United States Patent Application Publication US 2014/0004565 A1 - sequence listing, part 111

SEQ ID NO: 2774461 - RNA, 19 nt, Artificial Sequence
  Description of Artificial Sequence: Synthetic oligonucleotide
gaggccucuccccacugua

SEQ ID NO: 2774462 - RNA, 19 nt, Artificial Sequence
  Description of Artificial Sequence: Synthetic oligonucleotide
uucuccagccgggcuguca

SEQ ID NO: 2774463 - RNA, 19 nt, Artificial Sequence
  Description of Artificial Sequence: Synthetic oligonucleotide
ucacuccugggaacacaua

SEQ ID NO: 2774464 - RNA, 19 nt, Artificial Sequence
  Description of Artificial Sequence: Synthetic oligonucleotide
ggacgcugcuucaggaugc

SEQ ID NO: 2774465 - RNA, 19 nt, Artificial Sequence
  Description of Artificial Sequence: Synthetic oligonucleotide
ggugcacagggcaagcgca

SEQ ID NO: 2774466 - RNA, 19 nt, Artificial Sequence
  Description of Artificial Sequence: Synthetic oligonucleotide
agcggcuugcuguccuccu

SEQ ID NO: 2774467 - RNA, 19 nt, Artificial Sequence
  Description of Artificial Sequence: Synthetic oligonucleotide
ccucaaguccggacgcugc

SEQ ID NO: 2774468 - RNA, 19 nt, Artificial Sequence
  Description of Artificial Sequence: Synthetic oligonucleotide
gugcacagggcaagcgcag

SEQ ID NO: 2774469 - RNA, 19 nt, Artificial Sequence
  Description of Artificial Sequence: Synthetic oligonucleotide
ucgcggcuguaccccagcu

SEQ ID NO: 2774470 - RNA, 19 nt, Artificial Sequence
  Description of Artificial Sequence: Synthetic oligonucleotide
gagcggcuugcuguccucc

SEQ ID NO: 2774471 - RNA, 19 nt, Artificial Sequence
  Description of Artificial Sequence: Synthetic oligonucleotide
gcugugaaguggguuggcc

SEQ ID NO: 2774472 - RNA, 19 nt, Artificial Sequence
  Description of Artificial Sequence: Synthetic oligonucleotide
gagaguucacacaggcagu

SEQ ID NO: 2774473 - RNA, 19 nt, Artificial Sequence
  Description of Artificial Sequence: Synthetic oligonucleotide
gcgaagagcggcuugcugu

SEQ ID NO: 2774474 - RNA, 19 nt, Artificial Sequence
  Description of Artificial Sequence: Synthetic oligonucleotide
aggaggccucuccccacug

SEQ ID NO: 2774475 - RNA, 19 nt, Artificial Sequence
  Description of Artificial Sequence: Synthetic oligonucleotide
cugcuucaggaugccguag

SEQ ID NO: 2774476 - RNA, 19 nt, Artificial Sequence
  Description of Artificial Sequence: Synthetic oligonucleotide
gcugucagagucagauagc

SEQ ID NO: 2774477 - RNA, 19 nt, Artificial Sequence
  Description of Artificial Sequence: Synthetic oligonucleotide
cagagucagauagcgaugu

SEQ ID NO: 2774478 - RNA, 19 nt, Artificial Sequence
  Description of Artificial Sequence: Synthetic oligonucleotide
cuccccacuguagcugggc

SEQ ID NO: 2774479 - RNA, 19 nt, Artificial Sequence
  Description of Artificial Sequence: Synthetic oligonucleotide
ggcccucaaguccggacgc

SEQ ID NO: 2774480 - RNA, 19 nt, Artificial Sequence
  Description of Artificial Sequence: Synthetic oligonucleotide
ucucauccacugagccguc

SEQ ID NO: 2774481 - RNA, 19 nt, Artificial Sequence
  Description of Artificial Sequence: Synthetic oligonucleotide
cagggcaagcgcagaccug

SEQ ID NO: 2774482 - RNA, 19 nt, Artificial Sequence
  Description of Artificial Sequence: Synthetic oligonucleotide
cugggugcacagggcaagc

SEQ ID NO: 2774483 - RNA, 19 nt, Artificial Sequence
  Description of Artificial Sequence: Synthetic oligonucleotide
agcuugcgcagcgcagcgg

SEQ ID NO: 2774484 - RNA, 19 nt, Artificial Sequence
  Description of Artificial Sequence: Synthetic oligonucleotide
gcacaaugucgaugacuag

SEQ ID NO: 2774485 - RNA, 19 nt, Artificial Sequence
  Description of Artificial Sequence: Synthetic oligonucleotide
acugagccgucuagggacu

SEQ ID NO: 2774486 - RNA, 19 nt, Artificial Sequence
  Description of Artificial Sequence: Synthetic oligonucleotide
cccggguuuggaauaaaca

SEQ ID NO: 2774487 - RNA, 19 nt, Artificial Sequence
  Description of Artificial Sequence: Synthetic oligonucleotide
ggcgaagagcggcuugcug

SEQ ID NO: 2774488 - RNA, 19 nt, Artificial Sequence
  Description of Artificial Sequence: Synthetic oligonucleotide
ucaaguccggacgcugcuu

SEQ ID NO: 2774489 - RNA, 19 nt, Artificial Sequence
  Description of Artificial Sequence: Synthetic oligonucleotide
gcaggaagggugaggugag

SEQ ID NO: 2774490 - RNA, 19 nt, Artificial Sequence
  Description of Artificial Sequence: Synthetic oligonucleotide
cccagcuucuccagccggg

SEQ ID NO: 2774491 - RNA, 19 nt, Artificial Sequence
  Description of Artificial Sequence: Synthetic oligonucleotide
aggccucuccccacuguag

SEQ ID NO: 2774492 - RNA, 19 nt, Artificial Sequence
  Description of Artificial Sequence: Synthetic oligonucleotide
ccauagaggcgugucacuc

SEQ ID NO: 2774493 - RNA, 19 nt, Artificial Sequence
  Description of Artificial Sequence: Synthetic oligonucleotide
ccguagguauugaugagaa

SEQ ID NO: 2774494 - RNA, 19 nt, Artificial Sequence
  Description of Artificial Sequence: Synthetic oligonucleotide
ggcgugucacuccugggaa

SEQ ID NO: 2774495 - RNA, 19 nt, Artificial Sequence
  Description of Artificial Sequence: Synthetic oligonucleotide
gucagcaguagcagggagu

SEQ ID NO: 2774496 - RNA, 19 nt, Artificial Sequence
  Description of Artificial Sequence: Synthetic oligonucleotide
gccguagguauugaugaga

SEQ ID NO: 2774497 - RNA, 19 nt, Artificial Sequence
  Description of Artificial Sequence: Synthetic oligonucleotide
ggaggacuuggguggcccc

SEQ ID NO: 2774498 - RNA, 19 nt, Artificial Sequence
  Description of Artificial Sequence: Synthetic oligonucleotide
acacaggcagucagcagua

SEQ ID NO: 2774499 - RNA, 19 nt, Artificial Sequence
  Description of Artificial Sequence: Synthetic oligonucleotide
ggugaggugagcggcucac

SEQ ID NO: 2774500 - RNA, 19 nt, Artificial Sequence
  Description of Artificial Sequence: Synthetic oligonucleotide
ucagcucacgaagcuucuu

SEQ ID NO: 2774501 - RNA, 19 nt, Artificial Sequence
  Description of Artificial Sequence: Synthetic oligonucleotide
acgcugcuucaggaugccg

SEQ ID NO: 2774502 - RNA, 19 nt, Artificial Sequence
  Description of Artificial Sequence: Synthetic oligonucleotide
cugggcagacagcuuucca

SEQ ID NO: 2774503 - RNA, 19 nt, Artificial Sequence
  Description of Artificial Sequence: Synthetic oligonucleotide
cugaacaccggguguacuu

SEQ ID NO: 2774504 - RNA, 19 nt, Artificial Sequence
  Description of Artificial Sequence: Synthetic oligonucleotide
caggaagggugaggugagc

SEQ ID NO: 2774505 - RNA, 19 nt, Artificial Sequence
  Description of Artificial Sequence: Synthetic oligonucleotide
gcacagggcaagcgcagac

SEQ ID NO: 2774506 - RNA, 19 nt, Artificial Sequence
  Description of Artificial Sequence: Synthetic oligonucleotide
gugaggugagcggcucacc

SEQ ID NO: 2774507 - RNA, 19 nt, Artificial Sequence
  Description of Artificial Sequence: Synthetic oligonucleotide
gucuagggacuugauagau

SEQ ID NO: 2774508 - RNA, 19 nt, Artificial Sequence
  Description of Artificial Sequence: Synthetic oligonucleotide
ggcucaccaggcgaagagc

SEQ ID NO: 2774509 - RNA, 19 nt, Artificial Sequence
  Description of Artificial Sequence: Synthetic oligonucleotide
cuucaggaugccguaggua

SEQ ID NO: 2774510 - RNA, 19 nt, Artificial Sequence
  Description of Artificial Sequence: Synthetic oligonucleotide
cgaugacuagcuugcgcag

SEQ ID NO: 2774511 - RNA, 19 nt, Artificial Sequence
  Description of Artificial Sequence: Synthetic oligonucleotide
ugaucuucucagggauguu

SEQ ID NO: 2774512 - RNA, 19 nt, Artificial Sequence
  Description of Artificial Sequence: Synthetic oligonucleotide
gggaacacauaggccaaga

SEQ ID NO: 2774513 - RNA, 19 nt, Artificial Sequence
  Description of Artificial Sequence: Synthetic oligonucleotide
ccaagauccgccggucaag

SEQ ID NO: 2774514 - RNA, 19 nt, Artificial Sequence
  Description of Artificial Sequence: Synthetic oligonucleotide
agcggcucaccaggcgaag

SEQ ID NO: 2774515 - RNA, 19 nt, Artificial Sequence
  Description of Artificial Sequence: Synthetic oligonucleotide
cucgcugaacaccgggugu

SEQ ID NO: 2774516 - RNA, 19 nt, Artificial Sequence
  Description of Artificial Sequence: Synthetic oligonucleotide
uccgccggucaaguuggaa

SEQ ID NO: 2774517 - RNA, 19 nt, Artificial Sequence
  Description of Artificial Sequence: Synthetic oligonucleotide
gugaagccauagaggcgug

SEQ ID NO: 2774518 - RNA, 19 nt, Artificial Sequence
  Description of Artificial Sequence: Synthetic oligonucleotide
aggaugccguagguauuga

SEQ ID NO: 2774519 - RNA, 19 nt, Artificial Sequence
  Description of Artificial Sequence: Synthetic oligonucleotide
gugaaguggguuggcccuc

SEQ ID NO: 2774520 - RNA, 19 nt, Artificial Sequence
  Description of Artificial Sequence: Synthetic oligonucleotide
gcgaugugucagcucacga

SEQ ID NO: 2774521 - RNA, 19 nt, Artificial Sequence
  Description of Artificial Sequence: Synthetic oligonucleotide
gaggaggccucuccccacu

SEQ ID NO: 2774522 - RNA, 19 nt, Artificial Sequence
  Description of Artificial Sequence: Synthetic oligonucleotide
ggaggaggccucuccccac

SEQ ID NO: 2774523 - RNA, 19 nt, Artificial Sequence
  Description of Artificial Sequence: Synthetic oligonucleotide
ccccggguuuggaauaaac

SEQ ID NO: 2774524 - RNA, 19 nt, Artificial Sequence
  Description of Artificial Sequence: Synthetic oligonucleotide
gccaagauccgccggucaa

SEQ ID NO: 2774525 - RNA, 19 nt, Artificial Sequence
  Description of Artificial Sequence: Synthetic oligonucleotide
ggugagcggcucaccaggc

SEQ ID NO: 2774526 - RNA, 19 nt, Artificial Sequence
  Description of Artificial Sequence: Synthetic oligonucleotide
gucacuccugggaacacau

SEQ ID NO: 2774527 - RNA, 19 nt, Artificial Sequence
  Description of Artificial Sequence: Synthetic oligonucleotide
cagucagcaguagcaggga

SEQ ID NO: 2774528 - RNA, 19 nt, Artificial Sequence
  Description of Artificial Sequence: Synthetic oligonucleotide
ggaacacauaggccaagau

SEQ ID NO: 2774529 - RNA, 19 nt, Artificial Sequence
  Description of Artificial Sequence: Synthetic oligonucleotide
cgaagagcggcuugcuguc

SEQ ID NO: 2774530 - RNA, 19 nt, Artificial Sequence
  Description of Artificial Sequence: Synthetic oligonucleotide
gcugcuucaggaugccgua

SEQ ID NO: 2774531 - RNA, 19 nt, Artificial Sequence
  Description of Artificial Sequence: Synthetic oligonucleotide
cucaaguccggacgcugcu

SEQ ID NO: 2774532 - RNA, 19 nt, Artificial Sequence
  Description of Artificial Sequence: Synthetic oligonucleotide
gaaguggguuggcccucaa

SEQ ID NO: 2774533 - RNA, 19 nt, Artificial Sequence
  Description of Artificial Sequence: Synthetic oligonucleotide
gcaguagcagggagucacc

SEQ ID NO: 2774534 - RNA, 19 nt, Artificial Sequence
  Description of Artificial Sequence: Synthetic oligonucleotide
aggcgaagagcggcuugcu

SEQ ID NO: 2774535 - RNA, 19 nt, Artificial Sequence
  Description of Artificial Sequence: Synthetic oligonucleotide
cgaugugucagcucacgaa

SEQ ID NO: 2774536 - RNA, 19 nt, Artificial Sequence
  Description of Artificial Sequence: Synthetic oligonucleotide
cggacgcugcuucaggaug

SEQ ID NO: 2774537 - RNA, 19 nt, Artificial Sequence
  Description of Artificial Sequence: Synthetic oligonucleotide
gagcggcucaccaggcgaa

SEQ ID NO: 2774538 - RNA, 19 nt, Artificial Sequence
  Description of Artificial Sequence: Synthetic oligonucleotide
gcgugucacuccugggaac

SEQ ID NO: 2774539 - RNA, 19 nt, Artificial Sequence
  Description of Artificial Sequence: Synthetic oligonucleotide
caagauccgccggucaagu

SEQ ID NO: 2774540 - RNA, 19 nt, Artificial Sequence
  Description of Artificial Sequence: Synthetic oligonucleotide
gccgucuagggacuugaua

SEQ ID NO: 2774541 - RNA, 19 nt, Artificial Sequence
  Description of Artificial Sequence: Synthetic oligonucleotide
gcgcagaccuggaggaggc

SEQ ID NO: 2774542 - RNA, 19 nt, Artificial Sequence
  Description of Artificial Sequence: Synthetic oligonucleotide
ccuccuuggagaguucaca

SEQ ID NO: 2774543 - RNA, 19 nt, Artificial Sequence
  Description of Artificial Sequence: Synthetic oligonucleotide
ccucuccccacuguagcug

SEQ ID NO: 2774544 - RNA, 19 nt, Artificial Sequence
  Description of Artificial Sequence: Synthetic oligonucleotide
ggccaagauccgccgguca

SEQ ID NO: 2774545 - RNA, 19 nt, Artificial Sequence
  Description of Artificial Sequence: Synthetic oligonucleotide
gcagacagcuuuccaugcu

SEQ ID NO: 2774546 - RNA, 19 nt, Artificial Sequence
  Description of Artificial Sequence: Synthetic oligonucleotide
ccaggcgaagagcggcuug

SEQ ID NO: 2774547 - RNA, 19 nt, Artificial Sequence
  Description of Artificial Sequence: Synthetic oligonucleotide
cagggauguuggauacugu

SEQ ID NO: 2774548 - RNA, 19 nt, Artificial Sequence
  Description of Artificial Sequence: Synthetic oligonucleotide
gcuucaggaugccguaggu

SEQ ID NO: 2774549 - RNA, 19 nt, Artificial Sequence
  Description of Artificial Sequence: Synthetic oligonucleotide
cggcucaccaggcgaagag

SEQ ID NO: 2774550 - RNA, 19 nt, Artificial Sequence
  Description of Artificial Sequence: Synthetic oligonucleotide
gggcacaaugucgaugacu

SEQ ID NO: 2774551 - RNA, 19 nt, Artificial Sequence
  Description of Artificial Sequence: Synthetic oligonucleotide
ccacugagccgucuaggga

SEQ ID NO: 2774552 - RNA, 19 nt, Artificial Sequence
  Description of Artificial Sequence: Synthetic oligonucleotide
agccgggcugucagaguca

SEQ ID NO: 2774553 - RNA, 19 nt, Artificial Sequence
  Description of Artificial Sequence: Synthetic oligonucleotide
ggcuguaccccagcuucuc

SEQ ID NO: 2774554 - RNA, 19 nt, Artificial Sequence
  Description of Artificial Sequence: Synthetic oligonucleotide
cgucuagggacuugauaga

SEQ ID NO: 2774555 - RNA, 19 nt, Artificial Sequence
  Description of Artificial Sequence: Synthetic oligonucleotide
guuggcccucaaguccgga

SEQ ID NO: 2774556 - RNA, 19 nt, Artificial Sequence
  Description of Artificial Sequence: Synthetic oligonucleotide
cccacuguagcugggcaga

SEQ ID NO: 2774557 - RNA, 19 nt, Artificial Sequence
  Description of Artificial Sequence: Synthetic oligonucleotide
accaggcgaagagcggcuu

SEQ ID NO: 2774558 - RNA, 19 nt, Artificial Sequence
  Description of Artificial Sequence: Synthetic oligonucleotide
gucagcucacgaagcuucu

SEQ ID NO: 2774559 - RNA, 19 nt, Artificial Sequence
  Description of Artificial Sequence: Synthetic oligonucleotide
gaccuggaggaggccucuc

SEQ ID NO: 2774560 - RNA, 19 nt, Artificial Sequence
  Description of Artificial Sequence: Synthetic oligonucleotide
cccucaaguccggacgcug

SEQ ID NO: 2774561 - RNA, 19 nt, Artificial Sequence
  Description of Artificial Sequence: Synthetic oligonucleotide
gggugaggugagcggcuca

SEQ ID NO: 2774562 - RNA, 19 nt, Artificial Sequence
  Description of Artificial Sequence: Synthetic oligonucleotide
caccaggcgaagagcggcu

SEQ ID NO: 2774563 - RNA, 19 nt, Artificial Sequence
  Description of Artificial Sequence: Synthetic oligonucleotide
cgugucacuccugggaaca

SEQ ID NO: 2774564 - RNA, 19 nt, Artificial Sequence
  Description of Artificial Sequence: Synthetic oligonucleotide
caaugucgaugacuagcuu

SEQ ID NO: 2774565 - RNA, 19 nt, Artificial Sequence
  Description of Artificial Sequence: Synthetic oligonucleotide
gccauagaggcgugucacu

SEQ ID NO: 2774566 - RNA, 19 nt, Artificial Sequence
  Description of Artificial Sequence: Synthetic oligonucleotide
ggguguacuucgcggcugu

SEQ ID NO: 2774567 - RNA, 19 nt, Artificial Sequence
  Description of Artificial Sequence: Synthetic oligonucleotide
gcagggagucacccaggaa

SEQ ID NO: 2774568 - RNA, 19 nt, Artificial Sequence
  Description of Artificial Sequence: Synthetic oligonucleotide
cuccagccgggcugucaga

SEQ ID NO: 2774569 - RNA, 19 nt, Artificial Sequence
  Description of Artificial Sequence: Synthetic oligonucleotide
ggaugccguagguauugau

SEQ ID NO: 2774570 - RNA, 19 nt, Artificial Sequence
  Description of Artificial Sequence: Synthetic oligonucleotide
gcagcggggcugcugugaa

SEQ ID NO: 2774571 - RNA, 19 nt, Artificial Sequence
  Description of Artificial Sequence: Synthetic oligonucleotide
gcagaccuggaggaggccu

SEQ ID NO: 2774572 - RNA, 19 nt, Artificial Sequence
  Description of Artificial Sequence: Synthetic oligonucleotide
cagcgcagcggggcugcug

SEQ ID NO: 2774573 - RNA, 19 nt, Artificial Sequence
  Description of Artificial Sequence: Synthetic oligonucleotide
agccgucuagggacuugau

SEQ ID NO: 2774574 - RNA, 19 nt, Artificial Sequence
  Description of Artificial Sequence: Synthetic oligonucleotide
cagcaguagcagggaguca

SEQ ID NO: 2774575 - RNA, 19 nt, Artificial Sequence
  Description of Artificial Sequence: Synthetic oligonucleotide
cucagggauguuggauacu

SEQ ID NO: 2774576 - RNA, 19 nt, Artificial Sequence
  Description of Artificial Sequence: Synthetic oligonucleotide
gccucuccccacuguagcu

SEQ ID NO: 2774577 - RNA, 19 nt, Artificial Sequence
  Description of Artificial Sequence: Synthetic oligonucleotide
cguuuauugcaggaagggu

SEQ ID NO: 2774578 - RNA, 19 nt, Artificial Sequence
  Description of Artificial Sequence: Synthetic oligonucleotide
cgcugcuucaggaugccgu

SEQ ID NO: 2774579 - RNA, 19 nt, Artificial Sequence
  Description of Artificial Sequence: Synthetic oligonucleotide
ggaggccucuccccacugu

SEQ ID NO: 2774580 - RNA, 19 nt, Artificial Sequence
  Description of Artificial Sequence: Synthetic oligonucleotide
guagcugggcagacagcuu

SEQ ID NO: 2774581 - RNA, 19 nt, Artificial Sequence
  Description of Artificial Sequence: Synthetic oligonucleotide
cuucuccagccgggcuguc

SEQ ID NO: 2774582 - RNA, 19 nt, Artificial Sequence
  Description of Artificial Sequence: Synthetic oligonucleotide
gguuuggaauaaacacguu

SEQ ID NO: 2774583 - RNA, 19 nt, Artificial Sequence
  Description of Artificial Sequence: Synthetic oligonucleotide
gcugaacaccggguguacu

SEQ ID NO: 2774584 - RNA, 19 nt, Artificial Sequence
  Description of Artificial Sequence: Synthetic oligonucleotide
gcggcucaccaggcgaaga

SEQ ID NO: 2774585 - RNA, 19 nt, Artificial Sequence
  Description of Artificial Sequence: Synthetic oligonucleotide
cggguguacuucgcggcug

SEQ ID NO: 2774586 - RNA, 19 nt, Artificial Sequence
  Description of Artificial Sequence: Synthetic oligonucleotide
auccgccggucaaguugga

SEQ ID NO: 2774587 - RNA, 19 nt, Artificial Sequence
  Description of Artificial Sequence: Synthetic oligonucleotide
cgcugaacaccggguguac

SEQ ID NO: 2774588 - RNA, 19 nt, Artificial Sequence
  Description of Artificial Sequence: Synthetic oligonucleotide
ggcugcugugaaguggguu

SEQ ID NO: 2774589 - RNA, 19 nt, Artificial Sequence
  Description of Artificial Sequence: Synthetic oligonucleotide
gggcaagcgcagaccugga

SEQ ID NO: 2774590 - RNA, 19 nt, Artificial Sequence
  Description of Artificial Sequence: Synthetic oligonucleotide
cgcagcgcagcggggcugc

SEQ ID NO: 2774591 - RNA, 19 nt, Artificial Sequence
  Description of Artificial Sequence: Synthetic oligonucleotide
gcgcagcggggcugcugug

SEQ ID NO: 2774592 - RNA, 19 nt, Artificial Sequence
  Description of Artificial Sequence: Synthetic oligonucleotide
gguguacuucgcggcugua

SEQ ID NO: 2774593 - RNA, 19 nt, Artificial Sequence
  Description of Artificial Sequence: Synthetic oligonucleotide
gcgcagcgcagcggggcug

SEQ ID NO: 2774594 - RNA, 19 nt, Artificial Sequence
  Description of Artificial Sequence: Synthetic oligonucleotide
ccggguguacuucgcggcu

SEQ ID NO: 2774595 - RNA, 19 nt, Artificial Sequence
  Description of Artificial Sequence: Synthetic oligonucleotide
cgcagaccuggaggaggcc

SEQ ID NO: 2774596 - RNA, 19 nt, Artificial Sequence
  Description of Artificial Sequence: Synthetic oligonucleotide
ccggacgcugcuucaggau

SEQ ID NO: 2774597 - RNA, 19 nt, Artificial Sequence
  Description of Artificial Sequence: Synthetic oligonucleotide
gggagucacccaggaacuu

SEQ ID NO: 2774598 - RNA, 19 nt, Artificial Sequence
  Description of Artificial Sequence: Synthetic oligonucleotide
gcggcuugcuguccuccuu

SEQ ID NO: 2774599 - RNA, 19 nt, Artificial Sequence
  Description of Artificial Sequence: Synthetic oligonucleotide
cgcagcggggcugcuguga

SEQ ID NO: 2774600 - RNA, 19 nt, Artificial Sequence
  Description of Artificial Sequence: Synthetic oligonucleotide
cugagccgucuagggacuu

SEQ ID NO: 2774601 - RNA, 19 nt, Artificial Sequence
  Description of Artificial Sequence: Synthetic oligonucleotide
ccagccgggcugucagagu

SEQ ID NO: 2774602 - RNA, 19 nt, Artificial Sequence
  Description of Artificial Sequence: Synthetic oligonucleotide
gcccucaaguccggacgcu

SEQ ID NO: 2774603 - RNA, 19 nt, Artificial Sequence
  Description of Artificial Sequence: Synthetic oligonucleotide
ccgggcugucagagucaga

SEQ ID NO: 2774604 - RNA, 19 nt, Artificial Sequence
  Description of Artificial Sequence: Synthetic oligonucleotide
cggcuguaccccagcuucu

SEQ ID NO: 2774605 - RNA, 19 nt, Artificial Sequence
  Description of Artificial Sequence: Synthetic oligonucleotide
cgcggcuguaccccagcuu

SEQ ID NO: 2774606 - RNA, 19 nt, Artificial Sequence
  Description of Artificial Sequence: Synthetic oligonucleotide
gcagcgcagcggggcugcu

SEQ ID NO: 2774607 - RNA, 19 nt, Artificial Sequence
  Description of Artificial Sequence: Synthetic oligonucleotide
aaauuuguaaaacucuccc

SEQ ID NO: 2774608 - RNA, 19 nt, Artificial Sequence
  Description of Artificial Sequence: Synthetic oligonucleotide
acaaacugaagguugaugc

SEQ ID NO: 2774609 - RNA, 19 nt, Artificial Sequence
  Description of Artificial Sequence: Synthetic oligonucleotide
ucugucuacaaacugaagg

SEQ ID NO: 2774610 - RNA, 19 nt, Artificial Sequence
  Description of Artificial Sequence: Synthetic oligonucleotide
aaaaggaagagaugcaaac

SEQ ID NO: 2774611 - RNA, 19 nt, Artificial Sequence
  Description of Artificial Sequence: Synthetic oligonucleotide
auuuguaaaacucucccgc

SEQ ID NO: 2774612 - RNA, 19 nt, Artificial Sequence
  Description of Artificial Sequence: Synthetic oligonucleotide
aaggaagagaugcaaacgg

SEQ ID NO: 2774613 - RNA, 19 nt, Artificial Sequence
  Description of Artificial Sequence: Synthetic oligonucleotide
aauuuguaaaacucucccg

SEQ ID NO: 2774614 - RNA, 19 nt, Artificial Sequence
  Description of Artificial Sequence: Synthetic oligonucleotide
uuugccaaagccaaaagga

SEQ ID NO: 2774615 - RNA, 19 nt, Artificial Sequence
  Description of Artificial Sequence: Synthetic oligonucleotide
ucaaagugggucaagaucu

SEQ ID NO: 2774616 - RNA, 19 nt, Artificial Sequence
  Description of Artificial Sequence: Synthetic oligonucleotide
gaaagugugccucucaugc

SEQ ID NO: 2774617 - RNA, 19 nt, Artificial Sequence
  Description of Artificial Sequence: Synthetic oligonucleotide
uaaagaauguccaguuugg

SEQ ID NO: 2774618 - RNA, 19 nt, Artificial Sequence
  Description of Artificial Sequence: Synthetic oligonucleotide
aagugugccucucaugccc

SEQ ID NO: 2774619 - RNA, 19 nt, Artificial Sequence
  Description of Artificial Sequence: Synthetic oligonucleotide
uuagcaagccgcaagcccg

SEQ ID NO: 2774620 - RNA, 19 nt, Artificial Sequence
  Description of Artificial Sequence: Synthetic oligonucleotide
aaacucucccgccacgucc

SEQ ID NO: 2774621 - RNA, 19 nt, Artificial Sequence
  Description of Artificial Sequence: Synthetic oligonucleotide
agccaaaaggaagagaugc

SEQ ID NO: 2774622 - RNA, 19 nt, Artificial Sequence
  Description of Artificial Sequence: Synthetic oligonucleotide
ugcccaauaaagaaugucc

SEQ ID NO: 2774623 - RNA, 19 nt, Artificial Sequence
  Description of Artificial Sequence: Synthetic oligonucleotide
aaaggaagagaugcaaacg

SEQ ID NO: 2774624 - RNA, 19 nt, Artificial Sequence
  Description of Artificial Sequence: Synthetic oligonucleotide
agaauguccaguuuggaga

SEQ ID NO: 2774625 - RNA, 19 nt, Artificial Sequence
  Description of Artificial Sequence: Synthetic oligonucleotide
ucaugcccaauaaagaaug

SEQ ID NO: 2774626 - RNA, 19 nt, Artificial Sequence
  Description of Artificial Sequence: Synthetic oligonucleotide
aaagugugccucucaugcc

SEQ ID NO: 2774627 - RNA, 19 nt, Artificial Sequence
  Description of Artificial Sequence: Synthetic oligonucleotide
aaacugaagguugaugcuc

SEQ ID NO: 2774628 - RNA, 19 nt, Artificial Sequence
  Description of Artificial Sequence: Synthetic oligonucleotide
guuugccaaagccaaaagg

SEQ ID NO: 2774629 - RNA, 19 nt, Artificial Sequence
  Description of Artificial Sequence: Synthetic oligonucleotide
uccgcuguuagcaagccgc

SEQ ID NO: 2774630 - RNA, 19 nt, Artificial Sequence
  Description of Artificial Sequence: Synthetic oligonucleotide
agugggucaagaucugagc

SEQ ID NO: 2774631 - RNA, 19 nt, Artificial Sequence
  Description of Artificial Sequence: Synthetic oligonucleotide
ucuacaaacugaagguuga

SEQ ID NO: 2774632 - RNA, 19 nt, Artificial Sequence
  Description of Artificial Sequence: Synthetic oligonucleotide
uuuguaaaacucucccgcc

SEQ ID NO: 2774633 - RNA, 19 nt, Artificial Sequence
  Description of Artificial Sequence: Synthetic oligonucleotide
gaauguccaguuuggagag

SEQ ID NO: 2774634 - RNA, 19 nt, Artificial Sequence
  Description of Artificial Sequence: Synthetic oligonucleotide
aacucaagcuccgccaggc

SEQ ID NO: 2774635 - RNA, 19 nt, Artificial Sequence
  Description of Artificial Sequence: Synthetic oligonucleotide
ugaugcuccucucagguac

SEQ ID NO: 2774636 - RNA, 19 nt, Artificial Sequence
  Description of Artificial Sequence: Synthetic oligonucleotide
agcugcguuugccaaagcc

SEQ ID NO: 2774637 - RNA, 19 nt, Artificial Sequence
  Description of Artificial Sequence: Synthetic oligonucleotide
agccaaagccauuuguaac

SEQ ID NO: 2774638 - RNA, 19 nt, Artificial Sequence
  Description of Artificial Sequence: Synthetic oligonucleotide
gaugcaaacgggugugggg

SEQ ID NO: 2774639 - RNA, 19 nt, Artificial Sequence
  Description of Artificial Sequence: Synthetic oligonucleotide
uuccauaggacuaucuguc

SEQ ID NO: 2774640 - RNA, 19 nt, Artificial Sequence
  Description of Artificial Sequence: Synthetic oligonucleotide
aauaaagaauguccaguuu

SEQ ID NO: 2774641 - RNA, 19 nt, Artificial Sequence
  Description of Artificial Sequence: Synthetic oligonucleotide
acuaucugucuacaaacug

SEQ ID NO: 2774642 - RNA, 19 nt, Artificial Sequence
  Description of Artificial Sequence: Synthetic oligonucleotide
aacuagguuggguagccca

SEQ ID NO: 2774643 - RNA, 19 nt, Artificial Sequence
  Description of Artificial Sequence: Synthetic oligonucleotide
uucuaggccaaauuuguaa

SEQ ID NO: 2774644 - RNA, 19 nt, Artificial Sequence
  Description of Artificial Sequence: Synthetic oligonucleotide
uaucugucuacaaacugaa

SEQ ID NO: 2774645 - RNA, 19 nt, Artificial Sequence
  Description of Artificial Sequence: Synthetic oligonucleotide
uguaaaacucucccgccac

SEQ ID NO: 2774646 - RNA, 19 nt, Artificial Sequence
  Description of Artificial Sequence: Synthetic oligonucleotide
ucagggagcaccucaaagu

SEQ ID NO: 2774647 - RNA, 19 nt, Artificial Sequence
  Description of Artificial Sequence: Synthetic oligonucleotide
gguuggguagcccagagcc

SEQ ID NO: 2774648 - RNA, 19 nt, Artificial Sequence
  Description of Artificial Sequence: Synthetic oligonucleotide
aguuccagcauagccagcg

SEQ ID NO: 2774649 - RNA, 19 nt, Artificial Sequence
  Description of Artificial Sequence: Synthetic oligonucleotide
aguuuggagagaugacaac

SEQ ID NO: 2774650 - RNA, 19 nt, Artificial Sequence
  Description of Artificial Sequence: Synthetic oligonucleotide
uuguaacucaagcuccgcc

SEQ ID NO: 2774651 - RNA, 19 nt, Artificial Sequence
  Description of Artificial Sequence: Synthetic oligonucleotide
uuguaaaacucucccgcca

SEQ ID NO: 2774652 - RNA, 19 nt, Artificial Sequence
  Description of Artificial Sequence: Synthetic oligonucleotide
ucuaggccaaauuuguaaa

SEQ ID NO: 2774653 - RNA, 19 nt, Artificial Sequence
  Description of Artificial Sequence: Synthetic oligonucleotide
guuugcucggccaagcagg

SEQ ID NO: 2774654 - RNA, 19 nt, Artificial Sequence
  Description of Artificial Sequence: Synthetic oligonucleotide
auuggucugacugggagag

SEQ ID NO: 2774655 - RNA, 19 nt, Artificial Sequence
  Description of Artificial Sequence: Synthetic oligonucleotide
cacguccugaacuagguug

SEQ ID NO: 2774656 - RNA, 19 nt, Artificial Sequence
  Description of Artificial Sequence: Synthetic oligonucleotide
cucaaagugggucaagauc

SEQ ID NO: 2774657 - RNA, 19 nt, Artificial Sequence
  Description of Artificial Sequence: Synthetic oligonucleotide
cauaggacuaucugucuac

SEQ ID NO: 2774658 - RNA, 19 nt, Artificial Sequence
  Description of Artificial Sequence: Synthetic oligonucleotide
guuagcaagccgcaagccc

SEQ ID NO: 2774659 - RNA, 19 nt, Artificial Sequence
  Description of Artificial Sequence: Synthetic oligonucleotide
gaagagaugcaaacgggug

SEQ ID NO: 2774660 - RNA, 19 nt, Artificial Sequence
  Description of Artificial Sequence: Synthetic oligonucleotide
aagaucugagccaaagcca

SEQ ID NO: 2774661 - RNA, 19 nt, Artificial Sequence
  Description of Artificial Sequence: Synthetic oligonucleotide
ucuuccuuccauaggacua

SEQ ID NO: 2774662 - RNA, 19 nt, Artificial Sequence
  Description of Artificial Sequence: Synthetic oligonucleotide
gugggucaagaucugagcc

SEQ ID NO: 2774663 - RNA, 19 nt, Artificial Sequence
  Description of Artificial Sequence: Synthetic oligonucleotide
caggucauggaccacguug

SEQ ID NO: 2774664 - RNA, 19 nt, Artificial Sequence
  Description of Artificial Sequence: Synthetic oligonucleotide
uuuggagagaugacaacuu

SEQ ID NO: 2774665 - RNA, 19 nt, Artificial Sequence
  Description of Artificial Sequence: Synthetic oligonucleotide
agagccacguccccgcugg

SEQ ID NO: 2774666 - RNA, 19 nt, Artificial Sequence
  Description of Artificial Sequence: Synthetic oligonucleotide
uugccaaagccaaaaggaa

SEQ ID NO: 2774667 - RNA, 19 nt, Artificial Sequence
  Description of Artificial Sequence: Synthetic oligonucleotide
aaagccauuuguaacucaa

SEQ ID NO: 2774668 - RNA, 19 nt, Artificial Sequence
  Description of Artificial Sequence: Synthetic oligonucleotide
aggacuaucugucuacaaa

SEQ ID NO: 2774669 - RNA, 19 nt, Artificial Sequence
  Description of Artificial Sequence: Synthetic oligonucleotide
aggccaaauuuguaaaacu

SEQ ID NO: 2774670 - RNA, 19 nt, Artificial Sequence
  Description of Artificial Sequence: Synthetic oligonucleotide
guaacucaagcuccgccag

SEQ ID NO: 2774671 - RNA, 19 nt, Artificial Sequence
  Description of Artificial Sequence: Synthetic oligonucleotide
ugcucggccaagcaggccu

SEQ ID NO: 2774672 - RNA, 19 nt, Artificial Sequence
  Description of Artificial Sequence: Synthetic oligonucleotide
uaggccaaauuuguaaaac

SEQ ID NO: 2774673 - RNA, 19 nt, Artificial Sequence
  Description of Artificial Sequence: Synthetic oligonucleotide
cuguuagcaagccgcaagc

SEQ ID NO: 2774674 - RNA, 19 nt, Artificial Sequence
  Description of Artificial Sequence: Synthetic oligonucleotide
uaacucaagcuccgccagg

SEQ ID NO: 2774675 - RNA, 19 nt, Artificial Sequence
  Description of Artificial Sequence: Synthetic oligonucleotide
ugaacuagguuggguagcc

SEQ ID NO: 2774676 - RNA, 19 nt, Artificial Sequence
  Description of Artificial Sequence: Synthetic oligonucleotide
uccugaacuagguugggua

SEQ ID NO: 2774677 - RNA, 19 nt, Artificial Sequence
  Description of Artificial Sequence: Synthetic oligonucleotide
ggacuaucugucuacaaac

SEQ ID NO: 2774678 - RNA, 19 nt, Artificial Sequence
  Description of Artificial Sequence: Synthetic oligonucleotide
agcaccucaaaguggguca

SEQ ID NO: 2774679 - RNA, 19 nt, Artificial Sequence
  Description of Artificial Sequence: Synthetic oligonucleotide
gucuacaaacugaagguug

SEQ ID NO: 2774680 - RNA, 19 nt, Artificial Sequence
  Description of Artificial Sequence: Synthetic oligonucleotide
guaaaacucucccgccacg

SEQ ID NO: 2774681 - RNA, 19 nt, Artificial Sequence
  Description of Artificial Sequence: Synthetic oligonucleotide
aguagcggggccaggagac

SEQ ID NO: 2774682 - RNA, 19 nt, Artificial Sequence
  Description of Artificial Sequence: Synthetic oligonucleotide
ccauuuguaacucaagcuc

SEQ ID NO: 2774683 - RNA, 19 nt, Artificial Sequence
  Description of Artificial Sequence: Synthetic oligonucleotide
ccucucaugcccaauaaag

SEQ ID NO: 2774684 - RNA, 19 nt, Artificial Sequence
  Description of Artificial Sequence: Synthetic oligonucleotide
aggaagagaugcaaacggg

SEQ ID NO: 2774685 - RNA, 19 nt, Artificial Sequence
  Description of Artificial Sequence: Synthetic oligonucleotide
agacuccggagccucugcc

SEQ ID NO: 2774686 - RNA, 19 nt, Artificial Sequence
  Description of Artificial Sequence: Synthetic oligonucleotide
augcccaauaaagaauguc

SEQ ID NO: 2774687 - RNA, 19 nt, Artificial Sequence
  Description of Artificial Sequence: Synthetic oligonucleotide
uuugcucggccaagcaggc

SEQ ID NO: 2774688 - RNA, 19 nt, Artificial Sequence
  Description of Artificial Sequence: Synthetic oligonucleotide
acgggugugggguucuagg

SEQ ID NO: 2774689 - RNA, 19 nt, Artificial Sequence
  Description of Artificial Sequence: Synthetic oligonucleotide
uguccagaguuccagcaua

SEQ ID NO: 2774690 - RNA, 19 nt, Artificial Sequence
  Description of Artificial Sequence: Synthetic oligonucleotide
uggucugacugggagagca

SEQ ID NO: 2774691 - RNA, 19 nt, Artificial Sequence
  Description of Artificial Sequence: Synthetic oligonucleotide
agagaugcaaacgggugug

SEQ ID NO: 2774692 - RNA, 19 nt, Artificial Sequence
  Description of Artificial Sequence: Synthetic oligonucleotide
uccaguuuggagagaugac

SEQ ID NO: 2774693 - RNA, 19 nt, Artificial Sequence
  Description of Artificial Sequence: Synthetic oligonucleotide
uagguuggguagcccagag

SEQ ID NO: 2774694 - RNA, 19 nt, Artificial Sequence
  Description of Artificial Sequence: Synthetic oligonucleotide
agguuggguagcccagagc

SEQ ID NO: 2774695 - RNA, 19 nt, Artificial Sequence
  Description of Artificial Sequence: Synthetic oligonucleotide
cagggagcaccucaaagug

SEQ ID NO: 2774696 - RNA, 19 nt, Artificial Sequence
  Description of Artificial Sequence: Synthetic oligonucleotide
ucaagcuccgccaggcguc

SEQ ID NO: 2774697 - RNA, 19 nt, Artificial Sequence
  Description of Artificial Sequence: Synthetic oligonucleotide
ucugagccaaagccauuug

SEQ ID NO: 2774698 - RNA, 19 nt, Artificial Sequence
  Description of Artificial Sequence: Synthetic oligonucleotide
gagagaugacaacuucuuc

SEQ ID NO: 2774699 - RNA, 19 nt, Artificial Sequence
  Description of Artificial Sequence: Synthetic oligonucleotide
uguuagcaagccgcaagcc

SEQ ID NO: 2774700 - RNA, 19 nt, Artificial Sequence
  Description of Artificial Sequence: Synthetic oligonucleotide
agaugcaaacggguguggg

SEQ ID NO: 2774701 - RNA, 19 nt, Artificial Sequence
  Description of Artificial Sequence: Synthetic oligonucleotide
uuuguaacucaagcuccgc

SEQ ID NO: 2774702 - RNA, 19 nt, Artificial Sequence
  Description of Artificial Sequence: Synthetic oligonucleotide
ucgccauccgcuguuagca

SEQ ID NO: 2774703 - RNA, 19 nt, Artificial Sequence
  Description of Artificial Sequence: Synthetic oligonucleotide
uaaaacucucccgccacgu

SEQ ID NO: 2774704 - RNA, 19 nt, Artificial Sequence
  Description of Artificial Sequence: Synthetic oligonucleotide
uccauaggacuaucugucu

SEQ ID NO: 2774705 - RNA, 19 nt, Artificial Sequence
  Description of Artificial Sequence: Synthetic oligonucleotide
uucgccauccgcuguuagc

SEQ ID NO: 2774706 - RNA, 19 nt, Artificial Sequence
  Description of Artificial Sequence: Synthetic oligonucleotide
ucagucgucgcaccagguc

SEQ ID NO: 2774707 - RNA, 19 nt, Artificial Sequence
  Description of Artificial Sequence: Synthetic oligonucleotide
cucucaugcccaauaaaga

SEQ ID NO: 2774708 - RNA, 19 nt, Artificial Sequence
  Description of Artificial Sequence: Synthetic oligonucleotide
aagggaaagugugccucuc

SEQ ID NO: 2774709 - RNA, 19 nt, Artificial Sequence
  Description of Artificial Sequence: Synthetic oligonucleotide
gagccaaagccauuuguaa

SEQ ID NO: 2774710 - RNA, 19 nt, Artificial Sequence
  Description of Artificial Sequence: Synthetic oligonucleotide
ucgcaccaggucauggacc

SEQ ID NO: 2774711 - RNA, 19 nt, Artificial Sequence
  Description of Artificial Sequence: Synthetic oligonucleotide
gcuguuagcaagccgcaag

SEQ ID NO: 2774712 - RNA, 19 nt, Artificial Sequence
  Description of Artificial Sequence: Synthetic oligonucleotide
cugucuacaaacugaaggu

SEQ ID NO: 2774713 - RNA, 19 nt, Artificial Sequence
  Description of Artificial Sequence: Synthetic oligonucleotide
acguccugaacuagguugg

SEQ ID NO: 2774714 - RNA, 19 nt, Artificial Sequence
  Description of Artificial Sequence: Synthetic oligonucleotide
gggagcaccucaaaguggg

SEQ ID NO: 2774715 - RNA, 19 nt, Artificial Sequence
  Description of Artificial Sequence: Synthetic oligonucleotide
auagccagcggcugcuuga

SEQ ID NO: 2774716 - RNA, 19 nt, Artificial Sequence
  Description of Artificial Sequence: Synthetic oligonucleotide
agcuccgccaggcgucucc

SEQ ID NO: 2774717 - RNA, 19 nt, Artificial Sequence
  Description of Artificial Sequence: Synthetic oligonucleotide
ggccaagcaggccucaagg

SEQ ID NO: 2774718 - RNA, 19 nt, Artificial Sequence
  Description of Artificial Sequence: Synthetic oligonucleotide
aagccaaaaggaagagaug

SEQ ID NO: 2774719 - RNA, 19 nt, Artificial Sequence
  Description of Artificial Sequence: Synthetic oligonucleotide
guugaugcuccucucaggu

SEQ ID NO: 2774720 - RNA, 19 nt, Artificial Sequence
  Description of Artificial Sequence: Synthetic oligonucleotide
gggucauuggucugacugg

SEQ ID NO: 2774721 - RNA, 19 nt, Artificial Sequence
  Description of Artificial Sequence: Synthetic oligonucleotide
ugccauucuucgccauccg

SEQ ID NO: 2774722 - RNA, 19 nt, Artificial Sequence
  Description of Artificial Sequence: Synthetic oligonucleotide
caggcgucucccuaugcag

SEQ ID NO: 2774723 - RNA, 19 nt, Artificial Sequence
  Description of Artificial Sequence: Synthetic oligonucleotide
cuuccucagguuugcucgg

SEQ ID NO: 2774724 - RNA, 19 nt, Artificial Sequence
  Description of Artificial Sequence: Synthetic oligonucleotide
ugucuacaaacugaagguu

SEQ ID NO: 2774725 - RNA, 19 nt, Artificial Sequence
  Description of Artificial Sequence: Synthetic oligonucleotide
aggacaguccgggucauug

SEQ ID NO: 2774726 - RNA, 19 nt, Artificial Sequence
  Description of Artificial Sequence: Synthetic oligonucleotide
cuuccauaggacuaucugu

SEQ ID NO: 2774727 - RNA, 19 nt, Artificial Sequence
  Description of Artificial Sequence: Synthetic oligonucleotide
caguuuggagagaugacaa

SEQ ID NO: 2774728 - RNA, 19 nt, Artificial Sequence
  Description of Artificial Sequence: Synthetic oligonucleotide
uuguccagaguuccagcau

SEQ ID NO: 2774729 - RNA, 19 nt, Artificial Sequence
  Description of Artificial Sequence: Synthetic oligonucleotide
cugaacuagguuggguagc

SEQ ID NO: 2774730 - RNA, 19 nt, Artificial Sequence
  Description of Artificial Sequence: Synthetic oligonucleotide
uaggccagguccugcuucc

SEQ ID NO: 2774731 - RNA, 19 nt, Artificial Sequence
  Description of Artificial Sequence: Synthetic oligonucleotide
guuuggagagaugacaacu

SEQ ID NO: 2774732 - RNA, 19 nt, Artificial Sequence
  Description of Artificial Sequence: Synthetic oligonucleotide
gaagguugaugcuccucuc

SEQ ID NO: 2774733 - RNA, 19 nt, Artificial Sequence
  Description of Artificial Sequence: Synthetic oligonucleotide
gguuugcucggccaagcag

SEQ ID NO: 2774734 - RNA, 19 nt, Artificial Sequence
  Description of Artificial Sequence: Synthetic oligonucleotide
ucccgccacguccugaacu

SEQ ID NO: 2774735 - RNA, 19 nt, Artificial Sequence
  Description of Artificial Sequence: Synthetic oligonucleotide
caccaggucauggaccacg

SEQ ID NO: 2774736 - RNA, 19 nt, Artificial Sequence
  Description of Artificial Sequence: Synthetic oligonucleotide
cuaugcagcugcguuugcc

SEQ ID NO: 2774737 - RNA, 19 nt, Artificial Sequence
  Description of Artificial Sequence: Synthetic oligonucleotide
uccucagguuugcucggcc

SEQ ID NO: 2774738 - RNA, 19 nt, Artificial Sequence
  Description of Artificial Sequence: Synthetic oligonucleotide
ucagguuugcucggccaag

SEQ ID NO: 2774739 - RNA, 19 nt, Artificial Sequence
  Description of Artificial Sequence: Synthetic oligonucleotide
gagaugcaaacgggugugg

SEQ ID NO: 2774740 - RNA, 19 nt, Artificial Sequence
  Description of Artificial Sequence: Synthetic oligonucleotide
auccgcuguuagcaagccg

SEQ ID NO: 2774741 - RNA, 19 nt, Artificial Sequence
  Description of Artificial Sequence: Synthetic oligonucleotide
aggcgucucccuaugcagc

SEQ ID NO: 2774742 - RNA, 19 nt, Artificial Sequence
  Description of Artificial Sequence: Synthetic oligonucleotide
acguuguccagaguuccag

SEQ ID NO: 2774743 - RNA, 19 nt, Artificial Sequence
  Description of Artificial Sequence: Synthetic oligonucleotide
accacguuguccagaguuc

SEQ ID NO: 2774744 - RNA, 19 nt, Artificial Sequence
  Description of Artificial Sequence: Synthetic oligonucleotide
uaggacuaucugucuacaa

SEQ ID NO: 2774745 - RNA, 19 nt, Artificial Sequence
  Description of Artificial Sequence: Synthetic oligonucleotide
ugggguucuaggccaaauu

SEQ ID NO: 2774746 - RNA, 19 nt, Artificial Sequence
  Description of Artificial Sequence: Synthetic oligonucleotide
acuagguuggguagcccag

SEQ ID NO: 2774747 - RNA, 19 nt, Artificial Sequence
  Description of Artificial Sequence: Synthetic oligonucleotide
uagcaagccgcaagcccgc

SEQ ID NO: 2774748 - RNA, 19 nt, Artificial Sequence
  Description of Artificial Sequence: Synthetic oligonucleotide
guuccagcauagccagcgg

SEQ ID NO: 2774749 - RNA, 19 nt, Artificial Sequence
  Description of Artificial Sequence: Synthetic oligonucleotide
agcaccuggcucagggagc

SEQ ID NO: 2774750 - RNA, 19 nt, Artificial Sequence
  Description of Artificial Sequence: Synthetic oligonucleotide
uggguagcccagagccacg

SEQ ID NO: 2774751 - RNA, 19 nt, Artificial Sequence
  Description of Artificial Sequence: Synthetic oligonucleotide
ggccaaauuuguaaaacuc

SEQ ID NO: 2774752 - RNA, 19 nt, Artificial Sequence
  Description of Artificial Sequence: Synthetic oligonucleotide
aggucauggaccacguugu

SEQ ID NO: 2774753 - RNA, 19 nt, Artificial Sequence
  Description of Artificial Sequence: Synthetic oligonucleotide
ugccucucaugcccaauaa

SEQ ID NO: 2774754 - RNA, 19 nt, Artificial Sequence
  Description of Artificial Sequence: Synthetic oligonucleotide
ccugaacuagguuggguag

SEQ ID NO: 2774755 - RNA, 19 nt, Artificial Sequence
  Description of Artificial Sequence: Synthetic oligonucleotide
auaggacuaucugucuaca

SEQ ID NO: 2774756 - RNA, 19 nt, Artificial Sequence
  Description of Artificial Sequence: Synthetic oligonucleotide
ggaaagugugccucucaug

SEQ ID NO: 2774757 - RNA, 19 nt, Artificial Sequence
  Description of Artificial Sequence: Synthetic oligonucleotide
cuaggccaaauuuguaaaa

SEQ ID NO: 2774758 - RNA, 19 nt, Artificial Sequence
  Description of Artificial Sequence: Synthetic oligonucleotide
gaccacguuguccagaguu

SEQ ID NO: 2774759 - RNA, 19 nt, Artificial Sequence
  Description of Artificial Sequence: Synthetic oligonucleotide
gacaacuucuuccuuccau

SEQ ID NO: 2774760 - RNA, 19 nt, Artificial Sequence
  Description of Artificial Sequence: Synthetic oligonucleotide
gucgcaccaggucauggac

SEQ ID NO: 2774761 - RNA, 19 nt, Artificial Sequence
  Description of Artificial Sequence: Synthetic oligonucleotide
uccucucagguaccaggac

SEQ ID NO: 2774762 - RNA, 19 nt, Artificial Sequence
  Description of Artificial Sequence: Synthetic oligonucleotide
cagucgucgcaccagguca

SEQ ID NO: 2774763 - RNA, 19 nt, Artificial Sequence
  Description of Artificial Sequence: Synthetic oligonucleotide
aacgggugugggguucuag

SEQ ID NO: 2774764 - RNA, 19 nt, Artificial Sequence
  Description of Artificial Sequence: Synthetic oligonucleotide
cauuggucugacugggaga

SEQ ID NO: 2774765 - RNA, 19 nt, Artificial Sequence
  Description of Artificial Sequence: Synthetic oligonucleotide
ccuuccauaggacuaucug

SEQ ID NO: 2774766 - RNA, 19 nt, Artificial Sequence
  Description of Artificial Sequence: Synthetic oligonucleotide
gccaagcaggccucaaggg

SEQ ID NO: 2774767 - RNA, 19 nt, Artificial Sequence
  Description of Artificial Sequence: Synthetic oligonucleotide
auucuucgccauccgcugu

SEQ ID NO: 2774768 - RNA, 19 nt, Artificial Sequence
  Description of Artificial Sequence: Synthetic oligonucleotide
ucgucgcaccaggucaugg

SEQ ID NO: 2774769 - RNA, 19 nt, Artificial Sequence
  Description of Artificial Sequence: Synthetic oligonucleotide
gucugacugggagagcacc

SEQ ID NO: 2774770 - RNA, 19 nt, Artificial Sequence
  Description of Artificial Sequence: Synthetic oligonucleotide
gagacuccggagccucugc

SEQ ID NO: 2774771 - RNA, 19 nt, Artificial Sequence
  Description of Artificial Sequence: Synthetic oligonucleotide
cugcguuugccaaagccaa

SEQ ID NO: 2774772 - RNA, 19 nt, Artificial Sequence
  Description of Artificial Sequence: Synthetic oligonucleotide
gaugcuccucucagguacc

SEQ ID NO: 2774773 - RNA, 19 nt, Artificial Sequence
  Description of Artificial Sequence: Synthetic oligonucleotide
gaguagcggggccaggaga

SEQ ID NO: 2774774 - RNA, 19 nt, Artificial Sequence
  Description of Artificial Sequence: Synthetic oligonucleotide
gagcaccucaaaguggguc

SEQ ID NO: 2774775 - RNA, 19 nt, Artificial Sequence
  Description of Artificial Sequence: Synthetic oligonucleotide
ggguucuaggccaaauuug

SEQ ID NO: 2774776 - RNA, 19 nt, Artificial Sequence
  Description of Artificial Sequence: Synthetic oligonucleotide
uucuucgccauccgcuguu

SEQ ID NO: 2774777 - RNA, 19 nt, Artificial Sequence
  Description of Artificial Sequence: Synthetic oligonucleotide
cuugaggccggaggaguag

SEQ ID NO: 2774778 - RNA, 19 nt, Artificial Sequence
  Description of Artificial Sequence: Synthetic oligonucleotide
ggacaguccgggucauugg

SEQ ID NO: 2774779 - RNA, 19 nt, Artificial Sequence
  Description of Artificial Sequence: Synthetic oligonucleotide
acaguccgggucauugguc

SEQ ID NO: 2774780 - RNA, 19 nt, Artificial Sequence
  Description of Artificial Sequence: Synthetic oligonucleotide
ugcguuugccaaagccaaa

SEQ ID NO: 2774781 - RNA, 19 nt, Artificial Sequence
  Description of Artificial Sequence: Synthetic oligonucleotide
ucccuaugcagcugcguuu

SEQ ID NO: 2774782 - RNA, 19 nt, Artificial Sequence
  Description of Artificial Sequence: Synthetic oligonucleotide
cauagccagcggcugcuug

SEQ ID NO: 2774783 - RNA, 19 nt, Artificial Sequence
  Description of Artificial Sequence: Synthetic oligonucleotide
aauguccaguuuggagaga

SEQ ID NO: 2774784 - RNA, 19 nt, Artificial Sequence
  Description of Artificial Sequence: Synthetic oligonucleotide
ugcagcugcguuugccaaa

SEQ ID NO: 2774785 - RNA, 19 nt, Artificial Sequence
  Description of Artificial Sequence: Synthetic oligonucleotide
ucucccgccacguccugaa

SEQ ID NO: 2774786 - RNA, 19 nt, Artificial Sequence
  Description of Artificial Sequence: Synthetic oligonucleotide
gacuccggagccucugcca

SEQ ID NO: 2774787 - RNA, 19 nt, Artificial Sequence
  Description of Artificial Sequence: Synthetic oligonucleotide
gacuaucugucuacaaacu

SEQ ID NO: 2774788 - RNA, 19 nt, Artificial Sequence
  Description of Artificial Sequence: Synthetic oligonucleotide
agguuugcucggccaagca

SEQ ID NO: 2774789 - RNA, 19 nt, Artificial Sequence
  Description of Artificial Sequence: Synthetic oligonucleotide
cagcauagccagcggcugc

SEQ ID NO: 2774790 - RNA, 19 nt, Artificial Sequence
  Description of Artificial Sequence: Synthetic oligonucleotide
uugaugcuccucucaggua

SEQ ID NO: 2774791 - RNA, 19 nt, Artificial Sequence
  Description of Artificial Sequence: Synthetic oligonucleotide
gccaaagccauuuguaacu

SEQ ID NO: 2774792 - RNA, 19 nt, Artificial Sequence
  Description of Artificial Sequence: Synthetic oligonucleotide
ccucaagggaaagugugcc

SEQ ID NO: 2774793 - RNA, 19 nt, Artificial Sequence
  Description of Artificial Sequence: Synthetic oligonucleotide
gaacuagguuggguagccc

SEQ ID NO: 2774794 - RNA, 19 nt, Artificial Sequence
  Description of Artificial Sequence: Synthetic oligonucleotide
gacaguccgggucauuggu

SEQ ID NO: 2774795 - RNA, 19 nt, Artificial Sequence
  Description of Artificial Sequence: Synthetic oligonucleotide
aucugucuacaaacugaag

SEQ ID NO: 2774796 - RNA, 19 nt, Artificial Sequence
  Description of Artificial Sequence: Synthetic oligonucleotide
ggccaggagacuccggagc

SEQ ID NO: 2774797 - RNA, 19 nt, Artificial Sequence
  Description of Artificial Sequence: Synthetic oligonucleotide
aggaguagcggggccagga

SEQ ID NO: 2774798 - RNA, 19 nt, Artificial Sequence
  Description of Artificial Sequence: Synthetic oligonucleotide
cagguuugcucggccaagc

SEQ ID NO: 2774799 - RNA, 19 nt, Artificial Sequence
  Description of Artificial Sequence: Synthetic oligonucleotide
cucaugcccaauaaagaau

SEQ ID NO: 2774800 - RNA, 19 nt, Artificial Sequence
  Description of Artificial Sequence: Synthetic oligonucleotide
cauggaccacguuguccag

SEQ ID NO: 2774801 - RNA, 19 nt, Artificial Sequence
  Description of Artificial Sequence: Synthetic oligonucleotide
agcauagccagcggcugcu

SEQ ID NO: 2774802 - RNA, 19 nt, Artificial Sequence
  Description of Artificial Sequence: Synthetic oligonucleotide
uagccagcggcugcuugag

SEQ ID NO: 2774803 - RNA, 19 nt, Artificial Sequence
  Description of Artificial Sequence: Synthetic oligonucleotide
aguccgggucauuggucug

SEQ ID NO: 2774804 - RNA, 19 nt, Artificial Sequence
  Description of Artificial Sequence: Synthetic oligonucleotide
gcugcguuugccaaagcca

SEQ ID NO: 2774805 - RNA, 19 nt, Artificial Sequence
  Description of Artificial Sequence: Synthetic oligonucleotide
agcggggccaggagacucc

SEQ ID NO: 2774806 - RNA, 19 nt, Artificial Sequence
  Description of Artificial Sequence: Synthetic oligonucleotide
gccaggagacuccggagcc

SEQ ID NO: 2774807 - RNA, 19 nt, Artificial Sequence
  Description of Artificial Sequence: Synthetic oligonucleotide
ccauccgcuguuagcaagc

SEQ ID NO: 2774808 - RNA, 19 nt, Artificial Sequence
  Description of Artificial Sequence: Synthetic oligonucleotide
cuucgccauccgcuguuag

SEQ ID NO: 2774809 - RNA, 19 nt, Artificial Sequence
  Description of Artificial Sequence: Synthetic oligonucleotide
cugacugggagagcaccug

SEQ ID NO: 2774810 - RNA, 19 nt, Artificial Sequence
  Description of Artificial Sequence: Synthetic oligonucleotide
gcccaauaaagaaugucca

SEQ ID NO: 2774811 - RNA, 19 nt, Artificial Sequence
  Description of Artificial Sequence: Synthetic oligonucleotide
cauccgcuguuagcaagcc

SEQ ID NO: 2774812 - RNA, 19 nt, Artificial Sequence
  Description of Artificial Sequence: Synthetic oligonucleotide
gccauccgcuguuagcaag

SEQ ID NO: 2774813 - RNA, 19 nt, Artificial Sequence
  Description of Artificial Sequence: Synthetic oligonucleotide
uccgccaggcgucucccua

SEQ ID NO: 2774814 - RNA, 19 nt, Artificial Sequence
  Description of Artificial Sequence: Synthetic oligonucleotide
gccaaauuuguaaaacucu

SEQ ID NO: 2774815 - RNA, 19 nt, Artificial Sequence
  Description of Artificial Sequence: Synthetic oligonucleotide
gguucuaggccaaauuugu

SEQ ID NO: 2774816 - RNA, 19 nt, Artificial Sequence
  Description of Artificial Sequence: Synthetic oligonucleotide
ucucccuaugcagcugcgu

SEQ ID NO: 2774817 - RNA, 19 nt, Artificial Sequence
  Description of Artificial Sequence: Synthetic oligonucleotide
ggaguagcggggccaggag

SEQ ID NO: 2774818 - RNA, 19 nt, Artificial Sequence
  Description of Artificial Sequence: Synthetic oligonucleotide
ugcaaacgggugugggguu

SEQ ID NO: 2774819 - RNA, 19 nt, Artificial Sequence
  Description of Artificial Sequence: Synthetic oligonucleotide
cccgcuggcgccucagucg

SEQ ID NO: 2774820 - RNA, 19 nt, Artificial Sequence
  Description of Artificial Sequence: Synthetic oligonucleotide
cucagguuugcucggccaa

SEQ ID NO: 2774821 - RNA, 19 nt, Artificial Sequence
  Description of Artificial Sequence: Synthetic oligonucleotide
ccaaagccaaaaggaagag

SEQ ID NO: 2774822 - RNA, 19 nt, Artificial Sequence
  Description of Artificial Sequence: Synthetic oligonucleotide
gcuggcgccucagucgucg

SEQ ID NO: 2774823 - RNA, 19 nt, Artificial Sequence
  Description of Artificial Sequence: Synthetic oligonucleotide
ggaagagaugcaaacgggu

SEQ ID NO: 2774824 - RNA, 19 nt, Artificial Sequence
  Description of Artificial Sequence: Synthetic oligonucleotide
aagcaggccucaagggaaa

SEQ ID NO: 2774825 - RNA, 19 nt, Artificial Sequence
  Description of Artificial Sequence: Synthetic oligonucleotide
ggagccucugccauucuuc

SEQ ID NO: 2774826 - RNA, 19 nt, Artificial Sequence
  Description of Artificial Sequence: Synthetic oligonucleotide
caggagacuccggagccuc

SEQ ID NO: 2774827 - RNA, 19 nt, Artificial Sequence
  Description of Artificial Sequence: Synthetic oligonucleotide
ccucagucgucgcaccagg

SEQ ID NO: 2774828 - RNA, 19 nt, Artificial Sequence
  Description of Artificial Sequence: Synthetic oligonucleotide
agugugccucucaugccca

SEQ ID NO: 2774829 - RNA, 19 nt, Artificial Sequence
  Description of Artificial Sequence: Synthetic oligonucleotide
agccagcggcugcuugagg

SEQ ID NO: 2774830 - RNA, 19 nt, Artificial Sequence
  Description of Artificial Sequence: Synthetic oligonucleotide
auggaccacguuguccaga

SEQ ID NO: 2774831 - RNA, 19 nt, Artificial Sequence
  Description of Artificial Sequence: Synthetic oligonucleotide
ccaauaaagaauguccagu

SEQ ID NO: 2774832 - RNA, 19 nt, Artificial Sequence
  Description of Artificial Sequence: Synthetic oligonucleotide
cacguuguccagaguucca

SEQ ID NO: 2774833 - RNA, 19 nt, Artificial Sequence
  Description of Artificial Sequence: Synthetic oligonucleotide
ccacguuguccagaguucc

SEQ ID NO: 2774834 - RNA, 19 nt, Artificial Sequence
  Description of Artificial Sequence: Synthetic oligonucleotide
ccaagcaggccucaaggga

SEQ ID NO: 2774835 - RNA, 19 nt, Artificial Sequence
  Description of Artificial Sequence: Synthetic oligonucleotide
agcaggccucaagggaaag

SEQ ID NO: 2774836 - RNA, 19 nt, Artificial Sequence
  Description of Artificial Sequence: Synthetic oligonucleotide
caguccgggucauuggucu

SEQ ID NO: 2774837 - RNA, 19 nt, Artificial Sequence
  Description of Artificial Sequence: Synthetic oligonucleotide
guuggguagcccagagcca

SEQ ID NO: 2774838 - RNA, 19 nt, Artificial Sequence
  Description of Artificial Sequence: Synthetic oligonucleotide
gucucccuaugcagcugcg

SEQ ID NO: 2774839 - RNA, 19 nt, Artificial Sequence
  Description of Artificial Sequence: Synthetic oligonucleotide
uagcggggccaggagacuc

SEQ ID NO: 2774840 - RNA, 19 nt, Artificial Sequence
  Description of Artificial Sequence: Synthetic oligonucleotide
gaggaguagcggggccagg

SEQ ID NO: 2774841 - RNA, 19 nt, Artificial Sequence
  Description of Artificial Sequence: Synthetic oligonucleotide
ccucucagguaccaggaca

SEQ ID NO: 2774842 - RNA, 19 nt, Artificial Sequence
  Description of Artificial Sequence: Synthetic oligonucleotide
uccgggucauuggucugac

SEQ ID NO: 2774843 - RNA, 19 nt, Artificial Sequence
  Description of Artificial Sequence: Synthetic oligonucleotide
aggccucaagggaaagugu

SEQ ID NO: 2774844 - RNA, 19 nt, Artificial Sequence
  Description of Artificial Sequence: Synthetic oligonucleotide
cucaagggaaagugugccu

SEQ ID NO: 2774845 - RNA, 19 nt, Artificial Sequence
  Description of Artificial Sequence: Synthetic oligonucleotide
uuggucugacugggagagc

SEQ ID NO: 2774846 - RNA, 19 nt, Artificial Sequence
  Description of Artificial Sequence: Synthetic oligonucleotide
caagggaaagugugccucu

SEQ ID NO: 2774847 - RNA, 19 nt, Artificial Sequence
  Description of Artificial Sequence: Synthetic oligonucleotide
uuccuuccauaggacuauc

SEQ ID NO: 2774848 - RNA, 19 nt, Artificial Sequence
  Description of Artificial Sequence: Synthetic oligonucleotide
caugcccaauaaagaaugu

SEQ ID NO: 2774849 - RNA, 19 nt, Artificial Sequence
  Description of Artificial Sequence: Synthetic oligonucleotide
ggaggaguagcggggccag

SEQ ID NO: 2774850 - RNA, 19 nt, Artificial Sequence
  Description of Artificial Sequence: Synthetic oligonucleotide
ugugccucucaugcccaau

SEQ ID NO: 2774851 - RNA, 19 nt, Artificial Sequence
  Description of Artificial Sequence: Synthetic oligonucleotide
gggucaagaucugagccaa

SEQ ID NO: 2774852 - RNA, 19 nt, Artificial Sequence
  Description of Artificial Sequence: Synthetic oligonucleotide
gugccucucaugcccaaua

SEQ ID NO: 2774853 - RNA, 19 nt, Artificial Sequence
  Description of Artificial Sequence: Synthetic oligonucleotide
guucuaggccaaauuugua

SEQ ID NO: 2774854 - RNA, 19 nt, Artificial Sequence
  Description of Artificial Sequence: Synthetic oligonucleotide
gggccaggagacuccggag

SEQ ID NO: 2774855 - RNA, 19 nt, Artificial Sequence
  Description of Artificial Sequence: Synthetic oligonucleotide
cuagguuggguagcccaga

SEQ ID NO: 2774856 - RNA, 19 nt, Artificial Sequence
  Description of Artificial Sequence: Synthetic oligonucleotide
gggguucuaggccaaauuu

SEQ ID NO: 2774857 - RNA, 19 nt, Artificial Sequence
  Description of Artificial Sequence: Synthetic oligonucleotide
ccaaagccauuuguaacuc

SEQ ID NO: 2774858 - RNA, 19 nt, Artificial Sequence
  Description of Artificial Sequence: Synthetic oligonucleotide
cagagccacguccccgcug

SEQ ID NO: 2774859 - RNA, 19 nt, Artificial Sequence
  Description of Artificial Sequence: Synthetic oligonucleotide
caccucaaagugggucaag

SEQ ID NO: 2774860 - RNA, 19 nt, Artificial Sequence
  Description of Artificial Sequence: Synthetic oligonucleotide
cguuugccaaagccaaaag

SEQ ID NO: 2774861 - RNA, 19 nt, Artificial Sequence
  Description of Artificial Sequence: Synthetic oligonucleotide
uugcucggccaagcaggcc

SEQ ID NO: 2774862 - RNA, 19 nt, Artificial Sequence
  Description of Artificial Sequence: Synthetic oligonucleotide
cguuguccagaguuccagc

SEQ ID NO: 2774863 - RNA, 19 nt, Artificial Sequence
  Description of Artificial Sequence: Synthetic oligonucleotide
cccuaugcagcugcguuug

SEQ ID NO: 2774864 - RNA, 19 nt, Artificial Sequence
  Description of Artificial Sequence: Synthetic oligonucleotide
agucgucgcaccaggucau

SEQ ID NO: 2774865 - RNA, 19 nt, Artificial Sequence
  Description of Artificial Sequence: Synthetic oligonucleotide
ccauucuucgccauccgcu

SEQ ID NO: 2774866 - RNA, 19 nt, Artificial Sequence
  Description of Artificial Sequence: Synthetic oligonucleotide
ugugggguucuaggccaaa

SEQ ID NO: 2774867 - RNA, 19 nt, Artificial Sequence
  Description of Artificial Sequence: Synthetic oligonucleotide
cgggugugggguucuaggc

SEQ ID NO: 2774868 - RNA, 19 nt, Artificial Sequence
  Description of Artificial Sequence: Synthetic oligonucleotide
agcggcugcuugaggccgg

SEQ ID NO: 2774869 - RNA, 19 nt, Artificial Sequence
  Description of Artificial Sequence: Synthetic oligonucleotide
ggagagaugacaacuucuu

SEQ ID NO: 2774870 - RNA, 19 nt, Artificial Sequence
  Description of Artificial Sequence: Synthetic oligonucleotide
cgucucccuaugcagcugc

SEQ ID NO: 2774871 - RNA, 19 nt, Artificial Sequence
  Description of Artificial Sequence: Synthetic oligonucleotide
gcguuugccaaagccaaaa

SEQ ID NO: 2774872 - RNA, 19 nt, Artificial Sequence
  Description of Artificial Sequence: Synthetic oligonucleotide
guccgggucauuggucuga

SEQ ID NO: 2774873 - RNA, 19 nt, Artificial Sequence
  Description of Artificial Sequence: Synthetic oligonucleotide
ggucauggaccacguuguc

SEQ ID NO: 2774874 - RNA, 19 nt, Artificial Sequence
  Description of Artificial Sequence: Synthetic oligonucleotide
acucucccgccacguccug

SEQ ID NO: 2774875 - RNA, 19 nt, Artificial Sequence
  Description of Artificial Sequence: Synthetic oligonucleotide
ggcgccucagucgucgcac

SEQ ID NO: 2774876 - RNA, 19 nt, Artificial Sequence
  Description of Artificial Sequence: Synthetic oligonucleotide
cuuccuuccauaggacuau

SEQ ID NO: 2774877 - RNA, 19 nt, Artificial Sequence
  Description of Artificial Sequence: Synthetic oligonucleotide
gccucagucgucgcaccag

SEQ ID NO: 2774878 - RNA, 19 nt, Artificial Sequence
  Description of Artificial Sequence: Synthetic oligonucleotide
cgccacguccugaacuagg

SEQ ID NO: 2774879 - RNA, 19 nt, Artificial Sequence
  Description of Artificial Sequence: Synthetic oligonucleotide
cucccuaugcagcugcguu

SEQ ID NO: 2774880 - RNA, 19 nt, Artificial Sequence
  Description of Artificial Sequence: Synthetic oligonucleotide
ccauaggacuaucugucua

SEQ ID NO: 2774881 - RNA, 19 nt, Artificial Sequence
  Description of Artificial Sequence: Synthetic oligonucleotide
uccccgcuggcgccucagu

SEQ ID NO: 2774882 - RNA, 19 nt, Artificial Sequence
  Description of Artificial Sequence: Synthetic oligonucleotide
gccucucaugcccaauaaa

SEQ ID NO: 2774883 - RNA, 19 nt, Artificial Sequence
  Description of Artificial Sequence: Synthetic oligonucleotide
ccaggcgucucccuaugca

SEQ ID NO: 2774884 - RNA, 19 nt, Artificial Sequence
  Description of Artificial Sequence: Synthetic oligonucleotide
ucggccaagcaggccucaa

SEQ ID NO: 2774885 - RNA, 19 nt, Artificial Sequence
  Description of Artificial Sequence: Synthetic oligonucleotide
gucgucgcaccaggucaug

SEQ ID NO: 2774886 - RNA, 19 nt, Artificial Sequence
  Description of Artificial Sequence: Synthetic oligonucleotide
aaacgggugugggguucua

SEQ ID NO: 2774887 - RNA, 19 nt, Artificial Sequence
  Description of Artificial Sequence: Synthetic oligonucleotide
gcaaacgggugugggguuc

SEQ ID NO: 2774888 - RNA, 19 nt, Artificial Sequence
  Description of Artificial Sequence: Synthetic oligonucleotide
ccucagguuugcucggcca

SEQ ID NO: 2774889 - RNA, 19 nt, Artificial Sequence
  Description of Artificial Sequence: Synthetic oligonucleotide
guaccaggacaguccgggu

SEQ ID NO: 2774890 - RNA, 19 nt, Artificial Sequence
  Description of Artificial Sequence: Synthetic oligonucleotide
ggcgucucccuaugcagcu

SEQ ID NO: 2774891 - RNA, 19 nt, Artificial Sequence
  Description of Artificial Sequence: Synthetic oligonucleotide
gccaggcgucucccuaugc

SEQ ID NO: 2774892 - RNA, 19 nt, Artificial Sequence
  Description of Artificial Sequence: Synthetic oligonucleotide
ggucugacugggagagcac

SEQ ID NO: 2774893 - RNA, 19 nt, Artificial Sequence
  Description of Artificial Sequence: Synthetic oligonucleotide
ccuaugcagcugcguuugc

SEQ ID NO: 2774894 - RNA, 19 nt, Artificial Sequence
  Description of Artificial Sequence: Synthetic oligonucleotide
gcaccuggcucagggagca

SEQ ID NO: 2774895 - RNA, 19 nt, Artificial Sequence
  Description of Artificial Sequence: Synthetic oligonucleotide
cucagucgucgcaccaggu

SEQ ID NO: 2774896 - RNA, 19 nt, Artificial Sequence
  Description of Artificial Sequence: Synthetic oligonucleotide
guccugaacuagguugggu

SEQ ID NO: 2774897 - RNA, 19 nt, Artificial Sequence
  Description of Artificial Sequence: Synthetic oligonucleotide
cuacaaacugaagguugau

SEQ ID NO: 2774898 - RNA, 19 nt, Artificial Sequence
  Description of Artificial Sequence: Synthetic oligonucleotide
cucccgccacguccugaac

SEQ ID NO: 2774899 - RNA, 19 nt, Artificial Sequence
  Description of Artificial Sequence: Synthetic oligonucleotide
agcaagccgcaagcccgcu

SEQ ID NO: 2774900 - RNA, 19 nt, Artificial Sequence
  Description of Artificial Sequence: Synthetic oligonucleotide
cuggcucagggagcaccuc

SEQ ID NO: 2774901 - RNA, 19 nt, Artificial Sequence
  Description of Artificial Sequence: Synthetic oligonucleotide
gugugccucucaugcccaa

SEQ ID NO: 2774902 - RNA, 19 nt, Artificial Sequence
  Description of Artificial Sequence: Synthetic oligonucleotide
ccggaggaguagcggggcc

SEQ ID NO: 2774903 - RNA, 19 nt, Artificial Sequence
  Description of Artificial Sequence: Synthetic oligonucleotide
gaucugagccaaagccauu

SEQ ID NO: 2774904 - RNA, 19 nt, Artificial Sequence
  Description of Artificial Sequence: Synthetic oligonucleotide
guccccgcuggcgccucag

SEQ ID NO: 2774905 - RNA, 19 nt, Artificial Sequence
  Description of Artificial Sequence: Synthetic oligonucleotide
gcggggccaggagacuccg

SEQ ID NO: 2774906 - RNA, 19 nt, Artificial Sequence
  Description of Artificial Sequence: Synthetic oligonucleotide
ccacguccccgcuggcgcc

SEQ ID NO: 2774907 - RNA, 19 nt, Artificial Sequence
  Description of Artificial Sequence: Synthetic oligonucleotide
ccucugccauucuucgcca

SEQ ID NO: 2774908 - RNA, 19 nt, Artificial Sequence
  Description of Artificial Sequence: Synthetic oligonucleotide
gcgccucagucgucgcacc

SEQ ID NO: 2774909 - RNA, 19 nt, Artificial Sequence
  Description of Artificial Sequence: Synthetic oligonucleotide
gcucagggagcaccucaaa

SEQ ID NO: 2774910 - RNA, 19 nt, Artificial Sequence
  Description of Artificial Sequence: Synthetic oligonucleotide
caaacgggugugggguucu

SEQ ID NO: 2774911 - RNA, 19 nt, Artificial Sequence
  Description of Artificial Sequence: Synthetic oligonucleotide
ccucaaagugggucaagau

SEQ ID NO: 2774912 - RNA, 19 nt, Artificial Sequence
  Description of Artificial Sequence: Synthetic oligonucleotide
cguccugaacuagguuggg

SEQ ID NO: 2774913 - RNA, 19 nt, Artificial Sequence
  Description of Artificial Sequence: Synthetic oligonucleotide
gugggguucuaggccaaau

SEQ ID NO: 2774914 - RNA, 19 nt, Artificial Sequence
  Description of Artificial Sequence: Synthetic oligonucleotide
gugugggguucuaggccaa

SEQ ID NO: 2774915 - RNA, 19 nt, Artificial Sequence
  Description of Artificial Sequence: Synthetic oligonucleotide
cucucccgccacguccuga

SEQ ID NO: 2774916 - RNA, 19 nt, Artificial Sequence
  Description of Artificial Sequence: Synthetic oligonucleotide
gccacguccugaacuaggu

SEQ ID NO: 2774917 - RNA, 19 nt, Artificial Sequence
  Description of Artificial Sequence: Synthetic oligonucleotide
cggccaagcaggccucaag

SEQ ID NO: 2774918 - RNA, 19 nt, Artificial Sequence
  Description of Artificial Sequence: Synthetic oligonucleotide
ccgcuguuagcaagccgca

SEQ ID NO: 2774919 - RNA, 19 nt, Artificial Sequence
  Description of Artificial Sequence: Synthetic oligonucleotide
gcaccucaaagugggucaa

SEQ ID NO: 2774920 - RNA, 19 nt, Artificial Sequence
  Description of Artificial Sequence: Synthetic oligonucleotide
gcuccgccaggcgucuccc

SEQ ID NO: 2774921 - RNA, 19 nt, Artificial Sequence
  Description of Artificial Sequence: Synthetic oligonucleotide
cgucgcaccaggucaugga

SEQ ID NO: 2774922 - RNA, 19 nt, Artificial Sequence
  Description of Artificial Sequence: Synthetic oligonucleotide
ccccgcuggcgccucaguc

SEQ ID NO: 2774923 - RNA, 19 nt, Artificial Sequence
  Description of Artificial Sequence: Synthetic oligonucleotide
gcgucucccuaugcagcug

SEQ ID NO: 2774924 - RNA, 19 nt, Artificial Sequence
  Description of Artificial Sequence: Synthetic oligonucleotide
cucggccaagcaggccuca

SEQ ID NO: 2774925 - RNA, 19 nt, Artificial Sequence
  Description of Artificial Sequence: Synthetic oligonucleotide
cucugccauucuucgccau

SEQ ID NO: 2774926 - RNA, 19 nt, Artificial Sequence
  Description of Artificial Sequence: Synthetic oligonucleotide
guagcggggccaggagacu

SEQ ID NO: 2774927 - RNA, 19 nt, Artificial Sequence
  Description of Artificial Sequence: Synthetic oligonucleotide
caagcuccgccaggcgucu

SEQ ID NO: 2774928 - RNA, 19 nt, Artificial Sequence
  Description of Artificial Sequence: Synthetic oligonucleotide
ggucaagaucugagccaaa

SEQ ID NO: 2774929 - RNA, 19 nt, Artificial Sequence
  Description of Artificial Sequence: Synthetic oligonucleotide
caccuggcucagggagcac

SEQ ID NO: 2774930 - RNA, 19 nt, Artificial Sequence
  Description of Artificial Sequence: Synthetic oligonucleotide
ggguagcccagagccacgu

SEQ ID NO: 2774931 - RNA, 19 nt, Artificial Sequence
  Description of Artificial Sequence: Synthetic oligonucleotide
ccgccacguccugaacuag

SEQ ID NO: 2774932 - RNA, 19 nt, Artificial Sequence
  Description of Artificial Sequence: Synthetic oligonucleotide
cggaggaguagcggggcca

SEQ ID NO: 2774933 - RNA, 19 nt, Artificial Sequence
  Description of Artificial Sequence: Synthetic oligonucleotide
ggagcaccucaaagugggu

SEQ ID NO: 2774934 - RNA, 19 nt, Artificial Sequence
  Description of Artificial Sequence: Synthetic oligonucleotide
cgccaggcgucucccuaug

SEQ ID NO: 2774935 - RNA, 19 nt, Artificial Sequence
  Description of Artificial Sequence: Synthetic oligonucleotide
cuccggagccucugccauu

SEQ ID NO: 2774936 - RNA, 19 nt, Artificial Sequence
  Description of Artificial Sequence: Synthetic oligonucleotide
ccgcuggcgccucagucgu

SEQ ID NO: 2774937 - RNA, 19 nt, Artificial Sequence
  Description of Artificial Sequence: Synthetic oligonucleotide
cacguccccgcuggcgccu

SEQ ID NO: 2774938 - RNA, 19 nt, Artificial Sequence
  Description of Artificial Sequence: Synthetic oligonucleotide
cgccucagucgucgcacca

SEQ ID NO: 2774939 - RNA, 19 nt, Artificial Sequence
  Description of Artificial Sequence: Synthetic oligonucleotide
gcggcugcuugaggccgga

SEQ ID NO: 2774940 - RNA, 19 nt, Artificial Sequence
  Description of Artificial Sequence: Synthetic oligonucleotide
cgccauccgcuguuagcaa

SEQ ID NO: 2774941 - RNA, 19 nt, Artificial Sequence
  Description of Artificial Sequence: Synthetic oligonucleotide
ccacguccugaacuagguu

SEQ ID NO: 2774942 - RNA, 19 nt, Artificial Sequence
  Description of Artificial Sequence: Synthetic oligonucleotide
cgcuguuagcaagccgcaa

SEQ ID NO: 2774943 - RNA, 19 nt, Artificial Sequence
  Description of Artificial Sequence: Synthetic oligonucleotide
ccgccaggcgucucccuau

SEQ ID NO: 2774944 - RNA, 19 nt, Artificial Sequence
  Description of Artificial Sequence: Synthetic oligonucleotide
ccagagccacguccccgcu

SEQ ID NO: 2774945 - RNA, 19 nt, Artificial Sequence
  Description of Artificial Sequence: Synthetic oligonucleotide
caggacaguccgggucauu

SEQ ID NO: 2774946 - RNA, 19 nt, Artificial Sequence
  Description of Artificial Sequence: Synthetic oligonucleotide
ccgggucauuggucugacu

SEQ ID NO: 2774947 - RNA, 19 nt, Artificial Sequence
  Description of Artificial Sequence: Synthetic oligonucleotide
gcauagccagcggcugcuu

SEQ ID NO: 2774948 - RNA, 19 nt, Artificial Sequence
  Description of Artificial Sequence: Synthetic oligonucleotide
cgcuggcgccucagucguc

SEQ ID NO: 2774949 - RNA, 19 nt, Artificial Sequence
  Description of Artificial Sequence: Synthetic oligonucleotide
cggcugcuugaggccggag

SEQ ID NO: 2774950 - RNA, 19 nt, Artificial Sequence
  Description of Artificial Sequence: Synthetic oligonucleotide
ccaggacaguccgggucau

SEQ ID NO: 2774951 - RNA, 19 nt, Artificial Sequence
  Description of Artificial Sequence: Synthetic oligonucleotide
cguccccgcuggcgccuca

SEQ ID NO: 2774952 - RNA, 19 nt, Artificial Sequence
  Description of Artificial Sequence: Synthetic oligonucleotide
uaugaaucuaccaauauug

SEQ ID NO: 2774953 - RNA, 19 nt, Artificial Sequence
  Description of Artificial Sequence: Synthetic oligonucleotide
aucaaaauggaucucaaac

SEQ ID NO: 2774954 - RNA, 19 nt, Artificial Sequence
  Description of Artificial Sequence: Synthetic oligonucleotide
uuaagaaacacguuaaggc

SEQ ID NO: 2774955 - RNA, 19 nt, Artificial Sequence
  Description of Artificial Sequence: Synthetic oligonucleotide
uauaaggucaguuacagca

SEQ ID NO: 2774956 - RNA, 19 nt, Artificial Sequence
  Description of Artificial Sequence: Synthetic oligonucleotide
auucauuucaaacaggcug

SEQ ID NO: 2774957 - RNA, 19 nt, Artificial Sequence
  Description of Artificial Sequence: Synthetic oligonucleotide
uucauuucaaacaggcugg

SEQ ID NO: 2774958 - RNA, 19 nt, Artificial Sequence
  Description of Artificial Sequence: Synthetic oligonucleotide
uuaaauaugccacauuuaa

SEQ ID NO: 2774959 - RNA, 19 nt, Artificial Sequence
  Description of Artificial Sequence: Synthetic oligonucleotide
uuuagaugcucccaauugg

SEQ ID NO: 2774960 - RNA, 19 nt, Artificial Sequence
  Description of Artificial Sequence: Synthetic oligonucleotide
uuaaauuaacuguaguaug

SEQ ID NO: 2774961 - RNA, 19 nt, Artificial Sequence
  Description of Artificial Sequence: Synthetic oligonucleotide
ucaacugugacaaaaucac

SEQ ID NO: 2774962 - RNA, 19 nt, Artificial Sequence
  Description of Artificial Sequence: Synthetic oligonucleotide
aaaagcuuaagaaacacgu

SEQ ID NO: 2774963 - RNA, 19 nt, Artificial Sequence
  Description of Artificial Sequence: Synthetic oligonucleotide
auugcauucauuucaaaca

SEQ ID NO: 2774964 - RNA, 19 nt, Artificial Sequence
  Description of Artificial Sequence: Synthetic oligonucleotide
uucacuuacuacaaaagcu

SEQ ID NO: 2774965 - RNA, 19 nt, Artificial Sequence
  Description of Artificial Sequence: Synthetic oligonucleotide
acugaagugccuuucuugc

SEQ ID NO: 2774966 - RNA, 19 nt, Artificial Sequence
  Description of Artificial Sequence: Synthetic oligonucleotide
uaaauuaacuguaguaugu

SEQ ID NO: 2774967 - RNA, 19 nt, Artificial Sequence
  Description of Artificial Sequence: Synthetic oligonucleotide
aucucaaacguucacuuac

SEQ ID NO: 2774968 - RNA, 19 nt, Artificial Sequence
  Description of Artificial Sequence: Synthetic oligonucleotide
acaucuagaauacauccuc

SEQ ID NO: 2774969 - RNA, 19 nt, Artificial Sequence
  Description of Artificial Sequence: Synthetic oligonucleotide
aaauggaucucaaacguuc

SEQ ID NO: 2774970 - RNA, 19 nt, Artificial Sequence
  Description of Artificial Sequence: Synthetic oligonucleotide
uuagaugcucccaauuggg

SEQ ID NO: 2774971 - RNA, 19 nt, Artificial Sequence
  Description of Artificial Sequence: Synthetic oligonucleotide
uaagaaacacguuaaggca

SEQ ID NO: 2774972 - RNA, 19 nt, Artificial Sequence
  Description of Artificial Sequence: Synthetic oligonucleotide
uuuacuagucacauauuca

SEQ ID NO: 2774973 - RNA, 19 nt, Artificial Sequence
  Description of Artificial Sequence: Synthetic oligonucleotide
uugcauucauuucaaacag

SEQ ID NO: 2774974 - RNA, 19 nt, Artificial Sequence
  Description of Artificial Sequence: Synthetic oligonucleotide
uacuacaaaagcuuaagaa

SEQ ID NO: 2774975 - RNA, 19 nt, Artificial Sequence
  Description of Artificial Sequence: Synthetic oligonucleotide
gacaaaaucacuuacaguu

SEQ ID NO: 2774976 - RNA, 19 nt, Artificial Sequence
  Description of Artificial Sequence: Synthetic oligonucleotide
aagaaacacguuaaggcac

SEQ ID NO: 2774977 - RNA, 19 nt, Artificial Sequence
  Description of Artificial Sequence: Synthetic oligonucleotide
aauuaacuguaguaugucu

SEQ ID NO: 2774978 - RNA, 19 nt, Artificial Sequence
  Description of Artificial Sequence: Synthetic oligonucleotide
uuacuagucacauauucac

SEQ ID NO: 2774979 - RNA, 19 nt, Artificial Sequence
  Description of Artificial Sequence: Synthetic oligonucleotide
uguauauaugaaucuacca

SEQ ID NO: 2774980 - RNA, 19 nt, Artificial Sequence
  Description of Artificial Sequence: Synthetic oligonucleotide
guacaucuagaauacaucc

SEQ ID NO: 2774981 - RNA, 19 nt, Artificial Sequence
  Description of Artificial Sequence: Synthetic oligonucleotide
cuagaauacauccucugcc

SEQ ID NO: 2774982 - RNA, 19 nt, Artificial Sequence
  Description of Artificial Sequence: Synthetic oligonucleotide
uugauuucugcucuguucu

SEQ ID NO: 2774983 - RNA, 19 nt, Artificial Sequence
  Description of Artificial Sequence: Synthetic oligonucleotide
acuagucacauauucacug

SEQ ID NO: 2774984 - RNA, 19 nt, Artificial Sequence
  Description of Artificial Sequence: Synthetic oligonucleotide
cacauauucacugaagugc

SEQ ID NO: 2774985 - RNA, 19 nt, Artificial Sequence
  Description of Artificial Sequence: Synthetic oligonucleotide
aaauuaacuguaguauguc

SEQ ID NO: 2774986 - RNA, 19 nt, Artificial Sequence
  Description of Artificial Sequence: Synthetic oligonucleotide
ucuguauauaugaaucuac

SEQ ID NO: 2774987 - RNA, 19 nt, Artificial Sequence
  Description of Artificial Sequence: Synthetic oligonucleotide
acuuaaauaugccacauuu

SEQ ID NO: 2774988 - RNA, 19 nt, Artificial Sequence
  Description of Artificial Sequence: Synthetic oligonucleotide
ucuguucugagcaucuucc

SEQ ID NO: 2774989 - RNA, 19 nt, Artificial Sequence
  Description of Artificial Sequence: Synthetic oligonucleotide
cuuacaacuauaaggucag

SEQ ID NO: 2774990 - RNA, 19 nt, Artificial Sequence
  Description of Artificial Sequence: Synthetic oligonucleotide
gauuaguacauguaaaucu

SEQ ID NO: 2774991 - RNA, 19 nt, Artificial Sequence
  Description of Artificial Sequence: Synthetic oligonucleotide
uguaaaucuucauuuagau

SEQ ID NO: 2774992 - RNA, 19 nt, Artificial Sequence
  Description of Artificial Sequence: Synthetic oligonucleotide
ucuagaauacauccucugc

SEQ ID NO: 2774993 - RNA, 19 nt, Artificial Sequence
  Description of Artificial Sequence: Synthetic oligonucleotide
aacacguuaaggcacagua

SEQ ID NO: 2774994 - RNA, 19 nt, Artificial Sequence
  Description of Artificial Sequence: Synthetic oligonucleotide
agcuuuacuagucacauau

SEQ ID NO: 2774995 - RNA, 19 nt, Artificial Sequence
  Description of Artificial Sequence: Synthetic oligonucleotide
ucuucaacugcucucuuca

SEQ ID NO: 2774996 - RNA, 19 nt, Artificial Sequence
  Description of Artificial Sequence: Synthetic oligonucleotide
aagcuuaagaaacacguua

SEQ ID NO: 2774997 - RNA, 19 nt, Artificial Sequence
  Description of Artificial Sequence: Synthetic oligonucleotide
aguuacagcaggcuuauca

SEQ ID NO: 2774998 - RNA, 19 nt, Artificial Sequence
  Description of Artificial Sequence: Synthetic oligonucleotide
gugacaaaaucacuuacag

SEQ ID NO: 2774999 - RNA, 19 nt, Artificial Sequence
  Description of Artificial Sequence: Synthetic oligonucleotide
uccuacaguacacacaggu

SEQ ID NO: 2775000 - RNA, 19 nt, Artificial Sequence
  Description of Artificial Sequence: Synthetic oligonucleotide
ugaagugccuuucuugcag

SEQ ID NO: 2775001 - RNA, 19 nt, Artificial Sequence
  Description of Artificial Sequence: Synthetic oligonucleotide
cuguauauaugaaucuacc

SEQ ID NO: 2775002 - RNA, 19 nt, Artificial Sequence
  Description of Artificial Sequence: Synthetic oligonucleotide
caaaaucacuuacaguucc

SEQ ID NO: 2775003 - RNA, 19 nt, Artificial Sequence
  Description of Artificial Sequence: Synthetic oligonucleotide
caaacguucacuuacuaca

SEQ ID NO: 2775004 - RNA, 19 nt, Artificial Sequence
  Description of Artificial Sequence: Synthetic oligonucleotide
cuuucuugcagcaggacac

SEQ ID NO: 2775005 - RNA, 19 nt, Artificial Sequence
  Description of Artificial Sequence: Synthetic oligonucleotide
guauauaugaaucuaccaa

SEQ ID NO: 2775006 - RNA, 19 nt, Artificial Sequence
  Description of Artificial Sequence: Synthetic oligonucleotide
uuaacaggcugucuucucc

SEQ ID NO: 2775007 - RNA, 19 nt, Artificial Sequence
  Description of Artificial Sequence: Synthetic oligonucleotide
ugaaucuaccaauauugca

SEQ ID NO: 2775008 - RNA, 19 nt, Artificial Sequence
  Description of Artificial Sequence: Synthetic oligonucleotide
cuuuacuagucacauauuc

SEQ ID NO: 2775009 - RNA, 19 nt, Artificial Sequence
  Description of Artificial Sequence: Synthetic oligonucleotide
cauguaaaucuucauuuag

SEQ ID NO: 2775010 - RNA, 19 nt, Artificial Sequence
  Description of Artificial Sequence: Synthetic oligonucleotide
guucacuuacuacaaaagc

SEQ ID NO: 2775011 - RNA, 19 nt, Artificial Sequence
  Description of Artificial Sequence: Synthetic oligonucleotide
aggcuuaucaaaauggauc

SEQ ID NO: 2775012 - RNA, 19 nt, Artificial Sequence
  Description of Artificial Sequence: Synthetic oligonucleotide
uaguacauguaaaucuuca

SEQ ID NO: 2775013 - RNA, 19 nt, Artificial Sequence
  Description of Artificial Sequence: Synthetic oligonucleotide
uucugcucuguucugagca

SEQ ID NO: 2775014 - RNA, 19 nt, Artificial Sequence
  Description of Artificial Sequence: Synthetic oligonucleotide
aacaggcuggccuuccacg

SEQ ID NO: 2775015 - RNA, 19 nt, Artificial Sequence
  Description of Artificial Sequence: Synthetic oligonucleotide
ucaacugcucucuucagcu

SEQ ID NO: 2775016 - RNA, 19 nt, Artificial Sequence
  Description of Artificial Sequence: Synthetic oligonucleotide
uuacuacaaaagcuuaaga

SEQ ID NO: 2775017 - RNA, 19 nt, Artificial Sequence
  Description of Artificial Sequence: Synthetic oligonucleotide
acuauaaggucaguuacag

SEQ ID NO: 2775018 - RNA, 19 nt, Artificial Sequence
  Description of Artificial Sequence: Synthetic oligonucleotide
uaguaugucuguauauaug

SEQ ID NO: 2775019 - RNA, 19 nt, Artificial Sequence
  Description of Artificial Sequence: Synthetic oligonucleotide
ucacuuacuacaaaagcuu

SEQ ID NO: 2775020 - RNA, 19 nt, Artificial Sequence
  Description of Artificial Sequence: Synthetic oligonucleotide
aguacacacagguauguca

SEQ ID NO: 2775021 - RNA, 19 nt, Artificial Sequence
  Description of Artificial Sequence: Synthetic oligonucleotide
uauaugaaucuaccaauau

SEQ ID NO: 2775022 - RNA, 19 nt, Artificial Sequence
  Description of Artificial Sequence: Synthetic oligonucleotide
ucuucauuuagaugcuccc

SEQ ID NO: 2775023 - RNA, 19 nt, Artificial Sequence
  Description of Artificial Sequence: Synthetic oligonucleotide
uagaauacauccucugcca

SEQ ID NO: 2775024 - RNA, 19 nt, Artificial Sequence
  Description of Artificial Sequence: Synthetic oligonucleotide
uucauuuagaugcucccaa

SEQ ID NO: 2775025 - RNA, 19 nt, Artificial Sequence
  Description of Artificial Sequence: Synthetic oligonucleotide
cuuacuacaaaagcuuaag

SEQ ID NO: 2775026 - RNA, 19 nt, Artificial Sequence
  Description of Artificial Sequence: Synthetic oligonucleotide
acuucucguuuacaguccc

SEQ ID NO: 2775027 - RNA, 19 nt, Artificial Sequence
  Description of Artificial Sequence: Synthetic oligonucleotide
cugagcaucuuccacagug

SEQ ID NO: 2775028 - RNA, 19 nt, Artificial Sequence
  Description of Artificial Sequence: Synthetic oligonucleotide
aucuucauuuagaugcucc

SEQ ID NO: 2775029 - RNA, 19 nt, Artificial Sequence
  Description of Artificial Sequence: Synthetic oligonucleotide
auuaacuguaguaugucug

SEQ ID NO: 2775030 - RNA, 19 nt, Artificial Sequence
  Description of Artificial Sequence: Synthetic oligonucleotide
uccacagugauuaguacau

SEQ ID NO: 2775031 - RNA, 19 nt, Artificial Sequence
  Description of Artificial Sequence: Synthetic oligonucleotide
ugucuguauauaugaaucu

SEQ ID NO: 2775032 - RNA, 19 nt, Artificial Sequence
  Description of Artificial Sequence: Synthetic oligonucleotide
ucaaacguucacuuacuac

SEQ ID NO: 2775033 - RNA, 19 nt, Artificial Sequence
  Description of Artificial Sequence: Synthetic oligonucleotide
uacaucuagaauacauccu

SEQ ID NO: 2775034 - RNA, 19 nt, Artificial Sequence
  Description of Artificial Sequence: Synthetic oligonucleotide
aaucuaccaauauugcauu

SEQ ID NO: 2775035 - RNA, 19 nt, Artificial Sequence
  Description of Artificial Sequence: Synthetic oligonucleotide
aguuccuuacaacuauaag

SEQ ID NO: 2775036 - RNA, 19 nt, Artificial Sequence
  Description of Artificial Sequence: Synthetic oligonucleotide
augaaucuaccaauauugc

SEQ ID NO: 2775037 - RNA, 19 nt, Artificial Sequence
  Description of Artificial Sequence: Synthetic oligonucleotide
agcaggcuuaucaaaaugg

SEQ ID NO: 2775038 - RNA, 19 nt, Artificial Sequence
  Description of Artificial Sequence: Synthetic oligonucleotide
ucuucacuucuucaacugc

SEQ ID NO: 2775039 - RNA, 19 nt, Artificial Sequence
  Description of Artificial Sequence: Synthetic oligonucleotide
auauccaguacaucuagaa

SEQ ID NO: 2775040 - RNA, 19 nt, Artificial Sequence
  Description of Artificial Sequence: Synthetic oligonucleotide
ucguuuacaguccccaagu

SEQ ID NO: 2775041 - RNA, 19 nt, Artificial Sequence
  Description of Artificial Sequence: Synthetic oligonucleotide
uacaguacacacagguaug

SEQ ID NO: 2775042 - RNA, 19 nt, Artificial Sequence
  Description of Artificial Sequence: Synthetic oligonucleotide
auaugaaucuaccaauauu

SEQ ID NO: 2775043 - RNA, 19 nt, Artificial Sequence
  Description of Artificial Sequence: Synthetic oligonucleotide
aggacacuuaaauaugcca

SEQ ID NO: 2775044 - RNA, 19 nt, Artificial Sequence
  Description of Artificial Sequence: Synthetic oligonucleotide
acauuuaacaggcugucuu

SEQ ID NO: 2775045 - RNA, 19 nt, Artificial Sequence
  Description of Artificial Sequence: Synthetic oligonucleotide
uuaucaaaauggaucucaa

SEQ ID NO: 2775046 - RNA, 19 nt, Artificial Sequence
  Description of Artificial Sequence: Synthetic oligonucleotide
ucacuuacaguuccuuaca

SEQ ID NO: 2775047 - RNA, 19 nt, Artificial Sequence
  Description of Artificial Sequence: Synthetic oligonucleotide
uacagcaggcuuaucaaaa

SEQ ID NO: 2775048 - RNA, 19 nt, Artificial Sequence
  Description of Artificial Sequence: Synthetic oligonucleotide
ucuaccaauauugcauuca

SEQ ID NO: 2775049 - RNA, 19 nt, Artificial Sequence
  Description of Artificial Sequence: Synthetic oligonucleotide
agcugcagguaccaguaac

SEQ ID NO: 2775050 - RNA, 19 nt, Artificial Sequence
  Description of Artificial Sequence: Synthetic oligonucleotide
aacuguaguaugucuguau

SEQ ID NO: 2775051 - RNA, 19 nt, Artificial Sequence
  Description of Artificial Sequence: Synthetic oligonucleotide
aauauugcauucauuucaa

SEQ ID NO: 2775052 - RNA, 19 nt, Artificial Sequence
  Description of Artificial Sequence: Synthetic oligonucleotide
ugauuaguacauguaaauc

SEQ ID NO: 2775053 - RNA, 19 nt, Artificial Sequence
  Description of Artificial Sequence: Synthetic oligonucleotide
aagcagucguagcugagcu

SEQ ID NO: 2775054 - RNA, 19 nt, Artificial Sequence
  Description of Artificial Sequence: Synthetic oligonucleotide
uacaguuccuuacaacuau

SEQ ID NO: 2775055 - RNA, 19 nt, Artificial Sequence
  Description of Artificial Sequence: Synthetic oligonucleotide
uucagcuugauuucugcuc

SEQ ID NO: 2775056 - RNA, 19 nt, Artificial Sequence
  Description of Artificial Sequence: Synthetic oligonucleotide
uuaguacauguaaaucuuc

SEQ ID NO: 2775057 - RNA, 19 nt, Artificial Sequence
  Description of Artificial Sequence: Synthetic oligonucleotide
gacacuuaaauaugccaca

SEQ ID NO: 2775058 - RNA, 19 nt, Artificial Sequence
  Description of Artificial Sequence: Synthetic oligonucleotide
uguuagaagcagucguagc

SEQ ID NO: 2775059 - RNA, 19 nt, Artificial Sequence
  Description of Artificial Sequence: Synthetic oligonucleotide
aucuagaauacauccucug

SEQ ID NO: 2775060 - RNA, 19 nt, Artificial Sequence
  Description of Artificial Sequence: Synthetic oligonucleotide
aacugugacaaaaucacuu

SEQ ID NO: 2775061 - RNA, 19 nt, Artificial Sequence
  Description of Artificial Sequence: Synthetic oligonucleotide
uguucugagcaucuuccac

SEQ ID NO: 2775062 - RNA, 19 nt, Artificial Sequence
  Description of Artificial Sequence: Synthetic oligonucleotide
agguaugucaacugugaca

SEQ ID NO: 2775063 - RNA, 19 nt, Artificial Sequence
  Description of Artificial Sequence: Synthetic oligonucleotide
uuagaagcagucguagcug

SEQ ID NO: 2775064 - RNA, 19 nt, Artificial Sequence
  Description of Artificial Sequence: Synthetic oligonucleotide
aaggucaguuacagcaggc

SEQ ID NO: 2775065 - RNA, 19 nt, Artificial Sequence
  Description of Artificial Sequence: Synthetic oligonucleotide
accaguaacuucuucacuu

SEQ ID NO: 2775066 - RNA, 19 nt, Artificial Sequence
  Description of Artificial Sequence: Synthetic oligonucleotide
cuuacaguuccuuacaacu

SEQ ID NO: 2775067 - RNA, 19 nt, Artificial Sequence
  Description of Artificial Sequence: Synthetic oligonucleotide
ugucaacugugacaaaauc

SEQ ID NO: 2775068 - RNA, 19 nt, Artificial Sequence
  Description of Artificial Sequence: Synthetic oligonucleotide
acaaaaucacuuacaguuc

SEQ ID NO: 2775069 - RNA, 19 nt, Artificial Sequence
  Description of Artificial Sequence: Synthetic oligonucleotide
uguaguaugucuguauaua

SEQ ID NO: 2775070 - RNA, 19 nt, Artificial Sequence
  Description of Artificial Sequence: Synthetic oligonucleotide
auggaucucaaacguucac

SEQ ID NO: 2775071 - RNA, 19 nt, Artificial Sequence
  Description of Artificial Sequence: Synthetic oligonucleotide
cuuaucaaaauggaucuca

SEQ ID NO: 2775072 - RNA, 19 nt, Artificial Sequence
  Description of Artificial Sequence: Synthetic oligonucleotide
aaucacuuacaguuccuua

SEQ ID NO: 2775073 - RNA, 19 nt, Artificial Sequence
  Description of Artificial Sequence: Synthetic oligonucleotide
uauccaguacaucuagaau

SEQ ID NO: 2775074 - RNA, 19 nt, Artificial Sequence
  Description of Artificial Sequence: Synthetic oligonucleotide
uacuagucacauauucacu

SEQ ID NO: 2775075 - RNA, 19 nt, Artificial Sequence
  Description of Artificial Sequence: Synthetic oligonucleotide
uuacaguuccuuacaacua

SEQ ID NO: 2775076 - RNA, 19 nt, Artificial Sequence
  Description of Artificial Sequence: Synthetic oligonucleotide
gucucgugagcucuguuag

SEQ ID NO: 2775077 - RNA, 19 nt, Artificial Sequence
  Description of Artificial Sequence: Synthetic oligonucleotide
ugagcuuuacuagucacau

SEQ ID NO: 2775078 - RNA, 19 nt, Artificial Sequence
  Description of Artificial Sequence: Synthetic oligonucleotide
uagaugcucccaauugggc

SEQ ID NO: 2775079 - RNA, 19 nt, Artificial Sequence
  Description of Artificial Sequence: Synthetic oligonucleotide
uggccuuccacgcacuucu

SEQ ID NO: 2775080 - RNA, 19 nt, Artificial Sequence
  Description of Artificial Sequence: Synthetic oligonucleotide
guaacuucuucacuucuuc

SEQ ID NO: 2775081 - RNA, 19 nt, Artificial Sequence
  Description of Artificial Sequence: Synthetic oligonucleotide
cauuuaacaggcugucuuc

SEQ ID NO: 2775082 - RNA, 19 nt, Artificial Sequence
  Description of Artificial Sequence: Synthetic oligonucleotide
acgcacuucucguuuacag

SEQ ID NO: 2775083 - RNA, 19 nt, Artificial Sequence
  Description of Artificial Sequence: Synthetic oligonucleotide
guaccaguaacuucuucac

SEQ ID NO: 2775084 - RNA, 19 nt, Artificial Sequence
  Description of Artificial Sequence: Synthetic oligonucleotide
guuuacaguccccaaguca

SEQ ID NO: 2775085 - RNA, 19 nt, Artificial Sequence
  Description of Artificial Sequence: Synthetic oligonucleotide
agucacagugucucgugag

SEQ ID NO: 2775086 - RNA, 19 nt, Artificial Sequence
  Description of Artificial Sequence: Synthetic oligonucleotide
aucuaccaauauugcauuc

SEQ ID NO: 2775087 - RNA, 19 nt, Artificial Sequence
  Description of Artificial Sequence: Synthetic oligonucleotide
gaaucuaccaauauugcau

SEQ ID NO: 2775088 - RNA, 19 nt, Artificial Sequence
  Description of Artificial Sequence: Synthetic oligonucleotide
ucucaaacguucacuuacu

SEQ ID NO: 2775089 - RNA, 19 nt, Artificial Sequence
  Description of Artificial Sequence: Synthetic oligonucleotide
acguucacuuacuacaaaa

SEQ ID NO: 2775090 - RNA, 19 nt, Artificial Sequence
  Description of Artificial Sequence: Synthetic oligonucleotide
gucaacugugacaaaauca

SEQ ID NO: 2775091 - RNA, 19 nt, Artificial Sequence
  Description of Artificial Sequence: Synthetic oligonucleotide
ucagcugcagguaccagua

SEQ ID NO: 2775092 - RNA, 19 nt, Artificial Sequence
  Description of Artificial Sequence: Synthetic oligonucleotide
guucugagcaucuuccaca

SEQ ID NO: 2775093 - RNA, 19 nt, Artificial Sequence
  Description of Artificial Sequence: Synthetic oligonucleotide
gguaccaguaacuucuuca

SEQ ID NO: 2775094 - RNA, 19 nt, Artificial Sequence
  Description of Artificial Sequence: Synthetic oligonucleotide
cucguuuacaguccccaag

SEQ ID NO: 2775095 - RNA, 19 nt, Artificial Sequence
  Description of Artificial Sequence: Synthetic oligonucleotide
caggacacuuaaauaugcc

SEQ ID NO: 2775096 - RNA, 19 nt, Artificial Sequence
  Description of Artificial Sequence: Synthetic oligonucleotide
uagucacauauucacugaa

SEQ ID NO: 2775097 - RNA, 19 nt, Artificial Sequence
  Description of Artificial Sequence: Synthetic oligonucleotide
acugugacaaaaucacuua

SEQ ID NO: 2775098 - RNA, 19 nt, Artificial Sequence
  Description of Artificial Sequence: Synthetic oligonucleotide
cugugacaaaaucacuuac

SEQ ID NO: 2775099 - RNA, 19 nt, Artificial Sequence
  Description of Artificial Sequence: Synthetic oligonucleotide
guuagaagcagucguagcu

SEQ ID NO: 2775100 - RNA, 19 nt, Artificial Sequence
  Description of Artificial Sequence: Synthetic oligonucleotide
cacugaagugccuuucuug

SEQ ID NO: 2775101 - RNA, 19 nt, Artificial Sequence
  Description of Artificial Sequence: Synthetic oligonucleotide
ucccaauugggcuugccuc

SEQ ID NO: 2775102 - RNA, 19 nt, Artificial Sequence
  Description of Artificial Sequence: Synthetic oligonucleotide
acuguaguaugucuguaua

SEQ ID NO: 2775103 - RNA, 19 nt, Artificial Sequence
  Description of Artificial Sequence: Synthetic oligonucleotide
gcauucauuucaaacaggc

SEQ ID NO: 2775104 - RNA, 19 nt, Artificial Sequence
  Description of Artificial Sequence: Synthetic oligonucleotide
ugagcucuguuagaagcag

SEQ ID NO: 2775105 - RNA, 19 nt, Artificial Sequence
  Description of Artificial Sequence: Synthetic oligonucleotide
auguaaaucuucauuuaga

SEQ ID NO: 2775106 - RNA, 19 nt, Artificial Sequence
  Description of Artificial Sequence: Synthetic oligonucleotide
cuauaaggucaguuacagc

SEQ ID NO: 2775107 - RNA, 19 nt, Artificial Sequence
  Description of Artificial Sequence: Synthetic oligonucleotide
aagucacagugucucguga

SEQ ID NO: 2775108 - RNA, 19 nt, Artificial Sequence
  Description of Artificial Sequence: Synthetic oligonucleotide
auuaguacauguaaaucuu

SEQ ID NO: 2775109 - RNA, 19 nt, Artificial Sequence
  Description of Artificial Sequence: Synthetic oligonucleotide
agcucuguuagaagcaguc

SEQ ID NO: 2775110 - RNA, 19 nt, Artificial Sequence
  Description of Artificial Sequence: Synthetic oligonucleotide
ucguagcugagcuuuacua

SEQ ID NO: 2775111 - RNA, 19 nt, Artificial Sequence
  Description of Artificial Sequence: Synthetic oligonucleotide
cacagguaugucaacugug

SEQ ID NO: 2775112 - RNA, 19 nt, Artificial Sequence
  Description of Artificial Sequence: Synthetic oligonucleotide
acauguaaaucuucauuua

SEQ ID NO: 2775113 - RNA, 19 nt, Artificial Sequence
  Description of Artificial Sequence: Synthetic oligonucleotide
uucucguuuacagucccca

SEQ ID NO: 2775114 - RNA, 19 nt, Artificial Sequence
  Description of Artificial Sequence: Synthetic oligonucleotide
gaagugccuuucuugcagc

SEQ ID NO: 2775115 - RNA, 19 nt, Artificial Sequence
  Description of Artificial Sequence: Synthetic oligonucleotide
uggaucucaaacguucacu

SEQ ID NO: 2775116 - RNA, 19 nt, Artificial Sequence
  Description of Artificial Sequence: Synthetic oligonucleotide
agugauuaguacauguaaa

SEQ ID NO: 2775117 - RNA, 19 nt, Artificial Sequence
  Description of Artificial Sequence: Synthetic oligonucleotide
acacagguaugucaacugu

SEQ ID NO: 2775118 - RNA, 19 nt, Artificial Sequence
  Description of Artificial Sequence: Synthetic oligonucleotide
gguaugucaacugugacaa

SEQ ID NO: 2775119 - RNA, 19 nt, Artificial Sequence
  Description of Artificial Sequence: Synthetic oligonucleotide
caaaauggaucucaaacgu

SEQ ID NO: 2775120 - RNA, 19 nt, Artificial Sequence
  Description of Artificial Sequence: Synthetic oligonucleotide
uacaacuauaaggucaguu

SEQ ID NO: 2775121 - RNA, 19 nt, Artificial Sequence
  Description of Artificial Sequence: Synthetic oligonucleotide
auaaggucaguuacagcag

SEQ ID NO: 2775122 - RNA, 19 nt, Artificial Sequence
  Description of Artificial Sequence: Synthetic oligonucleotide
uuacagcaggcuuaucaaa

SEQ ID NO: 2775123 - RNA, 19 nt, Artificial Sequence
  Description of Artificial Sequence: Synthetic oligonucleotide
gaagcagucguagcugagc

SEQ ID NO: 2775124 - RNA, 19 nt, Artificial Sequence
  Description of Artificial Sequence: Synthetic oligonucleotide
uaacaggcugucuucuccu

SEQ ID NO: 2775125 - RNA, 19 nt, Artificial Sequence
  Description of Artificial Sequence: Synthetic oligonucleotide
uuuaacaggcugucuucuc

SEQ ID NO: 2775126 - RNA, 19 nt, Artificial Sequence
  Description of Artificial Sequence: Synthetic oligonucleotide
cuguuagaagcagucguag

SEQ ID NO: 2775127 - RNA, 19 nt, Artificial Sequence
  Description of Artificial Sequence: Synthetic oligonucleotide
auuuaacaggcugucuucu

SEQ ID NO: 2775128 - RNA, 19 nt, Artificial Sequence
  Description of Artificial Sequence: Synthetic oligonucleotide
cacuucucguuuacagucc

SEQ ID NO: 2775129 - RNA, 19 nt, Artificial Sequence
  Description of Artificial Sequence: Synthetic oligonucleotide
uaccaguaacuucuucacu

SEQ ID NO: 2775130 - RNA, 19 nt, Artificial Sequence
  Description of Artificial Sequence: Synthetic oligonucleotide
ggacacuuaaauaugccac

SEQ ID NO: 2775131 - RNA, 19 nt, Artificial Sequence
  Description of Artificial Sequence: Synthetic oligonucleotide
uugggcuugccucuguuuu

SEQ ID NO: 2775132 - RNA, 19 nt, Artificial Sequence
  Description of Artificial Sequence: Synthetic oligonucleotide
aaaucacuuacaguuccuu

SEQ ID NO: 2775133 - RNA, 19 nt, Artificial Sequence
  Description of Artificial Sequence: Synthetic oligonucleotide
ucauuuagaugcucccaau

SEQ ID NO: 2775134 - RNA, 19 nt, Artificial Sequence
  Description of Artificial Sequence: Synthetic oligonucleotide
ugucucgugagcucuguua

SEQ ID NO: 2775135 - RNA, 19 nt, Artificial Sequence
  Description of Artificial Sequence: Synthetic oligonucleotide
aaacguucacuuacuacaa

SEQ ID NO: 2775136 - RNA, 19 nt, Artificial Sequence
  Description of Artificial Sequence: Synthetic oligonucleotide
caguccccaagucacagug

SEQ ID NO: 2775137 - RNA, 19 nt, Artificial Sequence
  Description of Artificial Sequence: Synthetic oligonucleotide
aaagcuuaagaaacacguu

SEQ ID NO: 2775138 - RNA, 19 nt, Artificial Sequence
  Description of Artificial Sequence: Synthetic oligonucleotide
uucuucaacugcucucuuc

SEQ ID NO: 2775139 - RNA, 19 nt, Artificial Sequence
  Description of Artificial Sequence: Synthetic oligonucleotide
ugcagguaccaguaacuuc

SEQ ID NO: 2775140 - RNA, 19 nt, Artificial Sequence
  Description of Artificial Sequence: Synthetic oligonucleotide
gucacagugucucgugagc

SEQ ID NO: 2775141 - RNA, 19 nt, Artificial Sequence
  Description of Artificial Sequence: Synthetic oligonucleotide
auauaugaaucuaccaaua

SEQ ID NO: 2775142 - RNA, 19 nt, Artificial Sequence
  Description of Artificial Sequence: Synthetic oligonucleotide
acagguaugucaacuguga

SEQ ID NO: 2775143 - RNA, 19 nt, Artificial Sequence
  Description of Artificial Sequence: Synthetic oligonucleotide
cacuucuucaacugcucuc

SEQ ID NO: 2775144 - RNA, 19 nt, Artificial Sequence
  Description of Artificial Sequence: Synthetic oligonucleotide
cuuccacagugauuaguac

SEQ ID NO: 2775145 - RNA, 19 nt, Artificial Sequence
  Description of Artificial Sequence: Synthetic oligonucleotide
uuacaguccccaagucaca

SEQ ID NO: 2775146 - RNA, 19 nt, Artificial Sequence
  Description of Artificial Sequence: Synthetic oligonucleotide
cagugauuaguacauguaa

SEQ ID NO: 2775147 - RNA, 19 nt, Artificial Sequence
  Description of Artificial Sequence: Synthetic oligonucleotide
uagcugagcuuuacuaguc

SEQ ID NO: 2775148 - RNA, 19 nt, Artificial Sequence
  Description of Artificial Sequence: Synthetic oligonucleotide
ucauuucaaacaggcuggc

SEQ ID NO: 2775149 - RNA, 19 nt, Artificial Sequence
  Description of Artificial Sequence: Synthetic oligonucleotide
agcuuaagaaacacguuaa

SEQ ID NO: 2775150 - RNA, 19 nt, Artificial Sequence
  Description of Artificial Sequence: Synthetic oligonucleotide
ucgugagcucuguuagaag

SEQ ID NO: 2775151 - RNA, 19 nt, Artificial Sequence
  Description of Artificial Sequence: Synthetic oligonucleotide
acagcaggcuuaucaaaau

SEQ ID NO: 2775152 - RNA, 19 nt, Artificial Sequence
  Description of Artificial Sequence: Synthetic oligonucleotide
gcacuucucguuuacaguc

SEQ ID NO: 2775153 - RNA, 19 nt, Artificial Sequence
  Description of Artificial Sequence: Synthetic oligonucleotide
agaaacacguuaaggcaca

SEQ ID NO: 2775154 - RNA, 19 nt, Artificial Sequence
  Description of Artificial Sequence: Synthetic oligonucleotide
aauugggcuugccucuguu

SEQ ID NO: 2775155 - RNA, 19 nt, Artificial Sequence
  Description of Artificial Sequence: Synthetic oligonucleotide
ucaguuacagcaggcuuau

SEQ ID NO: 2775156 - RNA, 19 nt, Artificial Sequence
  Description of Artificial Sequence: Synthetic oligonucleotide
uauucacugaagugccuuu

SEQ ID NO: 2775157 - RNA, 19 nt, Artificial Sequence
  Description of Artificial Sequence: Synthetic oligonucleotide
acaguacacacagguaugu

SEQ ID NO: 2775158 - RNA, 19 nt, Artificial Sequence
  Description of Artificial Sequence: Synthetic oligonucleotide
cagcaggcuuaucaaaaug

SEQ ID NO: 2775159 - RNA, 19 nt, Artificial Sequence
  Description of Artificial Sequence: Synthetic oligonucleotide
ggcuuaucaaaauggaucu

SEQ ID NO: 2775160 - RNA, 19 nt, Artificial Sequence
  Description of Artificial Sequence: Synthetic oligonucleotide
cuucaacugcucucuucag

SEQ ID NO: 2775161 - RNA, 19 nt, Artificial Sequence
  Description of Artificial Sequence: Synthetic oligonucleotide
acacguuaaggcacaguag

SEQ ID NO: 2775162 - RNA, 19 nt, Artificial Sequence
  Description of Artificial Sequence: Synthetic oligonucleotide
aaacacguuaaggcacagu

SEQ ID NO: 2775163 - RNA, 19 nt, Artificial Sequence
  Description of Artificial Sequence: Synthetic oligonucleotide
cacguuaaggcacaguagu

SEQ ID NO: 2775164 - RNA, 19 nt, Artificial Sequence
  Description of Artificial Sequence: Synthetic oligonucleotide
cuugcagcaggacacuuaa

SEQ ID NO: 2775165 - RNA, 19 nt, Artificial Sequence
  Description of Artificial Sequence: Synthetic oligonucleotide
cugagcuuuacuagucaca

SEQ ID NO: 2775166 - RNA, 19 nt, Artificial Sequence
  Description of Artificial Sequence: Synthetic oligonucleotide
agucguagcugagcuuuac

SEQ ID NO: 2775167 - RNA, 19 nt, Artificial Sequence
  Description of Artificial Sequence: Synthetic oligonucleotide
acacuuaaauaugccacau

SEQ ID NO: 2775168 - RNA, 19 nt, Artificial Sequence
  Description of Artificial Sequence: Synthetic oligonucleotide
cagguaugucaacugugac

SEQ ID NO: 2775169 - RNA, 19 nt, Artificial Sequence
  Description of Artificial Sequence: Synthetic oligonucleotide
cuucucguuuacagucccc

SEQ ID NO: 2775170 - RNA, 19 nt, Artificial Sequence
  Description of Artificial Sequence: Synthetic oligonucleotide
ucacugaagugccuuucuu

SEQ ID NO: 2775171 - RNA, 19 nt, Artificial Sequence
  Description of Artificial Sequence: Synthetic oligonucleotide
ugggcuugccucuguuuug

SEQ ID NO: 2775172 - RNA, 19 nt, Artificial Sequence
  Description of Artificial Sequence: Synthetic oligonucleotide
acuuacuacaaaagcuuaa

SEQ ID NO: 2775173 - RNA, 19 nt, Artificial Sequence
  Description of Artificial Sequence: Synthetic oligonucleotide
acagugucucgugagcucu

SEQ ID NO: 2775174 - RNA, 19 nt, Artificial Sequence
  Description of Artificial Sequence: Synthetic oligonucleotide
ccaauauugcauucauuuc

SEQ ID NO: 2775175 - RNA, 19 nt, Artificial Sequence
  Description of Artificial Sequence: Synthetic oligonucleotide
gaaacacguuaaggcacag

SEQ ID NO: 2775176 - RNA, 19 nt, Artificial Sequence
  Description of Artificial Sequence: Synthetic oligonucleotide
cuucacuucuucaacugcu

SEQ ID NO: 2775177 - RNA, 19 nt, Artificial Sequence
  Description of Artificial Sequence: Synthetic oligonucleotide
gaucucaaacguucacuua

SEQ ID NO: 2775178 - RNA, 19 nt, Artificial Sequence
  Description of Artificial Sequence: Synthetic oligonucleotide
ucucgugagcucuguuaga

SEQ ID NO: 2775179 - RNA, 19 nt, Artificial Sequence
  Description of Artificial Sequence: Synthetic oligonucleotide
ucucguuuacaguccccaa

SEQ ID NO: 2775180 - RNA, 19 nt, Artificial Sequence
  Description of Artificial Sequence: Synthetic oligonucleotide
cucuguuagaagcagucgu

SEQ ID NO: 2775181 - RNA, 19 nt, Artificial Sequence
  Description of Artificial Sequence: Synthetic oligonucleotide
uuucuugcagcaggacacu

SEQ ID NO: 2775182 - RNA, 19 nt, Artificial Sequence
  Description of Artificial Sequence: Synthetic oligonucleotide
cuucauuuagaugcuccca

SEQ ID NO: 2775183 - RNA, 19 nt, Artificial Sequence
  Description of Artificial Sequence: Synthetic oligonucleotide
gcaggacacuuaaauaugc

SEQ ID NO: 2775184 - RNA, 19 nt, Artificial Sequence
  Description of Artificial Sequence: Synthetic oligonucleotide
ucugcucuguucugagcau

SEQ ID NO: 2775185 - RNA, 19 nt, Artificial Sequence
  Description of Artificial Sequence: Synthetic oligonucleotide
guuaaggcacaguaguuuu

SEQ ID NO: 2775186 - RNA, 19 nt, Artificial Sequence
  Description of Artificial Sequence: Synthetic oligonucleotide
acagugauuaguacaugua

SEQ ID NO: 2775187 - RNA, 19 nt, Artificial Sequence
  Description of Artificial Sequence: Synthetic oligonucleotide
gucuguauauaugaaucua

SEQ ID NO: 2775188 - RNA, 19 nt, Artificial Sequence
  Description of Artificial Sequence: Synthetic oligonucleotide
cacagugucucgugagcuc

SEQ ID NO: 2775189 - RNA, 19 nt, Artificial Sequence
  Description of Artificial Sequence: Synthetic oligonucleotide
caguuccuuacaacuauaa

SEQ ID NO: 2775190 - RNA, 19 nt, Artificial Sequence
  Description of Artificial Sequence: Synthetic oligonucleotide
gcugagcuuuacuagucac

SEQ ID NO: 2775191 - RNA, 19 nt, Artificial Sequence
  Description of Artificial Sequence: Synthetic oligonucleotide
uaacuguaguaugucugua

SEQ ID NO: 2775192 - RNA, 19 nt, Artificial Sequence
  Description of Artificial Sequence: Synthetic oligonucleotide
gucaguuacagcaggcuua

SEQ ID NO: 2775193 - RNA, 19 nt, Artificial Sequence
  Description of Artificial Sequence: Synthetic oligonucleotide
augucaacugugacaaaau

SEQ ID NO: 2775194 - RNA, 19 nt, Artificial Sequence
  Description of Artificial Sequence: Synthetic oligonucleotide
gcagguaccaguaacuucu

SEQ ID NO: 2775195 - RNA, 19 nt, Artificial Sequence
  Description of Artificial Sequence: Synthetic oligonucleotide
cauucauuucaaacaggcu

SEQ ID NO: 2775196 - RNA, 19 nt, Artificial Sequence
  Description of Artificial Sequence: Synthetic oligonucleotide
caucuagaauacauccucu

SEQ ID NO: 2775197 - RNA, 19 nt, Artificial Sequence
  Description of Artificial Sequence: Synthetic oligonucleotide
cuccuacaguacacacagg

SEQ ID NO: 2775198 - RNA, 19 nt, Artificial Sequence
  Description of Artificial Sequence: Synthetic oligonucleotide
cugaagugccuuucuugca

SEQ ID NO: 2775199 - RNA, 19 nt, Artificial Sequence
  Description of Artificial Sequence: Synthetic oligonucleotide
caucuuccacagugauuag

SEQ ID NO: 2775200 - RNA, 19 nt, Artificial Sequence
  Description of Artificial Sequence: Synthetic oligonucleotide
uucaaacaggcuggccuuc

SEQ ID NO: 2775201 - RNA, 19 nt, Artificial Sequence
  Description of Artificial Sequence: Synthetic oligonucleotide
agaagcagucguagcugag

SEQ ID NO: 2775202 - RNA, 19 nt, Artificial Sequence
  Description of Artificial Sequence: Synthetic oligonucleotide
guccuggccuccuacagua

SEQ ID NO: 2775203 - RNA, 19 nt, Artificial Sequence
  Description of Artificial Sequence: Synthetic oligonucleotide
ccaguaacuucuucacuuc

SEQ ID NO: 2775204 - RNA, 19 nt, Artificial Sequence
  Description of Artificial Sequence: Synthetic oligonucleotide
cauguccuggccuccuaca

SEQ ID NO: 2775205 - RNA, 19 nt, Artificial Sequence
  Description of Artificial Sequence: Synthetic oligonucleotide
cucgugagcucuguuagaa

SEQ ID NO: 2775206 - RNA, 19 nt, Artificial Sequence
  Description of Artificial Sequence: Synthetic oligonucleotide
cuguucugagcaucuucca

SEQ ID NO: 2775207 - RNA, 19 nt, Artificial Sequence
  Description of Artificial Sequence: Synthetic oligonucleotide
gccuuccacgcacuucucg

SEQ ID NO: 2775208 - RNA, 19 nt, Artificial Sequence
  Description of Artificial Sequence: Synthetic oligonucleotide
uuacaacuauaaggucagu

SEQ ID NO: 2775209 - RNA, 19 nt, Artificial Sequence
  Description of Artificial Sequence: Synthetic oligonucleotide
cacuuacaguuccuuacaa

SEQ ID NO: 2775210 - RNA, 19 nt, Artificial Sequence
  Description of Artificial Sequence: Synthetic oligonucleotide
ugcucucuucagcuugauu

SEQ ID NO: 2775211 - RNA, 19 nt, Artificial Sequence
  Description of Artificial Sequence: Synthetic oligonucleotide
uggccuccuacaguacaca

SEQ ID NO: 2775212 - RNA, 19 nt, Artificial Sequence
  Description of Artificial Sequence: Synthetic oligonucleotide
cuaccaauauugcauucau

SEQ ID NO: 2775213 - RNA, 19 nt, Artificial Sequence
  Description of Artificial Sequence: Synthetic oligonucleotide
ccuuucuugcagcaggaca

SEQ ID NO: 2775214 - RNA, 19 nt, Artificial Sequence
  Description of Artificial Sequence: Synthetic oligonucleotide
cucaaacguucacuuacua

SEQ ID NO: 2775215 - RNA, 19 nt, Artificial Sequence
  Description of Artificial Sequence: Synthetic oligonucleotide
cuguaguaugucuguauau

SEQ ID NO: 2775216 - RNA, 19 nt, Artificial Sequence
  Description of Artificial Sequence: Synthetic oligonucleotide
ggaucucaaacguucacuu

SEQ ID NO: 2775217 - RNA, 19 nt, Artificial Sequence
  Description of Artificial Sequence: Synthetic oligonucleotide
gcaggcuuaucaaaaugga

SEQ ID NO: 2775218 - RNA, 19 nt, Artificial Sequence
  Description of Artificial Sequence: Synthetic oligonucleotide
caggcuuaucaaaauggau

SEQ ID NO: 2775219 - RNA, 19 nt, Artificial Sequence
  Description of Artificial Sequence: Synthetic oligonucleotide
uccuggccuccuacaguac

SEQ ID NO: 2775220 - RNA, 19 nt, Artificial Sequence
  Description of Artificial Sequence: Synthetic oligonucleotide
caacugugacaaaaucacu

SEQ ID NO: 2775221 - RNA, 19 nt, Artificial Sequence
  Description of Artificial Sequence: Synthetic oligonucleotide
cccaagucacagugucucg

SEQ ID NO: 2775222 - RNA, 19 nt, Artificial Sequence
  Description of Artificial Sequence: Synthetic oligonucleotide
cugcucuguucugagcauc

SEQ ID NO: 2775223 - RNA, 19 nt, Artificial Sequence
  Description of Artificial Sequence: Synthetic oligonucleotide
agcagucguagcugagcuu

SEQ ID NO: 2775224 - RNA, 19 nt, Artificial Sequence
  Description of Artificial Sequence: Synthetic oligonucleotide
cagugucucgugagcucug

SEQ ID NO: 2775225 - RNA, 19 nt, Artificial Sequence
  Description of Artificial Sequence: Synthetic oligonucleotide
acguuaaggcacaguaguu

SEQ ID NO: 2775226 - RNA, 19 nt, Artificial Sequence
  Description of Artificial Sequence: Synthetic oligonucleotide
uucuugcagcaggacacuu

SEQ ID NO: 2775227 - RNA, 19 nt, Artificial Sequence
  Description of Artificial Sequence: Synthetic oligonucleotide
acaguuccuuacaacuaua

SEQ ID NO: 2775228 - RNA, 19 nt, Artificial Sequence
  Description of Artificial Sequence: Synthetic oligonucleotide
ggccuccuacaguacacac

SEQ ID NO: 2775229 - RNA, 19 nt, Artificial Sequence
  Description of Artificial Sequence: Synthetic oligonucleotide
gucguagcugagcuuuacu

SEQ ID NO: 2775230 - RNA, 19 nt, Artificial Sequence
  Description of Artificial Sequence: Synthetic oligonucleotide
ccccaagucacagugucuc

SEQ ID NO: 2775231 - RNA, 19 nt, Artificial Sequence
  Description of Artificial Sequence: Synthetic oligonucleotide
cucccaauugggcuugccu

SEQ ID NO: 2775232 - RNA, 19 nt, Artificial Sequence
  Description of Artificial Sequence: Synthetic oligonucleotide
aguccccaagucacagugu

SEQ ID NO: 2775233 - RNA, 19 nt, Artificial Sequence
  Description of Artificial Sequence: Synthetic oligonucleotide
gcuuaucaaaauggaucuc

SEQ ID NO: 2775234 - RNA, 19 nt, Artificial Sequence
  Description of Artificial Sequence: Synthetic oligonucleotide
gccacauuuaacaggcugu

SEQ ID NO: 2775235 - RNA, 19 nt, Artificial Sequence
  Description of Artificial Sequence: Synthetic oligonucleotide
ugccauguccuggccuccu

SEQ ID NO: 2775236 - RNA, 19 nt, Artificial Sequence
  Description of Artificial Sequence: Synthetic oligonucleotide
guaugucaacugugacaaa

SEQ ID NO: 2775237 - RNA, 19 nt, Artificial Sequence
  Description of Artificial Sequence: Synthetic oligonucleotide
ggucaguuacagcaggcuu

SEQ ID NO: 2775238 - RNA, 19 nt, Artificial Sequence
  Description of Artificial Sequence: Synthetic oligonucleotide
ccauguccuggccuccuac

SEQ ID NO: 2775239 - RNA, 19 nt, Artificial Sequence
  Description of Artificial Sequence: Synthetic oligonucleotide
cacauuuaacaggcugucu

SEQ ID NO: 2775240 - RNA, 19 nt, Artificial Sequence
  Description of Artificial Sequence: Synthetic oligonucleotide
gcugcagguaccaguaacu

SEQ ID NO: 2775241 - RNA, 19 nt, Artificial Sequence
  Description of Artificial Sequence: Synthetic oligonucleotide
gagcucuguuagaagcagu

SEQ ID NO: 2775242 - RNA, 19 nt, Artificial Sequence
  Description of Artificial Sequence: Synthetic oligonucleotide
gccuccuacaguacacaca

SEQ ID NO: 2775243 - RNA, 19 nt, Artificial Sequence
  Description of Artificial Sequence: Synthetic oligonucleotide
cguuuacaguccccaaguc

SEQ ID NO: 2775244 - RNA, 19 nt, Artificial Sequence
  Description of Artificial Sequence: Synthetic oligonucleotide
gcagucguagcugagcuuu

SEQ ID NO: 2775245 - RNA, 19 nt, Artificial Sequence
  Description of Artificial Sequence: Synthetic oligonucleotide
cacgcacuucucguuuaca

SEQ ID NO: 2775246 - RNA, 19 nt, Artificial Sequence
  Description of Artificial Sequence: Synthetic oligonucleotide
ccuggccuccuacaguaca

SEQ ID NO: 2775247 - RNA, 19 nt, Artificial Sequence
  Description of Artificial Sequence: Synthetic oligonucleotide
ugcucccaauugggcuugc

SEQ ID NO: 2775248 - RNA, 19 nt, Artificial Sequence
  Description of Artificial Sequence: Synthetic oligonucleotide
augccacauuuaacaggcu

SEQ ID NO: 2775249 - RNA, 19 nt, Artificial Sequence
  Description of Artificial Sequence: Synthetic oligonucleotide
ccaauugggcuugccucug

SEQ ID NO: 2775250 - RNA, 19 nt, Artificial Sequence
  Description of Artificial Sequence: Synthetic oligonucleotide
ccacgcacuucucguuuac

SEQ ID NO: 2775251 - RNA, 19 nt, Artificial Sequence
  Description of Artificial Sequence: Synthetic oligonucleotide
cuuccacgcacuucucguu

SEQ ID NO: 2775252 - RNA, 19 nt, Artificial Sequence
  Description of Artificial Sequence: Synthetic oligonucleotide
ccuuccacgcacuucucgu

SEQ ID NO: 2775253 - RNA, 19 nt, Artificial Sequence
  Description of Artificial Sequence: Synthetic oligonucleotide
cccaauugggcuugccucu

SEQ ID NO: 2775254 - RNA, 19 nt, Artificial Sequence
  Description of Artificial Sequence: Synthetic oligonucleotide
cagucguagcugagcuuua

SEQ ID NO: 2775255 - RNA, 19 nt, Artificial Sequence
  Description of Artificial Sequence: Synthetic oligonucleotide
caauugggcuugccucugu

SEQ ID NO: 2775256 - RNA, 19 nt, Artificial Sequence
  Description of Artificial Sequence: Synthetic oligonucleotide
cugcagguaccaguaacuu

SEQ ID NO: 2775257 - RNA, 19 nt, Artificial Sequence
  Description of Artificial Sequence: Synthetic oligonucleotide
caguuacagcaggcuuauc

SEQ ID NO: 2775258 - RNA, 19 nt, Artificial Sequence
  Description of Artificial Sequence: Synthetic oligonucleotide
gcucccaauugggcuugcc

SEQ ID NO: 2775259 - RNA, 19 nt, Artificial Sequence
  Description of Artificial Sequence: Synthetic oligonucleotide
cagcugcagguaccaguaa

SEQ ID NO: 2775260 - RNA, 19 nt, Artificial Sequence
  Description of Artificial Sequence: Synthetic oligonucleotide
ccaguacaucuagaauaca

SEQ ID NO: 2775261 - RNA, 19 nt, Artificial Sequence
  Description of Artificial Sequence: Synthetic oligonucleotide
gggcuugccucuguuuugu

SEQ ID NO: 2775262 - RNA, 19 nt, Artificial Sequence
  Description of Artificial Sequence: Synthetic oligonucleotide
cagguaccaguaacuucuu

SEQ ID NO: 2775263 - RNA, 19 nt, Artificial Sequence
  Description of Artificial Sequence: Synthetic oligonucleotide
cguuaaggcacaguaguuu

SEQ ID NO: 2775264 - RNA, 19 nt, Artificial Sequence
  Description of Artificial Sequence: Synthetic oligonucleotide
gcuuuacuagucacauauu

SEQ ID NO: 2775265 - RNA, 19 nt, Artificial Sequence
  Description of Artificial Sequence: Synthetic oligonucleotide
gccauguccuggccuccua

SEQ ID NO: 2775266 - RNA, 19 nt, Artificial Sequence
  Description of Artificial Sequence: Synthetic oligonucleotide
ggccuuccacgcacuucuc

SEQ ID NO: 2775267 - RNA, 19 nt, Artificial Sequence
  Description of Artificial Sequence: Synthetic oligonucleotide
gcuggccuuccacgcacuu

SEQ ID NO: 2775268 - RNA, 19 nt, Artificial Sequence
  Description of Artificial Sequence: Synthetic oligonucleotide
cugcucucuucagcuugau

SEQ ID NO: 2775269 - RNA, 19 nt, Artificial Sequence
  Description of Artificial Sequence: Synthetic oligonucleotide
ggcuugccucuguuuuguu

SEQ ID NO: 2775270 - RNA, 19 nt, Artificial Sequence
  Description of Artificial Sequence: Synthetic oligonucleotide
aaaccuacaaucuugccuc

SEQ ID NO: 2775271 - RNA, 19 nt, Artificial Sequence
  Description of Artificial Sequence: Synthetic oligonucleotide
auucaucucaaauaaggcc

SEQ ID NO: 2775272 - RNA, 19 nt, Artificial Sequence
  Description of Artificial Sequence: Synthetic oligonucleotide
aauaaggccacauccaucu

SEQ ID NO: 2775273 - RNA, 19 nt, Artificial Sequence
  Description of Artificial Sequence: Synthetic oligonucleotide
ugaacuuggucuaacaaag

SEQ ID NO: 2775274 - RNA, 19 nt, Artificial Sequence
  Description of Artificial Sequence: Synthetic oligonucleotide
uauugaagcgaucaacugg

SEQ ID NO: 2775275 - RNA, 19 nt, Artificial Sequence
  Description of Artificial Sequence: Synthetic oligonucleotide
uuuauguugucuaugguga

SEQ ID NO: 2775276 - RNA, 19 nt, Artificial Sequence
  Description of Artificial Sequence: Synthetic oligonucleotide
ucuaaaaccuacaaucuug

SEQ ID NO: 2775277 - RNA, 19 nt, Artificial Sequence
  Description of Artificial Sequence: Synthetic oligonucleotide
aaaaccuacaaucuugccu

SEQ ID NO: 2775278 - RNA, 19 nt, Artificial Sequence
  Description of Artificial Sequence: Synthetic oligonucleotide
aacuuggucuaacaaaggg

SEQ ID NO: 2775279 - RNA, 19 nt, Artificial Sequence
  Description of Artificial Sequence: Synthetic oligonucleotide
uuuugaaucugacugauuc

SEQ ID NO: 2775280 - RNA, 19 nt, Artificial Sequence
  Description of Artificial Sequence: Synthetic oligonucleotide
uucaucucaaauaaggcca

SEQ ID NO: 2775281 - RNA, 19 nt, Artificial Sequence
  Description of Artificial Sequence: Synthetic oligonucleotide
ucuauggugacuucagagg

SEQ ID NO: 2775282 - RNA, 19 nt, Artificial Sequence
  Description of Artificial Sequence: Synthetic oligonucleotide
cucaaauaaggccacaucc

SEQ ID NO: 2775283 - RNA, 19 nt, Artificial Sequence
  Description of Artificial Sequence: Synthetic oligonucleotide
cugucuaaaaccuacaauc

SEQ ID NO: 2775284 - RNA, 19 nt, Artificial Sequence
  Description of Artificial Sequence: Synthetic oligonucleotide
agcaacuggucccagauac

SEQ ID NO: 2775285 - RNA, 19 nt, Artificial Sequence
  Description of Artificial Sequence: Synthetic oligonucleotide
acuguucucagacccaucc

SEQ ID NO: 2775286 - RNA, 19 nt, Artificial Sequence
  Description of Artificial Sequence: Synthetic oligonucleotide
aucuguaugauguuuccgg

SEQ ID NO: 2775287 - RNA, 19 nt, Artificial Sequence
  Description of Artificial Sequence: Synthetic oligonucleotide
aauauugaagcgaucaacu

SEQ ID NO: 2775288 - RNA, 19 nt, Artificial Sequence
  Description of Artificial Sequence: Synthetic oligonucleotide
ugggaugaggcuuagagcu

SEQ ID NO: 2775289 - RNA, 19 nt, Artificial Sequence
  Description of Artificial Sequence: Synthetic oligonucleotide
uucaauauugaagcgauca

SEQ ID NO: 2775290 - RNA, 19 nt, Artificial Sequence
  Description of Artificial Sequence: Synthetic oligonucleotide
gaagcgaucaacuggagca

SEQ ID NO: 2775291 - RNA, 19 nt, Artificial Sequence
  Description of Artificial Sequence: Synthetic oligonucleotide
ucaauauuuucaauauuga

SEQ ID NO: 2775292 - RNA, 19 nt, Artificial Sequence
  Description of Artificial Sequence: Synthetic oligonucleotide
cuuuauguugucuauggug

SEQ ID NO: 2775293 - RNA, 19 nt, Artificial Sequence
  Description of Artificial Sequence: Synthetic oligonucleotide
uuuucaauauugaagcgau

SEQ ID NO: 2775294 - RNA, 19 nt, Artificial Sequence
  Description of Artificial Sequence: Synthetic oligonucleotide
uauuuucaauauugaagcg

SEQ ID NO: 2775295 - RNA, 19 nt, Artificial Sequence
  Description of Artificial Sequence: Synthetic oligonucleotide
uguaugauguuuccggaug

SEQ ID NO: 2775296 - RNA, 19 nt, Artificial Sequence
  Description of Artificial Sequence: Synthetic oligonucleotide
agcuuuauguugucuaugg

SEQ ID NO: 2775297 - RNA, 19 nt, Artificial Sequence
  Description of Artificial Sequence: Synthetic oligonucleotide
ucugcauccgaacuguuug

SEQ ID NO: 2775298 - RNA, 19 nt, Artificial Sequence
  Description of Artificial Sequence: Synthetic oligonucleotide
agagcugauaagcaacugg

SEQ ID NO: 2775299 - RNA, 19 nt, Artificial Sequence
  Description of Artificial Sequence: Synthetic oligonucleotide
acuuccugaauccuggcuc

SEQ ID NO: 2775300 - RNA, 19 nt, Artificial Sequence
  Description of Artificial Sequence: Synthetic oligonucleotide
cuauggugacuucagaggg

SEQ ID NO: 2775301 - RNA, 19 nt, Artificial Sequence
  Description of Artificial Sequence: Synthetic oligonucleotide
cuaaaaccuacaaucuugc

SEQ ID NO: 2775302 - RNA, 19 nt, Artificial Sequence
  Description of Artificial Sequence: Synthetic oligonucleotide
ugucuaaaaccuacaaucu

SEQ ID NO: 2775303 - RNA, 19 nt, Artificial Sequence
  Description of Artificial Sequence: Synthetic oligonucleotide
aaucugacugauucaucuc

SEQ ID NO: 2775304 - RNA, 19 nt, Artificial Sequence
  Description of Artificial Sequence: Synthetic oligonucleotide
ugggagaaaggccugaacu

SEQ ID NO: 2775305 - RNA, 19 nt, Artificial Sequence
  Description of Artificial Sequence: Synthetic oligonucleotide
cuuagagcugauaagcaac

SEQ ID NO: 2775306 - RNA, 19 nt, Artificial Sequence
  Description of Artificial Sequence: Synthetic oligonucleotide
uguggaagcuuuauguugu

SEQ ID NO: 2775307 - RNA, 19 nt, Artificial Sequence
  Description of Artificial Sequence: Synthetic oligonucleotide
cuuuucauuugccugggcc

SEQ ID NO: 2775308 - RNA, 19 nt, Artificial Sequence
  Description of Artificial Sequence: Synthetic oligonucleotide
ugaggcuuagagcugauaa

SEQ ID NO: 2775309 - RNA, 19 nt, Artificial Sequence
  Description of Artificial Sequence: Synthetic oligonucleotide
aggcuuagagcugauaagc

SEQ ID NO: 2775310 - RNA, 19 nt, Artificial Sequence
  Description of Artificial Sequence: Synthetic oligonucleotide
aucaacuggagcaacugcc

SEQ ID NO: 2775311 - RNA, 19 nt, Artificial Sequence
  Description of Artificial Sequence: Synthetic oligonucleotide
acuuggucuaacaaagggc

SEQ ID NO: 2775312 - RNA, 19 nt, Artificial Sequence
  Description of Artificial Sequence: Synthetic oligonucleotide
cugauaagcaacugguccc

SEQ ID NO: 2775313 - RNA, 19 nt, Artificial Sequence
  Description of Artificial Sequence: Synthetic oligonucleotide
ucuaacaaagggcuccucu

SEQ ID NO: 2775314 - RNA, 19 nt, Artificial Sequence
  Description of Artificial Sequence: Synthetic oligonucleotide
aacuguuugaagaguagag

SEQ ID NO: 2775315 - RNA, 19 nt, Artificial Sequence
  Description of Artificial Sequence: Synthetic oligonucleotide
ugauguuuccggauguccc

SEQ ID NO: 2775316 - RNA, 19 nt, Artificial Sequence
  Description of Artificial Sequence: Synthetic oligonucleotide
gauucaucucaaauaaggc

SEQ ID NO: 2775317 - RNA, 19 nt, Artificial Sequence
  Description of Artificial Sequence: Synthetic oligonucleotide
uggucuaucucacuguuuc

SEQ ID NO: 2775318 - RNA, 19 nt, Artificial Sequence
  Description of Artificial Sequence: Synthetic oligonucleotide
guagcuuuucauuugccug

SEQ ID NO: 2775319 - RNA, 19 nt, Artificial Sequence
  Description of Artificial Sequence: Synthetic oligonucleotide
uauggugacuucagagggg

SEQ ID NO: 2775320 - RNA, 19 nt, Artificial Sequence
  Description of Artificial Sequence: Synthetic oligonucleotide
acuguuugaagaguagagg

SEQ ID NO: 2775321 - RNA, 19 nt, Artificial Sequence
  Description of Artificial Sequence: Synthetic oligonucleotide
auuuucaauauugaagcga

SEQ ID NO: 2775322 - RNA, 19 nt, Artificial Sequence
  Description of Artificial Sequence: Synthetic oligonucleotide
gucuauggugacuucagag

SEQ ID NO: 2775323 - RNA, 19 nt, Artificial Sequence
  Description of Artificial Sequence: Synthetic oligonucleotide
uuagagcugauaagcaacu

SEQ ID NO: 2775324 - RNA, 19 nt, Artificial Sequence
  Description of Artificial Sequence: Synthetic oligonucleotide
uggagcaacugccauuucc

SEQ ID NO: 2775325 - RNA, 19 nt, Artificial Sequence
  Description of Artificial Sequence: Synthetic oligonucleotide
uaacaaagggcuccucugc

SEQ ID NO: 2775326 - RNA, 19 nt, Artificial Sequence
  Description of Artificial Sequence: Synthetic oligonucleotide
auauugaagcgaucaacug

SEQ ID NO: 2775327 - RNA, 19 nt, Artificial Sequence
  Description of Artificial Sequence: Synthetic oligonucleotide
uugucuauggugacuucag

SEQ ID NO: 2775328 - RNA, 19 nt, Artificial Sequence
  Description of Artificial Sequence: Synthetic oligonucleotide
uguuugaagaguagagguc

SEQ ID NO: 2775329 - RNA, 19 nt, Artificial Sequence
  Description of Artificial Sequence: Synthetic oligonucleotide
uacguagcuuuucauuugc

SEQ ID NO: 2775330 - RNA, 19 nt, Artificial Sequence
  Description of Artificial Sequence: Synthetic oligonucleotide
ugaagcgaucaacuggagc

SEQ ID NO: 2775331 - RNA, 19 nt, Artificial Sequence
  Description of Artificial Sequence: Synthetic oligonucleotide
cauuugugggagaaaggcc

SEQ ID NO: 2775332 - RNA, 19 nt, Artificial Sequence
  Description of Artificial Sequence: Synthetic oligonucleotide
ucacgguuggucuaucuca

SEQ ID NO: 2775333 - RNA, 19 nt, Artificial Sequence
  Description of Artificial Sequence: Synthetic oligonucleotide
ucaauauugaagcgaucaa

SEQ ID NO: 2775334 - RNA, 19 nt, Artificial Sequence
  Description of Artificial Sequence: Synthetic oligonucleotide
ugaauccuggcucccugcg

SEQ ID NO: 2775335 - RNA, 19 nt, Artificial Sequence
  Description of Artificial Sequence: Synthetic oligonucleotide
ugacugauucaucucaaau

SEQ ID NO: 2775336 - RNA, 19 nt, Artificial Sequence
  Description of Artificial Sequence: Synthetic oligonucleotide
uaagcaacuggucccagau

SEQ ID NO: 2775337 - RNA, 19 nt, Artificial Sequence
  Description of Artificial Sequence: Synthetic oligonucleotide
gcugauaagcaacuggucc

SEQ ID NO: 2775338 - RNA, 19 nt, Artificial Sequence
  Description of Artificial Sequence: Synthetic oligonucleotide
ucaacuggagcaacugcca

SEQ ID NO: 2775339 - RNA, 19 nt, Artificial Sequence
  Description of Artificial Sequence: Synthetic oligonucleotide
cuaacaaagggcuccucug

SEQ ID NO: 2775340 - RNA, 19 nt, Artificial Sequence
  Description of Artificial Sequence: Synthetic oligonucleotide
gaaucugacugauucaucu

SEQ ID NO: 2775341 - RNA, 19 nt, Artificial Sequence
  Description of Artificial Sequence: Synthetic oligonucleotide
aucugacugauucaucuca

SEQ ID NO: 2775342 - RNA, 19 nt, Artificial Sequence
  Description of Artificial Sequence: Synthetic oligonucleotide
ucuguaugauguuuccgga

SEQ ID NO: 2775343 - RNA, 19 nt, Artificial Sequence
  Description of Artificial Sequence: Synthetic oligonucleotide
auugaagcgaucaacugga

SEQ ID NO: 2775344 - RNA, 19 nt, Artificial Sequence
  Description of Artificial Sequence: Synthetic oligonucleotide
ugaagaguagaggucuucc

SEQ ID NO: 2775345 - RNA, 19 nt, Artificial Sequence
  Description of Artificial Sequence: Synthetic oligonucleotide
uuacguagcuuuucauuug

SEQ ID NO: 2775346 - RNA, 19 nt, Artificial Sequence
  Description of Artificial Sequence: Synthetic oligonucleotide
uggucuaacaaagggcucc

SEQ ID NO: 2775347 - RNA, 19 nt, Artificial Sequence
  Description of Artificial Sequence: Synthetic oligonucleotide
gacaccgugaccugcgagc

SEQ ID NO: 2775348 - RNA, 19 nt, Artificial Sequence
  Description of Artificial Sequence: Synthetic oligonucleotide
gaucaacuggagcaacugc

SEQ ID NO: 2775349 - RNA, 19 nt, Artificial Sequence
  Description of Artificial Sequence: Synthetic oligonucleotide
ugcauguggaagcuuuaug

SEQ ID NO: 2775350 - RNA, 19 nt, Artificial Sequence
  Description of Artificial Sequence: Synthetic oligonucleotide
uccaucuguaugauguuuc

SEQ ID NO: 2775351 - RNA, 19 nt, Artificial Sequence
  Description of Artificial Sequence: Synthetic oligonucleotide
uaaaaccuacaaucuugcc

SEQ ID NO: 2775352 - RNA, 19 nt, Artificial Sequence
  Description of Artificial Sequence: Synthetic oligonucleotide
auccgaacuguuugaagag

SEQ ID NO: 2775353 - RNA, 19 nt, Artificial Sequence
  Description of Artificial Sequence: Synthetic oligonucleotide
uugccugggccauuugugg

SEQ ID NO: 2775354 - RNA, 19 nt, Artificial Sequence
  Description of Artificial Sequence: Synthetic oligonucleotide
cauccgaacuguuugaaga

SEQ ID NO: 2775355 - RNA, 19 nt, Artificial Sequence
  Description of Artificial Sequence: Synthetic oligonucleotide
uuccuuacguagcuuuuca

SEQ ID NO: 2775356 - RNA, 19 nt, Artificial Sequence
  Description of Artificial Sequence: Synthetic oligonucleotide
ucaucucaaauaaggccac

SEQ ID NO: 2775357 - RNA, 19 nt, Artificial Sequence
  Description of Artificial Sequence: Synthetic oligonucleotide
gagaaaggccugaacuugg

SEQ ID NO: 2775358 - RNA, 19 nt, Artificial Sequence
  Description of Artificial Sequence: Synthetic oligonucleotide
uugaaucugacugauucau

SEQ ID NO: 2775359 - RNA, 19 nt, Artificial Sequence
  Description of Artificial Sequence: Synthetic oligonucleotide
cuuccugaauccuggcucc

SEQ ID NO: 2775360 - RNA, 19 nt, Artificial Sequence
  Description of Artificial Sequence: Synthetic oligonucleotide
cugcacuguucucagaccc

SEQ ID NO: 2775361 - RNA, 19 nt, Artificial Sequence
  Description of Artificial Sequence: Synthetic oligonucleotide
uacaaucuugccucugcca

SEQ ID NO: 2775362 - RNA, 19 nt, Artificial Sequence
  Description of Artificial Sequence: Synthetic oligonucleotide
auacuuccugaauccuggc

SEQ ID NO: 2775363 - RNA, 19 nt, Artificial Sequence
  Description of Artificial Sequence: Synthetic oligonucleotide
cucugcacuguucucagac

SEQ ID NO: 2775364 - RNA, 19 nt, Artificial Sequence
  Description of Artificial Sequence: Synthetic oligonucleotide
cucagacccauccugugag

SEQ ID NO: 2775365 - RNA, 19 nt, Artificial Sequence
  Description of Artificial Sequence: Synthetic oligonucleotide
uuugugggagaaaggccug

SEQ ID NO: 2775366 - RNA, 19 nt, Artificial Sequence
  Description of Artificial Sequence: Synthetic oligonucleotide
cuuggucuaacaaagggcu

SEQ ID NO: 2775367 - RNA, 19 nt, Artificial Sequence
  Description of Artificial Sequence: Synthetic oligonucleotide
uuacuugccggacugucua

SEQ ID NO: 2775368 - RNA, 19 nt, Artificial Sequence
  Description of Artificial Sequence: Synthetic oligonucleotide
ucucagacccauccuguga

SEQ ID NO: 2775369 - RNA, 19 nt, Artificial Sequence
  Description of Artificial Sequence: Synthetic oligonucleotide
cugggaugaggcuuagagc

SEQ ID NO: 2775370 - RNA, 19 nt, Artificial Sequence
  Description of Artificial Sequence: Synthetic oligonucleotide
aaucuugccucugccaccu

SEQ ID NO: 2775371 - RNA, 19 nt, Artificial Sequence
  Description of Artificial Sequence: Synthetic oligonucleotide
gaacuuggucuaacaaagg

SEQ ID NO: 2775372 - RNA, 19 nt, Artificial Sequence
  Description of Artificial Sequence: Synthetic oligonucleotide
ucugacugauucaucucaa

SEQ ID NO: 2775373 - RNA, 19 nt, Artificial Sequence
  Description of Artificial Sequence: Synthetic oligonucleotide
uucugcauguggaagcuuu

SEQ ID NO: 2775374 - RNA, 19 nt, Artificial Sequence
  Description of Artificial Sequence: Synthetic oligonucleotide
aagcuuuauguugucuaug

SEQ ID NO: 2775375 - RNA, 19 nt, Artificial Sequence
  Description of Artificial Sequence: Synthetic oligonucleotide
uucacgguuggucuaucuc

SEQ ID NO: 2775376 - RNA, 19 nt, Artificial Sequence
  Description of Artificial Sequence: Synthetic oligonucleotide
cauccugugagcucucuuc

SEQ ID NO: 2775377 - RNA, 19 nt, Artificial Sequence
  Description of Artificial Sequence: Synthetic oligonucleotide
uuauguugucuauggugac

SEQ ID NO: 2775378 - RNA, 19 nt, Artificial Sequence
  Description of Artificial Sequence: Synthetic oligonucleotide
gauguuuccggauguccca

SEQ ID NO: 2775379 - RNA, 19 nt, Artificial Sequence
  Description of Artificial Sequence: Synthetic oligonucleotide
ucuuuugaaucugacugau

SEQ ID NO: 2775380 - RNA, 19 nt, Artificial Sequence
  Description of Artificial Sequence: Synthetic oligonucleotide
ccagauacuuccugaaucc

SEQ ID NO: 2775381 - RNA, 19 nt, Artificial Sequence
  Description of Artificial Sequence: Synthetic oligonucleotide
ucugcacuguucucagacc

SEQ ID NO: 2775382 - RNA, 19 nt, Artificial Sequence
  Description of Artificial Sequence: Synthetic oligonucleotide
auuugccugggccauuugu

SEQ ID NO: 2775383 - RNA, 19 nt, Artificial Sequence
  Description of Artificial Sequence: Synthetic oligonucleotide
accgugaccugcgagcggc

SEQ ID NO: 2775384 - RNA, 19 nt, Artificial Sequence
  Description of Artificial Sequence: Synthetic oligonucleotide
cuacaaucuugccucugcc

SEQ ID NO: 2775385 - RNA, 19 nt, Artificial Sequence
  Description of Artificial Sequence: Synthetic oligonucleotide
ugucuauggugacuucaga

SEQ ID NO: 2775386 - RNA, 19 nt, Artificial Sequence
  Description of Artificial Sequence: Synthetic oligonucleotide
ugauaagcaacugguccca

SEQ ID NO: 2775387 - RNA, 19 nt, Artificial Sequence
  Description of Artificial Sequence: Synthetic oligonucleotide
cugaacuuggucuaacaaa

SEQ ID NO: 2775388 - RNA, 19 nt, Artificial Sequence
  Description of Artificial Sequence: Synthetic oligonucleotide
aaggccugaacuuggucua

SEQ ID NO: 2775389 - RNA, 19 nt, Artificial Sequence
  Description of Artificial Sequence: Synthetic oligonucleotide
uacuuccugaauccuggcu

SEQ ID NO: 2775390 - RNA, 19 nt, Artificial Sequence
  Description of Artificial Sequence: Synthetic oligonucleotide
ugccugggccauuuguggg

SEQ ID NO: 2775391 - RNA, 19 nt, Artificial Sequence
  Description of Artificial Sequence: Synthetic oligonucleotide
ugaaucugacugauucauc

SEQ ID NO: 2775392 - RNA, 19 nt, Artificial Sequence
  Description of Artificial Sequence: Synthetic oligonucleotide
uauguugucuauggugacu

SEQ ID NO: 2775393 - RNA, 19 nt, Artificial Sequence
  Description of Artificial Sequence: Synthetic oligonucleotide
aacugccauuuccuuacgu

SEQ ID NO: 2775394 - RNA, 19 nt, Artificial Sequence
  Description of Artificial Sequence: Synthetic oligonucleotide
uugccggacugucuaaaac

SEQ ID NO: 2775395 - RNA, 19 nt, Artificial Sequence
  Description of Artificial Sequence: Synthetic oligonucleotide
gaacuguuugaagaguaga

SEQ ID NO: 2775396 - RNA, 19 nt, Artificial Sequence
  Description of Artificial Sequence: Synthetic oligonucleotide
ucccuggacaccgugaccu

SEQ ID NO: 2775397 - RNA, 19 nt, Artificial Sequence
  Description of Artificial Sequence: Synthetic oligonucleotide
uuuuacuugccggacuguc

SEQ ID NO: 2775398 - RNA, 19 nt, Artificial Sequence
  Description of Artificial Sequence: Synthetic oligonucleotide
augucccaucaauauuuuc

SEQ ID NO: 2775399 - RNA, 19 nt, Artificial Sequence
  Description of Artificial Sequence: Synthetic oligonucleotide
acugccauuuccuuacgua

SEQ ID NO: 2775400 - RNA, 19 nt, Artificial Sequence
  Description of Artificial Sequence: Synthetic oligonucleotide
ccugggaugaggcuuagag

SEQ ID NO: 2775401 - RNA, 19 nt, Artificial Sequence
  Description of Artificial Sequence: Synthetic oligonucleotide
uuucaauauugaagcgauc

SEQ ID NO: 2775402 - RNA, 19 nt, Artificial Sequence
  Description of Artificial Sequence: Synthetic oligonucleotide
gacugucuaaaaccuacaa

SEQ ID NO: 2775403 - RNA, 19 nt, Artificial Sequence
  Description of Artificial Sequence: Synthetic oligonucleotide
caaucuugccucugccacc

SEQ ID NO: 2775404 - RNA, 19 nt, Artificial Sequence
  Description of Artificial Sequence: Synthetic oligonucleotide
gcaacugccauuuccuuac

SEQ ID NO: 2775405 - RNA, 19 nt, Artificial Sequence
  Description of Artificial Sequence: Synthetic oligonucleotide
uuccggaugucccaucaau

SEQ ID NO: 2775406 - RNA, 19 nt, Artificial Sequence
  Description of Artificial Sequence: Synthetic oligonucleotide
aacuggucccagauacuuc

SEQ ID NO: 2775407 - RNA, 19 nt, Artificial Sequence
  Description of Artificial Sequence: Synthetic oligonucleotide
aacuggagcaacugccauu

SEQ ID NO: 2775408 - RNA, 19 nt, Artificial Sequence
  Description of Artificial Sequence: Synthetic oligonucleotide
gugacuucagaggggauug

SEQ ID NO: 2775409 - RNA, 19 nt, Artificial Sequence
  Description of Artificial Sequence: Synthetic oligonucleotide
guuugaagaguagaggucu

SEQ ID NO: 2775410 - RNA, 19 nt, Artificial Sequence
  Description of Artificial Sequence: Synthetic oligonucleotide
ccauuugugggagaaaggc

SEQ ID NO: 2775411 - RNA, 19 nt, Artificial Sequence
  Description of Artificial Sequence: Synthetic oligonucleotide
uucucagacccauccugug

SEQ ID NO: 2775412 - RNA, 19 nt, Artificial Sequence
  Description of Artificial Sequence: Synthetic oligonucleotide
uugaagcgaucaacuggag

SEQ ID NO: 2775413 - RNA, 19 nt, Artificial Sequence
  Description of Artificial Sequence: Synthetic oligonucleotide
cuggacaccgugaccugcg

SEQ ID NO: 2775414 - RNA, 19 nt, Artificial Sequence
  Description of Artificial Sequence: Synthetic oligonucleotide
agauacuuccugaauccug

SEQ ID NO: 2775415 - RNA, 19 nt, Artificial Sequence
  Description of Artificial Sequence: Synthetic oligonucleotide
ugcacuguucucagaccca

SEQ ID NO: 2775416 - RNA, 19 nt, Artificial Sequence
  Description of Artificial Sequence: Synthetic oligonucleotide
auaagcaacuggucccaga

SEQ ID NO: 2775417 - RNA, 19 nt, Artificial Sequence
  Description of Artificial Sequence: Synthetic oligonucleotide
ugccaccuucugcaugugg

SEQ ID NO: 2775418 - RNA, 19 nt, Artificial Sequence
  Description of Artificial Sequence: Synthetic oligonucleotide
uggucccagauacuuccug

SEQ ID NO: 2775419 - RNA, 19 nt, Artificial Sequence
  Description of Artificial Sequence: Synthetic oligonucleotide
uuugaagaguagaggucuu

SEQ ID NO: 2775420 - RNA, 19 nt, Artificial Sequence
  Description of Artificial Sequence: Synthetic oligonucleotide
uccggaugucccaucaaua

SEQ ID NO: 2775421 - RNA, 19 nt, Artificial Sequence
  Description of Artificial Sequence: Synthetic oligonucleotide
ucagaggggauugcagucu

SEQ ID NO: 2775422 - RNA, 19 nt, Artificial Sequence
  Description of Artificial Sequence: Synthetic oligonucleotide
uuucacgguuggucuaucu

SEQ ID NO: 2775423 - RNA, 19 nt, Artificial Sequence
  Description of Artificial Sequence: Synthetic oligonucleotide
aggucuuccugggaugagg

SEQ ID NO: 2775424 - RNA, 19 nt, Artificial Sequence
  Description of Artificial Sequence: Synthetic oligonucleotide
uuggucuaacaaagggcuc

SEQ ID NO: 2775425 - RNA, 19 nt, Artificial Sequence
  Description of Artificial Sequence: Synthetic oligonucleotide
cuuacguagcuuuucauuu

SEQ ID NO: 2775426 - RNA, 19 nt, Artificial Sequence
  Description of Artificial Sequence: Synthetic oligonucleotide
cacgguuggucuaucucac

SEQ ID NO: 2775427 - RNA, 19 nt, Artificial Sequence
  Description of Artificial Sequence: Synthetic oligonucleotide
uuuccuuacguagcuuuuc

SEQ ID NO: 2775428 - RNA, 19 nt, Artificial Sequence
  Description of Artificial Sequence: Synthetic oligonucleotide
gccacauccaucuguauga

SEQ ID NO: 2775429 - RNA, 19 nt, Artificial Sequence
  Description of Artificial Sequence: Synthetic oligonucleotide
agcugauaagcaacugguc

SEQ ID NO: 2775430 - RNA, 19 nt, Artificial Sequence
  Description of Artificial Sequence: Synthetic oligonucleotide
guugucuauggugacuuca

SEQ ID NO: 2775431 - RNA, 19 nt, Artificial Sequence
  Description of Artificial Sequence: Synthetic oligonucleotide
gaaaggccugaacuugguc

SEQ ID NO: 2775432 - RNA, 19 nt, Artificial Sequence
  Description of Artificial Sequence: Synthetic oligonucleotide
agcuuuucauuugccuggg

SEQ ID NO: 2775433 - RNA, 19 nt, Artificial Sequence
  Description of Artificial Sequence: Synthetic oligonucleotide
acaccgugaccugcgagcg

SEQ ID NO: 2775434 - RNA, 19 nt, Artificial Sequence
  Description of Artificial Sequence: Synthetic oligonucleotide
cugaauccuggcucccugc

SEQ ID NO: 2775435 - RNA, 19 nt, Artificial Sequence
  Description of Artificial Sequence: Synthetic oligonucleotide
auggugacuucagagggga

SEQ ID NO: 2775436 - RNA, 19 nt, Artificial Sequence
  Description of Artificial Sequence: Synthetic oligonucleotide
agcaacugccauuuccuua

SEQ ID NO: 2775437 - RNA, 19 nt, Artificial Sequence
  Description of Artificial Sequence: Synthetic oligonucleotide
gucccaucaauauuuucaa

SEQ ID NO: 2775438 - RNA, 19 nt, Artificial Sequence
  Description of Artificial Sequence: Synthetic oligonucleotide
uuucauuugccugggccau

SEQ ID NO: 2775439 - RNA, 19 nt, Artificial Sequence
  Description of Artificial Sequence: Synthetic oligonucleotide
uccucugcauccgaacugu

SEQ ID NO: 2775440 - RNA, 19 nt, Artificial Sequence
  Description of Artificial Sequence: Synthetic oligonucleotide
ggccauuugugggagaaag

SEQ ID NO: 2775441 - RNA, 19 nt, Artificial Sequence
  Description of Artificial Sequence: Synthetic oligonucleotide
caaagggcuccucugcauc

SEQ ID NO: 2775442 - RNA, 19 nt, Artificial Sequence
  Description of Artificial Sequence: Synthetic oligonucleotide
acuggagcaacugccauuu

SEQ ID NO: 2775443 - RNA, 19 nt, Artificial Sequence
  Description of Artificial Sequence: Synthetic oligonucleotide
agcgaucaacuggagcaac

SEQ ID NO: 2775444 - RNA, 19 nt, Artificial Sequence
  Description of Artificial Sequence: Synthetic oligonucleotide
aguagaggucuuccuggga

SEQ ID NO: 2775445 - RNA, 19 nt, Artificial Sequence
  Description of Artificial Sequence: Synthetic oligonucleotide
acguagcuuuucauuugcc

SEQ ID NO: 2775446 - RNA, 19 nt, Artificial Sequence
  Description of Artificial Sequence: Synthetic oligonucleotide
aucucaaauaaggccacau

SEQ ID NO: 2775447 - RNA, 19 nt, Artificial Sequence
  Description of Artificial Sequence: Synthetic oligonucleotide
ucccagauacuuccugaau

SEQ ID NO: 2775448 - RNA, 19 nt, Artificial Sequence
  Description of Artificial Sequence: Synthetic oligonucleotide
uccgaacuguuugaagagu

SEQ ID NO: 2775449 - RNA, 19 nt, Artificial Sequence
  Description of Artificial Sequence: Synthetic oligonucleotide
guuuccggaugucccauca

SEQ ID NO: 2775450 - RNA, 19 nt, Artificial Sequence
  Description of Artificial Sequence: Synthetic oligonucleotide
ggaagcuuuauguugucua

SEQ ID NO: 2775451 - RNA, 19 nt, Artificial Sequence
  Description of Artificial Sequence: Synthetic oligonucleotide
ucagacccauccugugagc

SEQ ID NO: 2775452 - RNA, 19 nt, Artificial Sequence
  Description of Artificial Sequence: Synthetic oligonucleotide
uccugugagcucucuucug

SEQ ID NO: 2775453 - RNA, 19 nt, Artificial Sequence
  Description of Artificial Sequence: Synthetic oligonucleotide
gauaagcaacuggucccag

SEQ ID NO: 2775454 - RNA, 19 nt, Artificial Sequence
  Description of Artificial Sequence: Synthetic oligonucleotide
gagcugauaagcaacuggu

SEQ ID NO: 2775455 - RNA, 19 nt, Artificial Sequence
  Description of Artificial Sequence: Synthetic oligonucleotide
uggaagcuuuauguugucu

SEQ ID NO: 2775456 - RNA, 19 nt, Artificial Sequence
  Description of Artificial Sequence: Synthetic oligonucleotide
ugagcucucuucugagcuc

SEQ ID NO: 2775457 - RNA, 19 nt, Artificial Sequence
  Description of Artificial Sequence: Synthetic oligonucleotide
acaaagggcuccucugcau

SEQ ID NO: 2775458 - RNA, 19 nt, Artificial Sequence
  Description of Artificial Sequence: Synthetic oligonucleotide
ccuacaaucuugccucugc

SEQ ID NO: 2775459 - RNA, 19 nt, Artificial Sequence
  Description of Artificial Sequence: Synthetic oligonucleotide
cccagauacuuccugaauc

SEQ ID NO: 2775460 - RNA, 19 nt, Artificial Sequence
  Description of Artificial Sequence: Synthetic oligonucleotide
uccuuacguagcuuuucau

SEQ ID NO: 2775461 - RNA, 19 nt, Artificial Sequence
  Description of Artificial Sequence: Synthetic oligonucleotide
ucuucugagcucuccucuu

SEQ ID NO: 2775462 - RNA, 19 nt, Artificial Sequence
  Description of Artificial Sequence: Synthetic oligonucleotide
ggggauugcagucuucauc

SEQ ID NO: 2775463 - RNA, 19 nt, Artificial Sequence
  Description of Artificial Sequence: Synthetic oligonucleotide
ucccaucaauauuuucaau

SEQ ID NO: 2775464 - RNA, 19 nt, Artificial Sequence
  Description of Artificial Sequence: Synthetic oligonucleotide
cccaucaauauuuucaaua

SEQ ID NO: 2775465 - RNA, 19 nt, Artificial Sequence
  Description of Artificial Sequence: Synthetic oligonucleotide
uuuccggaugucccaucaa

SEQ ID NO: 2775466 - RNA, 19 nt, Artificial Sequence
  Description of Artificial Sequence: Synthetic oligonucleotide
ccaucuguaugauguuucc

SEQ ID NO: 2775467 - RNA, 19 nt, Artificial Sequence
  Description of Artificial Sequence: Synthetic oligonucleotide
auaaggccacauccaucug

SEQ ID NO: 2775468 - RNA, 19 nt, Artificial Sequence
  Description of Artificial Sequence: Synthetic oligonucleotide
aagcgaucaacuggagcaa

SEQ ID NO: 2775469 - RNA, 19 nt, Artificial Sequence
  Description of Artificial Sequence: Synthetic oligonucleotide
ugggccauuugugggagaa

SEQ ID NO: 2775470 - RNA, 19 nt, Artificial Sequence
  Description of Artificial Sequence: Synthetic oligonucleotide
aagcaacuggucccagaua

SEQ ID NO: 2775471 - RNA, 19 nt, Artificial Sequence
  Description of Artificial Sequence: Synthetic oligonucleotide
guagaggucuuccugggau

SEQ ID NO: 2775472 - RNA, 19 nt, Artificial Sequence
  Description of Artificial Sequence: Synthetic oligonucleotide
uuggucuaucucacuguuu

SEQ ID NO: 2775473 - RNA, 19 nt, Artificial Sequence
  Description of Artificial Sequence: Synthetic oligonucleotide
guaugauguuuccggaugu

SEQ ID NO: 2775474 - RNA, 19 nt, Artificial Sequence
  Description of Artificial Sequence: Synthetic oligonucleotide
agcucuccucuucuuuuga

SEQ ID NO: 2775475 - RNA, 19 nt, Artificial Sequence
  Description of Artificial Sequence: Synthetic oligonucleotide
ugcauccgaacuguuugaa

SEQ ID NO: 2775476 - RNA, 19 nt, Artificial Sequence
  Description of Artificial Sequence: Synthetic oligonucleotide
cuucagaggggauugcagu

SEQ ID NO: 2775477 - RNA, 19 nt, Artificial Sequence
  Description of Artificial Sequence: Synthetic oligonucleotide
gcggucagcagcucccugg

SEQ ID NO: 2775478 - RNA, 19 nt, Artificial Sequence
  Description of Artificial Sequence: Synthetic oligonucleotide
gcauccgaacuguuugaag

SEQ ID NO: 2775479 - RNA, 19 nt, Artificial Sequence
  Description of Artificial Sequence: Synthetic oligonucleotide
caaauaaggccacauccau

SEQ ID NO: 2775480 - RNA, 19 nt, Artificial Sequence
  Description of Artificial Sequence: Synthetic oligonucleotide
gcuuagagcugauaagcaa

SEQ ID NO: 2775481 - RNA, 19 nt, Artificial Sequence
  Description of Artificial Sequence: Synthetic oligonucleotide
ugugggagaaaggccugaa

SEQ ID NO: 2775482 - RNA, 19 nt, Artificial Sequence
  Description of Artificial Sequence: Synthetic oligonucleotide
uugugggagaaaggccuga

SEQ ID NO: 2775483 - RNA, 19 nt, Artificial Sequence
  Description of Artificial Sequence: Synthetic oligonucleotide
uugccucugccaccuucug

SEQ ID NO: 2775484 - RNA, 19 nt, Artificial Sequence
  Description of Artificial Sequence: Synthetic oligonucleotide
cggacugucuaaaaccuac

SEQ ID NO: 2775485 - RNA, 19 nt, Artificial Sequence
  Description of Artificial Sequence: Synthetic oligonucleotide
ucauuugccugggccauuu

SEQ ID NO: 2775486 - RNA, 19 nt, Artificial Sequence
  Description of Artificial Sequence: Synthetic oligonucleotide
caacugccauuuccuuacg

SEQ ID NO: 2775487 - RNA, 19 nt, Artificial Sequence
  Description of Artificial Sequence: Synthetic oligonucleotide
gucuaaaaccuacaaucuu

SEQ ID NO: 2775488 - RNA, 19 nt, Artificial Sequence
  Description of Artificial Sequence: Synthetic oligonucleotide
cauuuccuuacguagcuuu

SEQ ID NO: 2775489 - RNA, 19 nt, Artificial Sequence
  Description of Artificial Sequence: Synthetic oligonucleotide
ugacuucagaggggauugc

SEQ ID NO: 2775490 - RNA, 19 nt, Artificial Sequence
  Description of Artificial Sequence: Synthetic oligonucleotide
ggucccagauacuuccuga

SEQ ID NO: 2775491 - RNA, 19 nt, Artificial Sequence
  Description of Artificial Sequence: Synthetic oligonucleotide
uggacaccgugaccugcga

SEQ ID NO: 2775492 - RNA, 19 nt, Artificial Sequence
  Description of Artificial Sequence: Synthetic oligonucleotide
agaaaggccugaacuuggu

SEQ ID NO: 2775493 - RNA, 19 nt, Artificial Sequence
  Description of Artificial Sequence: Synthetic oligonucleotide
gugaccugcgagcggcccc

SEQ ID NO: 2775494 - RNA, 19 nt, Artificial Sequence
  Description of Artificial Sequence: Synthetic oligonucleotide
gccauuugugggagaaagg

SEQ ID NO: 2775495 - RNA, 19 nt, Artificial Sequence
  Description of Artificial Sequence: Synthetic oligonucleotide
auccaucuguaugauguuu

SEQ ID NO: 2775496 - RNA, 19 nt, Artificial Sequence
  Description of Artificial Sequence: Synthetic oligonucleotide
ugcggucagcagcucccug

SEQ ID NO: 2775497 - RNA, 19 nt, Artificial Sequence
  Description of Artificial Sequence: Synthetic oligonucleotide
cgaacuguuugaagaguag

SEQ ID NO: 2775498 - RNA, 19 nt, Artificial Sequence
  Description of Artificial Sequence: Synthetic oligonucleotide
ccugcggucagcagcuccc

SEQ ID NO: 2775499 - RNA, 19 nt, Artificial Sequence
  Description of Artificial Sequence: Synthetic oligonucleotide
auuuccuuacguagcuuuu

SEQ ID NO: 2775500 - RNA, 19 nt, Artificial Sequence
  Description of Artificial Sequence: Synthetic oligonucleotide
uacuugccggacugucuaa

SEQ ID NO: 2775501 - RNA, 19 nt, Artificial Sequence
  Description of Artificial Sequence: Synthetic oligonucleotide
acgguuggucuaucucacu

SEQ ID NO: 2775502 - RNA, 19 nt, Artificial Sequence
  Description of Artificial Sequence: Synthetic oligonucleotide
cugacugauucaucucaaa

SEQ ID NO: 2775503 - RNA, 19 nt, Artificial Sequence
  Description of Artificial Sequence: Synthetic oligonucleotide
cauguggaagcuuuauguu

SEQ ID NO: 2775504 - RNA, 19 nt, Artificial Sequence
  Description of Artificial Sequence: Synthetic oligonucleotide
uuccugaauccuggcuccc

SEQ ID NO: 2775505 - RNA, 19 nt, Artificial Sequence
  Description of Artificial Sequence: Synthetic oligonucleotide
uccugaauccuggcucccu

SEQ ID NO: 2775506 - RNA, 19 nt, Artificial Sequence
  Description of Artificial Sequence: Synthetic oligonucleotide
cugcauccgaacuguuuga

SEQ ID NO: 2775507 - RNA, 19 nt, Artificial Sequence
  Description of Artificial Sequence: Synthetic oligonucleotide
gacccauccugugagcucu

SEQ ID NO: 2775508 - RNA, 19 nt, Artificial Sequence
  Description of Artificial Sequence: Synthetic oligonucleotide
aggggauugcagucuucau

SEQ ID NO: 2775509 - RNA, 19 nt, Artificial Sequence
  Description of Artificial Sequence: Synthetic oligonucleotide
ccaucaauauuuucaauau

SEQ ID NO: 2775510 - RNA, 19 nt, Artificial Sequence
  Description of Artificial Sequence: Synthetic oligonucleotide
guggaagcuuuauguuguc

SEQ ID NO: 2775511 - RNA, 19 nt, Artificial Sequence
  Description of Artificial Sequence: Synthetic oligonucleotide
cucccuggacaccgugacc

SEQ ID NO: 2775512 - RNA, 19 nt, Artificial Sequence
  Description of Artificial Sequence: Synthetic oligonucleotide
accuacaaucuugccucug

SEQ ID NO: 2775513 - RNA, 19 nt, Artificial Sequence
  Description of Artificial Sequence: Synthetic oligonucleotide
uuuucacgguuggucuauc

SEQ ID NO: 2775514 - RNA, 19 nt, Artificial Sequence
  Description of Artificial Sequence: Synthetic oligonucleotide
cuugccggacugucuaaaa

SEQ ID NO: 2775515 - RNA, 19 nt, Artificial Sequence
  Description of Artificial Sequence: Synthetic oligonucleotide
agaggggauugcagucuuc

SEQ ID NO: 2775516 - RNA, 19 nt, Artificial Sequence
  Description of Artificial Sequence: Synthetic oligonucleotide
ggaugaggcuuagagcuga

SEQ ID NO: 2775517 - RNA, 19 nt, Artificial Sequence
  Description of Artificial Sequence: Synthetic oligonucleotide
ggaugucccaucaauauuu

SEQ ID NO: 2775518 - RNA, 19 nt, Artificial Sequence
  Description of Artificial Sequence: Synthetic oligonucleotide
ggcuuagagcugauaagca

SEQ ID NO: 2775519 - RNA, 19 nt, Artificial Sequence
  Description of Artificial Sequence: Synthetic oligonucleotide
acucugcacuguucucaga

SEQ ID NO: 2775520 - RNA, 19 nt, Artificial Sequence
  Description of Artificial Sequence: Synthetic oligonucleotide
ggacaccgugaccugcgag

SEQ ID NO: 2775521 - RNA, 19 nt, Artificial Sequence
  Description of Artificial Sequence: Synthetic oligonucleotide
acuugccggacugucuaaa

SEQ ID NO: 2775522 - RNA, 19 nt, Artificial Sequence
  Description of Artificial Sequence: Synthetic oligonucleotide
cacuguucucagacccauc

SEQ ID NO: 2775523 - RNA, 19 nt, Artificial Sequence
  Description of Artificial Sequence: Synthetic oligonucleotide
gagcucucuucugagcucu

SEQ ID NO: 2775524 - RNA, 19 nt, Artificial Sequence
  Description of Artificial Sequence: Synthetic oligonucleotide
gguuggucuaucucacugu

SEQ ID NO: 2775525 - RNA, 19 nt, Artificial Sequence
  Description of Artificial Sequence: Synthetic oligonucleotide
uggugacuucagaggggau

SEQ ID NO: 2775526 - RNA, 19 nt, Artificial Sequence
  Description of Artificial Sequence: Synthetic oligonucleotide
cauuugccugggccauuug

SEQ ID NO: 2775527 - RNA, 19 nt, Artificial Sequence
  Description of Artificial Sequence: Synthetic oligonucleotide
guucucagacccauccugu

SEQ ID NO: 2775528 - RNA, 19 nt, Artificial Sequence
  Description of Artificial Sequence: Synthetic oligonucleotide
ggagcaacugccauuuccu

SEQ ID NO: 2775529 - RNA, 19 nt, Artificial Sequence
  Description of Artificial Sequence: Synthetic oligonucleotide
cuaucucacuguuucuuuu

SEQ ID NO: 2775530 - RNA, 19 nt, Artificial Sequence
  Description of Artificial Sequence: Synthetic oligonucleotide
ccugaacuuggucuaacaa

SEQ ID NO: 2775531 - RNA, 19 nt, Artificial Sequence
  Description of Artificial Sequence: Synthetic oligonucleotide
caccgugaccugcgagcgg

SEQ ID NO: 2775532 - RNA, 19 nt, Artificial Sequence
  Description of Artificial Sequence: Synthetic oligonucleotide
ccugaauccuggcucccug

SEQ ID NO: 2775533 - RNA, 19 nt, Artificial Sequence
  Description of Artificial Sequence: Synthetic oligonucleotide
cgguuggucuaucucacug

SEQ ID NO: 2775534 - RNA, 19 nt, Artificial Sequence
  Description of Artificial Sequence: Synthetic oligonucleotide
gccugaacuuggucuaaca

SEQ ID NO: 2775535 - RNA, 19 nt, Artificial Sequence
  Description of Artificial Sequence: Synthetic oligonucleotide
uggcucccugcggucagca

SEQ ID NO: 2775536 - RNA, 19 nt, Artificial Sequence
  Description of Artificial Sequence: Synthetic oligonucleotide
caucucaaauaaggccaca

SEQ ID NO: 2775537 - RNA, 19 nt, Artificial Sequence
  Description of Artificial Sequence: Synthetic oligonucleotide
ggacugucuaaaaccuaca

SEQ ID NO: 2775538 - RNA, 19 nt, Artificial Sequence
  Description of Artificial Sequence: Synthetic oligonucleotide
uucauuugccugggccauu

SEQ ID NO: 2775539 - RNA, 19 nt, Artificial Sequence
  Description of Artificial Sequence: Synthetic oligonucleotide
gggaugaggcuuagagcug

SEQ ID NO: 2775540 - RNA, 19 nt, Artificial Sequence
  Description of Artificial Sequence: Synthetic oligonucleotide
ccgaacuguuugaagagua

SEQ ID NO: 2775541 - RNA, 19 nt, Artificial Sequence
  Description of Artificial Sequence: Synthetic oligonucleotide
cucccugcggucagcagcu

SEQ ID NO: 2775542 - RNA, 19 nt, Artificial Sequence
  Description of Artificial Sequence: Synthetic oligonucleotide
gcuuuauguugucuauggu

SEQ ID NO: 2775543 - RNA, 19 nt, Artificial Sequence
  Description of Artificial Sequence: Synthetic oligonucleotide
gaugucccaucaauauuuu

SEQ ID NO: 2775544 - RNA, 19 nt, Artificial Sequence
  Description of Artificial Sequence: Synthetic oligonucleotide
cgaucaacuggagcaacug

SEQ ID NO: 2775545 - RNA, 19 nt, Artificial Sequence
  Description of Artificial Sequence: Synthetic oligonucleotide
cagcucccuggacaccgug

SEQ ID NO: 2775546 - RNA, 19 nt, Artificial Sequence
  Description of Artificial Sequence: Synthetic oligonucleotide
cuuuugaaucugacugauu

SEQ ID NO: 2775547 - RNA, 19 nt, Artificial Sequence
  Description of Artificial Sequence: Synthetic oligonucleotide
augaggcuuagagcugaua

SEQ ID NO: 2775548 - RNA, 19 nt, Artificial Sequence
  Description of Artificial Sequence: Synthetic oligonucleotide
gucuaacaaagggcuccuc

SEQ ID NO: 2775549 - RNA, 19 nt, Artificial Sequence
  Description of Artificial Sequence: Synthetic oligonucleotide
caacuggucccagauacuu

SEQ ID NO: 2775550 - RNA, 19 nt, Artificial Sequence
  Description of Artificial Sequence: Synthetic oligonucleotide
ccuggacaccgugaccugc

SEQ ID NO: 2775551 - RNA, 19 nt, Artificial Sequence
  Description of Artificial Sequence: Synthetic oligonucleotide
cucugcauccgaacuguuu

SEQ ID NO: 2775552 - RNA, 19 nt, Artificial Sequence
  Description of Artificial Sequence: Synthetic oligonucleotide
gcuccucugcauccgaacu

SEQ ID NO: 2775553 - RNA, 19 nt, Artificial Sequence
  Description of Artificial Sequence: Synthetic oligonucleotide
cagauacuuccugaauccu

SEQ ID NO: 2775554 - RNA, 19 nt, Artificial Sequence
  Description of Artificial Sequence: Synthetic oligonucleotide
cuggagcaacugccauuuc

SEQ ID NO: 2775555 - RNA, 19 nt, Artificial Sequence
  Description of Artificial Sequence: Synthetic oligonucleotide
ccuuacguagcuuuucauu

SEQ ID NO: 2775556 - RNA, 19 nt, Artificial Sequence
  Description of Artificial Sequence: Synthetic oligonucleotide
cagacccauccugugagcu

SEQ ID NO: 2775557 - RNA, 19 nt, Artificial Sequence
  Description of Artificial Sequence: Synthetic oligonucleotide
ggugacuucagaggggauu

SEQ ID NO: 2775558 - RNA, 19 nt, Artificial Sequence
  Description of Artificial Sequence: Synthetic oligonucleotide
cguagcuuuucauuugccu

SEQ ID NO: 2775559 - RNA, 19 nt, Artificial Sequence
  Description of Artificial Sequence: Synthetic oligonucleotide
aggccugaacuuggucuaa

SEQ ID NO: 2775560 - RNA, 19 nt, Artificial Sequence
  Description of Artificial Sequence: Synthetic oligonucleotide
cauccaucuguaugauguu

SEQ ID NO: 2775561 - RNA, 19 nt, Artificial Sequence
  Description of Artificial Sequence: Synthetic oligonucleotide
gccggacugucuaaaaccu

SEQ ID NO: 2775562 - RNA, 19 nt, Artificial Sequence
  Description of Artificial Sequence: Synthetic oligonucleotide
ggccugaacuuggucuaac

SEQ ID NO: 2775563 - RNA, 19 nt, Artificial Sequence
  Description of Artificial Sequence: Synthetic oligonucleotide
acccauccugugagcucuc

SEQ ID NO: 2775564 - RNA, 19 nt, Artificial Sequence
  Description of Artificial Sequence: Synthetic oligonucleotide
ccggaugucccaucaauau

SEQ ID NO: 2775565 - RNA, 19 nt, Artificial Sequence
  Description of Artificial Sequence: Synthetic oligonucleotide
ggucuaacaaagggcuccu

SEQ ID NO: 2775566 - RNA, 19 nt, Artificial Sequence
  Description of Artificial Sequence: Synthetic oligonucleotide
cuggucccagauacuuccu

SEQ ID NO: 2775567 - RNA, 19 nt, Artificial Sequence
  Description of Artificial Sequence: Synthetic oligonucleotide
gaugaggcuuagagcugau

SEQ ID NO: 2775568 - RNA, 19 nt, Artificial Sequence
  Description of Artificial Sequence: Synthetic oligonucleotide
cugggccauuugugggaga

SEQ ID NO: 2775569 - RNA, 19 nt, Artificial Sequence
  Description of Artificial Sequence: Synthetic oligonucleotide
cagaggggauugcagucuu

SEQ ID NO: 2775570 - RNA, 19 nt, Artificial Sequence
  Description of Artificial Sequence: Synthetic oligonucleotide
gcgaucaacuggagcaacu

SEQ ID NO: 2775571 - RNA, 19 nt, Artificial Sequence
  Description of Artificial Sequence: Synthetic oligonucleotide
gcacuguucucagacccau

SEQ ID NO: 2775572 - RNA, 19 nt, Artificial Sequence
  Description of Artificial Sequence: Synthetic oligonucleotide
ccgugaccugcgagcggcc

SEQ ID NO: 2775573 - RNA, 19 nt, Artificial Sequence
  Description of Artificial Sequence: Synthetic oligonucleotide
gcaacuggucccagauacu

SEQ ID NO: 2775574 - RNA, 19 nt, Artificial Sequence
  Description of Artificial Sequence: Synthetic oligonucleotide
ccggacugucuaaaaccua

SEQ ID NO: 2775575 - RNA, 19 nt, Artificial Sequence
  Description of Artificial Sequence: Synthetic oligonucleotide
ucccugcggucagcagcuc

SEQ ID NO: 2775576 - RNA, 19 nt, Artificial Sequence
  Description of Artificial Sequence: Synthetic oligonucleotide
gggccauuugugggagaaa

SEQ ID NO: 2775577 - RNA, 19 nt, Artificial Sequence
  Description of Artificial Sequence: Synthetic oligonucleotide
cuucugcauguggaagcuu

SEQ ID NO: 2775578 - RNA, 19 nt, Artificial Sequence
  Description of Artificial Sequence: Synthetic oligonucleotide
cggaugucccaucaauauu

SEQ ID NO: 2775579 - RNA, 19 nt, Artificial Sequence
  Description of Artificial Sequence: Synthetic oligonucleotide
ccauccugugagcucucuu

SEQ ID NO: 2775580 - RNA, 19 nt, Artificial Sequence
  Description of Artificial Sequence: Synthetic oligonucleotide
ccauuuccuuacguagcuu

SEQ ID NO: 2775581 - RNA, 19 nt, Artificial Sequence
  Description of Artificial Sequence: Synthetic oligonucleotide
gcagcucccuggacaccgu

SEQ ID NO: 2775582 - RNA, 19 nt, Artificial Sequence
  Description of Artificial Sequence: Synthetic oligonucleotide
cccauccugugagcucucu

SEQ ID NO: 2775583 - RNA, 19 nt, Artificial Sequence
  Description of Artificial Sequence: Synthetic oligonucleotide
aauguaaggacauugauuc

SEQ ID NO: 2775584 - RNA, 19 nt, Artificial Sequence
  Description of Artificial Sequence: Synthetic oligonucleotide
aaaauaaggacacagcccc

SEQ ID NO: 2775585 - RNA, 19 nt, Artificial Sequence
  Description of Artificial Sequence: Synthetic oligonucleotide
aaauuucaaagauaaauac

SEQ ID NO: 2775586 - RNA, 19 nt, Artificial Sequence
  Description of Artificial Sequence: Synthetic oligonucleotide
aauaaagucccuuagcaac

SEQ ID NO: 2775587 - RNA, 19 nt, Artificial Sequence
  Description of Artificial Sequence: Synthetic oligonucleotide
aaaauuaaaauaaggacac

SEQ ID NO: 2775588 - RNA, 19 nt, Artificial Sequence
  Description of Artificial Sequence: Synthetic oligonucleotide
auuuuaacaaaacagauca

SEQ ID NO: 2775589 - RNA, 19 nt, Artificial Sequence
  Description of Artificial Sequence: Synthetic oligonucleotide
uuaaaauaaggacacagcc

SEQ ID NO: 2775590 - RNA, 19 nt, Artificial Sequence
  Description of Artificial Sequence: Synthetic oligonucleotide
auaaauacaauauuuauaa

SEQ ID NO: 2775591 - RNA, 19 nt, Artificial Sequence
  Description of Artificial Sequence: Synthetic oligonucleotide
aauguacaaaauuucaaag

SEQ ID NO: 2775592 - RNA, 19 nt, Artificial Sequence
  Description of Artificial Sequence: Synthetic oligonucleotide
uuuauaauugauauguuac

SEQ ID NO: 2775593 - RNA, 19 nt, Artificial Sequence
  Description of Artificial Sequence: Synthetic oligonucleotide
uaaacaaugaauuugacuu

SEQ ID NO: 2775594 - RNA, 19 nt, Artificial Sequence
  Description of Artificial Sequence: Synthetic oligonucleotide
uauguuacaaaauaaaguc

SEQ ID NO: 2775595 - RNA, 19 nt, Artificial Sequence
  Description of Artificial Sequence: Synthetic oligonucleotide
aaaauaaagucccuuagca

SEQ ID NO: 2775596 - RNA, 19 nt, Artificial Sequence
  Description of Artificial Sequence: Synthetic oligonucleotide
aauacaauauuuauaauug

SEQ ID NO: 2775597 - RNA, 19 nt, Artificial Sequence
  Description of Artificial Sequence: Synthetic oligonucleotide
aaacagaucaaagagacag

SEQ ID NO: 2775598 - RNA, 19 nt, Artificial Sequence
  Description of Artificial Sequence: Synthetic oligonucleotide
uguuacaaaauaaaguccc

SEQ ID NO: 2775599 - RNA, 19 nt, Artificial Sequence
  Description of Artificial Sequence: Synthetic oligonucleotide
aaaauaaacaaugaauuug

SEQ ID NO: 2775600 - RNA, 19 nt, Artificial Sequence
  Description of Artificial Sequence: Synthetic oligonucleotide
aaauacaauauuuauaauu

SEQ ID NO: 2775601 - RNA, 19 nt, Artificial Sequence
  Description of Artificial Sequence: Synthetic oligonucleotide
uacaaaauuucaaagauaa

SEQ ID NO: 2775602 - RNA, 19 nt, Artificial Sequence
  Description of Artificial Sequence: Synthetic oligonucleotide
acaaaugaaauguaaggac

SEQ ID NO: 2775603 - RNA, 19 nt, Artificial Sequence
  Description of Artificial Sequence: Synthetic oligonucleotide
aaaggauuuguucagauaa

SEQ ID NO: 2775604 - RNA, 19 nt, Artificial Sequence
  Description of Artificial Sequence: Synthetic oligonucleotide
auauuuauaauugauaugu

SEQ ID NO: 2775605 - RNA, 19 nt, Artificial Sequence
  Description of Artificial Sequence: Synthetic oligonucleotide
uucauuuuaacaaaacaga

SEQ ID NO: 2775606 - RNA, 19 nt, Artificial Sequence
  Description of Artificial Sequence: Synthetic oligonucleotide
uuaacaaaacagaucaaag

SEQ ID NO: 2775607 - RNA, 19 nt, Artificial Sequence
  Description of Artificial Sequence: Synthetic oligonucleotide
ucaaacaccaauacagacg

SEQ ID NO: 2775608 - RNA, 19 nt, Artificial Sequence
  Description of Artificial Sequence: Synthetic oligonucleotide
augaauuugacuuuuccuc

SEQ ID NO: 2775609 - RNA, 19 nt, Artificial Sequence
  Description of Artificial Sequence: Synthetic oligonucleotide
aauauuuauaauugauaug

SEQ ID NO: 2775610 - RNA, 19 nt, Artificial Sequence
  Description of Artificial Sequence: Synthetic oligonucleotide
ucaaagauaaauacaauau

SEQ ID NO: 2775611 - RNA, 19 nt, Artificial Sequence
  Description of Artificial Sequence: Synthetic oligonucleotide
uuagguacaaaugaaaugu

SEQ ID NO: 2775612 - RNA, 19 nt, Artificial Sequence
  Description of Artificial Sequence: Synthetic oligonucleotide
ucuaaacaauagcaaaugg

SEQ ID NO: 2775613 - RNA, 19 nt, Artificial Sequence
  Description of Artificial Sequence: Synthetic oligonucleotide
uuucaaaaggauuuguuca

SEQ ID NO: 2775614 - RNA, 19 nt, Artificial Sequence
  Description of Artificial Sequence: Synthetic oligonucleotide
guacaaaugaaauguaagg

SEQ ID NO: 2775615 - RNA, 19 nt, Artificial Sequence
  Description of Artificial Sequence: Synthetic oligonucleotide
aaugaauuugacuuuuccu

SEQ ID NO: 2775616 - RNA, 19 nt, Artificial Sequence
  Description of Artificial Sequence: Synthetic oligonucleotide
uaaaauaaggacacagccc

SEQ ID NO: 2775617 - RNA, 19 nt, Artificial Sequence
  Description of Artificial Sequence: Synthetic oligonucleotide
uguacaaaauuucaaagau

SEQ ID NO: 2775618 - RNA, 19 nt, Artificial Sequence
  Description of Artificial Sequence: Synthetic oligonucleotide
gauauguuacaaaauaaag

SEQ ID NO: 2775619 - RNA, 19 nt, Artificial Sequence
  Description of Artificial Sequence: Synthetic oligonucleotide
caaaacagaucaaagagac

SEQ ID NO: 2775620 - RNA, 19 nt, Artificial Sequence
  Description of Artificial Sequence: Synthetic oligonucleotide
auucauuuuaacaaaacag

SEQ ID NO: 2775621 - RNA, 19 nt, Artificial Sequence
  Description of Artificial Sequence: Synthetic oligonucleotide
uaaacaauagcaaaugguu

SEQ ID NO: 2775622 - RNA, 19 nt, Artificial Sequence
  Description of Artificial Sequence: Synthetic oligonucleotide
aauagcaaaugguuuaggu

SEQ ID NO: 2775623 - RNA, 19 nt, Artificial Sequence
  Description of Artificial Sequence: Synthetic oligonucleotide
aaagagacaguucucggug

SEQ ID NO: 2775624 - RNA, 19 nt, Artificial Sequence
  Description of Artificial Sequence: Synthetic oligonucleotide
agaucaaagagacaguucu

SEQ ID NO: 2775625 - RNA, 19 nt, Artificial Sequence
  Description of Artificial Sequence: Synthetic oligonucleotide
ucuuuuacauucuaaacaa

SEQ ID NO: 2775626 - RNA, 19 nt, Artificial Sequence
  Description of Artificial Sequence: Synthetic oligonucleotide
uaauugauauguuacaaaa

SEQ ID NO: 2775627 - RNA, 19 nt, Artificial Sequence
  Description of Artificial Sequence: Synthetic oligonucleotide
uguguugcaacacugggca

SEQ ID NO: 2775628 - RNA, 19 nt, Artificial Sequence
  Description of Artificial Sequence: Synthetic oligonucleotide
auuaaaauaaggacacagc

SEQ ID NO: 2775629 - RNA, 19 nt, Artificial Sequence
  Description of Artificial Sequence: Synthetic oligonucleotide
aaauaaacaaugaauuuga

SEQ ID NO: 2775630 - RNA, 19 nt, Artificial Sequence
  Description of Artificial Sequence: Synthetic oligonucleotide
aaaugguuuagguacaaau

SEQ ID NO: 2775631 - RNA, 19 nt, Artificial Sequence
  Description of Artificial Sequence: Synthetic oligonucleotide
uagcaaaugguuuagguac

SEQ ID NO: 2775632 - RNA, 19 nt, Artificial Sequence
  Description of Artificial Sequence: Synthetic oligonucleotide
uuuagguacaaaugaaaug

SEQ ID NO: 2775633 - RNA, 19 nt, Artificial Sequence
  Description of Artificial Sequence: Synthetic oligonucleotide
aaagauaaauacaauauuu

SEQ ID NO: 2775634 - RNA, 19 nt, Artificial Sequence
  Description of Artificial Sequence: Synthetic oligonucleotide
ugauauguuacaaaauaaa

SEQ ID NO: 2775635 - RNA, 19 nt, Artificial Sequence
  Description of Artificial Sequence: Synthetic oligonucleotide
uaacaaaacagaucaaaga

SEQ ID NO: 2775636 - RNA, 19 nt, Artificial Sequence
  Description of Artificial Sequence: Synthetic oligonucleotide
auugauauguuacaaaaua

SEQ ID NO: 2775637 - RNA, 19 nt, Artificial Sequence
  Description of Artificial Sequence: Synthetic oligonucleotide
uucaaagauaaauacaaua

SEQ ID NO: 2775638 - RNA, 19 nt, Artificial Sequence
  Description of Artificial Sequence: Synthetic oligonucleotide
aucaaacaccaauacagac

SEQ ID NO: 2775639 - RNA, 19 nt, Artificial Sequence
  Description of Artificial Sequence: Synthetic oligonucleotide
uuugacuauacaacaaacu

SEQ ID NO: 2775640 - RNA, 19 nt, Artificial Sequence
  Description of Artificial Sequence: Synthetic oligonucleotide
uuuucaaaaggauuuguuc

SEQ ID NO: 2775641 - RNA, 19 nt, Artificial Sequence
  Description of Artificial Sequence: Synthetic oligonucleotide
uuauaauugauauguuaca

SEQ ID NO: 2775642 - RNA, 19 nt, Artificial Sequence
  Description of Artificial Sequence: Synthetic oligonucleotide
uauacaacaaacuuuucuu

SEQ ID NO: 2775643 - RNA, 19 nt, Artificial Sequence
  Description of Artificial Sequence: Synthetic oligonucleotide
auaaacaaugaauuugacu

SEQ ID NO: 2775644 - RNA, 19 nt, Artificial Sequence
  Description of Artificial Sequence: Synthetic oligonucleotide
gauucauuuuaacaaaaca

SEQ ID NO: 2775645 - RNA, 19 nt, Artificial Sequence
  Description of Artificial Sequence: Synthetic oligonucleotide
ucauuuuaacaaaacagau

SEQ ID NO: 2775646 - RNA, 19 nt, Artificial Sequence
  Description of Artificial Sequence: Synthetic oligonucleotide
uggaaagucuaaacaauag

SEQ ID NO: 2775647 - RNA, 19 nt, Artificial Sequence
  Description of Artificial Sequence: Synthetic oligonucleotide
ugacuuuuccucaacauaa

SEQ ID NO: 2775648 - RNA, 19 nt, Artificial Sequence
  Description of Artificial Sequence: Synthetic oligonucleotide
aauuucaaagauaaauaca

SEQ ID NO: 2775649 - RNA, 19 nt, Artificial Sequence
  Description of Artificial Sequence: Synthetic oligonucleotide
uugacuauacaacaaacuu

SEQ ID NO: 2775650 - RNA, 19 nt, Artificial Sequence
  Description of Artificial Sequence: Synthetic oligonucleotide
aauuugacuuuuccucaac

SEQ ID NO: 2775651 - RNA, 19 nt, Artificial Sequence
  Description of Artificial Sequence: Synthetic oligonucleotide
uacaaaugaaauguaagga

SEQ ID NO: 2775652 - RNA, 19 nt, Artificial Sequence
  Description of Artificial Sequence: Synthetic oligonucleotide
uucaaaaggauuuguucag

SEQ ID NO: 2775653 - RNA, 19 nt, Artificial Sequence
  Description of Artificial Sequence: Synthetic oligonucleotide
uuuugacuauacaacaaac

SEQ ID NO: 2775654 - RNA, 19 nt, Artificial Sequence
  Description of Artificial Sequence: Synthetic oligonucleotide
uguuggcagacuaaaaugu

SEQ ID NO: 2775655 - RNA, 19 nt, Artificial Sequence
  Description of Artificial Sequence: Synthetic oligonucleotide
ugaaauguaaggacauuga

SEQ ID NO: 2775656 - RNA, 19 nt, Artificial Sequence
  Description of Artificial Sequence: Synthetic oligonucleotide
aaugguuuagguacaaaug

SEQ ID NO: 2775657 - RNA, 19 nt, Artificial Sequence
  Description of Artificial Sequence: Synthetic oligonucleotide
agauaaauacaauauuuau

SEQ ID NO: 2775658 - RNA, 19 nt, Artificial Sequence
  Description of Artificial Sequence: Synthetic oligonucleotide
uucuuuugacuauacaaca

SEQ ID NO: 2775659 - RNA, 19 nt, Artificial Sequence
  Description of Artificial Sequence: Synthetic oligonucleotide
ggaucaaacaccaauacag

SEQ ID NO: 2775660 - RNA, 19 nt, Artificial Sequence
  Description of Artificial Sequence: Synthetic oligonucleotide
acuaggguuugucacggcc

SEQ ID NO: 2775661 - RNA, 19 nt, Artificial Sequence
  Description of Artificial Sequence: Synthetic oligonucleotide
augguuuagguacaaauga

SEQ ID NO: 2775662 - RNA, 19 nt, Artificial Sequence
  Description of Artificial Sequence: Synthetic oligonucleotide
auguuacaaaauaaagucc

SEQ ID NO: 2775663 - RNA, 19 nt, Artificial Sequence
  Description of Artificial Sequence: Synthetic oligonucleotide
acauugauucauuuuaaca

SEQ ID NO: 2775664 - RNA, 19 nt, Artificial Sequence
  Description of Artificial Sequence: Synthetic oligonucleotide
uugauauguuacaaaauaa

SEQ ID NO: 2775665 - RNA, 19 nt, Artificial Sequence
  Description of Artificial Sequence: Synthetic oligonucleotide
uuucuuuuacauucuaaac

SEQ ID NO: 2775666 - RNA, 19 nt, Artificial Sequence
  Description of Artificial Sequence: Synthetic oligonucleotide
ugaauuugacuuuuccuca

SEQ ID NO: 2775667 - RNA, 19 nt, Artificial Sequence
  Description of Artificial Sequence: Synthetic oligonucleotide
aaauaaagucccuuagcaa

SEQ ID NO: 2775668 - RNA, 19 nt, Artificial Sequence
  Description of Artificial Sequence: Synthetic oligonucleotide
augcacagaaccuacuagg

SEQ ID NO: 2775669 - RNA, 19 nt, Artificial Sequence
  Description of Artificial Sequence: Synthetic oligonucleotide
aauaaacaaugaauuugac

SEQ ID NO: 2775670 - RNA, 19 nt, Artificial Sequence
  Description of Artificial Sequence: Synthetic oligonucleotide
ugcacagaaccuacuaggg

SEQ ID NO: 2775671 - RNA, 19 nt, Artificial Sequence
  Description of Artificial Sequence: Synthetic oligonucleotide
guuucuuuugacuauacaa

SEQ ID NO: 2775672 - RNA, 19 nt, Artificial Sequence
  Description of Artificial Sequence: Synthetic oligonucleotide
cauugauucauuuuaacaa

SEQ ID NO: 2775673 - RNA, 19 nt, Artificial Sequence
  Description of Artificial Sequence: Synthetic oligonucleotide
auauguuacaaaauaaagu

SEQ ID NO: 2775674 - RNA, 19 nt, Artificial Sequence
  Description of Artificial Sequence: Synthetic oligonucleotide
aaggacacagccccagacg

SEQ ID NO: 2775675 - RNA, 19 nt, Artificial Sequence
  Description of Artificial Sequence: Synthetic oligonucleotide
caaaauaaagucccuuagc

SEQ ID NO: 2775676 - RNA, 19 nt, Artificial Sequence
  Description of Artificial Sequence: Synthetic oligonucleotide
aacaccaauacagacguga

SEQ ID NO: 2775677 - RNA, 19 nt, Artificial Sequence
  Description of Artificial Sequence: Synthetic oligonucleotide
cauuuuaacaaaacagauc

SEQ ID NO: 2775678 - RNA, 19 nt, Artificial Sequence
  Description of Artificial Sequence: Synthetic oligonucleotide
auuuauaauugauauguua

SEQ ID NO: 2775679 - RNA, 19 nt, Artificial Sequence
  Description of Artificial Sequence: Synthetic oligonucleotide
uguguuggcagacuaaaau

SEQ ID NO: 2775680 - RNA, 19 nt, Artificial Sequence
  Description of Artificial Sequence: Synthetic oligonucleotide
aaaagaagguggggaaagc

SEQ ID NO: 2775681 - RNA, 19 nt, Artificial Sequence
  Description of Artificial Sequence: Synthetic oligonucleotide
ucaaagagacaguucucgg

SEQ ID NO: 2775682 - RNA, 19 nt, Artificial Sequence
  Description of Artificial Sequence: Synthetic oligonucleotide
uauaauugauauguuacaa

SEQ ID NO: 2775683 - RNA, 19 nt, Artificial Sequence
  Description of Artificial Sequence: Synthetic oligonucleotide
gauuuguucagauaacuua

SEQ ID NO: 2775684 - RNA, 19 nt, Artificial Sequence
  Description of Artificial Sequence: Synthetic oligonucleotide
aagcaauguacaaaauuuc

SEQ ID NO: 2775685 - RNA, 19 nt, Artificial Sequence
  Description of Artificial Sequence: Synthetic oligonucleotide
auugauucauuuuaacaaa

SEQ ID NO: 2775686 - RNA, 19 nt, Artificial Sequence
  Description of Artificial Sequence: Synthetic oligonucleotide
ugauucauuuuaacaaaac

SEQ ID NO: 2775687 - RNA, 19 nt, Artificial Sequence
  Description of Artificial Sequence: Synthetic oligonucleotide
accuacuaggguuugucac

SEQ ID NO: 2775688 - RNA, 19 nt, Artificial Sequence
  Description of Artificial Sequence: Synthetic oligonucleotide
caaaugaaauguaaggaca

SEQ ID NO: 2775689 - RNA, 19 nt, Artificial Sequence
  Description of Artificial Sequence: Synthetic oligonucleotide
aaagucccuuagcaacugc

SEQ ID NO: 2775690 - RNA, 19 nt, Artificial Sequence
  Description of Artificial Sequence: Synthetic oligonucleotide
agggauggaaagucuaaac

SEQ ID NO: 2775691 - RNA, 19 nt, Artificial Sequence
  Description of Artificial Sequence: Synthetic oligonucleotide
ugacuauacaacaaacuuu

SEQ ID NO: 2775692 - RNA, 19 nt, Artificial Sequence
  Description of Artificial Sequence: Synthetic oligonucleotide
aauaaggacacagccccag

SEQ ID NO: 2775693 - RNA, 19 nt, Artificial Sequence
  Description of Artificial Sequence: Synthetic oligonucleotide
caaugaauuugacuuuucc

SEQ ID NO: 2775694 - RNA, 19 nt, Artificial Sequence
  Description of Artificial Sequence: Synthetic oligonucleotide
aggacauugauucauuuua

SEQ ID NO: 2775695 - RNA, 19 nt, Artificial Sequence
  Description of Artificial Sequence: Synthetic oligonucleotide
auaauugauauguuacaaa

SEQ ID NO: 2775696 - RNA, 19 nt, Artificial Sequence
  Description of Artificial Sequence: Synthetic oligonucleotide
augaaauguaaggacauug

SEQ ID NO: 2775697 - RNA, 19 nt, Artificial Sequence
  Description of Artificial Sequence: Synthetic oligonucleotide
aggacacagccccagacgg

SEQ ID NO: 2775698 - RNA, 19 nt, Artificial Sequence
  Description of Artificial Sequence: Synthetic oligonucleotide
ucuuuugacuauacaacaa

SEQ ID NO: 2775699 - RNA, 19 nt, Artificial Sequence
  Description of Artificial Sequence: Synthetic oligonucleotide
uguugcaacacugggcagg

SEQ ID NO: 2775700 - RNA, 19 nt, Artificial Sequence
  Description of Artificial Sequence: Synthetic oligonucleotide
uugauucauuuuaacaaaa

SEQ ID NO: 2775701 - RNA, 19 nt, Artificial Sequence
  Description of Artificial Sequence: Synthetic oligonucleotide
uuuguugugugugugugug

SEQ ID NO: 2775702 - RNA, 19 nt, Artificial Sequence
  Description of Artificial Sequence: Synthetic oligonucleotide
uuggcagacuaaaauguac

SEQ ID NO: 2775703 - RNA, 19 nt, Artificial Sequence
  Description of Artificial Sequence: Synthetic oligonucleotide
aaacaaugaauuugacuuu

SEQ ID NO: 2775704 - RNA, 19 nt, Artificial Sequence
  Description of Artificial Sequence: Synthetic oligonucleotide
aaauguaaggacauugauu

SEQ ID NO: 2775705 - RNA, 19 nt, Artificial Sequence
  Description of Artificial Sequence: Synthetic oligonucleotide
aaaugaaauguaaggacau

SEQ ID NO: 2775706 - RNA, 19 nt, Artificial Sequence
  Description of Artificial Sequence: Synthetic oligonucleotide
uguguguguguguuggcag

SEQ ID NO: 2775707 - RNA, 19 nt, Artificial Sequence
  Description of Artificial Sequence: Synthetic oligonucleotide
aaaaggauuuguucagaua

SEQ ID NO: 2775708 - RNA, 19 nt, Artificial Sequence
  Description of Artificial Sequence: Synthetic oligonucleotide
cuaggguuugucacggccg

SEQ ID NO: 2775709 - RNA, 19 nt, Artificial Sequence
  Description of Artificial Sequence: Synthetic oligonucleotide
uggcagacuaaaauguacu

SEQ ID NO: 2775710 - RNA, 19 nt, Artificial Sequence
  Description of Artificial Sequence: Synthetic oligonucleotide
guguuggcagacuaaaaug

SEQ ID NO: 2775711 - RNA, 19 nt, Artificial Sequence
  Description of Artificial Sequence: Synthetic oligonucleotide
uuguucagauaacuuaaaa

SEQ ID NO: 2775712 - RNA, 19 nt, Artificial Sequence
  Description of Artificial Sequence: Synthetic oligonucleotide
aaggauuuguucagauaac

SEQ ID NO: 2775713 - RNA, 19 nt, Artificial Sequence
  Description of Artificial Sequence: Synthetic oligonucleotide
ggaaagucuaaacaauagc

SEQ ID NO: 2775714 - RNA, 19 nt, Artificial Sequence
  Description of Artificial Sequence: Synthetic oligonucleotide
uugacuuuuccucaacaua

SEQ ID NO: 2775715 - RNA, 19 nt, Artificial Sequence
  Description of Artificial Sequence: Synthetic oligonucleotide
gacauugauucauuuuaac

SEQ ID NO: 2775716 - RNA, 19 nt, Artificial Sequence
  Description of Artificial Sequence: Synthetic oligonucleotide
gguacaaaugaaauguaag

SEQ ID NO: 2775717 - RNA, 19 nt, Artificial Sequence
  Description of Artificial Sequence: Synthetic oligonucleotide
auagcaaaugguuuaggua

SEQ ID NO: 2775718 - RNA, 19 nt, Artificial Sequence
  Description of Artificial Sequence: Synthetic oligonucleotide
uguaaggacauugauucau

SEQ ID NO: 2775719 - RNA, 19 nt, Artificial Sequence
  Description of Artificial Sequence: Synthetic oligonucleotide
aauugauauguuacaaaau

SEQ ID NO: 2775720 - RNA, 19 nt, Artificial Sequence
  Description of Artificial Sequence: Synthetic oligonucleotide
caauguacaaaauuucaaa

SEQ ID NO: 2775721 - RNA, 19 nt, Artificial Sequence
  Description of Artificial Sequence: Synthetic oligonucleotide
ugggcaggaucaaacacca

SEQ ID NO: 2775722 - RNA, 19 nt, Artificial Sequence
  Description of Artificial Sequence: Synthetic oligonucleotide
aaggacauugauucauuuu

SEQ ID NO: 2775723 - RNA, 19 nt, Artificial Sequence
  Description of Artificial Sequence: Synthetic oligonucleotide
ugguuuagguacaaaugaa

SEQ ID NO: 2775724 - RNA, 19 nt, Artificial Sequence
  Description of Artificial Sequence: Synthetic oligonucleotide
gucuaaacaauagcaaaug

SEQ ID NO: 2775725 - RNA, 19 nt, Artificial Sequence
  Description of Artificial Sequence: Synthetic oligonucleotide
ucccuuagcaacugcaagu

SEQ ID NO: 2775726 - RNA, 19 nt, Artificial Sequence
  Description of Artificial Sequence: Synthetic oligonucleotide
uuuuaacaaaacagaucaa

SEQ ID NO: 2775727 - RNA, 19 nt, Artificial Sequence
  Description of Artificial Sequence: Synthetic oligonucleotide
uaaauacaauauuuauaau

SEQ ID NO: 2775728 - RNA, 19 nt, Artificial Sequence
  Description of Artificial Sequence: Synthetic oligonucleotide
caugcacagaaccuacuag

SEQ ID NO: 2775729 - RNA, 19 nt, Artificial Sequence
  Description of Artificial Sequence: Synthetic oligonucleotide
ugcaacacugggcaggauc

SEQ ID NO: 2775730 - RNA, 19 nt, Artificial Sequence
  Description of Artificial Sequence: Synthetic oligonucleotide
aggaucaaacaccaauaca

SEQ ID NO: 2775731 - RNA, 19 nt, Artificial Sequence
  Description of Artificial Sequence: Synthetic oligonucleotide
uuuguucagauaacuuaaa

SEQ ID NO: 2775732 - RNA, 19 nt, Artificial Sequence
  Description of Artificial Sequence: Synthetic oligonucleotide
uguugugugugugugugug

SEQ ID NO: 2775733 - RNA, 19 nt, Artificial Sequence
  Description of Artificial Sequence: Synthetic oligonucleotide
cuaaacaauagcaaauggu

SEQ ID NO: 2775734 - RNA, 19 nt, Artificial Sequence
  Description of Artificial Sequence: Synthetic oligonucleotide
aacaaugaauuugacuuuu

SEQ ID NO: 2775735 - RNA, 19 nt, Artificial Sequence
  Description of Artificial Sequence: Synthetic oligonucleotide
uaaggacacagccccagac

SEQ ID NO: 2775736 - RNA, 19 nt, Artificial Sequence
  Description of Artificial Sequence: Synthetic oligonucleotide
uauuuauaauugauauguu

SEQ ID NO: 2775737 - RNA, 19 nt, Artificial Sequence
  Description of Artificial Sequence: Synthetic oligonucleotide
ucggugucuguucuuuucc

SEQ ID NO: 2775738 - RNA, 19 nt, Artificial Sequence
  Description of Artificial Sequence: Synthetic oligonucleotide
acaauagcaaaugguuuag

SEQ ID NO: 2775739 - RNA, 19 nt, Artificial Sequence
  Description of Artificial Sequence: Synthetic oligonucleotide
auuuguucagauaacuuaa

SEQ ID NO: 2775740 - RNA, 19 nt, Artificial Sequence
  Description of Artificial Sequence: Synthetic oligonucleotide
cuguguugcaacacugggc

SEQ ID NO: 2775741 - RNA, 19 nt, Artificial Sequence
  Description of Artificial Sequence: Synthetic oligonucleotide
aaccuacuaggguuuguca

SEQ ID NO: 2775742 - RNA, 19 nt, Artificial Sequence
  Description of Artificial Sequence: Synthetic oligonucleotide
aagagacaguucucggugu

SEQ ID NO: 2775743 - RNA, 19 nt, Artificial Sequence
  Description of Artificial Sequence: Synthetic oligonucleotide
agcaauguacaaaauuuca

SEQ ID NO: 2775744 - RNA, 19 nt, Artificial Sequence
  Description of Artificial Sequence: Synthetic oligonucleotide
auacaacaaacuuuucuuu

SEQ ID NO: 2775745 - RNA, 19 nt, Artificial Sequence
  Description of Artificial Sequence: Synthetic oligonucleotide
gacgguguggccccucacg

SEQ ID NO: 2775746 - RNA, 19 nt, Artificial Sequence
  Description of Artificial Sequence: Synthetic oligonucleotide
caggaucaaacaccaauac

SEQ ID NO: 2775747 - RNA, 19 nt, Artificial Sequence
  Description of Artificial Sequence: Synthetic oligonucleotide
cuauacaacaaacuuuucu

SEQ ID NO: 2775748 - RNA, 19 nt, Artificial Sequence
  Description of Artificial Sequence: Synthetic oligonucleotide
uuuucccuguguugcaaca

SEQ ID NO: 2775749 - RNA, 19 nt, Artificial Sequence
  Description of Artificial Sequence: Synthetic oligonucleotide
cuuuugacuauacaacaaa

SEQ ID NO: 2775750 - RNA, 19 nt, Artificial Sequence
  Description of Artificial Sequence: Synthetic oligonucleotide
ucaaaaggauuuguucaga

SEQ ID NO: 2775751 - RNA, 19 nt, Artificial Sequence
  Description of Artificial Sequence: Synthetic oligonucleotide
acuuuucuuuucaaaagga

SEQ ID NO: 2775752 - RNA, 19 nt, Artificial Sequence
  Description of Artificial Sequence: Synthetic oligonucleotide
uguguguguuggcagacua

SEQ ID NO: 2775753 - RNA, 19 nt, Artificial Sequence
  Description of Artificial Sequence: Synthetic oligonucleotide
caaacaccaauacagacgu

SEQ ID NO: 2775754 - RNA, 19 nt, Artificial Sequence
  Description of Artificial Sequence: Synthetic oligonucleotide
ggauggaaagucuaaacaa

SEQ ID NO: 2775755 - RNA, 19 nt, Artificial Sequence
  Description of Artificial Sequence: Synthetic oligonucleotide
uaggguuugucacggccgc

SEQ ID NO: 2775756 - RNA, 19 nt, Artificial Sequence
  Description of Artificial Sequence: Synthetic oligonucleotide
aggauuuguucagauaacu

SEQ ID NO: 2775757 - RNA, 19 nt, Artificial Sequence
  Description of Artificial Sequence: Synthetic oligonucleotide
uuuuguugugugugugugu

SEQ ID NO: 2775758 - RNA, 19 nt, Artificial Sequence
  Description of Artificial Sequence: Synthetic oligonucleotide
uguguguuggcagacuaaa

SEQ ID NO: 2775759 - RNA, 19 nt, Artificial Sequence
  Description of Artificial Sequence: Synthetic oligonucleotide
guguguguguguguguugg

SEQ ID NO: 2775760 - RNA, 19 nt, Artificial Sequence
  Description of Artificial Sequence: Synthetic oligonucleotide
gaucaaacaccaauacaga

SEQ ID NO: 2775761 - RNA, 19 nt, Artificial Sequence
  Description of Artificial Sequence: Synthetic oligonucleotide
acuuuuccucaacauaaaa

SEQ ID NO: 2775762 - RNA, 19 nt, Artificial Sequence
  Description of Artificial Sequence: Synthetic oligonucleotide
aaaagggauggaaagucua

SEQ ID NO: 2775763 - RNA, 19 nt, Artificial Sequence
  Description of Artificial Sequence: Synthetic oligonucleotide
uugugugugugugugugug

SEQ ID NO: 2775764 - RNA, 19 nt, Artificial Sequence
  Description of Artificial Sequence: Synthetic oligonucleotide
cuacuaggguuugucacgg

SEQ ID NO: 2775765 - RNA, 19 nt, Artificial Sequence
  Description of Artificial Sequence: Synthetic oligonucleotide
acgguguggccccucacgg

SEQ ID NO: 2775766 - RNA, 19 nt, Artificial Sequence
  Description of Artificial Sequence: Synthetic oligonucleotide
gacuauacaacaaacuuuu

SEQ ID NO: 2775767 - RNA, 19 nt, Artificial Sequence
  Description of Artificial Sequence: Synthetic oligonucleotide
aaaacagaucaaagagaca

SEQ ID NO: 2775768 - RNA, 19 nt, Artificial Sequence
  Description of Artificial Sequence: Synthetic oligonucleotide
gggaaagcaauguacaaaa

SEQ ID NO: 2775769 - RNA, 19 nt, Artificial Sequence
  Description of Artificial Sequence: Synthetic oligonucleotide
ugucuguucuuuucccugu

SEQ ID NO: 2775770 - RNA, 19 nt, Artificial Sequence
  Description of Artificial Sequence: Synthetic oligonucleotide
aaugaaauguaaggacauu

SEQ ID NO: 2775771 - RNA, 19 nt, Artificial Sequence
  Description of Artificial Sequence: Synthetic oligonucleotide
auaaagucccuuagcaacu

SEQ ID NO: 2775772 - RNA, 19 nt, Artificial Sequence
  Description of Artificial Sequence: Synthetic oligonucleotide
uuugucacggccgcuggca

SEQ ID NO: 2775773 - RNA, 19 nt, Artificial Sequence
  Description of Artificial Sequence: Synthetic oligonucleotide
ucccuguguugcaacacug

SEQ ID NO: 2775774 - RNA, 19 nt, Artificial Sequence
  Description of Artificial Sequence: Synthetic oligonucleotide
gaaauguaaggacauugau

SEQ ID NO: 2775775 - RNA, 19 nt, Artificial Sequence
  Description of Artificial Sequence: Synthetic oligonucleotide
aagguggggaaagcaaugu

SEQ ID NO: 2775776 - RNA, 19 nt, Artificial Sequence
  Description of Artificial Sequence: Synthetic oligonucleotide
ucuguucuuuucccugugu

SEQ ID NO: 2775777 - RNA, 19 nt, Artificial Sequence
  Description of Artificial Sequence: Synthetic oligonucleotide
aguucucggugucuguucu

SEQ ID NO: 2775778 - RNA, 19 nt, Artificial Sequence
  Description of Artificial Sequence: Synthetic oligonucleotide
acacugggcaggaucaaac

SEQ ID NO: 2775779 - RNA, 19 nt, Artificial Sequence
  Description of Artificial Sequence: Synthetic oligonucleotide
uagguacaaaugaaaugua

SEQ ID NO: 2775780 - RNA, 19 nt, Artificial Sequence
  Description of Artificial Sequence: Synthetic oligonucleotide
gaagguggggaaagcaaug

SEQ ID NO: 2775781 - RNA, 19 nt, Artificial Sequence
  Description of Artificial Sequence: Synthetic oligonucleotide
uucccuguguugcaacacu

SEQ ID NO: 2775782 - RNA, 19 nt, Artificial Sequence
  Description of Artificial Sequence: Synthetic oligonucleotide
gucccuuagcaacugcaag

SEQ ID NO: 2775783 - RNA, 19 nt, Artificial Sequence
  Description of Artificial Sequence: Synthetic oligonucleotide
gggauggaaagucuaaaca

SEQ ID NO: 2775784 - RNA, 19 nt, Artificial Sequence
  Description of Artificial Sequence: Synthetic oligonucleotide
aaagggauggaaagucuaa

SEQ ID NO: 2775785 - RNA, 19 nt, Artificial Sequence
  Description of Artificial Sequence: Synthetic oligonucleotide
gugucuguucuuuucccug

SEQ ID NO: 2775786 - RNA, 19 nt, Artificial Sequence
  Description of Artificial Sequence: Synthetic oligonucleotide
ccuacuaggguuugucacg

SEQ ID NO: 2775787 - RNA, 19 nt, Artificial Sequence
  Description of Artificial Sequence: Synthetic oligonucleotide
gaauuugacuuuuccucaa

SEQ ID NO: 2775788 - RNA, 19 nt, Artificial Sequence
  Description of Artificial Sequence: Synthetic oligonucleotide
acagaucaaagagacaguu

SEQ ID NO: 2775789 - RNA, 19 nt, Artificial Sequence
  Description of Artificial Sequence: Synthetic oligonucleotide
uaaggacauugauucauuu

SEQ ID NO: 2775790 - RNA, 19 nt, Artificial Sequence
  Description of Artificial Sequence: Synthetic oligonucleotide
aacagaucaaagagacagu

SEQ ID NO: 2775791 - RNA, 19 nt, Artificial Sequence
  Description of Artificial Sequence: Synthetic oligonucleotide
cagaucaaagagacaguuc

SEQ ID NO: 2775792 - RNA, 19 nt, Artificial Sequence
  Description of Artificial Sequence: Synthetic oligonucleotide
uaaagucccuuagcaacug

SEQ ID NO: 2775793 - RNA, 19 nt, Artificial Sequence
  Description of Artificial Sequence: Synthetic oligonucleotide
uggggaaagcaauguacaa

SEQ ID NO: 2775794 - RNA, 19 nt, Artificial Sequence
  Description of Artificial Sequence: Synthetic oligonucleotide
caauagcaaaugguuuagg

SEQ ID NO: 2775795 - RNA, 19 nt, Artificial Sequence
  Description of Artificial Sequence: Synthetic oligonucleotide
uguguguguguguguguug

SEQ ID NO: 2775796 - RNA, 19 nt, Artificial Sequence
  Description of Artificial Sequence: Synthetic oligonucleotide
aagggauggaaagucuaaa

SEQ ID NO: 2775797 - RNA, 19 nt, Artificial Sequence
  Description of Artificial Sequence: Synthetic oligonucleotide
acaaugaauuugacuuuuc

SEQ ID NO: 2775798 - RNA, 19 nt, Artificial Sequence
  Description of Artificial Sequence: Synthetic oligonucleotide
cuuuucccuguguugcaac

SEQ ID NO: 2775799 - RNA, 19 nt, Artificial Sequence
  Description of Artificial Sequence: Synthetic oligonucleotide
gaaccuacuaggguuuguc

SEQ ID NO: 2775800 - RNA, 19 nt, Artificial Sequence
  Description of Artificial Sequence: Synthetic oligonucleotide
auguaaggacauugauuca

SEQ ID NO: 2775801 - RNA, 19 nt, Artificial Sequence
  Description of Artificial Sequence: Synthetic oligonucleotide
acuauacaacaaacuuuuc

SEQ ID NO: 2775802 - RNA, 19 nt, Artificial Sequence
  Description of Artificial Sequence: Synthetic oligonucleotide
cagacuaaaauguacuuuu

SEQ ID NO: 2775803 - RNA, 19 nt, Artificial Sequence
  Description of Artificial Sequence: Synthetic oligonucleotide
gauggaaagucuaaacaau

SEQ ID NO: 2775804 - RNA, 19 nt, Artificial Sequence
  Description of Artificial Sequence: Synthetic oligonucleotide
guuuagguacaaaugaaau

SEQ ID NO: 2775805 - RNA, 19 nt, Artificial Sequence
  Description of Artificial Sequence: Synthetic oligonucleotide
caaagauaaauacaauauu

SEQ ID NO: 2775806 - RNA, 19 nt, Artificial Sequence
  Description of Artificial Sequence: Synthetic oligonucleotide
gguggggaaagcaauguac

SEQ ID NO: 2775807 - RNA, 19 nt, Artificial Sequence
  Description of Artificial Sequence: Synthetic oligonucleotide
gaucaaagagacaguucuc

SEQ ID NO: 2775808 - RNA, 19 nt, Artificial Sequence
  Description of Artificial Sequence: Synthetic oligonucleotide
aaauaaggacacagcccca

SEQ ID NO: 2775809 - RNA, 19 nt, Artificial Sequence
  Description of Artificial Sequence: Synthetic oligonucleotide
uguguguguguguguuggc

SEQ ID NO: 2775810 - RNA, 19 nt, Artificial Sequence
  Description of Artificial Sequence: Synthetic oligonucleotide
agguacaaaugaaauguaa

SEQ ID NO: 2775811 - RNA, 19 nt, Artificial Sequence
  Description of Artificial Sequence: Synthetic oligonucleotide
ugugugugugugugugugu

SEQ ID NO: 2775812 - RNA, 19 nt, Artificial Sequence
  Description of Artificial Sequence: Synthetic oligonucleotide
auaaggacacagccccaga

SEQ ID NO: 2775813 - RNA, 19 nt, Artificial Sequence
  Description of Artificial Sequence: Synthetic oligonucleotide
ccuguguugcaacacuggg

SEQ ID NO: 2775814 - RNA, 19 nt, Artificial Sequence
  Description of Artificial Sequence: Synthetic oligonucleotide
cucggugucuguucuuuuc

SEQ ID NO: 2775815 - RNA, 19 nt, Artificial Sequence
  Description of Artificial Sequence: Synthetic oligonucleotide
cuuuucuuuucaaaaggau

SEQ ID NO: 2775816 - RNA, 19 nt, Artificial Sequence
  Description of Artificial Sequence: Synthetic oligonucleotide
guggggaaagcaauguaca

SEQ ID NO: 2775817 - RNA, 19 nt, Artificial Sequence
  Description of Artificial Sequence: Synthetic oligonucleotide
guacaaaauuucaaagaua

SEQ ID NO: 2775818 - RNA, 19 nt, Artificial Sequence
  Description of Artificial Sequence: Synthetic oligonucleotide
agaagguggggaaagcaau

SEQ ID NO: 2775819 - RNA, 19 nt, Artificial Sequence
  Description of Artificial Sequence: Synthetic oligonucleotide
uuucccuguguugcaacac

SEQ ID NO: 2775820 - RNA, 19 nt, Artificial Sequence
  Description of Artificial Sequence: Synthetic oligonucleotide
agacaguucucggugucug

SEQ ID NO: 2775821 - RNA, 19 nt, Artificial Sequence
  Description of Artificial Sequence: Synthetic oligonucleotide
gugugugugugugugugug

SEQ ID NO: 2775822 - RNA, 19 nt, Artificial Sequence
  Description of Artificial Sequence: Synthetic oligonucleotide
gguguggccccucacggcc

SEQ ID NO: 2775823 - RNA, 19 nt, Artificial Sequence
  Description of Artificial Sequence: Synthetic oligonucleotide
gucacggccgcuggcaccg

SEQ ID NO: 2775824 - RNA, 19 nt, Artificial Sequence
  Description of Artificial Sequence: Synthetic oligonucleotide
uccgcaugcacagaaccua

SEQ ID NO: 2775825 - RNA, 19 nt, Artificial Sequence
  Description of Artificial Sequence: Synthetic oligonucleotide
aacacugggcaggaucaaa

SEQ ID NO: 2775826 - RNA, 19 nt, Artificial Sequence
  Description of Artificial Sequence: Synthetic oligonucleotide
caaagagacaguucucggu

SEQ ID NO: 2775827 - RNA, 19 nt, Artificial Sequence
  Description of Artificial Sequence: Synthetic oligonucleotide
cucacggccgcuccgcaug

SEQ ID NO: 2775828 - RNA, 19 nt, Artificial Sequence
  Description of Artificial Sequence: Synthetic oligonucleotide
cuuuucaaaaggauuuguu

SEQ ID NO: 2775829 - RNA, 19 nt, Artificial Sequence
  Description of Artificial Sequence: Synthetic oligonucleotide
gcuggcaccguuucuuuug

SEQ ID NO: 2775830 - RNA, 19 nt, Artificial Sequence
  Description of Artificial Sequence: Synthetic oligonucleotide
ucuuuucccuguguugcaa

SEQ ID NO: 2775831 - RNA, 19 nt, Artificial Sequence
  Description of Artificial Sequence: Synthetic oligonucleotide
uuguugugugugugugugu

SEQ ID NO: 2775832 - RNA, 19 nt, Artificial Sequence
  Description of Artificial Sequence: Synthetic oligonucleotide
cacagaaccuacuaggguu

SEQ ID NO: 2775833 - RNA, 19 nt, Artificial Sequence
  Description of Artificial Sequence: Synthetic oligonucleotide
gcuccgcaugcacagaacc

SEQ ID NO: 2775834 - RNA, 19 nt, Artificial Sequence
  Description of Artificial Sequence: Synthetic oligonucleotide
acggccgcuccgcaugcac

SEQ ID NO: 2775835 - RNA, 19 nt, Artificial Sequence
  Description of Artificial Sequence: Synthetic oligonucleotide
gguuuagguacaaaugaaa

SEQ ID NO: 2775836 - RNA, 19 nt, Artificial Sequence
  Description of Artificial Sequence: Synthetic oligonucleotide
ugucacggccgcuggcacc

SEQ ID NO: 2775837 - RNA, 19 nt, Artificial Sequence
  Description of Artificial Sequence: Synthetic oligonucleotide
gguuugucacggccgcugg

SEQ ID NO: 2775838 - RNA, 19 nt, Artificial Sequence
  Description of Artificial Sequence: Synthetic oligonucleotide
agccccagacgguguggcc

SEQ ID NO: 2775839 - RNA, 19 nt, Artificial Sequence
  Description of Artificial Sequence: Synthetic oligonucleotide
uugucacggccgcuggcac

SEQ ID NO: 2775840 - RNA, 19 nt, Artificial Sequence
  Description of Artificial Sequence: Synthetic oligonucleotide
agacgguguggccccucac

SEQ ID NO: 2775841 - RNA, 19 nt, Artificial Sequence
  Description of Artificial Sequence: Synthetic oligonucleotide
guuugucacggccgcuggc

SEQ ID NO: 2775842 - RNA, 19 nt, Artificial Sequence
  Description of Artificial Sequence: Synthetic oligonucleotide
guguguguguguuggcaga

SEQ ID NO: 2775843 - RNA, 19 nt, Artificial Sequence
  Description of Artificial Sequence: Synthetic oligonucleotide
gcaauguacaaaauuucaa

SEQ ID NO: 2775844 - RNA, 19 nt, Artificial Sequence
  Description of Artificial Sequence: Synthetic oligonucleotide
caguucucggugucuguuc

SEQ ID NO: 2775845 - RNA, 19 nt, Artificial Sequence
  Description of Artificial Sequence: Synthetic oligonucleotide
caaaaggauuuguucagau

SEQ ID NO: 2775846 - RNA, 19 nt, Artificial Sequence
  Description of Artificial Sequence: Synthetic oligonucleotide
uacuaggguuugucacggc

SEQ ID NO: 2775847 - RNA, 19 nt, Artificial Sequence
  Description of Artificial Sequence: Synthetic oligonucleotide
uucucggugucuguucuuu

SEQ ID NO: 2775848 - RNA, 19 nt, Artificial Sequence
  Description of Artificial Sequence: Synthetic oligonucleotide
guguugcaacacugggcag

SEQ ID NO: 2775849 - RNA, 19 nt, Artificial Sequence
  Description of Artificial Sequence: Synthetic oligonucleotide
gacuuuuccucaacauaaa

SEQ ID NO: 2775850 - RNA, 19 nt, Artificial Sequence
  Description of Artificial Sequence: Synthetic oligonucleotide
aaacaccaauacagacgug

SEQ ID NO: 2775851 - RNA, 19 nt, Artificial Sequence
  Description of Artificial Sequence: Synthetic oligonucleotide
cacugggcaggaucaaaca

SEQ ID NO: 2775852 - RNA, 19 nt, Artificial Sequence
  Description of Artificial Sequence: Synthetic oligonucleotide
guugcaacacugggcagga

SEQ ID NO: 2775853 - RNA, 19 nt, Artificial Sequence
  Description of Artificial Sequence: Synthetic oligonucleotide
ggcaggaucaaacaccaau

SEQ ID NO: 2775854 - RNA, 19 nt, Artificial Sequence
  Description of Artificial Sequence: Synthetic oligonucleotide
uguggccccucacggccgc

SEQ ID NO: 2775855 - RNA, 19 nt, Artificial Sequence
  Description of Artificial Sequence: Synthetic oligonucleotide
acagaaccuacuaggguuu

SEQ ID NO: 2775856 - RNA, 19 nt, Artificial Sequence
  Description of Artificial Sequence: Synthetic oligonucleotide
ucacggccgcuccgcaugc

SEQ ID NO: 2775857 - RNA, 19 nt, Artificial Sequence
  Description of Artificial Sequence: Synthetic oligonucleotide
guguguguguguguuggca

SEQ ID NO: 2775858 - RNA, 19 nt, Artificial Sequence
  Description of Artificial Sequence: Synthetic oligonucleotide
cccuguguugcaacacugg

SEQ ID NO: 2775859 - RNA, 19 nt, Artificial Sequence
  Description of Artificial Sequence: Synthetic oligonucleotide
agguggggaaagcaaugua

SEQ ID NO: 2775860 - RNA, 19 nt, Artificial Sequence
  Description of Artificial Sequence: Synthetic oligonucleotide
guuggcagacuaaaaugua

SEQ ID NO: 2775861 - RNA, 19 nt, Artificial Sequence
  Description of Artificial Sequence: Synthetic oligonucleotide
gcaccguuucuuuugacua

SEQ ID NO: 2775862 - RNA, 19 nt, Artificial Sequence
  Description of Artificial Sequence: Synthetic oligonucleotide
gcaacacugggcaggauca

SEQ ID NO: 2775863 - RNA, 19 nt, Artificial Sequence
  Description of Artificial Sequence: Synthetic oligonucleotide
agucccuuagcaacugcaa

SEQ ID NO: 2775864 - RNA, 19 nt, Artificial Sequence
  Description of Artificial Sequence: Synthetic oligonucleotide
agaaccuacuaggguuugu

SEQ ID NO: 2775865 - RNA, 19 nt, Artificial Sequence
  Description of Artificial Sequence: Synthetic oligonucleotide
acaguucucggugucuguu

SEQ ID NO: 2775866 - RNA, 19 nt, Artificial Sequence
  Description of Artificial Sequence: Synthetic oligonucleotide
acagccccagacggugugg

SEQ ID NO: 2775867 - RNA, 19 nt, Artificial Sequence
  Description of Artificial Sequence: Synthetic oligonucleotide
accguuucuuuugacuaua

SEQ ID NO: 2775868 - RNA, 19 nt, Artificial Sequence
  Description of Artificial Sequence: Synthetic oligonucleotide
ggggaaagcaauguacaaa

SEQ ID NO: 2775869 - RNA, 19 nt, Artificial Sequence
  Description of Artificial Sequence: Synthetic oligonucleotide
cacagccccagacggugug

SEQ ID NO: 2775870 - RNA, 19 nt, Artificial Sequence
  Description of Artificial Sequence: Synthetic oligonucleotide
ggacauugauucauuuuaa

SEQ ID NO: 2775871 - RNA, 19 nt, Artificial Sequence
  Description of Artificial Sequence: Synthetic oligonucleotide
gcaggaucaaacaccaaua

SEQ ID NO: 2775872 - RNA, 19 nt, Artificial Sequence
  Description of Artificial Sequence: Synthetic oligonucleotide
ggccgcuccgcaugcacag

SEQ ID NO: 2775873 - RNA, 19 nt, Artificial Sequence
  Description of Artificial Sequence: Synthetic oligonucleotide
cagaaccuacuaggguuug

SEQ ID NO: 2775874 - RNA, 19 nt, Artificial Sequence
  Description of Artificial Sequence: Synthetic oligonucleotide
ggcaccguuucuuuugacu

SEQ ID NO: 2775875 - RNA, 19 nt, Artificial Sequence
  Description of Artificial Sequence: Synthetic oligonucleotide
cuggcaccguuucuuuuga

SEQ ID NO: 2775876 - RNA, 19 nt, Artificial Sequence
  Description of Artificial Sequence: Synthetic oligonucleotide
uggcaccguuucuuuugac

SEQ ID NO: 2775877 - RNA, 19 nt, Artificial Sequence
  Description of Artificial Sequence: Synthetic oligonucleotide
ggguuugucacggccgcug

SEQ ID NO: 2775878 - RNA, 19 nt, Artificial Sequence
  Description of Artificial Sequence: Synthetic oligonucleotide
guugugugugugugugugu

SEQ ID NO: 2775879 - RNA, 19 nt, Artificial Sequence
  Description of Artificial Sequence: Synthetic oligonucleotide
caaaugguuuagguacaaa

SEQ ID NO: 2775880 - RNA, 19 nt, Artificial Sequence
  Description of Artificial Sequence: Synthetic oligonucleotide
ggugucuguucuuuucccu

SEQ ID NO: 2775881 - RNA, 19 nt, Artificial Sequence
  Description of Artificial Sequence: Synthetic oligonucleotide
cagccccagacgguguggc

SEQ ID NO: 2775882 - RNA, 19 nt, Artificial Sequence
  Description of Artificial Sequence: Synthetic oligonucleotide
guguggccccucacggccg

SEQ ID NO: 2775883 - RNA, 19 nt, Artificial Sequence
  Description of Artificial Sequence: Synthetic oligonucleotide
gagacaguucucggugucu

SEQ ID NO: 2775884 - RNA, 19 nt, Artificial Sequence
  Description of Artificial Sequence: Synthetic oligonucleotide
ccguuucuuuugacuauac

SEQ ID NO: 2775885 - RNA, 19 nt, Artificial Sequence
  Description of Artificial Sequence: Synthetic oligonucleotide
cuccgcaugcacagaaccu

SEQ ID NO: 2775886 - RNA, 19 nt, Artificial Sequence
  Description of Artificial Sequence: Synthetic oligonucleotide
cuguucuuuucccuguguu

SEQ ID NO: 2775887 - RNA, 19 nt, Artificial Sequence
  Description of Artificial Sequence: Synthetic oligonucleotide
guguguuggcagacuaaaa

SEQ ID NO: 2775888 - RNA, 19 nt, Artificial Sequence
  Description of Artificial Sequence: Synthetic oligonucleotide
ccgcaugcacagaaccuac

SEQ ID NO: 2775889 - RNA, 19 nt, Artificial Sequence
  Description of Artificial Sequence: Synthetic oligonucleotide
guaaggacauugauucauu

SEQ ID NO: 2775890 - RNA, 19 nt, Artificial Sequence
  Description of Artificial Sequence: Synthetic oligonucleotide
guguguguuggcagacuaa

SEQ ID NO: 2775891 - RNA, 19 nt, Artificial Sequence
  Description of Artificial Sequence: Synthetic oligonucleotide
ggcagacuaaaauguacuu

SEQ ID NO: 2775892 - RNA, 19 nt, Artificial Sequence
  Description of Artificial Sequence: Synthetic oligonucleotide
gccccagacgguguggccc

SEQ ID NO: 2775893 - RNA, 19 nt, Artificial Sequence
  Description of Artificial Sequence: Synthetic oligonucleotide
cggugucuguucuuuuccc

SEQ ID NO: 2775894 - RNA, 19 nt, Artificial Sequence
  Description of Artificial Sequence: Synthetic oligonucleotide
gcacagaaccuacuagggu

SEQ ID NO: 2775895 - RNA, 19 nt, Artificial Sequence
  Description of Artificial Sequence: Synthetic oligonucleotide
ggauuuguucagauaacuu

SEQ ID NO: 2775896 - RNA, 19 nt, Artificial Sequence
  Description of Artificial Sequence: Synthetic oligonucleotide
gcagacuaaaauguacuuu

SEQ ID NO: 2775897 - RNA, 19 nt, Artificial Sequence
  Description of Artificial Sequence: Synthetic oligonucleotide
cagacgguguggccccuca

SEQ ID NO: 2775898 - RNA, 19 nt, Artificial Sequence
  Description of Artificial Sequence: Synthetic oligonucleotide
gcaaaugguuuagguacaa

SEQ ID NO: 2775899 - RNA, 19 nt, Artificial Sequence
  Description of Artificial Sequence: Synthetic oligonucleotide
aggguuugucacggccgcu

SEQ ID NO: 2775900 - RNA, 19 nt, Artificial Sequence
  Description of Artificial Sequence: Synthetic oligonucleotide
caccguuucuuuugacuau

SEQ ID NO: 2775901 - RNA, 19 nt, Artificial Sequence
  Description of Artificial Sequence: Synthetic oligonucleotide
cguuucuuuugacuauaca

SEQ ID NO: 2775902 - RNA, 19 nt, Artificial Sequence
  Description of Artificial Sequence: Synthetic oligonucleotide
ccccagacgguguggcccc

SEQ ID NO: 2775903 - RNA, 19 nt, Artificial Sequence
  Description of Artificial Sequence: Synthetic oligonucleotide
guguguguguguguguguu

SEQ ID NO: 2775904 - RNA, 19 nt, Artificial Sequence
  Description of Artificial Sequence: Synthetic oligonucleotide
acacagccccagacggugu

SEQ ID NO: 2775905 - RNA, 19 nt, Artificial Sequence
  Description of Artificial Sequence: Synthetic oligonucleotide
ggaaagcaauguacaaaau

SEQ ID NO: 2775906 - RNA, 19 nt, Artificial Sequence
  Description of Artificial Sequence: Synthetic oligonucleotide
uugcaacacugggcaggau

SEQ ID NO: 2775907 - RNA, 19 nt, Artificial Sequence
  Description of Artificial Sequence: Synthetic oligonucleotide
uggccccucacggccgcuc

SEQ ID NO: 2775908 - RNA, 19 nt, Artificial Sequence
  Description of Artificial Sequence: Synthetic oligonucleotide
caacacugggcaggaucaa

SEQ ID NO: 2775909 - RNA, 19 nt, Artificial Sequence
  Description of Artificial Sequence: Synthetic oligonucleotide
guucucggugucuguucuu

SEQ ID NO: 2775910 - RNA, 19 nt, Artificial Sequence
  Description of Artificial Sequence: Synthetic oligonucleotide
cgguguggccccucacggc

SEQ ID NO: 2775911 - RNA, 19 nt, Artificial Sequence
  Description of Artificial Sequence: Synthetic oligonucleotide
acggccgcuggcaccguuu

SEQ ID NO: 2775912 - RNA, 19 nt, Artificial Sequence
  Description of Artificial Sequence: Synthetic oligonucleotide
cgcuccgcaugcacagaac

SEQ ID NO: 2775913 - RNA, 19 nt, Artificial Sequence
  Description of Artificial Sequence: Synthetic oligonucleotide
ccgcuccgcaugcacagaa

SEQ ID NO: 2775914 - RNA, 19 nt, Artificial Sequence
  Description of Artificial Sequence: Synthetic oligonucleotide
ggacacagccccagacggu

SEQ ID NO: 2775915 - RNA, 19 nt, Artificial Sequence
  Description of Artificial Sequence: Synthetic oligonucleotide
gccgcuggcaccguuucuu

SEQ ID NO: 2775916 - RNA, 19 nt, Artificial Sequence
  Description of Artificial Sequence: Synthetic oligonucleotide
cacggccgcuccgcaugca

SEQ ID NO: 2775917 - RNA, 19 nt, Artificial Sequence
  Description of Artificial Sequence: Synthetic oligonucleotide
gggcaggaucaaacaccaa

SEQ ID NO: 2775918 - RNA, 19 nt, Artificial Sequence
  Description of Artificial Sequence: Synthetic oligonucleotide
cggccgcuggcaccguuuc

SEQ ID NO: 2775919 - RNA, 19 nt, Artificial Sequence
  Description of Artificial Sequence: Synthetic oligonucleotide
cgcaugcacagaaccuacu

SEQ ID NO: 2775920 - RNA, 19 nt, Artificial Sequence
  Description of Artificial Sequence: Synthetic oligonucleotide
ccagacgguguggccccuc

SEQ ID NO: 2775921 - RNA, 19 nt, Artificial Sequence
  Description of Artificial Sequence: Synthetic oligonucleotide
gccgcuccgcaugcacaga

SEQ ID NO: 2775922 - RNA, 19 nt, Artificial Sequence
  Description of Artificial Sequence: Synthetic oligonucleotide
ggccgcuggcaccguuucu

SEQ ID NO: 2775923 - RNA, 19 nt, Artificial Sequence
  Description of Artificial Sequence: Synthetic oligonucleotide
cggccgcuccgcaugcaca

SEQ ID NO: 2775924 - RNA, 19 nt, Artificial Sequence
  Description of Artificial Sequence: Synthetic oligonucleotide
cccucacggccgcuccgca

SEQ ID NO: 2775925 - RNA, 19 nt, Artificial Sequence
  Description of Artificial Sequence: Synthetic oligonucleotide
ccucacggccgcuccgcau

SEQ ID NO: 2775926 - RNA, 19 nt, Artificial Sequence
  Description of Artificial Sequence: Synthetic oligonucleotide
cacggccgcuggcaccguu

SEQ ID NO: 2775927 - RNA, 19 nt, Artificial Sequence
  Description of Artificial Sequence: Synthetic oligonucleotide
guggccccucacggccgcu

SEQ ID NO: 2775928 - RNA, 19 nt, Artificial Sequence
  Description of Artificial Sequence: Synthetic oligonucleotide
ccgcuggcaccguuucuuu

SEQ ID NO: 2775929 - RNA, 19 nt, Artificial Sequence
  Description of Artificial Sequence: Synthetic oligonucleotide
aauacauuugcccuuuuac

SEQ ID NO: 2775930 - RNA, 19 nt, Artificial Sequence
  Description of Artificial Sequence: Synthetic oligonucleotide
aaaagaauacauuugcccu

SEQ ID NO: 2775931 - RNA, 19 nt, Artificial Sequence
  Description of Artificial Sequence: Synthetic oligonucleotide
uaagcuuggaguaacaggc

SEQ ID NO: 2775932 - RNA, 19 nt, Artificial Sequence
  Description of Artificial Sequence: Synthetic oligonucleotide
aagucaucauaauagucgg

SEQ ID NO: 2775933 - RNA, 19 nt, Artificial Sequence
  Description of Artificial Sequence: Synthetic oligonucleotide
uugacaguaacuuaucggc

SEQ ID NO: 2775934 - RNA, 19 nt, Artificial Sequence
  Description of Artificial Sequence: Synthetic oligonucleotide
auagaaucgagguaggaag

SEQ ID NO: 2775935 - RNA, 19 nt, Artificial Sequence
  Description of Artificial Sequence: Synthetic oligonucleotide
uggaguaacaggcugaagc

SEQ ID NO: 2775936 - RNA, 19 nt, Artificial Sequence
  Description of Artificial Sequence: Synthetic oligonucleotide
auacauuugcccuuuuacc

SEQ ID NO: 2775937 - RNA, 19 nt, Artificial Sequence
  Description of Artificial Sequence: Synthetic oligonucleotide
cucgcaaacauucaaaggc

SEQ ID NO: 2775938 - RNA, 19 nt, Artificial Sequence
  Description of Artificial Sequence: Synthetic oligonucleotide
aaagcccagugucaggucc

SEQ ID NO: 2775939 - RNA, 19 nt, Artificial Sequence
  Description of Artificial Sequence: Synthetic oligonucleotide
aacacagcuggacacugcc

SEQ ID NO: 2775940 - RNA, 19 nt, Artificial Sequence
  Description of Artificial Sequence: Synthetic oligonucleotide
aaacaggcagugcagaaag

SEQ ID NO: 2775941 - RNA, 19 nt, Artificial Sequence
  Description of Artificial Sequence: Synthetic oligonucleotide
agucuuggaaacaaaagcc

SEQ ID NO: 2775942 - RNA, 19 nt, Artificial Sequence
  Description of Artificial Sequence: Synthetic oligonucleotide
uuauaaaucugaaagucau

SEQ ID NO: 2775943 - RNA, 19 nt, Artificial Sequence
  Description of Artificial Sequence: Synthetic oligonucleotide
aguaagaacuguuucuagg

SEQ ID NO: 2775944 - RNA, 19 nt, Artificial Sequence
  Description of Artificial Sequence: Synthetic oligonucleotide
gaaaccauuaguuugccga

SEQ ID NO: 2775945 - RNA, 19 nt, Artificial Sequence
  Description of Artificial Sequence: Synthetic oligonucleotide
acaguacccagccagaggg

SEQ ID NO: 2775946 - RNA, 19 nt, Artificial Sequence
  Description of Artificial Sequence: Synthetic oligonucleotide
uucaaaggccacaugaagc

SEQ ID NO: 2775947 - RNA, 19 nt, Artificial Sequence
  Description of Artificial Sequence: Synthetic oligonucleotide
auggguaggucccagaagg

SEQ ID NO: 2775948 - RNA, 19 nt, Artificial Sequence
  Description of Artificial Sequence: Synthetic oligonucleotide
ucuaaggccucucucuucg

SEQ ID NO: 2775949 - RNA, 19 nt, Artificial Sequence
  Description of Artificial Sequence: Synthetic oligonucleotide
cuugacaguaacuuaucgg

SEQ ID NO: 2775950 - RNA, 19 nt, Artificial Sequence
  Description of Artificial Sequence: Synthetic oligonucleotide
ugagcuuucacuagccaag

SEQ ID NO: 2775951 - RNA, 19 nt, Artificial Sequence
  Description of Artificial Sequence: Synthetic oligonucleotide
uguuucuagguccugugag

SEQ ID NO: 2775952 - RNA, 19 nt, Artificial Sequence
  Description of Artificial Sequence: Synthetic oligonucleotide
uacauuugcccuuuuacca

SEQ ID NO: 2775953 - RNA, 19 nt, Artificial Sequence
  Description of Artificial Sequence: Synthetic oligonucleotide
ugcacacgaacucacgugg

SEQ ID NO: 2775954 - RNA, 19 nt, Artificial Sequence
  Description of Artificial Sequence: Synthetic oligonucleotide
acauucaaaggccacauga

SEQ ID NO: 2775955 - RNA, 19 nt, Artificial Sequence
  Description of Artificial Sequence: Synthetic oligonucleotide
cuucaaaggggcaugagug

SEQ ID NO: 2775956 - RNA, 19 nt, Artificial Sequence
  Description of Artificial Sequence: Synthetic oligonucleotide
auaaaucugaaagucauca

SEQ ID NO: 2775957 - RNA, 19 nt, Artificial Sequence
  Description of Artificial Sequence: Synthetic oligonucleotide
auagucuucggcugcacac

SEQ ID NO: 2775958 - RNA, 19 nt, Artificial Sequence
  Description of Artificial Sequence: Synthetic oligonucleotide
aagugcauagucuucggcu

SEQ ID NO: 2775959 - RNA, 19 nt, Artificial Sequence
  Description of Artificial Sequence: Synthetic oligonucleotide
aacuuaucggcuaagcuug

SEQ ID NO: 2775960 - RNA, 19 nt, Artificial Sequence
  Description of Artificial Sequence: Synthetic oligonucleotide
aguggagcucucuaaggcc

SEQ ID NO: 2775961 - RNA, 19 nt, Artificial Sequence
  Description of Artificial Sequence: Synthetic oligonucleotide
gaugaaaccauuaguuugc

SEQ ID NO: 2775962 - RNA, 19 nt, Artificial Sequence
  Description of Artificial Sequence: Synthetic oligonucleotide
ugaagcacaguacccagcc

SEQ ID NO: 2775963 - RNA, 19 nt, Artificial Sequence
  Description of Artificial Sequence: Synthetic oligonucleotide
auuaguuugccgaacacag

SEQ ID NO: 2775964 - RNA, 19 nt, Artificial Sequence
  Description of Artificial Sequence: Synthetic oligonucleotide
uaguuugccgaacacagcu

SEQ ID NO: 2775965 - RNA, 19 nt, Artificial Sequence
  Description of Artificial Sequence: Synthetic oligonucleotide
ucuuggaaacaaaagccca

SEQ ID NO: 2775966 - RNA, 19 nt, Artificial Sequence
  Description of Artificial Sequence: Synthetic oligonucleotide
agugcagaaagauggguag

SEQ ID NO: 2775967 - RNA, 19 nt, Artificial Sequence
  Description of Artificial Sequence: Synthetic oligonucleotide
agaaagauggguagguccc

SEQ ID NO: 2775968 - RNA, 19 nt, Artificial Sequence
  Description of Artificial Sequence: Synthetic oligonucleotide
aaaacucgcaaacauucaa

SEQ ID NO: 2775969 - RNA, 19 nt, Artificial Sequence
  Description of Artificial Sequence: Synthetic oligonucleotide
ucugaaagucaucauaaua

SEQ ID NO: 2775970 - RNA, 19 nt, Artificial Sequence
  Description of Artificial Sequence: Synthetic oligonucleotide
auucaaaggccacaugaag

SEQ ID NO: 2775971 - RNA, 19 nt, Artificial Sequence
  Description of Artificial Sequence: Synthetic oligonucleotide
uacaagugcauagucuucg

SEQ ID NO: 2775972 - RNA, 19 nt, Artificial Sequence
  Description of Artificial Sequence: Synthetic oligonucleotide
aacaaaagcccagugucag

SEQ ID NO: 2775973 - RNA, 19 nt, Artificial Sequence
  Description of Artificial Sequence: Synthetic oligonucleotide
ucaauuuccauggugcaug

SEQ ID NO: 2775974 - RNA, 19 nt, Artificial Sequence
  Description of Artificial Sequence: Synthetic oligonucleotide
cagaaagauggguaggucc

SEQ ID NO: 2775975 - RNA, 19 nt, Artificial Sequence
  Description of Artificial Sequence: Synthetic oligonucleotide
aguaacuuaucggcuaagc

SEQ ID NO: 2775976 - RNA, 19 nt, Artificial Sequence
  Description of Artificial Sequence: Synthetic oligonucleotide
aaucugaaagucaucauaa

SEQ ID NO: 2775977 - RNA, 19 nt, Artificial Sequence
  Description of Artificial Sequence: Synthetic oligonucleotide
uaacuuaucggcuaagcuu

SEQ ID NO: 2775978 - RNA, 19 nt, Artificial Sequence
  Description of Artificial Sequence: Synthetic oligonucleotide
uuaucggcuaagcuuggag

SEQ ID NO: 2775979 - RNA, 19 nt, Artificial Sequence
  Description of Artificial Sequence: Synthetic oligonucleotide
gaaguggagcucucuaagg

SEQ ID NO: 2775980 - RNA, 19 nt, Artificial Sequence
  Description of Artificial Sequence: Synthetic oligonucleotide
ucgcaaacauucaaaggcc

SEQ ID NO: 2775981 - RNA, 19 nt, Artificial Sequence
  Description of Artificial Sequence: Synthetic oligonucleotide
uggggaaacaggcagugca

SEQ ID NO: 2775982 - RNA, 19 nt, Artificial Sequence
  Description of Artificial Sequence: Synthetic oligonucleotide
agugccaucgcacuuacaa

SEQ ID NO: 2775983 - RNA, 19 nt, Artificial Sequence
  Description of Artificial Sequence: Synthetic oligonucleotide
aucauaauagucggcuacc

SEQ ID NO: 2775984 - RNA, 19 nt, Artificial Sequence
  Description of Artificial Sequence: Synthetic oligonucleotide
ucaggucccaacuuucucc

SEQ ID NO: 2775985 - RNA, 19 nt, Artificial Sequence
  Description of Artificial Sequence: Synthetic oligonucleotide
ggaugaaaccauuaguuug

SEQ ID NO: 2775986 - RNA, 19 nt, Artificial Sequence
  Description of Artificial Sequence: Synthetic oligonucleotide
acucgcaaacauucaaagg

SEQ ID NO: 2775987 - RNA, 19 nt, Artificial Sequence
  Description of Artificial Sequence: Synthetic oligonucleotide
uaauagucggcuaccugcc

SEQ ID NO: 2775988 - RNA, 19 nt, Artificial Sequence
  Description of Artificial Sequence: Synthetic oligonucleotide
cuagccaaguccuggauug

SEQ ID NO: 2775989 - RNA, 19 nt, Artificial Sequence
  Description of Artificial Sequence: Synthetic oligonucleotide
caugaguguccauagaauc

SEQ ID NO: 2775990 - RNA, 19 nt, Artificial Sequence
  Description of Artificial Sequence: Synthetic oligonucleotide
cuuggaaacaaaagcccag

SEQ ID NO: 2775991 - RNA, 19 nt, Artificial Sequence
  Description of Artificial Sequence: Synthetic oligonucleotide
uuaccaucagccaguaaga

SEQ ID NO: 2775992 - RNA, 19 nt, Artificial Sequence
  Description of Artificial Sequence: Synthetic oligonucleotide
cucacguggggaaacaggc

SEQ ID NO: 2775993 - RNA, 19 nt, Artificial Sequence
  Description of Artificial Sequence: Synthetic oligonucleotide
guuugccgaacacagcugg

SEQ ID NO: 2775994 - RNA, 19 nt, Artificial Sequence
  Description of Artificial Sequence: Synthetic oligonucleotide
cucucuucggcagagacgc

SEQ ID NO: 2775995 - RNA, 19 nt, Artificial Sequence
  Description of Artificial Sequence: Synthetic oligonucleotide
ucucucuucggcagagacg

SEQ ID NO: 2775996 - RNA, 19 nt, Artificial Sequence
  Description of Artificial Sequence: Synthetic oligonucleotide
caucauaauagucggcuac

SEQ ID NO: 2775997 - RNA, 19 nt, Artificial Sequence
  Description of Artificial Sequence: Synthetic oligonucleotide
acaggcugaagcaagguuc

SEQ ID NO: 2775998 - RNA, 19 nt, Artificial Sequence
  Description of Artificial Sequence: Synthetic oligonucleotide
agugcauagucuucggcug

SEQ ID NO: 2775999 - RNA, 19 nt, Artificial Sequence
  Description of Artificial Sequence: Synthetic oligonucleotide
uauaaaucugaaagucauc

SEQ ID NO: 2776000 - RNA, 19 nt, Artificial Sequence
  Description of Artificial Sequence: Synthetic oligonucleotide
agccaguaagaacuguuuc

SEQ ID NO: 2776001 - RNA, 19 nt, Artificial Sequence
  Description of Artificial Sequence: Synthetic oligonucleotide
ugaaaccauuaguuugccg

SEQ ID NO: 2776002 - RNA, 19 nt, Artificial Sequence
  Description of Artificial Sequence: Synthetic oligonucleotide
ugccaucgcacuuacaagu

SEQ ID NO: 2776003 - RNA, 19 nt, Artificial Sequence
  Description of Artificial Sequence: Synthetic oligonucleotide
augaguguccauagaaucg

SEQ ID NO: 2776004 - RNA, 19 nt, Artificial Sequence
  Description of Artificial Sequence: Synthetic oligonucleotide
cuuucccaggucaauuucc

SEQ ID NO: 2776005 - RNA, 19 nt, Artificial Sequence
  Description of Artificial Sequence: Synthetic oligonucleotide
aaaccauuaguuugccgaa

SEQ ID NO: 2776006 - RNA, 19 nt, Artificial Sequence
  Description of Artificial Sequence: Synthetic oligonucleotide
uccauagaaucgagguagg

SEQ ID NO: 2776007 - RNA, 19 nt, Artificial Sequence
  Description of Artificial Sequence: Synthetic oligonucleotide
uccagucuuggaaacaaaa

SEQ ID NO: 2776008 - RNA, 19 nt, Artificial Sequence
  Description of Artificial Sequence: Synthetic oligonucleotide
uggaaacaaaagcccagug

SEQ ID NO: 2776009 - RNA, 19 nt, Artificial Sequence
  Description of Artificial Sequence: Synthetic oligonucleotide
gaaucgagguaggaagugg

SEQ ID NO: 2776010 - RNA, 19 nt, Artificial Sequence
  Description of Artificial Sequence: Synthetic oligonucleotide
ucccaggucaauuuccaug

SEQ ID NO: 2776011 - RNA, 19 nt, Artificial Sequence
  Description of Artificial Sequence: Synthetic oligonucleotide
uaucggcuaagcuuggagu

SEQ ID NO: 2776012 - RNA, 19 nt, Artificial Sequence
  Description of Artificial Sequence: Synthetic oligonucleotide
ugacaguaacuuaucggcu

SEQ ID NO: 2776013 - RNA, 19 nt, Artificial Sequence
  Description of Artificial Sequence: Synthetic oligonucleotide
gcuuucacuagccaagucc

SEQ ID NO: 2776014 - RNA, 19 nt, Artificial Sequence
  Description of Artificial Sequence: Synthetic oligonucleotide
ugaguguccauagaaucga

SEQ ID NO: 2776015 - RNA, 19 nt, Artificial Sequence
  Description of Artificial Sequence: Synthetic oligonucleotide
uuaguuugccgaacacagc

SEQ ID NO: 2776016 - RNA, 19 nt, Artificial Sequence
  Description of Artificial Sequence: Synthetic oligonucleotide
aaacauucaaaggccacau

SEQ ID NO: 2776017 - RNA, 19 nt, Artificial Sequence
  Description of Artificial Sequence: Synthetic oligonucleotide
cucuggaugaaaccauuag

SEQ ID NO: 2776018 - RNA, 19 nt, Artificial Sequence
  Description of Artificial Sequence: Synthetic oligonucleotide
aaccauuaguuugccgaac

SEQ ID NO: 2776019 - RNA, 19 nt, Artificial Sequence
  Description of Artificial Sequence: Synthetic oligonucleotide
aguaacaggcugaagcaag

SEQ ID NO: 2776020 - RNA, 19 nt, Artificial Sequence
  Description of Artificial Sequence: Synthetic oligonucleotide
guuucuagguccugugagc

SEQ ID NO: 2776021 - RNA, 19 nt, Artificial Sequence
  Description of Artificial Sequence: Synthetic oligonucleotide
gucuuggaaacaaaagccc

SEQ ID NO: 2776022 - RNA, 19 nt, Artificial Sequence
  Description of Artificial Sequence: Synthetic oligonucleotide
aauuuccauggugcaugcc

SEQ ID NO: 2776023 - RNA, 19 nt, Artificial Sequence
  Description of Artificial Sequence: Synthetic oligonucleotide
caugccucuggaugaaacc

SEQ ID NO: 2776024 - RNA, 19 nt, Artificial Sequence
  Description of Artificial Sequence: Synthetic oligonucleotide
acaagugcauagucuucgg

SEQ ID NO: 2776025 - RNA, 19 nt, Artificial Sequence
  Description of Artificial Sequence: Synthetic oligonucleotide
agacgcccagucuugacag

SEQ ID NO: 2776026 - RNA, 19 nt, Artificial Sequence
  Description of Artificial Sequence: Synthetic oligonucleotide
aaacaaaagcccaguguca

SEQ ID NO: 2776027 - RNA, 19 nt, Artificial Sequence
  Description of Artificial Sequence: Synthetic oligonucleotide
uggaugaaaccauuaguuu

SEQ ID NO: 2776028 - RNA, 19 nt, Artificial Sequence
  Description of Artificial Sequence: Synthetic oligonucleotide
uucaaaggggcaugagugu

SEQ ID NO: 2776029 - RNA, 19 nt, Artificial Sequence
  Description of Artificial Sequence: Synthetic oligonucleotide
uuucuagguccugugagcu

SEQ ID NO: 2776030 - RNA, 19 nt, Artificial Sequence
  Description of Artificial Sequence: Synthetic oligonucleotide
acuguuucuagguccugug

SEQ ID NO: 2776031 - RNA, 19 nt, Artificial Sequence
  Description of Artificial Sequence: Synthetic oligonucleotide
acaaaagcccagugucagg

SEQ ID NO: 2776032 - RNA, 19 nt, Artificial Sequence
  Description of Artificial Sequence: Synthetic oligonucleotide
uaaaucugaaagucaucau

SEQ ID NO: 2776033 - RNA, 19 nt, Artificial Sequence
  Description of Artificial Sequence: Synthetic oligonucleotide
cacguggggaaacaggcag

SEQ ID NO: 2776034 - RNA, 19 nt, Artificial Sequence
  Description of Artificial Sequence: Synthetic oligonucleotide
accauuaguuugccgaaca

SEQ ID NO: 2776035 - RNA, 19 nt, Artificial Sequence
  Description of Artificial Sequence: Synthetic oligonucleotide
augaaaccauuaguuugcc

SEQ ID NO: 2776036 - RNA, 19 nt, Artificial Sequence
  Description of Artificial Sequence: Synthetic oligonucleotide
aaggccucucucuucggca

SEQ ID NO: 2776037 - RNA, 19 nt, Artificial Sequence
  Description of Artificial Sequence: Synthetic oligonucleotide
uagucggcuaccugccugg

SEQ ID NO: 2776038 - RNA, 19 nt, Artificial Sequence
  Description of Artificial Sequence: Synthetic oligonucleotide
uugcccuuuuaccaucagc

SEQ ID NO: 2776039 - RNA, 19 nt, Artificial Sequence
  Description of Artificial Sequence: Synthetic oligonucleotide
guaagaacuguuucuaggu

SEQ ID NO: 2776040 - RNA, 19 nt, Artificial Sequence
  Description of Artificial Sequence: Synthetic oligonucleotide
ucggcuaccugccuggcaa

SEQ ID NO: 2776041 - RNA, 19 nt, Artificial Sequence
  Description of Artificial Sequence: Synthetic oligonucleotide
uuuccauggugcaugccuc

SEQ ID NO: 2776042 - RNA, 19 nt, Artificial Sequence
  Description of Artificial Sequence: Synthetic oligonucleotide
aacaggcugaagcaagguu

SEQ ID NO: 2776043 - RNA, 19 nt, Artificial Sequence
  Description of Artificial Sequence: Synthetic oligonucleotide
aaagauggguaggucccag

SEQ ID NO: 2776044 - RNA, 19 nt, Artificial Sequence
  Description of Artificial Sequence: Synthetic oligonucleotide
agcuuggaguaacaggcug

SEQ ID NO: 2776045 - RNA, 19 nt, Artificial Sequence
  Description of Artificial Sequence: Synthetic oligonucleotide
ugugagcuuucacuagcca

SEQ ID NO: 2776046 - RNA, 19 nt, Artificial Sequence
  Description of Artificial Sequence: Synthetic oligonucleotide
aaucgagguaggaagugga

SEQ ID NO: 2776047 - RNA, 19 nt, Artificial Sequence
  Description of Artificial Sequence: Synthetic oligonucleotide
acuuacaagugcauagucu

SEQ ID NO: 2776048 - RNA, 19 nt, Artificial Sequence
  Description of Artificial Sequence: Synthetic oligonucleotide
uguccauagaaucgaggua

SEQ ID NO: 2776049 - RNA, 19 nt, Artificial Sequence
  Description of Artificial Sequence: Synthetic oligonucleotide
cauaauagucggcuaccug

SEQ ID NO: 2776050 - RNA, 19 nt, Artificial Sequence
  Description of Artificial Sequence: Synthetic oligonucleotide
uuacaagugcauagucuuc

SEQ ID NO: 2776051 - RNA, 19 nt, Artificial Sequence
  Description of Artificial Sequence: Synthetic oligonucleotide
guaacaggcugaagcaagg

SEQ ID NO: 2776052 - RNA, 19 nt, Artificial Sequence
  Description of Artificial Sequence: Synthetic oligonucleotide
caaaggggcaugagugucc

SEQ ID NO: 2776053 - RNA, 19 nt, Artificial Sequence
  Description of Artificial Sequence: Synthetic oligonucleotide
caguaagaacuguuucuag

SEQ ID NO: 2776054 - RNA, 19 nt, Artificial Sequence
  Description of Artificial Sequence: Synthetic oligonucleotide
uagucuucggcugcacacg

SEQ ID NO: 2776055 - RNA, 19 nt, Artificial Sequence
  Description of Artificial Sequence: Synthetic oligonucleotide
auagucggcuaccugccug

SEQ ID NO: 2776056 - RNA, 19 nt, Artificial Sequence
  Description of Artificial Sequence: Synthetic oligonucleotide
ugcagaaagauggguaggu

SEQ ID NO: 2776057 - RNA, 19 nt, Artificial Sequence
  Description of Artificial Sequence: Synthetic oligonucleotide
ucgagguaggaaguggagc

SEQ ID NO: 2776058 - RNA, 19 nt, Artificial Sequence
  Description of Artificial Sequence: Synthetic oligonucleotide
ggaaguggagcucucuaag

SEQ ID NO: 2776059 - RNA, 19 nt, Artificial Sequence
  Description of Artificial Sequence: Synthetic oligonucleotide
aacuguuucuagguccugu

SEQ ID NO: 2776060 - RNA, 19 nt, Artificial Sequence
  Description of Artificial Sequence: Synthetic oligonucleotide
gacaguaacuuaucggcua

SEQ ID NO: 2776061 - RNA, 19 nt, Artificial Sequence
  Description of Artificial Sequence: Synthetic oligonucleotide
aaacucgcaaacauucaaa

SEQ ID NO: 2776062 - RNA, 19 nt, Artificial Sequence
  Description of Artificial Sequence: Synthetic oligonucleotide
ccuuauaaaucugaaaguc

SEQ ID NO: 2776063 - RNA, 19 nt, Artificial Sequence
  Description of Artificial Sequence: Synthetic oligonucleotide
aauagucggcuaccugccu

SEQ ID NO: 2776064 - RNA, 19 nt, Artificial Sequence
  Description of Artificial Sequence: Synthetic oligonucleotide
ugccuggcaagugccaucg

SEQ ID NO: 2776065 - RNA, 19 nt, Artificial Sequence
  Description of Artificial Sequence: Synthetic oligonucleotide
cuggcaagugccaucgcac

SEQ ID NO: 2776066 - RNA, 19 nt, Artificial Sequence
  Description of Artificial Sequence: Synthetic oligonucleotide
uccuggauugguccagucu

SEQ ID NO: 2776067 - RNA, 19 nt, Artificial Sequence
  Description of Artificial Sequence: Synthetic oligonucleotide
agucaucauaauagucggc

SEQ ID NO: 2776068 - RNA, 19 nt, Artificial Sequence
  Description of Artificial Sequence: Synthetic oligonucleotide
uggauugguccagucuugg

SEQ ID NO: 2776069 - RNA, 19 nt, Artificial Sequence
  Description of Artificial Sequence: Synthetic oligonucleotide
uuggaaacaaaagcccagu

SEQ ID NO: 2776070 - RNA, 19 nt, Artificial Sequence
  Description of Artificial Sequence: Synthetic oligonucleotide
uccugugagcuuucacuag

SEQ ID NO: 2776071 - RNA, 19 nt, Artificial Sequence
  Description of Artificial Sequence: Synthetic oligonucleotide
ugccgaacacagcuggaca

SEQ ID NO: 2776072 - RNA, 19 nt, Artificial Sequence
  Description of Artificial Sequence: Synthetic oligonucleotide
aagaauacauuugcccuuu

SEQ ID NO: 2776073 - RNA, 19 nt, Artificial Sequence
  Description of Artificial Sequence: Synthetic oligonucleotide
cuaccugccuggcaagugc

SEQ ID NO: 2776074 - RNA, 19 nt, Artificial Sequence
  Description of Artificial Sequence: Synthetic oligonucleotide
ucauaauagucggcuaccu

SEQ ID NO: 2776075 - RNA, 19 nt, Artificial Sequence
  Description of Artificial Sequence: Synthetic oligonucleotide
aguguccauagaaucgagg

SEQ ID NO: 2776076 - RNA, 19 nt, Artificial Sequence
  Description of Artificial Sequence: Synthetic oligonucleotide
caauuuccauggugcaugc

SEQ ID NO: 2776077 - RNA, 19 nt, Artificial Sequence
  Description of Artificial Sequence: Synthetic oligonucleotide
caggucccaacuuucuccc

SEQ ID NO: 2776078 - RNA, 19 nt, Artificial Sequence
  Description of Artificial Sequence: Synthetic oligonucleotide
ucaucauaauagucggcua

SEQ ID NO: 2776079 - RNA, 19 nt, Artificial Sequence
  Description of Artificial Sequence: Synthetic oligonucleotide
agugucaggucccaacuuu

SEQ ID NO: 2776080 - RNA, 19 nt, Artificial Sequence
  Description of Artificial Sequence: Synthetic oligonucleotide
uucggcugcacacgaacuc

SEQ ID NO: 2776081 - RNA, 19 nt, Artificial Sequence
  Description of Artificial Sequence: Synthetic oligonucleotide
cacacgaacucacgugggg

SEQ ID NO: 2776082 - RNA, 19 nt, Artificial Sequence
  Description of Artificial Sequence: Synthetic oligonucleotide
acaguaacuuaucggcuaa

SEQ ID NO: 2776083 - RNA, 19 nt, Artificial Sequence
  Description of Artificial Sequence: Synthetic oligonucleotide
ucacuagccaaguccugga

SEQ ID NO: 2776084 - RNA, 19 nt, Artificial Sequence
  Description of Artificial Sequence: Synthetic oligonucleotide
ugccuccagagccuuauaa

SEQ ID NO: 2776085 - RNA, 19 nt, Artificial Sequence
  Description of Artificial Sequence: Synthetic oligonucleotide
agagacgcccagucuugac

SEQ ID NO: 2776086 - RNA, 19 nt, Artificial Sequence
  Description of Artificial Sequence: Synthetic oligonucleotide
aucggcuaagcuuggagua

SEQ ID NO: 2776087 - RNA, 19 nt, Artificial Sequence
  Description of Artificial Sequence: Synthetic oligonucleotide
ucaaaggggcaugaguguc

SEQ ID NO: 2776088 - RNA, 19 nt, Artificial Sequence
  Description of Artificial Sequence: Synthetic oligonucleotide
guguccauagaaucgaggu

SEQ ID NO: 2776089 - RNA, 19 nt, Artificial Sequence
  Description of Artificial Sequence: Synthetic oligonucleotide
ccacaugaagcacaguacc

SEQ ID NO: 2776090 - RNA, 19 nt, Artificial Sequence
  Description of Artificial Sequence: Synthetic oligonucleotide
ucuucggcagagacgccca

SEQ ID NO: 2776091 - RNA, 19 nt, Artificial Sequence
  Description of Artificial Sequence: Synthetic oligonucleotide
cacaguacccagccagagg

SEQ ID NO: 2776092 - RNA, 19 nt, Artificial Sequence
  Description of Artificial Sequence: Synthetic oligonucleotide
aagauggguaggucccaga

SEQ ID NO: 2776093 - RNA, 19 nt, Artificial Sequence
  Description of Artificial Sequence: Synthetic oligonucleotide
uuugcccuuuuaccaucag

SEQ ID NO: 2776094 - RNA, 19 nt, Artificial Sequence
  Description of Artificial Sequence: Synthetic oligonucleotide
cuuacaagugcauagucuu

SEQ ID NO: 2776095 - RNA, 19 nt, Artificial Sequence
  Description of Artificial Sequence: Synthetic oligonucleotide
uuugccgaacacagcugga

SEQ ID NO: 2776096 - RNA, 19 nt, Artificial Sequence
  Description of Artificial Sequence: Synthetic oligonucleotide
agaaucgagguaggaagug

SEQ ID NO: 2776097 - RNA, 19 nt, Artificial Sequence
  Description of Artificial Sequence: Synthetic oligonucleotide
aaaggggcaugagugucca

SEQ ID NO: 2776098 - RNA, 19 nt, Artificial Sequence
  Description of Artificial Sequence: Synthetic oligonucleotide
uaggaaguggagcucucua

SEQ ID NO: 2776099 - RNA, 19 nt, Artificial Sequence
  Description of Artificial Sequence: Synthetic oligonucleotide
caggcagugcagaaagaug

SEQ ID NO: 2776100 - RNA, 19 nt, Artificial Sequence
  Description of Artificial Sequence: Synthetic oligonucleotide
guaacuuaucggcuaagcu

SEQ ID NO: 2776101 - RNA, 19 nt, Artificial Sequence
  Description of Artificial Sequence: Synthetic oligonucleotide
cacuuacaagugcauaguc

SEQ ID NO: 2776102 - RNA, 19 nt, Artificial Sequence
  Description of Artificial Sequence: Synthetic oligonucleotide
cuuucacuagccaaguccu

SEQ ID NO: 2776103 - RNA, 19 nt, Artificial Sequence
  Description of Artificial Sequence: Synthetic oligonucleotide
ucggcagagacgcccaguc

SEQ ID NO: 2776104 - RNA, 19 nt, Artificial Sequence
  Description of Artificial Sequence: Synthetic oligonucleotide
ucuagguccugugagcuuu

SEQ ID NO: 2776105 - RNA, 19 nt, Artificial Sequence
  Description of Artificial Sequence: Synthetic oligonucleotide
agcuuucacuagccaaguc

SEQ ID NO: 2776106 - RNA, 19 nt, Artificial Sequence
  Description of Artificial Sequence: Synthetic oligonucleotide
cugcacacgaacucacgug

SEQ ID NO: 2776107 - RNA, 19 nt, Artificial Sequence
  Description of Artificial Sequence: Synthetic oligonucleotide
caucgcacuuacaagugca

SEQ ID NO: 2776108 - RNA, 19 nt, Artificial Sequence
  Description of Artificial Sequence: Synthetic oligonucleotide
cauucaaaggccacaugaa

SEQ ID NO: 2776109 - RNA, 19 nt, Artificial Sequence
  Description of Artificial Sequence: Synthetic oligonucleotide
ucacguggggaaacaggca

SEQ ID NO: 2776110 - RNA, 19 nt, Artificial Sequence
  Description of Artificial Sequence: Synthetic oligonucleotide
agaacuguuucuagguccu

SEQ ID NO: 2776111 - RNA, 19 nt, Artificial Sequence
  Description of Artificial Sequence: Synthetic oligonucleotide
uugguccagucuuggaaac

SEQ ID NO: 2776112 - RNA, 19 nt, Artificial Sequence
  Description of Artificial Sequence: Synthetic oligonucleotide
acucacguggggaaacagg

SEQ ID NO: 2776113 - RNA, 19 nt, Artificial Sequence
  Description of Artificial Sequence: Synthetic oligonucleotide
aaguccuggauugguccag

SEQ ID NO: 2776114 - RNA, 19 nt, Artificial Sequence
  Description of Artificial Sequence: Synthetic oligonucleotide
gagacgcccagucuugaca

SEQ ID NO: 2776115 - RNA, 19 nt, Artificial Sequence
  Description of Artificial Sequence: Synthetic oligonucleotide
cuggaugaaaccauuaguu

SEQ ID NO: 2776116 - RNA, 19 nt, Artificial Sequence
  Description of Artificial Sequence: Synthetic oligonucleotide
cauuaguuugccgaacaca

SEQ ID NO: 2776117 - RNA, 19 nt, Artificial Sequence
  Description of Artificial Sequence: Synthetic oligonucleotide
gaauacauuugcccuuuua

SEQ ID NO: 2776118 - RNA, 19 nt, Artificial Sequence
  Description of Artificial Sequence: Synthetic oligonucleotide
aggaaguggagcucucuaa

SEQ ID NO: 2776119 - RNA, 19 nt, Artificial Sequence
  Description of Artificial Sequence: Synthetic oligonucleotide
agguccugugagcuuucac

SEQ ID NO: 2776120 - RNA, 19 nt, Artificial Sequence
  Description of Artificial Sequence: Synthetic oligonucleotide
aucugaaagucaucauaau

SEQ ID NO: 2776121 - RNA, 19 nt, Artificial Sequence
  Description of Artificial Sequence: Synthetic oligonucleotide
cauuugcccuuuuaccauc

SEQ ID NO: 2776122 - RNA, 19 nt, Artificial Sequence
  Description of Artificial Sequence: Synthetic oligonucleotide
cauagaaucgagguaggaa

SEQ ID NO: 2776123 - RNA, 19 nt, Artificial Sequence
  Description of Artificial Sequence: Synthetic oligonucleotide
gugccaucgcacuuacaag

SEQ ID NO: 2776124 - RNA, 19 nt, Artificial Sequence
  Description of Artificial Sequence: Synthetic oligonucleotide
caaacauucaaaggccaca

SEQ ID NO: 2776125 - RNA, 19 nt, Artificial Sequence
  Description of Artificial Sequence: Synthetic oligonucleotide
gugagcuuucacuagccaa

SEQ ID NO: 2776126 - RNA, 19 nt, Artificial Sequence
  Description of Artificial Sequence: Synthetic oligonucleotide
acuagccaaguccuggauu

SEQ ID NO: 2776127 - RNA, 19 nt, Artificial Sequence
  Description of Artificial Sequence: Synthetic oligonucleotide
cucuucggcagagacgccc

SEQ ID NO: 2776128 - RNA, 19 nt, Artificial Sequence
  Description of Artificial Sequence: Synthetic oligonucleotide
augccucuggaugaaacca

SEQ ID NO: 2776129 - RNA, 19 nt, Artificial Sequence
  Description of Artificial Sequence: Synthetic oligonucleotide
cagagccuuauaaaucuga

SEQ ID NO: 2776130 - RNA, 19 nt, Artificial Sequence
  Description of Artificial Sequence: Synthetic oligonucleotide
uggcaagugccaucgcacu

SEQ ID NO: 2776131 - RNA, 19 nt, Artificial Sequence
  Description of Artificial Sequence: Synthetic oligonucleotide
cuggauugguccagucuug

SEQ ID NO: 2776132 - RNA, 19 nt, Artificial Sequence
  Description of Artificial Sequence: Synthetic oligonucleotide
ggugcaugccucuggauga

SEQ ID NO: 2776133 - RNA, 19 nt, Artificial Sequence
  Description of Artificial Sequence: Synthetic oligonucleotide
ugccucuggaugaaaccau

SEQ ID NO: 2776134 - RNA, 19 nt, Artificial Sequence
  Description of Artificial Sequence: Synthetic oligonucleotide
ccaucagccaguaagaacu

SEQ ID NO: 2776135 - RNA, 19 nt, Artificial Sequence
  Description of Artificial Sequence: Synthetic oligonucleotide
ggcaugaguguccauagaa

SEQ ID NO: 2776136 - RNA, 19 nt, Artificial Sequence
  Description of Artificial Sequence: Synthetic oligonucleotide
cgcacuuacaagugcauag

SEQ ID NO: 2776137 - RNA, 19 nt, Artificial Sequence
  Description of Artificial Sequence: Synthetic oligonucleotide
ucucccuucaaaggggcau

SEQ ID NO: 2776138 - RNA, 19 nt, Artificial Sequence
  Description of Artificial Sequence: Synthetic oligonucleotide
ggaaacaaaagcccagugu

SEQ ID NO: 2776139 - RNA, 19 nt, Artificial Sequence
  Description of Artificial Sequence: Synthetic oligonucleotide
cccuuuuaccaucagccag

SEQ ID NO: 2776140 - RNA, 19 nt, Artificial Sequence
  Description of Artificial Sequence: Synthetic oligonucleotide
agucuucggcugcacacga

SEQ ID NO: 2776141 - RNA, 19 nt, Artificial Sequence
  Description of Artificial Sequence: Synthetic oligonucleotide
uugccgaacacagcuggac

SEQ ID NO: 2776142 - RNA, 19 nt, Artificial Sequence
  Description of Artificial Sequence: Synthetic oligonucleotide
ccagagggcguccucaggg

SEQ ID NO: 2776143 - RNA, 19 nt, Artificial Sequence
  Description of Artificial Sequence: Synthetic oligonucleotide
uaacaggcugaagcaaggu

SEQ ID NO: 2776144 - RNA, 19 nt, Artificial Sequence
  Description of Artificial Sequence: Synthetic oligonucleotide
caucagccaguaagaacug

SEQ ID NO: 2776145 - RNA, 19 nt, Artificial Sequence
  Description of Artificial Sequence: Synthetic oligonucleotide
uuccauggugcaugccucu

SEQ ID NO: 2776146 - RNA, 19 nt, Artificial Sequence
  Description of Artificial Sequence: Synthetic oligonucleotide
agguaggaaguggagcucu

SEQ ID NO: 2776147 - RNA, 19 nt, Artificial Sequence
  Description of Artificial Sequence: Synthetic oligonucleotide
agcucucuaaggccucucu

SEQ ID NO: 2776148 - RNA, 19 nt, Artificial Sequence
  Description of Artificial Sequence: Synthetic oligonucleotide
agagccuuauaaaucugaa

SEQ ID NO: 2776149 - RNA, 19 nt, Artificial Sequence
  Description of Artificial Sequence: Synthetic oligonucleotide
cuaaggccucucucuucgg

SEQ ID NO: 2776150 - RNA, 19 nt, Artificial Sequence
  Description of Artificial Sequence: Synthetic oligonucleotide
gaguguccauagaaucgag

SEQ ID NO: 2776151 - RNA, 19 nt, Artificial Sequence
  Description of Artificial Sequence: Synthetic oligonucleotide
aagcuuggaguaacaggcu

SEQ ID NO: 2776152 - RNA, 19 nt, Artificial Sequence
  Description of Artificial Sequence: Synthetic oligonucleotide
acacgaacucacgugggga

SEQ ID NO: 2776153 - RNA, 19 nt, Artificial Sequence
  Description of Artificial Sequence: Synthetic oligonucleotide
gcuaagcuuggaguaacag

SEQ ID NO: 2776154 - RNA, 19 nt, Artificial Sequence
  Description of Artificial Sequence: Synthetic oligonucleotide
ggccacaugaagcacagua

SEQ ID NO: 2776155 - RNA, 19 nt, Artificial Sequence
  Description of Artificial Sequence: Synthetic oligonucleotide
uuuuaccaucagccaguaa

SEQ ID NO: 2776156 - RNA, 19 nt, Artificial Sequence
  Description of Artificial Sequence: Synthetic oligonucleotide
aucgagguaggaaguggag

SEQ ID NO: 2776157 - RNA, 19 nt, Artificial Sequence
  Description of Artificial Sequence: Synthetic oligonucleotide
cucuaaggccucucucuuc

SEQ ID NO: 2776158 - RNA, 19 nt, Artificial Sequence
  Description of Artificial Sequence: Synthetic oligonucleotide
uuggaguaacaggcugaag

SEQ ID NO: 2776159 - RNA, 19 nt, Artificial Sequence
  Description of Artificial Sequence: Synthetic oligonucleotide
guccugugagcuuucacua

SEQ ID NO: 2776160 - RNA, 19 nt, Artificial Sequence
  Description of Artificial Sequence: Synthetic oligonucleotide
gaacacagcuggacacugc

SEQ ID NO: 2776161 - RNA, 19 nt, Artificial Sequence
  Description of Artificial Sequence: Synthetic oligonucleotide
caagugccaucgcacuuac

SEQ ID NO: 2776162 - RNA, 19 nt, Artificial Sequence
  Description of Artificial Sequence: Synthetic oligonucleotide
cucucuaaggccucucucu

SEQ ID NO: 2776163 - RNA, 19 nt, Artificial Sequence
  Description of Artificial Sequence: Synthetic oligonucleotide
gaagcacaguacccagcca

SEQ ID NO: 2776164 - RNA, 19 nt, Artificial Sequence
  Description of Artificial Sequence: Synthetic oligonucleotide
gaaagauggguagguccca

SEQ ID NO: 2776165 - RNA, 19 nt, Artificial Sequence
  Description of Artificial Sequence: Synthetic oligonucleotide
cauggugcaugccucugga

SEQ ID NO: 2776166 - RNA, 19 nt, Artificial Sequence
  Description of Artificial Sequence: Synthetic oligonucleotide
aguuugccgaacacagcug

SEQ ID NO: 2776167 - RNA, 19 nt, Artificial Sequence
  Description of Artificial Sequence: Synthetic oligonucleotide
gucaggucccaacuuucuc

SEQ ID NO: 2776168 - RNA, 19 nt, Artificial Sequence
  Description of Artificial Sequence: Synthetic oligonucleotide
ggucaauuuccauggugca

SEQ ID NO: 2776169 - RNA, 19 nt, Artificial Sequence
  Description of Artificial Sequence: Synthetic oligonucleotide
acuuaucggcuaagcuugg

SEQ ID NO: 2776170 - RNA, 19 nt, Artificial Sequence
  Description of Artificial Sequence: Synthetic oligonucleotide
gguccugugagcuuucacu

SEQ ID NO: 2776171 - RNA, 19 nt, Artificial Sequence
  Description of Artificial Sequence: Synthetic oligonucleotide
caaguccuggauuggucca

SEQ ID NO: 2776172 - RNA, 19 nt, Artificial Sequence
  Description of Artificial Sequence: Synthetic oligonucleotide
cauagucuucggcugcaca

SEQ ID NO: 2776173 - RNA, 19 nt, Artificial Sequence
  Description of Artificial Sequence: Synthetic oligonucleotide
ucggcuaagcuuggaguaa

SEQ ID NO: 2776174 - RNA, 19 nt, Artificial Sequence
  Description of Artificial Sequence: Synthetic oligonucleotide
agccagagggcguccucag

SEQ ID NO: 2776175 - RNA, 19 nt, Artificial Sequence
  Description of Artificial Sequence: Synthetic oligonucleotide
cugaagcaagguuccaaaa

SEQ ID NO: 2776176 - RNA, 19 nt, Artificial Sequence
  Description of Artificial Sequence: Synthetic oligonucleotide
ugguccagucuuggaaaca

SEQ ID NO: 2776177 - RNA, 19 nt, Artificial Sequence
  Description of Artificial Sequence: Synthetic oligonucleotide
uccauggugcaugccucug

SEQ ID NO: 2776178 - RNA, 19 nt, Artificial Sequence
  Description of Artificial Sequence: Synthetic oligonucleotide
aacaggcagugcagaaaga

SEQ ID NO: 2776179 - RNA, 19 nt, Artificial Sequence
  Description of Artificial Sequence: Synthetic oligonucleotide
cuguuucuagguccuguga

SEQ ID NO: 2776180 - RNA, 19 nt, Artificial Sequence
  Description of Artificial Sequence: Synthetic oligonucleotide
auuugcccuuuuaccauca

SEQ ID NO: 2776181 - RNA, 19 nt, Artificial Sequence
  Description of Artificial Sequence: Synthetic oligonucleotide
aggggcaugaguguccaua

SEQ ID NO: 2776182 - RNA, 19 nt, Artificial Sequence
  Description of Artificial Sequence: Synthetic oligonucleotide
gucuugacaguaacuuauc

SEQ ID NO: 2776183 - RNA, 19 nt, Artificial Sequence
  Description of Artificial Sequence: Synthetic oligonucleotide
caguaacuuaucggcuaag

SEQ ID NO: 2776184 - RNA, 19 nt, Artificial Sequence
  Description of Artificial Sequence: Synthetic oligonucleotide
cacgaacucacguggggaa

SEQ ID NO: 2776185 - RNA, 19 nt, Artificial Sequence
  Description of Artificial Sequence: Synthetic oligonucleotide
ucgcacuuacaagugcaua

SEQ ID NO: 2776186 - RNA, 19 nt, Artificial Sequence
  Description of Artificial Sequence: Synthetic oligonucleotide
ucccuucaaaggggcauga

SEQ ID NO: 2776187 - RNA, 19 nt, Artificial Sequence
  Description of Artificial Sequence: Synthetic oligonucleotide
acugccuccagagccuuau

SEQ ID NO: 2776188 - RNA, 19 nt, Artificial Sequence
  Description of Artificial Sequence: Synthetic oligonucleotide
gagguaggaaguggagcuc

SEQ ID NO: 2776189 - RNA, 19 nt, Artificial Sequence
  Description of Artificial Sequence: Synthetic oligonucleotide
ggggaaacaggcagugcag

SEQ ID NO: 2776190 - RNA, 19 nt, Artificial Sequence
  Description of Artificial Sequence: Synthetic oligonucleotide
cagucuugacaguaacuua

SEQ ID NO: 2776191 - RNA, 19 nt, Artificial Sequence
  Description of Artificial Sequence: Synthetic oligonucleotide
cuuggaguaacaggcugaa

SEQ ID NO: 2776192 - RNA, 19 nt, Artificial Sequence
  Description of Artificial Sequence: Synthetic oligonucleotide
uucuagguccugugagcuu

SEQ ID NO: 2776193 - RNA, 19 nt, Artificial Sequence
  Description of Artificial Sequence: Synthetic oligonucleotide
aucagccaguaagaacugu

SEQ ID NO: 2776194 - RNA, 19 nt, Artificial Sequence
  Description of Artificial Sequence: Synthetic oligonucleotide
gaacucacguggggaaaca

SEQ ID NO: 2776195 - RNA, 19 nt, Artificial Sequence
  Description of Artificial Sequence: Synthetic oligonucleotide
ucucuucggcagagacgcc

SEQ ID NO: 2776196 - RNA, 19 nt, Artificial Sequence
  Description of Artificial Sequence: Synthetic oligonucleotide
cucccuucaaaggggcaug

SEQ ID NO: 2776197 - RNA, 19 nt, Artificial Sequence
  Description of Artificial Sequence: Synthetic oligonucleotide
gccacaugaagcacaguac

SEQ ID NO: 2776198 - RNA, 19 nt, Artificial Sequence
  Description of Artificial Sequence: Synthetic oligonucleotide
ccaucgcacuuacaagugc

SEQ ID NO: 2776199 - RNA, 19 nt, Artificial Sequence
  Description of Artificial Sequence: Synthetic oligonucleotide
ccauuaguuugccgaacac

SEQ ID NO: 2776200 - RNA, 19 nt, Artificial Sequence
  Description of Artificial Sequence: Synthetic oligonucleotide
gugucaggucccaacuuuc

SEQ ID NO: 2776201 - RNA, 19 nt, Artificial Sequence
  Description of Artificial Sequence: Synthetic oligonucleotide
agccaaguccuggauuggu

SEQ ID NO: 2776202 - RNA, 19 nt, Artificial Sequence
  Description of Artificial Sequence: Synthetic oligonucleotide
uucggcagagacgcccagu

SEQ ID NO: 2776203 - RNA, 19 nt, Artificial Sequence
  Description of Artificial Sequence: Synthetic oligonucleotide
agaauacauuugcccuuuu

SEQ ID NO: 2776204 - RNA, 19 nt, Artificial Sequence
  Description of Artificial Sequence: Synthetic oligonucleotide
cuagguccugugagcuuuc

SEQ ID NO: 2776205 - RNA, 19 nt, Artificial Sequence
  Description of Artificial Sequence: Synthetic oligonucleotide
ccauggugcaugccucugg

SEQ ID NO: 2776206 - RNA, 19 nt, Artificial Sequence
  Description of Artificial Sequence: Synthetic oligonucleotide
cccagugucaggucccaac

SEQ ID NO: 2776207 - RNA, 19 nt, Artificial Sequence
  Description of Artificial Sequence: Synthetic oligonucleotide
uacccagccagagggcguc

SEQ ID NO: 2776208 - RNA, 19 nt, Artificial Sequence
  Description of Artificial Sequence: Synthetic oligonucleotide
cugccuggcaagugccauc

SEQ ID NO: 2776209 - RNA, 19 nt, Artificial Sequence
  Description of Artificial Sequence: Synthetic oligonucleotide
cuucggcagagacgcccag

SEQ ID NO: 2776210 - RNA, 19 nt, Artificial Sequence
  Description of Artificial Sequence: Synthetic oligonucleotide
aucgcacuuacaagugcau

SEQ ID NO: 2776211 - RNA, 19 nt, Artificial Sequence
  Description of Artificial Sequence: Synthetic oligonucleotide
gcacacgaacucacguggg

SEQ ID NO: 2776212 - RNA, 19 nt, Artificial Sequence
  Description of Artificial Sequence: Synthetic oligonucleotide
aggucccaacuuucucccu

SEQ ID NO: 2776213 - RNA, 19 nt, Artificial Sequence
  Description of Artificial Sequence: Synthetic oligonucleotide
gcuuggaguaacaggcuga

SEQ ID NO: 2776214 - RNA, 19 nt, Artificial Sequence
  Description of Artificial Sequence: Synthetic oligonucleotide
gccaucgcacuuacaagug

SEQ ID NO: 2776215 - RNA, 19 nt, Artificial Sequence
  Description of Artificial Sequence: Synthetic oligonucleotide
gcucucuaaggccucucuc

SEQ ID NO: 2776216 - RNA, 19 nt, Artificial Sequence
  Description of Artificial Sequence: Synthetic oligonucleotide
acgaacucacguggggaaa

SEQ ID NO: 2776217 - RNA, 19 nt, Artificial Sequence
  Description of Artificial Sequence: Synthetic oligonucleotide
gccuccagagccuuauaaa

SEQ ID NO: 2776218 - RNA, 19 nt, Artificial Sequence
  Description of Artificial Sequence: Synthetic oligonucleotide
cuuaucggcuaagcuugga

SEQ ID NO: 2776219 - RNA, 19 nt, Artificial Sequence
  Description of Artificial Sequence: Synthetic oligonucleotide
gcaugccucuggaugaaac

SEQ ID NO: 2776220 - RNA, 19 nt, Artificial Sequence
  Description of Artificial Sequence: Synthetic oligonucleotide
ggauugguccagucuugga

SEQ ID NO: 2776221 - RNA, 19 nt, Artificial Sequence
  Description of Artificial Sequence: Synthetic oligonucleotide
gcccuuuuaccaucagcca

SEQ ID NO: 2776222 - RNA, 19 nt, Artificial Sequence
  Description of Artificial Sequence: Synthetic oligonucleotide
ggcugcacacgaacucacg

SEQ ID NO: 2776223 - RNA, 19 nt, Artificial Sequence
  Description of Artificial Sequence: Synthetic oligonucleotide
acacagcuggacacugccu

SEQ ID NO: 2776224 - RNA, 19 nt, Artificial Sequence
  Description of Artificial Sequence: Synthetic oligonucleotide
gcccagucuugacaguaac

SEQ ID NO: 2776225 - RNA, 19 nt, Artificial Sequence
  Description of Artificial Sequence: Synthetic oligonucleotide
gagcuuucacuagccaagu

SEQ ID NO: 2776226 - RNA, 19 nt, Artificial Sequence
  Description of Artificial Sequence: Synthetic oligonucleotide
aaggggcaugaguguccau

SEQ ID NO: 2776227 - RNA, 19 nt, Artificial Sequence
  Description of Artificial Sequence: Synthetic oligonucleotide
cuucggcugcacacgaacu

SEQ ID NO: 2776228 - RNA, 19 nt, Artificial Sequence
  Description of Artificial Sequence: Synthetic oligonucleotide
gucaauuuccauggugcau

SEQ ID NO: 2776229 - RNA, 19 nt, Artificial Sequence
  Description of Artificial Sequence: Synthetic oligonucleotide
gggaaacaggcagugcaga

SEQ ID NO: 2776230 - RNA, 19 nt, Artificial Sequence
  Description of Artificial Sequence: Synthetic oligonucleotide
gcugcacacgaacucacgu

SEQ ID NO: 2776231 - RNA, 19 nt, Artificial Sequence
  Description of Artificial Sequence: Synthetic oligonucleotide
gcagagacgcccagucuug

SEQ ID NO: 2776232 - RNA, 19 nt, Artificial Sequence
  Description of Artificial Sequence: Synthetic oligonucleotide
acgcccagucuugacagua

SEQ ID NO: 2776233 - RNA, 19 nt, Artificial Sequence
  Description of Artificial Sequence: Synthetic oligonucleotide
ugcaugccucuggaugaaa

SEQ ID NO: 2776234 - RNA, 19 nt, Artificial Sequence
  Description of Artificial Sequence: Synthetic oligonucleotide
guccuggauugguccaguc

SEQ ID NO: 2776235 - RNA, 19 nt, Artificial Sequence
  Description of Artificial Sequence: Synthetic oligonucleotide
gcguccucagggcuuuccc

SEQ ID NO: 2776236 - RNA, 19 nt, Artificial Sequence
  Description of Artificial Sequence: Synthetic oligonucleotide
cuuuuaccaucagccagua

SEQ ID NO: 2776237 - RNA, 19 nt, Artificial Sequence
  Description of Artificial Sequence: Synthetic oligonucleotide
agggcuuucccaggucaau

SEQ ID NO: 2776238 - RNA, 19 nt, Artificial Sequence
  Description of Artificial Sequence: Synthetic oligonucleotide
ccaguaagaacuguuucua

SEQ ID NO: 2776239 - RNA, 19 nt, Artificial Sequence
  Description of Artificial Sequence: Synthetic oligonucleotide
gccagagggcguccucagg

SEQ ID NO: 2776240 - RNA, 19 nt, Artificial Sequence
  Description of Artificial Sequence: Synthetic oligonucleotide
ggcagagacgcccagucuu

SEQ ID NO: 2776241 - RNA, 19 nt, Artificial Sequence
  Description of Artificial Sequence: Synthetic oligonucleotide
acccagccagagggcgucc

SEQ ID NO: 2776242 - RNA, 19 nt, Artificial Sequence
  Description of Artificial Sequence: Synthetic oligonucleotide
gcuaccugccuggcaagug

SEQ ID NO: 2776243 - RNA, 19 nt, Artificial Sequence
  Description of Artificial Sequence: Synthetic oligonucleotide
ccuucaaaggggcaugagu

SEQ ID NO: 2776244 - RNA, 19 nt, Artificial Sequence
  Description of Artificial Sequence: Synthetic oligonucleotide
cgcaaacauucaaaggcca

SEQ ID NO: 2776245 - RNA, 19 nt, Artificial Sequence
  Description of Artificial Sequence: Synthetic oligonucleotide
gucggcuaccugccuggca

SEQ ID NO: 2776246 - RNA, 19 nt, Artificial Sequence
  Description of Artificial Sequence: Synthetic oligonucleotide
cagccaguaagaacuguuu

SEQ ID NO: 2776247 - RNA, 19 nt, Artificial Sequence
  Description of Artificial Sequence: Synthetic oligonucleotide
guaggaaguggagcucucu

SEQ ID NO: 2776248 - RNA, 19 nt, Artificial Sequence
  Description of Artificial Sequence: Synthetic oligonucleotide
aagugccaucgcacuuaca

SEQ ID NO: 2776249 - RNA, 19 nt, Artificial Sequence
  Description of Artificial Sequence: Synthetic oligonucleotide
cagggcuuucccaggucaa

SEQ ID NO: 2776250 - RNA, 19 nt, Artificial Sequence
  Description of Artificial Sequence: Synthetic oligonucleotide
cgagguaggaaguggagcu

SEQ ID NO: 2776251 - RNA, 19 nt, Artificial Sequence
  Description of Artificial Sequence: Synthetic oligonucleotide
gagcucucuaaggccucuc

SEQ ID NO: 2776252 - RNA, 19 nt, Artificial Sequence
  Description of Artificial Sequence: Synthetic oligonucleotide
gcaagugccaucgcacuua

SEQ ID NO: 2776253 - RNA, 19 nt, Artificial Sequence
  Description of Artificial Sequence: Synthetic oligonucleotide
cagccagagggcguccuca

SEQ ID NO: 2776254 - RNA, 19 nt, Artificial Sequence
  Description of Artificial Sequence: Synthetic oligonucleotide
ccuggauugguccagucuu

SEQ ID NO: 2776255 - RNA, 19 nt, Artificial Sequence
  Description of Artificial Sequence: Synthetic oligonucleotide
gcacuuacaagugcauagu

SEQ ID NO: 2776256 - RNA, 19 nt, Artificial Sequence
  Description of Artificial Sequence: Synthetic oligonucleotide
gguaggaaguggagcucuc

SEQ ID NO: 2776257 - RNA, 19 nt, Artificial Sequence
  Description of Artificial Sequence: Synthetic oligonucleotide
gggcaugaguguccauaga

SEQ ID NO: 2776258 - RNA, 19 nt, Artificial Sequence
  Description of Artificial Sequence: Synthetic oligonucleotide
ccagucuugacaguaacuu

SEQ ID NO: 2776259 - RNA, 19 nt, Artificial Sequence
  Description of Artificial Sequence: Synthetic oligonucleotide
ggcuaagcuuggaguaaca

SEQ ID NO: 2776260 - RNA, 19 nt, Artificial Sequence
  Description of Artificial Sequence: Synthetic oligonucleotide
cgaacucacguggggaaac

SEQ ID NO: 2776261 - RNA, 19 nt, Artificial Sequence
  Description of Artificial Sequence: Synthetic oligonucleotide
cagagacgcccagucuuga

SEQ ID NO: 2776262 - RNA, 19 nt, Artificial Sequence
  Description of Artificial Sequence: Synthetic oligonucleotide
ggcuuucccaggucaauuu

SEQ ID NO: 2776263 - RNA, 19 nt, Artificial Sequence
  Description of Artificial Sequence: Synthetic oligonucleotide
gacgcccagucuugacagu

SEQ ID NO: 2776264 - RNA, 19 nt, Artificial Sequence
  Description of Artificial Sequence: Synthetic oligonucleotide
ggcguccucagggcuuucc

SEQ ID NO: 2776265 - RNA, 19 nt, Artificial Sequence
  Description of Artificial Sequence: Synthetic oligonucleotide
ccucuggaugaaaccauua

SEQ ID NO: 2776266 - RNA, 19 nt, Artificial Sequence
  Description of Artificial Sequence: Synthetic oligonucleotide
ggucccaacuuucucccuu

SEQ ID NO: 2776267 - RNA, 19 nt, Artificial Sequence
  Description of Artificial Sequence: Synthetic oligonucleotide
ccauagaaucgagguagga

SEQ ID NO: 2776268 - RNA, 19 nt, Artificial Sequence
  Description of Artificial Sequence: Synthetic oligonucleotide
gugcaugccucuggaugaa

SEQ ID NO: 2776269 - RNA, 19 nt, Artificial Sequence
  Description of Artificial Sequence: Synthetic oligonucleotide
gcauagucuucggcugcac

SEQ ID NO: 2776270 - RNA, 19 nt, Artificial Sequence
  Description of Artificial Sequence: Synthetic oligonucleotide
gucuucggcugcacacgaa

SEQ ID NO: 2776271 - RNA, 19 nt, Artificial Sequence
  Description of Artificial Sequence: Synthetic oligonucleotide
cccagucuugacaguaacu

SEQ ID NO: 2776272 - RNA, 19 nt, Artificial Sequence
  Description of Artificial Sequence: Synthetic oligonucleotide
cagugucaggucccaacuu

SEQ ID NO: 2776273 - RNA, 19 nt, Artificial Sequence
  Description of Artificial Sequence: Synthetic oligonucleotide
ggcaagugccaucgcacuu

SEQ ID NO: 2776274 - RNA, 19 nt, Artificial Sequence
  Description of Artificial Sequence: Synthetic oligonucleotide
cggcuaagcuuggaguaac

SEQ ID NO: 2776275 - RNA, 19 nt, Artificial Sequence
  Description of Artificial Sequence: Synthetic oligonucleotide
gagggcguccucagggcuu

SEQ ID NO: 2776276 - RNA, 19 nt, Artificial Sequence
  Description of Artificial Sequence: Synthetic oligonucleotide
gccuggcaagugccaucgc

SEQ ID NO: 2776277 - RNA, 19 nt, Artificial Sequence
  Description of Artificial Sequence: Synthetic oligonucleotide
ggagcucucuaaggccucu

SEQ ID NO: 2776278 - RNA, 19 nt, Artificial Sequence
  Description of Artificial Sequence: Synthetic oligonucleotide
cggcuaccugccuggcaag

SEQ ID NO: 2776279 - RNA, 19 nt, Artificial Sequence
  Description of Artificial Sequence: Synthetic oligonucleotide
gggcuuucccaggucaauu

SEQ ID NO: 2776280 - RNA, 19 nt, Artificial Sequence
  Description of Artificial Sequence: Synthetic oligonucleotide
ggcuaccugccuggcaagu

SEQ ID NO: 2776281 - RNA, 19 nt, Artificial Sequence
  Description of Artificial Sequence: Synthetic oligonucleotide
gccucuggaugaaaccauu

SEQ ID NO: 2776282 - RNA, 19 nt, Artificial Sequence
  Description of Artificial Sequence: Synthetic oligonucleotide
cgcccagucuugacaguaa

SEQ ID NO: 2776283 - RNA, 19 nt, Artificial Sequence
  Description of Artificial Sequence: Synthetic oligonucleotide
cggcagagacgcccagucu

SEQ ID NO: 2776284 - RNA, 19 nt, Artificial Sequence
  Description of Artificial Sequence: Synthetic oligonucleotide
gggcguccucagggcuuuc

SEQ ID NO: 2776285 - RNA, 19 nt, Artificial Sequence
  Description of Artificial Sequence: Synthetic oligonucleotide
cccagccagagggcguccu

SEQ ID NO: 2776286 - RNA, 19 nt, Artificial Sequence
  Description of Artificial Sequence: Synthetic oligonucleotide
auauuuauaauuuuagagg

SEQ ID NO: 2776287 - RNA, 19 nt, Artificial Sequence
  Description of Artificial Sequence: Synthetic oligonucleotide
aaauguuucuuauuaaguc

SEQ ID NO: 2776288 - RNA, 19 nt, Artificial Sequence
  Description of Artificial Sequence: Synthetic oligonucleotide
uauuuauaauuuuagaggc

SEQ ID NO: 2776289 - RNA, 19 nt, Artificial Sequence
  Description of Artificial Sequence: Synthetic oligonucleotide
uguauauuuauaauuuuag

SEQ ID NO: 2776290 - RNA, 19 nt, Artificial Sequence
  Description of Artificial Sequence: Synthetic oligonucleotide
accuuuauuuuauaaagcc

SEQ ID NO: 2776291 - RNA, 19 nt, Artificial Sequence
  Description of Artificial Sequence: Synthetic oligonucleotide
gaucucagagacuugaucg

SEQ ID NO: 2776292 - RNA, 19 nt, Artificial Sequence
  Description of Artificial Sequence: Synthetic oligonucleotide
uauuuuauaaagccauggg

SEQ ID NO: 2776293 - RNA, 19 nt, Artificial Sequence
  Description of Artificial Sequence: Synthetic oligonucleotide
aaagguuauauuuauaaua

SEQ ID NO: 2776294 - RNA, 19 nt, Artificial Sequence
  Description of Artificial Sequence: Synthetic oligonucleotide
uuuuauaaagccauggguc

SEQ ID NO: 2776295 - RNA, 19 nt, Artificial Sequence
  Description of Artificial Sequence: Synthetic oligonucleotide
uauauuuguauauuuauaa

SEQ ID NO: 2776296 - RNA, 19 nt, Artificial Sequence
  Description of Artificial Sequence: Synthetic oligonucleotide
uuuuaaaccacacuuguaa

SEQ ID NO: 2776297 - RNA, 19 nt, Artificial Sequence
  Description of Artificial Sequence: Synthetic oligonucleotide
gaaaauguuucuuauuaag

SEQ ID NO: 2776298 - RNA, 19 nt, Artificial Sequence
  Description of Artificial Sequence: Synthetic oligonucleotide
aauguuucuuauuaaguca

SEQ ID NO: 2776299 - RNA, 19 nt, Artificial Sequence
  Description of Artificial Sequence: Synthetic oligonucleotide
uugacaauucuuaagaaaa

SEQ ID NO: 2776300 - RNA, 19 nt, Artificial Sequence
  Description of Artificial Sequence: Synthetic oligonucleotide
aauaccuuuauuuuauaaa

SEQ ID NO: 2776301 - RNA, 19 nt, Artificial Sequence
  Description of Artificial Sequence: Synthetic oligonucleotide
uuauuuuauaaagccaugg

SEQ ID NO: 2776302 - RNA, 19 nt, Artificial Sequence
  Description of Artificial Sequence: Synthetic oligonucleotide
uuaaaguaguccaugguga

SEQ ID NO: 2776303 - RNA, 19 nt, Artificial Sequence
  Description of Artificial Sequence: Synthetic oligonucleotide
aaguaguccauggugaugg

SEQ ID NO: 2776304 - RNA, 19 nt, Artificial Sequence
  Description of Artificial Sequence: Synthetic oligonucleotide
aaagccaugggucauucug

SEQ ID NO: 2776305 - RNA, 19 nt, Artificial Sequence
  Description of Artificial Sequence: Synthetic oligonucleotide
auuuuauaaagccaugggu

SEQ ID NO: 2776306 - RNA, 19 nt, Artificial Sequence
  Description of Artificial Sequence: Synthetic oligonucleotide
uuuauaaagccauggguca

SEQ ID NO: 2776307 - RNA, 19 nt, Artificial Sequence
  Description of Artificial Sequence: Synthetic oligonucleotide
uacacaaaagguuauauuu

SEQ ID NO: 2776308 - RNA, 19 nt, Artificial Sequence
  Description of Artificial Sequence: Synthetic oligonucleotide
cacacugucaacaggacgg

SEQ ID NO: 2776309 - RNA, 19 nt, Artificial Sequence
  Description of Artificial Sequence: Synthetic oligonucleotide
auggcauuguuccaguagc

SEQ ID NO: 2776310 - RNA, 19 nt, Artificial Sequence
  Description of Artificial Sequence: Synthetic oligonucleotide
aaaauagggaguggcaacg

SEQ ID NO: 2776311 - RNA, 19 nt, Artificial Sequence
  Description of Artificial Sequence: Synthetic oligonucleotide
uauuuguauauuuauaauu

SEQ ID NO: 2776312 - RNA, 19 nt, Artificial Sequence
  Description of Artificial Sequence: Synthetic oligonucleotide
guuaaaguaguccauggug

SEQ ID NO: 2776313 - RNA, 19 nt, Artificial Sequence
  Description of Artificial Sequence: Synthetic oligonucleotide
gauguugacaauucuuaag

SEQ ID NO: 2776314 - RNA, 19 nt, Artificial Sequence
  Description of Artificial Sequence: Synthetic oligonucleotide
aacaggacggagcaggaag

SEQ ID NO: 2776315 - RNA, 19 nt, Artificial Sequence
  Description of Artificial Sequence: Synthetic oligonucleotide
gucaggguuacacaaaagg

SEQ ID NO: 2776316 - RNA, 19 nt, Artificial Sequence
  Description of Artificial Sequence: Synthetic oligonucleotide
uucuuauuaagucaggguu

SEQ ID NO: 2776317 - RNA, 19 nt, Artificial Sequence
  Description of Artificial Sequence: Synthetic oligonucleotide
aaaagguuauauuuauaau

SEQ ID NO: 2776318 - RNA, 19 nt, Artificial Sequence
  Description of Artificial Sequence: Synthetic oligonucleotide
uuuauaauuuuagaggcaa

SEQ ID NO: 2776319 - RNA, 19 nt, Artificial Sequence
  Description of Artificial Sequence: Synthetic oligonucleotide
uucacaaggaccaucccca

SEQ ID NO: 2776320 - RNA, 19 nt, Artificial Sequence
  Description of Artificial Sequence: Synthetic oligonucleotide
aaaauguuucuuauuaagu

SEQ ID NO: 2776321 - RNA, 19 nt, Artificial Sequence
  Description of Artificial Sequence: Synthetic oligonucleotide
auguugacaauucuuaaga

SEQ ID NO: 2776322 - RNA, 19 nt, Artificial Sequence
  Description of Artificial Sequence: Synthetic oligonucleotide
agagacuugaucguuuccc

SEQ ID NO: 2776323 - RNA, 19 nt, Artificial Sequence
  Description of Artificial Sequence: Synthetic oligonucleotide
aagguuauauuuauaauau

SEQ ID NO: 2776324 - RNA, 19 nt, Artificial Sequence
  Description of Artificial Sequence: Synthetic oligonucleotide
aaaagauguugacaauucu

SEQ ID NO: 2776325 - RNA, 19 nt, Artificial Sequence
  Description of Artificial Sequence: Synthetic oligonucleotide
uuagaaauaccuuuauuuu

SEQ ID NO: 2776326 - RNA, 19 nt, Artificial Sequence
  Description of Artificial Sequence: Synthetic oligonucleotide
aauagggaguggcaacgcg

SEQ ID NO: 2776327 - RNA, 19 nt, Artificial Sequence
  Description of Artificial Sequence: Synthetic oligonucleotide
aaauaccuuuauuuuauaa

SEQ ID NO: 2776328 - RNA, 19 nt, Artificial Sequence
  Description of Artificial Sequence: Synthetic oligonucleotide
aaaagcugaaaauguuucu

SEQ ID NO: 2776329 - RNA, 19 nt, Artificial Sequence
  Description of Artificial Sequence: Synthetic oligonucleotide
uuguauauuuauaauuuua

SEQ ID NO: 2776330 - RNA, 19 nt, Artificial Sequence
  Description of Artificial Sequence: Synthetic oligonucleotide
ugcauggcgguuaaaguag

SEQ ID NO: 2776331 - RNA, 19 nt, Artificial Sequence
  Description of Artificial Sequence: Synthetic oligonucleotide
ucaggguuacacaaaaggu

SEQ ID NO: 2776332 - RNA, 19 nt, Artificial Sequence
  Description of Artificial Sequence: Synthetic oligonucleotide
guuccaguagcucagguug

SEQ ID NO: 2776333 - RNA, 19 nt, Artificial Sequence
  Description of Artificial Sequence: Synthetic oligonucleotide
aacaguguuuccugggcag

SEQ ID NO: 2776334 - RNA, 19 nt, Artificial Sequence
  Description of Artificial Sequence: Synthetic oligonucleotide
caaaagguuauauuuauaa

SEQ ID NO: 2776335 - RNA, 19 nt, Artificial Sequence
  Description of Artificial Sequence: Synthetic oligonucleotide
gacuugaucguuucccacg

SEQ ID NO: 2776336 - RNA, 19 nt, Artificial Sequence
  Description of Artificial Sequence: Synthetic oligonucleotide
uuucuuauuaagucagggu

SEQ ID NO: 2776337 - RNA, 19 nt, Artificial Sequence
  Description of Artificial Sequence: Synthetic oligonucleotide
agcaggaagagauggggac

SEQ ID NO: 2776338 - RNA, 19 nt, Artificial Sequence
  Description of Artificial Sequence: Synthetic oligonucleotide
cugauggccaggaugaccc

SEQ ID NO: 2776339 - RNA, 19 nt, Artificial Sequence
  Description of Artificial Sequence: Synthetic oligonucleotide
acaaggaccauccccagug

SEQ ID NO: 2776340 - RNA, 19 nt, Artificial Sequence
  Description of Artificial Sequence: Synthetic oligonucleotide
gaugacccagacaauaucc

SEQ ID NO: 2776341 - RNA, 19 nt, Artificial Sequence
  Description of Artificial Sequence: Synthetic oligonucleotide
gauggcauuguuccaguag

SEQ ID NO: 2776342 - RNA, 19 nt, Artificial Sequence
  Description of Artificial Sequence: Synthetic oligonucleotide
uguuucuuauuaagucagg

SEQ ID NO: 2776343 - RNA, 19 nt, Artificial Sequence
  Description of Artificial Sequence: Synthetic oligonucleotide
guuucuuauuaagucaggg

SEQ ID NO: 2776344 - RNA, 19 nt, Artificial Sequence
  Description of Artificial Sequence: Synthetic oligonucleotide
gacacugauggccaggaug

SEQ ID NO: 2776345 - RNA, 19 nt, Artificial Sequence
  Description of Artificial Sequence: Synthetic oligonucleotide
ucuuauuaagucaggguua

SEQ ID NO: 2776346 - RNA, 19 nt, Artificial Sequence
  Description of Artificial Sequence: Synthetic oligonucleotide
uuaaaccacacuuguaaaa

SEQ ID NO: 2776347 - RNA, 19 nt, Artificial Sequence
  Description of Artificial Sequence: Synthetic oligonucleotide
ugaucguuucccacgaaca

SEQ ID NO: 2776348 - RNA, 19 nt, Artificial Sequence
  Description of Artificial Sequence: Synthetic oligonucleotide
uccucugaggucuccaggg

SEQ ID NO: 2776349 - RNA, 19 nt, Artificial Sequence
  Description of Artificial Sequence: Synthetic oligonucleotide
ucguuucccacgaacagug

SEQ ID NO: 2776350 - RNA, 19 nt, Artificial Sequence
  Description of Artificial Sequence: Synthetic oligonucleotide
agaucucagagacuugauc

SEQ ID NO: 2776351 - RNA, 19 nt, Artificial Sequence
  Description of Artificial Sequence: Synthetic oligonucleotide
aaauagggaguggcaacgc

SEQ ID NO: 2776352 - RNA, 19 nt, Artificial Sequence
  Description of Artificial Sequence: Synthetic oligonucleotide
auuuguauauuuauaauuu

SEQ ID NO: 2776353 - RNA, 19 nt, Artificial Sequence
  Description of Artificial Sequence: Synthetic oligonucleotide
uagaaauaccuuuauuuua

SEQ ID NO: 2776354 - RNA, 19 nt, Artificial Sequence
  Description of Artificial Sequence: Synthetic oligonucleotide
uuuccugggcagaaagggg

SEQ ID NO: 2776355 - RNA, 19 nt, Artificial Sequence
  Description of Artificial Sequence: Synthetic oligonucleotide
ucaugcagcacacugucaa

SEQ ID NO: 2776356 - RNA, 19 nt, Artificial Sequence
  Description of Artificial Sequence: Synthetic oligonucleotide
uuggcugucuucuuccucc

SEQ ID NO: 2776357 - RNA, 19 nt, Artificial Sequence
  Description of Artificial Sequence: Synthetic oligonucleotide
uguuuccugggcagaaagg

SEQ ID NO: 2776358 - RNA, 19 nt, Artificial Sequence
  Description of Artificial Sequence: Synthetic oligonucleotide
ugaaaauguuucuuauuaa

SEQ ID NO: 2776359 - RNA, 19 nt, Artificial Sequence
  Description of Artificial Sequence: Synthetic oligonucleotide
uuuaaaccacacuuguaaa

SEQ ID NO: 2776360 - RNA, 19 nt, Artificial Sequence
  Description of Artificial Sequence: Synthetic oligonucleotide
uuuguauauuuauaauuuu

SEQ ID NO: 2776361 - RNA, 19 nt, Artificial Sequence
  Description of Artificial Sequence: Synthetic oligonucleotide
auggcgguuaaaguagucc

SEQ ID NO: 2776362 - RNA, 19 nt, Artificial Sequence
  Description of Artificial Sequence: Synthetic oligonucleotide
auuaagucaggguuacaca

SEQ ID NO: 2776363 - RNA, 19 nt, Artificial Sequence
  Description of Artificial Sequence: Synthetic oligonucleotide
gauggggacacugauggcc

SEQ ID NO: 2776364 - RNA, 19 nt, Artificial Sequence
  Description of Artificial Sequence: Synthetic oligonucleotide
guuuccugggcagaaaggg

SEQ ID NO: 2776365 - RNA, 19 nt, Artificial Sequence
  Description of Artificial Sequence: Synthetic oligonucleotide
acugucaacaggacggagc

SEQ ID NO: 2776366 - RNA, 19 nt, Artificial Sequence
  Description of Artificial Sequence: Synthetic oligonucleotide
acuggaucucccuuggcag

SEQ ID NO: 2776367 - RNA, 19 nt, Artificial Sequence
  Description of Artificial Sequence: Synthetic oligonucleotide
cuuagaaauaccuuuauuu

SEQ ID NO: 2776368 - RNA, 19 nt, Artificial Sequence
  Description of Artificial Sequence: Synthetic oligonucleotide
gaucguuucccacgaacag

SEQ ID NO: 2776369 - RNA, 19 nt, Artificial Sequence
  Description of Artificial Sequence: Synthetic oligonucleotide
guucacaaggaccaucccc

SEQ ID NO: 2776370 - RNA, 19 nt, Artificial Sequence
  Description of Artificial Sequence: Synthetic oligonucleotide
gcaucuagaucucagagac

SEQ ID NO: 2776371 - RNA, 19 nt, Artificial Sequence
  Description of Artificial Sequence: Synthetic oligonucleotide
gauagucgccauuggcugg

SEQ ID NO: 2776372 - RNA, 19 nt, Artificial Sequence
  Description of Artificial Sequence: Synthetic oligonucleotide
aagucaggguuacacaaaa

SEQ ID NO: 2776373 - RNA, 19 nt, Artificial Sequence
  Description of Artificial Sequence: Synthetic oligonucleotide
gucaacaggacggagcagg

SEQ ID NO: 2776374 - RNA, 19 nt, Artificial Sequence
  Description of Artificial Sequence: Synthetic oligonucleotide
uugaucguuucccacgaac

SEQ ID NO: 2776375 - RNA, 19 nt, Artificial Sequence
  Description of Artificial Sequence: Synthetic oligonucleotide
auguuucuuauuaagucag

SEQ ID NO: 2776376 - RNA, 19 nt, Artificial Sequence
  Description of Artificial Sequence: Synthetic oligonucleotide
ugcaucuagaucucagaga

SEQ ID NO: 2776377 - RNA, 19 nt, Artificial Sequence
  Description of Artificial Sequence: Synthetic oligonucleotide
aaagauguugacaauucuu

SEQ ID NO: 2776378 - RNA, 19 nt, Artificial Sequence
  Description of Artificial Sequence: Synthetic oligonucleotide
aagauguugacaauucuua

SEQ ID NO: 2776379 - RNA, 19 nt, Artificial Sequence
  Description of Artificial Sequence: Synthetic oligonucleotide
aaagcugaaaauguuucuu

SEQ ID NO: 2776380 - RNA, 19 nt, Artificial Sequence
  Description of Artificial Sequence: Synthetic oligonucleotide
uccccagugucucggauag

SEQ ID NO: 2776381 - RNA, 19 nt, Artificial Sequence
  Description of Artificial Sequence: Synthetic oligonucleotide
cauuguuccaguagcucag

SEQ ID NO: 2776382 - RNA, 19 nt, Artificial Sequence
  Description of Artificial Sequence: Synthetic oligonucleotide
aaggaccauccccaguguc

SEQ ID NO: 2776383 - RNA, 19 nt, Artificial Sequence
  Description of Artificial Sequence: Synthetic oligonucleotide
acccagacaauauccaucu

SEQ ID NO: 2776384 - RNA, 19 nt, Artificial Sequence
  Description of Artificial Sequence: Synthetic oligonucleotide
agaaauaccuuuauuuuau

SEQ ID NO: 2776385 - RNA, 19 nt, Artificial Sequence
  Description of Artificial Sequence: Synthetic oligonucleotide
agacuugaucguuucccac

SEQ ID NO: 2776386 - RNA, 19 nt, Artificial Sequence
  Description of Artificial Sequence: Synthetic oligonucleotide
cuucucaugcagcacacug

SEQ ID NO: 2776387 - RNA, 19 nt, Artificial Sequence
  Description of Artificial Sequence: Synthetic oligonucleotide
uguugacaauucuuaagaa

SEQ ID NO: 2776388 - RNA, 19 nt, Artificial Sequence
  Description of Artificial Sequence: Synthetic oligonucleotide
uggcgguuaaaguagucca

SEQ ID NO: 2776389 - RNA, 19 nt, Artificial Sequence
  Description of Artificial Sequence: Synthetic oligonucleotide
cuuauuaagucaggguuac

SEQ ID NO: 2776390 - RNA, 19 nt, Artificial Sequence
  Description of Artificial Sequence: Synthetic oligonucleotide
ugagagcugguccucugag

SEQ ID NO: 2776391 - RNA, 19 nt, Artificial Sequence
  Description of Artificial Sequence: Synthetic oligonucleotide
guugacaauucuuaagaaa

SEQ ID NO: 2776392 - RNA, 19 nt, Artificial Sequence
  Description of Artificial Sequence: Synthetic oligonucleotide
uuauaauuuuagaggcaaa

SEQ ID NO: 2776393 - RNA, 19 nt, Artificial Sequence
  Description of Artificial Sequence: Synthetic oligonucleotide
uuguucucaggguuggcug

SEQ ID NO: 2776394 - RNA, 19 nt, Artificial Sequence
  Description of Artificial Sequence: Synthetic oligonucleotide
ucggauagucgccauuggc

SEQ ID NO: 2776395 - RNA, 19 nt, Artificial Sequence
  Description of Artificial Sequence: Synthetic oligonucleotide
uaguccauggugauggcau

SEQ ID NO: 2776396 - RNA, 19 nt, Artificial Sequence
  Description of Artificial Sequence: Synthetic oligonucleotide
uuacacaaaagguuauauu

SEQ ID NO: 2776397 - RNA, 19 nt, Artificial Sequence
  Description of Artificial Sequence: Synthetic oligonucleotide
ugcugcaucuagaucucag

SEQ ID NO: 2776398 - RNA, 19 nt, Artificial Sequence
  Description of Artificial Sequence: Synthetic oligonucleotide
cugcaucuagaucucagag

SEQ ID NO: 2776399 - RNA, 19 nt, Artificial Sequence
  Description of Artificial Sequence: Synthetic oligonucleotide
acgaacaguguuuccuggg

SEQ ID NO: 2776400 - RNA, 19 nt, Artificial Sequence
  Description of Artificial Sequence: Synthetic oligonucleotide
uucucaugcagcacacugu

SEQ ID NO: 2776401 - RNA, 19 nt, Artificial Sequence
  Description of Artificial Sequence: Synthetic oligonucleotide
ucagguuguucucaggguu

SEQ ID NO: 2776402 - RNA, 19 nt, Artificial Sequence
  Description of Artificial Sequence: Synthetic oligonucleotide
cauggugauggcauuguuc

SEQ ID NO: 2776403 - RNA, 19 nt, Artificial Sequence
  Description of Artificial Sequence: Synthetic oligonucleotide
cagugucucggauagucgc

SEQ ID NO: 2776404 - RNA, 19 nt, Artificial Sequence
  Description of Artificial Sequence: Synthetic oligonucleotide
aaaguaguccauggugaug

SEQ ID NO: 2776405 - RNA, 19 nt, Artificial Sequence
  Description of Artificial Sequence: Synthetic oligonucleotide
uaaaguaguccauggugau

SEQ ID NO: 2776406 - RNA, 19 nt, Artificial Sequence
  Description of Artificial Sequence: Synthetic oligonucleotide
ucucggauagucgccauug

SEQ ID NO: 2776407 - RNA, 19 nt, Artificial Sequence
  Description of Artificial Sequence: Synthetic oligonucleotide
uuucccacgaacaguguuu

SEQ ID NO: 2776408 - RNA, 19 nt, Artificial Sequence
  Description of Artificial Sequence: Synthetic oligonucleotide
uaagucaggguuacacaaa

SEQ ID NO: 2776409 - RNA, 19 nt, Artificial Sequence
  Description of Artificial Sequence: Synthetic oligonucleotide
acggagcaggaagagaugg

SEQ ID NO: 2776410 - RNA, 19 nt, Artificial Sequence
  Description of Artificial Sequence: Synthetic oligonucleotide
acugcauggcgguuaaagu

SEQ ID NO: 2776411 - RNA, 19 nt, Artificial Sequence
  Description of Artificial Sequence: Synthetic oligonucleotide
auuuauaauuuuagaggca

SEQ ID NO: 2776412 - RNA, 19 nt, Artificial Sequence
  Description of Artificial Sequence: Synthetic oligonucleotide
auagggaguggcaacgcgg

SEQ ID NO: 2776413 - RNA, 19 nt, Artificial Sequence
  Description of Artificial Sequence: Synthetic oligonucleotide
guguuuccugggcagaaag

SEQ ID NO: 2776414 - RNA, 19 nt, Artificial Sequence
  Description of Artificial Sequence: Synthetic oligonucleotide
acuugaucguuucccacga

SEQ ID NO: 2776415 - RNA, 19 nt, Artificial Sequence
  Description of Artificial Sequence: Synthetic oligonucleotide
agauguugacaauucuuaa

SEQ ID NO: 2776416 - RNA, 19 nt, Artificial Sequence
  Description of Artificial Sequence: Synthetic oligonucleotide
gacuggaucucccuuggca

SEQ ID NO: 2776417 - RNA, 19 nt, Artificial Sequence
  Description of Artificial Sequence: Synthetic oligonucleotide
gcucagguuguucucaggg

SEQ ID NO: 2776418 - RNA, 19 nt, Artificial Sequence
  Description of Artificial Sequence: Synthetic oligonucleotide
gccaggaugacccagacaa

SEQ ID NO: 2776419 - RNA, 19 nt, Artificial Sequence
  Description of Artificial Sequence: Synthetic oligonucleotide
auauauuuguauauuuaua

SEQ ID NO: 2776420 - RNA, 19 nt, Artificial Sequence
  Description of Artificial Sequence: Synthetic oligonucleotide
uagggaguggcaacgcgga

SEQ ID NO: 2776421 - RNA, 19 nt, Artificial Sequence
  Description of Artificial Sequence: Synthetic oligonucleotide
agugucucggauagucgcc

SEQ ID NO: 2776422 - RNA, 19 nt, Artificial Sequence
  Description of Artificial Sequence: Synthetic oligonucleotide
ucccuuggcagcuccacug

SEQ ID NO: 2776423 - RNA, 19 nt, Artificial Sequence
  Description of Artificial Sequence: Synthetic oligonucleotide
aucucagagacuugaucgu

SEQ ID NO: 2776424 - RNA, 19 nt, Artificial Sequence
  Description of Artificial Sequence: Synthetic oligonucleotide
aggguuggcugucuucuuc

SEQ ID NO: 2776425 - RNA, 19 nt, Artificial Sequence
  Description of Artificial Sequence: Synthetic oligonucleotide
auaaagccaugggucauuc

SEQ ID NO: 2776426 - RNA, 19 nt, Artificial Sequence
  Description of Artificial Sequence: Synthetic oligonucleotide
ucuagaucucagagacuug

SEQ ID NO: 2776427 - RNA, 19 nt, Artificial Sequence
  Description of Artificial Sequence: Synthetic oligonucleotide
cacgaacaguguuuccugg

SEQ ID NO: 2776428 - RNA, 19 nt, Artificial Sequence
  Description of Artificial Sequence: Synthetic oligonucleotide
acacugauggccaggauga

SEQ ID NO: 2776429 - RNA, 19 nt, Artificial Sequence
  Description of Artificial Sequence: Synthetic oligonucleotide
uguucucaggguuggcugu

SEQ ID NO: 2776430 - RNA, 19 nt, Artificial Sequence
  Description of Artificial Sequence: Synthetic oligonucleotide
aguggcaacgcggaggcug

SEQ ID NO: 2776431 - RNA, 19 nt, Artificial Sequence
  Description of Artificial Sequence: Synthetic oligonucleotide
gucgccauuggcuggggag

SEQ ID NO: 2776432 - RNA, 19 nt, Artificial Sequence
  Description of Artificial Sequence: Synthetic oligonucleotide
gagacuugaucguuuccca

SEQ ID NO: 2776433 - RNA, 19 nt, Artificial Sequence
  Description of Artificial Sequence: Synthetic oligonucleotide
agauggggacacugauggc

SEQ ID NO: 2776434 - RNA, 19 nt, Artificial Sequence
  Description of Artificial Sequence: Synthetic oligonucleotide
ucaacaggacggagcagga

SEQ ID NO: 2776435 - RNA, 19 nt, Artificial Sequence
  Description of Artificial Sequence: Synthetic oligonucleotide
gguuauauuuauaauauau

SEQ ID NO: 2776436 - RNA, 19 nt, Artificial Sequence
  Description of Artificial Sequence: Synthetic oligonucleotide
cacugcauggcgguuaaag

SEQ ID NO: 2776437 - RNA, 19 nt, Artificial Sequence
  Description of Artificial Sequence: Synthetic oligonucleotide
ggauagucgccauuggcug

SEQ ID NO: 2776438 - RNA, 19 nt, Artificial Sequence
  Description of Artificial Sequence: Synthetic oligonucleotide
ccagacaauauccaucuug

SEQ ID NO: 2776439 - RNA, 19 nt, Artificial Sequence
  Description of Artificial Sequence: Synthetic oligonucleotide
gaacaguguuuccugggca

SEQ ID NO: 2776440 - RNA, 19 nt, Artificial Sequence
  Description of Artificial Sequence: Synthetic oligonucleotide
auagucgccauuggcuggg

SEQ ID NO: 2776441 - RNA, 19 nt, Artificial Sequence
  Description of Artificial Sequence: Synthetic oligonucleotide
uguuccaguagcucagguu

SEQ ID NO: 2776442 - RNA, 19 nt, Artificial Sequence
  Description of Artificial Sequence: Synthetic oligonucleotide
cuagaucucagagacuuga

SEQ ID NO: 2776443 - RNA, 19 nt, Artificial Sequence
  Description of Artificial Sequence: Synthetic oligonucleotide
agggacuggaucucccuug

SEQ ID NO: 2776444 - RNA, 19 nt, Artificial Sequence
  Description of Artificial Sequence: Synthetic oligonucleotide
aggguuacacaaaagguua

SEQ ID NO: 2776445 - RNA, 19 nt, Artificial Sequence
  Description of Artificial Sequence: Synthetic oligonucleotide
uggcauuguuccaguagcu

SEQ ID NO: 2776446 - RNA, 19 nt, Artificial Sequence
  Description of Artificial Sequence: Synthetic oligonucleotide
agguuauauuuauaauaua

SEQ ID NO: 2776447 - RNA, 19 nt, Artificial Sequence
  Description of Artificial Sequence: Synthetic oligonucleotide
uggcagcuccacugcaugg

SEQ ID NO: 2776448 - RNA, 19 nt, Artificial Sequence
  Description of Artificial Sequence: Synthetic oligonucleotide
ugacccagacaauauccau

SEQ ID NO: 2776449 - RNA, 19 nt, Artificial Sequence
  Description of Artificial Sequence: Synthetic oligonucleotide
cugucaacaggacggagca

SEQ ID NO: 2776450 - RNA, 19 nt, Artificial Sequence
  Description of Artificial Sequence: Synthetic oligonucleotide
cagguuguucucaggguug

SEQ ID NO: 2776451 - RNA, 19 nt, Artificial Sequence
  Description of Artificial Sequence: Synthetic oligonucleotide
uuauaaagccaugggucau

SEQ ID NO: 2776452 - RNA, 19 nt, Artificial Sequence
  Description of Artificial Sequence: Synthetic oligonucleotide
ucacaaggaccauccccag

SEQ ID NO: 2776453 - RNA, 19 nt, Artificial Sequence
  Description of Artificial Sequence: Synthetic oligonucleotide
acacaaaagguuauauuua

SEQ ID NO: 2776454 - RNA, 19 nt, Artificial Sequence
  Description of Artificial Sequence: Synthetic oligonucleotide
gacccagacaauauccauc

SEQ ID NO: 2776455 - RNA, 19 nt, Artificial Sequence
  Description of Artificial Sequence: Synthetic oligonucleotide
aagccaugggucauucugu

SEQ ID NO: 2776456 - RNA, 19 nt, Artificial Sequence
  Description of Artificial Sequence: Synthetic oligonucleotide
auuguuccaguagcucagg

SEQ ID NO: 2776457 - RNA, 19 nt, Artificial Sequence
  Description of Artificial Sequence: Synthetic oligonucleotide
uuguuccaguagcucaggu

SEQ ID NO: 2776458 - RNA, 19 nt, Artificial Sequence
  Description of Artificial Sequence: Synthetic oligonucleotide
ggcugcugcaucuagaucu

SEQ ID NO: 2776459 - RNA, 19 nt, Artificial Sequence
  Description of Artificial Sequence: Synthetic oligonucleotide
uuccaguagcucagguugu

SEQ ID NO: 2776460 - RNA, 19 nt, Artificial Sequence
  Description of Artificial Sequence: Synthetic oligonucleotide
ucugagagcugguccucug

SEQ ID NO: 2776461 - RNA, 19 nt, Artificial Sequence
  Description of Artificial Sequence: Synthetic oligonucleotide
agguuguucucaggguugg

SEQ ID NO: 2776462 - RNA, 19 nt, Artificial Sequence
  Description of Artificial Sequence: Synthetic oligonucleotide
ggaguggcaacgcggaggc

SEQ ID NO: 2776463 - RNA, 19 nt, Artificial Sequence
  Description of Artificial Sequence: Synthetic oligonucleotide
ccuuuauuuuauaaagcca

SEQ ID NO: 2776464 - RNA, 19 nt, Artificial Sequence
  Description of Artificial Sequence: Synthetic oligonucleotide
uagaucucagagacuugau

SEQ ID NO: 2776465 - RNA, 19 nt, Artificial Sequence
  Description of Artificial Sequence: Synthetic oligonucleotide
gcacacugucaacaggacg

SEQ ID NO: 2776466 - RNA, 19 nt, Artificial Sequence
  Description of Artificial Sequence: Synthetic oligonucleotide
gcauuguuccaguagcuca

SEQ ID NO: 2776467 - RNA, 19 nt, Artificial Sequence
  Description of Artificial Sequence: Synthetic oligonucleotide
agcucagguuguucucagg

SEQ ID NO: 2776468 - RNA, 19 nt, Artificial Sequence
  Description of Artificial Sequence: Synthetic oligonucleotide
aucguuucccacgaacagu

SEQ ID NO: 2776469 - RNA, 19 nt, Artificial Sequence
  Description of Artificial Sequence: Synthetic oligonucleotide
caugcagcacacugucaac

SEQ ID NO: 2776470 - RNA, 19 nt, Artificial Sequence
  Description of Artificial Sequence: Synthetic oligonucleotide
cugcauggcgguuaaagua

SEQ ID NO: 2776471 - RNA, 19 nt, Artificial Sequence
  Description of Artificial Sequence: Synthetic oligonucleotide
agagauggggacacugaug

SEQ ID NO: 2776472 - RNA, 19 nt, Artificial Sequence
  Description of Artificial Sequence: Synthetic oligonucleotide
cucggauagucgccauugg

SEQ ID NO: 2776473 - RNA, 19 nt, Artificial Sequence
  Description of Artificial Sequence: Synthetic oligonucleotide
uauaaagccaugggucauu

SEQ ID NO: 2776474 - RNA, 19 nt, Artificial Sequence
  Description of Artificial Sequence: Synthetic oligonucleotide
agcuccacugcauggcggu

SEQ ID NO: 2776475 - RNA, 19 nt, Artificial Sequence
  Description of Artificial Sequence: Synthetic oligonucleotide
cacaaaagguuauauuuau

SEQ ID NO: 2776476 - RNA, 19 nt, Artificial Sequence
  Description of Artificial Sequence: Synthetic oligonucleotide
cagagacuugaucguuucc

SEQ ID NO: 2776477 - RNA, 19 nt, Artificial Sequence
  Description of Artificial Sequence: Synthetic oligonucleotide
augcagcacacugucaaca

SEQ ID NO: 2776478 - RNA, 19 nt, Artificial Sequence
  Description of Artificial Sequence: Synthetic oligonucleotide
accauccccagugucucgg

SEQ ID NO: 2776479 - RNA, 19 nt, Artificial Sequence
  Description of Artificial Sequence: Synthetic oligonucleotide
agcacacugucaacaggac

SEQ ID NO: 2776480 - RNA, 19 nt, Artificial Sequence
  Description of Artificial Sequence: Synthetic oligonucleotide
ucgccauuggcuggggagc

SEQ ID NO: 2776481 - RNA, 19 nt, Artificial Sequence
  Description of Artificial Sequence: Synthetic oligonucleotide
ggguucacaaggaccaucc

SEQ ID NO: 2776482 - RNA, 19 nt, Artificial Sequence
  Description of Artificial Sequence: Synthetic oligonucleotide
uccacugcauggcgguuaa

SEQ ID NO: 2776483 - RNA, 19 nt, Artificial Sequence
  Description of Artificial Sequence: Synthetic oligonucleotide
ggguucugagagcuggucc

SEQ ID NO: 2776484 - RNA, 19 nt, Artificial Sequence
  Description of Artificial Sequence: Synthetic oligonucleotide
uaaagccaugggucauucu

SEQ ID NO: 2776485 - RNA, 19 nt, Artificial Sequence
  Description of Artificial Sequence: Synthetic oligonucleotide
uuauuaagucaggguuaca

SEQ ID NO: 2776486 - RNA, 19 nt, Artificial Sequence
  Description of Artificial Sequence: Synthetic oligonucleotide
aggcugcugcaucuagauc

SEQ ID NO: 2776487 - RNA, 19 nt, Artificial Sequence
  Description of Artificial Sequence: Synthetic oligonucleotide
guuacacaaaagguuauau

SEQ ID NO: 2776488 - RNA, 19 nt, Artificial Sequence
  Description of Artificial Sequence: Synthetic oligonucleotide
augacccagacaauaucca

SEQ ID NO: 2776489 - RNA, 19 nt, Artificial Sequence
  Description of Artificial Sequence: Synthetic oligonucleotide
gggacuggaucucccuugg

SEQ ID NO: 2776490 - RNA, 19 nt, Artificial Sequence
  Description of Artificial Sequence: Synthetic oligonucleotide
uggaucucccuuggcagcu

SEQ ID NO: 2776491 - RNA, 19 nt, Artificial Sequence
  Description of Artificial Sequence: Synthetic oligonucleotide
gaccauccccagugucucg

SEQ ID NO: 2776492 - RNA, 19 nt, Artificial Sequence
  Description of Artificial Sequence: Synthetic oligonucleotide
cagcuccacugcauggcgg

SEQ ID NO: 2776493 - RNA, 19 nt, Artificial Sequence
  Description of Artificial Sequence: Synthetic oligonucleotide
uucccacgaacaguguuuc

SEQ ID NO: 2776494 - RNA, 19 nt, Artificial Sequence
  Description of Artificial Sequence: Synthetic oligonucleotide
gggaguggcaacgcggagg

SEQ ID NO: 2776495 - RNA, 19 nt, Artificial Sequence
  Description of Artificial Sequence: Synthetic oligonucleotide
aggaccauccccagugucu

SEQ ID NO: 2776496 - RNA, 19 nt, Artificial Sequence
  Description of Artificial Sequence: Synthetic oligonucleotide
agucaggguuacacaaaag

SEQ ID NO: 2776497 - RNA, 19 nt, Artificial Sequence
  Description of Artificial Sequence: Synthetic oligonucleotide
ggguuggcugucuucuucc

SEQ ID NO: 2776498 - RNA, 19 nt, Artificial Sequence
  Description of Artificial Sequence: Synthetic oligonucleotide
ucucagagacuugaucguu

SEQ ID NO: 2776499 - RNA, 19 nt, Artificial Sequence
  Description of Artificial Sequence: Synthetic oligonucleotide
caggguuacacaaaagguu

SEQ ID NO: 2776500 - RNA, 19 nt, Artificial Sequence
  Description of Artificial Sequence: Synthetic oligonucleotide
cauggcgguuaaaguaguc

SEQ ID NO: 2776501 - RNA, 19 nt, Artificial Sequence
  Description of Artificial Sequence: Synthetic oligonucleotide
guagcucagguuguucuca

SEQ ID NO: 2776502 - RNA, 19 nt, Artificial Sequence
  Description of Artificial Sequence: Synthetic oligonucleotide
cgguuaaaguaguccaugg

SEQ ID NO: 2776503 - RNA, 19 nt, Artificial Sequence
  Description of Artificial Sequence: Synthetic oligonucleotide
acaaaagguuauauuuaua

SEQ ID NO: 2776504 - RNA, 19 nt, Artificial Sequence
  Description of Artificial Sequence: Synthetic oligonucleotide
cucaggguuggcugucuuc

SEQ ID NO: 2776505 - RNA, 19 nt, Artificial Sequence
  Description of Artificial Sequence: Synthetic oligonucleotide
ugucaacaggacggagcag

SEQ ID NO: 2776506 - RNA, 19 nt, Artificial Sequence
  Description of Artificial Sequence: Synthetic oligonucleotide
cauuggcuggggagcgggg

SEQ ID NO: 2776507 - RNA, 19 nt, Artificial Sequence
  Description of Artificial Sequence: Synthetic oligonucleotide
gcugucuucuuccuccuuc

SEQ ID NO: 2776508 - RNA, 19 nt, Artificial Sequence
  Description of Artificial Sequence: Synthetic oligonucleotide
gcagcuccacugcauggcg

SEQ ID NO: 2776509 - RNA, 19 nt, Artificial Sequence
  Description of Artificial Sequence: Synthetic oligonucleotide
guuggcugucuucuuccuc

SEQ ID NO: 2776510 - RNA, 19 nt, Artificial Sequence
  Description of Artificial Sequence: Synthetic oligonucleotide
acaggacggagcaggaaga

SEQ ID NO: 2776511 - RNA, 19 nt, Artificial Sequence
  Description of Artificial Sequence: Synthetic oligonucleotide
gacggagcaggaagagaug

SEQ ID NO: 2776512 - RNA, 19 nt, Artificial Sequence
  Description of Artificial Sequence: Synthetic oligonucleotide
ccagugucucggauagucg

SEQ ID NO: 2776513 - RNA, 19 nt, Artificial Sequence
  Description of Artificial Sequence: Synthetic oligonucleotide
ugauggcauuguuccagua

SEQ ID NO: 2776514 - RNA, 19 nt, Artificial Sequence
  Description of Artificial Sequence: Synthetic oligonucleotide
gaggcugcugcaucuagau

SEQ ID NO: 2776515 - RNA, 19 nt, Artificial Sequence
  Description of Artificial Sequence: Synthetic oligonucleotide
auggggacacugauggcca

SEQ ID NO: 2776516 - RNA, 19 nt, Artificial Sequence
  Description of Artificial Sequence: Synthetic oligonucleotide
ucccacgaacaguguuucc

SEQ ID NO: 2776517 - RNA, 19 nt, Artificial Sequence
  Description of Artificial Sequence: Synthetic oligonucleotide
uggggacacugauggccag

SEQ ID NO: 2776518 - RNA, 19 nt, Artificial Sequence
  Description of Artificial Sequence: Synthetic oligonucleotide
aggaugacccagacaauau

SEQ ID NO: 2776519 - RNA, 19 nt, Artificial Sequence
  Description of Artificial Sequence: Synthetic oligonucleotide
ucucccuuggcagcuccac

SEQ ID NO: 2776520 - RNA, 19 nt, Artificial Sequence
  Description of Artificial Sequence: Synthetic oligonucleotide
agggaguggcaacgcggag

SEQ ID NO: 2776521 - RNA, 19 nt, Artificial Sequence
  Description of Artificial Sequence: Synthetic oligonucleotide
guccauggugauggcauug

SEQ ID NO: 2776522 - RNA, 19 nt, Artificial Sequence
  Description of Artificial Sequence: Synthetic oligonucleotide
gguuaaaguaguccauggu

SEQ ID NO: 2776523 - RNA, 19 nt, Artificial Sequence
  Description of Artificial Sequence: Synthetic oligonucleotide
ugauggccaggaugaccca

SEQ ID NO: 2776524 - RNA, 19 nt, Artificial Sequence
  Description of Artificial Sequence: Synthetic oligonucleotide
auccccagugucucggaua

SEQ ID NO: 2776525 - RNA, 19 nt, Artificial Sequence
  Description of Artificial Sequence: Synthetic oligonucleotide
acaguguuuccugggcaga

SEQ ID NO: 2776526 - RNA, 19 nt, Artificial Sequence
  Description of Artificial Sequence: Synthetic oligonucleotide
gcgguuaaaguaguccaug

SEQ ID NO: 2776527 - RNA, 19 nt, Artificial Sequence
  Description of Artificial Sequence: Synthetic oligonucleotide
caguagcucagguuguucu

SEQ ID NO: 2776528 - RNA, 19 nt, Artificial Sequence
  Description of Artificial Sequence: Synthetic oligonucleotide
aacgcggaggcugcugcau

SEQ ID NO: 2776529 - RNA, 19 nt, Artificial Sequence
  Description of Artificial Sequence: Synthetic oligonucleotide
caggacggagcaggaagag

SEQ ID NO: 2776530 - RNA, 19 nt, Artificial Sequence
  Description of Artificial Sequence: Synthetic oligonucleotide
guaguccauggugauggca

SEQ ID NO: 2776531 - RNA, 19 nt, Artificial Sequence
  Description of Artificial Sequence: Synthetic oligonucleotide
caggaugacccagacaaua

SEQ ID NO: 2776532 - RNA, 19 nt, Artificial Sequence
  Description of Artificial Sequence: Synthetic oligonucleotide
gcaacgcggaggcugcugc

SEQ ID NO: 2776533 - RNA, 19 nt, Artificial Sequence
  Description of Artificial Sequence: Synthetic oligonucleotide
gguucacaaggaccauccc

SEQ ID NO: 2776534 - RNA, 19 nt, Artificial Sequence
  Description of Artificial Sequence: Synthetic oligonucleotide
aguccauggugauggcauu

SEQ ID NO: 2776535 - RNA, 19 nt, Artificial Sequence
  Description of Artificial Sequence: Synthetic oligonucleotide
ccacgaacaguguuuccug

SEQ ID NO: 2776536 - RNA, 19 nt, Artificial Sequence
  Description of Artificial Sequence: Synthetic oligonucleotide
cgaacaguguuuccugggc

SEQ ID NO: 2776537 - RNA, 19 nt, Artificial Sequence
  Description of Artificial Sequence: Synthetic oligonucleotide
acacugucaacaggacgga

SEQ ID NO: 2776538 - RNA, 19 nt, Artificial Sequence
  Description of Artificial Sequence: Synthetic oligonucleotide
ugguccucugaggucucca

SEQ ID NO: 2776539 - RNA, 19 nt, Artificial Sequence
  Description of Artificial Sequence: Synthetic oligonucleotide
ccaugggucauucuguaaa

SEQ ID NO: 2776540 - RNA, 19 nt, Artificial Sequence
  Description of Artificial Sequence: Synthetic oligonucleotide
ucucaggguuggcugucuu

SEQ ID NO: 2776541 - RNA, 19 nt, Artificial Sequence
  Description of Artificial Sequence: Synthetic oligonucleotide
ugucucggauagucgccau

SEQ ID NO: 2776542 - RNA, 19 nt, Artificial Sequence
  Description of Artificial Sequence: Synthetic oligonucleotide
cacugucaacaggacggag

SEQ ID NO: 2776543 - RNA, 19 nt, Artificial Sequence
  Description of Artificial Sequence: Synthetic oligonucleotide
aggacggagcaggaagaga

SEQ ID NO: 2776544 - RNA, 19 nt, Artificial Sequence
  Description of Artificial Sequence: Synthetic oligonucleotide
cucaugcagcacacuguca

SEQ ID NO: 2776545 - RNA, 19 nt, Artificial Sequence
  Description of Artificial Sequence: Synthetic oligonucleotide
uucucaggguuggcugucu

SEQ ID NO: 2776546 - RNA, 19 nt, Artificial Sequence
  Description of Artificial Sequence: Synthetic oligonucleotide
aguguuuccugggcagaaa

SEQ ID NO: 2776547 - RNA, 19 nt, Artificial Sequence
  Description of Artificial Sequence: Synthetic oligonucleotide
cugagagcugguccucuga

SEQ ID NO: 2776548 - RNA, 19 nt, Artificial Sequence
  Description of Artificial Sequence: Synthetic oligonucleotide
ggcagcuccacugcauggc

SEQ ID NO: 2776549 - RNA, 19 nt, Artificial Sequence
  Description of Artificial Sequence: Synthetic oligonucleotide
augggucauucuguaaauu

SEQ ID NO: 2776550 - RNA, 19 nt, Artificial Sequence
  Description of Artificial Sequence: Synthetic oligonucleotide
ggcauuguuccaguagcuc

SEQ ID NO: 2776551 - RNA, 19 nt, Artificial Sequence
  Description of Artificial Sequence: Synthetic oligonucleotide
gugucucggauagucgcca

SEQ ID NO: 2776552 - RNA, 19 nt, Artificial Sequence
  Description of Artificial Sequence: Synthetic oligonucleotide
cucagguuguucucagggu

SEQ ID NO: 2776553 - RNA, 19 nt, Artificial Sequence
  Description of Artificial Sequence: Synthetic oligonucleotide
agucgccauuggcugggga

SEQ ID NO: 2776554 - RNA, 19 nt, Artificial Sequence
  Description of Artificial Sequence: Synthetic oligonucleotide
uccaguagcucagguuguu

SEQ ID NO: 2776555 - RNA, 19 nt, Artificial Sequence
  Description of Artificial Sequence: Synthetic oligonucleotide
cccagugucucggauaguc

SEQ ID NO: 2776556 - RNA, 19 nt, Artificial Sequence
  Description of Artificial Sequence: Synthetic oligonucleotide
auggccaggaugacccaga

SEQ ID NO: 2776557 - RNA, 19 nt, Artificial Sequence
  Description of Artificial Sequence: Synthetic oligonucleotide
caugggucauucuguaaau

SEQ ID NO: 2776558 - RNA, 19 nt, Artificial Sequence
  Description of Artificial Sequence: Synthetic oligonucleotide
guucugagagcugguccuc

SEQ ID NO: 2776559 - RNA, 19 nt, Artificial Sequence
  Description of Artificial Sequence: Synthetic oligonucleotide
uagucgccauuggcugggg

SEQ ID NO: 2776560 - RNA, 19 nt, Artificial Sequence
  Description of Artificial Sequence: Synthetic oligonucleotide
gguuacacaaaagguuaua

SEQ ID NO: 2776561 - RNA, 19 nt, Artificial Sequence
  Description of Artificial Sequence: Synthetic oligonucleotide
ggacggagcaggaagagau

SEQ ID NO: 2776562 - RNA, 19 nt, Artificial Sequence
  Description of Artificial Sequence: Synthetic oligonucleotide
gcaggaagagauggggaca

SEQ ID NO: 2776563 - RNA, 19 nt, Artificial Sequence
  Description of Artificial Sequence: Synthetic oligonucleotide
ccauuggcuggggagcggg

SEQ ID NO: 2776564 - RNA, 19 nt, Artificial Sequence
  Description of Artificial Sequence: Synthetic oligonucleotide
cucagagacuugaucguuu

SEQ ID NO: 2776565 - RNA, 19 nt, Artificial Sequence
  Description of Artificial Sequence: Synthetic oligonucleotide
ggaccauccccagugucuc

SEQ ID NO: 2776566 - RNA, 19 nt, Artificial Sequence
  Description of Artificial Sequence: Synthetic oligonucleotide
gcuuagaaauaccuuuauu

SEQ ID NO: 2776567 - RNA, 19 nt, Artificial Sequence
  Description of Artificial Sequence: Synthetic oligonucleotide
cuuggcagcuccacugcau

SEQ ID NO: 2776568 - RNA, 19 nt, Artificial Sequence
  Description of Artificial Sequence: Synthetic oligonucleotide
caucuagaucucagagacu

SEQ ID NO: 2776569 - RNA, 19 nt, Artificial Sequence
  Description of Artificial Sequence: Synthetic oligonucleotide
ggacuggaucucccuuggc

SEQ ID NO: 2776570 - RNA, 19 nt, Artificial Sequence
  Description of Artificial Sequence: Synthetic oligonucleotide
cccuuggcagcuccacugc

SEQ ID NO: 2776571 - RNA, 19 nt, Artificial Sequence
  Description of Artificial Sequence: Synthetic oligonucleotide
cuugaucguuucccacgaa

SEQ ID NO: 2776572 - RNA, 19 nt, Artificial Sequence
  Description of Artificial Sequence: Synthetic oligonucleotide
gggacacugauggccagga

SEQ ID NO: 2776573 - RNA, 19 nt, Artificial Sequence
  Description of Artificial Sequence: Synthetic oligonucleotide
cugguccucugaggucucc

SEQ ID NO: 2776574 - RNA, 19 nt, Artificial Sequence
  Description of Artificial Sequence: Synthetic oligonucleotide
gggguucacaaggaccauc

SEQ ID NO: 2776575 - RNA, 19 nt, Artificial Sequence
  Description of Artificial Sequence: Synthetic oligonucleotide
caguguuuccugggcagaa

SEQ ID NO: 2776576 - RNA, 19 nt, Artificial Sequence
  Description of Artificial Sequence: Synthetic oligonucleotide
caacgcggaggcugcugca

SEQ ID NO: 2776577 - RNA, 19 nt, Artificial Sequence
  Description of Artificial Sequence: Synthetic oligonucleotide
gggucauucuguaaauuuu

SEQ ID NO: 2776578 - RNA, 19 nt, Artificial Sequence
  Description of Artificial Sequence: Synthetic oligonucleotide
cggauagucgccauuggcu

SEQ ID NO: 2776579 - RNA, 19 nt, Artificial Sequence
  Description of Artificial Sequence: Synthetic oligonucleotide
cacaaggaccauccccagu

SEQ ID NO: 2776580 - RNA, 19 nt, Artificial Sequence
  Description of Artificial Sequence: Synthetic oligonucleotide
gggguucugagagcugguc

SEQ ID NO: 2776581 - RNA, 19 nt, Artificial Sequence
  Description of Artificial Sequence: Synthetic oligonucleotide
aucucccuuggcagcucca

SEQ ID NO: 2776582 - RNA, 19 nt, Artificial Sequence
  Description of Artificial Sequence: Synthetic oligonucleotide
caaggaccauccccagugu

SEQ ID NO: 2776583 - RNA, 19 nt, Artificial Sequence
  Description of Artificial Sequence: Synthetic oligonucleotide
cuccacugcauggcgguua

SEQ ID NO: 2776584 - RNA, 19 nt, Artificial Sequence
  Description of Artificial Sequence: Synthetic oligonucleotide
caacaggacggagcaggaa

SEQ ID NO: 2776585 - RNA, 19 nt, Artificial Sequence
  Description of Artificial Sequence: Synthetic oligonucleotide
ggcaacgcggaggcugcug

SEQ ID NO: 2776586 - RNA, 19 nt, Artificial Sequence
  Description of Artificial Sequence: Synthetic oligonucleotide
ccaguagcucagguuguuc

SEQ ID NO: 2776587 - RNA, 19 nt, Artificial Sequence
  Description of Artificial Sequence: Synthetic oligonucleotide
gccauuggcuggggagcgg

SEQ ID NO: 2776588 - RNA, 19 nt, Artificial Sequence
  Description of Artificial Sequence: Synthetic oligonucleotide
gguuggcugucuucuuccu

SEQ ID NO: 2776589 - RNA, 19 nt, Artificial Sequence
  Description of Artificial Sequence: Synthetic oligonucleotide
cccacgaacaguguuuccu

SEQ ID NO: 2776590 - RNA, 19 nt, Artificial Sequence
  Description of Artificial Sequence: Synthetic oligonucleotide
cugcugcaucuagaucuca

SEQ ID NO: 2776591 - RNA, 19 nt, Artificial Sequence
  Description of Artificial Sequence: Synthetic oligonucleotide
ccucugaggucuccaggga

SEQ ID NO: 2776592 - RNA, 19 nt, Artificial Sequence
  Description of Artificial Sequence: Synthetic oligonucleotide
cucccuuggcagcuccacu

SEQ ID NO: 2776593 - RNA, 19 nt, Artificial Sequence
  Description of Artificial Sequence: Synthetic oligonucleotide
gucucggauagucgccauu

SEQ ID NO: 2776594 - RNA, 19 nt, Artificial Sequence
  Description of Artificial Sequence: Synthetic oligonucleotide
ggcgguuaaaguaguccau

SEQ ID NO: 2776595 - RNA, 19 nt, Artificial Sequence
  Description of Artificial Sequence: Synthetic oligonucleotide
ggguuacacaaaagguuau

SEQ ID NO: 2776596 - RNA, 19 nt, Artificial Sequence
  Description of Artificial Sequence: Synthetic oligonucleotide
cggaggcugcugcaucuag

SEQ ID NO: 2776597 - RNA, 19 nt, Artificial Sequence
  Description of Artificial Sequence: Synthetic oligonucleotide
ccuuggcagcuccacugca

SEQ ID NO: 2776598 - RNA, 19 nt, Artificial Sequence
  Description of Artificial Sequence: Synthetic oligonucleotide
cgccauuggcuggggagcg

SEQ ID NO: 2776599 - RNA, 19 nt, Artificial Sequence
  Description of Artificial Sequence: Synthetic oligonucleotide
cauccccagugucucggau

SEQ ID NO: 2776600 - RNA, 19 nt, Artificial Sequence
  Description of Artificial Sequence: Synthetic oligonucleotide
ggaucucccuuggcagcuc

SEQ ID NO: 2776601 - RNA, 19 nt, Artificial Sequence
  Description of Artificial Sequence: Synthetic oligonucleotide
gcauggcgguuaaaguagu

SEQ ID NO: 2776602 - RNA, 19 nt, Artificial Sequence
  Description of Artificial Sequence: Synthetic oligonucleotide
ccauccccagugucucgga

SEQ ID NO: 2776603 - RNA, 19 nt, Artificial Sequence
  Description of Artificial Sequence: Synthetic oligonucleotide
caggguuggcugucuucuu

SEQ ID NO: 2776604 - RNA, 19 nt, Artificial Sequence
  Description of Artificial Sequence: Synthetic oligonucleotide
ggacacugauggccaggau

SEQ ID NO: 2776605 - RNA, 19 nt, Artificial Sequence
  Description of Artificial Sequence: Synthetic oligonucleotide
gcugguccucugaggucuc

SEQ ID NO: 2776606 - RNA, 19 nt, Artificial Sequence
  Description of Artificial Sequence: Synthetic oligonucleotide
gaguggcaacgcggaggcu

SEQ ID NO: 2776607 - RNA, 19 nt, Artificial Sequence
  Description of Artificial Sequence: Synthetic oligonucleotide
ccaggaugacccagacaau

SEQ ID NO: 2776608 - RNA, 19 nt, Artificial Sequence
  Description of Artificial Sequence: Synthetic oligonucleotide
cgcggaggcugcugcaucu

SEQ ID NO: 2776609 - RNA, 19 nt, Artificial Sequence
  Description of Artificial Sequence: Synthetic oligonucleotide
gcggaggcugcugcaucua

SEQ ID NO: 2776610 - RNA, 19 nt, Artificial Sequence
  Description of Artificial Sequence: Synthetic oligonucleotide
ccuucucaugcagcacacu

SEQ ID NO: 2776611 - RNA, 19 nt, Artificial Sequence
  Description of Artificial Sequence: Synthetic oligonucleotide
cguuucccacgaacagugu

SEQ ID NO: 2776612 - RNA, 19 nt, Artificial Sequence
  Description of Artificial Sequence: Synthetic oligonucleotide
cccagacaauauccaucuu

SEQ ID NO: 2776613 - RNA, 19 nt, Artificial Sequence
  Description of Artificial Sequence: Synthetic oligonucleotide
gcuccacugcauggcgguu

SEQ ID NO: 2776614 - RNA, 19 nt, Artificial Sequence
  Description of Artificial Sequence: Synthetic oligonucleotide
ccacugcauggcgguuaaa

SEQ ID NO: 2776615 - RNA, 19 nt, Artificial Sequence
  Description of Artificial Sequence: Synthetic oligonucleotide
ccccagugucucggauagu

SEQ ID NO: 2776616 - RNA, 19 nt, Artificial Sequence
  Description of Artificial Sequence: Synthetic oligonucleotide
uuuauauucaaucacugcc

SEQ ID NO: 2776617 - RNA, 19 nt, Artificial Sequence
  Description of Artificial Sequence: Synthetic oligonucleotide
acuauuugggaucugcagc

SEQ ID NO: 2776618 - RNA, 19 nt, Artificial Sequence
  Description of Artificial Sequence: Synthetic oligonucleotide
ucaaucacugccaucuugg

SEQ ID NO: 2776619 - RNA, 19 nt, Artificial Sequence
  Description of Artificial Sequence: Synthetic oligonucleotide
aaguccuucuccgugagcc

SEQ ID NO: 2776620 - RNA, 19 nt, Artificial Sequence
  Description of Artificial Sequence: Synthetic oligonucleotide
uuauauucaaucacugcca

SEQ ID NO: 2776621 - RNA, 19 nt, Artificial Sequence
  Description of Artificial Sequence: Synthetic oligonucleotide
uauucaaucacugccaucu

SEQ ID NO: 2776622 - RNA, 19 nt, Artificial Sequence
  Description of Artificial Sequence: Synthetic oligonucleotide
acuuuaaacagcuuuggga

SEQ ID NO: 2776623 - RNA, 19 nt, Artificial Sequence
  Description of Artificial Sequence: Synthetic oligonucleotide
uagucgaugagcuucuccg

SEQ ID NO: 2776624 - RNA, 19 nt, Artificial Sequence
  Description of Artificial Sequence: Synthetic oligonucleotide
uucuccgugagccagaagu

SEQ ID NO: 2776625 - RNA, 19 nt, Artificial Sequence
  Description of Artificial Sequence: Synthetic oligonucleotide
cuguuuauggcgcaggucc

SEQ ID NO: 2776626 - RNA, 19 nt, Artificial Sequence
  Description of Artificial Sequence: Synthetic oligonucleotide
aagucagccaugcgcaugg

SEQ ID NO: 2776627 - RNA, 19 nt, Artificial Sequence
  Description of Artificial Sequence: Synthetic oligonucleotide
cuuuauauucaaucacugc

SEQ ID NO: 2776628 - RNA, 19 nt, Artificial Sequence
  Description of Artificial Sequence: Synthetic oligonucleotide
uuuccauagucgaugagcu

SEQ ID NO: 2776629 - RNA, 19 nt, Artificial Sequence
  Description of Artificial Sequence: Synthetic oligonucleotide
uuuaggagaguaagguugc

SEQ ID NO: 2776630 - RNA, 19 nt, Artificial Sequence
  Description of Artificial Sequence: Synthetic oligonucleotide
guuuaggagaguaagguug

SEQ ID NO: 2776631 - RNA, 19 nt, Artificial Sequence
  Description of Artificial Sequence: Synthetic oligonucleotide
ugggauuaaguccuucucc

SEQ ID NO: 2776632 - RNA, 19 nt, Artificial Sequence
  Description of Artificial Sequence: Synthetic oligonucleotide
uccaguuaagucuuuggug

SEQ ID NO: 2776633 - RNA, 19 nt, Artificial Sequence
  Description of Artificial Sequence: Synthetic oligonucleotide
gauuaaguccuucuccgug

SEQ ID NO: 2776634 - RNA, 19 nt, Artificial Sequence
  Description of Artificial Sequence: Synthetic oligonucleotide
auagucgaugagcuucucc

SEQ ID NO: 2776635 - RNA, 19 nt, Artificial Sequence
  Description of Artificial Sequence: Synthetic oligonucleotide
uacuauuugggaucugcag

SEQ ID NO: 2776636 - RNA, 19 nt, Artificial Sequence
  Description of Artificial Sequence: Synthetic oligonucleotide
uucccuuuauauucaauca

SEQ ID NO: 2776637 - RNA, 19 nt, Artificial Sequence
  Description of Artificial Sequence: Synthetic oligonucleotide
auuucguccacgcgugccc

SEQ ID NO: 2776638 - RNA, 19 nt, Artificial Sequence
  Description of Artificial Sequence: Synthetic oligonucleotide
cuuuccauagucgaugagc

SEQ ID NO: 2776639 - RNA, 19 nt, Artificial Sequence
  Description of Artificial Sequence: Synthetic oligonucleotide
ugaguaccaggacagcucc

SEQ ID NO: 2776640 - RNA, 19 nt, Artificial Sequence
  Description of Artificial Sequence: Synthetic oligonucleotide
agcuguggagauuugcuuc

SEQ ID NO: 2776641 - RNA, 19 nt, Artificial Sequence
  Description of Artificial Sequence: Synthetic oligonucleotide
ugauccuggaaccgaggcg

SEQ ID NO: 2776642 - RNA, 19 nt, Artificial Sequence
  Description of Artificial Sequence: Synthetic oligonucleotide
aguacuuuaaacagcuuug

SEQ ID NO: 2776643 - RNA, 19 nt, Artificial Sequence
  Description of Artificial Sequence: Synthetic oligonucleotide
cuuacuauuugggaucugc

SEQ ID NO: 2776644 - RNA, 19 nt, Artificial Sequence
  Description of Artificial Sequence: Synthetic oligonucleotide
ucccuuuauauucaaucac

SEQ ID NO: 2776645 - RNA, 19 nt, Artificial Sequence
  Description of Artificial Sequence: Synthetic oligonucleotide
uucaaucacugccaucuug

SEQ ID NO: 2776646 - RNA, 19 nt, Artificial Sequence
  Description of Artificial Sequence: Synthetic oligonucleotide
agaguaagguugcugucuc

SEQ ID NO: 2776647 - RNA, 19 nt, Artificial Sequence
  Description of Artificial Sequence: Synthetic oligonucleotide
aggagaguaagguugcugu

SEQ ID NO: 2776648 - RNA, 19 nt, Artificial Sequence
  Description of Artificial Sequence: Synthetic oligonucleotide
gagacugcggcugcgagcg

SEQ ID NO: 2776649 - RNA, 19 nt, Artificial Sequence
  Description of Artificial Sequence: Synthetic oligonucleotide
cagcuuugggauuaagucc

SEQ ID NO: 2776650 - RNA, 19 nt, Artificial Sequence
  Description of Artificial Sequence: Synthetic oligonucleotide
gauccuggaaccgaggcgc

SEQ ID NO: 2776651 - RNA, 19 nt, Artificial Sequence
  Description of Artificial Sequence: Synthetic oligonucleotide
ccaguuaagucuuuggugc

SEQ ID NO: 2776652 - RNA, 19 nt, Artificial Sequence
  Description of Artificial Sequence: Synthetic oligonucleotide
uuacuauuugggaucugca

SEQ ID NO: 2776653 - RNA, 19 nt, Artificial Sequence
  Description of Artificial Sequence: Synthetic oligonucleotide
uauauucaaucacugccau

SEQ ID NO: 2776654 - RNA, 19 nt, Artificial Sequence
  Description of Artificial Sequence: Synthetic oligonucleotide
ugguuuaggagaguaaggu

SEQ ID NO: 2776655 - RNA, 19 nt, Artificial Sequence
  Description of Artificial Sequence: Synthetic oligonucleotide
gggauuaaguccuucuccg

SEQ ID NO: 2776656 - RNA, 19 nt, Artificial Sequence
  Description of Artificial Sequence: Synthetic oligonucleotide
aggggagggaggcaauucc

SEQ ID NO: 2776657 - RNA, 19 nt, Artificial Sequence
  Description of Artificial Sequence: Synthetic oligonucleotide
auuaaguccuucuccguga

SEQ ID NO: 2776658 - RNA, 19 nt, Artificial Sequence
  Description of Artificial Sequence: Synthetic oligonucleotide
cuuggcccgaucuugcucc

SEQ ID NO: 2776659 - RNA, 19 nt, Artificial Sequence
  Description of Artificial Sequence: Synthetic oligonucleotide
guagcagcugguuuaggag

SEQ ID NO: 2776660 - RNA, 19 nt, Artificial Sequence
  Description of Artificial Sequence: Synthetic oligonucleotide
ucagccaugcgcauggcuc

SEQ ID NO: 2776661 - RNA, 19 nt, Artificial Sequence
  Description of Artificial Sequence: Synthetic oligonucleotide
cugguuuaggagaguaagg

SEQ ID NO: 2776662 - RNA, 19 nt, Artificial Sequence
  Description of Artificial Sequence: Synthetic oligonucleotide
uccauagucgaugagcuuc

SEQ ID NO: 2776663 - RNA, 19 nt, Artificial Sequence
  Description of Artificial Sequence: Synthetic oligonucleotide
aggcgcuaguacuuuaaac

SEQ ID NO: 2776664 - RNA, 19 nt, Artificial Sequence
  Description of Artificial Sequence: Synthetic oligonucleotide
guacuuuaaacagcuuugg

SEQ ID NO: 2776665 - RNA, 19 nt, Artificial Sequence
  Description of Artificial Sequence: Synthetic oligonucleotide
uuaaguccuucuccgugag

SEQ ID NO: 2776666 - RNA, 19 nt, Artificial Sequence
  Description of Artificial Sequence: Synthetic oligonucleotide
uucguggcgcacuaggccc

SEQ ID NO: 2776667 - RNA, 19 nt, Artificial Sequence
  Description of Artificial Sequence: Synthetic oligonucleotide
gaugcgagacuccgggccg

SEQ ID NO: 2776668 - RNA, 19 nt, Artificial Sequence
  Description of Artificial Sequence: Synthetic oligonucleotide
cuuuaaacagcuuugggau

SEQ ID NO: 2776669 - RNA, 19 nt, Artificial Sequence
  Description of Artificial Sequence: Synthetic oligonucleotide
uucugauccuggaaccgag

SEQ ID NO: 2776670 - RNA, 19 nt, Artificial Sequence
  Description of Artificial Sequence: Synthetic oligonucleotide
auauucaaucacugccauc

SEQ ID NO: 2776671 - RNA, 19 nt, Artificial Sequence
  Description of Artificial Sequence: Synthetic oligonucleotide
aacagcuuugggauuaagu

SEQ ID NO: 2776672 - RNA, 19 nt, Artificial Sequence
  Description of Artificial Sequence: Synthetic oligonucleotide
ucugauccuggaaccgagg

SEQ ID NO: 2776673 - RNA, 19 nt, Artificial Sequence
  Description of Artificial Sequence: Synthetic oligonucleotide
uccgugagccagaagucag

SEQ ID NO: 2776674 - RNA, 19 nt, Artificial Sequence
  Description of Artificial Sequence: Synthetic oligonucleotide
ggcgcuaguacuuuaaaca

SEQ ID NO: 2776675 - RNA, 19 nt, Artificial Sequence
  Description of Artificial Sequence: Synthetic oligonucleotide
ugcuccuuacuauuuggga

SEQ ID NO: 2776676 - RNA, 19 nt, Artificial Sequence
  Description of Artificial Sequence: Synthetic oligonucleotide
uuccgcagcagguggaugc

SEQ ID NO: 2776677 - RNA, 19 nt, Artificial Sequence
  Description of Artificial Sequence: Synthetic oligonucleotide
agccuacagagugaguacc

SEQ ID NO: 2776678 - RNA, 19 nt, Artificial Sequence
  Description of Artificial Sequence: Synthetic oligonucleotide
caaguuccgcagcaggugg

SEQ ID NO: 2776679 - RNA, 19 nt, Artificial Sequence
  Description of Artificial Sequence: Synthetic oligonucleotide
uugggauuaaguccuucuc

SEQ ID NO: 2776680 - RNA, 19 nt, Artificial Sequence
  Description of Artificial Sequence: Synthetic oligonucleotide
cuccuuacuauuugggauc

SEQ ID NO: 2776681 - RNA, 19 nt, Artificial Sequence
  Description of Artificial Sequence: Synthetic oligonucleotide
ugagcuucuccgcguagcc

SEQ ID NO: 2776682 - RNA, 19 nt, Artificial Sequence
  Description of Artificial Sequence: Synthetic oligonucleotide
uccacgcgugcccaugacg

SEQ ID NO: 2776683 - RNA, 19 nt, Artificial Sequence
  Description of Artificial Sequence: Synthetic oligonucleotide
cucauuucguccacgcgug

SEQ ID NO: 2776684 - RNA, 19 nt, Artificial Sequence
  Description of Artificial Sequence: Synthetic oligonucleotide
agcuuugggauuaaguccu

SEQ ID NO: 2776685 - RNA, 19 nt, Artificial Sequence
  Description of Artificial Sequence: Synthetic oligonucleotide
aagguugcugucucuucga

SEQ ID NO: 2776686 - RNA, 19 nt, Artificial Sequence
  Description of Artificial Sequence: Synthetic oligonucleotide
ccagaagucagccaugcgc

SEQ ID NO: 2776687 - RNA, 19 nt, Artificial Sequence
  Description of Artificial Sequence: Synthetic oligonucleotide
cugauccuggaaccgaggc

SEQ ID NO: 2776688 - RNA, 19 nt, Artificial Sequence
  Description of Artificial Sequence: Synthetic oligonucleotide
agccagaagucagccaugc

SEQ ID NO: 2776689 - RNA, 19 nt, Artificial Sequence
  Description of Artificial Sequence: Synthetic oligonucleotide
ucuuuggugcuugagccgu

SEQ ID NO: 2776690 - RNA, 19 nt, Artificial Sequence
  Description of Artificial Sequence: Synthetic oligonucleotide
gagauuugcuuccuguuua

SEQ ID NO: 2776691 - RNA, 19 nt, Artificial Sequence
  Description of Artificial Sequence: Synthetic oligonucleotide
gucuuuggugcuugagccg

SEQ ID NO: 2776692 - RNA, 19 nt, Artificial Sequence
  Description of Artificial Sequence: Synthetic oligonucleotide
uguuuauggcgcagguccu

SEQ ID NO: 2776693 - RNA, 19 nt, Artificial Sequence
  Description of Artificial Sequence: Synthetic oligonucleotide
cauucugauccuggaaccg

SEQ ID NO: 2776694 - RNA, 19 nt, Artificial Sequence
  Description of Artificial Sequence: Synthetic oligonucleotide
cagaagucagccaugcgca

SEQ ID NO: 2776695 - RNA, 19 nt, Artificial Sequence
  Description of Artificial Sequence: Synthetic oligonucleotide
ugccaucuuggcccgaucu

SEQ ID NO: 2776696 - RNA, 19 nt, Artificial Sequence
  Description of Artificial Sequence: Synthetic oligonucleotide
aguaccaggacagcuccag

SEQ ID NO: 2776697 - RNA, 19 nt, Artificial Sequence
  Description of Artificial Sequence: Synthetic oligonucleotide
guucguggcgcacuaggcc

SEQ ID NO: 2776698 - RNA, 19 nt, Artificial Sequence
  Description of Artificial Sequence: Synthetic oligonucleotide
agugaguaccaggacagcu

SEQ ID NO: 2776699 - RNA, 19 nt, Artificial Sequence
  Description of Artificial Sequence: Synthetic oligonucleotide
ccuuuauauucaaucacug

SEQ ID NO: 2776700 - RNA, 19 nt, Artificial Sequence
  Description of Artificial Sequence: Synthetic oligonucleotide
guagacgcggccgugggag

SEQ ID NO: 2776701 - RNA, 19 nt, Artificial Sequence
  Description of Artificial Sequence: Synthetic oligonucleotide
gcgcuaguacuuuaaacag

SEQ ID NO: 2776702 - RNA, 19 nt, Artificial Sequence
  Description of Artificial Sequence: Synthetic oligonucleotide
guuaagucuuuggugcuug

SEQ ID NO: 2776703 - RNA, 19 nt, Artificial Sequence
  Description of Artificial Sequence: Synthetic oligonucleotide
ugcuugagccgugugggag

SEQ ID NO: 2776704 - RNA, 19 nt, Artificial Sequence
  Description of Artificial Sequence: Synthetic oligonucleotide
gcugguuuaggagaguaag

SEQ ID NO: 2776705 - RNA, 19 nt, Artificial Sequence
  Description of Artificial Sequence: Synthetic oligonucleotide
caucuuggcccgaucuugc

SEQ ID NO: 2776706 - RNA, 19 nt, Artificial Sequence
  Description of Artificial Sequence: Synthetic oligonucleotide
uuuauggcgcagguccugc

SEQ ID NO: 2776707 - RNA, 19 nt, Artificial Sequence
  Description of Artificial Sequence: Synthetic oligonucleotide
uuccuguuuauggcgcagg

SEQ ID NO: 2776708 - RNA, 19 nt, Artificial Sequence
  Description of Artificial Sequence: Synthetic oligonucleotide
uaggagaguaagguugcug

SEQ ID NO: 2776709 - RNA, 19 nt, Artificial Sequence
  Description of Artificial Sequence: Synthetic oligonucleotide
uccuguuuauggcgcaggu

SEQ ID NO: 2776710 - RNA, 19 nt, Artificial Sequence
  Description of Artificial Sequence: Synthetic oligonucleotide
uagccuacagagugaguac

SEQ ID NO: 2776711 - RNA, 19 nt, Artificial Sequence
  Description of Artificial Sequence: Synthetic oligonucleotide
ucuccgugagccagaaguc

SEQ ID NO: 2776712 - RNA, 19 nt, Artificial Sequence
  Description of Artificial Sequence: Synthetic oligonucleotide
agcuuuccauagucgauga

SEQ ID NO: 2776713 - RNA, 19 nt, Artificial Sequence
  Description of Artificial Sequence: Synthetic oligonucleotide
cuucgaggcacaggcaggg

SEQ ID NO: 2776714 - RNA, 19 nt, Artificial Sequence
  Description of Artificial Sequence: Synthetic oligonucleotide
caaucacugccaucuuggc

SEQ ID NO: 2776715 - RNA, 19 nt, Artificial Sequence
  Description of Artificial Sequence: Synthetic oligonucleotide
uccgcguagccccucauuu

SEQ ID NO: 2776716 - RNA, 19 nt, Artificial Sequence
  Description of Artificial Sequence: Synthetic oligonucleotide
gaugagcuucuccgcguag

SEQ ID NO: 2776717 - RNA, 19 nt, Artificial Sequence
  Description of Artificial Sequence: Synthetic oligonucleotide
cucgaugcguucguggcgc

SEQ ID NO: 2776718 - RNA, 19 nt, Artificial Sequence
  Description of Artificial Sequence: Synthetic oligonucleotide
uuaagucuuuggugcuuga

SEQ ID NO: 2776719 - RNA, 19 nt, Artificial Sequence
  Description of Artificial Sequence: Synthetic oligonucleotide
cuagccuacagagugagua

SEQ ID NO: 2776720 - RNA, 19 nt, Artificial Sequence
  Description of Artificial Sequence: Synthetic oligonucleotide
uccuuacuauuugggaucu

SEQ ID NO: 2776721 - RNA, 19 nt, Artificial Sequence
  Description of Artificial Sequence: Synthetic oligonucleotide
ugagcaaguuccgcagcag

SEQ ID NO: 2776722 - RNA, 19 nt, Artificial Sequence
  Description of Artificial Sequence: Synthetic oligonucleotide
ggaugcgagacuccgggcc

SEQ ID NO: 2776723 - RNA, 19 nt, Artificial Sequence
  Description of Artificial Sequence: Synthetic oligonucleotide
agguggaugcgagacuccg

SEQ ID NO: 2776724 - RNA, 19 nt, Artificial Sequence
  Description of Artificial Sequence: Synthetic oligonucleotide
uggagauuugcuuccuguu

SEQ ID NO: 2776725 - RNA, 19 nt, Artificial Sequence
  Description of Artificial Sequence: Synthetic oligonucleotide
guagccccucauuucgucc

SEQ ID NO: 2776726 - RNA, 19 nt, Artificial Sequence
  Description of Artificial Sequence: Synthetic oligonucleotide
ucguggcgcacuaggcccg

SEQ ID NO: 2776727 - RNA, 19 nt, Artificial Sequence
  Description of Artificial Sequence: Synthetic oligonucleotide
caagcggcgguagacgcgg

SEQ ID NO: 2776728 - RNA, 19 nt, Artificial Sequence
  Description of Artificial Sequence: Synthetic oligonucleotide
uagccccucauuucgucca

SEQ ID NO: 2776729 - RNA, 19 nt, Artificial Sequence
  Description of Artificial Sequence: Synthetic oligonucleotide
gcuccaguuaagucuuugg

SEQ ID NO: 2776730 - RNA, 19 nt, Artificial Sequence
  Description of Artificial Sequence: Synthetic oligonucleotide
gcccaugacgccucgaugc

SEQ ID NO: 2776731 - RNA, 19 nt, Artificial Sequence
  Description of Artificial Sequence: Synthetic oligonucleotide
gcagcauucuuguguagcc

SEQ ID NO: 2776732 - RNA, 19 nt, Artificial Sequence
  Description of Artificial Sequence: Synthetic oligonucleotide
ucgaugagcuucuccgcgu

SEQ ID NO: 2776733 - RNA, 19 nt, Artificial Sequence
  Description of Artificial Sequence: Synthetic oligonucleotide
gaagucagccaugcgcaug

SEQ ID NO: 2776734 - RNA, 19 nt, Artificial Sequence
  Description of Artificial Sequence: Synthetic oligonucleotide
uaccaggacagcuccaguu

SEQ ID NO: 2776735 - RNA, 19 nt, Artificial Sequence
  Description of Artificial Sequence: Synthetic oligonucleotide
agauuugcuuccuguuuau

SEQ ID NO: 2776736 - RNA, 19 nt, Artificial Sequence
  Description of Artificial Sequence: Synthetic oligonucleotide
guuggugucgcccagcuuu

SEQ ID NO: 2776737 - RNA, 19 nt, Artificial Sequence
  Description of Artificial Sequence: Synthetic oligonucleotide
agguugcugucucuucgag

SEQ ID NO: 2776738 - RNA, 19 nt, Artificial Sequence
  Description of Artificial Sequence: Synthetic oligonucleotide
aauucccuuuauauucaau

SEQ ID NO: 2776739 - RNA, 19 nt, Artificial Sequence
  Description of Artificial Sequence: Synthetic oligonucleotide
ugacgccucgaugcguucg

SEQ ID NO: 2776740 - RNA, 19 nt, Artificial Sequence
  Description of Artificial Sequence: Synthetic oligonucleotide
cauuucguccacgcgugcc

SEQ ID NO: 2776741 - RNA, 19 nt, Artificial Sequence
  Description of Artificial Sequence: Synthetic oligonucleotide
gauuugcuuccuguuuaug

SEQ ID NO: 2776742 - RNA, 19 nt, Artificial Sequence
  Description of Artificial Sequence: Synthetic oligonucleotide
ugcccaugacgccucgaug

SEQ ID NO: 2776743 - RNA, 19 nt, Artificial Sequence
  Description of Artificial Sequence: Synthetic oligonucleotide
ccauucugauccuggaacc

SEQ ID NO: 2776744 - RNA, 19 nt, Artificial Sequence
  Description of Artificial Sequence: Synthetic oligonucleotide
gcuguggagauuugcuucc

SEQ ID NO: 2776745 - RNA, 19 nt, Artificial Sequence
  Description of Artificial Sequence: Synthetic oligonucleotide
ugcugucucuucgaggcac

SEQ ID NO: 2776746 - RNA, 19 nt, Artificial Sequence
  Description of Artificial Sequence: Synthetic oligonucleotide
ucguucguuggugucgccc

SEQ ID NO: 2776747 - RNA, 19 nt, Artificial Sequence
  Description of Artificial Sequence: Synthetic oligonucleotide
ucauuucguccacgcgugc

SEQ ID NO: 2776748 - RNA, 19 nt, Artificial Sequence
  Description of Artificial Sequence: Synthetic oligonucleotide
agcagcugguuuaggagag

SEQ ID NO: 2776749 - RNA, 19 nt, Artificial Sequence
  Description of Artificial Sequence: Synthetic oligonucleotide
gaaccgaggcgcuaguacu

SEQ ID NO: 2776750 - RNA, 19 nt, Artificial Sequence
  Description of Artificial Sequence: Synthetic oligonucleotide
guaagguugcugucucuuc

SEQ ID NO: 2776751 - RNA, 19 nt, Artificial Sequence
  Description of Artificial Sequence: Synthetic oligonucleotide
auucugauccuggaaccga

SEQ ID NO: 2776752 - RNA, 19 nt, Artificial Sequence
  Description of Artificial Sequence: Synthetic oligonucleotide
aguaagguugcugucucuu

SEQ ID NO: 2776753 - RNA, 19 nt, Artificial Sequence
  Description of Artificial Sequence: Synthetic oligonucleotide
gugagcaaguuccgcagca

SEQ ID NO: 2776754 - RNA, 19 nt, Artificial Sequence
  Description of Artificial Sequence: Synthetic oligonucleotide
auggcucguucguuggugu

SEQ ID NO: 2776755 - RNA, 19 nt, Artificial Sequence
  Description of Artificial Sequence: Synthetic oligonucleotide
gagaguaagguugcugucu

SEQ ID NO: 2776756 - RNA, 19 nt, Artificial Sequence
  Description of Artificial Sequence: Synthetic oligonucleotide
gagacuccgggccgaggcc

SEQ ID NO: 2776757 - RNA, 19 nt, Artificial Sequence
  Description of Artificial Sequence: Synthetic oligonucleotide
gcuaguacuuuaaacagcu

SEQ ID NO: 2776758 - RNA, 19 nt, Artificial Sequence
  Description of Artificial Sequence: Synthetic oligonucleotide
uggaugcgagacuccgggc

SEQ ID NO: 2776759 - RNA, 19 nt, Artificial Sequence
  Description of Artificial Sequence: Synthetic oligonucleotide
gggaucugcagcauucuug

SEQ ID NO: 2776760 - RNA, 19 nt, Artificial Sequence
  Description of Artificial Sequence: Synthetic oligonucleotide
cagcauucuuguguagccc

SEQ ID NO: 2776761 - RNA, 19 nt, Artificial Sequence
  Description of Artificial Sequence: Synthetic oligonucleotide
cacuaggcccgugagcaag

SEQ ID NO: 2776762 - RNA, 19 nt, Artificial Sequence
  Description of Artificial Sequence: Synthetic oligonucleotide
uuggugcuugagccgugug

SEQ ID NO: 2776763 - RNA, 19 nt, Artificial Sequence
  Description of Artificial Sequence: Synthetic oligonucleotide
ccacgcgugcccaugacgc

SEQ ID NO: 2776764 - RNA, 19 nt, Artificial Sequence
  Description of Artificial Sequence: Synthetic oligonucleotide
uuuggugcuugagccgugu

SEQ ID NO: 2776765 - RNA, 19 nt, Artificial Sequence
  Description of Artificial Sequence: Synthetic oligonucleotide
cauggcucguucguuggug

SEQ ID NO: 2776766 - RNA, 19 nt, Artificial Sequence
  Description of Artificial Sequence: Synthetic oligonucleotide
uuaggagaguaagguugcu

SEQ ID NO: 2776767 - RNA, 19 nt, Artificial Sequence
  Description of Artificial Sequence: Synthetic oligonucleotide
uuggugucgcccagcuuuc

SEQ ID NO: 2776768 - RNA, 19 nt, Artificial Sequence
  Description of Artificial Sequence: Synthetic oligonucleotide
agccccucauuucguccac

SEQ ID NO: 2776769 - RNA, 19 nt, Artificial Sequence
  Description of Artificial Sequence: Synthetic oligonucleotide
augcgcauggcucguucgu

SEQ ID NO: 2776770 - RNA, 19 nt, Artificial Sequence
  Description of Artificial Sequence: Synthetic oligonucleotide
gaucuugcuccuuacuauu

SEQ ID NO: 2776771 - RNA, 19 nt, Artificial Sequence
  Description of Artificial Sequence: Synthetic oligonucleotide
guggagauuugcuuccugu

SEQ ID NO: 2776772 - RNA, 19 nt, Artificial Sequence
  Description of Artificial Sequence: Synthetic oligonucleotide
agccgugugggagcugugg

SEQ ID NO: 2776773 - RNA, 19 nt, Artificial Sequence
  Description of Artificial Sequence: Synthetic oligonucleotide
uggcgcacuaggcccguga

SEQ ID NO: 2776774 - RNA, 19 nt, Artificial Sequence
  Description of Artificial Sequence: Synthetic oligonucleotide
gcguucguggcgcacuagg

SEQ ID NO: 2776775 - RNA, 19 nt, Artificial Sequence
  Description of Artificial Sequence: Synthetic oligonucleotide
uuucguccacgcgugccca

SEQ ID NO: 2776776 - RNA, 19 nt, Artificial Sequence
  Description of Artificial Sequence: Synthetic oligonucleotide
agaagucagccaugcgcau

SEQ ID NO: 2776777 - RNA, 19 nt, Artificial Sequence
  Description of Artificial Sequence: Synthetic oligonucleotide
uucgaggcacaggcagggg

SEQ ID NO: 2776778 - RNA, 19 nt, Artificial Sequence
  Description of Artificial Sequence: Synthetic oligonucleotide
guucguuggugucgcccag

SEQ ID NO: 2776779 - RNA, 19 nt, Artificial Sequence
  Description of Artificial Sequence: Synthetic oligonucleotide
agcuccaguuaagucuuug

SEQ ID NO: 2776780 - RNA, 19 nt, Artificial Sequence
  Description of Artificial Sequence: Synthetic oligonucleotide
augacgccucgaugcguuc

SEQ ID NO: 2776781 - RNA, 19 nt, Artificial Sequence
  Description of Artificial Sequence: Synthetic oligonucleotide
uucguuggugucgcccagc

SEQ ID NO: 2776782 - RNA, 19 nt, Artificial Sequence
  Description of Artificial Sequence: Synthetic oligonucleotide
cuccaguuaagucuuuggu

SEQ ID NO: 2776783 - RNA, 19 nt, Artificial Sequence
  Description of Artificial Sequence: Synthetic oligonucleotide
aguuaagucuuuggugcuu

SEQ ID NO: 2776784 - RNA, 19 nt, Artificial Sequence
  Description of Artificial Sequence: Synthetic oligonucleotide
ggcucguucguuggugucg

SEQ ID NO: 2776785 - RNA, 19 nt, Artificial Sequence
  Description of Artificial Sequence: Synthetic oligonucleotide
uauuugggaucugcagcau

SEQ ID NO: 2776786 - RNA, 19 nt, Artificial Sequence
  Description of Artificial Sequence: Synthetic oligonucleotide
uaaacagcuuugggauuaa

SEQ ID NO: 2776787 - RNA, 19 nt, Artificial Sequence
  Description of Artificial Sequence: Synthetic oligonucleotide
ugucgcccagcuuuccaua

SEQ ID NO: 2776788 - RNA, 19 nt, Artificial Sequence
  Description of Artificial Sequence: Synthetic oligonucleotide
gaggcgcuaguacuuuaaa

SEQ ID NO: 2776789 - RNA, 19 nt, Artificial Sequence
  Description of Artificial Sequence: Synthetic oligonucleotide
gccucgaugcguucguggc

SEQ ID NO: 2776790 - RNA, 19 nt, Artificial Sequence
  Description of Artificial Sequence: Synthetic oligonucleotide
gcuugagccgugugggagc

SEQ ID NO: 2776791 - RNA, 19 nt, Artificial Sequence
  Description of Artificial Sequence: Synthetic oligonucleotide
uaggcccgugagcaaguuc

SEQ ID NO: 2776792 - RNA, 19 nt, Artificial Sequence
  Description of Artificial Sequence: Synthetic oligonucleotide
uuccauagucgaugagcuu

SEQ ID NO: 2776793 - RNA, 19 nt, Artificial Sequence
  Description of Artificial Sequence: Synthetic oligonucleotide
cuuuggugcuugagccgug

SEQ ID NO: 2776794 - RNA, 19 nt, Artificial Sequence
  Description of Artificial Sequence: Synthetic oligonucleotide
ucgcccagcuuuccauagu

SEQ ID NO: 2776795 - RNA, 19 nt, Artificial Sequence
  Description of Artificial Sequence: Synthetic oligonucleotide
ggccgugggagacugcggc

SEQ ID NO: 2776796 - RNA, 19 nt, Artificial Sequence
  Description of Artificial Sequence: Synthetic oligonucleotide
cacgcgugcccaugacgcc

SEQ ID NO: 2776797 - RNA, 19 nt, Artificial Sequence
  Description of Artificial Sequence: Synthetic oligonucleotide
gcaaguuccgcagcaggug

SEQ ID NO: 2776798 - RNA, 19 nt, Artificial Sequence
  Description of Artificial Sequence: Synthetic oligonucleotide
aaccgaggcgcuaguacuu

SEQ ID NO: 2776799 - RNA, 19 nt, Artificial Sequence
  Description of Artificial Sequence: Synthetic oligonucleotide
caauucccuuuauauucaa

SEQ ID NO: 2776800 - RNA, 19 nt, Artificial Sequence
  Description of Artificial Sequence: Synthetic oligonucleotide
ugggagcuguggagauuug

SEQ ID NO: 2776801 - RNA, 19 nt, Artificial Sequence
  Description of Artificial Sequence: Synthetic oligonucleotide
cgcguagccccucauuucg

SEQ ID NO: 2776802 - RNA, 19 nt, Artificial Sequence
  Description of Artificial Sequence: Synthetic oligonucleotide
gguggaugcgagacuccgg

SEQ ID NO: 2776803 - RNA, 19 nt, Artificial Sequence
  Description of Artificial Sequence: Synthetic oligonucleotide
gcuccuuacuauuugggau

SEQ ID NO: 2776804 - RNA, 19 nt, Artificial Sequence
  Description of Artificial Sequence: Synthetic oligonucleotide
ccgugagcaaguuccgcag

SEQ ID NO: 2776805 - RNA, 19 nt, Artificial Sequence
  Description of Artificial Sequence: Synthetic oligonucleotide
cccuuuauauucaaucacu

SEQ ID NO: 2776806 - RNA, 19 nt, Artificial Sequence
  Description of Artificial Sequence: Synthetic oligonucleotide
gcuuuccauagucgaugag

SEQ ID NO: 2776807 - RNA, 19 nt, Artificial Sequence
  Description of Artificial Sequence: Synthetic oligonucleotide
ugggagacugcggcugcga

SEQ ID NO: 2776808 - RNA, 19 nt, Artificial Sequence
  Description of Artificial Sequence: Synthetic oligonucleotide
gaugcguucguggcgcacu

SEQ ID NO: 2776809 - RNA, 19 nt, Artificial Sequence
  Description of Artificial Sequence: Synthetic oligonucleotide
gaggcccaagcggcgguag

SEQ ID NO: 2776810 - RNA, 19 nt, Artificial Sequence
  Description of Artificial Sequence: Synthetic oligonucleotide
uggcucguucguugguguc

SEQ ID NO: 2776811 - RNA, 19 nt, Artificial Sequence
  Description of Artificial Sequence: Synthetic oligonucleotide
cccaagcggcgguagacgc

SEQ ID NO: 2776812 - RNA, 19 nt, Artificial Sequence
  Description of Artificial Sequence: Synthetic oligonucleotide
gagcuguggagauuugcuu

SEQ ID NO: 2776813 - RNA, 19 nt, Artificial Sequence
  Description of Artificial Sequence: Synthetic oligonucleotide
ggcgcacuaggcccgugag

SEQ ID NO: 2776814 - RNA, 19 nt, Artificial Sequence
  Description of Artificial Sequence: Synthetic oligonucleotide
cccagcuuuccauagucga

SEQ ID NO: 2776815 - RNA, 19 nt, Artificial Sequence
  Description of Artificial Sequence: Synthetic oligonucleotide
cuccgugagccagaaguca

SEQ ID NO: 2776816 - RNA, 19 nt, Artificial Sequence
  Description of Artificial Sequence: Synthetic oligonucleotide
uagacgcggccgugggaga

SEQ ID NO: 2776817 - RNA, 19 nt, Artificial Sequence
  Description of Artificial Sequence: Synthetic oligonucleotide
cccaugacgccucgaugcg

SEQ ID NO: 2776818 - RNA, 19 nt, Artificial Sequence
  Description of Artificial Sequence: Synthetic oligonucleotide
ccucgaugcguucguggcg

SEQ ID NO: 2776819 - RNA, 19 nt, Artificial Sequence
  Description of Artificial Sequence: Synthetic oligonucleotide
gagggaggcaauucccuuu

SEQ ID NO: 2776820 - RNA, 19 nt, Artificial Sequence
  Description of Artificial Sequence: Synthetic oligonucleotide
gggagcuguggagauuugc

SEQ ID NO: 2776821 - RNA, 19 nt, Artificial Sequence
  Description of Artificial Sequence: Synthetic oligonucleotide
ccaucuuggcccgaucuug

SEQ ID NO: 2776822 - RNA, 19 nt, Artificial Sequence
  Description of Artificial Sequence: Synthetic oligonucleotide
ucguccacgcgugcccaug

SEQ ID NO: 2776823 - RNA, 19 nt, Artificial Sequence
  Description of Artificial Sequence: Synthetic oligonucleotide
ugcguucguggcgcacuag

SEQ ID NO: 2776824 - RNA, 19 nt, Artificial Sequence
  Description of Artificial Sequence: Synthetic oligonucleotide
caguuaagucuuuggugcu

SEQ ID NO: 2776825 - RNA, 19 nt, Artificial Sequence
  Description of Artificial Sequence: Synthetic oligonucleotide
gaguaagguugcugucucu

SEQ ID NO: 2776826 - RNA, 19 nt, Artificial Sequence
  Description of Artificial Sequence: Synthetic oligonucleotide
aguuccgcagcagguggau

SEQ ID NO: 2776827 - RNA, 19 nt, Artificial Sequence
  Description of Artificial Sequence: Synthetic oligonucleotide
ccccucauuucguccacgc

SEQ ID NO: 2776828 - RNA, 19 nt, Artificial Sequence
  Description of Artificial Sequence: Synthetic oligonucleotide
gguuuaggagaguaagguu

SEQ ID NO: 2776829 - RNA, 19 nt, Artificial Sequence
  Description of Artificial Sequence: Synthetic oligonucleotide
aagcggcgguagacgcggc

SEQ ID NO: 2776830 - RNA, 19 nt, Artificial Sequence
  Description of Artificial Sequence: Synthetic oligonucleotide
cccucauuucguccacgcg

SEQ ID NO: 2776831 - RNA, 19 nt, Artificial Sequence
  Description of Artificial Sequence: Synthetic oligonucleotide
acgcgugcccaugacgccu

SEQ ID NO: 2776832 - RNA, 19 nt, Artificial Sequence
  Description of Artificial Sequence: Synthetic oligonucleotide
ggaggcaauucccuuuaua

SEQ ID NO: 2776833 - RNA, 19 nt, Artificial Sequence
  Description of Artificial Sequence: Synthetic oligonucleotide
acuaggcccgugagcaagu

SEQ ID NO: 2776834 - RNA, 19 nt, Artificial Sequence
  Description of Artificial Sequence: Synthetic oligonucleotide
gugggagacugcggcugcg

SEQ ID NO: 2776835 - RNA, 19 nt, Artificial Sequence
  Description of Artificial Sequence: Synthetic oligonucleotide
ggagauuugcuuccuguuu

SEQ ID NO: 2776836 - RNA, 19 nt, Artificial Sequence
  Description of Artificial Sequence: Synthetic oligonucleotide
uuggcccgaucuugcuccu

SEQ ID NO: 2776837 - RNA, 19 nt, Artificial Sequence
  Description of Artificial Sequence: Synthetic oligonucleotide
ucgaugcguucguggcgca

SEQ ID NO: 2776838 - RNA, 19 nt, Artificial Sequence
  Description of Artificial Sequence: Synthetic oligonucleotide
gcgcauggcucguucguug

SEQ ID NO: 2776839 - RNA, 19 nt, Artificial Sequence
  Description of Artificial Sequence: Synthetic oligonucleotide
gcggccgugggagacugcg

SEQ ID NO: 2776840 - RNA, 19 nt, Artificial Sequence
  Description of Artificial Sequence: Synthetic oligonucleotide
ccuggaaccgaggcgcuag

SEQ ID NO: 2776841 - RNA, 19 nt, Artificial Sequence
  Description of Artificial Sequence: Synthetic oligonucleotide
ccucauuucguccacgcgu

SEQ ID NO: 2776842 - RNA, 19 nt, Artificial Sequence
  Description of Artificial Sequence: Synthetic oligonucleotide
cuucuccgugagccagaag

SEQ ID NO: 2776843 - RNA, 19 nt, Artificial Sequence
  Description of Artificial Sequence: Synthetic oligonucleotide
ugcgcauggcucguucguu

SEQ ID NO: 2776844 - RNA, 19 nt, Artificial Sequence
  Description of Artificial Sequence: Synthetic oligonucleotide
cucguucguuggugucgcc

SEQ ID NO: 2776845 - RNA, 19 nt, Artificial Sequence
  Description of Artificial Sequence: Synthetic oligonucleotide
uggaaccgaggcgcuagua

SEQ ID NO: 2776846 - RNA, 19 nt, Artificial Sequence
  Description of Artificial Sequence: Synthetic oligonucleotide
cguucguggcgcacuaggc

SEQ ID NO: 2776847 - RNA, 19 nt, Artificial Sequence
  Description of Artificial Sequence: Synthetic oligonucleotide
ccgugugggagcuguggag

SEQ ID NO: 2776848 - RNA, 19 nt, Artificial Sequence
  Description of Artificial Sequence: Synthetic oligonucleotide
ggauuaaguccuucuccgu

SEQ ID NO: 2776849 - RNA, 19 nt, Artificial Sequence
  Description of Artificial Sequence: Synthetic oligonucleotide
ccgugagccagaagucagc

SEQ ID NO: 2776850 - RNA, 19 nt, Artificial Sequence
  Description of Artificial Sequence: Synthetic oligonucleotide
uggugucgcccagcuuucc

SEQ ID NO: 2776851 - RNA, 19 nt, Artificial Sequence
  Description of Artificial Sequence: Synthetic oligonucleotide
guuccgcagcagguggaug

SEQ ID NO: 2776852 - RNA, 19 nt, Artificial Sequence
  Description of Artificial Sequence: Synthetic oligonucleotide
cccaguagcagcugguuua

SEQ ID NO: 2776853 - RNA, 19 nt, Artificial Sequence
  Description of Artificial Sequence: Synthetic oligonucleotide
ggagcuguggagauuugcu

SEQ ID NO: 2776854 - RNA, 19 nt, Artificial Sequence
  Description of Artificial Sequence: Synthetic oligonucleotide
ggugucgcccagcuuucca

SEQ ID NO: 2776855 - RNA, 19 nt, Artificial Sequence
  Description of Artificial Sequence: Synthetic oligonucleotide
gcucguucguuggugucgc

SEQ ID NO: 2776856 - RNA, 19 nt, Artificial Sequence
  Description of Artificial Sequence: Synthetic oligonucleotide
augcguucguggcgcacua

SEQ ID NO: 2776857 - RNA, 19 nt, Artificial Sequence
  Description of Artificial Sequence: Synthetic oligonucleotide
gugcuugagccguguggga

SEQ ID NO: 2776858 - RNA, 19 nt, Artificial Sequence
  Description of Artificial Sequence: Synthetic oligonucleotide
cauagucgaugagcuucuc

SEQ ID NO: 2776859 - RNA, 19 nt, Artificial Sequence
  Description of Artificial Sequence: Synthetic oligonucleotide
cgugagccagaagucagcc

SEQ ID NO: 2776860 - RNA, 19 nt, Artificial Sequence
  Description of Artificial Sequence: Synthetic oligonucleotide
cgcauggcucguucguugg

SEQ ID NO: 2776861 - RNA, 19 nt, Artificial Sequence
  Description of Artificial Sequence: Synthetic oligonucleotide
gcggcgguagacgcggccg

SEQ ID NO: 2776862 - RNA, 19 nt, Artificial Sequence
  Description of Artificial Sequence: Synthetic oligonucleotide
gacgccucgaugcguucgu

SEQ ID NO: 2776863 - RNA, 19 nt, Artificial Sequence
  Description of Artificial Sequence: Synthetic oligonucleotide
aggcccaagcggcgguaga

SEQ ID NO: 2776864 - RNA, 19 nt, Artificial Sequence
  Description of Artificial Sequence: Synthetic oligonucleotide
cccgugagcaaguuccgca

SEQ ID NO: 2776865 - RNA, 19 nt, Artificial Sequence
  Description of Artificial Sequence: Synthetic oligonucleotide
gaguaccaggacagcucca

SEQ ID NO: 2776866 - RNA, 19 nt, Artificial Sequence
  Description of Artificial Sequence: Synthetic oligonucleotide
caugacgccucgaugcguu

SEQ ID NO: 2776867 - RNA, 19 nt, Artificial Sequence
  Description of Artificial Sequence: Synthetic oligonucleotide
uucguccacgcgugcccau

SEQ ID NO: 2776868 - RNA, 19 nt, Artificial Sequence
  Description of Artificial Sequence: Synthetic oligonucleotide
ccgaucuugcuccuuacua

SEQ ID NO: 2776869 - RNA, 19 nt, Artificial Sequence
  Description of Artificial Sequence: Synthetic oligonucleotide
cgggccgaggcccaagcgg

SEQ ID NO: 2776870 - RNA, 19 nt, Artificial Sequence
  Description of Artificial Sequence: Synthetic oligonucleotide
guccacgcgugcccaugac

SEQ ID NO: 2776871 - RNA, 19 nt, Artificial Sequence
  Description of Artificial Sequence: Synthetic oligonucleotide
cagcugguuuaggagagua

SEQ ID NO: 2776872 - RNA, 19 nt, Artificial Sequence
  Description of Artificial Sequence: Synthetic oligonucleotide
cgcacuaggcccgugagca

SEQ ID NO: 2776873 - RNA, 19 nt, Artificial Sequence
  Description of Artificial Sequence: Synthetic oligonucleotide
cgugagcaaguuccgcagc

SEQ ID NO: 2776874 - RNA, 19 nt, Artificial Sequence
  Description of Artificial Sequence: Synthetic oligonucleotide
ccuguuuauggcgcagguc

SEQ ID NO: 2776875 - RNA, 19 nt, Artificial Sequence
  Description of Artificial Sequence: Synthetic oligonucleotide
gcgguagacgcggccgugg

SEQ ID NO: 2776876 - RNA, 19 nt, Artificial Sequence
  Description of Artificial Sequence: Synthetic oligonucleotide
gcgcacuaggcccgugagc

SEQ ID NO: 2776877 - RNA, 19 nt, Artificial Sequence
  Description of Artificial Sequence: Synthetic oligonucleotide
cgccucgaugcguucgugg

SEQ ID NO: 2776878 - RNA, 19 nt, Artificial Sequence
  Description of Artificial Sequence: Synthetic oligonucleotide
gccuacagagugaguacca

SEQ ID NO: 2776879 - RNA, 19 nt, Artificial Sequence
  Description of Artificial Sequence: Synthetic oligonucleotide
accgaggcgcuaguacuuu

SEQ ID NO: 2776880 - RNA, 19 nt, Artificial Sequence
  Description of Artificial Sequence: Synthetic oligonucleotide
gugucgcccagcuuuccau

SEQ ID NO: 2776881 - RNA, 19 nt, Artificial Sequence
  Description of Artificial Sequence: Synthetic oligonucleotide
guaccaggacagcuccagu

SEQ ID NO: 2776882 - RNA, 19 nt, Artificial Sequence
  Description of Artificial Sequence: Synthetic oligonucleotide
ggcccgugagcaaguuccg

SEQ ID NO: 2776883 - RNA, 19 nt, Artificial Sequence
  Description of Artificial Sequence: Synthetic oligonucleotide
gguagacgcggccguggga

SEQ ID NO: 2776884 - RNA, 19 nt, Artificial Sequence
  Description of Artificial Sequence: Synthetic oligonucleotide
uccuggaaccgaggcgcua

SEQ ID NO: 2776885 - RNA, 19 nt, Artificial Sequence
  Description of Artificial Sequence: Synthetic oligonucleotide
cuaguacuuuaaacagcuu

SEQ ID NO: 2776886 - RNA, 19 nt, Artificial Sequence
  Description of Artificial Sequence: Synthetic oligonucleotide
gugcccaugacgccucgau

SEQ ID NO: 2776887 - RNA, 19 nt, Artificial Sequence
  Description of Artificial Sequence: Synthetic oligonucleotide
ggcccaagcggcgguagac

SEQ ID NO: 2776888 - RNA, 19 nt, Artificial Sequence
  Description of Artificial Sequence: Synthetic oligonucleotide
agccaugcgcauggcucgu

SEQ ID NO: 2776889 - RNA, 19 nt, Artificial Sequence
  Description of Artificial Sequence: Synthetic oligonucleotide
acgcggccgugggagacug

SEQ ID NO: 2776890 - RNA, 19 nt, Artificial Sequence
  Description of Artificial Sequence: Synthetic oligonucleotide
auccuggaaccgaggcgcu

SEQ ID NO: 2776891 - RNA, 19 nt, Artificial Sequence
  Description of Artificial Sequence: Synthetic oligonucleotide
cguucguuggugucgccca

SEQ ID NO: 2776892 - RNA, 19 nt, Artificial Sequence
  Description of Artificial Sequence: Synthetic oligonucleotide
ccaugcgcauggcucguuc

SEQ ID NO: 2776893 - RNA, 19 nt, Artificial Sequence
  Description of Artificial Sequence: Synthetic oligonucleotide
uugagccgugugggagcug

SEQ ID NO: 2776894 - RNA, 19 nt, Artificial Sequence
  Description of Artificial Sequence: Synthetic oligonucleotide
cguagccccucauuucguc

SEQ ID NO: 2776895 - RNA, 19 nt, Artificial Sequence
  Description of Artificial Sequence: Synthetic oligonucleotide
cuugagccgugugggagcu

SEQ ID NO: 2776896 - RNA, 19 nt, Artificial Sequence
  Description of Artificial Sequence: Synthetic oligonucleotide
ggcccgaucuugcuccuua

SEQ ID NO: 2776897 - RNA, 19 nt, Artificial Sequence
  Description of Artificial Sequence: Synthetic oligonucleotide
acgccucgaugcguucgug

SEQ ID NO: 2776898 - RNA, 19 nt, Artificial Sequence
  Description of Artificial Sequence: Synthetic oligonucleotide
agguccugcugcaguccca

SEQ ID NO: 2776899 - RNA, 19 nt, Artificial Sequence
  Description of Artificial Sequence: Synthetic oligonucleotide
gagccgugugggagcugug

SEQ ID NO: 2776900 - RNA, 19 nt, Artificial Sequence
  Description of Artificial Sequence: Synthetic oligonucleotide
gacuccgggccgaggccca

SEQ ID NO: 2776901 - RNA, 19 nt, Artificial Sequence
  Description of Artificial Sequence: Synthetic oligonucleotide
gcccgaucuugcuccuuac

SEQ ID NO: 2776902 - RNA, 19 nt, Artificial Sequence
  Description of Artificial Sequence: Synthetic oligonucleotide
ccgcguagccccucauuuc

SEQ ID NO: 2776903 - RNA, 19 nt, Artificial Sequence
  Description of Artificial Sequence: Synthetic oligonucleotide
ccgugggagacugcggcug

SEQ ID NO: 2776904 - RNA, 19 nt, Artificial Sequence
  Description of Artificial Sequence: Synthetic oligonucleotide
ccauagucgaugagcuucu

SEQ ID NO: 2776905 - RNA, 19 nt, Artificial Sequence
  Description of Artificial Sequence: Synthetic oligonucleotide
cgugggagacugcggcugc

SEQ ID NO: 2776906 - RNA, 19 nt, Artificial Sequence
  Description of Artificial Sequence: Synthetic oligonucleotide
cgguagacgcggccguggg

SEQ ID NO: 2776907 - RNA, 19 nt, Artificial Sequence
  Description of Artificial Sequence: Synthetic oligonucleotide
gggagggaggcaauucccu

SEQ ID NO: 2776908 - RNA, 19 nt, Artificial Sequence
  Description of Artificial Sequence: Synthetic oligonucleotide
gcccgugagcaaguuccgc

SEQ ID NO: 2776909 - RNA, 19 nt, Artificial Sequence
  Description of Artificial Sequence: Synthetic oligonucleotide
cuucuccgcguagccccuc

SEQ ID NO: 2776910 - RNA, 19 nt, Artificial Sequence
  Description of Artificial Sequence: Synthetic oligonucleotide
ccgggccgaggcccaagcg

SEQ ID NO: 2776911 - RNA, 19 nt, Artificial Sequence
  Description of Artificial Sequence: Synthetic oligonucleotide
cgaucuugcuccuuacuau

SEQ ID NO: 2776912 - RNA, 19 nt, Artificial Sequence
  Description of Artificial Sequence: Synthetic oligonucleotide
cuccgggccgaggcccaag

SEQ ID NO: 2776913 - RNA, 19 nt, Artificial Sequence
  Description of Artificial Sequence: Synthetic oligonucleotide
ggcgguagacgcggccgug

SEQ ID NO: 2776914 - RNA, 19 nt, Artificial Sequence
  Description of Artificial Sequence: Synthetic oligonucleotide
gcgugcccaugacgccucg

SEQ ID NO: 2776915 - RNA, 19 nt, Artificial Sequence
  Description of Artificial Sequence: Synthetic oligonucleotide
ccuuacuauuugggaucug

SEQ ID NO: 2776916 - RNA, 19 nt, Artificial Sequence
  Description of Artificial Sequence: Synthetic oligonucleotide
ccccauucugauccuggaa

SEQ ID NO: 2776917 - RNA, 19 nt, Artificial Sequence
  Description of Artificial Sequence: Synthetic oligonucleotide
cuguggagauuugcuuccu

SEQ ID NO: 2776918 - RNA, 19 nt, Artificial Sequence
  Description of Artificial Sequence: Synthetic oligonucleotide
gcgagacuccgggccgagg

SEQ ID NO: 2776919 - RNA, 19 nt, Artificial Sequence
  Description of Artificial Sequence: Synthetic oligonucleotide
cgaggcgcuaguacuuuaa

SEQ ID NO: 2776920 - RNA, 19 nt, Artificial Sequence
  Description of Artificial Sequence: Synthetic oligonucleotide
cuggaaccgaggcgcuagu

SEQ ID NO: 2776921 - RNA, 19 nt, Artificial Sequence
  Description of Artificial Sequence: Synthetic oligonucleotide
gacgcggccgugggagacu

SEQ ID NO: 2776922 - RNA, 19 nt, Artificial Sequence
  Description of Artificial Sequence: Synthetic oligonucleotide
gcacuaggcccgugagcaa

SEQ ID NO: 2776923 - RNA, 19 nt, Artificial Sequence
  Description of Artificial Sequence: Synthetic oligonucleotide
uggcccgaucuugcuccuu

SEQ ID NO: 2776924 - RNA, 19 nt, Artificial Sequence
  Description of Artificial Sequence: Synthetic oligonucleotide
gcauggcucguucguuggu

SEQ ID NO: 2776925 - RNA, 19 nt, Artificial Sequence
  Description of Artificial Sequence: Synthetic oligonucleotide
guggcgcacuaggcccgug

SEQ ID NO: 2776926 - RNA, 19 nt, Artificial Sequence
  Description of Artificial Sequence: Synthetic oligonucleotide
cuccgcguagccccucauu

SEQ ID NO: 2776927 - RNA, 19 nt, Artificial Sequence
  Description of Artificial Sequence: Synthetic oligonucleotide
cgcgugcccaugacgccuc

SEQ ID NO: 2776928 - RNA, 19 nt, Artificial Sequence
  Description of Artificial Sequence: Synthetic oligonucleotide
ccuucuccgugagccagaa

SEQ ID NO: 2776929 - RNA, 19 nt, Artificial Sequence
  Description of Artificial Sequence: Synthetic oligonucleotide
cccgaucuugcuccuuacu

SEQ ID NO: 2776930 - RNA, 19 nt, Artificial Sequence
  Description of Artificial Sequence: Synthetic oligonucleotide
gggaggcaauucccuuuau

SEQ ID NO: 2776931 - RNA, 19 nt, Artificial Sequence
  Description of Artificial Sequence: Synthetic oligonucleotide
cguccacgcgugcccauga

SEQ ID NO: 2776932 - RNA, 19 nt, Artificial Sequence
  Description of Artificial Sequence: Synthetic oligonucleotide
cgaugcguucguggcgcac

SEQ ID NO: 2776933 - RNA, 19 nt, Artificial Sequence
  Description of Artificial Sequence: Synthetic oligonucleotide
ccgaggcgcuaguacuuua

SEQ ID NO: 2776934 - RNA, 19 nt, Artificial Sequence
  Description of Artificial Sequence: Synthetic oligonucleotide
cuaggcccgugagcaaguu

SEQ ID NO: 2776935 - RNA, 19 nt, Artificial Sequence
  Description of Artificial Sequence: Synthetic oligonucleotide
cacugccaucuuggcccga

SEQ ID NO: 2776936 - RNA, 19 nt, Artificial Sequence
  Description of Artificial Sequence: Synthetic oligonucleotide
gcguagccccucauuucgu

SEQ ID NO: 2776937 - RNA, 19 nt, Artificial Sequence
  Description of Artificial Sequence: Synthetic oligonucleotide
gcaggggagggaggcaauu

SEQ ID NO: 2776938 - RNA, 19 nt, Artificial Sequence
  Description of Artificial Sequence: Synthetic oligonucleotide
ccaugacgccucgaugcgu

SEQ ID NO: 2776939 - RNA, 19 nt, Artificial Sequence
  Description of Artificial Sequence: Synthetic oligonucleotide
ccgcagcagguggaugcga

SEQ ID NO: 2776940 - RNA, 19 nt, Artificial Sequence
  Description of Artificial Sequence: Synthetic oligonucleotide
cgcggccgugggagacugc

SEQ ID NO: 2776941 - RNA, 19 nt, Artificial Sequence
  Description of Artificial Sequence: Synthetic oligonucleotide
ccgaggcccaagcggcggu

SEQ ID NO: 2776942 - RNA, 19 nt, Artificial Sequence
  Description of Artificial Sequence: Synthetic oligonucleotide
cgugcccaugacgccucga

SEQ ID NO: 2776943 - RNA, 19 nt, Artificial Sequence
  Description of Artificial Sequence: Synthetic oligonucleotide
gccaugcgcauggcucguu

SEQ ID NO: 2776944 - RNA, 19 nt, Artificial Sequence
  Description of Artificial Sequence: Synthetic oligonucleotide
cggcgguagacgcggccgu

SEQ ID NO: 2776945 - RNA, 19 nt, Artificial Sequence
  Description of Artificial Sequence: Synthetic oligonucleotide
cgaggcccaagcggcggua

SEQ ID NO: 2776946 - RNA, 19 nt, Artificial Sequence
  Description of Artificial Sequence: Synthetic oligonucleotide
cguuggugucgcccagcuu

SEQ ID NO: 2776947 - RNA, 19 nt, Artificial Sequence
  Description of Artificial Sequence: Synthetic oligonucleotide
cguggcgcacuaggcccgu

SEQ ID NO: 2776948 - RNA, 19 nt, Artificial Sequence
  Description of Artificial Sequence: Synthetic oligonucleotide
ugcucuaguaguuugaugg

SEQ ID NO: 2776949 - RNA, 19 nt, Artificial Sequence
  Description of Artificial Sequence: Synthetic oligonucleotide
aaauuugccguccauguuc

SEQ ID NO: 2776950 - RNA, 19 nt, Artificial Sequence
  Description of Artificial Sequence: Synthetic oligonucleotide
ucgucuauaaucuucgugg

SEQ ID NO: 2776951 - RNA, 19 nt, Artificial Sequence
  Description of Artificial Sequence: Synthetic oligonucleotide
uaucgauugaaauuucugg

SEQ ID NO: 2776952 - RNA, 19 nt, Artificial Sequence
  Description of Artificial Sequence: Synthetic oligonucleotide
acuaaucugccucaugucc

SEQ ID NO: 2776953 - RNA, 19 nt, Artificial Sequence
  Description of Artificial Sequence: Synthetic oligonucleotide
aguuugauggccuugucgg

SEQ ID NO: 2776954 - RNA, 19 nt, Artificial Sequence
  Description of Artificial Sequence: Synthetic oligonucleotide
auuguuuccacugagaccu

SEQ ID NO: 2776955 - RNA, 19 nt, Artificial Sequence
  Description of Artificial Sequence: Synthetic oligonucleotide
gaacuuacugaccaccucg

SEQ ID NO: 2776956 - RNA, 19 nt, Artificial Sequence
  Description of Artificial Sequence: Synthetic oligonucleotide
uccacugagaccucgacag

SEQ ID NO: 2776957 - RNA, 19 nt, Artificial Sequence
  Description of Artificial Sequence: Synthetic oligonucleotide
uucuccgucacuaaucugc

SEQ ID NO: 2776958 - RNA, 19 nt, Artificial Sequence
  Description of Artificial Sequence: Synthetic oligonucleotide
uuucucuuguucaacagca

SEQ ID NO: 2776959 - RNA, 19 nt, Artificial Sequence
  Description of Artificial Sequence: Synthetic oligonucleotide
acuucagaggaacacgcgc

SEQ ID NO: 2776960 - RNA, 19 nt, Artificial Sequence
  Description of Artificial Sequence: Synthetic oligonucleotide
uugucaauguuccucagca

SEQ ID NO: 2776961 - RNA, 19 nt, Artificial Sequence
  Description of Artificial Sequence: Synthetic oligonucleotide
uuuagagugcucuaguagu

SEQ ID NO: 2776962 - RNA, 19 nt, Artificial Sequence
  Description of Artificial Sequence: Synthetic oligonucleotide
gaaauuucugguccacugg

SEQ ID NO: 2776963 - RNA, 19 nt, Artificial Sequence
  Description of Artificial Sequence: Synthetic oligonucleotide
ucacuaaucugccucaugu

SEQ ID NO: 2776964 - RNA, 19 nt, Artificial Sequence
  Description of Artificial Sequence: Synthetic oligonucleotide
uaguuugauggccuugucg

SEQ ID NO: 2776965 - RNA, 19 nt, Artificial Sequence
  Description of Artificial Sequence: Synthetic oligonucleotide
agcacaaccgaucacuauc

SEQ ID NO: 2776966 - RNA, 19 nt, Artificial Sequence
  Description of Artificial Sequence: Synthetic oligonucleotide
guagagggacauuaggugg

SEQ ID NO: 2776967 - RNA, 19 nt, Artificial Sequence
  Description of Artificial Sequence: Synthetic oligonucleotide
aacagcagucgcuuuggcg

SEQ ID NO: 2776968 - RNA, 19 nt, Artificial Sequence
  Description of Artificial Sequence: Synthetic oligonucleotide
uguucugcagaguuuuggg

SEQ ID NO: 2776969 - RNA, 19 nt, Artificial Sequence
  Description of Artificial Sequence: Synthetic oligonucleotide
gaacacgcgcuguagaggg

SEQ ID NO: 2776970 - RNA, 19 nt, Artificial Sequence
  Description of Artificial Sequence: Synthetic oligonucleotide
ucagguuuaauuccucucu

SEQ ID NO: 2776971 - RNA, 19 nt, Artificial Sequence
  Description of Artificial Sequence: Synthetic oligonucleotide
ucuauaaucuucguggcgu

SEQ ID NO: 2776972 - RNA, 19 nt, Artificial Sequence
  Description of Artificial Sequence: Synthetic oligonucleotide
ucuucaagagcacaaccga

SEQ ID NO: 2776973 - RNA, 19 nt, Artificial Sequence
  Description of Artificial Sequence: Synthetic oligonucleotide
ucuuguucaacagcagucg

SEQ ID NO: 2776974 - RNA, 19 nt, Artificial Sequence
  Description of Artificial Sequence: Synthetic oligonucleotide
uuugcagucagguuuaauu

SEQ ID NO: 2776975 - RNA, 19 nt, Artificial Sequence
  Description of Artificial Sequence: Synthetic oligonucleotide
ugagggcuaauuaaauuug

SEQ ID NO: 2776976 - RNA, 19 nt, Artificial Sequence
  Description of Artificial Sequence: Synthetic oligonucleotide
cuucugaucuucaagagca

SEQ ID NO: 2776977 - RNA, 19 nt, Artificial Sequence
  Description of Artificial Sequence: Synthetic oligonucleotide
ucaagagcacaaccgauca

SEQ ID NO: 2776978 - RNA, 19 nt, Artificial Sequence
  Description of Artificial Sequence: Synthetic oligonucleotide
uggaucaucuccaggagga

SEQ ID NO: 2776979 - RNA, 19 nt, Artificial Sequence
  Description of Artificial Sequence: Synthetic oligonucleotide
agaguuuugggaccggcuc

SEQ ID NO: 2776980 - RNA, 19 nt, Artificial Sequence
  Description of Artificial Sequence: Synthetic oligonucleotide
aucgauugaaauuucuggu

SEQ ID NO: 2776981 - RNA, 19 nt, Artificial Sequence
  Description of Artificial Sequence: Synthetic oligonucleotide
uaauuccucucuuucuccg

SEQ ID NO: 2776982 - RNA, 19 nt, Artificial Sequence
  Description of Artificial Sequence: Synthetic oligonucleotide
cuuuagagugcucuaguag

SEQ ID NO: 2776983 - RNA, 19 nt, Artificial Sequence
  Description of Artificial Sequence: Synthetic oligonucleotide
ucggaguugucaauguucc

SEQ ID NO: 2776984 - RNA, 19 nt, Artificial Sequence
  Description of Artificial Sequence: Synthetic oligonucleotide
aaggauuccuccugcuggg

SEQ ID NO: 2776985 - RNA, 19 nt, Artificial Sequence
  Description of Artificial Sequence: Synthetic oligonucleotide
auuagguggcucuuggcag

SEQ ID NO: 2776986 - RNA, 19 nt, Artificial Sequence
  Description of Artificial Sequence: Synthetic oligonucleotide
caaggauuccuccugcugg

SEQ ID NO: 2776987 - RNA, 19 nt, Artificial Sequence
  Description of Artificial Sequence: Synthetic oligonucleotide
aaccgaucacuaucgauug

SEQ ID NO: 2776988 - RNA, 19 nt, Artificial Sequence
  Description of Artificial Sequence: Synthetic oligonucleotide
uuucggauuguuuccacug

SEQ ID NO: 2776989 - RNA, 19 nt, Artificial Sequence
  Description of Artificial Sequence: Synthetic oligonucleotide
gauuguuuccacugagacc

SEQ ID NO: 2776990 - RNA, 19 nt, Artificial Sequence
  Description of Artificial Sequence: Synthetic oligonucleotide
uugagggcuaauuaaauuu

SEQ ID NO: 2776991 - RNA, 19 nt, Artificial Sequence
  Description of Artificial Sequence: Synthetic oligonucleotide
gacauuagguggcucuugg

SEQ ID NO: 2776992 - RNA, 19 nt, Artificial Sequence
  Description of Artificial Sequence: Synthetic oligonucleotide
aucacuaucgauugaaauu

SEQ ID NO: 2776993 - RNA, 19 nt, Artificial Sequence
  Description of Artificial Sequence: Synthetic oligonucleotide
cuaauuaaauuugccgucc

SEQ ID NO: 2776994 - RNA, 19 nt, Artificial Sequence
  Description of Artificial Sequence: Synthetic oligonucleotide
aagagcacaaccgaucacu

SEQ ID NO: 2776995 - RNA, 19 nt, Artificial Sequence
  Description of Artificial Sequence: Synthetic oligonucleotide
auuaaauuugccguccaug

SEQ ID NO: 2776996 - RNA, 19 nt, Artificial Sequence
  Description of Artificial Sequence: Synthetic oligonucleotide
uucguggcgugcuucaagg

SEQ ID NO: 2776997 - RNA, 19 nt, Artificial Sequence
  Description of Artificial Sequence: Synthetic oligonucleotide
uucaacagcagucgcuuug

SEQ ID NO: 2776998 - RNA, 19 nt, Artificial Sequence
  Description of Artificial Sequence: Synthetic oligonucleotide
ugcagucagguuuaauucc

SEQ ID NO: 2776999 - RNA, 19 nt, Artificial Sequence
  Description of Artificial Sequence: Synthetic oligonucleotide
cuaucgauugaaauuucug

SEQ ID NO: 2777000 - RNA, 19 nt, Artificial Sequence
  Description of Artificial Sequence: Synthetic oligonucleotide
gaggguucggcccaucagg

SEQ ID NO: 2777001 - RNA, 19 nt, Artificial Sequence
  Description of Artificial Sequence: Synthetic oligonucleotide
aucuucaagagcacaaccg

SEQ ID NO: 2777002 - RNA, 19 nt, Artificial Sequence
  Description of Artificial Sequence: Synthetic oligonucleotide
ucuuucucuuguucaacag

SEQ ID NO: 2777003 - RNA, 19 nt, Artificial Sequence
  Description of Artificial Sequence: Synthetic oligonucleotide
gggcuaauuaaauuugccg

SEQ ID NO: 2777004 - RNA, 19 nt, Artificial Sequence
  Description of Artificial Sequence: Synthetic oligonucleotide
ugggccaugagcuccgggg

SEQ ID NO: 2777005 - RNA, 19 nt, Artificial Sequence
  Description of Artificial Sequence: Synthetic oligonucleotide
aauuaaauuugccguccau

SEQ ID NO: 2777006 - RNA, 19 nt, Artificial Sequence
  Description of Artificial Sequence: Synthetic oligonucleotide
cauccaggaacuuacugac

SEQ ID NO: 2777007 - RNA, 19 nt, Artificial Sequence
  Description of Artificial Sequence: Synthetic oligonucleotide
uucaagagcacaaccgauc

SEQ ID NO: 2777008 - RNA, 19 nt, Artificial Sequence
  Description of Artificial Sequence: Synthetic oligonucleotide
ucucuuguucaacagcagu

SEQ ID NO: 2777009 - RNA, 19 nt, Artificial Sequence
  Description of Artificial Sequence: Synthetic oligonucleotide
uucuggauacuguggauca

SEQ ID NO: 2777010 - RNA, 19 nt, Artificial Sequence
  Description of Artificial Sequence: Synthetic oligonucleotide
ucacuaucgauugaaauuu

SEQ ID NO: 2777011 - RNA, 19 nt, Artificial Sequence
  Description of Artificial Sequence: Synthetic oligonucleotide
ucgauugaaauuucugguc

SEQ ID NO: 2777012 - RNA, 19 nt, Artificial Sequence
  Description of Artificial Sequence: Synthetic oligonucleotide
gacagugaggguucggccc

SEQ ID NO: 2777013 - RNA, 19 nt, Artificial Sequence
  Description of Artificial Sequence: Synthetic oligonucleotide
uagagggacauuagguggc

SEQ ID NO: 2777014 - RNA, 19 nt, Artificial Sequence
  Description of Artificial Sequence: Synthetic oligonucleotide
uugcagucagguuuaauuc

SEQ ID NO: 2777015 - RNA, 19 nt, Artificial Sequence
  Description of Artificial Sequence: Synthetic oligonucleotide
uuuguaagggcccgugggu

SEQ ID NO: 2777016 - RNA, 19 nt, Artificial Sequence
  Description of Artificial Sequence: Synthetic oligonucleotide
auugaaauuucugguccac

SEQ ID NO: 2777017 - RNA, 19 nt, Artificial Sequence
  Description of Artificial Sequence: Synthetic oligonucleotide
uuuggcgcugaucuucgcc

SEQ ID NO: 2777018 - RNA, 19 nt, Artificial Sequence
  Description of Artificial Sequence: Synthetic oligonucleotide
ucggauuguuuccacugag

SEQ ID NO: 2777019 - RNA, 19 nt, Artificial Sequence
  Description of Artificial Sequence: Synthetic oligonucleotide
acauuagguggcucuuggc

SEQ ID NO: 2777020 - RNA, 19 nt, Artificial Sequence
  Description of Artificial Sequence: Synthetic oligonucleotide
uccgucacuaaucugccuc

SEQ ID NO: 2777021 - RNA, 19 nt, Artificial Sequence
  Description of Artificial Sequence: Synthetic oligonucleotide
agggcuaauuaaauuugcc

SEQ ID NO: 2777022 - RNA, 19 nt, Artificial Sequence
  Description of Artificial Sequence: Synthetic oligonucleotide
ugagaccucgacagugagg

SEQ ID NO: 2777023 - RNA, 19 nt, Artificial Sequence
  Description of Artificial Sequence: Synthetic oligonucleotide
uuugagggcuaauuaaauu

SEQ ID NO: 2777024 - RNA, 19 nt, Artificial Sequence
  Description of Artificial Sequence: Synthetic oligonucleotide
uggauacuguggaucaucu

SEQ ID NO: 2777025 - RNA, 19 nt, Artificial Sequence
  Description of Artificial Sequence: Synthetic oligonucleotide
uccaggaggauuucuuucu

SEQ ID NO: 2777026 - RNA, 19 nt, Artificial Sequence
  Description of Artificial Sequence: Synthetic oligonucleotide
gauugaaauuucuggucca

SEQ ID NO: 2777027 - RNA, 19 nt, Artificial Sequence
  Description of Artificial Sequence: Synthetic oligonucleotide
aggaacacgcgcuguagag

SEQ ID NO: 2777028 - RNA, 19 nt, Artificial Sequence
  Description of Artificial Sequence: Synthetic oligonucleotide
uuacugaccaccucgucua

SEQ ID NO: 2777029 - RNA, 19 nt, Artificial Sequence
  Description of Artificial Sequence: Synthetic oligonucleotide
agagugcucuaguaguuug

SEQ ID NO: 2777030 - RNA, 19 nt, Artificial Sequence
  Description of Artificial Sequence: Synthetic oligonucleotide
acuguggaucaucuccagg

SEQ ID NO: 2777031 - RNA, 19 nt, Artificial Sequence
  Description of Artificial Sequence: Synthetic oligonucleotide
uuugccguccauguucugc

SEQ ID NO: 2777032 - RNA, 19 nt, Artificial Sequence
  Description of Artificial Sequence: Synthetic oligonucleotide
uccuuuagagugcucuagu

SEQ ID NO: 2777033 - RNA, 19 nt, Artificial Sequence
  Description of Artificial Sequence: Synthetic oligonucleotide
ucuccgucacuaaucugcc

SEQ ID NO: 2777034 - RNA, 19 nt, Artificial Sequence
  Description of Artificial Sequence: Synthetic oligonucleotide
ggauuguuuccacugagac

SEQ ID NO: 2777035 - RNA, 19 nt, Artificial Sequence
  Description of Artificial Sequence: Synthetic oligonucleotide
cuuguucaacagcagucgc

SEQ ID NO: 2777036 - RNA, 19 nt, Artificial Sequence
  Description of Artificial Sequence: Synthetic oligonucleotide
cuguggaucaucuccagga

SEQ ID NO: 2777037 - RNA, 19 nt, Artificial Sequence
  Description of Artificial Sequence: Synthetic oligonucleotide
auguucugcagaguuuugg

SEQ ID NO: 2777038 - RNA, 19 nt, Artificial Sequence
  Description of Artificial Sequence: Synthetic oligonucleotide
aaucuucguggcgugcuuc

SEQ ID NO: 2777039 - RNA, 19 nt, Artificial Sequence
  Description of Artificial Sequence: Synthetic oligonucleotide
uucggauuguuuccacuga

SEQ ID NO: 2777040 - RNA, 19 nt, Artificial Sequence
  Description of Artificial Sequence: Synthetic oligonucleotide
ugaggguucggcccaucag

SEQ ID NO: 2777041 - RNA, 19 nt, Artificial Sequence
  Description of Artificial Sequence: Synthetic oligonucleotide
gaccaccucgucuauaauc

SEQ ID NO: 2777042 - RNA, 19 nt, Artificial Sequence
  Description of Artificial Sequence: Synthetic oligonucleotide
guugucaauguuccucagc

SEQ ID NO: 2777043 - RNA, 19 nt, Artificial Sequence
  Description of Artificial Sequence: Synthetic oligonucleotide
cucgucuauaaucuucgug

SEQ ID NO: 2777044 - RNA, 19 nt, Artificial Sequence
  Description of Artificial Sequence: Synthetic oligonucleotide
uggguuugagggcuaauua

SEQ ID NO: 2777045 - RNA, 19 nt, Artificial Sequence
  Description of Artificial Sequence: Synthetic oligonucleotide
uaaucugccucauguccug

SEQ ID NO: 2777046 - RNA, 19 nt, Artificial Sequence
  Description of Artificial Sequence: Synthetic oligonucleotide
aauuugccguccauguucu

SEQ ID NO: 2777047 - RNA, 19 nt, Artificial Sequence
  Description of Artificial Sequence: Synthetic oligonucleotide
cuuggcaguucccacauca

SEQ ID NO: 2777048 - RNA, 19 nt, Artificial Sequence
  Description of Artificial Sequence: Synthetic oligonucleotide
uuccacugagaccucgaca

SEQ ID NO: 2777049 - RNA, 19 nt, Artificial Sequence
  Description of Artificial Sequence: Synthetic oligonucleotide
uuagagugcucuaguaguu

SEQ ID NO: 2777050 - RNA, 19 nt, Artificial Sequence
  Description of Artificial Sequence: Synthetic oligonucleotide
accucgucuauaaucuucg

SEQ ID NO: 2777051 - RNA, 19 nt, Artificial Sequence
  Description of Artificial Sequence: Synthetic oligonucleotide
agucagguuuaauuccucu

SEQ ID NO: 2777052 - RNA, 19 nt, Artificial Sequence
  Description of Artificial Sequence: Synthetic oligonucleotide
cauuagguggcucuuggca

SEQ ID NO: 2777053 - RNA, 19 nt, Artificial Sequence
  Description of Artificial Sequence: Synthetic oligonucleotide
auuucggauuguuuccacu

SEQ ID NO: 2777054 - RNA, 19 nt, Artificial Sequence
  Description of Artificial Sequence: Synthetic oligonucleotide
ugguccacuggcccaggcg

SEQ ID NO: 2777055 - RNA, 19 nt, Artificial Sequence
  Description of Artificial Sequence: Synthetic oligonucleotide
agggacauuagguggcucu

SEQ ID NO: 2777056 - RNA, 19 nt, Artificial Sequence
  Description of Artificial Sequence: Synthetic oligonucleotide
aguaguuugauggccuugu

SEQ ID NO: 2777057 - RNA, 19 nt, Artificial Sequence
  Description of Artificial Sequence: Synthetic oligonucleotide
gcuaauuaaauuugccguc

SEQ ID NO: 2777058 - RNA, 19 nt, Artificial Sequence
  Description of Artificial Sequence: Synthetic oligonucleotide
gguuuaauuccucucuuuc

SEQ ID NO: 2777059 - RNA, 19 nt, Artificial Sequence
  Description of Artificial Sequence: Synthetic oligonucleotide
gcuguagagggacauuagg

SEQ ID NO: 2777060 - RNA, 19 nt, Artificial Sequence
  Description of Artificial Sequence: Synthetic oligonucleotide
gagggcuaauuaaauuugc

SEQ ID NO: 2777061 - RNA, 19 nt, Artificial Sequence
  Description of Artificial Sequence: Synthetic oligonucleotide
uuggcgcugaucuucgccu

SEQ ID NO: 2777062 - RNA, 19 nt, Artificial Sequence
  Description of Artificial Sequence: Synthetic oligonucleotide
gguucggcccaucaggcgg

SEQ ID NO: 2777063 - RNA, 19 nt, Artificial Sequence
  Description of Artificial Sequence: Synthetic oligonucleotide
gucgcuuuggcgcugaucu

SEQ ID NO: 2777064 - RNA, 19 nt, Artificial Sequence
  Description of Artificial Sequence: Synthetic oligonucleotide
ggggauuucggauuguuuc

SEQ ID NO: 2777065 - RNA, 19 nt, Artificial Sequence
  Description of Artificial Sequence: Synthetic oligonucleotide
ugcuucaaggauuccuccu

SEQ ID NO: 2777066 - RNA, 19 nt, Artificial Sequence
  Description of Artificial Sequence: Synthetic oligonucleotide
aguucccacaucauccagg

SEQ ID NO: 2777067 - RNA, 19 nt, Artificial Sequence
  Description of Artificial Sequence: Synthetic oligonucleotide
cuugucggaguugucaaug

SEQ ID NO: 2777068 - RNA, 19 nt, Artificial Sequence
  Description of Artificial Sequence: Synthetic oligonucleotide
uuagguggcucuuggcagu

SEQ ID NO: 2777069 - RNA, 19 nt, Artificial Sequence
  Description of Artificial Sequence: Synthetic oligonucleotide
ugcuggggauuucggauug

SEQ ID NO: 2777070 - RNA, 19 nt, Artificial Sequence
  Description of Artificial Sequence: Synthetic oligonucleotide
cuauaaucuucguggcgug

SEQ ID NO: 2777071 - RNA, 19 nt, Artificial Sequence
  Description of Artificial Sequence: Synthetic oligonucleotide
ucgacagugaggguucggc

SEQ ID NO: 2777072 - RNA, 19 nt, Artificial Sequence
  Description of Artificial Sequence: Synthetic oligonucleotide
uauaaucuucguggcgugc

SEQ ID NO: 2777073 - RNA, 19 nt, Artificial Sequence
  Description of Artificial Sequence: Synthetic oligonucleotide
acuuacugaccaccucguc

SEQ ID NO: 2777074 - RNA, 19 nt, Artificial Sequence
  Description of Artificial Sequence: Synthetic oligonucleotide
cacuucagaggaacacgcg

SEQ ID NO: 2777075 - RNA, 19 nt, Artificial Sequence
  Description of Artificial Sequence: Synthetic oligonucleotide
ggcuaauuaaauuugccgu

SEQ ID NO: 2777076 - RNA, 19 nt, Artificial Sequence
  Description of Artificial Sequence: Synthetic oligonucleotide
caggaacuuacugaccacc

SEQ ID NO: 2777077 - RNA, 19 nt, Artificial Sequence
  Description of Artificial Sequence: Synthetic oligonucleotide
gguccacuggcccaggcgg

SEQ ID NO: 2777078 - RNA, 19 nt, Artificial Sequence
  Description of Artificial Sequence: Synthetic oligonucleotide
acaaccgaucacuaucgau

SEQ ID NO: 2777079 - RNA, 19 nt, Artificial Sequence
  Description of Artificial Sequence: Synthetic oligonucleotide
cauguccuggcuguucugg

SEQ ID NO: 2777080 - RNA, 19 nt, Artificial Sequence
  Description of Artificial Sequence: Synthetic oligonucleotide
uuugggaccggcuccuuua

SEQ ID NO: 2777081 - RNA, 19 nt, Artificial Sequence
  Description of Artificial Sequence: Synthetic oligonucleotide
auaaucuucguggcgugcu

SEQ ID NO: 2777082 - RNA, 19 nt, Artificial Sequence
  Description of Artificial Sequence: Synthetic oligonucleotide
gucagguuuaauuccucuc

SEQ ID NO: 2777083 - RNA, 19 nt, Artificial Sequence
  Description of Artificial Sequence: Synthetic oligonucleotide
gggauuucggauuguuucc

SEQ ID NO: 2777084 - RNA, 19 nt, Artificial Sequence
  Description of Artificial Sequence: Synthetic oligonucleotide
uacuguggaucaucuccag

SEQ ID NO: 2777085 - RNA, 19 nt, Artificial Sequence
  Description of Artificial Sequence: Synthetic oligonucleotide
ucugccucauguccuggcu

SEQ ID NO: 2777086 - RNA, 19 nt, Artificial Sequence
  Description of Artificial Sequence: Synthetic oligonucleotide
aguugucaauguuccucag

SEQ ID NO: 2777087 - RNA, 19 nt, Artificial Sequence
  Description of Artificial Sequence: Synthetic oligonucleotide
acuaucgauugaaauuucu

SEQ ID NO: 2777088 - RNA, 19 nt, Artificial Sequence
  Description of Artificial Sequence: Synthetic oligonucleotide
cgauugaaauuucuggucc

SEQ ID NO: 2777089 - RNA, 19 nt, Artificial Sequence
  Description of Artificial Sequence: Synthetic oligonucleotide
cugaucuucgccugggcca

SEQ ID NO: 2777090 - RNA, 19 nt, Artificial Sequence
  Description of Artificial Sequence: Synthetic oligonucleotide
aacuuacugaccaccucgu

SEQ ID NO: 2777091 - RNA, 19 nt, Artificial Sequence
  Description of Artificial Sequence: Synthetic oligonucleotide
uugucggaguugucaaugu

SEQ ID NO: 2777092 - RNA, 19 nt, Artificial Sequence
  Description of Artificial Sequence: Synthetic oligonucleotide
cugaucuucaagagcacaa

SEQ ID NO: 2777093 - RNA, 19 nt, Artificial Sequence
  Description of Artificial Sequence: Synthetic oligonucleotide
acacgcgcuguagagggac

SEQ ID NO: 2777094 - RNA, 19 nt, Artificial Sequence
  Description of Artificial Sequence: Synthetic oligonucleotide
ugccucauguccuggcugu

SEQ ID NO: 2777095 - RNA, 19 nt, Artificial Sequence
  Description of Artificial Sequence: Synthetic oligonucleotide
uugggaccggcuccuuuag

SEQ ID NO: 2777096 - RNA, 19 nt, Artificial Sequence
  Description of Artificial Sequence: Synthetic oligonucleotide
uguucuggauacuguggau

SEQ ID NO: 2777097 - RNA, 19 nt, Artificial Sequence
  Description of Artificial Sequence: Synthetic oligonucleotide
guucuggauacuguggauc

SEQ ID NO: 2777098 - RNA, 19 nt, Artificial Sequence
  Description of Artificial Sequence: Synthetic oligonucleotide
gggaccggcuccuuuagag

SEQ ID NO: 2777099 - RNA, 19 nt, Artificial Sequence
  Description of Artificial Sequence: Synthetic oligonucleotide
cuucgccugggccaugagc

SEQ ID NO: 2777100 - RNA, 19 nt, Artificial Sequence
  Description of Artificial Sequence: Synthetic oligonucleotide
uuucuccgucacuaaucug

SEQ ID NO: 2777101 - RNA, 19 nt, Artificial Sequence
  Description of Artificial Sequence: Synthetic oligonucleotide
agaggaacacgcgcuguag

SEQ ID NO: 2777102 - RNA, 19 nt, Artificial Sequence
  Description of Artificial Sequence: Synthetic oligonucleotide
gucggaguugucaauguuc

SEQ ID NO: 2777103 - RNA, 19 nt, Artificial Sequence
  Description of Artificial Sequence: Synthetic oligonucleotide
cuccuuuagagugcucuag

SEQ ID NO: 2777104 - RNA, 19 nt, Artificial Sequence
  Description of Artificial Sequence: Synthetic oligonucleotide
ucuccaggaggauuucuuu

SEQ ID NO: 2777105 - RNA, 19 nt, Artificial Sequence
  Description of Artificial Sequence: Synthetic oligonucleotide
uaguaguuugauggccuug

SEQ ID NO: 2777106 - RNA, 19 nt, Artificial Sequence
  Description of Artificial Sequence: Synthetic oligonucleotide
agguuuaauuccucucuuu

SEQ ID NO: 2777107 - RNA, 19 nt, Artificial Sequence
  Description of Artificial Sequence: Synthetic oligonucleotide
cacugagaccucgacagug

SEQ ID NO: 2777108 - RNA, 19 nt, Artificial Sequence
  Description of Artificial Sequence: Synthetic oligonucleotide
ggaguugucaauguuccuc

SEQ ID NO: 2777109 - RNA, 19 nt, Artificial Sequence
  Description of Artificial Sequence: Synthetic oligonucleotide
uccugcuggggauuucgga

SEQ ID NO: 2777110 - RNA, 19 nt, Artificial Sequence
  Description of Artificial Sequence: Synthetic oligonucleotide
cuguagagggacauuaggu

SEQ ID NO: 2777111 - RNA, 19 nt, Artificial Sequence
  Description of Artificial Sequence: Synthetic oligonucleotide
cuucguggcgugcuucaag

SEQ ID NO: 2777112 - RNA, 19 nt, Artificial Sequence
  Description of Artificial Sequence: Synthetic oligonucleotide
uggcgugcuucaaggauuc

SEQ ID NO: 2777113 - RNA, 19 nt, Artificial Sequence
  Description of Artificial Sequence: Synthetic oligonucleotide
gcacaaccgaucacuaucg

SEQ ID NO: 2777114 - RNA, 19 nt, Artificial Sequence
  Description of Artificial Sequence: Synthetic oligonucleotide
uggcuguucuggauacugu

SEQ ID NO: 2777115 - RNA, 19 nt, Artificial Sequence
  Description of Artificial Sequence: Synthetic oligonucleotide
gucacuaaucugccucaug

SEQ ID NO: 2777116 - RNA, 19 nt, Artificial Sequence
  Description of Artificial Sequence: Synthetic oligonucleotide
cugagaccucgacagugag

SEQ ID NO: 2777117 - RNA, 19 nt, Artificial Sequence
  Description of Artificial Sequence: Synthetic oligonucleotide
gaggaacacgcgcuguaga

SEQ ID NO: 2777118 - RNA, 19 nt, Artificial Sequence
  Description of Artificial Sequence: Synthetic oligonucleotide
caggcggcacuucagagga

SEQ ID NO: 2777119 - RNA, 19 nt, Artificial Sequence
  Description of Artificial Sequence: Synthetic oligonucleotide
cuaaucugccucauguccu

SEQ ID NO: 2777120 - RNA, 19 nt, Artificial Sequence
  Description of Artificial Sequence: Synthetic oligonucleotide
cuggauacuguggaucauc

SEQ ID NO: 2777121 - RNA, 19 nt, Artificial Sequence
  Description of Artificial Sequence: Synthetic oligonucleotide
ugucggaguugucaauguu

SEQ ID NO: 2777122 - RNA, 19 nt, Artificial Sequence
  Description of Artificial Sequence: Synthetic oligonucleotide
cugcagaguuuugggaccg

SEQ ID NO: 2777123 - RNA, 19 nt, Artificial Sequence
  Description of Artificial Sequence: Synthetic oligonucleotide
cacuaucgauugaaauuuc

SEQ ID NO: 2777124 - RNA, 19 nt, Artificial Sequence
  Description of Artificial Sequence: Synthetic oligonucleotide
uguaagggcccguggguuu

SEQ ID NO: 2777125 - RNA, 19 nt, Artificial Sequence
  Description of Artificial Sequence: Synthetic oligonucleotide
ucuccagccgucucuugau

SEQ ID NO: 2777126 - RNA, 19 nt, Artificial Sequence
  Description of Artificial Sequence: Synthetic oligonucleotide
uggggauuucggauuguuu

SEQ ID NO: 2777127 - RNA, 19 nt, Artificial Sequence
  Description of Artificial Sequence: Synthetic oligonucleotide
caaccgaucacuaucgauu

SEQ ID NO: 2777128 - RNA, 19 nt, Artificial Sequence
  Description of Artificial Sequence: Synthetic oligonucleotide
gugcucuaguaguuugaug

SEQ ID NO: 2777129 - RNA, 19 nt, Artificial Sequence
  Description of Artificial Sequence: Synthetic oligonucleotide
accucgacagugaggguuc

SEQ ID NO: 2777130 - RNA, 19 nt, Artificial Sequence
  Description of Artificial Sequence: Synthetic oligonucleotide
ggaacacgcgcuguagagg

SEQ ID NO: 2777131 - RNA, 19 nt, Artificial Sequence
  Description of Artificial Sequence: Synthetic oligonucleotide
gguggcucuuggcaguucc

SEQ ID NO: 2777132 - RNA, 19 nt, Artificial Sequence
  Description of Artificial Sequence: Synthetic oligonucleotide
cuuucuccgucacuaaucu

SEQ ID NO: 2777133 - RNA, 19 nt, Artificial Sequence
  Description of Artificial Sequence: Synthetic oligonucleotide
accggcuccuuuagagugc

SEQ ID NO: 2777134 - RNA, 19 nt, Artificial Sequence
  Description of Artificial Sequence: Synthetic oligonucleotide
gcucuaguaguuugauggc

SEQ ID NO: 2777135 - RNA, 19 nt, Artificial Sequence
  Description of Artificial Sequence: Synthetic oligonucleotide
aggaacuuacugaccaccu

SEQ ID NO: 2777136 - RNA, 19 nt, Artificial Sequence
  Description of Artificial Sequence: Synthetic oligonucleotide
uccagccgucucuugauuu

SEQ ID NO: 2777137 - RNA, 19 nt, Artificial Sequence
  Description of Artificial Sequence: Synthetic oligonucleotide
uuuugggaccggcuccuuu

SEQ ID NO: 2777138 - RNA, 19 nt, Artificial Sequence
  Description of Artificial Sequence: Synthetic oligonucleotide
ucauguccuggcuguucug

SEQ ID NO: 2777139 - RNA, 19 nt, Artificial Sequence
  Description of Artificial Sequence: Synthetic oligonucleotide
caagagcacaaccgaucac

SEQ ID NO: 2777140 - RNA, 19 nt, Artificial Sequence
  Description of Artificial Sequence: Synthetic oligonucleotide
agcagugucuccagccguc

SEQ ID NO: 2777141 - RNA, 19 nt, Artificial Sequence
  Description of Artificial Sequence: Synthetic oligonucleotide
agugcucuaguaguuugau

SEQ ID NO: 2777142 - RNA, 19 nt, Artificial Sequence
  Description of Artificial Sequence: Synthetic oligonucleotide
uaaucuucguggcgugcuu

SEQ ID NO: 2777143 - RNA, 19 nt, Artificial Sequence
  Description of Artificial Sequence: Synthetic oligonucleotide
cuucagaggaacacgcgcu

SEQ ID NO: 2777144 - RNA, 19 nt, Artificial Sequence
  Description of Artificial Sequence: Synthetic oligonucleotide
guuugauggccuugucgga

SEQ ID NO: 2777145 - RNA, 19 nt, Artificial Sequence
  Description of Artificial Sequence: Synthetic oligonucleotide
uggcucuuggcaguuccca

SEQ ID NO: 2777146 - RNA, 19 nt, Artificial Sequence
  Description of Artificial Sequence: Synthetic oligonucleotide
ggguuugagggcuaauuaa

SEQ ID NO: 2777147 - RNA, 19 nt, Artificial Sequence
  Description of Artificial Sequence: Synthetic oligonucleotide
acugagaccucgacaguga

SEQ ID NO: 2777148 - RNA, 19 nt, Artificial Sequence
  Description of Artificial Sequence: Synthetic oligonucleotide
gcacuucagaggaacacgc

SEQ ID NO: 2777149 - RNA, 19 nt, Artificial Sequence
  Description of Artificial Sequence: Synthetic oligonucleotide
agucgcuuuggcgcugauc

SEQ ID NO: 2777150 - RNA, 19 nt, Artificial Sequence
  Description of Artificial Sequence: Synthetic oligonucleotide
gguuugagggcuaauuaaa

SEQ ID NO: 2777151 - RNA, 19 nt, Artificial Sequence
  Description of Artificial Sequence: Synthetic oligonucleotide
gucuccagccgucucuuga

SEQ ID NO: 2777152 - RNA, 19 nt, Artificial Sequence
  Description of Artificial Sequence: Synthetic oligonucleotide
cuccugcuggggauuucgg

SEQ ID NO: 2777153 - RNA, 19 nt, Artificial Sequence
  Description of Artificial Sequence: Synthetic oligonucleotide
ugaucuucgccugggccau

SEQ ID NO: 2777154 - RNA, 19 nt, Artificial Sequence
  Description of Artificial Sequence: Synthetic oligonucleotide
cugccucauguccuggcug

SEQ ID NO: 2777155 - RNA, 19 nt, Artificial Sequence
  Description of Artificial Sequence: Synthetic oligonucleotide
uuguaagggcccguggguu

SEQ ID NO: 2777156 - RNA, 19 nt, Artificial Sequence
  Description of Artificial Sequence: Synthetic oligonucleotide
ugcagaguuuugggaccgg

SEQ ID NO: 2777157 - RNA, 19 nt, Artificial Sequence
  Description of Artificial Sequence: Synthetic oligonucleotide
uagagugcucuaguaguuu

SEQ ID NO: 2777158 - RNA, 19 nt, Artificial Sequence
  Description of Artificial Sequence: Synthetic oligonucleotide
cagucagguuuaauuccuc

SEQ ID NO: 2777159 - RNA, 19 nt, Artificial Sequence
  Description of Artificial Sequence: Synthetic oligonucleotide
ucguggcgugcuucaagga

SEQ ID NO: 2777160 - RNA, 19 nt, Artificial Sequence
  Description of Artificial Sequence: Synthetic oligonucleotide
guaguuugauggccuuguc

SEQ ID NO: 2777161 - RNA, 19 nt, Artificial Sequence
  Description of Artificial Sequence: Synthetic oligonucleotide
ucuucgccugggccaugag

SEQ ID NO: 2777162 - RNA, 19 nt, Artificial Sequence
  Description of Artificial Sequence: Synthetic oligonucleotide
uggcgcugaucuucgccug

SEQ ID NO: 2777163 - RNA, 19 nt, Artificial Sequence
  Description of Artificial Sequence: Synthetic oligonucleotide
cgucuauaaucuucguggc

SEQ ID NO: 2777164 - RNA, 19 nt, Artificial Sequence
  Description of Artificial Sequence: Synthetic oligonucleotide
ccguccauguucugcagag

SEQ ID NO: 2777165 - RNA, 19 nt, Artificial Sequence
  Description of Artificial Sequence: Synthetic oligonucleotide
accgaucacuaucgauuga

SEQ ID NO: 2777166 - RNA, 19 nt, Artificial Sequence
  Description of Artificial Sequence: Synthetic oligonucleotide
ugccguccauguucugcag

SEQ ID NO: 2777167 - RNA, 19 nt, Artificial Sequence
  Description of Artificial Sequence: Synthetic oligonucleotide
caacagcagucgcuuuggc

SEQ ID NO: 2777168 - RNA, 19 nt, Artificial Sequence
  Description of Artificial Sequence: Synthetic oligonucleotide
gauggccuugucggaguug

SEQ ID NO: 2777169 - RNA, 19 nt, Artificial Sequence
  Description of Artificial Sequence: Synthetic oligonucleotide
cuuuggcgcugaucuucgc

SEQ ID NO: 2777170 - RNA, 19 nt, Artificial Sequence
  Description of Artificial Sequence: Synthetic oligonucleotide
ugaccaccucgucuauaau

SEQ ID NO: 2777171 - RNA, 19 nt, Artificial Sequence
  Description of Artificial Sequence: Synthetic oligonucleotide
guaagggcccguggguuug

SEQ ID NO: 2777172 - RNA, 19 nt, Artificial Sequence
  Description of Artificial Sequence: Synthetic oligonucleotide
ugggaccggcuccuuuaga

SEQ ID NO: 2777173 - RNA, 19 nt, Artificial Sequence
  Description of Artificial Sequence: Synthetic oligonucleotide
agagggacauuagguggcu

SEQ ID NO: 2777174 - RNA, 19 nt, Artificial Sequence
  Description of Artificial Sequence: Synthetic oligonucleotide
gcuuuggcgcugaucuucg

SEQ ID NO: 2777175 - RNA, 19 nt, Artificial Sequence
  Description of Artificial Sequence: Synthetic oligonucleotide
ucuggauacuguggaucau

SEQ ID NO: 2777176 - RNA, 19 nt, Artificial Sequence
  Description of Artificial Sequence: Synthetic oligonucleotide
cuucaagagcacaaccgau

SEQ ID NO: 2777177 - RNA, 19 nt, Artificial Sequence
  Description of Artificial Sequence: Synthetic oligonucleotide
ucuuggcaguucccacauc

SEQ ID NO: 2777178 - RNA, 19 nt, Artificial Sequence
  Description of Artificial Sequence: Synthetic oligonucleotide
guuugagggcuaauuaaau

SEQ ID NO: 2777179 - RNA, 19 nt, Artificial Sequence
  Description of Artificial Sequence: Synthetic oligonucleotide
gugaggguucggcccauca

SEQ ID NO: 2777180 - RNA, 19 nt, Artificial Sequence
  Description of Artificial Sequence: Synthetic oligonucleotide
auuugccguccauguucug

SEQ ID NO: 2777181 - RNA, 19 nt, Artificial Sequence
  Description of Artificial Sequence: Synthetic oligonucleotide
uacugaccaccucgucuau

SEQ ID NO: 2777182 - RNA, 19 nt, Artificial Sequence
  Description of Artificial Sequence: Synthetic oligonucleotide
ggguucggcccaucaggcg

SEQ ID NO: 2777183 - RNA, 19 nt, Artificial Sequence
  Description of Artificial Sequence: Synthetic oligonucleotide
uccacuggcccaggcggca

SEQ ID NO: 2777184 - RNA, 19 nt, Artificial Sequence
  Description of Artificial Sequence: Synthetic oligonucleotide
gcucuuggcaguucccaca

SEQ ID NO: 2777185 - RNA, 19 nt, Artificial Sequence
  Description of Artificial Sequence: Synthetic oligonucleotide
cucauguccuggcuguucu

SEQ ID NO: 2777186 - RNA, 19 nt, Artificial Sequence
  Description of Artificial Sequence: Synthetic oligonucleotide
cucgacagugaggguucgg

SEQ ID NO: 2777187 - RNA, 19 nt, Artificial Sequence
  Description of Artificial Sequence: Synthetic oligonucleotide
agagcacaaccgaucacua

SEQ ID NO: 2777188 - RNA, 19 nt, Artificial Sequence
  Description of Artificial Sequence: Synthetic oligonucleotide
cugggccaugagcuccggg

SEQ ID NO: 2777189 - RNA, 19 nt, Artificial Sequence
  Description of Artificial Sequence: Synthetic oligonucleotide
cccaucaggcgguuugcag

SEQ ID NO: 2777190 - RNA, 19 nt, Artificial Sequence
  Description of Artificial Sequence: Synthetic oligonucleotide
gcgguuugcagucagguuu

SEQ ID NO: 2777191 - RNA, 19 nt, Artificial Sequence
  Description of Artificial Sequence: Synthetic oligonucleotide
ccgucucuugauuuucuuc

SEQ ID NO: 2777192 - RNA, 19 nt, Artificial Sequence
  Description of Artificial Sequence: Synthetic oligonucleotide
ggauuccuccugcugggga

SEQ ID NO: 2777193 - RNA, 19 nt, Artificial Sequence
  Description of Artificial Sequence: Synthetic oligonucleotide
ggcucuuggcaguucccac

SEQ ID NO: 2777194 - RNA, 19 nt, Artificial Sequence
  Description of Artificial Sequence: Synthetic oligonucleotide
gaccucgacagugaggguu

SEQ ID NO: 2777195 - RNA, 19 nt, Artificial Sequence
  Description of Artificial Sequence: Synthetic oligonucleotide
ggcggcacuucagaggaac

SEQ ID NO: 2777196 - RNA, 19 nt, Artificial Sequence
  Description of Artificial Sequence: Synthetic oligonucleotide
ggacauuagguggcucuug

SEQ ID NO: 2777197 - RNA, 19 nt, Artificial Sequence
  Description of Artificial Sequence: Synthetic oligonucleotide
aacacgcgcuguagaggga

SEQ ID NO: 2777198 - RNA, 19 nt, Artificial Sequence
  Description of Artificial Sequence: Synthetic oligonucleotide
aagggcccguggguuugag

SEQ ID NO: 2777199 - RNA, 19 nt, Artificial Sequence
  Description of Artificial Sequence: Synthetic oligonucleotide
caggaggauuucuuucucu

SEQ ID NO: 2777200 - RNA, 19 nt, Artificial Sequence
  Description of Artificial Sequence: Synthetic oligonucleotide
cagaguuuugggaccggcu

SEQ ID NO: 2777201 - RNA, 19 nt, Artificial Sequence
  Description of Artificial Sequence: Synthetic oligonucleotide
gcagaguuuugggaccggc

SEQ ID NO: 2777202 - RNA, 19 nt, Artificial Sequence
  Description of Artificial Sequence: Synthetic oligonucleotide
ccaggaacuuacugaccac

SEQ ID NO: 2777203 - RNA, 19 nt, Artificial Sequence
  Description of Artificial Sequence: Synthetic oligonucleotide
cacaaccgaucacuaucga

SEQ ID NO: 2777204 - RNA, 19 nt, Artificial Sequence
  Description of Artificial Sequence: Synthetic oligonucleotide
agugaggguucggcccauc

SEQ ID NO: 2777205 - RNA, 19 nt, Artificial Sequence
  Description of Artificial Sequence: Synthetic oligonucleotide
ggccuugucggaguuguca

SEQ ID NO: 2777206 - RNA, 19 nt, Artificial Sequence
  Description of Artificial Sequence: Synthetic oligonucleotide
guggcucuuggcaguuccc

SEQ ID NO: 2777207 - RNA, 19 nt, Artificial Sequence
  Description of Artificial Sequence: Synthetic oligonucleotide
ccuccugcuggggauuucg

SEQ ID NO: 2777208 - RNA, 19 nt, Artificial Sequence
  Description of Artificial Sequence: Synthetic oligonucleotide
cagccgucucuugauuuuc

SEQ ID NO: 2777209 - RNA, 19 nt, Artificial Sequence
  Description of Artificial Sequence: Synthetic oligonucleotide
agaccucgacagugagggu

SEQ ID NO: 2777210 - RNA, 19 nt, Artificial Sequence
  Description of Artificial Sequence: Synthetic oligonucleotide
gagcacaaccgaucacuau

SEQ ID NO: 2777211 - RNA, 19 nt, Artificial Sequence
  Description of Artificial Sequence: Synthetic oligonucleotide
cagaggaacacgcgcugua

SEQ ID NO: 2777212 - RNA, 19 nt, Artificial Sequence
  Description of Artificial Sequence: Synthetic oligonucleotide
agccgucucuugauuuucu

SEQ ID NO: 2777213 - RNA, 19 nt, Artificial Sequence
  Description of Artificial Sequence: Synthetic oligonucleotide
ggcuccuuuagagugcucu

SEQ ID NO: 2777214 - RNA, 19 nt, Artificial Sequence
  Description of Artificial Sequence: Synthetic oligonucleotide
cgacagugaggguucggcc

SEQ ID NO: 2777215 - RNA, 19 nt, Artificial Sequence
  Description of Artificial Sequence: Synthetic oligonucleotide
gagggacauuagguggcuc

SEQ ID NO: 2777216 - RNA, 19 nt, Artificial Sequence
  Description of Artificial Sequence: Synthetic oligonucleotide
cccaggcggcacuucagag

SEQ ID NO: 2777217 - RNA, 19 nt, Artificial Sequence
  Description of Artificial Sequence: Synthetic oligonucleotide
gccuugucggaguugucaa

SEQ ID NO: 2777218 - RNA, 19 nt, Artificial Sequence
  Description of Artificial Sequence: Synthetic oligonucleotide
ccaggaggauuucuuucuc

SEQ ID NO: 2777219 - RNA, 19 nt, Artificial Sequence
  Description of Artificial Sequence: Synthetic oligonucleotide
cagugucuccagccgucuc

SEQ ID NO: 2777220 - RNA, 19 nt, Artificial Sequence
  Description of Artificial Sequence: Synthetic oligonucleotide
ccuuuagagugcucuagua

SEQ ID NO: 2777221 - RNA, 19 nt, Artificial Sequence
  Description of Artificial Sequence: Synthetic oligonucleotide
uaagggcccguggguuuga

SEQ ID NO: 2777222 - RNA, 19 nt, Artificial Sequence
  Description of Artificial Sequence: Synthetic oligonucleotide
cuaguaguuugauggccuu

SEQ ID NO: 2777223 - RNA, 19 nt, Artificial Sequence
  Description of Artificial Sequence: Synthetic oligonucleotide
guccacuggcccaggcggc

SEQ ID NO: 2777224 - RNA, 19 nt, Artificial Sequence
  Description of Artificial Sequence: Synthetic oligonucleotide
ucgcuuuggcgcugaucuu

SEQ ID NO: 2777225 - RNA, 19 nt, Artificial Sequence
  Description of Artificial Sequence: Synthetic oligonucleotide
agguggcucuuggcaguuc

SEQ ID NO: 2777226 - RNA, 19 nt, Artificial Sequence
  Description of Artificial Sequence: Synthetic oligonucleotide
cagguuuaauuccucucuu

SEQ ID NO: 2777227 - RNA, 19 nt, Artificial Sequence
  Description of Artificial Sequence: Synthetic oligonucleotide
acugaccaccucgucuaua

SEQ ID NO: 2777228 - RNA, 19 nt, Artificial Sequence
  Description of Artificial Sequence: Synthetic oligonucleotide
gcagucagguuuaauuccu

SEQ ID NO: 2777229 - RNA, 19 nt, Artificial Sequence
  Description of Artificial Sequence: Synthetic oligonucleotide
ccgaucacuaucgauugaa

SEQ ID NO: 2777230 - RNA, 19 nt, Artificial Sequence
  Description of Artificial Sequence: Synthetic oligonucleotide
acgcgcuguagagggacau

SEQ ID NO: 2777231 - RNA, 19 nt, Artificial Sequence
  Description of Artificial Sequence: Synthetic oligonucleotide
gcgcugaucuucgccuggg

SEQ ID NO: 2777232 - RNA, 19 nt, Artificial Sequence
  Description of Artificial Sequence: Synthetic oligonucleotide
cacgcgcuguagagggaca

SEQ ID NO: 2777233 - RNA, 19 nt, Artificial Sequence
  Description of Artificial Sequence: Synthetic oligonucleotide
ccgucacuaaucugccuca

SEQ ID NO: 2777234 - RNA, 19 nt, Artificial Sequence
  Description of Artificial Sequence: Synthetic oligonucleotide
guggcgugcuucaaggauu

SEQ ID NO: 2777235 - RNA, 19 nt, Artificial Sequence
  Description of Artificial Sequence: Synthetic oligonucleotide
gccguccauguucugcaga

SEQ ID NO: 2777236 - RNA, 19 nt, Artificial Sequence
  Description of Artificial Sequence: Synthetic oligonucleotide
cggauuguuuccacugaga

SEQ ID NO: 2777237 - RNA, 19 nt, Artificial Sequence
  Description of Artificial Sequence: Synthetic oligonucleotide
gcgcuguagagggacauua

SEQ ID NO: 2777238 - RNA, 19 nt, Artificial Sequence
  Description of Artificial Sequence: Synthetic oligonucleotide
ggcccaucaggcgguuugc

SEQ ID NO: 2777239 - RNA, 19 nt, Artificial Sequence
  Description of Artificial Sequence: Synthetic oligonucleotide
cgcuuuggcgcugaucuuc

SEQ ID NO: 2777240 - RNA, 19 nt, Artificial Sequence
  Description of Artificial Sequence: Synthetic oligonucleotide
gcccaggcggcacuucaga

SEQ ID NO: 2777241 - RNA, 19 nt, Artificial Sequence
  Description of Artificial Sequence: Synthetic oligonucleotide
guuugcagucagguuuaau

SEQ ID NO: 2777242 - RNA, 19 nt, Artificial Sequence
  Description of Artificial Sequence: Synthetic oligonucleotide
gcgugcuucaaggauuccu

SEQ ID NO: 2777243 - RNA, 19 nt, Artificial Sequence
  Description of Artificial Sequence: Synthetic oligonucleotide
ccucauguccuggcuguuc

SEQ ID NO: 2777244 - RNA, 19 nt, Artificial Sequence
  Description of Artificial Sequence: Synthetic oligonucleotide
cggcccaucaggcgguuug

SEQ ID NO: 2777245 - RNA, 19 nt, Artificial Sequence
  Description of Artificial Sequence: Synthetic oligonucleotide
ggcccaggcggcacuucag

SEQ ID NO: 2777246 - RNA, 19 nt, Artificial Sequence
  Description of Artificial Sequence: Synthetic oligonucleotide
cgaucacuaucgauugaaa

SEQ ID NO: 2777247 - RNA, 19 nt, Artificial Sequence
  Description of Artificial Sequence: Synthetic oligonucleotide
cuccgucacuaaucugccu

SEQ ID NO: 2777248 - RNA, 19 nt, Artificial Sequence
  Description of Artificial Sequence: Synthetic oligonucleotide
guucggcccaucaggcggu

SEQ ID NO: 2777249 - RNA, 19 nt, Artificial Sequence
  Description of Artificial Sequence: Synthetic oligonucleotide
ccucgacagugaggguucg

SEQ ID NO: 2777250 - RNA, 19 nt, Artificial Sequence
  Description of Artificial Sequence: Synthetic oligonucleotide
ggcgugcuucaaggauucc

SEQ ID NO: 2777251 - RNA, 19 nt, Artificial Sequence
  Description of Artificial Sequence: Synthetic oligonucleotide
cgcugaucuucgccugggc

SEQ ID NO: 2777252 - RNA, 19 nt, Artificial Sequence
  Description of Artificial Sequence: Synthetic oligonucleotide
cuggggauuucggauuguu

SEQ ID NO: 2777253 - RNA, 19 nt, Artificial Sequence
  Description of Artificial Sequence: Synthetic oligonucleotide
gcggcacuucagaggaaca

SEQ ID NO: 2777254 - RNA, 19 nt, Artificial Sequence
  Description of Artificial Sequence: Synthetic oligonucleotide
uucggcccaucaggcgguu

SEQ ID NO: 2777255 - RNA, 19 nt, Artificial Sequence
  Description of Artificial Sequence: Synthetic oligonucleotide
cgguuugcagucagguuua

SEQ ID NO: 2777256 - RNA, 19 nt, Artificial Sequence
  Description of Artificial Sequence: Synthetic oligonucleotide
ucggcccaucaggcgguuu

SEQ ID NO: 2777257 - RNA, 19 nt, Artificial Sequence
  Description of Artificial Sequence: Synthetic oligonucleotide
gguuugcagucagguuuaa

SEQ ID NO: 2777258 - RNA, 19 nt, Artificial Sequence
  Description of Artificial Sequence: Synthetic oligonucleotide
gcagucgcuuuggcgcuga

SEQ ID NO: 2777259 - RNA, 19 nt, Artificial Sequence
  Description of Artificial Sequence: Synthetic oligonucleotide
gcccguggguuugagggcu

SEQ ID NO: 2777260 - RNA, 19 nt, Artificial Sequence
  Description of Artificial Sequence: Synthetic oligonucleotide
cuccagccgucucuugauu

SEQ ID NO: 2777261 - RNA, 19 nt, Artificial Sequence
  Description of Artificial Sequence: Synthetic oligonucleotide
gccgucucuugauuuucuu

SEQ ID NO: 2777262 - RNA, 19 nt, Artificial Sequence
  Description of Artificial Sequence: Synthetic oligonucleotide
cguggcgugcuucaaggau

SEQ ID NO: 2777263 - RNA, 19 nt, Artificial Sequence
  Description of Artificial Sequence: Synthetic oligonucleotide
cacuggcccaggcggcacu

SEQ ID NO: 2777264 - RNA, 19 nt, Artificial Sequence
  Description of Artificial Sequence: Synthetic oligonucleotide
ccugggccaugagcuccgg

SEQ ID NO: 2777265 - RNA, 19 nt, Artificial Sequence
  Description of Artificial Sequence: Synthetic oligonucleotide
ccagccgucucuugauuuu

SEQ ID NO: 2777266 - RNA, 19 nt, Artificial Sequence
  Description of Artificial Sequence: Synthetic oligonucleotide
ccucgucuauaaucuucgu

SEQ ID NO: 2777267 - RNA, 19 nt, Artificial Sequence
  Description of Artificial Sequence: Synthetic oligonucleotide
aggcggcacuucagaggaa

SEQ ID NO: 2777268 - RNA, 19 nt, Artificial Sequence
  Description of Artificial Sequence: Synthetic oligonucleotide
ccuugucggaguugucaau

SEQ ID NO: 2777269 - RNA, 19 nt, Artificial Sequence
  Description of Artificial Sequence: Synthetic oligonucleotide
ccacuggcccaggcggcac

SEQ ID NO: 2777270 - RNA, 19 nt, Artificial Sequence
  Description of Artificial Sequence: Synthetic oligonucleotide
guuuugggaccggcuccuu

SEQ ID NO: 2777271 - RNA, 19 nt, Artificial Sequence
  Description of Artificial Sequence: Synthetic oligonucleotide
ccacugagaccucgacagu

SEQ ID NO: 2777272 - RNA, 19 nt, Artificial Sequence
  Description of Artificial Sequence: Synthetic oligonucleotide
gcuggggauuucggauugu

SEQ ID NO: 2777273 - RNA, 19 nt, Artificial Sequence
  Description of Artificial Sequence: Synthetic oligonucleotide
cggaguugucaauguuccu

SEQ ID NO: 2777274 - RNA, 19 nt, Artificial Sequence
  Description of Artificial Sequence: Synthetic oligonucleotide
ccggcuccuuuagagugcu

SEQ ID NO: 2777275 - RNA, 19 nt, Artificial Sequence
  Description of Artificial Sequence: Synthetic oligonucleotide
ccaccucgucuauaaucuu

SEQ ID NO: 2777276 - RNA, 19 nt, Artificial Sequence
  Description of Artificial Sequence: Synthetic oligonucleotide
cccguggguuugagggcua

SEQ ID NO: 2777277 - RNA, 19 nt, Artificial Sequence
  Description of Artificial Sequence: Synthetic oligonucleotide
ccguggguuugagggcuaa

SEQ ID NO: 2777278 - RNA, 19 nt, Artificial Sequence
  Description of Artificial Sequence: Synthetic oligonucleotide
cagucgcuuuggcgcugau

SEQ ID NO: 2777279 - RNA, 19 nt, Artificial Sequence
  Description of Artificial Sequence: Synthetic oligonucleotide
cggcuccuuuagagugcuc

SEQ ID NO: 2777280 - RNA, 19 nt, Artificial Sequence
  Description of Artificial Sequence: Synthetic oligonucleotide
cgucacuaaucugccucau

SEQ ID NO: 2777281 - RNA, 19 nt, Artificial Sequence
  Description of Artificial Sequence: Synthetic oligonucleotide
gccucauguccuggcuguu

SEQ ID NO: 2777282 - RNA, 19 nt, Artificial Sequence
  Description of Artificial Sequence: Synthetic oligonucleotide
cguggguuugagggcuaau

SEQ ID NO: 2777283 - RNA, 19 nt, Artificial Sequence
  Description of Artificial Sequence: Synthetic oligonucleotide
cgcgcuguagagggacauu

SEQ ID NO: 2777284 - RNA, 19 nt, Artificial Sequence
  Description of Artificial Sequence: Synthetic oligonucleotide
cugaagaacaucugaagcg

SEQ ID NO: 2777285 - RNA, 19 nt, Artificial Sequence
  Description of Artificial Sequence: Synthetic oligonucleotide
ucugagauggcgauggagc

SEQ ID NO: 2777286 - RNA, 19 nt, Artificial Sequence
  Description of Artificial Sequence: Synthetic oligonucleotide
uggacgugaagaaaaggcg

SEQ ID NO: 2777287 - RNA, 19 nt, Artificial Sequence
  Description of Artificial Sequence: Synthetic oligonucleotide
guuggguccccauugaugg

SEQ ID NO: 2777288 - RNA, 19 nt, Artificial Sequence
  Description of Artificial Sequence: Synthetic oligonucleotide
ugaagaacaucugaagcgg

SEQ ID NO: 2777289 - RNA, 19 nt, Artificial Sequence
  Description of Artificial Sequence: Synthetic oligonucleotide
cucauucccauccucaucg

SEQ ID NO: 2777290 - RNA, 19 nt, Artificial Sequence
  Description of Artificial Sequence: Synthetic oligonucleotide
aguggucugaagcucauuc

SEQ ID NO: 2777291 - RNA, 19 nt, Artificial Sequence
  Description of Artificial Sequence: Synthetic oligonucleotide
auggacgugaagaaaaggc

SEQ ID NO: 2777292 - RNA, 19 nt, Artificial Sequence
  Description of Artificial Sequence: Synthetic oligonucleotide
aaaggcggaagccauccuc

SEQ ID NO: 2777293 - RNA, 19 nt, Artificial Sequence
  Description of Artificial Sequence: Synthetic oligonucleotide
uuccacacuucugagaugg

SEQ ID NO: 2777294 - RNA, 19 nt, Artificial Sequence
  Description of Artificial Sequence: Synthetic oligonucleotide
cuucucauggccuccaggg

SEQ ID NO: 2777295 - RNA, 19 nt, Artificial Sequence
  Description of Artificial Sequence: Synthetic oligonucleotide
uccagccaaguuaauaucc

SEQ ID NO: 2777296 - RNA, 19 nt, Artificial Sequence
  Description of Artificial Sequence: Synthetic oligonucleotide
auugauggugucugccucc

SEQ ID NO: 2777297 - RNA, 19 nt, Artificial Sequence
  Description of Artificial Sequence: Synthetic oligonucleotide
uuaauauccgccuccuucu

SEQ ID NO: 2777298 - RNA, 19 nt, Artificial Sequence
  Description of Artificial Sequence: Synthetic oligonucleotide
guuaauauccgccuccuuc

SEQ ID NO: 2777299 - RNA, 19 nt, Artificial Sequence
  Description of Artificial Sequence: Synthetic oligonucleotide
uucaccucucgccugaggc

SEQ ID NO: 2777300 - RNA, 19 nt, Artificial Sequence
  Description of Artificial Sequence: Synthetic oligonucleotide
acuucugagauggcgaugg

SEQ ID NO: 2777301 - RNA, 19 nt, Artificial Sequence
  Description of Artificial Sequence: Synthetic oligonucleotide
uggucugaagcucauuccc

SEQ ID NO: 2777302 - RNA, 19 nt, Artificial Sequence
  Description of Artificial Sequence: Synthetic oligonucleotide
auauccgccuccuucuugg

SEQ ID NO: 2777303 - RNA, 19 nt, Artificial Sequence
  Description of Artificial Sequence: Synthetic oligonucleotide
auucccauccucaucgugc

SEQ ID NO: 2777304 - RNA, 19 nt, Artificial Sequence
  Description of Artificial Sequence: Synthetic oligonucleotide
ugacuccugaagaacaucu

SEQ ID NO: 2777305 - RNA, 19 nt, Artificial Sequence
  Description of Artificial Sequence: Synthetic oligonucleotide
caaguuaauauccgccucc

SEQ ID NO: 2777306 - RNA, 19 nt, Artificial Sequence
  Description of Artificial Sequence: Synthetic oligonucleotide
uucuuggccacauaggcuc

SEQ ID NO: 2777307 - RNA, 19 nt, Artificial Sequence
  Description of Artificial Sequence: Synthetic oligonucleotide
uuuucaacuucuucuccgc

SEQ ID NO: 2777308 - RNA, 19 nt, Artificial Sequence
  Description of Artificial Sequence: Synthetic oligonucleotide
auccucaucgugcugguuc

SEQ ID NO: 2777309 - RNA, 19 nt, Artificial Sequence
  Description of Artificial Sequence: Synthetic oligonucleotide
ucacugucuucacugcugg

SEQ ID NO: 2777310 - RNA, 19 nt, Artificial Sequence
  Description of Artificial Sequence: Synthetic oligonucleotide
aagaacaucugaagcggac

SEQ ID NO: 2777311 - RNA, 19 nt, Artificial Sequence
  Description of Artificial Sequence: Synthetic oligonucleotide
cugaagcucauucccaucc

SEQ ID NO: 2777312 - RNA, 19 nt, Artificial Sequence
  Description of Artificial Sequence: Synthetic oligonucleotide
ucuguaccucggcaggucg

SEQ ID NO: 2777313 - RNA, 19 nt, Artificial Sequence
  Description of Artificial Sequence: Synthetic oligonucleotide
agccaaguuaauauccgcc

SEQ ID NO: 2777314 - RNA, 19 nt, Artificial Sequence
  Description of Artificial Sequence: Synthetic oligonucleotide
auggcucccagcuucuugg

SEQ ID NO: 2777315 - RNA, 19 nt, Artificial Sequence
  Description of Artificial Sequence: Synthetic oligonucleotide
uguggcuccagccaaguua

SEQ ID NO: 2777316 - RNA, 19 nt, Artificial Sequence
  Description of Artificial Sequence: Synthetic oligonucleotide
aauauccgccuccuucuug

SEQ ID NO: 2777317 - RNA, 19 nt, Artificial Sequence
  Description of Artificial Sequence: Synthetic oligonucleotide
auaggcucggaacucagga

SEQ ID NO: 2777318 - RNA, 19 nt, Artificial Sequence
  Description of Artificial Sequence: Synthetic oligonucleotide
ucaggaguggucugaagcu

SEQ ID NO: 2777319 - RNA, 19 nt, Artificial Sequence
  Description of Artificial Sequence: Synthetic oligonucleotide
gaaaaggcggaagccaucc

SEQ ID NO: 2777320 - RNA, 19 nt, Artificial Sequence
  Description of Artificial Sequence: Synthetic oligonucleotide
uuucggagaagcuuccuuc

SEQ ID NO: 2777321 - RNA, 19 nt, Artificial Sequence
  Description of Artificial Sequence: Synthetic oligonucleotide
ucugaagcggacacagcug

SEQ ID NO: 2777322 - RNA, 19 nt, Artificial Sequence
  Description of Artificial Sequence: Synthetic oligonucleotide
acaucugaagcggacacag

SEQ ID NO: 2777323 - RNA, 19 nt, Artificial Sequence
  Description of Artificial Sequence: Synthetic oligonucleotide
gauggacgugaagaaaagg

SEQ ID NO: 2777324 - RNA, 19 nt, Artificial Sequence
  Description of Artificial Sequence: Synthetic oligonucleotide
gaacaucugaagcggacac

SEQ ID NO: 2777325 - RNA, 19 nt, Artificial Sequence
  Description of Artificial Sequence: Synthetic oligonucleotide
uccuucuguaccucggcag

SEQ ID NO: 2777326 - RNA, 19 nt, Artificial Sequence
  Description of Artificial Sequence: Synthetic oligonucleotide
acuccugaagaacaucuga

SEQ ID NO: 2777327 - RNA, 19 nt, Artificial Sequence
  Description of Artificial Sequence: Synthetic oligonucleotide
uucaacuucuucuccgccu

SEQ ID NO: 2777328 - RNA, 19 nt, Artificial Sequence
  Description of Artificial Sequence: Synthetic oligonucleotide
ugcugguucaccucucgcc

SEQ ID NO: 2777329 - RNA, 19 nt, Artificial Sequence
  Description of Artificial Sequence: Synthetic oligonucleotide
cugaagcggacacagcugc

SEQ ID NO: 2777330 - RNA, 19 nt, Artificial Sequence
  Description of Artificial Sequence: Synthetic oligonucleotide
ucaacuucuucuccgccuc

SEQ ID NO: 2777331 - RNA, 19 nt, Artificial Sequence
  Description of Artificial Sequence: Synthetic oligonucleotide
ugaucccaagcgacguugg

SEQ ID NO: 2777332 - RNA, 19 nt, Artificial Sequence
  Description of Artificial Sequence: Synthetic oligonucleotide
agcuguccagcauggcucc

SEQ ID NO: 2777333 - RNA, 19 nt, Artificial Sequence
  Description of Artificial Sequence: Synthetic oligonucleotide
ccugaagaacaucugaagc

SEQ ID NO: 2777334 - RNA, 19 nt, Artificial Sequence
  Description of Artificial Sequence: Synthetic oligonucleotide
uuuugaucccaagcgacgu

SEQ ID NO: 2777335 - RNA, 19 nt, Artificial Sequence
  Description of Artificial Sequence: Synthetic oligonucleotide
aagcggacacagcugccuc

SEQ ID NO: 2777336 - RNA, 19 nt, Artificial Sequence
  Description of Artificial Sequence: Synthetic oligonucleotide
aggguuucggagaagcuuc

SEQ ID NO: 2777337 - RNA, 19 nt, Artificial Sequence
  Description of Artificial Sequence: Synthetic oligonucleotide
ucaucgugcugguucaccu

SEQ ID NO: 2777338 - RNA, 19 nt, Artificial Sequence
  Description of Artificial Sequence: Synthetic oligonucleotide
auggcgauggagcugucca

SEQ ID NO: 2777339 - RNA, 19 nt, Artificial Sequence
  Description of Artificial Sequence: Synthetic oligonucleotide
aaguuaauauccgccuccu

SEQ ID NO: 2777340 - RNA, 19 nt, Artificial Sequence
  Description of Artificial Sequence: Synthetic oligonucleotide
ucuuggccacauaggcucg

SEQ ID NO: 2777341 - RNA, 19 nt, Artificial Sequence
  Description of Artificial Sequence: Synthetic oligonucleotide
cugucuucacugcuggagc

SEQ ID NO: 2777342 - RNA, 19 nt, Artificial Sequence
  Description of Artificial Sequence: Synthetic oligonucleotide
uucugagauggcgauggag

SEQ ID NO: 2777343 - RNA, 19 nt, Artificial Sequence
  Description of Artificial Sequence: Synthetic oligonucleotide
uucggcaggguuucggaga

SEQ ID NO: 2777344 - RNA, 19 nt, Artificial Sequence
  Description of Artificial Sequence: Synthetic oligonucleotide
uugaucccaagcgacguug

SEQ ID NO: 2777345 - RNA, 19 nt, Artificial Sequence
  Description of Artificial Sequence: Synthetic oligonucleotide
uucggagaagcuuccuucu

SEQ ID NO: 2777346 - RNA, 19 nt, Artificial Sequence
  Description of Artificial Sequence: Synthetic oligonucleotide
aagaaaaggcggaagccau

SEQ ID NO: 2777347 - RNA, 19 nt, Artificial Sequence
  Description of Artificial Sequence: Synthetic oligonucleotide
uuucggcaggguuucggag

SEQ ID NO: 2777348 - RNA, 19 nt, Artificial Sequence
  Description of Artificial Sequence: Synthetic oligonucleotide
ggacgugaagaaaaggcgg

SEQ ID NO: 2777349 - RNA, 19 nt, Artificial Sequence
  Description of Artificial Sequence: Synthetic oligonucleotide
ucccaagcgacguuggguc

SEQ ID NO: 2777350 - RNA, 19 nt, Artificial Sequence
  Description of Artificial Sequence: Synthetic oligonucleotide
uucuuccacacuucugaga

SEQ ID NO: 2777351 - RNA, 19 nt, Artificial Sequence
  Description of Artificial Sequence: Synthetic oligonucleotide
gacacagcugccucucggc

SEQ ID NO: 2777352 - RNA, 19 nt, Artificial Sequence
  Description of Artificial Sequence: Synthetic oligonucleotide
ucugccaccugccgcaccu

SEQ ID NO: 2777353 - RNA, 19 nt, Artificial Sequence
  Description of Artificial Sequence: Synthetic oligonucleotide
aggcucggaacucaggagu

SEQ ID NO: 2777354 - RNA, 19 nt, Artificial Sequence
  Description of Artificial Sequence: Synthetic oligonucleotide
guauggcugacuccugaag

SEQ ID NO: 2777355 - RNA, 19 nt, Artificial Sequence
  Description of Artificial Sequence: Synthetic oligonucleotide
uaggcucggaacucaggag

SEQ ID NO: 2777356 - RNA, 19 nt, Artificial Sequence
  Description of Artificial Sequence: Synthetic oligonucleotide
uggccuccagggauggacg

SEQ ID NO: 2777357 - RNA, 19 nt, Artificial Sequence
  Description of Artificial Sequence: Synthetic oligonucleotide
ugaagcucauucccauccu

SEQ ID NO: 2777358 - RNA, 19 nt, Artificial Sequence
  Description of Artificial Sequence: Synthetic oligonucleotide
aagccauccuccuccucug

SEQ ID NO: 2777359 - RNA, 19 nt, Artificial Sequence
  Description of Artificial Sequence: Synthetic oligonucleotide
gaucccaagcgacguuggg

SEQ ID NO: 2777360 - RNA, 19 nt, Artificial Sequence
  Description of Artificial Sequence: Synthetic oligonucleotide
guggucugaagcucauucc

SEQ ID NO: 2777361 - RNA, 19 nt, Artificial Sequence
  Description of Artificial Sequence: Synthetic oligonucleotide
cauaggcucggaacucagg

SEQ ID NO: 2777362 - RNA, 19 nt, Artificial Sequence
  Description of Artificial Sequence: Synthetic oligonucleotide
cagccaaguuaauauccgc

SEQ ID NO: 2777363 - RNA, 19 nt, Artificial Sequence
  Description of Artificial Sequence: Synthetic oligonucleotide
ugcgugguuucuuccacac

SEQ ID NO: 2777364 - RNA, 19 nt, Artificial Sequence
  Description of Artificial Sequence: Synthetic oligonucleotide
aucgugcugguucaccucu

SEQ ID NO: 2777365 - RNA, 19 nt, Artificial Sequence
  Description of Artificial Sequence: Synthetic oligonucleotide
uccucaucgugcugguuca

SEQ ID NO: 2777366 - RNA, 19 nt, Artificial Sequence
  Description of Artificial Sequence: Synthetic oligonucleotide
agaacaucugaagcggaca

SEQ ID NO: 2777367 - RNA, 19 nt, Artificial Sequence
  Description of Artificial Sequence: Synthetic oligonucleotide
uugaccugcuucaggccug

SEQ ID NO: 2777368 - RNA, 19 nt, Artificial Sequence
  Description of Artificial Sequence: Synthetic oligonucleotide
aagcucauucccauccuca

SEQ ID NO: 2777369 - RNA, 19 nt, Artificial Sequence
  Description of Artificial Sequence: Synthetic oligonucleotide
cacacuucugagauggcga

SEQ ID NO: 2777370 - RNA, 19 nt, Artificial Sequence
  Description of Artificial Sequence: Synthetic oligonucleotide
uguauggcugacuccugaa

SEQ ID NO: 2777371 - RNA, 19 nt, Artificial Sequence
  Description of Artificial Sequence: Synthetic oligonucleotide
cauugauggugucugccuc

SEQ ID NO: 2777372 - RNA, 19 nt, Artificial Sequence
  Description of Artificial Sequence: Synthetic oligonucleotide
aaaaggcggaagccauccu

SEQ ID NO: 2777373 - RNA, 19 nt, Artificial Sequence
  Description of Artificial Sequence: Synthetic oligonucleotide
gucgguguauggcugacuc

SEQ ID NO: 2777374 - RNA, 19 nt, Artificial Sequence
  Description of Artificial Sequence: Synthetic oligonucleotide
aacaucugaagcggacaca

SEQ ID NO: 2777375 - RNA, 19 nt, Artificial Sequence
  Description of Artificial Sequence: Synthetic oligonucleotide
gaagcucauucccauccuc

SEQ ID NO: 2777376 - RNA, 19 nt, Artificial Sequence
  Description of Artificial Sequence: Synthetic oligonucleotide
auggcugacuccugaagaa

SEQ ID NO: 2777377 - RNA, 19 nt, Artificial Sequence
  Description of Artificial Sequence: Synthetic oligonucleotide
gacgugaagaaaaggcgga

SEQ ID NO: 2777378 - RNA, 19 nt, Artificial Sequence
  Description of Artificial Sequence: Synthetic oligonucleotide
cuugcgugguuucuuccac

SEQ ID NO: 2777379 - RNA, 19 nt, Artificial Sequence
  Description of Artificial Sequence: Synthetic oligonucleotide
ugaagcggacacagcugcc

SEQ ID NO: 2777380 - RNA, 19 nt, Artificial Sequence
  Description of Artificial Sequence: Synthetic oligonucleotide
ugguucaccucucgccuga

SEQ ID NO: 2777381 - RNA, 19 nt, Artificial Sequence
  Description of Artificial Sequence: Synthetic oligonucleotide
ccagccaaguuaauauccg

SEQ ID NO: 2777382 - RNA, 19 nt, Artificial Sequence
  Description of Artificial Sequence: Synthetic oligonucleotide
ucgucacugucuucacugc

SEQ ID NO: 2777383 - RNA, 19 nt, Artificial Sequence
  Description of Artificial Sequence: Synthetic oligonucleotide
ucugaagcucauucccauc

SEQ ID NO: 2777384 - RNA, 19 nt, Artificial Sequence
  Description of Artificial Sequence: Synthetic oligonucleotide
ugagauggcgauggagcug

SEQ ID NO: 2777385 - RNA, 19 nt, Artificial Sequence
  Description of Artificial Sequence: Synthetic oligonucleotide
ucuucuccgccuccuucug

SEQ ID NO: 2777386 - RNA, 19 nt, Artificial Sequence
  Description of Artificial Sequence: Synthetic oligonucleotide
ucuuggguucuuccuuuuc

SEQ ID NO: 2777387 - RNA, 19 nt, Artificial Sequence
  Description of Artificial Sequence: Synthetic oligonucleotide
agaaaaggcggaagccauc

SEQ ID NO: 2777388 - RNA, 19 nt, Artificial Sequence
  Description of Artificial Sequence: Synthetic oligonucleotide
ucggcaggucgguguaugg

SEQ ID NO: 2777389 - RNA, 19 nt, Artificial Sequence
  Description of Artificial Sequence: Synthetic oligonucleotide
ucgguguauggcugacucc

SEQ ID NO: 2777390 - RNA, 19 nt, Artificial Sequence
  Description of Artificial Sequence: Synthetic oligonucleotide
uccagggauggacgugaag

SEQ ID NO: 2777391 - RNA, 19 nt, Artificial Sequence
  Description of Artificial Sequence: Synthetic oligonucleotide
cucauggccuccagggaug

SEQ ID NO: 2777392 - RNA, 19 nt, Artificial Sequence
  Description of Artificial Sequence: Synthetic oligonucleotide
uuggguucuuccuuuucuu

SEQ ID NO: 2777393 - RNA, 19 nt, Artificial Sequence
  Description of Artificial Sequence: Synthetic oligonucleotide
uggguccccauugauggug

SEQ ID NO: 2777394 - RNA, 19 nt, Artificial Sequence
  Description of Artificial Sequence: Synthetic oligonucleotide
cucgccugaggcuucgcug

SEQ ID NO: 2777395 - RNA, 19 nt, Artificial Sequence
  Description of Artificial Sequence: Synthetic oligonucleotide
ucaccucucgccugaggcu

SEQ ID NO: 2777396 - RNA, 19 nt, Artificial Sequence
  Description of Artificial Sequence: Synthetic oligonucleotide
gucacugucuucacugcug

SEQ ID NO: 2777397 - RNA, 19 nt, Artificial Sequence
  Description of Artificial Sequence: Synthetic oligonucleotide
ucggcaggguuucggagaa

SEQ ID NO: 2777398 - RNA, 19 nt, Artificial Sequence
  Description of Artificial Sequence: Synthetic oligonucleotide
cuccugaagaacaucugaa

SEQ ID NO: 2777399 - RNA, 19 nt, Artificial Sequence
  Description of Artificial Sequence: Synthetic oligonucleotide
cuguaccucggcaggucgg

SEQ ID NO: 2777400 - RNA, 19 nt, Artificial Sequence
  Description of Artificial Sequence: Synthetic oligonucleotide
acacuucugagauggcgau

SEQ ID NO: 2777401 - RNA, 19 nt, Artificial Sequence
  Description of Artificial Sequence: Synthetic oligonucleotide
uuugaucccaagcgacguu

SEQ ID NO: 2777402 - RNA, 19 nt, Artificial Sequence
  Description of Artificial Sequence: Synthetic oligonucleotide
cuccuugaccugcuucagg

SEQ ID NO: 2777403 - RNA, 19 nt, Artificial Sequence
  Description of Artificial Sequence: Synthetic oligonucleotide
auggugucugccuccuuga

SEQ ID NO: 2777404 - RNA, 19 nt, Artificial Sequence
  Description of Artificial Sequence: Synthetic oligonucleotide
ucauggccuccagggaugg

SEQ ID NO: 2777405 - RNA, 19 nt, Artificial Sequence
  Description of Artificial Sequence: Synthetic oligonucleotide
cagcauggcucccagcuuc

SEQ ID NO: 2777406 - RNA, 19 nt, Artificial Sequence
  Description of Artificial Sequence: Synthetic oligonucleotide
gacuccugaagaacaucug

SEQ ID NO: 2777407 - RNA, 19 nt, Artificial Sequence
  Description of Artificial Sequence: Synthetic oligonucleotide
uggcgauggagcuguccag

SEQ ID NO: 2777408 - RNA, 19 nt, Artificial Sequence
  Description of Artificial Sequence: Synthetic oligonucleotide
uugcgugguuucuuccaca

SEQ ID NO: 2777409 - RNA, 19 nt, Artificial Sequence
  Description of Artificial Sequence: Synthetic oligonucleotide
ggugucugccuccuugacc

SEQ ID NO: 2777410 - RNA, 19 nt, Artificial Sequence
  Description of Artificial Sequence: Synthetic oligonucleotide
ucucgccugaggcuucgcu

SEQ ID NO: 2777411 - RNA, 19 nt, Artificial Sequence
  Description of Artificial Sequence: Synthetic oligonucleotide
gauggcgauggagcugucc

SEQ ID NO: 2777412 - RNA, 19 nt, Artificial Sequence
  Description of Artificial Sequence: Synthetic oligonucleotide
ucggagaagcuuccuucuc

SEQ ID NO: 2777413 - RNA, 19 nt, Artificial Sequence
  Description of Artificial Sequence: Synthetic oligonucleotide
cauggcucccagcuucuug

SEQ ID NO: 2777414 - RNA, 19 nt, Artificial Sequence
  Description of Artificial Sequence: Synthetic oligonucleotide
uaccucggcaggucggugu

SEQ ID NO: 2777415 - RNA, 19 nt, Artificial Sequence
  Description of Artificial Sequence: Synthetic oligonucleotide
uucuccgccuccuucugua

SEQ ID NO: 2777416 - RNA, 19 nt, Artificial Sequence
  Description of Artificial Sequence: Synthetic oligonucleotide
agcucauucccauccucau

SEQ ID NO: 2777417 - RNA, 19 nt, Artificial Sequence
  Description of Artificial Sequence: Synthetic oligonucleotide
cauucccauccucaucgug

SEQ ID NO: 2777418 - RNA, 19 nt, Artificial Sequence
  Description of Artificial Sequence: Synthetic oligonucleotide
caucugaagcggacacagc

SEQ ID NO: 2777419 - RNA, 19 nt, Artificial Sequence
  Description of Artificial Sequence: Synthetic oligonucleotide
ugcuucaggccuguggcuc

SEQ ID NO: 2777420 - RNA, 19 nt, Artificial Sequence
  Description of Artificial Sequence: Synthetic oligonucleotide
acacagcugccucucggca

SEQ ID NO: 2777421 - RNA, 19 nt, Artificial Sequence
  Description of Artificial Sequence: Synthetic oligonucleotide
uaauauccgccuccuucuu

SEQ ID NO: 2777422 - RNA, 19 nt, Artificial Sequence
  Description of Artificial Sequence: Synthetic oligonucleotide
cacagcugccucucggcac

SEQ ID NO: 2777423 - RNA, 19 nt, Artificial Sequence
  Description of Artificial Sequence: Synthetic oligonucleotide
ccuucuguaccucggcagg

SEQ ID NO: 2777424 - RNA, 19 nt, Artificial Sequence
  Description of Artificial Sequence: Synthetic oligonucleotide
ucggaacucaggagugguc

SEQ ID NO: 2777425 - RNA, 19 nt, Artificial Sequence
  Description of Artificial Sequence: Synthetic oligonucleotide
uguaccucggcaggucggu

SEQ ID NO: 2777426 - RNA, 19 nt, Artificial Sequence
  Description of Artificial Sequence: Synthetic oligonucleotide
aucccaagcgacguugggu

SEQ ID NO: 2777427 - RNA, 19 nt, Artificial Sequence
  Description of Artificial Sequence: Synthetic oligonucleotide
cucaucgugcugguucacc

SEQ ID NO: 2777428 - RNA, 19 nt, Artificial Sequence
  Description of Artificial Sequence: Synthetic oligonucleotide
guucaccucucgccugagg

SEQ ID NO: 2777429 - RNA, 19 nt, Artificial Sequence
  Description of Artificial Sequence: Synthetic oligonucleotide
ggccacauaggcucggaac

SEQ ID NO: 2777430 - RNA, 19 nt, Artificial Sequence
  Description of Artificial Sequence: Synthetic oligonucleotide
guguauggcugacuccuga

SEQ ID NO: 2777431 - RNA, 19 nt, Artificial Sequence
  Description of Artificial Sequence: Synthetic oligonucleotide
uggcugacuccugaagaac

SEQ ID NO: 2777432 - RNA, 19 nt, Artificial Sequence
  Description of Artificial Sequence: Synthetic oligonucleotide
gagauggcgauggagcugu

SEQ ID NO: 2777433 - RNA, 19 nt, Artificial Sequence
  Description of Artificial Sequence: Synthetic oligonucleotide
ucauucccauccucaucgu

SEQ ID NO: 2777434 - RNA, 19 nt, Artificial Sequence
  Description of Artificial Sequence: Synthetic oligonucleotide
gaacucaggaguggucuga

SEQ ID NO: 2777435 - RNA, 19 nt, Artificial Sequence
  Description of Artificial Sequence: Synthetic oligonucleotide
aacucaggaguggucugaa

SEQ ID NO: 2777436 - RNA, 19 nt, Artificial Sequence
  Description of Artificial Sequence: Synthetic oligonucleotide
gacguuggguccccauuga

SEQ ID NO: 2777437 - RNA, 19 nt, Artificial Sequence
  Description of Artificial Sequence: Synthetic oligonucleotide
uccacacuucugagauggc

SEQ ID NO: 2777438 - RNA, 19 nt, Artificial Sequence
  Description of Artificial Sequence: Synthetic oligonucleotide
cuuggguucuuccuuuucu

SEQ ID NO: 2777439 - RNA, 19 nt, Artificial Sequence
  Description of Artificial Sequence: Synthetic oligonucleotide
ggauggacgugaagaaaag

SEQ ID NO: 2777440 - RNA, 19 nt, Artificial Sequence
  Description of Artificial Sequence: Synthetic oligonucleotide
uggugucugccuccuugac

SEQ ID NO: 2777441 - RNA, 19 nt, Artificial Sequence
  Description of Artificial Sequence: Synthetic oligonucleotide
cuccgccuccuucuguacc

SEQ ID NO: 2777442 - RNA, 19 nt, Artificial Sequence
  Description of Artificial Sequence: Synthetic oligonucleotide
cugguucaccucucgccug

SEQ ID NO: 2777443 - RNA, 19 nt, Artificial Sequence
  Description of Artificial Sequence: Synthetic oligonucleotide
aguuaauauccgccuccuu

SEQ ID NO: 2777444 - RNA, 19 nt, Artificial Sequence
  Description of Artificial Sequence: Synthetic oligonucleotide
agcggacacagcugccucu

SEQ ID NO: 2777445 - RNA, 19 nt, Artificial Sequence
  Description of Artificial Sequence: Synthetic oligonucleotide
aggaguggucugaagcuca

SEQ ID NO: 2777446 - RNA, 19 nt, Artificial Sequence
  Description of Artificial Sequence: Synthetic oligonucleotide
acauaggcucggaacucag

SEQ ID NO: 2777447 - RNA, 19 nt, Artificial Sequence
  Description of Artificial Sequence: Synthetic oligonucleotide
cuugaccugcuucaggccu

SEQ ID NO: 2777448 - RNA, 19 nt, Artificial Sequence
  Description of Artificial Sequence: Synthetic oligonucleotide
caucgugcugguucaccuc

SEQ ID NO: 2777449 - RNA, 19 nt, Artificial Sequence
  Description of Artificial Sequence: Synthetic oligonucleotide
ggaacucaggaguggucug

SEQ ID NO: 2777450 - RNA, 19 nt, Artificial Sequence
  Description of Artificial Sequence: Synthetic oligonucleotide
uauccgccuccuucuuggc

SEQ ID NO: 2777451 - RNA, 19 nt, Artificial Sequence
  Description of Artificial Sequence: Synthetic oligonucleotide
acuccucgucacugucuuc

SEQ ID NO: 2777452 - RNA, 19 nt, Artificial Sequence
  Description of Artificial Sequence: Synthetic oligonucleotide
gggauggacgugaagaaaa

SEQ ID NO: 2777453 - RNA, 19 nt, Artificial Sequence
  Description of Artificial Sequence: Synthetic oligonucleotide
ccacacuucugagauggcg

SEQ ID NO: 2777454 - RNA, 19 nt, Artificial Sequence
  Description of Artificial Sequence: Synthetic oligonucleotide
uucuguaccucggcagguc

SEQ ID NO: 2777455 - RNA, 19 nt, Artificial Sequence
  Description of Artificial Sequence: Synthetic oligonucleotide
ccaaguuaauauccgccuc

SEQ ID NO: 2777456 - RNA, 19 nt, Artificial Sequence
  Description of Artificial Sequence: Synthetic oligonucleotide
cuuggccacauaggcucgg

SEQ ID NO: 2777457 - RNA, 19 nt, Artificial Sequence
  Description of Artificial Sequence: Synthetic oligonucleotide
guggcuccagccaaguuaa

SEQ ID NO: 2777458 - RNA, 19 nt, Artificial Sequence
  Description of Artificial Sequence: Synthetic oligonucleotide
cugacuccugaagaacauc

SEQ ID NO: 2777459 - RNA, 19 nt, Artificial Sequence
  Description of Artificial Sequence: Synthetic oligonucleotide
cucggcaccgcugccacuc

SEQ ID NO: 2777460 - RNA, 19 nt, Artificial Sequence
  Description of Artificial Sequence: Synthetic oligonucleotide
aggucgguguauggcugac

SEQ ID NO: 2777461 - RNA, 19 nt, Artificial Sequence
  Description of Artificial Sequence: Synthetic oligonucleotide
cucccagcuucuuggccac

SEQ ID NO: 2777462 - RNA, 19 nt, Artificial Sequence
  Description of Artificial Sequence: Synthetic oligonucleotide
uggccacauaggcucggaa

SEQ ID NO: 2777463 - RNA, 19 nt, Artificial Sequence
  Description of Artificial Sequence: Synthetic oligonucleotide
ccagggauggacgugaaga

SEQ ID NO: 2777464 - RNA, 19 nt, Artificial Sequence
  Description of Artificial Sequence: Synthetic oligonucleotide
uuccuucucauggccucca

SEQ ID NO: 2777465 - RNA, 19 nt, Artificial Sequence
  Description of Artificial Sequence: Synthetic oligonucleotide
caggaguggucugaagcuc

SEQ ID NO: 2777466 - RNA, 19 nt, Artificial Sequence
  Description of Artificial Sequence: Synthetic oligonucleotide
ugccacuccucgucacugu

SEQ ID NO: 2777467 - RNA, 19 nt, Artificial Sequence
  Description of Artificial Sequence: Synthetic oligonucleotide
uuggguccccauugauggu

SEQ ID NO: 2777468 - RNA, 19 nt, Artificial Sequence
  Description of Artificial Sequence: Synthetic oligonucleotide
ggggcuggcgcuuucggca

SEQ ID NO: 2777469 - RNA, 19 nt, Artificial Sequence
  Description of Artificial Sequence: Synthetic oligonucleotide
ucuccgccuccuucuguac

SEQ ID NO: 2777470 - RNA, 19 nt, Artificial Sequence
  Description of Artificial Sequence: Synthetic oligonucleotide
gccaaguuaauauccgccu

SEQ ID NO: 2777471 - RNA, 19 nt, Artificial Sequence
  Description of Artificial Sequence: Synthetic oligonucleotide
uggcgcuuucggcaggguu

SEQ ID NO: 2777472 - RNA, 19 nt, Artificial Sequence
  Description of Artificial Sequence: Synthetic oligonucleotide
ccuucucauggccuccagg

SEQ ID NO: 2777473 - RNA, 19 nt, Artificial Sequence
  Description of Artificial Sequence: Synthetic oligonucleotide
gcuccagccaaguuaauau

SEQ ID NO: 2777474 - RNA, 19 nt, Artificial Sequence
  Description of Artificial Sequence: Synthetic oligonucleotide
cugagauggcgauggagcu

SEQ ID NO: 2777475 - RNA, 19 nt, Artificial Sequence
  Description of Artificial Sequence: Synthetic oligonucleotide
gcuuucggcaggguuucgg

SEQ ID NO: 2777476 - RNA, 19 nt, Artificial Sequence
  Description of Artificial Sequence: Synthetic oligonucleotide
acgugaagaaaaggcggaa

SEQ ID NO: 2777477 - RNA, 19 nt, Artificial Sequence
  Description of Artificial Sequence: Synthetic oligonucleotide
gucugccuccuugaccugc

SEQ ID NO: 2777478 - RNA, 19 nt, Artificial Sequence
  Description of Artificial Sequence: Synthetic oligonucleotide
gaagcggacacagcugccu

SEQ ID NO: 2777479 - RNA, 19 nt, Artificial Sequence
  Description of Artificial Sequence: Synthetic oligonucleotide
gccacauaggcucggaacu

SEQ ID NO: 2777480 - RNA, 19 nt, Artificial Sequence
  Description of Artificial Sequence: Synthetic oligonucleotide
acguuggguccccauugau

SEQ ID NO: 2777481 - RNA, 19 nt, Artificial Sequence
  Description of Artificial Sequence: Synthetic oligonucleotide
gugguuucuuccacacuuc

SEQ ID NO: 2777482 - RNA, 19 nt, Artificial Sequence
  Description of Artificial Sequence: Synthetic oligonucleotide
ggcgauggagcuguccagc

SEQ ID NO: 2777483 - RNA, 19 nt, Artificial Sequence
  Description of Artificial Sequence: Synthetic oligonucleotide
cugccucucggcaccgcug

SEQ ID NO: 2777484 - RNA, 19 nt, Artificial Sequence
  Description of Artificial Sequence: Synthetic oligonucleotide
cugccacuccucgucacug

SEQ ID NO: 2777485 - RNA, 19 nt, Artificial Sequence
  Description of Artificial Sequence: Synthetic oligonucleotide
cacauaggcucggaacuca

SEQ ID NO: 2777486 - RNA, 19 nt, Artificial Sequence
  Description of Artificial Sequence: Synthetic oligonucleotide
cucggcaggucgguguaug

SEQ ID NO: 2777487 - RNA, 19 nt, Artificial Sequence
  Description of Artificial Sequence: Synthetic oligonucleotide
ggagcuguccagcauggcu

SEQ ID NO: 2777488 - RNA, 19 nt, Artificial Sequence
  Description of Artificial Sequence: Synthetic oligonucleotide
gcuucaggccuguggcucc

SEQ ID NO: 2777489 - RNA, 19 nt, Artificial Sequence
  Description of Artificial Sequence: Synthetic oligonucleotide
ugucugccuccuugaccug

SEQ ID NO: 2777490 - RNA, 19 nt, Artificial Sequence
  Description of Artificial Sequence: Synthetic oligonucleotide
ggcugacuccugaagaaca

SEQ ID NO: 2777491 - RNA, 19 nt, Artificial Sequence
  Description of Artificial Sequence: Synthetic oligonucleotide
cccauugauggugucugcc

SEQ ID NO: 2777492 - RNA, 19 nt, Artificial Sequence
  Description of Artificial Sequence: Synthetic oligonucleotide
gucugaagcucauucccau

SEQ ID NO: 2777493 - RNA, 19 nt, Artificial Sequence
  Description of Artificial Sequence: Synthetic oligonucleotide
ucgugcugguucaccucuc

SEQ ID NO: 2777494 - RNA, 19 nt, Artificial Sequence
  Description of Artificial Sequence: Synthetic oligonucleotide
uccgccuugcgugguuucu

SEQ ID NO: 2777495 - RNA, 19 nt, Artificial Sequence
  Description of Artificial Sequence: Synthetic oligonucleotide
cacuucugagauggcgaug

SEQ ID NO: 2777496 - RNA, 19 nt, Artificial Sequence
  Description of Artificial Sequence: Synthetic oligonucleotide
cgcaccuccgccuugcgug

SEQ ID NO: 2777497 - RNA, 19 nt, Artificial Sequence
  Description of Artificial Sequence: Synthetic oligonucleotide
guuucggagaagcuuccuu

SEQ ID NO: 2777498 - RNA, 19 nt, Artificial Sequence
  Description of Artificial Sequence: Synthetic oligonucleotide
caagcgacguugggucccc

SEQ ID NO: 2777499 - RNA, 19 nt, Artificial Sequence
  Description of Artificial Sequence: Synthetic oligonucleotide
cgugaagaaaaggcggaag

SEQ ID NO: 2777500 - RNA, 19 nt, Artificial Sequence
  Description of Artificial Sequence: Synthetic oligonucleotide
ucggcaccgcugccacucc

SEQ ID NO: 2777501 - RNA, 19 nt, Artificial Sequence
  Description of Artificial Sequence: Synthetic oligonucleotide
gcaccgcugccacuccucg

SEQ ID NO: 2777502 - RNA, 19 nt, Artificial Sequence
  Description of Artificial Sequence: Synthetic oligonucleotide
cguuggguccccauugaug

SEQ ID NO: 2777503 - RNA, 19 nt, Artificial Sequence
  Description of Artificial Sequence: Synthetic oligonucleotide
ggucugaagcucauuccca

SEQ ID NO: 2777504 - RNA, 19 nt, Artificial Sequence
  Description of Artificial Sequence: Synthetic oligonucleotide
ugccgcaccuccgccuugc

SEQ ID NO: 2777505 - RNA, 19 nt, Artificial Sequence
  Description of Artificial Sequence: Synthetic oligonucleotide
ugaccugcuucaggccugu

SEQ ID NO: 2777506 - RNA, 19 nt, Artificial Sequence
  Description of Artificial Sequence: Synthetic oligonucleotide
uggagcuguccagcauggc

SEQ ID NO: 2777507 - RNA, 19 nt, Artificial Sequence
  Description of Artificial Sequence: Synthetic oligonucleotide
ggcucggaacucaggagug

SEQ ID NO: 2777508 - RNA, 19 nt, Artificial Sequence
  Description of Artificial Sequence: Synthetic oligonucleotide
gcaccuccgccuugcgugg

SEQ ID NO: 2777509 - RNA, 19 nt, Artificial Sequence
  Description of Artificial Sequence: Synthetic oligonucleotide
agcgacguuggguccccau

SEQ ID NO: 2777510 - RNA, 19 nt, Artificial Sequence
  Description of Artificial Sequence: Synthetic oligonucleotide
gcucggaacucaggagugg

SEQ ID NO: 2777511 - RNA, 19 nt, Artificial Sequence
  Description of Artificial Sequence: Synthetic oligonucleotide
gcucauucccauccucauc

SEQ ID NO: 2777512 - RNA, 19 nt, Artificial Sequence
  Description of Artificial Sequence: Synthetic oligonucleotide
ggcucccagcuucuuggcc

SEQ ID NO: 2777513 - RNA, 19 nt, Artificial Sequence
  Description of Artificial Sequence: Synthetic oligonucleotide
caggucgguguauggcuga

SEQ ID NO: 2777514 - RNA, 19 nt, Artificial Sequence
  Description of Artificial Sequence: Synthetic oligonucleotide
gcugguucaccucucgccu

SEQ ID NO: 2777515 - RNA, 19 nt, Artificial Sequence
  Description of Artificial Sequence: Synthetic oligonucleotide
ggcaggucgguguauggcu

SEQ ID NO: 2777516 - RNA, 19 nt, Artificial Sequence
  Description of Artificial Sequence: Synthetic oligonucleotide
accucggcaggucggugua

SEQ ID NO: 2777517 - RNA, 19 nt, Artificial Sequence
  Description of Artificial Sequence: Synthetic oligonucleotide
gccuugcgugguuucuucc

SEQ ID NO: 2777518 - RNA, 19 nt, Artificial Sequence
  Description of Artificial Sequence: Synthetic oligonucleotide
gggcuggcgcuuucggcag

SEQ ID NO: 2777519 - RNA, 19 nt, Artificial Sequence
  Description of Artificial Sequence: Synthetic oligonucleotide
ccaagcgacguuggguccc

SEQ ID NO: 2777520 - RNA, 19 nt, Artificial Sequence
  Description of Artificial Sequence: Synthetic oligonucleotide
gcaggucgguguauggcug

SEQ ID NO: 2777521 - RNA, 19 nt, Artificial Sequence
  Description of Artificial Sequence: Synthetic oligonucleotide
ggagaagcuuccuucucau

SEQ ID NO: 2777522 - RNA, 19 nt, Artificial Sequence
  Description of Artificial Sequence: Synthetic oligonucleotide
caccugccgcaccuccgcc

SEQ ID NO: 2777523 - RNA, 19 nt, Artificial Sequence
  Description of Artificial Sequence: Synthetic oligonucleotide
agcugccucucggcaccgc

SEQ ID NO: 2777524 - RNA, 19 nt, Artificial Sequence
  Description of Artificial Sequence: Synthetic oligonucleotide
ccuugcgugguuucuucca

SEQ ID NO: 2777525 - RNA, 19 nt, Artificial Sequence
  Description of Artificial Sequence: Synthetic oligonucleotide
cgacguuggguccccauug

SEQ ID NO: 2777526 - RNA, 19 nt, Artificial Sequence
  Description of Artificial Sequence: Synthetic oligonucleotide
ggguuucggagaagcuucc

SEQ ID NO: 2777527 - RNA, 19 nt, Artificial Sequence
  Description of Artificial Sequence: Synthetic oligonucleotide
cuucugagauggcgaugga

SEQ ID NO: 2777528 - RNA, 19 nt, Artificial Sequence
  Description of Artificial Sequence: Synthetic oligonucleotide
gguguauggcugacuccug

SEQ ID NO: 2777529 - RNA, 19 nt, Artificial Sequence
  Description of Artificial Sequence: Synthetic oligonucleotide
cccaagcgacguugggucc

SEQ ID NO: 2777530 - RNA, 19 nt, Artificial Sequence
  Description of Artificial Sequence: Synthetic oligonucleotide
ucucggcaccgcugccacu

SEQ ID NO: 2777531 - RNA, 19 nt, Artificial Sequence
  Description of Artificial Sequence: Synthetic oligonucleotide
gcgauggagcuguccagca

SEQ ID NO: 2777532 - RNA, 19 nt, Artificial Sequence
  Description of Artificial Sequence: Synthetic oligonucleotide
gcuggcgcuuucggcaggg

SEQ ID NO: 2777533 - RNA, 19 nt, Artificial Sequence
  Description of Artificial Sequence: Synthetic oligonucleotide
cacugucuucacugcugga

SEQ ID NO: 2777534 - RNA, 19 nt, Artificial Sequence
  Description of Artificial Sequence: Synthetic oligonucleotide
cuccgccuugcgugguuuc

SEQ ID NO: 2777535 - RNA, 19 nt, Artificial Sequence
  Description of Artificial Sequence: Synthetic oligonucleotide
accucucgccugaggcuuc

SEQ ID NO: 2777536 - RNA, 19 nt, Artificial Sequence
  Description of Artificial Sequence: Synthetic oligonucleotide
cuguccagcauggcuccca

SEQ ID NO: 2777537 - RNA, 19 nt, Artificial Sequence
  Description of Artificial Sequence: Synthetic oligonucleotide
ccaccugccgcaccuccgc

SEQ ID NO: 2777538 - RNA, 19 nt, Artificial Sequence
  Description of Artificial Sequence: Synthetic oligonucleotide
guaccucggcaggucggug

SEQ ID NO: 2777539 - RNA, 19 nt, Artificial Sequence
  Description of Artificial Sequence: Synthetic oligonucleotide
cucggaacucaggaguggu

SEQ ID NO: 2777540 - RNA, 19 nt, Artificial Sequence
  Description of Artificial Sequence: Synthetic oligonucleotide
gccacuccucgucacuguc

SEQ ID NO: 2777541 - RNA, 19 nt, Artificial Sequence
  Description of Artificial Sequence: Synthetic oligonucleotide
ggcuccagccaaguuaaua

SEQ ID NO: 2777542 - RNA, 19 nt, Artificial Sequence
  Description of Artificial Sequence: Synthetic oligonucleotide
caggguuucggagaagcuu

SEQ ID NO: 2777543 - RNA, 19 nt, Artificial Sequence
  Description of Artificial Sequence: Synthetic oligonucleotide
ccccauugauggugucugc

SEQ ID NO: 2777544 - RNA, 19 nt, Artificial Sequence
  Description of Artificial Sequence: Synthetic oligonucleotide
uggcuccagccaaguuaau

SEQ ID NO: 2777545 - RNA, 19 nt, Artificial Sequence
  Description of Artificial Sequence: Synthetic oligonucleotide
ccauugauggugucugccu

SEQ ID NO: 2777546 - RNA, 19 nt, Artificial Sequence
  Description of Artificial Sequence: Synthetic oligonucleotide
cggagaagcuuccuucuca

SEQ ID NO: 2777547 - RNA, 19 nt, Artificial Sequence
  Description of Artificial Sequence: Synthetic oligonucleotide
ggcuggcgcuuucggcagg

SEQ ID NO: 2777548 - RNA, 19 nt, Artificial Sequence
  Description of Artificial Sequence: Synthetic oligonucleotide
cuucuguaccucggcaggu

SEQ ID NO: 2777549 - RNA, 19 nt, Artificial Sequence
  Description of Artificial Sequence: Synthetic oligonucleotide
cgugguuucuuccacacuu

SEQ ID NO: 2777550 - RNA, 19 nt, Artificial Sequence
  Description of Artificial Sequence: Synthetic oligonucleotide
cacuccucgucacugucuu

SEQ ID NO: 2777551 - RNA, 19 nt, Artificial Sequence
  Description of Artificial Sequence: Synthetic oligonucleotide
ggccuguggcuccagccaa

SEQ ID NO: 2777552 - RNA, 19 nt, Artificial Sequence
  Description of Artificial Sequence: Synthetic oligonucleotide
gguucaccucucgccugag

SEQ ID NO: 2777553 - RNA, 19 nt, Artificial Sequence
  Description of Artificial Sequence: Synthetic oligonucleotide
ccuccagggauggacguga

SEQ ID NO: 2777554 - RNA, 19 nt, Artificial Sequence
  Description of Artificial Sequence: Synthetic oligonucleotide
cagcugccucucggcaccg

SEQ ID NO: 2777555 - RNA, 19 nt, Artificial Sequence
  Description of Artificial Sequence: Synthetic oligonucleotide
aagcgacguugggucccca

SEQ ID NO: 2777556 - RNA, 19 nt, Artificial Sequence
  Description of Artificial Sequence: Synthetic oligonucleotide
cugcuucaggccuguggcu

SEQ ID NO: 2777557 - RNA, 19 nt, Artificial Sequence
  Description of Artificial Sequence: Synthetic oligonucleotide
cuccagggauggacgugaa

SEQ ID NO: 2777558 - RNA, 19 nt, Artificial Sequence
  Description of Artificial Sequence: Synthetic oligonucleotide
cucucgccugaggcuucgc

SEQ ID NO: 2777559 - RNA, 19 nt, Artificial Sequence
  Description of Artificial Sequence: Synthetic oligonucleotide
cuucuccgccuccuucugu

SEQ ID NO: 2777560 - RNA, 19 nt, Artificial Sequence
  Description of Artificial Sequence: Synthetic oligonucleotide
cgccuccuucuguaccucg

SEQ ID NO: 2777561 - RNA, 19 nt, Artificial Sequence
  Description of Artificial Sequence: Synthetic oligonucleotide
gccuguggcuccagccaag

SEQ ID NO: 2777562 - RNA, 19 nt, Artificial Sequence
  Description of Artificial Sequence: Synthetic oligonucleotide
gcggacacagcugccucuc

SEQ ID NO: 2777563 - RNA, 19 nt, Artificial Sequence
  Description of Artificial Sequence: Synthetic oligonucleotide
ggcgcuuucggcaggguuu

SEQ ID NO: 2777564 - RNA, 19 nt, Artificial Sequence
  Description of Artificial Sequence: Synthetic oligonucleotide
gcgcuuucggcaggguuuc

SEQ ID NO: 2777565 - RNA, 19 nt, Artificial Sequence
  Description of Artificial Sequence: Synthetic oligonucleotide
gccuccagggauggacgug

SEQ ID NO: 2777566 - RNA, 19 nt, Artificial Sequence
  Description of Artificial Sequence: Synthetic oligonucleotide
cugccgcaccuccgccuug

SEQ ID NO: 2777567 - RNA, 19 nt, Artificial Sequence
  Description of Artificial Sequence: Synthetic oligonucleotide
gaccugcuucaggccugug

SEQ ID NO: 2777568 - RNA, 19 nt, Artificial Sequence
  Description of Artificial Sequence: Synthetic oligonucleotide
ggcaccgcugccacuccuc

SEQ ID NO: 2777569 - RNA, 19 nt, Artificial Sequence
  Description of Artificial Sequence: Synthetic oligonucleotide
ccucucgccugaggcuucg

SEQ ID NO: 2777570 - RNA, 19 nt, Artificial Sequence
  Description of Artificial Sequence: Synthetic oligonucleotide
cggcaggucgguguauggc

SEQ ID NO: 2777571 - RNA, 19 nt, Artificial Sequence
  Description of Artificial Sequence: Synthetic oligonucleotide
gccgcaccuccgccuugcg

SEQ ID NO: 2777572 - RNA, 19 nt, Artificial Sequence
  Description of Artificial Sequence: Synthetic oligonucleotide
gcugacuccugaagaacau

SEQ ID NO: 2777573 - RNA, 19 nt, Artificial Sequence
  Description of Artificial Sequence: Synthetic oligonucleotide
cgccuugcgugguuucuuc

SEQ ID NO: 2777574 - RNA, 19 nt, Artificial Sequence
  Description of Artificial Sequence: Synthetic oligonucleotide
gcugccucucggcaccgcu

SEQ ID NO: 2777575 - RNA, 19 nt, Artificial Sequence
  Description of Artificial Sequence: Synthetic oligonucleotide
cggacacagcugccucucg

SEQ ID NO: 2777576 - RNA, 19 nt, Artificial Sequence
  Description of Artificial Sequence: Synthetic oligonucleotide
gguuucggagaagcuuccu

SEQ ID NO: 2777577 - RNA, 19 nt, Artificial Sequence
  Description of Artificial Sequence: Synthetic oligonucleotide
gccucucggcaccgcugcc

SEQ ID NO: 2777578 - RNA, 19 nt, Artificial Sequence
  Description of Artificial Sequence: Synthetic oligonucleotide
caccucucgccugaggcuu

SEQ ID NO: 2777579 - RNA, 19 nt, Artificial Sequence
  Description of Artificial Sequence: Synthetic oligonucleotide
cgguguauggcugacuccu

SEQ ID NO: 2777580 - RNA, 19 nt, Artificial Sequence
  Description of Artificial Sequence: Synthetic oligonucleotide
ggccuccagggauggacgu

SEQ ID NO: 2777581 - RNA, 19 nt, Artificial Sequence
  Description of Artificial Sequence: Synthetic oligonucleotide
gaguggucugaagcucauu

SEQ ID NO: 2777582 - RNA, 19 nt, Artificial Sequence
  Description of Artificial Sequence: Synthetic oligonucleotide
cggaacucaggaguggucu

SEQ ID NO: 2777583 - RNA, 19 nt, Artificial Sequence
  Description of Artificial Sequence: Synthetic oligonucleotide
cauggccuccagggaugga

SEQ ID NO: 2777584 - RNA, 19 nt, Artificial Sequence
  Description of Artificial Sequence: Synthetic oligonucleotide
gcaggguuucggagaagcu

SEQ ID NO: 2777585 - RNA, 19 nt, Artificial Sequence
  Description of Artificial Sequence: Synthetic oligonucleotide
gcgugguuucuuccacacu

SEQ ID NO: 2777586 - RNA, 19 nt, Artificial Sequence
  Description of Artificial Sequence: Synthetic oligonucleotide
ccucucggcaccgcugcca

SEQ ID NO: 2777587 - RNA, 19 nt, Artificial Sequence
  Description of Artificial Sequence: Synthetic oligonucleotide
ccucaucgugcugguucac

SEQ ID NO: 2777588 - RNA, 19 nt, Artificial Sequence
  Description of Artificial Sequence: Synthetic oligonucleotide
ccacuccucgucacugucu

SEQ ID NO: 2777589 - RNA, 19 nt, Artificial Sequence
  Description of Artificial Sequence: Synthetic oligonucleotide
cgcugccacuccucgucac

SEQ ID NO: 2777590 - RNA, 19 nt, Artificial Sequence
  Description of Artificial Sequence: Synthetic oligonucleotide
gcgacguuggguccccauu

SEQ ID NO: 2777591 - RNA, 19 nt, Artificial Sequence
  Description of Artificial Sequence: Synthetic oligonucleotide
ggguccccauugauggugu

SEQ ID NO: 2777592 - RNA, 19 nt, Artificial Sequence
  Description of Artificial Sequence: Synthetic oligonucleotide
caccgcugccacuccucgu

SEQ ID NO: 2777593 - RNA, 19 nt, Artificial Sequence
  Description of Artificial Sequence: Synthetic oligonucleotide
ggaguggucugaagcucau

SEQ ID NO: 2777594 - RNA, 19 nt, Artificial Sequence
  Description of Artificial Sequence: Synthetic oligonucleotide
ggucgguguauggcugacu

SEQ ID NO: 2777595 - RNA, 19 nt, Artificial Sequence
  Description of Artificial Sequence: Synthetic oligonucleotide
cuguggcuccagccaaguu

SEQ ID NO: 2777596 - RNA, 19 nt, Artificial Sequence
  Description of Artificial Sequence: Synthetic oligonucleotide
cgucacugucuucacugcu

SEQ ID NO: 2777597 - RNA, 19 nt, Artificial Sequence
  Description of Artificial Sequence: Synthetic oligonucleotide
ccauccucaucgugcuggu

SEQ ID NO: 2777598 - RNA, 19 nt, Artificial Sequence
  Description of Artificial Sequence: Synthetic oligonucleotide
ccgcugccacuccucguca

SEQ ID NO: 2777599 - RNA, 19 nt, Artificial Sequence
  Description of Artificial Sequence: Synthetic oligonucleotide
cgcuuucggcaggguuucg

SEQ ID NO: 2777600 - RNA, 19 nt, Artificial Sequence
  Description of Artificial Sequence: Synthetic oligonucleotide
cauccucaucgugcugguu

SEQ ID NO: 2777601 - RNA, 19 nt, Artificial Sequence
  Description of Artificial Sequence: Synthetic oligonucleotide
ccagcauggcucccagcuu

SEQ ID NO: 2777602 - RNA, 19 nt, Artificial Sequence
  Description of Artificial Sequence: Synthetic oligonucleotide
cuggcgcuuucggcagggu

SEQ ID NO: 2777603 - RNA, 19 nt, Artificial Sequence
  Description of Artificial Sequence: Synthetic oligonucleotide
cugccuccuugaccugcuu

SEQ ID NO: 2777604 - RNA, 19 nt, Artificial Sequence
  Description of Artificial Sequence: Synthetic oligonucleotide
ccugccgcaccuccgccuu

SEQ ID NO: 2777605 - RNA, 19 nt, Artificial Sequence
  Description of Artificial Sequence: Synthetic oligonucleotide
cgauggagcuguccagcau

SEQ ID NO: 2777606 - RNA, 19 nt, Artificial Sequence
  Description of Artificial Sequence: Synthetic oligonucleotide
caccuccgccuugcguggu

SEQ ID NO: 2777607 - RNA, 19 nt, Artificial Sequence
  Description of Artificial Sequence: Synthetic oligonucleotide
cggcaggguuucggagaag

SEQ ID NO: 2777608 - RNA, 19 nt, Artificial Sequence
  Description of Artificial Sequence: Synthetic oligonucleotide
ccgcaccuccgccuugcgu

SEQ ID NO: 2777609 - RNA, 19 nt, Artificial Sequence
  Description of Artificial Sequence: Synthetic oligonucleotide
gcauggcucccagcuucuu

SEQ ID NO: 2777610 - RNA, 19 nt, Artificial Sequence
  Description of Artificial Sequence: Synthetic oligonucleotide
ccuccgccuugcgugguuu

SEQ ID NO: 2777611 - RNA, 19 nt, Artificial Sequence
  Description of Artificial Sequence: Synthetic oligonucleotide
ccgccuugcgugguuucuu

SEQ ID NO: 2777612 - RNA, 19 nt, Artificial Sequence
  Description of Artificial Sequence: Synthetic oligonucleotide
ccucggcaggucgguguau

SEQ ID NO: 2777613 - RNA, 19 nt, Artificial Sequence
  Description of Artificial Sequence: Synthetic oligonucleotide
cggcaccgcugccacuccu

SEQ ID NO: 2777614 - RNA, 19 nt, Artificial Sequence
  Description of Artificial Sequence: Synthetic oligonucleotide
uuuacaaugaugcccacgg

SEQ ID NO: 2777615 - RNA, 19 nt, Artificial Sequence
  Description of Artificial Sequence: Synthetic oligonucleotide
uuuguguucgucauuuugg

SEQ ID NO: 2777616 - RNA, 19 nt, Artificial Sequence
  Description of Artificial Sequence: Synthetic oligonucleotide
caaaggaacaacuccaugc

SEQ ID NO: 2777617 - RNA, 19 nt, Artificial Sequence
  Description of Artificial Sequence: Synthetic oligonucleotide
cuagagaacauguagcgag

SEQ ID NO: 2777618 - RNA, 19 nt, Artificial Sequence
  Description of Artificial Sequence: Synthetic oligonucleotide
uucagcugaacccaggugc

SEQ ID NO: 2777619 - RNA, 19 nt, Artificial Sequence
  Description of Artificial Sequence: Synthetic oligonucleotide
aacauuaauccucuuggca

SEQ ID NO: 2777620 - RNA, 19 nt, Artificial Sequence
  Description of Artificial Sequence: Synthetic oligonucleotide
agaacauguagcgagugcc

SEQ ID NO: 2777621 - RNA, 19 nt, Artificial Sequence
  Description of Artificial Sequence: Synthetic oligonucleotide
aagaaucuugcccuuaacu

SEQ ID NO: 2777622 - RNA, 19 nt, Artificial Sequence
  Description of Artificial Sequence: Synthetic oligonucleotide
aaaggaacaacuccaugcu

SEQ ID NO: 2777623 - RNA, 19 nt, Artificial Sequence
  Description of Artificial Sequence: Synthetic oligonucleotide
auucauaugggaugggcuc

SEQ ID NO: 2777624 - RNA, 19 nt, Artificial Sequence
  Description of Artificial Sequence: Synthetic oligonucleotide
aaugaugcccacggcaugc

SEQ ID NO: 2777625 - RNA, 19 nt, Artificial Sequence
  Description of Artificial Sequence: Synthetic oligonucleotide
uguacauuaggccaugaau

SEQ ID NO: 2777626 - RNA, 19 nt, Artificial Sequence
  Description of Artificial Sequence: Synthetic oligonucleotide
aauccucuuggcaagaauc

SEQ ID NO: 2777627 - RNA, 19 nt, Artificial Sequence
  Description of Artificial Sequence: Synthetic oligonucleotide
caugaauucauaugggaug

SEQ ID NO: 2777628 - RNA, 19 nt, Artificial Sequence
  Description of Artificial Sequence: Synthetic oligonucleotide
gaaucuugcccuuaacuug

SEQ ID NO: 2777629 - RNA, 19 nt, Artificial Sequence
  Description of Artificial Sequence: Synthetic oligonucleotide
ugucucugcucuuagagug

SEQ ID NO: 2777630 - RNA, 19 nt, Artificial Sequence
  Description of Artificial Sequence: Synthetic oligonucleotide
ugcuugauguguucgaucc

SEQ ID NO: 2777631 - RNA, 19 nt, Artificial Sequence
  Description of Artificial Sequence: Synthetic oligonucleotide
cuuggcaagaaucuugccc

SEQ ID NO: 2777632 - RNA, 19 nt, Artificial Sequence
  Description of Artificial Sequence: Synthetic oligonucleotide
uuggcaagaaucuugcccu

SEQ ID NO: 2777633 - RNA, 19 nt, Artificial Sequence
  Description of Artificial Sequence: Synthetic oligonucleotide
uggucauuuuccuucaccc

SEQ ID NO: 2777634 - RNA, 19 nt, Artificial Sequence
  Description of Artificial Sequence: Synthetic oligonucleotide
uuuuccuucacccgcuuca

SEQ ID NO: 2777635 - RNA, 19 nt, Artificial Sequence
  Description of Artificial Sequence: Synthetic oligonucleotide
gauguguucgauccgaaca

SEQ ID NO: 2777636 - RNA, 19 nt, Artificial Sequence
  Description of Artificial Sequence: Synthetic oligonucleotide
augaauucauaugggaugg

SEQ ID NO: 2777637 - RNA, 19 nt, Artificial Sequence
  Description of Artificial Sequence: Synthetic oligonucleotide
aaacccuuuacaguccagg

SEQ ID NO: 2777638 - RNA, 19 nt, Artificial Sequence
  Description of Artificial Sequence: Synthetic oligonucleotide
aacauguagcgagugcccc

SEQ ID NO: 2777639 - RNA, 19 nt, Artificial Sequence
  Description of Artificial Sequence: Synthetic oligonucleotide
ucgauccgaacauuaaucc

SEQ ID NO: 2777640 - RNA, 19 nt, Artificial Sequence
  Description of Artificial Sequence: Synthetic oligonucleotide
acauuaauccucuuggcaa

SEQ ID NO: 2777641 - RNA, 19 nt, Artificial Sequence
  Description of Artificial Sequence: Synthetic oligonucleotide
uaugggaugggcuccagca

SEQ ID NO: 2777642 - RNA, 19 nt, Artificial Sequence
  Description of Artificial Sequence: Synthetic oligonucleotide
aacccaggugcccuucucc

SEQ ID NO: 2777643 - RNA, 19 nt, Artificial Sequence
  Description of Artificial Sequence: Synthetic oligonucleotide
uuuggcgagucacuggaag

SEQ ID NO: 2777644 - RNA, 19 nt, Artificial Sequence
  Description of Artificial Sequence: Synthetic oligonucleotide
aagugugccucucugggug

SEQ ID NO: 2777645 - RNA, 19 nt, Artificial Sequence
  Description of Artificial Sequence: Synthetic oligonucleotide
uuuacaguccagguucugg

SEQ ID NO: 2777646 - RNA, 19 nt, Artificial Sequence
  Description of Artificial Sequence: Synthetic oligonucleotide
uucgauccgaacauuaauc

SEQ ID NO: 2777647 - RNA, 19 nt, Artificial Sequence
  Description of Artificial Sequence: Synthetic oligonucleotide
caaagugugccucucuggg

SEQ ID NO: 2777648 - RNA, 19 nt, Artificial Sequence
  Description of Artificial Sequence: Synthetic oligonucleotide
uggccaaaggaacaacucc

SEQ ID NO: 2777649 - RNA, 19 nt, Artificial Sequence
  Description of Artificial Sequence: Synthetic oligonucleotide
gucauuuuccuucacccgc

SEQ ID NO: 2777650 - RNA, 19 nt, Artificial Sequence
  Description of Artificial Sequence: Synthetic oligonucleotide
aauucauaugggaugggcu

SEQ ID NO: 2777651 - RNA, 19 nt, Artificial Sequence
  Description of Artificial Sequence: Synthetic oligonucleotide
agaaucuugcccuuaacuu

SEQ ID NO: 2777652 - RNA, 19 nt, Artificial Sequence
  Description of Artificial Sequence: Synthetic oligonucleotide
auuuuggcgagucacugga

SEQ ID NO: 2777653 - RNA, 19 nt, Artificial Sequence
  Description of Artificial Sequence: Synthetic oligonucleotide
uguguucgucauuuuggcg

SEQ ID NO: 2777654 - RNA, 19 nt, Artificial Sequence
  Description of Artificial Sequence: Synthetic oligonucleotide
acaaagugugccucucugg

SEQ ID NO: 2777655 - RNA, 19 nt, Artificial Sequence
  Description of Artificial Sequence: Synthetic oligonucleotide
cuucuucuggucauuuucc

SEQ ID NO: 2777656 - RNA, 19 nt, Artificial Sequence
  Description of Artificial Sequence: Synthetic oligonucleotide
gaacauuaauccucuuggc

SEQ ID NO: 2777657 - RNA, 19 nt, Artificial Sequence
  Description of Artificial Sequence: Synthetic oligonucleotide
cauuaauccucuuggcaag

SEQ ID NO: 2777658 - RNA, 19 nt, Artificial Sequence
  Description of Artificial Sequence: Synthetic oligonucleotide
aguccucacaaagugugcc

SEQ ID NO: 2777659 - RNA, 19 nt, Artificial Sequence
  Description of Artificial Sequence: Synthetic oligonucleotide
cuugcccuuaacuugcuug

SEQ ID NO: 2777660 - RNA, 19 nt, Artificial Sequence
  Description of Artificial Sequence: Synthetic oligonucleotide
aggccuagagaacauguag

SEQ ID NO: 2777661 - RNA, 19 nt, Artificial Sequence
  Description of Artificial Sequence: Synthetic oligonucleotide
uuguguucgucauuuuggc

SEQ ID NO: 2777662 - RNA, 19 nt, Artificial Sequence
  Description of Artificial Sequence: Synthetic oligonucleotide
aggaacaacuccaugcuuc

SEQ ID NO: 2777663 - RNA, 19 nt, Artificial Sequence
  Description of Artificial Sequence: Synthetic oligonucleotide
gauccgaacauuaauccuc

SEQ ID NO: 2777664 - RNA, 19 nt, Artificial Sequence
  Description of Artificial Sequence: Synthetic oligonucleotide
cuuuguguucgucauuuug

SEQ ID NO: 2777665 - RNA, 19 nt, Artificial Sequence
  Description of Artificial Sequence: Synthetic oligonucleotide
cucuuggcaagaaucuugc

SEQ ID NO: 2777666 - RNA, 19 nt, Artificial Sequence
  Description of Artificial Sequence: Synthetic oligonucleotide
guguucgucauuuuggcga

SEQ ID NO: 2777667 - RNA, 19 nt, Artificial Sequence
  Description of Artificial Sequence: Synthetic oligonucleotide
uguucgucauuuuggcgag

SEQ ID NO: 2777668 - RNA, 19 nt, Artificial Sequence
  Description of Artificial Sequence: Synthetic oligonucleotide
uccuucacccgcuucagga

SEQ ID NO: 2777669 - RNA, 19 nt, Artificial Sequence
  Description of Artificial Sequence: Synthetic oligonucleotide
aaaggccuagagaacaugu

SEQ ID NO: 2777670 - RNA, 19 nt, Artificial Sequence
  Description of Artificial Sequence: Synthetic oligonucleotide
ucugcucuuagagugcuug

SEQ ID NO: 2777671 - RNA, 19 nt, Artificial Sequence
  Description of Artificial Sequence: Synthetic oligonucleotide
ucagcugaacccaggugcc

SEQ ID NO: 2777672 - RNA, 19 nt, Artificial Sequence
  Description of Artificial Sequence: Synthetic oligonucleotide
uggaagauggcugccgcgg

SEQ ID NO: 2777673 - RNA, 19 nt, Artificial Sequence
  Description of Artificial Sequence: Synthetic oligonucleotide
uucccguuaguccucacaa

SEQ ID NO: 2777674 - RNA, 19 nt, Artificial Sequence
  Description of Artificial Sequence: Synthetic oligonucleotide
ucuuagagugcuugaugug

SEQ ID NO: 2777675 - RNA, 19 nt, Artificial Sequence
  Description of Artificial Sequence: Synthetic oligonucleotide
cgaacauuaauccucuugg

SEQ ID NO: 2777676 - RNA, 19 nt, Artificial Sequence
  Description of Artificial Sequence: Synthetic oligonucleotide
uuacaguccagguucuggu

SEQ ID NO: 2777677 - RNA, 19 nt, Artificial Sequence
  Description of Artificial Sequence: Synthetic oligonucleotide
auaugggaugggcuccagc

SEQ ID NO: 2777678 - RNA, 19 nt, Artificial Sequence
  Description of Artificial Sequence: Synthetic oligonucleotide
cauuuuggcgagucacugg

SEQ ID NO: 2777679 - RNA, 19 nt, Artificial Sequence
  Description of Artificial Sequence: Synthetic oligonucleotide
ucaggaagcugucucugcu

SEQ ID NO: 2777680 - RNA, 19 nt, Artificial Sequence
  Description of Artificial Sequence: Synthetic oligonucleotide
gucacuggaagauggcugc

SEQ ID NO: 2777681 - RNA, 19 nt, Artificial Sequence
  Description of Artificial Sequence: Synthetic oligonucleotide
aaagugugccucucugggu

SEQ ID NO: 2777682 - RNA, 19 nt, Artificial Sequence
  Description of Artificial Sequence: Synthetic oligonucleotide
gagaacauguagcgagugc

SEQ ID NO: 2777683 - RNA, 19 nt, Artificial Sequence
  Description of Artificial Sequence: Synthetic oligonucleotide
ucauuuuggcgagucacug

SEQ ID NO: 2777684 - RNA, 19 nt, Artificial Sequence
  Description of Artificial Sequence: Synthetic oligonucleotide
ucauuuuccuucacccgcu

SEQ ID NO: 2777685 - RNA, 19 nt, Artificial Sequence
  Description of Artificial Sequence: Synthetic oligonucleotide
cuaaaaggccuagagaaca

SEQ ID NO: 2777686 - RNA, 19 nt, Artificial Sequence
  Description of Artificial Sequence: Synthetic oligonucleotide
ucaggcuccuucccguuag

SEQ ID NO: 2777687 - RNA, 19 nt, Artificial Sequence
  Description of Artificial Sequence: Synthetic oligonucleotide
gaugcccacggcaugcugg

SEQ ID NO: 2777688 - RNA, 19 nt, Artificial Sequence
  Description of Artificial Sequence: Synthetic oligonucleotide
gccuagagaacauguagcg

SEQ ID NO: 2777689 - RNA, 19 nt, Artificial Sequence
  Description of Artificial Sequence: Synthetic oligonucleotide
uguucgauccgaacauuaa

SEQ ID NO: 2777690 - RNA, 19 nt, Artificial Sequence
  Description of Artificial Sequence: Synthetic oligonucleotide
aaaaggccuagagaacaug

SEQ ID NO: 2777691 - RNA, 19 nt, Artificial Sequence
  Description of Artificial Sequence: Synthetic oligonucleotide
agagugcuugauguguucg

SEQ ID NO: 2777692 - RNA, 19 nt, Artificial Sequence
  Description of Artificial Sequence: Synthetic oligonucleotide
uucauaugggaugggcucc

SEQ ID NO: 2777693 - RNA, 19 nt, Artificial Sequence
  Description of Artificial Sequence: Synthetic oligonucleotide
uggcgcuucagcugaaccc

SEQ ID NO: 2777694 - RNA, 19 nt, Artificial Sequence
  Description of Artificial Sequence: Synthetic oligonucleotide
uagagaacauguagcgagu

SEQ ID NO: 2777695 - RNA, 19 nt, Artificial Sequence
  Description of Artificial Sequence: Synthetic oligonucleotide
cuggucauuuuccuucacc

SEQ ID NO: 2777696 - RNA, 19 nt, Artificial Sequence
  Description of Artificial Sequence: Synthetic oligonucleotide
agugccccuccucuugccc

SEQ ID NO: 2777697 - RNA, 19 nt, Artificial Sequence
  Description of Artificial Sequence: Synthetic oligonucleotide
uugcccuuaacuugcuugu

SEQ ID NO: 2777698 - RNA, 19 nt, Artificial Sequence
  Description of Artificial Sequence: Synthetic oligonucleotide
acaguccagguucuggucu

SEQ ID NO: 2777699 - RNA, 19 nt, Artificial Sequence
  Description of Artificial Sequence: Synthetic oligonucleotide
uuacaaugaugcccacggc

SEQ ID NO: 2777700 - RNA, 19 nt, Artificial Sequence
  Description of Artificial Sequence: Synthetic oligonucleotide
uuguacauuaggccaugaa

SEQ ID NO: 2777701 - RNA, 19 nt, Artificial Sequence
  Description of Artificial Sequence: Synthetic oligonucleotide
auguguucgauccgaacau

SEQ ID NO: 2777702 - RNA, 19 nt, Artificial Sequence
  Description of Artificial Sequence: Synthetic oligonucleotide
uaaaaggccuagagaacau

SEQ ID NO: 2777703 - RNA, 19 nt, Artificial Sequence
  Description of Artificial Sequence: Synthetic oligonucleotide
ggucauuuuccuucacccg

SEQ ID NO: 2777704 - RNA, 19 nt, Artificial Sequence
  Description of Artificial Sequence: Synthetic oligonucleotide
uucuucuggucauuuuccu

SEQ ID NO: 2777705 - RNA, 19 nt, Artificial Sequence
  Description of Artificial Sequence: Synthetic oligonucleotide
uugcccuuuguguucguca

SEQ ID NO: 2777706 - RNA, 19 nt, Artificial Sequence
  Description of Artificial Sequence: Synthetic oligonucleotide
ugaauucauaugggauggg

SEQ ID NO: 2777707 - RNA, 19 nt, Artificial Sequence
  Description of Artificial Sequence: Synthetic oligonucleotide
uuagagugcuugauguguu

SEQ ID NO: 2777708 - RNA, 19 nt, Artificial Sequence
  Description of Artificial Sequence: Synthetic oligonucleotide
uucaggaagcugucucugc

SEQ ID NO: 2777709 - RNA, 19 nt, Artificial Sequence
  Description of Artificial Sequence: Synthetic oligonucleotide
uuggcgagucacuggaaga

SEQ ID NO: 2777710 - RNA, 19 nt, Artificial Sequence
  Description of Artificial Sequence: Synthetic oligonucleotide
aggaagcugucucugcucu

SEQ ID NO: 2777711 - RNA, 19 nt, Artificial Sequence
  Description of Artificial Sequence: Synthetic oligonucleotide
uuuuguacauuaggccaug

SEQ ID NO: 2777712 - RNA, 19 nt, Artificial Sequence
  Description of Artificial Sequence: Synthetic oligonucleotide
uucacccgcuucaggaagc

SEQ ID NO: 2777713 - RNA, 19 nt, Artificial Sequence
  Description of Artificial Sequence: Synthetic oligonucleotide
cacaaagugugccucucug

SEQ ID NO: 2777714 - RNA, 19 nt, Artificial Sequence
  Description of Artificial Sequence: Synthetic oligonucleotide
gaacauguagcgagugccc

SEQ ID NO: 2777715 - RNA, 19 nt, Artificial Sequence
  Description of Artificial Sequence: Synthetic oligonucleotide
agguucuggucuuuuauuu

SEQ ID NO: 2777716 - RNA, 19 nt, Artificial Sequence
  Description of Artificial Sequence: Synthetic oligonucleotide
uaguccucacaaagugugc

SEQ ID NO: 2777717 - RNA, 19 nt, Artificial Sequence
  Description of Artificial Sequence: Synthetic oligonucleotide
aagcugucucugcucuuag

SEQ ID NO: 2777718 - RNA, 19 nt, Artificial Sequence
  Description of Artificial Sequence: Synthetic oligonucleotide
ugauguguucgauccgaac

SEQ ID NO: 2777719 - RNA, 19 nt, Artificial Sequence
  Description of Artificial Sequence: Synthetic oligonucleotide
uaauccucuuggcaagaau

SEQ ID NO: 2777720 - RNA, 19 nt, Artificial Sequence
  Description of Artificial Sequence: Synthetic oligonucleotide
aaggaacaacuccaugcuu

SEQ ID NO: 2777721 - RNA, 19 nt, Artificial Sequence
  Description of Artificial Sequence: Synthetic oligonucleotide
agucacuggaagauggcug

SEQ ID NO: 2777722 - RNA, 19 nt, Artificial Sequence
  Description of Artificial Sequence: Synthetic oligonucleotide
uccucuugcccuuuguguu

SEQ ID NO: 2777723 - RNA, 19 nt, Artificial Sequence
  Description of Artificial Sequence: Synthetic oligonucleotide
cuucacccgcuucaggaag

SEQ ID NO: 2777724 - RNA, 19 nt, Artificial Sequence
  Description of Artificial Sequence: Synthetic oligonucleotide
ucacaaagugugccucucu

SEQ ID NO: 2777725 - RNA, 19 nt, Artificial Sequence
  Description of Artificial Sequence: Synthetic oligonucleotide
ggaacaacuccaugcuucc

SEQ ID NO: 2777726 - RNA, 19 nt, Artificial Sequence
  Description of Artificial Sequence: Synthetic oligonucleotide
uuccuucacccgcuucagg

SEQ ID NO: 2777727 - RNA, 19 nt, Artificial Sequence
  Description of Artificial Sequence: Synthetic oligonucleotide
ucuuggcaagaaucuugcc

SEQ ID NO: 2777728 - RNA, 19 nt, Artificial Sequence
  Description of Artificial Sequence: Synthetic oligonucleotide
agugugccucucugggugg

SEQ ID NO: 2777729 - RNA, 19 nt, Artificial Sequence
  Description of Artificial Sequence: Synthetic oligonucleotide
cucuuagagugcuugaugu

SEQ ID NO: 2777730 - RNA, 19 nt, Artificial Sequence
  Description of Artificial Sequence: Synthetic oligonucleotide
cccuuuacaguccagguuc

SEQ ID NO: 2777731 - RNA, 19 nt, Artificial Sequence
  Description of Artificial Sequence: Synthetic oligonucleotide
agagaacauguagcgagug

SEQ ID NO: 2777732 - RNA, 19 nt, Artificial Sequence
  Description of Artificial Sequence: Synthetic oligonucleotide
cuggaagauggcugccgcg

SEQ ID NO: 2777733 - RNA, 19 nt, Artificial Sequence
  Description of Artificial Sequence: Synthetic oligonucleotide
augcccacggcaugcuggg

SEQ ID NO: 2777734 - RNA, 19 nt, Artificial Sequence
  Description of Artificial Sequence: Synthetic oligonucleotide
cuugauguguucgauccga

SEQ ID NO: 2777735 - RNA, 19 nt, Artificial Sequence
  Description of Artificial Sequence: Synthetic oligonucleotide
aaaacccuuuacaguccag

SEQ ID NO: 2777736 - RNA, 19 nt, Artificial Sequence
  Description of Artificial Sequence: Synthetic oligonucleotide
gaugggcuccagcagcuca

SEQ ID NO: 2777737 - RNA, 19 nt, Artificial Sequence
  Description of Artificial Sequence: Synthetic oligonucleotide
acaaugaugcccacggcau

SEQ ID NO: 2777738 - RNA, 19 nt, Artificial Sequence
  Description of Artificial Sequence: Synthetic oligonucleotide
uugauguguucgauccgaa

SEQ ID NO: 2777739 - RNA, 19 nt, Artificial Sequence
  Description of Artificial Sequence: Synthetic oligonucleotide
uucgucauuuuggcgaguc

SEQ ID NO: 2777740 - RNA, 19 nt, Artificial Sequence
  Description of Artificial Sequence: Synthetic oligonucleotide
acauguagcgagugccccu

SEQ ID NO: 2777741 - RNA, 19 nt, Artificial Sequence
  Description of Artificial Sequence: Synthetic oligonucleotide
ucgucauuuuggcgaguca

SEQ ID NO: 2777742 - RNA, 19 nt, Artificial Sequence
  Description of Artificial Sequence: Synthetic oligonucleotide
caagaaucuugcccuuaac

SEQ ID NO: 2777743 - RNA, 19 nt, Artificial Sequence
  Description of Artificial Sequence: Synthetic oligonucleotide
cccguuaguccucacaaag

SEQ ID NO: 2777744 - RNA, 19 nt, Artificial Sequence
  Description of Artificial Sequence: Synthetic oligonucleotide
ugcaggcuggcgcuucagc

SEQ ID NO: 2777745 - RNA, 19 nt, Artificial Sequence
  Description of Artificial Sequence: Synthetic oligonucleotide
uguagcgagugccccuccu

SEQ ID NO: 2777746 - RNA, 19 nt, Artificial Sequence
  Description of Artificial Sequence: Synthetic oligonucleotide
auuaauccucuuggcaaga

SEQ ID NO: 2777747 - RNA, 19 nt, Artificial Sequence
  Description of Artificial Sequence: Synthetic oligonucleotide
cuggcgcuucagcugaacc

SEQ ID NO: 2777748 - RNA, 19 nt, Artificial Sequence
  Description of Artificial Sequence: Synthetic oligonucleotide
uuuguacauuaggccauga

SEQ ID NO: 2777749 - RNA, 19 nt, Artificial Sequence
  Description of Artificial Sequence: Synthetic oligonucleotide
uagagugcuugauguguuc

SEQ ID NO: 2777750 - RNA, 19 nt, Artificial Sequence
  Description of Artificial Sequence: Synthetic oligonucleotide
ugcccuuuguguucgucau

SEQ ID NO: 2777751 - RNA, 19 nt, Artificial Sequence
  Description of Artificial Sequence: Synthetic oligonucleotide
auguagcgagugccccucc

SEQ ID NO: 2777752 - RNA, 19 nt, Artificial Sequence
  Description of Artificial Sequence: Synthetic oligonucleotide
gagugcuugauguguucga

SEQ ID NO: 2777753 - RNA, 19 nt, Artificial Sequence
  Description of Artificial Sequence: Synthetic oligonucleotide
auccucuuggcaagaaucu

SEQ ID NO: 2777754 - RNA, 19 nt, Artificial Sequence
  Description of Artificial Sequence: Synthetic oligonucleotide
cuucaggaagcugucucug

SEQ ID NO: 2777755 - RNA, 19 nt, Artificial Sequence
  Description of Artificial Sequence: Synthetic oligonucleotide
ggcuccuucccguuagucc

SEQ ID NO: 2777756 - RNA, 19 nt, Artificial Sequence
  Description of Artificial Sequence: Synthetic oligonucleotide
ucucugcucuuagagugcu

SEQ ID NO: 2777757 - RNA, 19 nt, Artificial Sequence
  Description of Artificial Sequence: Synthetic oligonucleotide
ucauaugggaugggcucca

SEQ ID NO: 2777758 - RNA, 19 nt, Artificial Sequence
  Description of Artificial Sequence: Synthetic oligonucleotide
gcgagucacuggaagaugg

SEQ ID NO: 2777759 - RNA, 19 nt, Artificial Sequence
  Description of Artificial Sequence: Synthetic oligonucleotide
gcucuuagagugcuugaug

SEQ ID NO: 2777760 - RNA, 19 nt, Artificial Sequence
  Description of Artificial Sequence: Synthetic oligonucleotide
ggccuagagaacauguagc

SEQ ID NO: 2777761 - RNA, 19 nt, Artificial Sequence
  Description of Artificial Sequence: Synthetic oligonucleotide
uuaauccucuuggcaagaa

SEQ ID NO: 2777762 - RNA, 19 nt, Artificial Sequence
  Description of Artificial Sequence: Synthetic oligonucleotide
ccuaaaaggccuagagaac

SEQ ID NO: 2777763 - RNA, 19 nt, Artificial Sequence
  Description of Artificial Sequence: Synthetic oligonucleotide
ucuggucauuuuccuucac

SEQ ID NO: 2777764 - RNA, 19 nt, Artificial Sequence
  Description of Artificial Sequence: Synthetic oligonucleotide
uuuuggcgagucacuggaa

SEQ ID NO: 2777765 - RNA, 19 nt, Artificial Sequence
  Description of Artificial Sequence: Synthetic oligonucleotide
ugcucuuagagugcuugau

SEQ ID NO: 2777766 - RNA, 19 nt, Artificial Sequence
  Description of Artificial Sequence: Synthetic oligonucleotide
ccgaacauuaauccucuug

SEQ ID NO: 2777767 - RNA, 19 nt, Artificial Sequence
  Description of Artificial Sequence: Synthetic oligonucleotide
uccucacaaagugugccuc

SEQ ID NO: 2777768 - RNA, 19 nt, Artificial Sequence
  Description of Artificial Sequence: Synthetic oligonucleotide
ugaugcccacggcaugcug

SEQ ID NO: 2777769 - RNA, 19 nt, Artificial Sequence
  Description of Artificial Sequence: Synthetic oligonucleotide
uacguggccaaaggaacaa

SEQ ID NO: 2777770 - RNA, 19 nt, Artificial Sequence
  Description of Artificial Sequence: Synthetic oligonucleotide
ugaacccaggugcccuucu

SEQ ID NO: 2777771 - RNA, 19 nt, Artificial Sequence
  Description of Artificial Sequence: Synthetic oligonucleotide
cguuaguccucacaaagug

SEQ ID NO: 2777772 - RNA, 19 nt, Artificial Sequence
  Description of Artificial Sequence: Synthetic oligonucleotide
caaugaugcccacggcaug

SEQ ID NO: 2777773 - RNA, 19 nt, Artificial Sequence
  Description of Artificial Sequence: Synthetic oligonucleotide
acccuuuacaguccagguu

SEQ ID NO: 2777774 - RNA, 19 nt, Artificial Sequence
  Description of Artificial Sequence: Synthetic oligonucleotide
cuuagagugcuugaugugu

SEQ ID NO: 2777775 - RNA, 19 nt, Artificial Sequence
  Description of Artificial Sequence: Synthetic oligonucleotide
caggcuggcgcuucagcug

SEQ ID NO: 2777776 - RNA, 19 nt, Artificial Sequence
  Description of Artificial Sequence: Synthetic oligonucleotide
auccgaacauuaauccucu

SEQ ID NO: 2777777 - RNA, 19 nt, Artificial Sequence
  Description of Artificial Sequence: Synthetic oligonucleotide
aggcuggcgcuucagcuga

SEQ ID NO: 2777778 - RNA, 19 nt, Artificial Sequence
  Description of Artificial Sequence: Synthetic oligonucleotide
cagcucaggcuccuucccg

SEQ ID NO: 2777779 - RNA, 19 nt, Artificial Sequence
  Description of Artificial Sequence: Synthetic oligonucleotide
uggcgagucacuggaagau

SEQ ID NO: 2777780 - RNA, 19 nt, Artificial Sequence
  Description of Artificial Sequence: Synthetic oligonucleotide
acccaggugcccuucuccu

SEQ ID NO: 2777781 - RNA, 19 nt, Artificial Sequence
  Description of Artificial Sequence: Synthetic oligonucleotide
agugcuugauguguucgau

SEQ ID NO: 2777782 - RNA, 19 nt, Artificial Sequence
  Description of Artificial Sequence: Synthetic oligonucleotide
caggaagcugucucugcuc

SEQ ID NO: 2777783 - RNA, 19 nt, Artificial Sequence
  Description of Artificial Sequence: Synthetic oligonucleotide
gcuccagcagcucaggcuc

SEQ ID NO: 2777784 - RNA, 19 nt, Artificial Sequence
  Description of Artificial Sequence: Synthetic oligonucleotide
gcuugauguguucgauccg

SEQ ID NO: 2777785 - RNA, 19 nt, Artificial Sequence
  Description of Artificial Sequence: Synthetic oligonucleotide
guggccaaaggaacaacuc

SEQ ID NO: 2777786 - RNA, 19 nt, Artificial Sequence
  Description of Artificial Sequence: Synthetic oligonucleotide
gugcuugauguguucgauc

SEQ ID NO: 2777787 - RNA, 19 nt, Artificial Sequence
  Description of Artificial Sequence: Synthetic oligonucleotide
aaggccuagagaacaugua

SEQ ID NO: 2777788 - RNA, 19 nt, Artificial Sequence
  Description of Artificial Sequence: Synthetic oligonucleotide
uccagguucuggucuuuua

SEQ ID NO: 2777789 - RNA, 19 nt, Artificial Sequence
  Description of Artificial Sequence: Synthetic oligonucleotide
cauguagcgagugccccuc

SEQ ID NO: 2777790 - RNA, 19 nt, Artificial Sequence
  Description of Artificial Sequence: Synthetic oligonucleotide
acguggccaaaggaacaac

SEQ ID NO: 2777791 - RNA, 19 nt, Artificial Sequence
  Description of Artificial Sequence: Synthetic oligonucleotide
ggccaaaggaacaacucca

SEQ ID NO: 2777792 - RNA, 19 nt, Artificial Sequence
  Description of Artificial Sequence: Synthetic oligonucleotide
gaagcugucucugcucuua

SEQ ID NO: 2777793 - RNA, 19 nt, Artificial Sequence
  Description of Artificial Sequence: Synthetic oligonucleotide
ucccguuaguccucacaaa

SEQ ID NO: 2777794 - RNA, 19 nt, Artificial Sequence
  Description of Artificial Sequence: Synthetic oligonucleotide
cuucccguuaguccucaca

SEQ ID NO: 2777795 - RNA, 19 nt, Artificial Sequence
  Description of Artificial Sequence: Synthetic oligonucleotide
guucgauccgaacauuaau

SEQ ID NO: 2777796 - RNA, 19 nt, Artificial Sequence
  Description of Artificial Sequence: Synthetic oligonucleotide
gucucugcucuuagagugc

SEQ ID NO: 2777797 - RNA, 19 nt, Artificial Sequence
  Description of Artificial Sequence: Synthetic oligonucleotide
cucacaaagugugccucuc

SEQ ID NO: 2777798 - RNA, 19 nt, Artificial Sequence
  Description of Artificial Sequence: Synthetic oligonucleotide
agcugaacccaggugcccu

SEQ ID NO: 2777799 - RNA, 19 nt, Artificial Sequence
  Description of Artificial Sequence: Synthetic oligonucleotide
ugggcuccagcagcucagg

SEQ ID NO: 2777800 - RNA, 19 nt, Artificial Sequence
  Description of Artificial Sequence: Synthetic oligonucleotide
uguguucgauccgaacauu

SEQ ID NO: 2777801 - RNA, 19 nt, Artificial Sequence
  Description of Artificial Sequence: Synthetic oligonucleotide
guagcgagugccccuccuc

SEQ ID NO: 2777802 - RNA, 19 nt, Artificial Sequence
  Description of Artificial Sequence: Synthetic oligonucleotide
guacguggccaaaggaaca

SEQ ID NO: 2777803 - RNA, 19 nt, Artificial Sequence
  Description of Artificial Sequence: Synthetic oligonucleotide
uggguggugcaggcuggcg

SEQ ID NO: 2777804 - RNA, 19 nt, Artificial Sequence
  Description of Artificial Sequence: Synthetic oligonucleotide
ucuugcccuuaacuugcuu

SEQ ID NO: 2777805 - RNA, 19 nt, Artificial Sequence
  Description of Artificial Sequence: Synthetic oligonucleotide
guuaguccucacaaagugu

SEQ ID NO: 2777806 - RNA, 19 nt, Artificial Sequence
  Description of Artificial Sequence: Synthetic oligonucleotide
cuuuacaguccagguucug

SEQ ID NO: 2777807 - RNA, 19 nt, Artificial Sequence
  Description of Artificial Sequence: Synthetic oligonucleotide
ccaaaggaacaacuccaug

SEQ ID NO: 2777808 - RNA, 19 nt, Artificial Sequence
  Description of Artificial Sequence: Synthetic oligonucleotide
gagugccccuccucuugcc

SEQ ID NO: 2777809 - RNA, 19 nt, Artificial Sequence
  Description of Artificial Sequence: Synthetic oligonucleotide
aggcuccuucccguuaguc

SEQ ID NO: 2777810 - RNA, 19 nt, Artificial Sequence
  Description of Artificial Sequence: Synthetic oligonucleotide
gaacccaggugcccuucuc

SEQ ID NO: 2777811 - RNA, 19 nt, Artificial Sequence
  Description of Artificial Sequence: Synthetic oligonucleotide
augggcuccagcagcucag

SEQ ID NO: 2777812 - RNA, 19 nt, Artificial Sequence
  Description of Artificial Sequence: Synthetic oligonucleotide
uccucuuggcaagaaucuu

SEQ ID NO: 2777813 - RNA, 19 nt, Artificial Sequence
  Description of Artificial Sequence: Synthetic oligonucleotide
ugccucucuggguggugca

SEQ ID NO: 2777814 - RNA, 19 nt, Artificial Sequence
  Description of Artificial Sequence: Synthetic oligonucleotide
gagucacuggaagauggcu

SEQ ID NO: 2777815 - RNA, 19 nt, Artificial Sequence
  Description of Artificial Sequence: Synthetic oligonucleotide
cuccucuugcccuuugugu

SEQ ID NO: 2777816 - RNA, 19 nt, Artificial Sequence
  Description of Artificial Sequence: Synthetic oligonucleotide
gcaagaaucuugcccuuaa

SEQ ID NO: 2777817 - RNA, 19 nt, Artificial Sequence
  Description of Artificial Sequence: Synthetic oligonucleotide
acggcaugcugggugacau

SEQ ID NO: 2777818 - RNA, 19 nt, Artificial Sequence
  Description of Artificial Sequence: Synthetic oligonucleotide
cgucauuuuggcgagucac

SEQ ID NO: 2777819 - RNA, 19 nt, Artificial Sequence
  Description of Artificial Sequence: Synthetic oligonucleotide
ggcgcuucagcugaaccca

SEQ ID NO: 2777820 - RNA, 19 nt, Artificial Sequence
  Description of Artificial Sequence: Synthetic oligonucleotide
guguucgauccgaacauua

SEQ ID NO: 2777821 - RNA, 19 nt, Artificial Sequence
  Description of Artificial Sequence: Synthetic oligonucleotide
cugcucuuagagugcuuga

SEQ ID NO: 2777822 - RNA, 19 nt, Artificial Sequence
  Description of Artificial Sequence: Synthetic oligonucleotide
uccuucccguuaguccuca

SEQ ID NO: 2777823 - RNA, 19 nt, Artificial Sequence
  Description of Artificial Sequence: Synthetic oligonucleotide
gugccucucuggguggugc

SEQ ID NO: 2777824 - RNA, 19 nt, Artificial Sequence
  Description of Artificial Sequence: Synthetic oligonucleotide
ugugccucucuggguggug

SEQ ID NO: 2777825 - RNA, 19 nt, Artificial Sequence
  Description of Artificial Sequence: Synthetic oligonucleotide
gucauuuuggcgagucacu

SEQ ID NO: 2777826 - RNA, 19 nt, Artificial Sequence
  Description of Artificial Sequence: Synthetic oligonucleotide
cuugcccuuuguguucguc

SEQ ID NO: 2777827 - RNA, 19 nt, Artificial Sequence
  Description of Artificial Sequence: Synthetic oligonucleotide
gcagcucaggcuccuuccc

SEQ ID NO: 2777828 - RNA, 19 nt, Artificial Sequence
  Description of Artificial Sequence: Synthetic oligonucleotide
cugucucugcucuuagagu

SEQ ID NO: 2777829 - RNA, 19 nt, Artificial Sequence
  Description of Artificial Sequence: Synthetic oligonucleotide
cauaugggaugggcuccag

SEQ ID NO: 2777830 - RNA, 19 nt, Artificial Sequence
  Description of Artificial Sequence: Synthetic oligonucleotide
ccaugaauucauaugggau

SEQ ID NO: 2777831 - RNA, 19 nt, Artificial Sequence
  Description of Artificial Sequence: Synthetic oligonucleotide
ucucuggguggugcaggcu

SEQ ID NO: 2777832 - RNA, 19 nt, Artificial Sequence
  Description of Artificial Sequence: Synthetic oligonucleotide
gcccacggcaugcugggug

SEQ ID NO: 2777833 - RNA, 19 nt, Artificial Sequence
  Description of Artificial Sequence: Synthetic oligonucleotide
cuccuucccguuaguccuc

SEQ ID NO: 2777834 - RNA, 19 nt, Artificial Sequence
  Description of Artificial Sequence: Synthetic oligonucleotide
cagcugaacccaggugccc

SEQ ID NO: 2777835 - RNA, 19 nt, Artificial Sequence
  Description of Artificial Sequence: Synthetic oligonucleotide
uccgaacauuaauccucuu

SEQ ID NO: 2777836 - RNA, 19 nt, Artificial Sequence
  Description of Artificial Sequence: Synthetic oligonucleotide
augaugcccacggcaugcu

SEQ ID NO: 2777837 - RNA, 19 nt, Artificial Sequence
  Description of Artificial Sequence: Synthetic oligonucleotide
gugcccuucuccuuggcuu

SEQ ID NO: 2777838 - RNA, 19 nt, Artificial Sequence
  Description of Artificial Sequence: Synthetic oligonucleotide
gcgagugccccuccucuug

SEQ ID NO: 2777839 - RNA, 19 nt, Artificial Sequence
  Description of Artificial Sequence: Synthetic oligonucleotide
agcgagugccccuccucuu

SEQ ID NO: 2777840 - RNA, 19 nt, Artificial Sequence
  Description of Artificial Sequence: Synthetic oligonucleotide
ccucuugcccuuuguguuc

SEQ ID NO: 2777841 - RNA, 19 nt, Artificial Sequence
  Description of Artificial Sequence: Synthetic oligonucleotide
ggcgagucacuggaagaug

SEQ ID NO: 2777842 - RNA, 19 nt, Artificial Sequence
  Description of Artificial Sequence: Synthetic oligonucleotide
cccuuaacuugcuuguuua

SEQ ID NO: 2777843 - RNA, 19 nt, Artificial Sequence
  Description of Artificial Sequence: Synthetic oligonucleotide
gcuucaggaagcugucucu

SEQ ID NO: 2777844 - RNA, 19 nt, Artificial Sequence
  Description of Artificial Sequence: Synthetic oligonucleotide
cgagucacuggaagauggc

SEQ ID NO: 2777845 - RNA, 19 nt, Artificial Sequence
  Description of Artificial Sequence: Synthetic oligonucleotide
ugcccuuaacuugcuuguu

SEQ ID NO: 2777846 - RNA, 19 nt, Artificial Sequence
  Description of Artificial Sequence: Synthetic oligonucleotide
cuggguggugcaggcuggc

SEQ ID NO: 2777847 - RNA, 19 nt, Artificial Sequence
  Description of Artificial Sequence: Synthetic oligonucleotide
gcuucagcugaacccaggu

SEQ ID NO: 2777848 - RNA, 19 nt, Artificial Sequence
  Description of Artificial Sequence: Synthetic oligonucleotide
ccuagagaacauguagcga

SEQ ID NO: 2777849 - RNA, 19 nt, Artificial Sequence
  Description of Artificial Sequence: Synthetic oligonucleotide
gguggugcaggcuggcgcu

SEQ ID NO: 2777850 - RNA, 19 nt, Artificial Sequence
  Description of Artificial Sequence: Synthetic oligonucleotide
cagguucuggucuuuuauu

SEQ ID NO: 2777851 - RNA, 19 nt, Artificial Sequence
  Description of Artificial Sequence: Synthetic oligonucleotide
cugaacccaggugcccuuc

SEQ ID NO: 2777852 - RNA, 19 nt, Artificial Sequence
  Description of Artificial Sequence: Synthetic oligonucleotide
ccucucuggguggugcagg

SEQ ID NO: 2777853 - RNA, 19 nt, Artificial Sequence
  Description of Artificial Sequence: Synthetic oligonucleotide
ugccccuccucuugcccuu

SEQ ID NO: 2777854 - RNA, 19 nt, Artificial Sequence
  Description of Artificial Sequence: Synthetic oligonucleotide
gaacaacuccaugcuuccu

SEQ ID NO: 2777855 - RNA, 19 nt, Artificial Sequence
  Description of Artificial Sequence: Synthetic oligonucleotide
gcaggcuggcgcuucagcu

SEQ ID NO: 2777856 - RNA, 19 nt, Artificial Sequence
  Description of Artificial Sequence: Synthetic oligonucleotide
uggugcaggcuggcgcuuc

SEQ ID NO: 2777857 - RNA, 19 nt, Artificial Sequence
  Description of Artificial Sequence: Synthetic oligonucleotide
gggcuccagcagcucaggc

SEQ ID NO: 2777858 - RNA, 19 nt, Artificial Sequence
  Description of Artificial Sequence: Synthetic oligonucleotide
cgcuucagcugaacccagg

SEQ ID NO: 2777859 - RNA, 19 nt, Artificial Sequence
  Description of Artificial Sequence: Synthetic oligonucleotide
gugcaggcuggcgcuucag

SEQ ID NO: 2777860 - RNA, 19 nt, Artificial Sequence
  Description of Artificial Sequence: Synthetic oligonucleotide
gugccccuccucuugcccu

SEQ ID NO: 2777861 - RNA, 19 nt, Artificial Sequence
  Description of Artificial Sequence: Synthetic oligonucleotide
cucaggcuccuucccguua

SEQ ID NO: 2777862 - RNA, 19 nt, Artificial Sequence
  Description of Artificial Sequence: Synthetic oligonucleotide
ggugcaggcuggcgcuuca

SEQ ID NO: 2777863 - RNA, 19 nt, Artificial Sequence
  Description of Artificial Sequence: Synthetic oligonucleotide
ggugcccuucuccuuggcu

SEQ ID NO: 2777864 - RNA, 19 nt, Artificial Sequence
  Description of Artificial Sequence: Synthetic oligonucleotide
cgagugccccuccucuugc

SEQ ID NO: 2777865 - RNA, 19 nt, Artificial Sequence
  Description of Artificial Sequence: Synthetic oligonucleotide
cacccgcuucaggaagcug

SEQ ID NO: 2777866 - RNA, 19 nt, Artificial Sequence
  Description of Artificial Sequence: Synthetic oligonucleotide
ccguuaguccucacaaagu

SEQ ID NO: 2777867 - RNA, 19 nt, Artificial Sequence
  Description of Artificial Sequence: Synthetic oligonucleotide
gccucucuggguggugcag

SEQ ID NO: 2777868 - RNA, 19 nt, Artificial Sequence
  Description of Artificial Sequence: Synthetic oligonucleotide
cacggcaugcugggugaca

SEQ ID NO: 2777869 - RNA, 19 nt, Artificial Sequence
  Description of Artificial Sequence: Synthetic oligonucleotide
cccacggcaugcuggguga

SEQ ID NO: 2777870 - RNA, 19 nt, Artificial Sequence
  Description of Artificial Sequence: Synthetic oligonucleotide
ggcaagaaucuugcccuua

SEQ ID NO: 2777871 - RNA, 19 nt, Artificial Sequence
  Description of Artificial Sequence: Synthetic oligonucleotide
ccagguucuggucuuuuau

SEQ ID NO: 2777872 - RNA, 19 nt, Artificial Sequence
  Description of Artificial Sequence: Synthetic oligonucleotide
ugcccacggcaugcugggu

SEQ ID NO: 2777873 - RNA, 19 nt, Artificial Sequence
  Description of Artificial Sequence: Synthetic oligonucleotide
cguggccaaaggaacaacu

SEQ ID NO: 2777874 - RNA, 19 nt, Artificial Sequence
  Description of Artificial Sequence: Synthetic oligonucleotide
cgauccgaacauuaauccu

SEQ ID NO: 2777875 - RNA, 19 nt, Artificial Sequence
  Description of Artificial Sequence: Synthetic oligonucleotide
gcgcuucagcugaacccag

SEQ ID NO: 2777876 - RNA, 19 nt, Artificial Sequence
  Description of Artificial Sequence: Synthetic oligonucleotide
caguccagguucuggucuu

SEQ ID NO: 2777877 - RNA, 19 nt, Artificial Sequence
  Description of Artificial Sequence: Synthetic oligonucleotide
ccuuuacaguccagguucu

SEQ ID NO: 2777878 - RNA, 19 nt, Artificial Sequence
  Description of Artificial Sequence: Synthetic oligonucleotide
cauuuuccuucacccgcuu

SEQ ID NO: 2777879 - RNA, 19 nt, Artificial Sequence
  Description of Artificial Sequence: Synthetic oligonucleotide
ccucacaaagugugccucu

SEQ ID NO: 2777880 - RNA, 19 nt, Artificial Sequence
  Description of Artificial Sequence: Synthetic oligonucleotide
gcuggcgcuucagcugaac

SEQ ID NO: 2777881 - RNA, 19 nt, Artificial Sequence
  Description of Artificial Sequence: Synthetic oligonucleotide
cccuuuguguucgucauuu

SEQ ID NO: 2777882 - RNA, 19 nt, Artificial Sequence
  Description of Artificial Sequence: Synthetic oligonucleotide
guucgucauuuuggcgagu

SEQ ID NO: 2777883 - RNA, 19 nt, Artificial Sequence
  Description of Artificial Sequence: Synthetic oligonucleotide
ccuucccguuaguccucac

SEQ ID NO: 2777884 - RNA, 19 nt, Artificial Sequence
  Description of Artificial Sequence: Synthetic oligonucleotide
gugugccucucuggguggu

SEQ ID NO: 2777885 - RNA, 19 nt, Artificial Sequence
  Description of Artificial Sequence: Synthetic oligonucleotide
cucugcucuuagagugcuu

SEQ ID NO: 2777886 - RNA, 19 nt, Artificial Sequence
  Description of Artificial Sequence: Synthetic oligonucleotide
caggcuccuucccguuagu

SEQ ID NO: 2777887 - RNA, 19 nt, Artificial Sequence
  Description of Artificial Sequence: Synthetic oligonucleotide
guccagguucuggucuuuu

SEQ ID NO: 2777888 - RNA, 19 nt, Artificial Sequence
  Description of Artificial Sequence: Synthetic oligonucleotide
gcugaacccaggugcccuu

SEQ ID NO: 2777889 - RNA, 19 nt, Artificial Sequence
  Description of Artificial Sequence: Synthetic oligonucleotide
ccacggcaugcugggugac

SEQ ID NO: 2777890 - RNA, 19 nt, Artificial Sequence
  Description of Artificial Sequence: Synthetic oligonucleotide
ccccuccucuugcccuuug

SEQ ID NO: 2777891 - RNA, 19 nt, Artificial Sequence
  Description of Artificial Sequence: Synthetic oligonucleotide
gcucaggcuccuucccguu

SEQ ID NO: 2777892 - RNA, 19 nt, Artificial Sequence
  Description of Artificial Sequence: Synthetic oligonucleotide
gcccuuuguguucgucauu

SEQ ID NO: 2777893 - RNA, 19 nt, Artificial Sequence
  Description of Artificial Sequence: Synthetic oligonucleotide
guggugcaggcuggcgcuu

SEQ ID NO: 2777894 - RNA, 19 nt, Artificial Sequence
  Description of Artificial Sequence: Synthetic oligonucleotide
cccaggugcccuucuccuu

SEQ ID NO: 2777895 - RNA, 19 nt, Artificial Sequence
  Description of Artificial Sequence: Synthetic oligonucleotide
ggcuggcgcuucagcugaa

SEQ ID NO: 2777896 - RNA, 19 nt, Artificial Sequence
  Description of Artificial Sequence: Synthetic oligonucleotide
ccgcuucaggaagcugucu

SEQ ID NO: 2777897 - RNA, 19 nt, Artificial Sequence
  Description of Artificial Sequence: Synthetic oligonucleotide
gccccuccucuugcccuuu

SEQ ID NO: 2777898 - RNA, 19 nt, Artificial Sequence
  Description of Artificial Sequence: Synthetic oligonucleotide
aauuugguggcuuagagac

SEQ ID NO: 2777899 - RNA, 19 nt, Artificial Sequence
  Description of Artificial Sequence: Synthetic oligonucleotide
aaaugcauaacuuguagcc

SEQ ID NO: 2777900 - RNA, 19 nt, Artificial Sequence
  Description of Artificial Sequence: Synthetic oligonucleotide
uucaauaagaaucaccuug

SEQ ID NO: 2777901 - RNA, 19 nt, Artificial Sequence
  Description of Artificial Sequence: Synthetic oligonucleotide
auaagaaucaccuuggagu

SEQ ID NO: 2777902 - RNA, 19 nt, Artificial Sequence
  Description of Artificial Sequence: Synthetic oligonucleotide
aagaacaucgggcagagug

SEQ ID NO: 2777903 - RNA, 19 nt, Artificial Sequence
  Description of Artificial Sequence: Synthetic oligonucleotide
ucaauaagaaucaccuugg

SEQ ID NO: 2777904 - RNA, 19 nt, Artificial Sequence
  Description of Artificial Sequence: Synthetic oligonucleotide
aauaagaaucaccuuggag

SEQ ID NO: 2777905 - RNA, 19 nt, Artificial Sequence
  Description of Artificial Sequence: Synthetic oligonucleotide
aucuugaagaucuccaacc

SEQ ID NO: 2777906 - RNA, 19 nt, Artificial Sequence
  Description of Artificial Sequence: Synthetic oligonucleotide
acaaacaugugucuucugc

SEQ ID NO: 2777907 - RNA, 19 nt, Artificial Sequence
  Description of Artificial Sequence: Synthetic oligonucleotide
aacaaaguacuccagagaa

SEQ ID NO: 2777908 - RNA, 19 nt, Artificial Sequence
  Description of Artificial Sequence: Synthetic oligonucleotide
aaucuugaagaucuccaac

SEQ ID NO: 2777909 - RNA, 19 nt, Artificial Sequence
  Description of Artificial Sequence: Synthetic oligonucleotide
cuccauuucaauaagaauc

SEQ ID NO: 2777910 - RNA, 19 nt, Artificial Sequence
  Description of Artificial Sequence: Synthetic oligonucleotide
uuauuuucaagaacaucgg

SEQ ID NO: 2777911 - RNA, 19 nt, Artificial Sequence
  Description of Artificial Sequence: Synthetic oligonucleotide
agugugaugaacaaaguac

SEQ ID NO: 2777912 - RNA, 19 nt, Artificial Sequence
  Description of Artificial Sequence: Synthetic oligonucleotide
auuuucaagaacaucgggc

SEQ ID NO: 2777913 - RNA, 19 nt, Artificial Sequence
  Description of Artificial Sequence: Synthetic oligonucleotide
uuuucaagaacaucgggca

SEQ ID NO: 2777914 - RNA, 19 nt, Artificial Sequence
  Description of Artificial Sequence: Synthetic oligonucleotide
uugcugugcaucaugaggg

SEQ ID NO: 2777915 - RNA, 19 nt, Artificial Sequence
  Description of Artificial Sequence: Synthetic oligonucleotide
uugaagaucuccaaccugc

SEQ ID NO: 2777916 - RNA, 19 nt, Artificial Sequence
  Description of Artificial Sequence: Synthetic oligonucleotide
ugaacaaaguacuccagag

SEQ ID NO: 2777917 - RNA, 19 nt, Artificial Sequence
  Description of Artificial Sequence: Synthetic oligonucleotide
uauuuucaagaacaucggg

SEQ ID NO: 2777918 - RNA, 19 nt, Artificial Sequence
  Description of Artificial Sequence: Synthetic oligonucleotide
uccauuucaauaagaauca

SEQ ID NO: 2777919 - RNA, 19 nt, Artificial Sequence
  Description of Artificial Sequence: Synthetic oligonucleotide
auuucaauaagaaucaccu

SEQ ID NO: 2777920 - RNA, 19 nt, Artificial Sequence
  Description of Artificial Sequence: Synthetic oligonucleotide
aggucucucccauaaaugc

SEQ ID NO: 2777921 - RNA, 19 nt, Artificial Sequence
  Description of Artificial Sequence: Synthetic oligonucleotide
ucuucccuccacuugaugg

SEQ ID NO: 2777922 - RNA, 19 nt, Artificial Sequence
  Description of Artificial Sequence: Synthetic oligonucleotide
cugcauuuucacaagaugc

SEQ ID NO: 2777923 - RNA, 19 nt, Artificial Sequence
  Description of Artificial Sequence: Synthetic oligonucleotide
cuuagagacugcuuguugg

SEQ ID NO: 2777924 - RNA, 19 nt, Artificial Sequence
  Description of Artificial Sequence: Synthetic oligonucleotide
cagagugugaugaacaaag

SEQ ID NO: 2777925 - RNA, 19 nt, Artificial Sequence
  Description of Artificial Sequence: Synthetic oligonucleotide
uuucacaagaugcuggaga

SEQ ID NO: 2777926 - RNA, 19 nt, Artificial Sequence
  Description of Artificial Sequence: Synthetic oligonucleotide
uaagcaaacuccuugcugu

SEQ ID NO: 2777927 - RNA, 19 nt, Artificial Sequence
  Description of Artificial Sequence: Synthetic oligonucleotide
gauacugcuuuccaccacg

SEQ ID NO: 2777928 - RNA, 19 nt, Artificial Sequence
  Description of Artificial Sequence: Synthetic oligonucleotide
auaacuuguagccacauuu

SEQ ID NO: 2777929 - RNA, 19 nt, Artificial Sequence
  Description of Artificial Sequence: Synthetic oligonucleotide
ugaugaacaaaguacucca

SEQ ID NO: 2777930 - RNA, 19 nt, Artificial Sequence
  Description of Artificial Sequence: Synthetic oligonucleotide
cauuucaauaagaaucacc

SEQ ID NO: 2777931 - RNA, 19 nt, Artificial Sequence
  Description of Artificial Sequence: Synthetic oligonucleotide
cauuugguaccucacaugc

SEQ ID NO: 2777932 - RNA, 19 nt, Artificial Sequence
  Description of Artificial Sequence: Synthetic oligonucleotide
uucguaagcaaacuccuug

SEQ ID NO: 2777933 - RNA, 19 nt, Artificial Sequence
  Description of Artificial Sequence: Synthetic oligonucleotide
acuccagagaacugguucc

SEQ ID NO: 2777934 - RNA, 19 nt, Artificial Sequence
  Description of Artificial Sequence: Synthetic oligonucleotide
cauuuucacaagaugcugg

SEQ ID NO: 2777935 - RNA, 19 nt, Artificial Sequence
  Description of Artificial Sequence: Synthetic oligonucleotide
uaaaugcauaacuuguagc

SEQ ID NO: 2777936 - RNA, 19 nt, Artificial Sequence
  Description of Artificial Sequence: Synthetic oligonucleotide
aaguacuccagagaacugg

SEQ ID NO: 2777937 - RNA, 19 nt, Artificial Sequence
  Description of Artificial Sequence: Synthetic oligonucleotide
uucacaagaugcuggagag

SEQ ID NO: 2777938 - RNA, 19 nt, Artificial Sequence
  Description of Artificial Sequence: Synthetic oligonucleotide
augcauaacuuguagccac

SEQ ID NO: 2777939 - RNA, 19 nt, Artificial Sequence
  Description of Artificial Sequence: Synthetic oligonucleotide
cuugcugugcaucaugagg

SEQ ID NO: 2777940 - RNA, 19 nt, Artificial Sequence
  Description of Artificial Sequence: Synthetic oligonucleotide
aaacaugugucuucugcug

SEQ ID NO: 2777941 - RNA, 19 nt, Artificial Sequence
  Description of Artificial Sequence: Synthetic oligonucleotide
agaauuugguggcuuagag

SEQ ID NO: 2777942 - RNA, 19 nt, Artificial Sequence
  Description of Artificial Sequence: Synthetic oligonucleotide
cuguucguaagcaaacucc

SEQ ID NO: 2777943 - RNA, 19 nt, Artificial Sequence
  Description of Artificial Sequence: Synthetic oligonucleotide
ugcauuuucacaagaugcu

SEQ ID NO: 2777944 - RNA, 19 nt, Artificial Sequence
  Description of Artificial Sequence: Synthetic oligonucleotide
uguucguaagcaaacuccu

SEQ ID NO: 2777945 - RNA, 19 nt, Artificial Sequence
  Description of Artificial Sequence: Synthetic oligonucleotide
gaugagggcacugugcagg

SEQ ID NO: 2777946 - RNA, 19 nt, Artificial Sequence
  Description of Artificial Sequence: Synthetic oligonucleotide
cuggauacugcuuuccacc

SEQ ID NO: 2777947 - RNA, 19 nt, Artificial Sequence
  Description of Artificial Sequence: Synthetic oligonucleotide
aguuguucuggaugagggc

SEQ ID NO: 2777948 - RNA, 19 nt, Artificial Sequence
  Description of Artificial Sequence: Synthetic oligonucleotide
cugcuuuccaccacggugg

SEQ ID NO: 2777949 - RNA, 19 nt, Artificial Sequence
  Description of Artificial Sequence: Synthetic oligonucleotide
uuugguggcuuagagacug

SEQ ID NO: 2777950 - RNA, 19 nt, Artificial Sequence
  Description of Artificial Sequence: Synthetic oligonucleotide
aggacaaacaugugucuuc

SEQ ID NO: 2777951 - RNA, 19 nt, Artificial Sequence
  Description of Artificial Sequence: Synthetic oligonucleotide
ucuugaagaucuccaaccu

SEQ ID NO: 2777952 - RNA, 19 nt, Artificial Sequence
  Description of Artificial Sequence: Synthetic oligonucleotide
uguagccacauuuauuuuc

SEQ ID NO: 2777953 - RNA, 19 nt, Artificial Sequence
  Description of Artificial Sequence: Synthetic oligonucleotide
uuugguaccucacaugcuu

SEQ ID NO: 2777954 - RNA, 19 nt, Artificial Sequence
  Description of Artificial Sequence: Synthetic oligonucleotide
aucaccuuggaguuguucu

SEQ ID NO: 2777955 - RNA, 19 nt, Artificial Sequence
  Description of Artificial Sequence: Synthetic oligonucleotide
uuucaagaacaucgggcag

SEQ ID NO: 2777956 - RNA, 19 nt, Artificial Sequence
  Description of Artificial Sequence: Synthetic oligonucleotide
aacaugugucuucugcugu

SEQ ID NO: 2777957 - RNA, 19 nt, Artificial Sequence
  Description of Artificial Sequence: Synthetic oligonucleotide
aaugcauaacuuguagcca

SEQ ID NO: 2777958 - RNA, 19 nt, Artificial Sequence
  Description of Artificial Sequence: Synthetic oligonucleotide
cuuggaguuguucuggaug

SEQ ID NO: 2777959 - RNA, 19 nt, Artificial Sequence
  Description of Artificial Sequence: Synthetic oligonucleotide
aucuccaaccugcaguggg

SEQ ID NO: 2777960 - RNA, 19 nt, Artificial Sequence
  Description of Artificial Sequence: Synthetic oligonucleotide
uuagagacugcuuguuggc

SEQ ID NO: 2777961 - RNA, 19 nt, Artificial Sequence
  Description of Artificial Sequence: Synthetic oligonucleotide
uaagaaucaccuuggaguu

SEQ ID NO: 2777962 - RNA, 19 nt, Artificial Sequence
  Description of Artificial Sequence: Synthetic oligonucleotide
guggcuuagagacugcuug

SEQ ID NO: 2777963 - RNA, 19 nt, Artificial Sequence
  Description of Artificial Sequence: Synthetic oligonucleotide
uacuccagagaacugguuc

SEQ ID NO: 2777964 - RNA, 19 nt, Artificial Sequence
  Description of Artificial Sequence: Synthetic oligonucleotide
ucguaagcaaacuccuugc

SEQ ID NO: 2777965 - RNA, 19 nt, Artificial Sequence
  Description of Artificial Sequence: Synthetic oligonucleotide
auuuucacaagaugcugga

SEQ ID NO: 2777966 - RNA, 19 nt, Artificial Sequence
  Description of Artificial Sequence: Synthetic oligonucleotide
augaacaaaguacuccaga

SEQ ID NO: 2777967 - RNA, 19 nt, Artificial Sequence
  Description of Artificial Sequence: Synthetic oligonucleotide
agaucuccaaccugcagug

SEQ ID NO: 2777968 - RNA, 19 nt, Artificial Sequence
  Description of Artificial Sequence: Synthetic oligonucleotide
gagagaaucuugaagaucu

SEQ ID NO: 2777969 - RNA, 19 nt, Artificial Sequence
  Description of Artificial Sequence: Synthetic oligonucleotide
ugugaugaacaaaguacuc

SEQ ID NO: 2777970 - RNA, 19 nt, Artificial Sequence
  Description of Artificial Sequence: Synthetic oligonucleotide
ugccccugaagacucgugg

SEQ ID NO: 2777971 - RNA, 19 nt, Artificial Sequence
  Description of Artificial Sequence: Synthetic oligonucleotide
aacuuguagccacauuuau

SEQ ID NO: 2777972 - RNA, 19 nt, Artificial Sequence
  Description of Artificial Sequence: Synthetic oligonucleotide
guaagcaaacuccuugcug

SEQ ID NO: 2777973 - RNA, 19 nt, Artificial Sequence
  Description of Artificial Sequence: Synthetic oligonucleotide
aacuccuugcugugcauca

SEQ ID NO: 2777974 - RNA, 19 nt, Artificial Sequence
  Description of Artificial Sequence: Synthetic oligonucleotide
gaauuugguggcuuagaga

SEQ ID NO: 2777975 - RNA, 19 nt, Artificial Sequence
  Description of Artificial Sequence: Synthetic oligonucleotide
gagaaucuugaagaucucc

SEQ ID NO: 2777976 - RNA, 19 nt, Artificial Sequence
  Description of Artificial Sequence: Synthetic oligonucleotide
gaacaaaguacuccagaga

SEQ ID NO: 2777977 - RNA, 19 nt, Artificial Sequence
  Description of Artificial Sequence: Synthetic oligonucleotide
ucccauaaaugcauaacuu

SEQ ID NO: 2777978 - RNA, 19 nt, Artificial Sequence
  Description of Artificial Sequence: Synthetic oligonucleotide
uucaagaacaucgggcaga

SEQ ID NO: 2777979 - RNA, 19 nt, Artificial Sequence
  Description of Artificial Sequence: Synthetic oligonucleotide
gccacauuuauuuucaaga

SEQ ID NO: 2777980 - RNA, 19 nt, Artificial Sequence
  Description of Artificial Sequence: Synthetic oligonucleotide
caagaugcuggagagaauc

SEQ ID NO: 2777981 - RNA, 19 nt, Artificial Sequence
  Description of Artificial Sequence: Synthetic oligonucleotide
ucuggaugagggcacugug

SEQ ID NO: 2777982 - RNA, 19 nt, Artificial Sequence
  Description of Artificial Sequence: Synthetic oligonucleotide
ucuggauacugcuuuccac

SEQ ID NO: 2777983 - RNA, 19 nt, Artificial Sequence
  Description of Artificial Sequence: Synthetic oligonucleotide
aaacuccuugcugugcauc

SEQ ID NO: 2777984 - RNA, 19 nt, Artificial Sequence
  Description of Artificial Sequence: Synthetic oligonucleotide
ucaagaacaucgggcagag

SEQ ID NO: 2777985 - RNA, 19 nt, Artificial Sequence
  Description of Artificial Sequence: Synthetic oligonucleotide
gaugaacaaaguacuccag

SEQ ID NO: 2777986 - RNA, 19 nt, Artificial Sequence
  Description of Artificial Sequence: Synthetic oligonucleotide
agaaucuugaagaucucca

SEQ ID NO: 2777987 - RNA, 19 nt, Artificial Sequence
  Description of Artificial Sequence: Synthetic oligonucleotide
gaagaucuccaaccugcag

SEQ ID NO: 2777988 - RNA, 19 nt, Artificial Sequence
  Description of Artificial Sequence: Synthetic oligonucleotide
cagggcaaccuccuguucg

SEQ ID NO: 2777989 - RNA, 19 nt, Artificial Sequence
  Description of Artificial Sequence: Synthetic oligonucleotide
aagcaaacuccuugcugug

SEQ ID NO: 2777990 - RNA, 19 nt, Artificial Sequence
  Description of Artificial Sequence: Synthetic oligonucleotide
uucuggauacugcuuucca

SEQ ID NO: 2777991 - RNA, 19 nt, Artificial Sequence
  Description of Artificial Sequence: Synthetic oligonucleotide
ugaagaucuccaaccugca

SEQ ID NO: 2777992 - RNA, 19 nt, Artificial Sequence
  Description of Artificial Sequence: Synthetic oligonucleotide
cuugaagaucuccaaccug

SEQ ID NO: 2777993 - RNA, 19 nt, Artificial Sequence
  Description of Artificial Sequence: Synthetic oligonucleotide
accugcagugggcuggccc

SEQ ID NO: 2777994 - RNA, 19 nt, Artificial Sequence
  Description of Artificial Sequence: Synthetic oligonucleotide
uccuugcugugcaucauga

SEQ ID NO: 2777995 - RNA, 19 nt, Artificial Sequence
  Description of Artificial Sequence: Synthetic oligonucleotide
gucuuguccgggcagcagg

SEQ ID NO: 2777996 - RNA, 19 nt, Artificial Sequence
  Description of Artificial Sequence: Synthetic oligonucleotide
acaugcuuccagaauuugg

SEQ ID NO: 2777997 - RNA, 19 nt, Artificial Sequence
  Description of Artificial Sequence: Synthetic oligonucleotide
agagacugcuuguuggcca

SEQ ID NO: 2777998 - RNA, 19 nt, Artificial Sequence
  Description of Artificial Sequence: Synthetic oligonucleotide
gaaucuugaagaucuccaa

SEQ ID NO: 2777999 - RNA, 19 nt, Artificial Sequence
  Description of Artificial Sequence: Synthetic oligonucleotide
uggauacugcuuuccacca

SEQ ID NO: 2778000 - RNA, 19 nt, Artificial Sequence
  Description of Artificial Sequence: Synthetic oligonucleotide
ugcugaguugccccugaag

SEQ ID NO: 2778001 - RNA, 19 nt, Artificial Sequence
  Description of Artificial Sequence: Synthetic oligonucleotide
ucaccuuggaguuguucug

SEQ ID NO: 2778002 - RNA, 19 nt, Artificial Sequence
  Description of Artificial Sequence: Synthetic oligonucleotide
ugaguugccccugaagacu

SEQ ID NO: 2778003 - RNA, 19 nt, Artificial Sequence
  Description of Artificial Sequence: Synthetic oligonucleotide
acaaaguacuccagagaac

SEQ ID NO: 2778004 - RNA, 19 nt, Artificial Sequence
  Description of Artificial Sequence: Synthetic oligonucleotide
cuggaugagggcacugugc

SEQ ID NO: 2778005 - RNA, 19 nt, Artificial Sequence
  Description of Artificial Sequence: Synthetic oligonucleotide
cuuguagccacauuuauuu

SEQ ID NO: 2778006 - RNA, 19 nt, Artificial Sequence
  Description of Artificial Sequence: Synthetic oligonucleotide
ugcugugcaucaugagggg

SEQ ID NO: 2778007 - RNA, 19 nt, Artificial Sequence
  Description of Artificial Sequence: Synthetic oligonucleotide
ucuccaaccugcagugggc

SEQ ID NO: 2778008 - RNA, 19 nt, Artificial Sequence
  Description of Artificial Sequence: Synthetic oligonucleotide
gguggcugcgucuuguccg

SEQ ID NO: 2778009 - RNA, 19 nt, Artificial Sequence
  Description of Artificial Sequence: Synthetic oligonucleotide
ugcauaacuuguagccaca

SEQ ID NO: 2778010 - RNA, 19 nt, Artificial Sequence
  Description of Artificial Sequence: Synthetic oligonucleotide
ugugucuucugcuguucug

SEQ ID NO: 2778011 - RNA, 19 nt, Artificial Sequence
  Description of Artificial Sequence: Synthetic oligonucleotide
gugucuucugcuguucugg

SEQ ID NO: 2778012 - RNA, 19 nt, Artificial Sequence
  Description of Artificial Sequence: Synthetic oligonucleotide
guuccugcugaguugcccc

SEQ ID NO: 2778013 - RNA, 19 nt, Artificial Sequence
  Description of Artificial Sequence: Synthetic oligonucleotide
ucucccauaaaugcauaac

SEQ ID NO: 2778014 - RNA, 19 nt, Artificial Sequence
  Description of Artificial Sequence: Synthetic oligonucleotide
gagugugaugaacaaagua

SEQ ID NO: 2778015 - RNA, 19 nt, Artificial Sequence
  Description of Artificial Sequence: Synthetic oligonucleotide
acugugcagggcaaccucc

SEQ ID NO: 2778016 - RNA, 19 nt, Artificial Sequence
  Description of Artificial Sequence: Synthetic oligonucleotide
uuuucacaagaugcuggag

SEQ ID NO: 2778017 - RNA, 19 nt, Artificial Sequence
  Description of Artificial Sequence: Synthetic oligonucleotide
guuguucuggaugagggca

SEQ ID NO: 2778018 - RNA, 19 nt, Artificial Sequence
  Description of Artificial Sequence: Synthetic oligonucleotide
ugguaccucacaugcuucc

SEQ ID NO: 2778019 - RNA, 19 nt, Artificial Sequence
  Description of Artificial Sequence: Synthetic oligonucleotide
uuucaauaagaaucaccuu

SEQ ID NO: 2778020 - RNA, 19 nt, Artificial Sequence
  Description of Artificial Sequence: Synthetic oligonucleotide
agcaaacuccuugcugugc

SEQ ID NO: 2778021 - RNA, 19 nt, Artificial Sequence
  Description of Artificial Sequence: Synthetic oligonucleotide
agagaacugguuccugcug

SEQ ID NO: 2778022 - RNA, 19 nt, Artificial Sequence
  Description of Artificial Sequence: Synthetic oligonucleotide
cccauaaaugcauaacuug

SEQ ID NO: 2778023 - RNA, 19 nt, Artificial Sequence
  Description of Artificial Sequence: Synthetic oligonucleotide
cugaguugccccugaagac

SEQ ID NO: 2778024 - RNA, 19 nt, Artificial Sequence
  Description of Artificial Sequence: Synthetic oligonucleotide
uggagagaaucuugaagau

SEQ ID NO: 2778025 - RNA, 19 nt, Artificial Sequence
  Description of Artificial Sequence: Synthetic oligonucleotide
uuguucuggaugagggcac

SEQ ID NO: 2778026 - RNA, 19 nt, Artificial Sequence
  Description of Artificial Sequence: Synthetic oligonucleotide
caggucucucccauaaaug

SEQ ID NO: 2778027 - RNA, 19 nt, Artificial Sequence
  Description of Artificial Sequence: Synthetic oligonucleotide
cuucugcuguucuggauac

SEQ ID NO: 2778028 - RNA, 19 nt, Artificial Sequence
  Description of Artificial Sequence: Synthetic oligonucleotide
ugcuuguuggccacauggu

SEQ ID NO: 2778029 - RNA, 19 nt, Artificial Sequence
  Description of Artificial Sequence: Synthetic oligonucleotide
cauaaaugcauaacuugua

SEQ ID NO: 2778030 - RNA, 19 nt, Artificial Sequence
  Description of Artificial Sequence: Synthetic oligonucleotide
gcuuccagaauuugguggc

SEQ ID NO: 2778031 - RNA, 19 nt, Artificial Sequence
  Description of Artificial Sequence: Synthetic oligonucleotide
uugaugguccccugcauuu

SEQ ID NO: 2778032 - RNA, 19 nt, Artificial Sequence
  Description of Artificial Sequence: Synthetic oligonucleotide
caggugggcauuugguacc

SEQ ID NO: 2778033 - RNA, 19 nt, Artificial Sequence
  Description of Artificial Sequence: Synthetic oligonucleotide
aaaguacuccagagaacug

SEQ ID NO: 2778034 - RNA, 19 nt, Artificial Sequence
  Description of Artificial Sequence: Synthetic oligonucleotide
augcuuccagaauuuggug

SEQ ID NO: 2778035 - RNA, 19 nt, Artificial Sequence
  Description of Artificial Sequence: Synthetic oligonucleotide
cuccuguucguaagcaaac

SEQ ID NO: 2778036 - RNA, 19 nt, Artificial Sequence
  Description of Artificial Sequence: Synthetic oligonucleotide
uaccucacaugcuuccaga

SEQ ID NO: 2778037 - RNA, 19 nt, Artificial Sequence
  Description of Artificial Sequence: Synthetic oligonucleotide
caaaguacuccagagaacu

SEQ ID NO: 2778038 - RNA, 19 nt, Artificial Sequence
  Description of Artificial Sequence: Synthetic oligonucleotide
guagccacauuuauuuuca

SEQ ID NO: 2778039 - RNA, 19 nt, Artificial Sequence
  Description of Artificial Sequence: Synthetic oligonucleotide
uuguccgggcagcaggucu

SEQ ID NO: 2778040 - RNA, 19 nt, Artificial Sequence
  Description of Artificial Sequence: Synthetic oligonucleotide
guaccucacaugcuuccag

SEQ ID NO: 2778041 - RNA, 19 nt, Artificial Sequence
  Description of Artificial Sequence: Synthetic oligonucleotide
gcugaguugccccugaaga

SEQ ID NO: 2778042 - RNA, 19 nt, Artificial Sequence
  Description of Artificial Sequence: Synthetic oligonucleotide
ucacaugcuuccagaauuu

SEQ ID NO: 2778043 - RNA, 19 nt, Artificial Sequence
  Description of Artificial Sequence: Synthetic oligonucleotide
ucuuguccgggcagcaggu

SEQ ID NO: 2778044 - RNA, 19 nt, Artificial Sequence
  Description of Artificial Sequence: Synthetic oligonucleotide
ugggcauuugguaccucac

SEQ ID NO: 2778045 - RNA, 19 nt, Artificial Sequence
  Description of Artificial Sequence: Synthetic oligonucleotide
gaacaucgggcagagugug

SEQ ID NO: 2778046 - RNA, 19 nt, Artificial Sequence
  Description of Artificial Sequence: Synthetic oligonucleotide
caugcuuccagaauuuggu

SEQ ID NO: 2778047 - RNA, 19 nt, Artificial Sequence
  Description of Artificial Sequence: Synthetic oligonucleotide
aagaaucaccuuggaguug

SEQ ID NO: 2778048 - RNA, 19 nt, Artificial Sequence
  Description of Artificial Sequence: Synthetic oligonucleotide
auggucuucccuccacuug

SEQ ID NO: 2778049 - RNA, 19 nt, Artificial Sequence
  Description of Artificial Sequence: Synthetic oligonucleotide
uguucuggauacugcuuuc

SEQ ID NO: 2778050 - RNA, 19 nt, Artificial Sequence
  Description of Artificial Sequence: Synthetic oligonucleotide
uagagacugcuuguuggcc

SEQ ID NO: 2778051 - RNA, 19 nt, Artificial Sequence
  Description of Artificial Sequence: Synthetic oligonucleotide
gagacugcuuguuggccac

SEQ ID NO: 2778052 - RNA, 19 nt, Artificial Sequence
  Description of Artificial Sequence: Synthetic oligonucleotide
ucccaggugggcauuuggu

SEQ ID NO: 2778053 - RNA, 19 nt, Artificial Sequence
  Description of Artificial Sequence: Synthetic oligonucleotide
ugucuucugcuguucugga

SEQ ID NO: 2778054 - RNA, 19 nt, Artificial Sequence
  Description of Artificial Sequence: Synthetic oligonucleotide
cugguuccugcugaguugc

SEQ ID NO: 2778055 - RNA, 19 nt, Artificial Sequence
  Description of Artificial Sequence: Synthetic oligonucleotide
aagaugcuggagagaaucu

SEQ ID NO: 2778056 - RNA, 19 nt, Artificial Sequence
  Description of Artificial Sequence: Synthetic oligonucleotide
cuggccccaccccagaggc

SEQ ID NO: 2778057 - RNA, 19 nt, Artificial Sequence
  Description of Artificial Sequence: Synthetic oligonucleotide
uggcuuagagacugcuugu

SEQ ID NO: 2778058 - RNA, 19 nt, Artificial Sequence
  Description of Artificial Sequence: Synthetic oligonucleotide
uugguaccucacaugcuuc

SEQ ID NO: 2778059 - RNA, 19 nt, Artificial Sequence
  Description of Artificial Sequence: Synthetic oligonucleotide
cugcuguucuggauacugc

SEQ ID NO: 2778060 - RNA, 19 nt, Artificial Sequence
  Description of Artificial Sequence: Synthetic oligonucleotide
cuuguuggccacauggucu

SEQ ID NO: 2778061 - RNA, 19 nt, Artificial Sequence
  Description of Artificial Sequence: Synthetic oligonucleotide
uccccugcauuuucacaag

SEQ ID NO: 2778062 - RNA, 19 nt, Artificial Sequence
  Description of Artificial Sequence: Synthetic oligonucleotide
gacaaacaugugucuucug

SEQ ID NO: 2778063 - RNA, 19 nt, Artificial Sequence
  Description of Artificial Sequence: Synthetic oligonucleotide
uccagaauuugguggcuua

SEQ ID NO: 2778064 - RNA, 19 nt, Artificial Sequence
  Description of Artificial Sequence: Synthetic oligonucleotide
agaacaucgggcagagugu

SEQ ID NO: 2778065 - RNA, 19 nt, Artificial Sequence
  Description of Artificial Sequence: Synthetic oligonucleotide
gaugguccccugcauuuuc

SEQ ID NO: 2778066 - RNA, 19 nt, Artificial Sequence
  Description of Artificial Sequence: Synthetic oligonucleotide
acauggucuucccuccacu

SEQ ID NO: 2778067 - RNA, 19 nt, Artificial Sequence
  Description of Artificial Sequence: Synthetic oligonucleotide
ugugcagggcaaccuccug

SEQ ID NO: 2778068 - RNA, 19 nt, Artificial Sequence
  Description of Artificial Sequence: Synthetic oligonucleotide
ggaguuguucuggaugagg

SEQ ID NO: 2778069 - RNA, 19 nt, Artificial Sequence
  Description of Artificial Sequence: Synthetic oligonucleotide
aaccuccuguucguaagca

SEQ ID NO: 2778070 - RNA, 19 nt, Artificial Sequence
  Description of Artificial Sequence: Synthetic oligonucleotide
ucccuccacuugauggucc

SEQ ID NO: 2778071 - RNA, 19 nt, Artificial Sequence
  Description of Artificial Sequence: Synthetic oligonucleotide
uuguuggccacauggucuu

SEQ ID NO: 2778072 - RNA, 19 nt, Artificial Sequence
  Description of Artificial Sequence: Synthetic oligonucleotide
caccuuggaguuguucugg

SEQ ID NO: 2778073 - RNA, 19 nt, Artificial Sequence
  Description of Artificial Sequence: Synthetic oligonucleotide
ucugccucccaggugggca

SEQ ID NO: 2778074 - RNA, 19 nt, Artificial Sequence
  Description of Artificial Sequence: Synthetic oligonucleotide
aguacuccagagaacuggu

SEQ ID NO: 2778075 - RNA, 19 nt, Artificial Sequence
  Description of Artificial Sequence: Synthetic oligonucleotide
cucccauaaaugcauaacu

SEQ ID NO: 2778076 - RNA, 19 nt, Artificial Sequence
  Description of Artificial Sequence: Synthetic oligonucleotide
guggcugcgucuuguccgg

SEQ ID NO: 2778077 - RNA, 19 nt, Artificial Sequence
  Description of Artificial Sequence: Synthetic oligonucleotide
guucuggauacugcuuucc

SEQ ID NO: 2778078 - RNA, 19 nt, Artificial Sequence
  Description of Artificial Sequence: Synthetic oligonucleotide
ccugcauuuucacaagaug

SEQ ID NO: 2778079 - RNA, 19 nt, Artificial Sequence
  Description of Artificial Sequence: Synthetic oligonucleotide
uccuguucguaagcaaacu

SEQ ID NO: 2778080 - RNA, 19 nt, Artificial Sequence
  Description of Artificial Sequence: Synthetic oligonucleotide
caaccuccuguucguaagc

SEQ ID NO: 2778081 - RNA, 19 nt, Artificial Sequence
  Description of Artificial Sequence: Synthetic oligonucleotide
augugucuucugcuguucu

SEQ ID NO: 2778082 - RNA, 19 nt, Artificial Sequence
  Description of Artificial Sequence: Synthetic oligonucleotide
gcaaccuccuguucguaag

SEQ ID NO: 2778083 - RNA, 19 nt, Artificial Sequence
  Description of Artificial Sequence: Synthetic oligonucleotide
caaacaugugucuucugcu

SEQ ID NO: 2778084 - RNA, 19 nt, Artificial Sequence
  Description of Artificial Sequence: Synthetic oligonucleotide
gugugaugaacaaaguacu

SEQ ID NO: 2778085 - RNA, 19 nt, Artificial Sequence
  Description of Artificial Sequence: Synthetic oligonucleotide
uccacuugaugguccccug

SEQ ID NO: 2778086 - RNA, 19 nt, Artificial Sequence
  Description of Artificial Sequence: Synthetic oligonucleotide
ugcuuuccaccacgguggc

SEQ ID NO: 2778087 - RNA, 19 nt, Artificial Sequence
  Description of Artificial Sequence: Synthetic oligonucleotide
uucuggaugagggcacugu

SEQ ID NO: 2778088 - RNA, 19 nt, Artificial Sequence
  Description of Artificial Sequence: Synthetic oligonucleotide
agagaaucuugaagaucuc

SEQ ID NO: 2778089 - RNA, 19 nt, Artificial Sequence
  Description of Artificial Sequence: Synthetic oligonucleotide
ugcuggagagaaucuugaa

SEQ ID NO: 2778090 - RNA, 19 nt, Artificial Sequence
  Description of Artificial Sequence: Synthetic oligonucleotide
gcauuugguaccucacaug

SEQ ID NO: 2778091 - RNA, 19 nt, Artificial Sequence
  Description of Artificial Sequence: Synthetic oligonucleotide
gugggcauuugguaccuca

SEQ ID NO: 2778092 - RNA, 19 nt, Artificial Sequence
  Description of Artificial Sequence: Synthetic oligonucleotide
auacugcuuuccaccacgg

SEQ ID NO: 2778093 - RNA, 19 nt, Artificial Sequence
  Description of Artificial Sequence: Synthetic oligonucleotide
cucccaggugggcauuugg

SEQ ID NO: 2778094 - RNA, 19 nt, Artificial Sequence
  Description of Artificial Sequence: Synthetic oligonucleotide
gcuuagagacugcuuguug

SEQ ID NO: 2778095 - RNA, 19 nt, Artificial Sequence
  Description of Artificial Sequence: Synthetic oligonucleotide
agggcaaccuccuguucgu

SEQ ID NO: 2778096 - RNA, 19 nt, Artificial Sequence
  Description of Artificial Sequence: Synthetic oligonucleotide
uacugcuuuccaccacggu

SEQ ID NO: 2778097 - RNA, 19 nt, Artificial Sequence
  Description of Artificial Sequence: Synthetic oligonucleotide
gaucuccaaccugcagugg

SEQ ID NO: 2778098 - RNA, 19 nt, Artificial Sequence
  Description of Artificial Sequence: Synthetic oligonucleotide
caauaagaaucaccuugga

SEQ ID NO: 2778099 - RNA, 19 nt, Artificial Sequence
  Description of Artificial Sequence: Synthetic oligonucleotide
uguccgggcagcaggucuc

SEQ ID NO: 2778100 - RNA, 19 nt, Artificial Sequence
  Description of Artificial Sequence: Synthetic oligonucleotide
ucucucccauaaaugcaua

SEQ ID NO: 2778101 - RNA, 19 nt, Artificial Sequence
  Description of Artificial Sequence: Synthetic oligonucleotide
gcauuuucacaagaugcug

SEQ ID NO: 2778102 - RNA, 19 nt, Artificial Sequence
  Description of Artificial Sequence: Synthetic oligonucleotide
ccaggugggcauuugguac

SEQ ID NO: 2778103 - RNA, 19 nt, Artificial Sequence
  Description of Artificial Sequence: Synthetic oligonucleotide
acaugugucuucugcuguu

SEQ ID NO: 2778104 - RNA, 19 nt, Artificial Sequence
  Description of Artificial Sequence: Synthetic oligonucleotide
ugcagggcaaccuccuguu

SEQ ID NO: 2778105 - RNA, 19 nt, Artificial Sequence
  Description of Artificial Sequence: Synthetic oligonucleotide
uuguagccacauuuauuuu

SEQ ID NO: 2778106 - RNA, 19 nt, Artificial Sequence
  Description of Artificial Sequence: Synthetic oligonucleotide
accucacaugcuuccagaa

SEQ ID NO: 2778107 - RNA, 19 nt, Artificial Sequence
  Description of Artificial Sequence: Synthetic oligonucleotide
cucacaugcuuccagaauu

SEQ ID NO: 2778108 - RNA, 19 nt, Artificial Sequence
  Description of Artificial Sequence: Synthetic oligonucleotide
cuccuugcugugcaucaug

SEQ ID NO: 2778109 - RNA, 19 nt, Artificial Sequence
  Description of Artificial Sequence: Synthetic oligonucleotide
ugggcuggccccaccccag

SEQ ID NO: 2778110 - RNA, 19 nt, Artificial Sequence
  Description of Artificial Sequence: Synthetic oligonucleotide
uggaguuguucuggaugag

SEQ ID NO: 2778111 - RNA, 19 nt, Artificial Sequence
  Description of Artificial Sequence: Synthetic oligonucleotide
guuggccacauggucuucc

SEQ ID NO: 2778112 - RNA, 19 nt, Artificial Sequence
  Description of Artificial Sequence: Synthetic oligonucleotide
acuugaugguccccugcau

SEQ ID NO: 2778113 - RNA, 19 nt, Artificial Sequence
  Description of Artificial Sequence: Synthetic oligonucleotide
agagugugaugaacaaagu

SEQ ID NO: 2778114 - RNA, 19 nt, Artificial Sequence
  Description of Artificial Sequence: Synthetic oligonucleotide
gccaggacaaacauguguc

SEQ ID NO: 2778115 - RNA, 19 nt, Artificial Sequence
  Description of Artificial Sequence: Synthetic oligonucleotide
cacauggucuucccuccac

SEQ ID NO: 2778116 - RNA, 19 nt, Artificial Sequence
  Description of Artificial Sequence: Synthetic oligonucleotide
accuuggaguuguucugga

SEQ ID NO: 2778117 - RNA, 19 nt, Artificial Sequence
  Description of Artificial Sequence: Synthetic oligonucleotide
acaucgggcagagugugau

SEQ ID NO: 2778118 - RNA, 19 nt, Artificial Sequence
  Description of Artificial Sequence: Synthetic oligonucleotide
uccagagaacugguuccug

SEQ ID NO: 2778119 - RNA, 19 nt, Artificial Sequence
  Description of Artificial Sequence: Synthetic oligonucleotide
ccauaaaugcauaacuugu

SEQ ID NO: 2778120 - RNA, 19 nt, Artificial Sequence
  Description of Artificial Sequence: Synthetic oligonucleotide
uugguggcuuagagacugc

SEQ ID NO: 2778121 - RNA, 19 nt, Artificial Sequence
  Description of Artificial Sequence: Synthetic oligonucleotide
uguucuggaugagggcacu

SEQ ID NO: 2778122 - RNA, 19 nt, Artificial Sequence
  Description of Artificial Sequence: Synthetic oligonucleotide
ugcgucuuguccgggcagc

SEQ ID NO: 2778123 - RNA, 19 nt, Artificial Sequence
  Description of Artificial Sequence: Synthetic oligonucleotide
uugccccugaagacucgug

SEQ ID NO: 2778124 - RNA, 19 nt, Artificial Sequence
  Description of Artificial Sequence: Synthetic oligonucleotide
acugcuuguuggccacaug

SEQ ID NO: 2778125 - RNA, 19 nt, Artificial Sequence
  Description of Artificial Sequence: Synthetic oligonucleotide
gaguugccccugaagacuc

SEQ ID NO: 2778126 - RNA, 19 nt, Artificial Sequence
  Description of Artificial Sequence: Synthetic oligonucleotide
auuugguaccucacaugcu

SEQ ID NO: 2778127 - RNA, 19 nt, Artificial Sequence
  Description of Artificial Sequence: Synthetic oligonucleotide
gcaaacuccuugcugugca

SEQ ID NO: 2778128 - RNA, 19 nt, Artificial Sequence
  Description of Artificial Sequence: Synthetic oligonucleotide
cacuugaugguccccugca

SEQ ID NO: 2778129 - RNA, 19 nt, Artificial Sequence
  Description of Artificial Sequence: Synthetic oligonucleotide
ggagagaaucuugaagauc

SEQ ID NO: 2778130 - RNA, 19 nt, Artificial Sequence
  Description of Artificial Sequence: Synthetic oligonucleotide
uuccugcugaguugccccu

SEQ ID NO: 2778131 - RNA, 19 nt, Artificial Sequence
  Description of Artificial Sequence: Synthetic oligonucleotide
ugguccccugcauuuucac

SEQ ID NO: 2778132 - RNA, 19 nt, Artificial Sequence
  Description of Artificial Sequence: Synthetic oligonucleotide
cacugugcagggcaaccuc

SEQ ID NO: 2778133 - RNA, 19 nt, Artificial Sequence
  Description of Artificial Sequence: Synthetic oligonucleotide
ugguggcuuagagacugcu

SEQ ID NO: 2778134 - RNA, 19 nt, Artificial Sequence
  Description of Artificial Sequence: Synthetic oligonucleotide
acgguggcugcgucuuguc

SEQ ID NO: 2778135 - RNA, 19 nt, Artificial Sequence
  Description of Artificial Sequence: Synthetic oligonucleotide
cacaugcuuccagaauuug

SEQ ID NO: 2778136 - RNA, 19 nt, Artificial Sequence
  Description of Artificial Sequence: Synthetic oligonucleotide
accuccuguucguaagcaa

SEQ ID NO: 2778137 - RNA, 19 nt, Artificial Sequence
  Description of Artificial Sequence: Synthetic oligonucleotide
ggccacauggucuucccuc

SEQ ID NO: 2778138 - RNA, 19 nt, Artificial Sequence
  Description of Artificial Sequence: Synthetic oligonucleotide
ccuguucguaagcaaacuc

SEQ ID NO: 2778139 - RNA, 19 nt, Artificial Sequence
  Description of Artificial Sequence: Synthetic oligonucleotide
gccacauggucuucccucc

SEQ ID NO: 2778140 - RNA, 19 nt, Artificial Sequence
  Description of Artificial Sequence: Synthetic oligonucleotide
caugugucuucugcuguuc

SEQ ID NO: 2778141 - RNA, 19 nt, Artificial Sequence
  Description of Artificial Sequence: Synthetic oligonucleotide
cucucccauaaaugcauaa

SEQ ID NO: 2778142 - RNA, 19 nt, Artificial Sequence
  Description of Artificial Sequence: Synthetic oligonucleotide
cagaggcuccauuucaaua

SEQ ID NO: 2778143 - RNA, 19 nt, Artificial Sequence
  Description of Artificial Sequence: Synthetic oligonucleotide
ggcuccauuucaauaagaa

SEQ ID NO: 2778144 - RNA, 19 nt, Artificial Sequence
  Description of Artificial Sequence: Synthetic oligonucleotide
aacaucgggcagaguguga

SEQ ID NO: 2778145 - RNA, 19 nt, Artificial Sequence
  Description of Artificial Sequence: Synthetic oligonucleotide
auuugguggcuuagagacu

SEQ ID NO: 2778146 - RNA, 19 nt, Artificial Sequence
  Description of Artificial Sequence: Synthetic oligonucleotide
ggggccaggacaaacaugu

SEQ ID NO: 2778147 - RNA, 19 nt, Artificial Sequence
  Description of Artificial Sequence: Synthetic oligonucleotide
aaccugcagugggcuggcc

SEQ ID NO: 2778148 - RNA, 19 nt, Artificial Sequence
  Description of Artificial Sequence: Synthetic oligonucleotide
caucgggcagagugugaug

SEQ ID NO: 2778149 - RNA, 19 nt, Artificial Sequence
  Description of Artificial Sequence: Synthetic oligonucleotide
uuccagaauuugguggcuu

SEQ ID NO: 2778150 - RNA, 19 nt, Artificial Sequence
  Description of Artificial Sequence: Synthetic oligonucleotide
ggaugagggcacugugcag

SEQ ID NO: 2778151 - RNA, 19 nt, Artificial Sequence
  Description of Artificial Sequence: Synthetic oligonucleotide
cagaauuugguggcuuaga

SEQ ID NO: 2778152 - RNA, 19 nt, Artificial Sequence
  Description of Artificial Sequence: Synthetic oligonucleotide
uucccuccacuugaugguc

SEQ ID NO: 2778153 - RNA, 19 nt, Artificial Sequence
  Description of Artificial Sequence: Synthetic oligonucleotide
uccaccacgguggcugcgu

SEQ ID NO: 2778154 - RNA, 19 nt, Artificial Sequence
  Description of Artificial Sequence: Synthetic oligonucleotide
cuucccuccacuugauggu

SEQ ID NO: 2778155 - RNA, 19 nt, Artificial Sequence
  Description of Artificial Sequence: Synthetic oligonucleotide
cugcgucuuguccgggcag

SEQ ID NO: 2778156 - RNA, 19 nt, Artificial Sequence
  Description of Artificial Sequence: Synthetic oligonucleotide
ggauacugcuuuccaccac

SEQ ID NO: 2778157 - RNA, 19 nt, Artificial Sequence
  Description of Artificial Sequence: Synthetic oligonucleotide
ucgggcagagugugaugaa

SEQ ID NO: 2778158 - RNA, 19 nt, Artificial Sequence
  Description of Artificial Sequence: Synthetic oligonucleotide
ggucucucccauaaaugca

SEQ ID NO: 2778159 - RNA, 19 nt, Artificial Sequence
  Description of Artificial Sequence: Synthetic oligonucleotide
ggcagagugugaugaacaa

SEQ ID NO: 2778160 - RNA, 19 nt, Artificial Sequence
  Description of Artificial Sequence: Synthetic oligonucleotide
uuccaccacgguggcugcg

SEQ ID NO: 2778161 - RNA, 19 nt, Artificial Sequence
  Description of Artificial Sequence: Synthetic oligonucleotide
ggcauuugguaccucacau

SEQ ID NO: 2778162 - RNA, 19 nt, Artificial Sequence
  Description of Artificial Sequence: Synthetic oligonucleotide
aguugccccugaagacucg

SEQ ID NO: 2778163 - RNA, 19 nt, Artificial Sequence
  Description of Artificial Sequence: Synthetic oligonucleotide
cagcaggucucucccauaa

SEQ ID NO: 2778164 - RNA, 19 nt, Artificial Sequence
  Description of Artificial Sequence: Synthetic oligonucleotide
ccagaauuugguggcuuag

SEQ ID NO: 2778165 - RNA, 19 nt, Artificial Sequence
  Description of Artificial Sequence: Synthetic oligonucleotide
ggccaggacaaacaugugu

SEQ ID NO: 2778166 - RNA, 19 nt, Artificial Sequence
  Description of Artificial Sequence: Synthetic oligonucleotide
uccugcugaguugccccug

SEQ ID NO: 2778167 - RNA, 19 nt, Artificial Sequence
  Description of Artificial Sequence: Synthetic oligonucleotide
aggcuccauuucaauaaga

SEQ ID NO: 2778168 - RNA, 19 nt, Artificial Sequence
  Description of Artificial Sequence: Synthetic oligonucleotide
ugaugguccccugcauuuu

SEQ ID NO: 2778169 - RNA, 19 nt, Artificial Sequence
  Description of Artificial Sequence: Synthetic oligonucleotide
cuguucuggauacugcuuu

SEQ ID NO: 2778170 - RNA, 19 nt, Artificial Sequence
  Description of Artificial Sequence: Synthetic oligonucleotide
agcaggucucucccauaaa

SEQ ID NO: 2778171 - RNA, 19 nt, Artificial Sequence
  Description of Artificial Sequence: Synthetic oligonucleotide
gggcauuugguaccucaca

SEQ ID NO: 2778172 - RNA, 19 nt, Artificial Sequence
  Description of Artificial Sequence: Synthetic oligonucleotide
gggcagagugugaugaaca

SEQ ID NO: 2778173 - RNA, 19 nt, Artificial Sequence
  Description of Artificial Sequence: Synthetic oligonucleotide
ccuugcugugcaucaugag

SEQ ID NO: 2778174 - RNA, 19 nt, Artificial Sequence
  Description of Artificial Sequence: Synthetic oligonucleotide
gucucucccauaaaugcau

SEQ ID NO: 2778175 - RNA, 19 nt, Artificial Sequence
  Description of Artificial Sequence: Synthetic oligonucleotide
caaccugcagugggcuggc

SEQ ID NO: 2778176 - RNA, 19 nt, Artificial Sequence
  Description of Artificial Sequence: Synthetic oligonucleotide
gugggcuggccccacccca

SEQ ID NO: 2778177 - RNA, 19 nt, Artificial Sequence
  Description of Artificial Sequence: Synthetic oligonucleotide
uucugcuguucuggauacu

SEQ ID NO: 2778178 - RNA, 19 nt, Artificial Sequence
  Description of Artificial Sequence: Synthetic oligonucleotide
aggugggcauuugguaccu

SEQ ID NO: 2778179 - RNA, 19 nt, Artificial Sequence
  Description of Artificial Sequence: Synthetic oligonucleotide
gugcagggcaaccuccugu

SEQ ID NO: 2778180 - RNA, 19 nt, Artificial Sequence
  Description of Artificial Sequence: Synthetic oligonucleotide
gcuccauuucaauaagaau

SEQ ID NO: 2778181 - RNA, 19 nt, Artificial Sequence
  Description of Artificial Sequence: Synthetic oligonucleotide
cuugaugguccccugcauu

SEQ ID NO: 2778182 - RNA, 19 nt, Artificial Sequence
  Description of Artificial Sequence: Synthetic oligonucleotide
accacgguggcugcgucuu

SEQ ID NO: 2778183 - RNA, 19 nt, Artificial Sequence
  Description of Artificial Sequence: Synthetic oligonucleotide
ccuccuguucguaagcaaa

SEQ ID NO: 2778184 - RNA, 19 nt, Artificial Sequence
  Description of Artificial Sequence: Synthetic oligonucleotide
gguccccugcauuuucaca

SEQ ID NO: 2778185 - RNA, 19 nt, Artificial Sequence
  Description of Artificial Sequence: Synthetic oligonucleotide
gcaggucucucccauaaau

SEQ ID NO: 2778186 - RNA, 19 nt, Artificial Sequence
  Description of Artificial Sequence: Synthetic oligonucleotide
ccauuucaauaagaaucac

SEQ ID NO: 2778187 - RNA, 19 nt, Artificial Sequence
  Description of Artificial Sequence: Synthetic oligonucleotide
ggacaaacaugugucuucu

SEQ ID NO: 2778188 - RNA, 19 nt, Artificial Sequence
  Description of Artificial Sequence: Synthetic oligonucleotide
ggcaaccuccuguucguaa

SEQ ID NO: 2778189 - RNA, 19 nt, Artificial Sequence
  Description of Artificial Sequence: Synthetic oligonucleotide
ggcugcgucuuguccgggc

SEQ ID NO: 2778190 - RNA, 19 nt, Artificial Sequence
  Description of Artificial Sequence: Synthetic oligonucleotide
ccgggcagcaggucucucc

SEQ ID NO: 2778191 - RNA, 19 nt, Artificial Sequence
  Description of Artificial Sequence: Synthetic oligonucleotide
gguaccucacaugcuucca

SEQ ID NO: 2778192 - RNA, 19 nt, Artificial Sequence
  Description of Artificial Sequence: Synthetic oligonucleotide
gcugcgucuuguccgggca

SEQ ID NO: 2778193 - RNA, 19 nt, Artificial Sequence
  Description of Artificial Sequence: Synthetic oligonucleotide
uggcugcgucuuguccggg

SEQ ID NO: 2778194 - RNA, 19 nt, Artificial Sequence
  Description of Artificial Sequence: Synthetic oligonucleotide
cauaacuuguagccacauu

SEQ ID NO: 2778195 - RNA, 19 nt, Artificial Sequence
  Description of Artificial Sequence: Synthetic oligonucleotide
uguuggccacauggucuuc

SEQ ID NO: 2778196 - RNA, 19 nt, Artificial Sequence
  Description of Artificial Sequence: Synthetic oligonucleotide
cuuguccgggcagcagguc

SEQ ID NO: 2778197 - RNA, 19 nt, Artificial Sequence
  Description of Artificial Sequence: Synthetic oligonucleotide
uggccccaccccagaggcu

SEQ ID NO: 2778198 - RNA, 19 nt, Artificial Sequence
  Description of Artificial Sequence: Synthetic oligonucleotide
gcagagugugaugaacaaa

SEQ ID NO: 2778199 - RNA, 19 nt, Artificial Sequence
  Description of Artificial Sequence: Synthetic oligonucleotide
cauggucuucccuccacuu

SEQ ID NO: 2778200 - RNA, 19 nt, Artificial Sequence
  Description of Artificial Sequence: Synthetic oligonucleotide
gaacugguuccugcugagu

SEQ ID NO: 2778201 - RNA, 19 nt, Artificial Sequence
  Description of Artificial Sequence: Synthetic oligonucleotide
gucuucugcuguucuggau

SEQ ID NO: 2778202 - RNA, 19 nt, Artificial Sequence
  Description of Artificial Sequence: Synthetic oligonucleotide
agacugcuuguuggccaca

SEQ ID NO: 2778203 - RNA, 19 nt, Artificial Sequence
  Description of Artificial Sequence: Synthetic oligonucleotide
cugugcagggcaaccuccu

SEQ ID NO: 2778204 - RNA, 19 nt, Artificial Sequence
  Description of Artificial Sequence: Synthetic oligonucleotide
cuccacuugaugguccccu

SEQ ID NO: 2778205 - RNA, 19 nt, Artificial Sequence
  Description of Artificial Sequence: Synthetic oligonucleotide
ggcuggccccaccccagag

SEQ ID NO: 2778206 - RNA, 19 nt, Artificial Sequence
  Description of Artificial Sequence: Synthetic oligonucleotide
ggccccaccccagaggcuc

SEQ ID NO: 2778207 - RNA, 19 nt, Artificial Sequence
  Description of Artificial Sequence: Synthetic oligonucleotide
gacugcuuguuggccacau

SEQ ID NO: 2778208 - RNA, 19 nt, Artificial Sequence
  Description of Artificial Sequence: Synthetic oligonucleotide
caaacuccuugcugugcau

SEQ ID NO: 2778209 - RNA, 19 nt, Artificial Sequence
  Description of Artificial Sequence: Synthetic oligonucleotide
guucguaagcaaacuccuu

SEQ ID NO: 2778210 - RNA, 19 nt, Artificial Sequence
  Description of Artificial Sequence: Synthetic oligonucleotide
agggcacugugcagggcaa

SEQ ID NO: 2778211 - RNA, 19 nt, Artificial Sequence
  Description of Artificial Sequence: Synthetic oligonucleotide
guugccccugaagacucgu

SEQ ID NO: 2778212 - RNA, 19 nt, Artificial Sequence
  Description of Artificial Sequence: Synthetic oligonucleotide
cuccagagaacugguuccu

SEQ ID NO: 2778213 - RNA, 19 nt, Artificial Sequence
  Description of Artificial Sequence: Synthetic oligonucleotide
cccaggugggcauuuggua

SEQ ID NO: 2778214 - RNA, 19 nt, Artificial Sequence
  Description of Artificial Sequence: Synthetic oligonucleotide
ccaggacaaacaugugucu

SEQ ID NO: 2778215 - RNA, 19 nt, Artificial Sequence
  Description of Artificial Sequence: Synthetic oligonucleotide
cccagaggcuccauuucaa

SEQ ID NO: 2778216 - RNA, 19 nt, Artificial Sequence
  Description of Artificial Sequence: Synthetic oligonucleotide
gcagggcaaccuccuguuc

SEQ ID NO: 2778217 - RNA, 19 nt, Artificial Sequence
  Description of Artificial Sequence: Synthetic oligonucleotide
ggcagcaggucucucccau

SEQ ID NO: 2778218 - RNA, 19 nt, Artificial Sequence
  Description of Artificial Sequence: Synthetic oligonucleotide
cuccaaccugcagugggcu

SEQ ID NO: 2778219 - RNA, 19 nt, Artificial Sequence
  Description of Artificial Sequence: Synthetic oligonucleotide
cgguggcugcgucuugucc

SEQ ID NO: 2778220 - RNA, 19 nt, Artificial Sequence
  Description of Artificial Sequence: Synthetic oligonucleotide
cgggcagagugugaugaac

SEQ ID NO: 2778221 - RNA, 19 nt, Artificial Sequence
  Description of Artificial Sequence: Synthetic oligonucleotide
cugcugaguugccccugaa

SEQ ID NO: 2778222 - RNA, 19 nt, Artificial Sequence
  Description of Artificial Sequence: Synthetic oligonucleotide
gggccaggacaaacaugug

SEQ ID NO: 2778223 - RNA, 19 nt, Artificial Sequence
  Description of Artificial Sequence: Synthetic oligonucleotide
ccccugcauuuucacaaga

SEQ ID NO: 2778224 - RNA, 19 nt, Artificial Sequence
  Description of Artificial Sequence: Synthetic oligonucleotide
uccgggcagcaggucucuc

SEQ ID NO: 2778225 - RNA, 19 nt, Artificial Sequence
  Description of Artificial Sequence: Synthetic oligonucleotide
cccugcauuuucacaagau

SEQ ID NO: 2778226 - RNA, 19 nt, Artificial Sequence
  Description of Artificial Sequence: Synthetic oligonucleotide
gcauaacuuguagccacau

SEQ ID NO: 2778227 - RNA, 19 nt, Artificial Sequence
  Description of Artificial Sequence: Synthetic oligonucleotide
cugcagugggcuggcccca

SEQ ID NO: 2778228 - RNA, 19 nt, Artificial Sequence
  Description of Artificial Sequence: Synthetic oligonucleotide
cacgguggcugcgucuugu

SEQ ID NO: 2778229 - RNA, 19 nt, Artificial Sequence
  Description of Artificial Sequence: Synthetic oligonucleotide
cguaagcaaacuccuugcu

SEQ ID NO: 2778230 - RNA, 19 nt, Artificial Sequence
  Description of Artificial Sequence: Synthetic oligonucleotide
guacuccagagaacugguu

SEQ ID NO: 2778231 - RNA, 19 nt, Artificial Sequence
  Description of Artificial Sequence: Synthetic oligonucleotide
caccacgguggcugcgucu

SEQ ID NO: 2778232 - RNA, 19 nt, Artificial Sequence
  Description of Artificial Sequence: Synthetic oligonucleotide
gcagcaggucucucccaua

SEQ ID NO: 2778233 - RNA, 19 nt, Artificial Sequence
  Description of Artificial Sequence: Synthetic oligonucleotide
ggcuuagagacugcuuguu

SEQ ID NO: 2778234 - RNA, 19 nt, Artificial Sequence
  Description of Artificial Sequence: Synthetic oligonucleotide
cugccucccaggugggcau

SEQ ID NO: 2778235 - RNA, 19 nt, Artificial Sequence
  Description of Artificial Sequence: Synthetic oligonucleotide
ugccucccaggugggcauu

SEQ ID NO: 2778236 - RNA, 19 nt, Artificial Sequence
  Description of Artificial Sequence: Synthetic oligonucleotide
gcuguucuggauacugcuu

SEQ ID NO: 2778237 - RNA, 19 nt, Artificial Sequence
  Description of Artificial Sequence: Synthetic oligonucleotide
gguggcuuagagacugcuu

SEQ ID NO: 2778238 - RNA, 19 nt, Artificial Sequence
  Description of Artificial Sequence: Synthetic oligonucleotide
ccacauggucuucccucca

SEQ ID NO: 2778239 - RNA, 19 nt, Artificial Sequence
  Description of Artificial Sequence: Synthetic oligonucleotide
ccucacaugcuuccagaau

SEQ ID NO: 2778240 - RNA, 19 nt, Artificial Sequence
  Description of Artificial Sequence: Synthetic oligonucleotide
cgucuuguccgggcagcag

SEQ ID NO: 2778241 - RNA, 19 nt, Artificial Sequence
  Description of Artificial Sequence: Synthetic oligonucleotide
gcgucuuguccgggcagca

SEQ ID NO: 2778242 - RNA, 19 nt, Artificial Sequence
  Description of Artificial Sequence: Synthetic oligonucleotide
ggugggcauuugguaccuc

SEQ ID NO: 2778243 - RNA, 19 nt, Artificial Sequence
  Description of Artificial Sequence: Synthetic oligonucleotide
gaaucaccuuggaguuguu

SEQ ID NO: 2778244 - RNA, 19 nt, Artificial Sequence
  Description of Artificial Sequence: Synthetic oligonucleotide
ccuuggaguuguucuggau

SEQ ID NO: 2778245 - RNA, 19 nt, Artificial Sequence
  Description of Artificial Sequence: Synthetic oligonucleotide
gggcuggccccaccccaga

SEQ ID NO: 2778246 - RNA, 19 nt, Artificial Sequence
  Description of Artificial Sequence: Synthetic oligonucleotide
caagaacaucgggcagagu

SEQ ID NO: 2778247 - RNA, 19 nt, Artificial Sequence
  Description of Artificial Sequence: Synthetic oligonucleotide
ccacgguggcugcgucuug

SEQ ID NO: 2778248 - RNA, 19 nt, Artificial Sequence
  Description of Artificial Sequence: Synthetic oligonucleotide
guccgggcagcaggucucu

SEQ ID NO: 2778249 - RNA, 19 nt, Artificial Sequence
  Description of Artificial Sequence: Synthetic oligonucleotide
gccccaccccagaggcucc

SEQ ID NO: 2778250 - RNA, 19 nt, Artificial Sequence
  Description of Artificial Sequence: Synthetic oligonucleotide
ggucuucccuccacuugau

SEQ ID NO: 2778251 - RNA, 19 nt, Artificial Sequence
  Description of Artificial Sequence: Synthetic oligonucleotide
gggcaaccuccuguucgua

SEQ ID NO: 2778252 - RNA, 19 nt, Artificial Sequence
  Description of Artificial Sequence: Synthetic oligonucleotide
gcuuuccaccacgguggcu

SEQ ID NO: 2778253 - RNA, 19 nt, Artificial Sequence
  Description of Artificial Sequence: Synthetic oligonucleotide
ccaccccagaggcuccauu

SEQ ID NO: 2778254 - RNA, 19 nt, Artificial Sequence
  Description of Artificial Sequence: Synthetic oligonucleotide
gccucccaggugggcauuu

SEQ ID NO: 2778255 - RNA, 19 nt, Artificial Sequence
  Description of Artificial Sequence: Synthetic oligonucleotide
cccaccccagaggcuccau

SEQ ID NO: 2778256 - RNA, 19 nt, Artificial Sequence
  Description of Artificial Sequence: Synthetic oligonucleotide
aaaucaggcauauugagag

SEQ ID NO: 2778257 - RNA, 19 nt, Artificial Sequence
  Description of Artificial Sequence: Synthetic oligonucleotide
aagggcuucaaucugcucc

SEQ ID NO: 2778258 - RNA, 19 nt, Artificial Sequence
  Description of Artificial Sequence: Synthetic oligonucleotide
uuuaaugucucauagguga

SEQ ID NO: 2778259 - RNA, 19 nt, Artificial Sequence
  Description of Artificial Sequence: Synthetic oligonucleotide
uugaacuucacgaacaacc

SEQ ID NO: 2778260 - RNA, 19 nt, Artificial Sequence
  Description of Artificial Sequence: Synthetic oligonucleotide
aaaccaauaaacaaucuuc

SEQ ID NO: 2778261 - RNA, 19 nt, Artificial Sequence
  Description of Artificial Sequence: Synthetic oligonucleotide
uugacuauguauuuuaaug

SEQ ID NO: 2778262 - RNA, 19 nt, Artificial Sequence
  Description of Artificial Sequence: Synthetic oligonucleotide
agugacaguaugcagaagg

SEQ ID NO: 2778263 - RNA, 19 nt, Artificial Sequence
  Description of Artificial Sequence: Synthetic oligonucleotide
gaauucuugaacaaucucg

SEQ ID NO: 2778264 - RNA, 19 nt, Artificial Sequence
  Description of Artificial Sequence: Synthetic oligonucleotide
ucuaccaucagcuggaucu

SEQ ID NO: 2778265 - RNA, 19 nt, Artificial Sequence
  Description of Artificial Sequence: Synthetic oligonucleotide
aaugcuagugacaguaugc

SEQ ID NO: 2778266 - RNA, 19 nt, Artificial Sequence
  Description of Artificial Sequence: Synthetic oligonucleotide
aauucuugaacaaucucgg

SEQ ID NO: 2778267 - RNA, 19 nt, Artificial Sequence
  Description of Artificial Sequence: Synthetic oligonucleotide
uuugagaucuguuaguaac

SEQ ID NO: 2778268 - RNA, 19 nt, Artificial Sequence
  Description of Artificial Sequence: Synthetic oligonucleotide
uucacgaacaaccuggcca

SEQ ID NO: 2778269 - RNA, 19 nt, Artificial Sequence
  Description of Artificial Sequence: Synthetic oligonucleotide
aaugucucauaggugaugg

SEQ ID NO: 2778270 - RNA, 19 nt, Artificial Sequence
  Description of Artificial Sequence: Synthetic oligonucleotide
aacuucacgaacaaccugg

SEQ ID NO: 2778271 - RNA, 19 nt, Artificial Sequence
  Description of Artificial Sequence: Synthetic oligonucleotide
aaaaccaauaaacaaucuu

SEQ ID NO: 2778272 - RNA, 19 nt, Artificial Sequence
  Description of Artificial Sequence: Synthetic oligonucleotide
ucugguuccuacauuggcg

SEQ ID NO: 2778273 - RNA, 19 nt, Artificial Sequence
  Description of Artificial Sequence: Synthetic oligonucleotide
ugacuauguauuuuaaugu

SEQ ID NO: 2778274 - RNA, 19 nt, Artificial Sequence
  Description of Artificial Sequence: Synthetic oligonucleotide
aucuguuaguaacugguac

SEQ ID NO: 2778275 - RNA, 19 nt, Artificial Sequence
  Description of Artificial Sequence: Synthetic oligonucleotide
gaggcuuugaacuucacga

SEQ ID NO: 2778276 - RNA, 19 nt, Artificial Sequence
  Description of Artificial Sequence: Synthetic oligonucleotide
ucuugaacaaucucgggac

SEQ ID NO: 2778277 - RNA, 19 nt, Artificial Sequence
  Description of Artificial Sequence: Synthetic oligonucleotide
aagcuucucagcuuugguc

SEQ ID NO: 2778278 - RNA, 19 nt, Artificial Sequence
  Description of Artificial Sequence: Synthetic oligonucleotide
aaaugcuagugacaguaug

SEQ ID NO: 2778279 - RNA, 19 nt, Artificial Sequence
  Description of Artificial Sequence: Synthetic oligonucleotide
uaacugguacaccucauag

SEQ ID NO: 2778280 - RNA, 19 nt, Artificial Sequence
  Description of Artificial Sequence: Synthetic oligonucleotide
ucaacagcggucauuggcc

SEQ ID NO: 2778281 - RNA, 19 nt, Artificial Sequence
  Description of Artificial Sequence: Synthetic oligonucleotide
ugucucauaggugauggcg

SEQ ID NO: 2778282 - RNA, 19 nt, Artificial Sequence
  Description of Artificial Sequence: Synthetic oligonucleotide
cugugcauaucuaugcugg

SEQ ID NO: 2778283 - RNA, 19 nt, Artificial Sequence
  Description of Artificial Sequence: Synthetic oligonucleotide
cuucugaacauccaggcug

SEQ ID NO: 2778284 - RNA, 19 nt, Artificial Sequence
  Description of Artificial Sequence: Synthetic oligonucleotide
ucuguuaguaacugguaca

SEQ ID NO: 2778285 - RNA, 19 nt, Artificial Sequence
  Description of Artificial Sequence: Synthetic oligonucleotide
ucuucuaccaucagcugga

SEQ ID NO: 2778286 - RNA, 19 nt, Artificial Sequence
  Description of Artificial Sequence: Synthetic oligonucleotide
ucauaguuuacugagcagu

SEQ ID NO: 2778287 - RNA, 19 nt, Artificial Sequence
  Description of Artificial Sequence: Synthetic oligonucleotide
augcagaagggcuucaauc

SEQ ID NO: 2778288 - RNA, 19 nt, Artificial Sequence
  Description of Artificial Sequence: Synthetic oligonucleotide
aucaccgcaucauugcugg

SEQ ID NO: 2778289 - RNA, 19 nt, Artificial Sequence
  Description of Artificial Sequence: Synthetic oligonucleotide
gacucugguuccuacauug

SEQ ID NO: 2778290 - RNA, 19 nt, Artificial Sequence
  Description of Artificial Sequence: Synthetic oligonucleotide
ugaacuucacgaacaaccu

SEQ ID NO: 2778291 - RNA, 19 nt, Artificial Sequence
  Description of Artificial Sequence: Synthetic oligonucleotide
gacuauguauuuuaauguc

SEQ ID NO: 2778292 - RNA, 19 nt, Artificial Sequence
  Description of Artificial Sequence: Synthetic oligonucleotide
aaacaaucuucugaacauc

SEQ ID NO: 2778293 - RNA, 19 nt, Artificial Sequence
  Description of Artificial Sequence: Synthetic oligonucleotide
uuuaaguucugcugcccag

SEQ ID NO: 2778294 - RNA, 19 nt, Artificial Sequence
  Description of Artificial Sequence: Synthetic oligonucleotide
uuuuacucuguucauccuc

SEQ ID NO: 2778295 - RNA, 19 nt, Artificial Sequence
  Description of Artificial Sequence: Synthetic oligonucleotide
ucacgaacaaccuggccag

SEQ ID NO: 2778296 - RNA, 19 nt, Artificial Sequence
  Description of Artificial Sequence: Synthetic oligonucleotide
accgcaucauugcuggugc

SEQ ID NO: 2778297 - RNA, 19 nt, Artificial Sequence
  Description of Artificial Sequence: Synthetic oligonucleotide
aucagcuggaucucaacag

SEQ ID NO: 2778298 - RNA, 19 nt, Artificial Sequence
  Description of Artificial Sequence: Synthetic oligonucleotide
ccugaaaucaggcauauug

SEQ ID NO: 2778299 - RNA, 19 nt, Artificial Sequence
  Description of Artificial Sequence: Synthetic oligonucleotide
ugguuuagcagcugaagcu

SEQ ID NO: 2778300 - RNA, 19 nt, Artificial Sequence
  Description of Artificial Sequence: Synthetic oligonucleotide
ugcauaucuaugcuggguc

SEQ ID NO: 2778301 - RNA, 19 nt, Artificial Sequence
  Description of Artificial Sequence: Synthetic oligonucleotide
uuuacugagcagugcugcg

SEQ ID NO: 2778302 - RNA, 19 nt, Artificial Sequence
  Description of Artificial Sequence: Synthetic oligonucleotide
uacaccucauaguuuacug

SEQ ID NO: 2778303 - RNA, 19 nt, Artificial Sequence
  Description of Artificial Sequence: Synthetic oligonucleotide
ucagcuggaucucaacagc

SEQ ID NO: 2778304 - RNA, 19 nt, Artificial Sequence
  Description of Artificial Sequence: Synthetic oligonucleotide
cuauguuuguucuucccac

SEQ ID NO: 2778305 - RNA, 19 nt, Artificial Sequence
  Description of Artificial Sequence: Synthetic oligonucleotide
gagaucuguuaguaacugg

SEQ ID NO: 2778306 - RNA, 19 nt, Artificial Sequence
  Description of Artificial Sequence: Synthetic oligonucleotide
auaguuuacugagcagugc

SEQ ID NO: 2778307 - RNA, 19 nt, Artificial Sequence
  Description of Artificial Sequence: Synthetic oligonucleotide
  modified_base (4)..(4): a, c, u, g, unknown or other
ugcncuuugagaucuguua

SEQ ID NO: 2778308 - RNA, 19 nt, Artificial Sequence
  Description of Artificial Sequence: Synthetic oligonucleotide
ggugcuuuuacucuguuca

SEQ ID NO: 2778309 - RNA, 19 nt, Artificial Sequence
  Description of Artificial Sequence: Synthetic oligonucleotide
  modified_base (10)..(10): a, c, u, g, unknown or other
uuccgcugcncuuugagau

SEQ ID NO: 2778310 - RNA, 19 nt, Artificial Sequence
  Description of Artificial Sequence: Synthetic oligonucleotide
caccucauaguuuacugag

SEQ ID NO: 2778311 - RNA, 19 nt, Artificial Sequence
  Description of Artificial Sequence: Synthetic oligonucleotide
uucugaacauccaggcugc

SEQ ID NO: 2778312 - RNA, 19 nt, Artificial Sequence
  Description of Artificial Sequence: Synthetic oligonucleotide
uacucuguucauccucugg

SEQ ID NO: 2778313 - RNA, 19 nt, Artificial Sequence
  Description of Artificial Sequence: Synthetic oligonucleotide
cucaacagcggucauuggc

SEQ ID NO: 2778314 - RNA, 19 nt, Artificial Sequence
  Description of Artificial Sequence: Synthetic oligonucleotide
aacugguacaccucauagu

SEQ ID NO: 2778315 - RNA, 19 nt, Artificial Sequence
  Description of Artificial Sequence: Synthetic oligonucleotide
cuuuucauugcugugagga

SEQ ID NO: 2778316 - RNA, 19 nt, Artificial Sequence
  Description of Artificial Sequence: Synthetic oligonucleotide
uaguaacugguacaccuca

SEQ ID NO: 2778317 - RNA, 19 nt, Artificial Sequence
  Description of Artificial Sequence: Synthetic oligonucleotide
ugggccugcagguaaaaug

SEQ ID NO: 2778318 - RNA, 19 nt, Artificial Sequence
  Description of Artificial Sequence: Synthetic oligonucleotide
cauaguuuacugagcagug

SEQ ID NO: 2778319 - RNA, 19 nt, Artificial Sequence
  Description of Artificial Sequence: Synthetic oligonucleotide
ucaggcauauugagagagg

SEQ ID NO: 2778320 - RNA, 19 nt, Artificial Sequence
  Description of Artificial Sequence: Synthetic oligonucleotide
auguuuguucuucccacuc

SEQ ID NO: 2778321 - RNA, 19 nt, Artificial Sequence
  Description of Artificial Sequence: Synthetic oligonucleotide
uuugacuauguauuuuaau

SEQ ID NO: 2778322 - RNA, 19 nt, Artificial Sequence
  Description of Artificial Sequence: Synthetic oligonucleotide
aaguucugcugcccagcgc

SEQ ID NO: 2778323 - RNA, 19 nt, Artificial Sequence
  Description of Artificial Sequence: Synthetic oligonucleotide
aucaggcauauugagagag

SEQ ID NO: 2778324 - RNA, 19 nt, Artificial Sequence
  Description of Artificial Sequence: Synthetic oligonucleotide
uccaucaccgcaucauugc

SEQ ID NO: 2778325 - RNA, 19 nt, Artificial Sequence
  Description of Artificial Sequence: Synthetic oligonucleotide
ucagcuuuggucagcuugu

SEQ ID NO: 2778326 - RNA, 19 nt, Artificial Sequence
  Description of Artificial Sequence: Synthetic oligonucleotide
guuaguaacugguacaccu

SEQ ID NO: 2778327 - RNA, 19 nt, Artificial Sequence
  Description of Artificial Sequence: Synthetic oligonucleotide
uuuugacuauguauuuuaa

SEQ ID NO: 2778328 - RNA, 19 nt, Artificial Sequence
  Description of Artificial Sequence: Synthetic oligonucleotide
ugugguuuagcagcugaag

SEQ ID NO: 2778329 - RNA, 19 nt, Artificial Sequence
  Description of Artificial Sequence: Synthetic oligonucleotide
agcuuguggcuuuucauug

SEQ ID NO: 2778330 - RNA, 19 nt, Artificial Sequence
  Description of Artificial Sequence: Synthetic oligonucleotide
ugguacaccucauaguuua

SEQ ID NO: 2778331 - RNA, 19 nt, Artificial Sequence
  Description of Artificial Sequence: Synthetic oligonucleotide
ugugcauaucuaugcuggg

SEQ ID NO: 2778332 - RNA, 19 nt, Artificial Sequence
  Description of Artificial Sequence: Synthetic oligonucleotide
agaucuguuaguaacuggu

SEQ ID NO: 2778333 - RNA, 19 nt, Artificial Sequence
  Description of Artificial Sequence: Synthetic oligonucleotide
uuccaucaccgcaucauug

SEQ ID NO: 2778334 - RNA, 19 nt, Artificial Sequence
  Description of Artificial Sequence: Synthetic oligonucleotide
uuaguaacugguacaccuc

SEQ ID NO: 2778335 - RNA, 19 nt, Artificial Sequence
  Description of Artificial Sequence: Synthetic oligonucleotide
  modified_base (17)..(17): a, c, u, g, unknown or other
uuuguucuucccacucncc

SEQ ID NO: 2778336 - RNA, 19 nt, Artificial Sequence
  Description of Artificial Sequence: Synthetic oligonucleotide
agcgcuauguuuguucuuc

SEQ ID NO: 2778337 - RNA, 19 nt, Artificial Sequence
  Description of Artificial Sequence: Synthetic oligonucleotide
uggcguuuaaguucugcug

SEQ ID NO: 2778338 - RNA, 19 nt, Artificial Sequence
  Description of Artificial Sequence: Synthetic oligonucleotide
caggcauauugagagaggg

SEQ ID NO: 2778339 - RNA, 19 nt, Artificial Sequence
  Description of Artificial Sequence: Synthetic oligonucleotide
ucuaugcugggucuucuuc

SEQ ID NO: 2778340 - RNA, 19 nt, Artificial Sequence
  Description of Artificial Sequence: Synthetic oligonucleotide
aaucaggcauauugagaga

SEQ ID NO: 2778341 - RNA, 19 nt, Artificial Sequence
  Description of Artificial Sequence: Synthetic oligonucleotide
  modified_base (18)..(18): a, c, u, g, unknown or other
guuuguucuucccacucnc

SEQ ID NO: 2778342 - RNA, 19 nt, Artificial Sequence
  Description of Artificial Sequence: Synthetic oligonucleotide
guuuacugagcagugcugc

SEQ ID NO: 2778343 - RNA, 19 nt, Artificial Sequence
  Description of Artificial Sequence: Synthetic oligonucleotide
aacaaucucgggacucugg

SEQ ID NO: 2778344 - RNA, 19 nt, Artificial Sequence
  Description of Artificial Sequence: Synthetic oligonucleotide
gaaaucaggcauauugaga

SEQ ID NO: 2778345 - RNA, 19 nt, Artificial Sequence
  Description of Artificial Sequence: Synthetic oligonucleotide
cagcugugcauaucuaugc

SEQ ID NO: 2778346 - RNA, 19 nt, Artificial Sequence
  Description of Artificial Sequence: Synthetic oligonucleotide
gaacuucacgaacaaccug

SEQ ID NO: 2778347 - RNA, 19 nt, Artificial Sequence
  Description of Artificial Sequence: Synthetic oligonucleotide
cugaaaucaggcauauuga

SEQ ID NO: 2778348 - RNA, 19 nt, Artificial Sequence
  Description of Artificial Sequence: Synthetic oligonucleotide
ggcguuuaaguucugcugc

SEQ ID NO: 2778349 - RNA, 19 nt, Artificial Sequence
  Description of Artificial Sequence: Synthetic oligonucleotide
caaccaacccugaaaucag

SEQ ID NO: 2778350 - RNA, 19 nt, Artificial Sequence
  Description of Artificial Sequence: Synthetic oligonucleotide
uuaaguucugcugcccagc

SEQ ID NO: 2778351 - RNA, 19 nt, Artificial Sequence
  Description of Artificial Sequence: Synthetic oligonucleotide
uuaaugucucauaggugau

SEQ ID NO: 2778352 - RNA, 19 nt, Artificial Sequence
  Description of Artificial Sequence: Synthetic oligonucleotide
  modified_base (10)..(10): a, c, u, g, unknown or other
uucccacucnccuuccgcu

SEQ ID NO: 2778353 - RNA, 19 nt, Artificial Sequence
  Description of Artificial Sequence: Synthetic oligonucleotide
accaacccugaaaucaggc

SEQ ID NO: 2778354 - RNA, 19 nt, Artificial Sequence
  Description of Artificial Sequence: Synthetic oligonucleotide
cagcuggaucucaacagcg

SEQ ID NO: 2778355 - RNA, 19 nt, Artificial Sequence
  Description of Artificial Sequence: Synthetic oligonucleotide
gugacaguaugcagaaggg

SEQ ID NO: 2778356 - RNA, 19 nt, Artificial Sequence
  Description of Artificial Sequence: Synthetic oligonucleotide
ugacaguaugcagaagggc

SEQ ID NO: 2778357 - RNA, 19 nt, Artificial Sequence
  Description of Artificial Sequence: Synthetic oligonucleotide
acaaucucgggacucuggu

SEQ ID NO: 2778358 - RNA, 19 nt, Artificial Sequence
  Description of Artificial Sequence: Synthetic oligonucleotide
cugugaggaauucuugaac

SEQ ID NO: 2778359 - RNA, 19 nt, Artificial Sequence
  Description of Artificial Sequence: Synthetic oligonucleotide
cuguuaguaacugguacac

SEQ ID NO: 2778360 - RNA, 19 nt, Artificial Sequence
  Description of Artificial Sequence: Synthetic oligonucleotide
cucauaguuuacugagcag

SEQ ID NO: 2778361 - RNA, 19 nt, Artificial Sequence
  Description of Artificial Sequence: Synthetic oligonucleotide
  modified_base (3)..(3): a, c, u, g, unknown or other
gcncuuugagaucuguuag

SEQ ID NO: 2778362 - RNA, 19 nt, Artificial Sequence
  Description of Artificial Sequence: Synthetic oligonucleotide
uuuucauugcugugaggaa

SEQ ID NO: 2778363 - RNA, 19 nt, Artificial Sequence
  Description of Artificial Sequence: Synthetic oligonucleotide
cucugguuccuacauuggc

SEQ ID NO: 2778364 - RNA, 19 nt, Artificial Sequence
  Description of Artificial Sequence: Synthetic oligonucleotide
uggcuuuucauugcuguga

SEQ ID NO: 2778365 - RNA, 19 nt, Artificial Sequence
  Description of Artificial Sequence: Synthetic oligonucleotide
agcuuuggucagcuugugg

SEQ ID NO: 2778366 - RNA, 19 nt, Artificial Sequence
  Description of Artificial Sequence: Synthetic oligonucleotide
acaccucauaguuuacuga

SEQ ID NO: 2778367 - RNA, 19 nt, Artificial Sequence
  Description of Artificial Sequence: Synthetic oligonucleotide
cugcccagcgcuauguuug

SEQ ID NO: 2778368 - RNA, 19 nt, Artificial Sequence
  Description of Artificial Sequence: Synthetic oligonucleotide
auaucuaugcugggucuuc

SEQ ID NO: 2778369 - RNA, 19 nt, Artificial Sequence
  Description of Artificial Sequence: Synthetic oligonucleotide
ucauugcuggugcuuuuac

SEQ ID NO: 2778370 - RNA, 19 nt, Artificial Sequence
  Description of Artificial Sequence: Synthetic oligonucleotide
ugaggaauucuugaacaau

SEQ ID NO: 2778371 - RNA, 19 nt, Artificial Sequence
  Description of Artificial Sequence: Synthetic oligonucleotide
uaaugucucauaggugaug

SEQ ID NO: 2778372 - RNA, 19 nt, Artificial Sequence
  Description of Artificial Sequence: Synthetic oligonucleotide
accucauaguuuacugagc

SEQ ID NO: 2778373 - RNA, 19 nt, Artificial Sequence
  Description of Artificial Sequence: Synthetic oligonucleotide
uguuaguaacugguacacc

SEQ ID NO: 2778374 - RNA, 19 nt, Artificial Sequence
  Description of Artificial Sequence: Synthetic oligonucleotide
gacaguaugcagaagggcu

SEQ ID NO: 2778375 - RNA, 19 nt, Artificial Sequence
  Description of Artificial Sequence: Synthetic oligonucleotide
guuuaaguucugcugccca

SEQ ID NO: 2778376 - RNA, 19 nt, Artificial Sequence
  Description of Artificial Sequence: Synthetic oligonucleotide
acuucacgaacaaccuggc

SEQ ID NO: 2778377 - RNA, 19 nt, Artificial Sequence
  Description of Artificial Sequence: Synthetic oligonucleotide
auaggugauggcguuuaag

SEQ ID NO: 2778378 - RNA, 19 nt, Artificial Sequence
  Description of Artificial Sequence: Synthetic oligonucleotide
agggcuucaaucugcuccu

SEQ ID NO: 2778379 - RNA, 19 nt, Artificial Sequence
  Description of Artificial Sequence: Synthetic oligonucleotide
ccugcagguaaaaugcuag

SEQ ID NO: 2778380 - RNA, 19 nt, Artificial Sequence
  Description of Artificial Sequence: Synthetic oligonucleotide
aaccaacccugaaaucagg

SEQ ID NO: 2778381 - RNA, 19 nt, Artificial Sequence
  Description of Artificial Sequence: Synthetic oligonucleotide
gauggcguuuaaguucugc

SEQ ID NO: 2778382 - RNA, 19 nt, Artificial Sequence
  Description of Artificial Sequence: Synthetic oligonucleotide
cuagugacaguaugcagaa

SEQ ID NO: 2778383 - RNA, 19 nt, Artificial Sequence
  Description of Artificial Sequence: Synthetic oligonucleotide
caaucugcuccuccgugag

SEQ ID NO: 2778384 - RNA, 19 nt, Artificial Sequence
  Description of Artificial Sequence: Synthetic oligonucleotide
aacagcggucauuggccug

SEQ ID NO: 2778385 - RNA, 19 nt, Artificial Sequence
  Description of Artificial Sequence: Synthetic oligonucleotide
agcugugcauaucuaugcu

SEQ ID NO: 2778386 - RNA, 19 nt, Artificial Sequence
  Description of Artificial Sequence: Synthetic oligonucleotide
ugggucuucuucuuccauc

SEQ ID NO: 2778387 - RNA, 19 nt, Artificial Sequence
  Description of Artificial Sequence: Synthetic oligonucleotide
  modified_base (11)..(11): a, c, u, g, unknown or other
cuucccacucnccuuccgc

SEQ ID NO: 2778388 - RNA, 19 nt, Artificial Sequence
  Description of Artificial Sequence: Synthetic oligonucleotide
aggaauucuugaacaaucu

SEQ ID NO: 2778389 - RNA, 19 nt, Artificial Sequence
  Description of Artificial Sequence: Synthetic oligonucleotide
gguaaaaccaauaaacaau

SEQ ID NO: 2778390 - RNA, 19 nt, Artificial Sequence
  Description of Artificial Sequence: Synthetic oligonucleotide
caucaccgcaucauugcug

SEQ ID NO: 2778391 - RNA, 19 nt, Artificial Sequence
  Description of Artificial Sequence: Synthetic oligonucleotide
gcugcugaggcuuugaacu

SEQ ID NO: 2778392 - RNA, 19 nt, Artificial Sequence
  Description of Artificial Sequence: Synthetic oligonucleotide
ugcuuuuacucuguucauc

SEQ ID NO: 2778393 - RNA, 19 nt, Artificial Sequence
  Description of Artificial Sequence: Synthetic oligonucleotide
cuggaucucaacagcgguc

SEQ ID NO: 2778394 - RNA, 19 nt, Artificial Sequence
  Description of Artificial Sequence: Synthetic oligonucleotide
uuacugagcagugcugcgu

SEQ ID NO: 2778395 - RNA, 19 nt, Artificial Sequence
  Description of Artificial Sequence: Synthetic oligonucleotide
ucucaacagcggucauugg

SEQ ID NO: 2778396 - RNA, 19 nt, Artificial Sequence
  Description of Artificial Sequence: Synthetic oligonucleotide
caucagcuggaucucaaca

SEQ ID NO: 2778397 - RNA, 19 nt, Artificial Sequence
  Description of Artificial Sequence: Synthetic oligonucleotide
ugagccgcucuucacucuc

SEQ ID NO: 2778398 - RNA, 19 nt, Artificial Sequence
  Description of Artificial Sequence: Synthetic oligonucleotide
cuucacgaacaaccuggcc

SEQ ID NO: 2778399 - RNA, 19 nt, Artificial Sequence
  Description of Artificial Sequence: Synthetic oligonucleotide
aggugauggcguuuaaguu

SEQ ID NO: 2778400 - RNA, 19 nt, Artificial Sequence
  Description of Artificial Sequence: Synthetic oligonucleotide
ucauaggugauggcguuua

SEQ ID NO: 2778401 - RNA, 19 nt, Artificial Sequence
  Description of Artificial Sequence: Synthetic oligonucleotide
uuacucuguucauccucug

SEQ ID NO: 2778402 - RNA, 19 nt, Artificial Sequence
  Description of Artificial Sequence: Synthetic oligonucleotide
agcuggaucucaacagcgg

SEQ ID NO: 2778403 - RNA, 19 nt, Artificial Sequence
  Description of Artificial Sequence: Synthetic oligonucleotide
aguuuacugagcagugcug

SEQ ID NO: 2778404 - RNA, 19 nt, Artificial Sequence
  Description of Artificial Sequence: Synthetic oligonucleotide
gcuauguuuguucuuccca

SEQ ID NO: 2778405 - RNA, 19 nt, Artificial Sequence
  Description of Artificial Sequence: Synthetic oligonucleotide
aggcauauugagagagggg

SEQ ID NO: 2778406 - RNA, 19 nt, Artificial Sequence
  Description of Artificial Sequence: Synthetic oligonucleotide
gcugugcauaucuaugcug

SEQ ID NO: 2778407 - RNA, 19 nt, Artificial Sequence
  Description of Artificial Sequence: Synthetic oligonucleotide
gggccugcagguaaaaugc

SEQ ID NO: 2778408 - RNA, 19 nt, Artificial Sequence
  Description of Artificial Sequence: Synthetic oligonucleotide
ggcuuugaacuucacgaac

SEQ ID NO: 2778409 - RNA, 19 nt, Artificial Sequence
  Description of Artificial Sequence: Synthetic oligonucleotide
uaugcugggucuucuucuu

SEQ ID NO: 2778410 - RNA, 19 nt, Artificial Sequence
  Description of Artificial Sequence: Synthetic oligonucleotide
agcagugcugcguucgcau

SEQ ID NO: 2778411 - RNA, 19 nt, Artificial Sequence
  Description of Artificial Sequence: Synthetic oligonucleotide
aacaaccuggccagcugug

SEQ ID NO: 2778412 - RNA, 19 nt, Artificial Sequence
  Description of Artificial Sequence: Synthetic oligonucleotide
gggguaaaaccaauaaaca

SEQ ID NO: 2778413 - RNA, 19 nt, Artificial Sequence
  Description of Artificial Sequence: Synthetic oligonucleotide
ucugcugcccagcgcuaug

SEQ ID NO: 2778414 - RNA, 19 nt, Artificial Sequence
  Description of Artificial Sequence: Synthetic oligonucleotide
  modified_base (9)..(9): a, c, u, g, unknown or other
ucccacucnccuuccgcug

SEQ ID NO: 2778415 - RNA, 19 nt, Artificial Sequence
  Description of Artificial Sequence: Synthetic oligonucleotide
gugaggaauucuugaacaa

SEQ ID NO: 2778416 - RNA, 19 nt, Artificial Sequence
  Description of Artificial Sequence: Synthetic oligonucleotide
uaucuaugcugggucuucu

SEQ ID NO: 2778417 - RNA, 19 nt, Artificial Sequence
  Description of Artificial Sequence: Synthetic oligonucleotide
cuuugagaucuguuaguaa

SEQ ID NO: 2778418 - RNA, 19 nt, Artificial Sequence
  Description of Artificial Sequence: Synthetic oligonucleotide
aacccugaaaucaggcaua

SEQ ID NO: 2778419 - RNA, 19 nt, Artificial Sequence
  Description of Artificial Sequence: Synthetic oligonucleotide
acucugguuccuacauugg

SEQ ID NO: 2778420 - RNA, 19 nt, Artificial Sequence
  Description of Artificial Sequence: Synthetic oligonucleotide
ucauuggccugugguuuag

SEQ ID NO: 2778421 - RNA, 19 nt, Artificial Sequence
  Description of Artificial Sequence: Synthetic oligonucleotide
guaacugguacaccucaua

SEQ ID NO: 2778422 - RNA, 19 nt, Artificial Sequence
  Description of Artificial Sequence: Synthetic oligonucleotide
ugcugcguucgcauccuuc

SEQ ID NO: 2778423 - RNA, 19 nt, Artificial Sequence
  Description of Artificial Sequence: Synthetic oligonucleotide
  modified_base (9)..(9): a, c, u, g, unknown or other
uccgcugcncuuugagauc

SEQ ID NO: 2778424 - RNA, 19 nt, Artificial Sequence
  Description of Artificial Sequence: Synthetic oligonucleotide
ccagcugugcauaucuaug

SEQ ID NO: 2778425 - RNA, 19 nt, Artificial Sequence
  Description of Artificial Sequence: Synthetic oligonucleotide
uuuggucagcuuguggcuu

SEQ ID NO: 2778426 - RNA, 19 nt, Artificial Sequence
  Description of Artificial Sequence: Synthetic oligonucleotide
ccaaccaacccugaaauca

SEQ ID NO: 2778427 - RNA, 19 nt, Artificial Sequence
  Description of Artificial Sequence: Synthetic oligonucleotide
ccucauaguuuacugagca

SEQ ID NO: 2778428 - RNA, 19 nt, Artificial Sequence
  Description of Artificial Sequence: Synthetic oligonucleotide
gaacaaccuggccagcugu

SEQ ID NO: 2778429 - RNA, 19 nt, Artificial Sequence
  Description of Artificial Sequence: Synthetic oligonucleotide
  modified_base (5)..(5): a, c, u, g, unknown or other
  modified_base (17)..(17): a, c, u, g, unknown or other
acucnccuuccgcugcncu

SEQ ID NO: 2778430 - RNA, 19 nt, Artificial Sequence
  Description of Artificial Sequence: Synthetic oligonucleotide
acagcggucauuggccugu

SEQ ID NO: 2778431 - RNA, 19 nt, Artificial Sequence
  Description of Artificial Sequence: Synthetic oligonucleotide
gaucuguuaguaacuggua

SEQ ID NO: 2778432 - RNA, 19 nt, Artificial Sequence
  Description of Artificial Sequence: Synthetic oligonucleotide
caccgcaucauugcuggug

SEQ ID NO: 2778433 - RNA, 19 nt, Artificial Sequence
  Description of Artificial Sequence: Synthetic oligonucleotide
ugcugaggcuuugaacuuc

SEQ ID NO: 2778434 - RNA, 19 nt, Artificial Sequence
  Description of Artificial Sequence: Synthetic oligonucleotide
acgaacaaccuggccagcu

SEQ ID NO: 2778435 - RNA, 19 nt, Artificial Sequence
  Description of Artificial Sequence: Synthetic oligonucleotide
gcguuuaaguucugcugcc

SEQ ID NO: 2778436 - RNA, 19 nt, Artificial Sequence
  Description of Artificial Sequence: Synthetic oligonucleotide
acaguaugcagaagggcuu

SEQ ID NO: 2778437 - RNA, 19 nt, Artificial Sequence
  Description of Artificial Sequence: Synthetic oligonucleotide
  modified_base (3)..(3): a, c, u, g, unknown or other
  modified_base (15)..(15): a, c, u, g, unknown or other
ucnccuuccgcugcncuuu

SEQ ID NO: 2778438 - RNA, 19 nt, Artificial Sequence
  Description of Artificial Sequence: Synthetic oligonucleotide
ucgggacucugguuccuac

SEQ ID NO: 2778439 - RNA, 19 nt, Artificial Sequence
  Description of Artificial Sequence: Synthetic oligonucleotide
uccgugagccgcucuucac

SEQ ID NO: 2778440 - RNA, 19 nt, Artificial Sequence
  Description of Artificial Sequence: Synthetic oligonucleotide
cugguuccuacauuggcgu

SEQ ID NO: 2778441 - RNA, 19 nt, Artificial Sequence
  Description of Artificial Sequence: Synthetic oligonucleotide
gugauggcguuuaaguucu

SEQ ID NO: 2778442 - RNA, 19 nt, Artificial Sequence
  Description of Artificial Sequence: Synthetic oligonucleotide
  modified_base (11)..(11): a, c, u, g, unknown or other
cuuccgcugcncuuugaga

SEQ ID NO: 2778443 - RNA, 19 nt, Artificial Sequence
  Description of Artificial Sequence: Synthetic oligonucleotide
gcuuuucauugcugugagg

SEQ ID NO: 2778444 - RNA, 19 nt, Artificial Sequence
  Description of Artificial Sequence: Synthetic oligonucleotide
uagugacaguaugcagaag

SEQ ID NO: 2778445 - RNA, 19 nt, Artificial Sequence
  Description of Artificial Sequence: Synthetic oligonucleotide
ucauugcugugaggaauuc

SEQ ID NO: 2778446 - RNA, 19 nt, Artificial Sequence
  Description of Artificial Sequence: Synthetic oligonucleotide
uuggucagcuuguggcuuu

SEQ ID NO: 2778447 - RNA, 19 nt, Artificial Sequence
  Description of Artificial Sequence: Synthetic oligonucleotide
caguaugcagaagggcuuc

SEQ ID NO: 2778448 - RNA, 19 nt, Artificial Sequence
  Description of Artificial Sequence: Synthetic oligonucleotide
  modified_base (2)..(2): a, c, u, g, unknown or other
cncuuugagaucuguuagu

SEQ ID NO: 2778449 - RNA, 19 nt, Artificial Sequence
  Description of Artificial Sequence: Synthetic oligonucleotide
cuuuggucagcuuguggcu

SEQ ID NO: 2778450 - RNA, 19 nt, Artificial Sequence
  Description of Artificial Sequence: Synthetic oligonucleotide
agcggucauuggccugugg

SEQ ID NO: 2778451 - RNA, 19 nt, Artificial Sequence
  Description of Artificial Sequence: Synthetic oligonucleotide
aguaugcagaagggcuuca

SEQ ID NO: 2778452 - RNA, 19 nt, Artificial Sequence
  Description of Artificial Sequence: Synthetic oligonucleotide
uccuccgugagccgcucuu

SEQ ID NO: 2778453 - RNA, 19 nt, Artificial Sequence
  Description of Artificial Sequence: Synthetic oligonucleotide
ggcugcugaggcuuugaac

SEQ ID NO: 2778454 - RNA, 19 nt, Artificial Sequence
  Description of Artificial Sequence: Synthetic oligonucleotide
aucuaugcugggucuucuu

SEQ ID NO: 2778455 - RNA, 19 nt, Artificial Sequence
  Description of Artificial Sequence: Synthetic oligonucleotide
aguaacugguacaccucau

SEQ ID NO: 2778456 - RNA, 19 nt, Artificial Sequence
  Description of Artificial Sequence: Synthetic oligonucleotide
cuuguggcuuuucauugcu

SEQ ID NO: 2778457 - RNA, 19 nt, Artificial Sequence
  Description of Artificial Sequence: Synthetic oligonucleotide
cacucucuucuaccaucag

SEQ ID NO: 2778458 - RNA, 19 nt, Artificial Sequence
  Description of Artificial Sequence: Synthetic oligonucleotide
ugcccagcgcuauguuugu

SEQ ID NO: 2778459 - RNA, 19 nt, Artificial Sequence
  Description of Artificial Sequence: Synthetic oligonucleotide
  modified_base (2)..(2): a, c, u, g, unknown or other
  modified_base (14)..(14): a, c, u, g, unknown or other
cnccuuccgcugcncuuug

SEQ ID NO: 2778460 - RNA, 19 nt, Artificial Sequence
  Description of Artificial Sequence: Synthetic oligonucleotide
ugauggcguuuaaguucug

SEQ ID NO: 2778461 - RNA, 19 nt, Artificial Sequence
  Description of Artificial Sequence: Synthetic oligonucleotide
aucauugcuggugcuuuua

SEQ ID NO: 2778462 - RNA, 19 nt, Artificial Sequence
  Description of Artificial Sequence: Synthetic oligonucleotide
cugugguuuagcagcugaa

SEQ ID NO: 2778463 - RNA, 19 nt, Artificial Sequence
  Description of Artificial Sequence: Synthetic oligonucleotide
cuugaacaaucucgggacu

SEQ ID NO: 2778464 - RNA, 19 nt, Artificial Sequence
  Description of Artificial Sequence: Synthetic oligonucleotide
cugaggcuuugaacuucac

SEQ ID NO: 2778465 - RNA, 19 nt, Artificial Sequence
  Description of Artificial Sequence: Synthetic oligonucleotide
gucauuggccugugguuua

SEQ ID NO: 2778466 - RNA, 19 nt, Artificial Sequence
  Description of Artificial Sequence: Synthetic oligonucleotide
ugguuccuacauuggcguu

SEQ ID NO: 2778467 - RNA, 19 nt, Artificial Sequence
  Description of Artificial Sequence: Synthetic oligonucleotide
cccagcgcuauguuuguuc

SEQ ID NO: 2778468 - RNA, 19 nt, Artificial Sequence
  Description of Artificial Sequence: Synthetic oligonucleotide
acccugaaaucaggcauau

SEQ ID NO: 2778469 - RNA, 19 nt, Artificial Sequence
  Description of Artificial Sequence: Synthetic oligonucleotide
ccaacccugaaaucaggca

SEQ ID NO: 2778470 - RNA, 19 nt, Artificial Sequence
  Description of Artificial Sequence: Synthetic oligonucleotide
guacaccucauaguuuacu

SEQ ID NO: 2778471 - RNA, 19 nt, Artificial Sequence
  Description of Artificial Sequence: Synthetic oligonucleotide
cgcuauguuuguucuuccc

SEQ ID NO: 2778472 - RNA, 19 nt, Artificial Sequence
  Description of Artificial Sequence: Synthetic oligonucleotide
gcgcuauguuuguucuucc

SEQ ID NO: 2778473 - RNA, 19 nt, Artificial Sequence
  Description of Artificial Sequence: Synthetic oligonucleotide
ccaucagcuggaucucaac

SEQ ID NO: 2778474 - RNA, 19 nt, Artificial Sequence
  Description of Artificial Sequence: Synthetic oligonucleotide
gcauaucuaugcugggucu

SEQ ID NO: 2778475 - RNA, 19 nt, Artificial Sequence
  Description of Artificial Sequence: Synthetic oligonucleotide
gugcauaucuaugcugggu

SEQ ID NO: 2778476 - RNA, 19 nt, Artificial Sequence
  Description of Artificial Sequence: Synthetic oligonucleotide
  modified_base (8)..(8): a, c, u, g, unknown or other
cccacucnccuuccgcugc

SEQ ID NO: 2778477 - RNA, 19 nt, Artificial Sequence
  Description of Artificial Sequence: Synthetic oligonucleotide
cugcagguaaaaugcuagu

SEQ ID NO: 2778478 - RNA, 19 nt, Artificial Sequence
  Description of Artificial Sequence: Synthetic oligonucleotide
  modified_base (4)..(4): a, c, u, g, unknown or other
  modified_base (16)..(16): a, c, u, g, unknown or other
cucnccuuccgcugcncuu

SEQ ID NO: 2778479 - RNA, 19 nt, Artificial Sequence
  Description of Artificial Sequence: Synthetic oligonucleotide
ucaccgcaucauugcuggu

SEQ ID NO: 2778480 - RNA, 19 nt, Artificial Sequence
  Description of Artificial Sequence: Synthetic oligonucleotide
gcugaagcuucucagcuuu

SEQ ID NO: 2778481 - RNA, 19 nt, Artificial Sequence
  Description of Artificial Sequence: Synthetic oligonucleotide
cuccgugagccgcucuuca

SEQ ID NO: 2778482 - RNA, 19 nt, Artificial Sequence
  Description of Artificial Sequence: Synthetic oligonucleotide
ugcugcccagcgcuauguu

SEQ ID NO: 2778483 - RNA, 19 nt, Artificial Sequence
  Description of Artificial Sequence: Synthetic oligonucleotide
gguacaccucauaguuuac

SEQ ID NO: 2778484 - RNA, 19 nt, Artificial Sequence
  Description of Artificial Sequence: Synthetic oligonucleotide
cagcuuuggucagcuugug

SEQ ID NO: 2778485 - RNA, 19 nt, Artificial Sequence
  Description of Artificial Sequence: Synthetic oligonucleotide
cguuuaaguucugcugccc

SEQ ID NO: 2778486 - RNA, 19 nt, Artificial Sequence
  Description of Artificial Sequence: Synthetic oligonucleotide
cauaggugauggcguuuaa

SEQ ID NO: 2778487 - RNA, 19 nt, Artificial Sequence
  Description of Artificial Sequence: Synthetic oligonucleotide
caacagcggucauuggccu

SEQ ID NO: 2778488 - RNA, 19 nt, Artificial Sequence
  Description of Artificial Sequence: Synthetic oligonucleotide
gguuuagcagcugaagcuu

SEQ ID NO: 2778489 - RNA, 19 nt, Artificial Sequence
  Description of Artificial Sequence: Synthetic oligonucleotide
agccgcucuucacucucuu

SEQ ID NO: 2778490 - RNA, 19 nt, Artificial Sequence
  Description of Artificial Sequence: Synthetic oligonucleotide
gcggucauuggccuguggu

SEQ ID NO: 2778491 - RNA, 19 nt, Artificial Sequence
  Description of Artificial Sequence: Synthetic oligonucleotide
cauugcugugaggaauucu

SEQ ID NO: 2778492 - RNA, 19 nt, Artificial Sequence
  Description of Artificial Sequence: Synthetic oligonucleotide
cccaaccaacccugaaauc

SEQ ID NO: 2778493 - RNA, 19 nt, Artificial Sequence
  Description of Artificial Sequence: Synthetic oligonucleotide
cgaacaaccuggccagcug

SEQ ID NO: 2778494 - RNA, 19 nt, Artificial Sequence
  Description of Artificial Sequence: Synthetic oligonucleotide
cgugagccgcucuucacuc

SEQ ID NO: 2778495 - RNA, 19 nt, Artificial Sequence
  Description of Artificial Sequence: Synthetic oligonucleotide
  modified_base (6)..(6): a, c, u, g, unknown or other
  modified_base (18)..(18): a, c, u, g, unknown or other
cacucnccuuccgcugcnc

SEQ ID NO: 2778496 - RNA, 19 nt, Artificial Sequence
  Description of Artificial Sequence: Synthetic oligonucleotide
cugguacaccucauaguuu

SEQ ID NO: 2778497 - RNA, 19 nt, Artificial Sequence
  Description of Artificial Sequence: Synthetic oligonucleotide
cauaucuaugcugggucuu

SEQ ID NO: 2778498 - RNA, 19 nt, Artificial Sequence
  Description of Artificial Sequence: Synthetic oligonucleotide
  modified_base (5)..(5): a, c, u, g, unknown or other
cugcncuuugagaucuguu

SEQ ID NO: 2778499 - RNA, 19 nt, Artificial Sequence
  Description of Artificial Sequence: Synthetic oligonucleotide
gccagcugugcauaucuau

SEQ ID NO: 2778500 - RNA, 19 nt, Artificial Sequence
  Description of Artificial Sequence: Synthetic oligonucleotide
guuccuacauuggcguuuu

SEQ ID NO: 2778501 - RNA, 19 nt, Artificial Sequence
  Description of Artificial Sequence: Synthetic oligonucleotide
ggucauuggccugugguuu

SEQ ID NO: 2778502 - RNA, 19 nt, Artificial Sequence
  Description of Artificial Sequence: Synthetic oligonucleotide
caaucucgggacucugguu

SEQ ID NO: 2778503 - RNA, 19 nt, Artificial Sequence
  Description of Artificial Sequence: Synthetic oligonucleotide
ccagcgcuauguuuguucu

SEQ ID NO: 2778504 - RNA, 19 nt, Artificial Sequence
  Description of Artificial Sequence: Synthetic oligonucleotide
gugagccgcucuucacucu

SEQ ID NO: 2778505 - RNA, 19 nt, Artificial Sequence
  Description of Artificial Sequence: Synthetic oligonucleotide
gguuccuacauuggcguuu

SEQ ID NO: 2778506 - RNA, 19 nt, Artificial Sequence
  Description of Artificial Sequence: Synthetic oligonucleotide
gccugcagguaaaaugcua

SEQ ID NO: 2778507 - RNA, 19 nt, Artificial Sequence
  Description of Artificial Sequence: Synthetic oligonucleotide
  modified_base (7)..(7): a, c, u, g, unknown or other
  modified_base (19)..(19): a, c, u, g, unknown or other
ccacucnccuuccgcugcn

SEQ ID NO: 2778508 - RNA, 19 nt, Artificial Sequence
  Description of Artificial Sequence: Synthetic oligonucleotide
  modified_base (6)..(6): a, c, u, g, unknown or other
gcugcncuuugagaucugu

SEQ ID NO: 2778509 - RNA, 19 nt, Artificial Sequence
  Description of Artificial Sequence: Synthetic oligonucleotide
ccucugggccugcagguaa

SEQ ID NO: 2778510 - RNA, 19 nt, Artificial Sequence
  Description of Artificial Sequence: Synthetic oligonucleotide
cagcggucauuggccugug

SEQ ID NO: 2778511 - RNA, 19 nt, Artificial Sequence
  Description of Artificial Sequence: Synthetic oligonucleotide
gagccgcucuucacucucu

SEQ ID NO: 2778512 - RNA, 19 nt, Artificial Sequence
  Description of Artificial Sequence: Synthetic oligonucleotide
cucauaggugauggcguuu

SEQ ID NO: 2778513 - RNA, 19 nt, Artificial Sequence
  Description of Artificial Sequence: Synthetic oligonucleotide
guucugcugcccagcgcua

SEQ ID NO: 2778514 - RNA, 19 nt, Artificial Sequence
  Description of Artificial Sequence: Synthetic oligonucleotide
gcugcccagcgcuauguuu

SEQ ID NO: 2778515 - RNA, 19 nt, Artificial Sequence
  Description of Artificial Sequence: Synthetic oligonucleotide
ccaucaccgcaucauugcu

SEQ ID NO: 2778516 - RNA, 19 nt, Artificial Sequence
  Description of Artificial Sequence: Synthetic oligonucleotide
gccugugguuuagcagcug

SEQ ID NO: 2778517 - RNA, 19 nt, Artificial Sequence
  Description of Artificial Sequence: Synthetic oligonucleotide
cugcugcccagcgcuaugu

SEQ ID NO: 2778518 - RNA, 19 nt, Artificial Sequence
  Description of Artificial Sequence: Synthetic oligonucleotide
ggacucugguuccuacauu

SEQ ID NO: 2778519 - RNA, 19 nt, Artificial Sequence
  Description of Artificial Sequence: Synthetic oligonucleotide
ggucagcuuguggcuuuuc

SEQ ID NO: 2778520 - RNA, 19 nt, Artificial Sequence
  Description of Artificial Sequence: Synthetic oligonucleotide
ccuccgugagccgcucuuc

SEQ ID NO: 2778521 - RNA, 19 nt, Artificial Sequence
  Description of Artificial Sequence: Synthetic oligonucleotide
cuggugcuuuuacucuguu

SEQ ID NO: 2778522 - RNA, 19 nt, Artificial Sequence
  Description of Artificial Sequence: Synthetic oligonucleotide
ccgugagccgcucuucacu

SEQ ID NO: 2778523 - RNA, 19 nt, Artificial Sequence
  Description of Artificial Sequence: Synthetic oligonucleotide
cgggacucugguuccuaca

SEQ ID NO: 2778524 - RNA, 19 nt, Artificial Sequence
  Description of Artificial Sequence: Synthetic oligonucleotide
  modified_base (7)..(7): a, c, u, g, unknown or other
cgcugcncuuugagaucug

SEQ ID NO: 2778525 - RNA, 19 nt, Artificial Sequence
  Description of Artificial Sequence: Synthetic oligonucleotide
ggccugcagguaaaaugcu

SEQ ID NO: 2778526 - RNA, 19 nt, Artificial Sequence
  Description of Artificial Sequence: Synthetic oligonucleotide
cagcgcuauguuuguucuu

SEQ ID NO: 2778527 - RNA, 19 nt, Artificial Sequence
  Description of Artificial Sequence: Synthetic oligonucleotide
  modified_base (8)..(8): a, c, u, g, unknown or other
ccgcugcncuuugagaucu

SEQ ID NO: 2778528 - RNA, 19 nt, Artificial Sequence
  Description of Artificial Sequence: Synthetic oligonucleotide
ggccagcugugcauaucua

SEQ ID NO: 2778529 - RNA, 19 nt, Artificial Sequence
  Description of Artificial Sequence: Synthetic oligonucleotide
cggucauuggccugugguu

SEQ ID NO: 2778530 - RNA, 19 nt, Artificial Sequence
  Description of Artificial Sequence: Synthetic oligonucleotide
gugcugcguucgcauccuu

SEQ ID NO: 2778531 - RNA, 19 nt, Artificial Sequence
  Description of Artificial Sequence: Synthetic oligonucleotide
ccgcaucauugcuggugcu

SEQ ID NO: 2778532 - RNA, 19 nt, Artificial Sequence
  Description of Artificial Sequence: Synthetic oligonucleotide
cgcaucauugcuggugcuu

SEQ ID NO: 2778533 - RNA, 19 nt, Artificial Sequence
  Description of Artificial Sequence: Synthetic oligonucleotide
gcccagcgcuauguuuguu

SEQ ID NO: 2778534 - RNA, 19 nt, Artificial Sequence
  Description of Artificial Sequence: Synthetic oligonucleotide
  modified_base (1)..(1): a, c, u, g, unknown or other
  modified_base (13)..(13): a, c, u, g, unknown or other
nccuuccgcugcncuuuga

SEQ ID NO: 2778535 - RNA, 19 nt, Artificial Sequence
  Description of Artificial Sequence: Synthetic oligonucleotide
auguggauccacuugaacc

SEQ ID NO: 2778536 - RNA, 19 nt, Artificial Sequence
  Description of Artificial Sequence: Synthetic oligonucleotide
ugcuguuucccuuagagag

SEQ ID NO: 2778537 - RNA, 19 nt, Artificial Sequence
  Description of Artificial Sequence: Synthetic oligonucleotide
uguggauccacuugaaccg

SEQ ID NO: 2778538 - RNA, 19 nt, Artificial Sequence
  Description of Artificial Sequence: Synthetic oligonucleotide
augacagcggcauugaagg

SEQ ID NO: 2778539 - RNA, 19 nt, Artificial Sequence
  Description of Artificial Sequence: Synthetic oligonucleotide
ucuaucuccacugacaccc

SEQ ID NO: 2778540 - RNA, 19 nt, Artificial Sequence
  Description of Artificial Sequence: Synthetic oligonucleotide
uuagagaggcugaagauga

SEQ ID NO: 2778541 - RNA, 19 nt, Artificial Sequence
  Description of Artificial Sequence: Synthetic oligonucleotide
accauagccgaauagcugg

SEQ ID NO: 2778542 - RNA, 19 nt, Artificial Sequence
  Description of Artificial Sequence: Synthetic oligonucleotide
aauguggauccacuugaac

SEQ ID NO: 2778543 - RNA, 19 nt, Artificial Sequence
  Description of Artificial Sequence: Synthetic oligonucleotide
ucaauguggauccacuuga

SEQ ID NO: 2778544 - RNA, 19 nt, Artificial Sequence
  Description of Artificial Sequence: Synthetic oligonucleotide
ucaaccuucucaaaguccu

SEQ ID NO: 2778545 - RNA, 19 nt, Artificial Sequence
  Description of Artificial Sequence: Synthetic oligonucleotide
guccuuagcagacacaucc

SEQ ID NO: 2778546 - RNA, 19 nt, Artificial Sequence
  Description of Artificial Sequence: Synthetic oligonucleotide
cacacaaugccaucaaacc

SEQ ID NO: 2778547 - RNA, 19 nt, Artificial Sequence
  Description of Artificial Sequence: Synthetic oligonucleotide
uguucuauccgcugcagca

SEQ ID NO: 2778548 - RNA, 19 nt, Artificial Sequence
  Description of Artificial Sequence: Synthetic oligonucleotide
aucggcacccuccucagcc

SEQ ID NO: 2778549 - RNA, 19 nt, Artificial Sequence
  Description of Artificial Sequence: Synthetic oligonucleotide
agcaucuucaccuguuccg

SEQ ID NO: 2778550 - RNA, 19 nt, Artificial Sequence
  Description of Artificial Sequence: Synthetic oligonucleotide
gaccauacaagccucucag

SEQ ID NO: 2778551 - RNA, 19 nt, Artificial Sequence
  Description of Artificial Sequence: Synthetic oligonucleotide
gaguugaacuguucuaucc

SEQ ID NO: 2778552 - RNA, 19 nt, Artificial Sequence
  Description of Artificial Sequence: Synthetic oligonucleotide
agacacauccggcagguuc

SEQ ID NO: 2778553 - RNA, 19 nt, Artificial Sequence
  Description of Artificial Sequence: Synthetic oligonucleotide
caugcuguuucccuuagag

SEQ ID NO: 2778554 - RNA, 19 nt, Artificial Sequence
  Description of Artificial Sequence: Synthetic oligonucleotide
uuagcagacacauccggca

SEQ ID NO: 2778555 - RNA, 19 nt, Artificial Sequence
  Description of Artificial Sequence: Synthetic oligonucleotide
ugaagguaucuccagcccc

SEQ ID NO: 2778556 - RNA, 19 nt, Artificial Sequence
  Description of Artificial Sequence: Synthetic oligonucleotide
cagaucaaccuucucaaag

SEQ ID NO: 2778557 - RNA, 19 nt, Artificial Sequence
  Description of Artificial Sequence: Synthetic oligonucleotide
ucuucacacgaccauacaa

SEQ ID NO: 2778558 - RNA, 19 nt, Artificial Sequence
  Description of Artificial Sequence: Synthetic oligonucleotide
agaucaaccuucucaaagu

SEQ ID NO: 2778559 - RNA, 19 nt, Artificial Sequence
  Description of Artificial Sequence: Synthetic oligonucleotide
uucacacgaccauacaagc

SEQ ID NO: 2778560 - RNA, 19 nt, Artificial Sequence
  Description of Artificial Sequence: Synthetic oligonucleotide
gaugacagcggcauugaag

SEQ ID NO: 2778561 - RNA, 19 nt, Artificial Sequence
  Description of Artificial Sequence: Synthetic oligonucleotide
ucaccauagccgaauagcu

SEQ ID NO: 2778562 - RNA, 19 nt, Artificial Sequence
  Description of Artificial Sequence: Synthetic oligonucleotide
uuucuucacacgaccauac

SEQ ID NO: 2778563 - RNA, 19 nt, Artificial Sequence
  Description of Artificial Sequence: Synthetic oligonucleotide
ugcauuccggcccucaaug

SEQ ID NO: 2778564 - RNA, 19 nt, Artificial Sequence
  Description of Artificial Sequence: Synthetic oligonucleotide
gacucucuggggcagaggc

SEQ ID NO: 2778565 - RNA, 19 nt, Artificial Sequence
  Description of Artificial Sequence: Synthetic oligonucleotide
cuuagcagacacauccggc

SEQ ID NO: 2778566 - RNA, 19 nt, Artificial Sequence
  Description of Artificial Sequence: Synthetic oligonucleotide
cagugugucuacuacucgg

SEQ ID NO: 2778567 - RNA, 19 nt, Artificial Sequence
  Description of Artificial Sequence: Synthetic oligonucleotide
gugucuacuacucggggag

SEQ ID NO: 2778568 - RNA, 19 nt, Artificial Sequence
  Description of Artificial Sequence: Synthetic oligonucleotide
uugaagguaucuccagccc

SEQ ID NO: 2778569 - RNA, 19 nt, Artificial Sequence
  Description of Artificial Sequence: Synthetic oligonucleotide
aaguccuuagcagacacau

SEQ ID NO: 2778570 - RNA, 19 nt, Artificial Sequence
  Description of Artificial Sequence: Synthetic oligonucleotide
ugaguguagcagcuggccc

SEQ ID NO: 2778571 - RNA, 19 nt, Artificial Sequence
  Description of Artificial Sequence: Synthetic oligonucleotide
cucaaaguccuuagcagac

SEQ ID NO: 2778572 - RNA, 19 nt, Artificial Sequence
  Description of Artificial Sequence: Synthetic oligonucleotide
auagccgaauagcuggaag

SEQ ID NO: 2778573 - RNA, 19 nt, Artificial Sequence
  Description of Artificial Sequence: Synthetic oligonucleotide
ucacacgaccauacaagcc

SEQ ID NO: 2778574 - RNA, 19 nt, Artificial Sequence
  Description of Artificial Sequence: Synthetic oligonucleotide
cuuagagaggcugaagaug

SEQ ID NO: 2778575 - RNA, 19 nt, Artificial Sequence
  Description of Artificial Sequence: Synthetic oligonucleotide
acuugaaccgggucagauc

SEQ ID NO: 2778576 - RNA, 19 nt, Artificial Sequence
  Description of Artificial Sequence: Synthetic oligonucleotide
uggaagagcucuucccggg

SEQ ID NO: 2778577 - RNA, 19 nt, Artificial Sequence
  Description of Artificial Sequence: Synthetic oligonucleotide
ugugucuacuacucgggga

SEQ ID NO: 2778578 - RNA, 19 nt, Artificial Sequence
  Description of Artificial Sequence: Synthetic oligonucleotide
uguuccgaugcauuccggc

SEQ ID NO: 2778579 - RNA, 19 nt, Artificial Sequence
  Description of Artificial Sequence: Synthetic oligonucleotide
uagccgaauagcuggaaga

SEQ ID NO: 2778580 - RNA, 19 nt, Artificial Sequence
  Description of Artificial Sequence: Synthetic oligonucleotide
uuccgaugcauuccggccc

SEQ ID NO: 2778581 - RNA, 19 nt, Artificial Sequence
  Description of Artificial Sequence: Synthetic oligonucleotide
aacuguucuauccgcugca

SEQ ID NO: 2778582 - RNA, 19 nt, Artificial Sequence
  Description of Artificial Sequence: Synthetic oligonucleotide
aaggcaucugaguguagca

SEQ ID NO: 2778583 - RNA, 19 nt, Artificial Sequence
  Description of Artificial Sequence: Synthetic oligonucleotide
gugggaaggcaucugagug

SEQ ID NO: 2778584 - RNA, 19 nt, Artificial Sequence
  Description of Artificial Sequence: Synthetic oligonucleotide
ugacaaacaccaccucacc

SEQ ID NO: 2778585 - RNA, 19 nt, Artificial Sequence
  Description of Artificial Sequence: Synthetic oligonucleotide
gaaggcaucugaguguagc

SEQ ID NO: 2778586 - RNA, 19 nt, Artificial Sequence
  Description of Artificial Sequence: Synthetic oligonucleotide
cucaauguggauccacuug

SEQ ID NO: 2778587 - RNA, 19 nt, Artificial Sequence
  Description of Artificial Sequence: Synthetic oligonucleotide
gacacccggacucucuggg

SEQ ID NO: 2778588 - RNA, 19 nt, Artificial Sequence
  Description of Artificial Sequence: Synthetic oligonucleotide
auccacuugaaccggguca

SEQ ID NO: 2778589 - RNA, 19 nt, Artificial Sequence
  Description of Artificial Sequence: Synthetic oligonucleotide
caaaguccuuagcagacac

SEQ ID NO: 2778590 - RNA, 19 nt, Artificial Sequence
  Description of Artificial Sequence: Synthetic oligonucleotide
uacuacucggggagguggg

SEQ ID NO: 2778591 - RNA, 19 nt, Artificial Sequence
  Description of Artificial Sequence: Synthetic oligonucleotide
caccaccucaccauagccg

SEQ ID NO: 2778592 - RNA, 19 nt, Artificial Sequence
  Description of Artificial Sequence: Synthetic oligonucleotide
cacacuuccugccagccac

SEQ ID NO: 2778593 - RNA, 19 nt, Artificial Sequence
  Description of Artificial Sequence: Synthetic oligonucleotide
uccacuugaaccgggucag

SEQ ID NO: 2778594 - RNA, 19 nt, Artificial Sequence
  Description of Artificial Sequence: Synthetic oligonucleotide
ccauacaagccucucaggg

SEQ ID NO: 2778595 - RNA, 19 nt, Artificial Sequence
  Description of Artificial Sequence: Synthetic oligonucleotide
uaucuccacugacacccgg

SEQ ID NO: 2778596 - RNA, 19 nt, Artificial Sequence
  Description of Artificial Sequence: Synthetic oligonucleotide
augagugucgccccuuucu

SEQ ID NO: 2778597 - RNA, 19 nt, Artificial Sequence
  Description of Artificial Sequence: Synthetic oligonucleotide
agugucgccccuuucuuca

SEQ ID NO: 2778598 - RNA, 19 nt, Artificial Sequence
  Description of Artificial Sequence: Synthetic oligonucleotide
ggucagaucaaccuucuca

SEQ ID NO: 2778599 - RNA, 19 nt, Artificial Sequence
  Description of Artificial Sequence: Synthetic oligonucleotide
gacacauccggcagguucc

SEQ ID NO: 2778600 - RNA, 19 nt, Artificial Sequence
  Description of Artificial Sequence: Synthetic oligonucleotide
gucagaucaaccuucucaa

SEQ ID NO: 2778601 - RNA, 19 nt, Artificial Sequence
  Description of Artificial Sequence: Synthetic oligonucleotide
accaccucaccauagccga

SEQ ID NO: 2778602 - RNA, 19 nt, Artificial Sequence
  Description of Artificial Sequence: Synthetic oligonucleotide
cacgucuuugcugacaaac

SEQ ID NO: 2778603 - RNA, 19 nt, Artificial Sequence
  Description of Artificial Sequence: Synthetic oligonucleotide
accauacaagccucucagg

SEQ ID NO: 2778604 - RNA, 19 nt, Artificial Sequence
  Description of Artificial Sequence: Synthetic oligonucleotide
guuccgaugcauuccggcc

SEQ ID NO: 2778605 - RNA, 19 nt, Artificial Sequence
  Description of Artificial Sequence: Synthetic oligonucleotide
accuguuccgaugcauucc

SEQ ID NO: 2778606 - RNA, 19 nt, Artificial Sequence
  Description of Artificial Sequence: Synthetic oligonucleotide
uggaguugaacuguucuau

SEQ ID NO: 2778607 - RNA, 19 nt, Artificial Sequence
  Description of Artificial Sequence: Synthetic oligonucleotide
ugccaucaaaccccugcag

SEQ ID NO: 2778608 - RNA, 19 nt, Artificial Sequence
  Description of Artificial Sequence: Synthetic oligonucleotide
cuguuucccuuagagaggc

SEQ ID NO: 2778609 - RNA, 19 nt, Artificial Sequence
  Description of Artificial Sequence: Synthetic oligonucleotide
auuccggcccucaaugugg

SEQ ID NO: 2778610 - RNA, 19 nt, Artificial Sequence
  Description of Artificial Sequence: Synthetic oligonucleotide
cuacuacucggggaggugg

SEQ ID NO: 2778611 - RNA, 19 nt, Artificial Sequence
  Description of Artificial Sequence: Synthetic oligonucleotide
aucuucaccuguuccgaug

SEQ ID NO: 2778612 - RNA, 19 nt, Artificial Sequence
  Description of Artificial Sequence: Synthetic oligonucleotide
ucucacacaaugccaucaa

SEQ ID NO: 2778613 - RNA, 19 nt, Artificial Sequence
  Description of Artificial Sequence: Synthetic oligonucleotide
guuucccuuagagaggcug

SEQ ID NO: 2778614 - RNA, 19 nt, Artificial Sequence
  Description of Artificial Sequence: Synthetic oligonucleotide
gccaucaaaccccugcagg

SEQ ID NO: 2778615 - RNA, 19 nt, Artificial Sequence
  Description of Artificial Sequence: Synthetic oligonucleotide
aaacaccaccucaccauag

SEQ ID NO: 2778616 - RNA, 19 nt, Artificial Sequence
  Description of Artificial Sequence: Synthetic oligonucleotide
uucuucacacgaccauaca

SEQ ID NO: 2778617 - RNA, 19 nt, Artificial Sequence
  Description of Artificial Sequence: Synthetic oligonucleotide
ugcaugcuguuucccuuag

SEQ ID NO: 2778618 - RNA, 19 nt, Artificial Sequence
  Description of Artificial Sequence: Synthetic oligonucleotide
agccgaauagcuggaagag

SEQ ID NO: 2778619 - RNA, 19 nt, Artificial Sequence
  Description of Artificial Sequence: Synthetic oligonucleotide
uguagcagcuggcccucag

SEQ ID NO: 2778620 - RNA, 19 nt, Artificial Sequence
  Description of Artificial Sequence: Synthetic oligonucleotide
acauccggcagguuccugu

SEQ ID NO: 2778621 - RNA, 19 nt, Artificial Sequence
  Description of Artificial Sequence: Synthetic oligonucleotide
ucaaaguccuuagcagaca

SEQ ID NO: 2778622 - RNA, 19 nt, Artificial Sequence
  Description of Artificial Sequence: Synthetic oligonucleotide
cuggcagccgaaucucagg

SEQ ID NO: 2778623 - RNA, 19 nt, Artificial Sequence
  Description of Artificial Sequence: Synthetic oligonucleotide
aagaugacagcggcauuga

SEQ ID NO: 2778624 - RNA, 19 nt, Artificial Sequence
  Description of Artificial Sequence: Synthetic oligonucleotide
ugacacccggacucucugg

SEQ ID NO: 2778625 - RNA, 19 nt, Artificial Sequence
  Description of Artificial Sequence: Synthetic oligonucleotide
caccauagccgaauagcug

SEQ ID NO: 2778626 - RNA, 19 nt, Artificial Sequence
  Description of Artificial Sequence: Synthetic oligonucleotide
uggaaccccaggugcuugg

SEQ ID NO: 2778627 - RNA, 19 nt, Artificial Sequence
  Description of Artificial Sequence: Synthetic oligonucleotide
ggcaucugaguguagcagc

SEQ ID NO: 2778628 - RNA, 19 nt, Artificial Sequence
  Description of Artificial Sequence: Synthetic oligonucleotide
cugaguguagcagcuggcc

SEQ ID NO: 2778629 - RNA, 19 nt, Artificial Sequence
  Description of Artificial Sequence: Synthetic oligonucleotide
cagggcaucggcacccucc

SEQ ID NO: 2778630 - RNA, 19 nt, Artificial Sequence
  Description of Artificial Sequence: Synthetic oligonucleotide
uccugcaugcuguuucccu

SEQ ID NO: 2778631 - RNA, 19 nt, Artificial Sequence
  Description of Artificial Sequence: Synthetic oligonucleotide
uucuauccgcugcagcauc

SEQ ID NO: 2778632 - RNA, 19 nt, Artificial Sequence
  Description of Artificial Sequence: Synthetic oligonucleotide
cauuccggcccucaaugug

SEQ ID NO: 2778633 - RNA, 19 nt, Artificial Sequence
  Description of Artificial Sequence: Synthetic oligonucleotide
cugccagccaccuggcagc

SEQ ID NO: 2778634 - RNA, 19 nt, Artificial Sequence
  Description of Artificial Sequence: Synthetic oligonucleotide
cucuaucuccacugacacc

SEQ ID NO: 2778635 - RNA, 19 nt, Artificial Sequence
  Description of Artificial Sequence: Synthetic oligonucleotide
caggcacagaugagugucg

SEQ ID NO: 2778636 - RNA, 19 nt, Artificial Sequence
  Description of Artificial Sequence: Synthetic oligonucleotide
ucagaucaaccuucucaaa

SEQ ID NO: 2778637 - RNA, 19 nt, Artificial Sequence
  Description of Artificial Sequence: Synthetic oligonucleotide
ugucuacuacucggggagg

SEQ ID NO: 2778638 - RNA, 19 nt, Artificial Sequence
  Description of Artificial Sequence: Synthetic oligonucleotide
agagaggcugaagaugaca

SEQ ID NO: 2778639 - RNA, 19 nt, Artificial Sequence
  Description of Artificial Sequence: Synthetic oligonucleotide
uccgaugcauuccggcccu

SEQ ID NO: 2778640 - RNA, 19 nt, Artificial Sequence
  Description of Artificial Sequence: Synthetic oligonucleotide
cuguucuauccgcugcagc

SEQ ID NO: 2778641 - RNA, 19 nt, Artificial Sequence
  Description of Artificial Sequence: Synthetic oligonucleotide
ucaccuguuccgaugcauu

SEQ ID NO: 2778642 - RNA, 19 nt, Artificial Sequence
  Description of Artificial Sequence: Synthetic oligonucleotide
aggcaucugaguguagcag

SEQ ID NO: 2778643 - RNA, 19 nt, Artificial Sequence
  Description of Artificial Sequence: Synthetic oligonucleotide
cuuggaguugaacuguucu

SEQ ID NO: 2778644 - RNA, 19 nt, Artificial Sequence
  Description of Artificial Sequence: Synthetic oligonucleotide
ugaaccgggucagaucaac

SEQ ID NO: 2778645 - RNA, 19 nt, Artificial Sequence
  Description of Artificial Sequence: Synthetic oligonucleotide
cacacgaccauacaagccu

SEQ ID NO: 2778646 - RNA, 19 nt, Artificial Sequence
  Description of Artificial Sequence: Synthetic oligonucleotide
gaggugggaaggcaucuga

SEQ ID NO: 2778647 - RNA, 19 nt, Artificial Sequence
  Description of Artificial Sequence: Synthetic oligonucleotide
aaaguccuuagcagacaca

SEQ ID NO: 2778648 - RNA, 19 nt, Artificial Sequence
  Description of Artificial Sequence: Synthetic oligonucleotide
ugagugucgccccuuucuu

SEQ ID NO: 2778649 - RNA, 19 nt, Artificial Sequence
  Description of Artificial Sequence: Synthetic oligonucleotide
ggcugaagaugacagcggc

SEQ ID NO: 2778650 - RNA, 19 nt, Artificial Sequence
  Description of Artificial Sequence: Synthetic oligonucleotide
gauccacuugaaccggguc

SEQ ID NO: 2778651 - RNA, 19 nt, Artificial Sequence
  Description of Artificial Sequence: Synthetic oligonucleotide
ugcaggccacacuuccugc

SEQ ID NO: 2778652 - RNA, 19 nt, Artificial Sequence
  Description of Artificial Sequence: Synthetic oligonucleotide
ucaggguccagggcaucgg

SEQ ID NO: 2778653 - RNA, 19 nt, Artificial Sequence
  Description of Artificial Sequence: Synthetic oligonucleotide
ucuacuacucggggaggug

SEQ ID NO: 2778654 - RNA, 19 nt, Artificial Sequence
  Description of Artificial Sequence: Synthetic oligonucleotide
aaaccccugcaggccacac

SEQ ID NO: 2778655 - RNA, 19 nt, Artificial Sequence
  Description of Artificial Sequence: Synthetic oligonucleotide
ccuuagcagacacauccgg

SEQ ID NO: 2778656 - RNA, 19 nt, Artificial Sequence
  Description of Artificial Sequence: Synthetic oligonucleotide
agcugacuggaaccccagg

SEQ ID NO: 2778657 - RNA, 19 nt, Artificial Sequence
  Description of Artificial Sequence: Synthetic oligonucleotide
gcacagaugagugucgccc

SEQ ID NO: 2778658 - RNA, 19 nt, Artificial Sequence
  Description of Artificial Sequence: Synthetic oligonucleotide
aguguagcagcuggcccuc

SEQ ID NO: 2778659 - RNA, 19 nt, Artificial Sequence
  Description of Artificial Sequence: Synthetic oligonucleotide
gaguguagcagcuggcccu

SEQ ID NO: 2778660 - RNA, 19 nt, Artificial Sequence
  Description of Artificial Sequence: Synthetic oligonucleotide
accccaggugcuuggccac

SEQ ID NO: 2778661 - RNA, 19 nt, Artificial Sequence
  Description of Artificial Sequence: Synthetic oligonucleotide
cugcaggccacacuuccug

SEQ ID NO: 2778662 - RNA, 19 nt, Artificial Sequence
  Description of Artificial Sequence: Synthetic oligonucleotide
gaaccgggucagaucaacc

SEQ ID NO: 2778663 - RNA, 19 nt, Artificial Sequence
  Description of Artificial Sequence: Synthetic oligonucleotide
acacccggacucucugggg

SEQ ID NO: 2778664 - RNA, 19 nt, Artificial Sequence
  Description of Artificial Sequence: Synthetic oligonucleotide
ccuguuccgaugcauuccg

SEQ ID NO: 2778665 - RNA, 19 nt, Artificial Sequence
  Description of Artificial Sequence: Synthetic oligonucleotide
agcggcauugaagguaucu

SEQ ID NO: 2778666 - RNA, 19 nt, Artificial Sequence
  Description of Artificial Sequence: Synthetic oligonucleotide
accccugcaggccacacuu

SEQ ID NO: 2778667 - RNA, 19 nt, Artificial Sequence
  Description of Artificial Sequence: Synthetic oligonucleotide
acgaccauacaagccucuc

SEQ ID NO: 2778668 - RNA, 19 nt, Artificial Sequence
  Description of Artificial Sequence: Synthetic oligonucleotide
aggcugaagaugacagcgg

SEQ ID NO: 2778669 - RNA, 19 nt, Artificial Sequence
  Description of Artificial Sequence: Synthetic oligonucleotide
aaccccugcaggccacacu

SEQ ID NO: 2778670 - RNA, 19 nt, Artificial Sequence
  Description of Artificial Sequence: Synthetic oligonucleotide
acacgaccauacaagccuc

SEQ ID NO: 2778671 - RNA, 19 nt, Artificial Sequence
  Description of Artificial Sequence: Synthetic oligonucleotide
aauagcuggaagagcucuu

SEQ ID NO: 2778672 - RNA, 19 nt, Artificial Sequence
  Description of Artificial Sequence: Synthetic oligonucleotide
caccuguuccgaugcauuc

SEQ ID NO: 2778673 - RNA, 19 nt, Artificial Sequence
  Description of Artificial Sequence: Synthetic oligonucleotide
uucaccuguuccgaugcau

SEQ ID NO: 2778674 - RNA, 19 nt, Artificial Sequence
  Description of Artificial Sequence: Synthetic oligonucleotide
ugaagaugacagcggcauu

SEQ ID NO: 2778675 - RNA, 19 nt, Artificial Sequence
  Description of Artificial Sequence: Synthetic oligonucleotide
ugucgccccuuucuucaca

SEQ ID NO: 2778676 - RNA, 19 nt, Artificial Sequence
  Description of Artificial Sequence: Synthetic oligonucleotide
gaugagugucgccccuuuc

SEQ ID NO: 2778677 - RNA, 19 nt, Artificial Sequence
  Description of Artificial Sequence: Synthetic oligonucleotide
agccucucagggccuccgc

SEQ ID NO: 2778678 - RNA, 19 nt, Artificial Sequence
  Description of Artificial Sequence: Synthetic oligonucleotide
gacagcggcauugaaggua

SEQ ID NO: 2778679 - RNA, 19 nt, Artificial Sequence
  Description of Artificial Sequence: Synthetic oligonucleotide
cuguuccgaugcauuccgg

SEQ ID NO: 2778680 - RNA, 19 nt, Artificial Sequence
  Description of Artificial Sequence: Synthetic oligonucleotide
uuccggcccucaaugugga

SEQ ID NO: 2778681 - RNA, 19 nt, Artificial Sequence
  Description of Artificial Sequence: Synthetic oligonucleotide
cuccgcagcugacuggaac

SEQ ID NO: 2778682 - RNA, 19 nt, Artificial Sequence
  Description of Artificial Sequence: Synthetic oligonucleotide
ugcuuggaguugaacuguu

SEQ ID NO: 2778683 - RNA, 19 nt, Artificial Sequence
  Description of Artificial Sequence: Synthetic oligonucleotide
agcccaggcacagaugagu

SEQ ID NO: 2778684 - RNA, 19 nt, Artificial Sequence
  Description of Artificial Sequence: Synthetic oligonucleotide
gagugucgccccuuucuuc

SEQ ID NO: 2778685 - RNA, 19 nt, Artificial Sequence
  Description of Artificial Sequence: Synthetic oligonucleotide
acgucuuugcugacaaaca

SEQ ID NO: 2778686 - RNA, 19 nt, Artificial Sequence
  Description of Artificial Sequence: Synthetic oligonucleotide
agaggcugcuuggaguuga

SEQ ID NO: 2778687 - RNA, 19 nt, Artificial Sequence
  Description of Artificial Sequence: Synthetic oligonucleotide
cugacacccggacucucug

SEQ ID NO: 2778688 - RNA, 19 nt, Artificial Sequence
  Description of Artificial Sequence: Synthetic oligonucleotide
ggaguugaacuguucuauc

SEQ ID NO: 2778689 - RNA, 19 nt, Artificial Sequence
  Description of Artificial Sequence: Synthetic oligonucleotide
gaugcauuccggcccucaa

SEQ ID NO: 2778690 - RNA, 19 nt, Artificial Sequence
  Description of Artificial Sequence: Synthetic oligonucleotide
agggcaucggcacccuccu

SEQ ID NO: 2778691 - RNA, 19 nt, Artificial Sequence
  Description of Artificial Sequence: Synthetic oligonucleotide
accgggucagaucaaccuu

SEQ ID NO: 2778692 - RNA, 19 nt, Artificial Sequence
  Description of Artificial Sequence: Synthetic oligonucleotide
agccgaaucucagggccuc

SEQ ID NO: 2778693 - RNA, 19 nt, Artificial Sequence
  Description of Artificial Sequence: Synthetic oligonucleotide
acaaugccaucaaaccccu

SEQ ID NO: 2778694 - RNA, 19 nt, Artificial Sequence
  Description of Artificial Sequence: Synthetic oligonucleotide
cucucacacaaugccauca

SEQ ID NO: 2778695 - RNA, 19 nt, Artificial Sequence
  Description of Artificial Sequence: Synthetic oligonucleotide
acagcggcauugaagguau

SEQ ID NO: 2778696 - RNA, 19 nt, Artificial Sequence
  Description of Artificial Sequence: Synthetic oligonucleotide
aguccuuagcagacacauc

SEQ ID NO: 2778697 - RNA, 19 nt, Artificial Sequence
  Description of Artificial Sequence: Synthetic oligonucleotide
ugacagcggcauugaaggu

SEQ ID NO: 2778698 - RNA, 19 nt, Artificial Sequence
  Description of Artificial Sequence: Synthetic oligonucleotide
ucccggggcuucucuaucu

SEQ ID NO: 2778699 - RNA, 19 nt, Artificial Sequence
  Description of Artificial Sequence: Synthetic oligonucleotide
gucgccccuuucuucacac

SEQ ID NO: 2778700 - RNA, 19 nt, Artificial Sequence
  Description of Artificial Sequence: Synthetic oligonucleotide
ggcaucggcacccuccuca

SEQ ID NO: 2778701 - RNA, 19 nt, Artificial Sequence
  Description of Artificial Sequence: Synthetic oligonucleotide
augcauuccggcccucaau

SEQ ID NO: 2778702 - RNA, 19 nt, Artificial Sequence
  Description of Artificial Sequence: Synthetic oligonucleotide
ucggcacccuccucagccc

SEQ ID NO: 2778703 - RNA, 19 nt, Artificial Sequence
  Description of Artificial Sequence: Synthetic oligonucleotide
acacuuccugccagccacc

SEQ ID NO: 2778704 - RNA, 19 nt, Artificial Sequence
  Description of Artificial Sequence: Synthetic oligonucleotide
cccagugugucuacuacuc

SEQ ID NO: 2778705 - RNA, 19 nt, Artificial Sequence
  Description of Artificial Sequence: Synthetic oligonucleotide
uugaaccgggucagaucaa

SEQ ID NO: 2778706 - RNA, 19 nt, Artificial Sequence
  Description of Artificial Sequence: Synthetic oligonucleotide
uguuucccuuagagaggcu

SEQ ID NO: 2778707 - RNA, 19 nt, Artificial Sequence
  Description of Artificial Sequence: Synthetic oligonucleotide
agaugagugucgccccuuu

SEQ ID NO: 2778708 - RNA, 19 nt, Artificial Sequence
  Description of Artificial Sequence: Synthetic oligonucleotide
agaugacagcggcauugaa

SEQ ID NO: 2778709 - RNA, 19 nt, Artificial Sequence
  Description of Artificial Sequence: Synthetic oligonucleotide
ccagugugucuacuacucg

SEQ ID NO: 2778710 - RNA, 19 nt, Artificial Sequence
  Description of Artificial Sequence: Synthetic oligonucleotide
acaagccucucagggccuc

SEQ ID NO: 2778711 - RNA, 19 nt, Artificial Sequence
  Description of Artificial Sequence: Synthetic oligonucleotide
cccuuagagaggcugaaga

SEQ ID NO: 2778712 - RNA, 19 nt, Artificial Sequence
  Description of Artificial Sequence: Synthetic oligonucleotide
caaacaccaccucaccaua

SEQ ID NO: 2778713 - RNA, 19 nt, Artificial Sequence
  Description of Artificial Sequence: Synthetic oligonucleotide
uucccggggcuucucuauc

SEQ ID NO: 2778714 - RNA, 19 nt, Artificial Sequence
  Description of Artificial Sequence: Synthetic oligonucleotide
cucagcccaggcacagaug

SEQ ID NO: 2778715 - RNA, 19 nt, Artificial Sequence
  Description of Artificial Sequence: Synthetic oligonucleotide
ccgaauagcuggaagagcu

SEQ ID NO: 2778716 - RNA, 19 nt, Artificial Sequence
  Description of Artificial Sequence: Synthetic oligonucleotide
caauguggauccacuugaa

SEQ ID NO: 2778717 - RNA, 19 nt, Artificial Sequence
  Description of Artificial Sequence: Synthetic oligonucleotide
guccagggcaucggcaccc

SEQ ID NO: 2778718 - RNA, 19 nt, Artificial Sequence
  Description of Artificial Sequence: Synthetic oligonucleotide
acugacacccggacucucu

SEQ ID NO: 2778719 - RNA, 19 nt, Artificial Sequence
  Description of Artificial Sequence: Synthetic oligonucleotide
caucugaguguagcagcug

SEQ ID NO: 2778720 - RNA, 19 nt, Artificial Sequence
  Description of Artificial Sequence: Synthetic oligonucleotide
ccaggcacagaugaguguc

SEQ ID NO: 2778721 - RNA, 19 nt, Artificial Sequence
  Description of Artificial Sequence: Synthetic oligonucleotide
ggcacagaugagugucgcc

SEQ ID NO: 2778722 - RNA, 19 nt, Artificial Sequence
  Description of Artificial Sequence: Synthetic oligonucleotide
acccggacucucuggggca

SEQ ID NO: 2778723 - RNA, 19 nt, Artificial Sequence
  Description of Artificial Sequence: Synthetic oligonucleotide
gccuccugcaugcuguuuc

SEQ ID NO: 2778724 - RNA, 19 nt, Artificial Sequence
  Description of Artificial Sequence: Synthetic oligonucleotide
ccgggucagaucaaccuuc

SEQ ID NO: 2778725 - RNA, 19 nt, Artificial Sequence
  Description of Artificial Sequence: Synthetic oligonucleotide
accucaccauagccgaaua

SEQ ID NO: 2778726 - RNA, 19 nt, Artificial Sequence
  Description of Artificial Sequence: Synthetic oligonucleotide
cccugcaggccacacuucc

SEQ ID NO: 2778727 - RNA, 19 nt, Artificial Sequence
  Description of Artificial Sequence: Synthetic oligonucleotide
cggcccucaauguggaucc

SEQ ID NO: 2778728 - RNA, 19 nt, Artificial Sequence
  Description of Artificial Sequence: Synthetic oligonucleotide
ccuccugcaugcuguuucc

SEQ ID NO: 2778729 - RNA, 19 nt, Artificial Sequence
  Description of Artificial Sequence: Synthetic oligonucleotide
ccucaccauagccgaauag

SEQ ID NO: 2778730 - RNA, 19 nt, Artificial Sequence
  Description of Artificial Sequence: Synthetic oligonucleotide
cuggaaccccaggugcuug

SEQ ID NO: 2778731 - RNA, 19 nt, Artificial Sequence
  Description of Artificial Sequence: Synthetic oligonucleotide
gccgaauagcuggaagagc

SEQ ID NO: 2778732 - RNA, 19 nt, Artificial Sequence
  Description of Artificial Sequence: Synthetic oligonucleotide
cucggggaggugggaaggc

SEQ ID NO: 2778733 - RNA, 19 nt, Artificial Sequence
  Description of Artificial Sequence: Synthetic oligonucleotide
caaugccaucaaaccccug

SEQ ID NO: 2778734 - RNA, 19 nt, Artificial Sequence
  Description of Artificial Sequence: Synthetic oligonucleotide
cuccugcaugcuguuuccc

SEQ ID NO: 2778735 - RNA, 19 nt, Artificial Sequence
  Description of Artificial Sequence: Synthetic oligonucleotide
gcaucggcacccuccucag

SEQ ID NO: 2778736 - RNA, 19 nt, Artificial Sequence
  Description of Artificial Sequence: Synthetic oligonucleotide
gguccagggcaucggcacc

SEQ ID NO: 2778737 - RNA, 19 nt, Artificial Sequence
  Description of Artificial Sequence: Synthetic oligonucleotide
acuacucggggagguggga

SEQ ID NO: 2778738 - RNA, 19 nt, Artificial Sequence
  Description of Artificial Sequence: Synthetic oligonucleotide
gcaucuucaccuguuccga

SEQ ID NO: 2778739 - RNA, 19 nt, Artificial Sequence
  Description of Artificial Sequence: Synthetic oligonucleotide
caucggcacccuccucagc

SEQ ID NO: 2778740 - RNA, 19 nt, Artificial Sequence
  Description of Artificial Sequence: Synthetic oligonucleotide
agggccuccgcagcugacu

SEQ ID NO: 2778741 - RNA, 19 nt, Artificial Sequence
  Description of Artificial Sequence: Synthetic oligonucleotide
cugcaugcuguuucccuua

SEQ ID NO: 2778742 - RNA, 19 nt, Artificial Sequence
  Description of Artificial Sequence: Synthetic oligonucleotide
ggcagaggcugcuuggagu

SEQ ID NO: 2778743 - RNA, 19 nt, Artificial Sequence
  Description of Artificial Sequence: Synthetic oligonucleotide
gcggcauugaagguaucuc

SEQ ID NO: 2778744 - RNA, 19 nt, Artificial Sequence
  Description of Artificial Sequence: Synthetic oligonucleotide
gggccuccgcagcugacug

SEQ ID NO: 2778745 - RNA, 19 nt, Artificial Sequence
  Description of Artificial Sequence: Synthetic oligonucleotide
cuucaccuguuccgaugca

SEQ ID NO: 2778746 - RNA, 19 nt, Artificial Sequence
  Description of Artificial Sequence: Synthetic oligonucleotide
gugucgccccuuucuucac

SEQ ID NO: 2778747 - RNA, 19 nt, Artificial Sequence
  Description of Artificial Sequence: Synthetic oligonucleotide
ggaggugggaaggcaucug

SEQ ID NO: 2778748 - RNA, 19 nt, Artificial Sequence
  Description of Artificial Sequence: Synthetic oligonucleotide
ccggggcuucucuaucucc

SEQ ID NO: 2778749 - RNA, 19 nt, Artificial Sequence
  Description of Artificial Sequence: Synthetic oligonucleotide
gggaaggcaucugagugua

SEQ ID NO: 2778750 - RNA, 19 nt, Artificial Sequence
  Description of Artificial Sequence: Synthetic oligonucleotide
acacauccggcagguuccu

SEQ ID NO: 2778751 - RNA, 19 nt, Artificial Sequence
  Description of Artificial Sequence: Synthetic oligonucleotide
cccuuucuucacacgacca

SEQ ID NO: 2778752 - RNA, 19 nt, Artificial Sequence
  Description of Artificial Sequence: Synthetic oligonucleotide
gccacacuuccugccagcc

SEQ ID NO: 2778753 - RNA, 19 nt, Artificial Sequence
  Description of Artificial Sequence: Synthetic oligonucleotide
gagcucuucccggggcuuc

SEQ ID NO: 2778754 - RNA, 19 nt, Artificial Sequence
  Description of Artificial Sequence: Synthetic oligonucleotide
cauagccgaauagcuggaa

SEQ ID NO: 2778755 - RNA, 19 nt, Artificial Sequence
  Description of Artificial Sequence: Synthetic oligonucleotide
gucuacuacucggggaggu

SEQ ID NO: 2778756 - RNA, 19 nt, Artificial Sequence
  Description of Artificial Sequence: Synthetic oligonucleotide
cagaggcugcuuggaguug

SEQ ID NO: 2778757 - RNA, 19 nt, Artificial Sequence
  Description of Artificial Sequence: Synthetic oligonucleotide
cugcuuggaguugaacugu

SEQ ID NO: 2778758 - RNA, 19 nt, Artificial Sequence
  Description of Artificial Sequence: Synthetic oligonucleotide
cgaauagcuggaagagcuc

SEQ ID NO: 2778759 - RNA, 19 nt, Artificial Sequence
  Description of Artificial Sequence: Synthetic oligonucleotide
guucuauccgcugcagcau

SEQ ID NO: 2778760 - RNA, 19 nt, Artificial Sequence
  Description of Artificial Sequence: Synthetic oligonucleotide
gccaccuggcagccgaauc

SEQ ID NO: 2778761 - RNA, 19 nt, Artificial Sequence
  Description of Artificial Sequence: Synthetic oligonucleotide
cuacucggggaggugggaa

SEQ ID NO: 2778762 - RNA, 19 nt, Artificial Sequence
  Description of Artificial Sequence: Synthetic oligonucleotide
ggaaccccaggugcuuggc

SEQ ID NO: 2778763 - RNA, 19 nt, Artificial Sequence
  Description of Artificial Sequence: Synthetic oligonucleotide
ccucucacacaaugccauc

SEQ ID NO: 2778764 - RNA, 19 nt, Artificial Sequence
  Description of Artificial Sequence: Synthetic oligonucleotide
ccagccaccuggcagccga

SEQ ID NO: 2778765 - RNA, 19 nt, Artificial Sequence
  Description of Artificial Sequence: Synthetic oligonucleotide
ccggcccucaauguggauc

SEQ ID NO: 2778766 - RNA, 19 nt, Artificial Sequence
  Description of Artificial Sequence: Synthetic oligonucleotide
cacugacacccggacucuc

SEQ ID NO: 2778767 - RNA, 19 nt, Artificial Sequence
  Description of Artificial Sequence: Synthetic oligonucleotide
ccuuagagaggcugaagau

SEQ ID NO: 2778768 - RNA, 19 nt, Artificial Sequence
  Description of Artificial Sequence: Synthetic oligonucleotide
cagggccuccgcagcugac

SEQ ID NO: 2778769 - RNA, 19 nt, Artificial Sequence
  Description of Artificial Sequence: Synthetic oligonucleotide
cacgaccauacaagccucu

SEQ ID NO: 2778770 - RNA, 19 nt, Artificial Sequence
  Description of Artificial Sequence: Synthetic oligonucleotide
ggaaggcaucugaguguag

SEQ ID NO: 2778771 - RNA, 19 nt, Artificial Sequence
  Description of Artificial Sequence: Synthetic oligonucleotide
cuucccggggcuucucuau

SEQ ID NO: 2778772 - RNA, 19 nt, Artificial Sequence
  Description of Artificial Sequence: Synthetic oligonucleotide
ccauagccgaauagcugga

SEQ ID NO: 2778773 - RNA, 19 nt, Artificial Sequence
  Description of Artificial Sequence: Synthetic oligonucleotide
gccccuuucuucacacgac

SEQ ID NO: 2778774 - RNA, 19 nt, Artificial Sequence
  Description of Artificial Sequence: Synthetic oligonucleotide
gccucucagggccuccgca

SEQ ID NO: 2778775 - RNA, 19 nt, Artificial Sequence
  Description of Artificial Sequence: Synthetic oligonucleotide
ccgcagcugacuggaaccc

SEQ ID NO: 2778776 - RNA, 19 nt, Artificial Sequence
  Description of Artificial Sequence: Synthetic oligonucleotide
cacuugaaccgggucagau

SEQ ID NO: 2778777 - RNA, 19 nt, Artificial Sequence
  Description of Artificial Sequence: Synthetic oligonucleotide
uccggcccucaauguggau

SEQ ID NO: 2778778 - RNA, 19 nt, Artificial Sequence
  Description of Artificial Sequence: Synthetic oligonucleotide
caucuucaccuguuccgau

SEQ ID NO: 2778779 - RNA, 19 nt, Artificial Sequence
  Description of Artificial Sequence: Synthetic oligonucleotide
gcacccuccucagcccagg

SEQ ID NO: 2778780 - RNA, 19 nt, Artificial Sequence
  Description of Artificial Sequence: Synthetic oligonucleotide
ggggaggugggaaggcauc

SEQ ID NO: 2778781 - RNA, 19 nt, Artificial Sequence
  Description of Artificial Sequence: Synthetic oligonucleotide
cacauccggcagguuccug

SEQ ID NO: 2778782 - RNA, 19 nt, Artificial Sequence
  Description of Artificial Sequence: Synthetic oligonucleotide
gccuccgcagcugacugga

SEQ ID NO: 2778783 - RNA, 19 nt, Artificial Sequence
  Description of Artificial Sequence: Synthetic oligonucleotide
cuccacugacacccggacu

SEQ ID NO: 2778784 - RNA, 19 nt, Artificial Sequence
  Description of Artificial Sequence: Synthetic oligonucleotide
cgaaucucagggccuccug

SEQ ID NO: 2778785 - RNA, 19 nt, Artificial Sequence
  Description of Artificial Sequence: Synthetic oligonucleotide
cagccgaaucucagggccu

SEQ ID NO: 2778786 - RNA, 19 nt, Artificial Sequence
  Description of Artificial Sequence: Synthetic oligonucleotide
gaggcugcuuggaguugaa

SEQ ID NO: 2778787 - RNA, 19 nt, Artificial Sequence
  Description of Artificial Sequence: Synthetic oligonucleotide
gcccucaauguggauccac

SEQ ID NO: 2778788 - RNA, 19 nt, Artificial Sequence
  Description of Artificial Sequence: Synthetic oligonucleotide
cgaccauacaagccucuca

SEQ ID NO: 2778789 - RNA, 19 nt, Artificial Sequence
  Description of Artificial Sequence: Synthetic oligonucleotide
gcauuccggcccucaaugu

SEQ ID NO: 2778790 - RNA, 19 nt, Artificial Sequence
  Description of Artificial Sequence: Synthetic oligonucleotide
ggcacccuccucagcccag

SEQ ID NO: 2778791 - RNA, 19 nt, Artificial Sequence
  Description of Artificial Sequence: Synthetic oligonucleotide
cagcggcauugaagguauc

SEQ ID NO: 2778792 - RNA, 19 nt, Artificial Sequence
  Description of Artificial Sequence: Synthetic oligonucleotide
agccaccuggcagccgaau

SEQ ID NO: 2778793 - RNA, 19 nt, Artificial Sequence
  Description of Artificial Sequence: Synthetic oligonucleotide
caccucaccauagccgaau

SEQ ID NO: 2778794 - RNA, 19 nt, Artificial Sequence
  Description of Artificial Sequence: Synthetic oligonucleotide
gccgaaucucagggccucc

SEQ ID NO: 2778795 - RNA, 19 nt, Artificial Sequence
  Description of Artificial Sequence: Synthetic oligonucleotide
cccggggcuucucuaucuc

SEQ ID NO: 2778796 - RNA, 19 nt, Artificial Sequence
  Description of Artificial Sequence: Synthetic oligonucleotide
ccacacuuccugccagcca

SEQ ID NO: 2778797 - RNA, 19 nt, Artificial Sequence
  Description of Artificial Sequence: Synthetic oligonucleotide
ggugcuuggccacgucuuu

SEQ ID NO: 2778798 - RNA, 19 nt, Artificial Sequence
  Description of Artificial Sequence: Synthetic oligonucleotide
cccggacucucuggggcag

SEQ ID NO: 2778799 - RNA, 19 nt, Artificial Sequence
  Description of Artificial Sequence: Synthetic oligonucleotide
ccuccucagcccaggcaca

SEQ ID NO: 2778800 - RNA, 19 nt, Artificial Sequence
  Description of Artificial Sequence: Synthetic oligonucleotide
cgcagcugacuggaacccc

SEQ ID NO: 2778801 - RNA, 19 nt, Artificial Sequence
  Description of Artificial Sequence: Synthetic oligonucleotide
ccucaauguggauccacuu

SEQ ID NO: 2778802 - RNA, 19 nt, Artificial Sequence
  Description of Artificial Sequence: Synthetic oligonucleotide
ccccaggugcuuggccacg

SEQ ID NO: 2778803 - RNA, 19 nt, Artificial Sequence
  Description of Artificial Sequence: Synthetic oligonucleotide
cagccaccuggcagccgaa

SEQ ID NO: 2778804 - RNA, 19 nt, Artificial Sequence
  Description of Artificial Sequence: Synthetic oligonucleotide
cuauccgcugcagcaucuu

SEQ ID NO: 2778805 - RNA, 19 nt, Artificial Sequence
  Description of Artificial Sequence: Synthetic oligonucleotide
gggcaucggcacccuccuc

SEQ ID NO: 2778806 - RNA, 19 nt, Artificial Sequence
  Description of Artificial Sequence: Synthetic oligonucleotide
cagaugagugucgccccuu

SEQ ID NO: 2778807 - RNA, 19 nt, Artificial Sequence
  Description of Artificial Sequence: Synthetic oligonucleotide
ccagggcaucggcacccuc

SEQ ID NO: 2778808 - RNA, 19 nt, Artificial Sequence
  Description of Artificial Sequence: Synthetic oligonucleotide
ccaccucaccauagccgaa

SEQ ID NO: 2778809 - RNA, 19 nt, Artificial Sequence
  Description of Artificial Sequence: Synthetic oligonucleotide
ccacgucuuugcugacaaa

SEQ ID NO: 2778810 - RNA, 19 nt, Artificial Sequence
  Description of Artificial Sequence: Synthetic oligonucleotide
ggcccucaauguggaucca

SEQ ID NO: 2778811 - RNA, 19 nt, Artificial Sequence
  Description of Artificial Sequence: Synthetic oligonucleotide
cgaugcauuccggcccuca

SEQ ID NO: 2778812 - RNA, 19 nt, Artificial Sequence
  Description of Artificial Sequence: Synthetic oligonucleotide
cgggucagaucaaccuucu

SEQ ID NO: 2778813 - RNA, 19 nt, Artificial Sequence
  Description of Artificial Sequence: Synthetic oligonucleotide
ccacuugaaccgggucaga

SEQ ID NO: 2778814 - RNA, 19 nt, Artificial Sequence
  Description of Artificial Sequence: Synthetic oligonucleotide
ccgaaucucagggccuccu

SEQ ID NO: 2778815 - RNA, 19 nt, Artificial Sequence
  Description of Artificial Sequence: Synthetic oligonucleotide
cggcacccuccucagccca

SEQ ID NO: 2778816 - RNA, 19 nt, Artificial Sequence
  Description of Artificial Sequence: Synthetic oligonucleotide
ccuccgcagcugacuggaa

SEQ ID NO: 2778817 - RNA, 19 nt, Artificial Sequence
  Description of Artificial Sequence: Synthetic oligonucleotide
ccgaugcauuccggcccuc

SEQ ID NO: 2778818 - RNA, 19 nt, Artificial Sequence
  Description of Artificial Sequence: Synthetic oligonucleotide
ccggacucucuggggcaga

SEQ ID NO: 2778819 - RNA, 19 nt, Artificial Sequence
  Description of Artificial Sequence: Synthetic oligonucleotide
cccaggugcuuggccacgu

SEQ ID NO: 2778820 - RNA, 19 nt, Artificial Sequence
  Description of Artificial Sequence: Synthetic oligonucleotide
uuuacauaaagaaacaucu

SEQ ID NO: 2778821 - RNA, 19 nt, Artificial Sequence
  Description of Artificial Sequence: Synthetic oligonucleotide
aagagauccagauagaucu

SEQ ID NO: 2778822 - RNA, 19 nt, Artificial Sequence
  Description of Artificial Sequence: Synthetic oligonucleotide
aacacaagugccuaagccc

SEQ ID NO: 2778823 - RNA, 19 nt, Artificial Sequence
  Description of Artificial Sequence: Synthetic oligonucleotide
aaacacaagugccuaagcc

SEQ ID NO: 2778824 - RNA, 19 nt, Artificial Sequence
  Description of Artificial Sequence: Synthetic oligonucleotide
uagaucaaagcuaaaaugc

SEQ ID NO: 2778825 - RNA, 19 nt, Artificial Sequence
  Description of Artificial Sequence: Synthetic oligonucleotide
uagaucucaggacagagcg

SEQ ID NO: 2778826 - RNA, 19 nt, Artificial Sequence
  Description of Artificial Sequence: Synthetic oligonucleotide
aaagcuaaaaugcgacagc

SEQ ID NO: 2778827 - RNA, 19 nt, Artificial Sequence
  Description of Artificial Sequence: Synthetic oligonucleotide
uaaagaaacaucuggaaac

SEQ ID NO: 2778828 - RNA, 19 nt, Artificial Sequence
  Description of Artificial Sequence: Synthetic oligonucleotide
uuagaucaaagcuaaaaug

SEQ ID NO: 2778829 - RNA, 19 nt, Artificial Sequence
  Description of Artificial Sequence: Synthetic oligonucleotide
aauggugccaaucaauugu

SEQ ID NO: 2778830 - RNA, 19 nt, Artificial Sequence
  Description of Artificial Sequence: Synthetic oligonucleotide
aauguaauggugccaauca

SEQ ID NO: 2778831 - RNA, 19 nt, Artificial Sequence
  Description of Artificial Sequence: Synthetic oligonucleotide
auagaguaagaacucaggg

SEQ ID NO: 2778832 - RNA, 19 nt, Artificial Sequence
  Description of Artificial Sequence: Synthetic oligonucleotide
aacucaggguaagagaucc

SEQ ID NO: 2778833 - RNA, 19 nt, Artificial Sequence
  Description of Artificial Sequence: Synthetic oligonucleotide
auggcauuuagaucaaagc

SEQ ID NO: 2778834 - RNA, 19 nt, Artificial Sequence
  Description of Artificial Sequence: Synthetic oligonucleotide
aacaucuggaaacguuucc

SEQ ID NO: 2778835 - RNA, 19 nt, Artificial Sequence
  Description of Artificial Sequence: Synthetic oligonucleotide
aagcuaaaaugcgacagcc

SEQ ID NO: 2778836 - RNA, 19 nt, Artificial Sequence
  Description of Artificial Sequence: Synthetic oligonucleotide
aaagaaacaucuggaaacg

SEQ ID NO: 2778837 - RNA, 19 nt, Artificial Sequence
  Description of Artificial Sequence: Synthetic oligonucleotide
uuuagaucaaagcuaaaau

SEQ ID NO: 2778838 - RNA, 19 nt, Artificial Sequence
  Description of Artificial Sequence: Synthetic oligonucleotide
accuuuagaaaguugguuc

SEQ ID NO: 2778839 - RNA, 19 nt, Artificial Sequence
  Description of Artificial Sequence: Synthetic oligonucleotide
ucaacacagguuuacauug

SEQ ID NO: 2778840 - RNA, 19 nt, Artificial Sequence
  Description of Artificial Sequence: Synthetic oligonucleotide
accauauuuacauaaagaa

SEQ ID NO: 2778841 - RNA, 19 nt, Artificial Sequence
  Description of Artificial Sequence: Synthetic oligonucleotide
aacacagguuuacauuggc

SEQ ID NO: 2778842 - RNA, 19 nt, Artificial Sequence
  Description of Artificial Sequence: Synthetic oligonucleotide
agucucuaaaucaugaugg

SEQ ID NO: 2778843 - RNA, 19 nt, Artificial Sequence
  Description of Artificial Sequence: Synthetic oligonucleotide
uagaagaccacaguaaaag

SEQ ID NO: 2778844 - RNA, 19 nt, Artificial Sequence
  Description of Artificial Sequence: Synthetic oligonucleotide
aaugcgacagccugcuugg

SEQ ID NO: 2778845 - RNA, 19 nt, Artificial Sequence
  Description of Artificial Sequence: Synthetic oligonucleotide
aaaugcgacagccugcuug

SEQ ID NO: 2778846 - RNA, 19 nt, Artificial Sequence
  Description of Artificial Sequence: Synthetic oligonucleotide
accauacacgcucaguucc

SEQ ID NO: 2778847 - RNA, 19 nt, Artificial Sequence
  Description of Artificial Sequence: Synthetic oligonucleotide
caaacgagcaccauucucc

SEQ ID NO: 2778848 - RNA, 19 nt, Artificial Sequence
  Description of Artificial Sequence: Synthetic oligonucleotide
uggcauuuagaucaaagcu

SEQ ID NO: 2778849 - RNA, 19 nt, Artificial Sequence
  Description of Artificial Sequence: Synthetic oligonucleotide
aaacgagcaccauucuccc

SEQ ID NO: 2778850 - RNA, 19 nt, Artificial Sequence
  Description of Artificial Sequence: Synthetic oligonucleotide
auuuacauaaagaaacauc

SEQ ID NO: 2778851 - RNA, 19 nt, Artificial Sequence
  Description of Artificial Sequence: Synthetic oligonucleotide
uucuuuuagaagaccacag

SEQ ID NO: 2778852 - RNA, 19 nt, Artificial Sequence
  Description of Artificial Sequence: Synthetic oligonucleotide
aggagcaccaauucuaggg

SEQ ID NO: 2778853 - RNA, 19 nt, Artificial Sequence
  Description of Artificial Sequence: Synthetic oligonucleotide
uuuuagaagaccacaguaa

SEQ ID NO: 2778854 - RNA, 19 nt, Artificial Sequence
  Description of Artificial Sequence: Synthetic oligonucleotide
uuuagaagaccacaguaaa

SEQ ID NO: 2778855 - RNA, 19 nt, Artificial Sequence
  Description of Artificial Sequence: Synthetic oligonucleotide
aaauguaauggugccaauc

SEQ ID NO: 2778856 - RNA, 19 nt, Artificial Sequence
  Description of Artificial Sequence: Synthetic oligonucleotide
acagguuuacauuggcacc

SEQ ID NO: 2778857 - RNA, 19 nt, Artificial Sequence
  Description of Artificial Sequence: Synthetic oligonucleotide
aaacguuucccauucuuca

SEQ ID NO: 2778858 - RNA, 19 nt, Artificial Sequence
  Description of Artificial Sequence: Synthetic oligonucleotide
ugauccaaauguaauggug

SEQ ID NO: 2778859 - RNA, 19 nt, Artificial Sequence
  Description of Artificial Sequence: Synthetic oligonucleotide
uucuucuuuuagaagacca

SEQ ID NO: 2778860 - RNA, 19 nt, Artificial Sequence
  Description of Artificial Sequence: Synthetic oligonucleotide
uccugagacaccauacacg

SEQ ID NO: 2778861 - RNA, 19 nt, Artificial Sequence
  Description of Artificial Sequence: Synthetic oligonucleotide
caugauccaaauguaaugg

SEQ ID NO: 2778862 - RNA, 19 nt, Artificial Sequence
  Description of Artificial Sequence: Synthetic oligonucleotide
auccaaauguaauggugcc

SEQ ID NO: 2778863 - RNA, 19 nt, Artificial Sequence
  Description of Artificial Sequence: Synthetic oligonucleotide
agaguaagaacucagggua

SEQ ID NO: 2778864 - RNA, 19 nt, Artificial Sequence
  Description of Artificial Sequence: Synthetic oligonucleotide
cucugugugauccugagac

SEQ ID NO: 2778865 - RNA, 19 nt, Artificial Sequence
  Description of Artificial Sequence: Synthetic oligonucleotide
aacguuucccauucuucac

SEQ ID NO: 2778866 - RNA, 19 nt, Artificial Sequence
  Description of Artificial Sequence: Synthetic oligonucleotide
ggguaagagauccagauag

SEQ ID NO: 2778867 - RNA, 19 nt, Artificial Sequence
  Description of Artificial Sequence: Synthetic oligonucleotide
ugagacaccauacacgcuc

SEQ ID NO: 2778868 - RNA, 19 nt, Artificial Sequence
  Description of Artificial Sequence: Synthetic oligonucleotide
gauagaguaagaacucagg

SEQ ID NO: 2778869 - RNA, 19 nt, Artificial Sequence
  Description of Artificial Sequence: Synthetic oligonucleotide
agaaaauuauaaaauauaa

SEQ ID NO: 2778870 - RNA, 19 nt, Artificial Sequence
  Description of Artificial Sequence: Synthetic oligonucleotide
aagcuagccccucagcaac

SEQ ID NO: 2778871 - RNA, 19 nt, Artificial Sequence
  Description of Artificial Sequence: Synthetic oligonucleotide
auaaagaaacaucuggaaa

SEQ ID NO: 2778872 - RNA, 19 nt, Artificial Sequence
  Description of Artificial Sequence: Synthetic oligonucleotide
cuaauucucugugugaucc

SEQ ID NO: 2778873 - RNA, 19 nt, Artificial Sequence
  Description of Artificial Sequence: Synthetic oligonucleotide
ucagcaacacagcaggagc

SEQ ID NO: 2778874 - RNA, 19 nt, Artificial Sequence
  Description of Artificial Sequence: Synthetic oligonucleotide
aagaaaauuauaaaauaua

SEQ ID NO: 2778875 - RNA, 19 nt, Artificial Sequence
  Description of Artificial Sequence: Synthetic oligonucleotide
auuguuucuucuuuuagaa

SEQ ID NO: 2778876 - RNA, 19 nt, Artificial Sequence
  Description of Artificial Sequence: Synthetic oligonucleotide
uuacauaaagaaacaucug

SEQ ID NO: 2778877 - RNA, 19 nt, Artificial Sequence
  Description of Artificial Sequence: Synthetic oligonucleotide
gauccaaauguaauggugc

SEQ ID NO: 2778878 - RNA, 19 nt, Artificial Sequence
  Description of Artificial Sequence: Synthetic oligonucleotide
uuucccauucuucaccugc

SEQ ID NO: 2778879 - RNA, 19 nt, Artificial Sequence
  Description of Artificial Sequence: Synthetic oligonucleotide
aucaaagcuaaaaugcgac

SEQ ID NO: 2778880 - RNA, 19 nt, Artificial Sequence
  Description of Artificial Sequence: Synthetic oligonucleotide
aagaacucaggguaagaga

SEQ ID NO: 2778881 - RNA, 19 nt, Artificial Sequence
  Description of Artificial Sequence: Synthetic oligonucleotide
aauucuaggggaccguggu

SEQ ID NO: 2778882 - RNA, 19 nt, Artificial Sequence
  Description of Artificial Sequence: Synthetic oligonucleotide
acauuggcaccauauuuac

SEQ ID NO: 2778883 - RNA, 19 nt, Artificial Sequence
  Description of Artificial Sequence: Synthetic oligonucleotide
uagaguaagaacucagggu

SEQ ID NO: 2778884 - RNA, 19 nt, Artificial Sequence
  Description of Artificial Sequence: Synthetic oligonucleotide
gagucucuaaaucaugaug

SEQ ID NO: 2778885 - RNA, 19 nt, Artificial Sequence
  Description of Artificial Sequence: Synthetic oligonucleotide
agcaaggagucucuaaauc

SEQ ID NO: 2778886 - RNA, 19 nt, Artificial Sequence
  Description of Artificial Sequence: Synthetic oligonucleotide
aaucaauuguuucuucuuu

SEQ ID NO: 2778887 - RNA, 19 nt, Artificial Sequence
  Description of Artificial Sequence: Synthetic oligonucleotide
cacagguuuacauuggcac

SEQ ID NO: 2778888 - RNA, 19 nt, Artificial Sequence
  Description of Artificial Sequence: Synthetic oligonucleotide
auccagauagaucucagga

SEQ ID NO: 2778889 - RNA, 19 nt, Artificial Sequence
  Description of Artificial Sequence: Synthetic oligonucleotide
acguuucccauucuucacc

SEQ ID NO: 2778890 - RNA, 19 nt, Artificial Sequence
  Description of Artificial Sequence: Synthetic oligonucleotide
acaucuggaaacguuuccc

SEQ ID NO: 2778891 - RNA, 19 nt, Artificial Sequence
  Description of Artificial Sequence: Synthetic oligonucleotide
uuacacacagcaaggaguc

SEQ ID NO: 2778892 - RNA, 19 nt, Artificial Sequence
  Description of Artificial Sequence: Synthetic oligonucleotide
agaucaaagcuaaaaugcg

SEQ ID NO: 2778893 - RNA, 19 nt, Artificial Sequence
  Description of Artificial Sequence: Synthetic oligonucleotide
aaucaugaugguuucuaaa

SEQ ID NO: 2778894 - RNA, 19 nt, Artificial Sequence
  Description of Artificial Sequence: Synthetic oligonucleotide
ucuuuuagaagaccacagu

SEQ ID NO: 2778895 - RNA, 19 nt, Artificial Sequence
  Description of Artificial Sequence: Synthetic oligonucleotide
gaaaguugguuccccaagc

SEQ ID NO: 2778896 - RNA, 19 nt, Artificial Sequence
  Description of Artificial Sequence: Synthetic oligonucleotide
uacauuggcaccauauuua

SEQ ID NO: 2778897 - RNA, 19 nt, Artificial Sequence
  Description of Artificial Sequence: Synthetic oligonucleotide
aucaugaugguuucuaaaa

SEQ ID NO: 2778898 - RNA, 19 nt, Artificial Sequence
  Description of Artificial Sequence: Synthetic oligonucleotide
caaagcuaaaaugcgacag

SEQ ID NO: 2778899 - RNA, 19 nt, Artificial Sequence
  Description of Artificial Sequence: Synthetic oligonucleotide
uucuaggggaccguggugg

SEQ ID NO: 2778900 - RNA, 19 nt, Artificial Sequence
  Description of Artificial Sequence: Synthetic oligonucleotide
acacaagugccuaagcccc

SEQ ID NO: 2778901 - RNA, 19 nt, Artificial Sequence
  Description of Artificial Sequence: Synthetic oligonucleotide
cauggcauuuagaucaaag

SEQ ID NO: 2778902 - RNA, 19 nt, Artificial Sequence
  Description of Artificial Sequence: Synthetic oligonucleotide
aaaguugguuccccaagcu

SEQ ID NO: 2778903 - RNA, 19 nt, Artificial Sequence
  Description of Artificial Sequence: Synthetic oligonucleotide
agaaaguugguuccccaag

SEQ ID NO: 2778904 - RNA, 19 nt, Artificial Sequence
  Description of Artificial Sequence: Synthetic oligonucleotide
gauagaucucaggacagag

SEQ ID NO: 2778905 - RNA, 19 nt, Artificial Sequence
  Description of Artificial Sequence: Synthetic oligonucleotide
uaagagauccagauagauc

SEQ ID NO: 2778906 - RNA, 19 nt, Artificial Sequence
  Description of Artificial Sequence: Synthetic oligonucleotide
ucuucuuuuagaagaccac

SEQ ID NO: 2778907 - RNA, 19 nt, Artificial Sequence
  Description of Artificial Sequence: Synthetic oligonucleotide
gaucucaggacagagcgcc

SEQ ID NO: 2778908 - RNA, 19 nt, Artificial Sequence
  Description of Artificial Sequence: Synthetic oligonucleotide
cuaaaaugcgacagccugc

SEQ ID NO: 2778909 - RNA, 19 nt, Artificial Sequence
  Description of Artificial Sequence: Synthetic oligonucleotide
gauccagauagaucucagg

SEQ ID NO: 2778910 - RNA, 19 nt, Artificial Sequence
  Description of Artificial Sequence: Synthetic oligonucleotide
uguccucccagauagagua

SEQ ID NO: 2778911 - RNA, 19 nt, Artificial Sequence
  Description of Artificial Sequence: Synthetic oligonucleotide
auuuagaucaaagcuaaaa

SEQ ID NO: 2778912 - RNA, 19 nt, Artificial Sequence
  Description of Artificial Sequence: Synthetic oligonucleotide
uagccccucagcaacacag

SEQ ID NO: 2778913 - RNA, 19 nt, Artificial Sequence
  Description of Artificial Sequence: Synthetic oligonucleotide
uccaugauccaaauguaau

SEQ ID NO: 2778914 - RNA, 19 nt, Artificial Sequence
  Description of Artificial Sequence: Synthetic oligonucleotide
acagcaggagcaccaauuc

SEQ ID NO: 2778915 - RNA, 19 nt, Artificial Sequence
  Description of Artificial Sequence: Synthetic oligonucleotide
aaacaucuggaaacguuuc

SEQ ID NO: 2778916 - RNA, 19 nt, Artificial Sequence
  Description of Artificial Sequence: Synthetic oligonucleotide
ucuaaaucaugaugguuuc

SEQ ID NO: 2778917 - RNA, 19 nt, Artificial Sequence
  Description of Artificial Sequence: Synthetic oligonucleotide
ugauccugagacaccauac

SEQ ID NO: 2778918 - RNA, 19 nt, Artificial Sequence
  Description of Artificial Sequence: Synthetic oligonucleotide
uuagaagaccacaguaaaa

SEQ ID NO: 2778919 - RNA, 19 nt, Artificial Sequence
  Description of Artificial Sequence: Synthetic oligonucleotide
ucaaagcuaaaaugcgaca

SEQ ID NO: 2778920 - RNA, 19 nt, Artificial Sequence
  Description of Artificial Sequence: Synthetic oligonucleotide
uuuacauuggcaccauauu

SEQ ID NO: 2778921 - RNA, 19 nt, Artificial Sequence
  Description of Artificial Sequence: Synthetic oligonucleotide
cuuccuaauucucugugug

SEQ ID NO: 2778922 - RNA, 19 nt, Artificial Sequence
  Description of Artificial Sequence: Synthetic oligonucleotide
uuuagaaaguugguucccc

SEQ ID NO: 2778923 - RNA, 19 nt, Artificial Sequence
  Description of Artificial Sequence: Synthetic oligonucleotide
uuguuucuucuuuuagaag

SEQ ID NO: 2778924 - RNA, 19 nt, Artificial Sequence
  Description of Artificial Sequence: Synthetic oligonucleotide
uccagauagaucucaggac

SEQ ID NO: 2778925 - RNA, 19 nt, Artificial Sequence
  Description of Artificial Sequence: Synthetic oligonucleotide
uaauggugccaaucaauug

SEQ ID NO: 2778926 - RNA, 19 nt, Artificial Sequence
  Description of Artificial Sequence: Synthetic oligonucleotide
uauuuacauaaagaaacau

SEQ ID NO: 2778927 - RNA, 19 nt, Artificial Sequence
  Description of Artificial Sequence: Synthetic oligonucleotide
aggcuguucaccuuuagaa

SEQ ID NO: 2778928 - RNA, 19 nt, Artificial Sequence
  Description of Artificial Sequence: Synthetic oligonucleotide
uucccauucuucaccugcg

SEQ ID NO: 2778929 - RNA, 19 nt, Artificial Sequence
  Description of Artificial Sequence: Synthetic oligonucleotide
acauaaagaaacaucugga

SEQ ID NO: 2778930 - RNA, 19 nt, Artificial Sequence
  Description of Artificial Sequence: Synthetic oligonucleotide
agcaccauucuccccaguc

SEQ ID NO: 2778931 - RNA, 19 nt, Artificial Sequence
  Description of Artificial Sequence: Synthetic oligonucleotide
aacgagcaccauucucccc

SEQ ID NO: 2778932 - RNA, 19 nt, Artificial Sequence
  Description of Artificial Sequence: Synthetic oligonucleotide
aguugguuccccaagcuag

SEQ ID NO: 2778933 - RNA, 19 nt, Artificial Sequence
  Description of Artificial Sequence: Synthetic oligonucleotide
auagaucucaggacagagc

SEQ ID NO: 2778934 - RNA, 19 nt, Artificial Sequence
  Description of Artificial Sequence: Synthetic oligonucleotide
gcuguucaccuuuagaaag

SEQ ID NO: 2778935 - RNA, 19 nt, Artificial Sequence
  Description of Artificial Sequence: Synthetic oligonucleotide
ucccagauagaguaagaac

SEQ ID NO: 2778936 - RNA, 19 nt, Artificial Sequence
  Description of Artificial Sequence: Synthetic oligonucleotide
uuagaaaguugguucccca

SEQ ID NO: 2778937 - RNA, 19 nt, Artificial Sequence
  Description of Artificial Sequence: Synthetic oligonucleotide
uaaaucaugaugguuucua

SEQ ID NO: 2778938 - RNA, 19 nt, Artificial Sequence
  Description of Artificial Sequence: Synthetic oligonucleotide
uaaaaugcgacagccugcu

SEQ ID NO: 2778939 - RNA, 19 nt, Artificial Sequence
  Description of Artificial Sequence: Synthetic oligonucleotide
aauucucugugugauccug

SEQ ID NO: 2778940 - RNA, 19 nt, Artificial Sequence
  Description of Artificial Sequence: Synthetic oligonucleotide
cauaaagaaacaucuggaa

SEQ ID NO: 2778941 - RNA, 19 nt, Artificial Sequence
  Description of Artificial Sequence: Synthetic oligonucleotide
ucaauuguuucuucuuuua

SEQ ID NO: 2778942 - RNA, 19 nt, Artificial Sequence
  Description of Artificial Sequence: Synthetic oligonucleotide
agaagaccacaguaaaaga

SEQ ID NO: 2778943 - RNA, 19 nt, Artificial Sequence
  Description of Artificial Sequence: Synthetic oligonucleotide
agauagaguaagaacucag

SEQ ID NO: 2778944 - RNA, 19 nt, Artificial Sequence
  Description of Artificial Sequence: Synthetic oligonucleotide
acagcaaggagucucuaaa

SEQ ID NO: 2778945 - RNA, 19 nt, Artificial Sequence
  Description of Artificial Sequence: Synthetic oligonucleotide
caccauauuuacauaaaga

SEQ ID NO: 2778946 - RNA, 19 nt, Artificial Sequence
  Description of Artificial Sequence: Synthetic oligonucleotide
agaacucaggguaagagau

SEQ ID NO: 2778947 - RNA, 19 nt, Artificial Sequence
  Description of Artificial Sequence: Synthetic oligonucleotide
accacaguaaaagaaaauu

SEQ ID NO: 2778948 - RNA, 19 nt, Artificial Sequence
  Description of Artificial Sequence: Synthetic oligonucleotide
gaagaccacaguaaaagaa

SEQ ID NO: 2778949 - RNA, 19 nt, Artificial Sequence
  Description of Artificial Sequence: Synthetic oligonucleotide
cuuuuagaagaccacagua

SEQ ID NO: 2778950 - RNA, 19 nt, Artificial Sequence
  Description of Artificial Sequence: Synthetic oligonucleotide
agucucaacacagguuuac

SEQ ID NO: 2778951 - RNA, 19 nt, Artificial Sequence
  Description of Artificial Sequence: Synthetic oligonucleotide
ccugagacaccauacacgc

SEQ ID NO: 2778952 - RNA, 19 nt, Artificial Sequence
  Description of Artificial Sequence: Synthetic oligonucleotide
gaucaaagcuaaaaugcga

SEQ ID NO: 2778953 - RNA, 19 nt, Artificial Sequence
  Description of Artificial Sequence: Synthetic oligonucleotide
ucaccuuuagaaaguuggu

SEQ ID NO: 2778954 - RNA, 19 nt, Artificial Sequence
  Description of Artificial Sequence: Synthetic oligonucleotide
ucucaacacagguuuacau

SEQ ID NO: 2778955 - RNA, 19 nt, Artificial Sequence
  Description of Artificial Sequence: Synthetic oligonucleotide
acacacagcaaggagucuc

SEQ ID NO: 2778956 - RNA, 19 nt, Artificial Sequence
  Description of Artificial Sequence: Synthetic oligonucleotide
uggcaccauauuuacauaa

SEQ ID NO: 2778957 - RNA, 19 nt, Artificial Sequence
  Description of Artificial Sequence: Synthetic oligonucleotide
acgagcaccauucucccca

SEQ ID NO: 2778958 - RNA, 19 nt, Artificial Sequence
  Description of Artificial Sequence: Synthetic oligonucleotide
ugugugauccugagacacc

SEQ ID NO: 2778959 - RNA, 19 nt, Artificial Sequence
  Description of Artificial Sequence: Synthetic oligonucleotide
caacacagguuuacauugg

SEQ ID NO: 2778960 - RNA, 19 nt, Artificial Sequence
  Description of Artificial Sequence: Synthetic oligonucleotide
acaccauacacgcucaguu

SEQ ID NO: 2778961 - RNA, 19 nt, Artificial Sequence
  Description of Artificial Sequence: Synthetic oligonucleotide
gaaacguuucccauucuuc

SEQ ID NO: 2778962 - RNA, 19 nt, Artificial Sequence
  Description of Artificial Sequence: Synthetic oligonucleotide
ucaccugcggcucuccugu

SEQ ID NO: 2778963 - RNA, 19 nt, Artificial Sequence
  Description of Artificial Sequence: Synthetic oligonucleotide
augauccaaauguaauggu

SEQ ID NO: 2778964 - RNA, 19 nt, Artificial Sequence
  Description of Artificial Sequence: Synthetic oligonucleotide
ucaggguaagagauccaga

SEQ ID NO: 2778965 - RNA, 19 nt, Artificial Sequence
  Description of Artificial Sequence: Synthetic oligonucleotide
ggagcaccaauucuagggg

SEQ ID NO: 2778966 - RNA, 19 nt, Artificial Sequence
  Description of Artificial Sequence: Synthetic oligonucleotide
uacacgcucaguucccuug

SEQ ID NO: 2778967 - RNA, 19 nt, Artificial Sequence
  Description of Artificial Sequence: Synthetic oligonucleotide
uuccuaauucucuguguga

SEQ ID NO: 2778968 - RNA, 19 nt, Artificial Sequence
  Description of Artificial Sequence: Synthetic oligonucleotide
cuggaaacguuucccauuc

SEQ ID NO: 2778969 - RNA, 19 nt, Artificial Sequence
  Description of Artificial Sequence: Synthetic oligonucleotide
cuuuagaaaguugguuccc

SEQ ID NO: 2778970 - RNA, 19 nt, Artificial Sequence
  Description of Artificial Sequence: Synthetic oligonucleotide
acgcucaguucccuuggcc

SEQ ID NO: 2778971 - RNA, 19 nt, Artificial Sequence
  Description of Artificial Sequence: Synthetic oligonucleotide
aucaauuguuucuucuuuu

SEQ ID NO: 2778972 - RNA, 19 nt, Artificial Sequence
  Description of Artificial Sequence: Synthetic oligonucleotide
gauccugagacaccauaca

SEQ ID NO: 2778973 - RNA, 19 nt, Artificial Sequence
  Description of Artificial Sequence: Synthetic oligonucleotide
ucccauucuucaccugcgg

SEQ ID NO: 2778974 - RNA, 19 nt, Artificial Sequence
  Description of Artificial Sequence: Synthetic oligonucleotide
uccuaauucucugugugau

SEQ ID NO: 2778975 - RNA, 19 nt, Artificial Sequence
  Description of Artificial Sequence: Synthetic oligonucleotide
uagaaaguugguuccccaa

SEQ ID NO: 2778976 - RNA, 19 nt, Artificial Sequence
  Description of Artificial Sequence: Synthetic oligonucleotide
cacaguaaaagaaaauuau

SEQ ID NO: 2778977 - RNA, 19 nt, Artificial Sequence
  Description of Artificial Sequence: Synthetic oligonucleotide
cucaggguaagagauccag

SEQ ID NO: 2778978 - RNA, 19 nt, Artificial Sequence
  Description of Artificial Sequence: Synthetic oligonucleotide
aaguugguuccccaagcua

SEQ ID NO: 2778979 - RNA, 19 nt, Artificial Sequence
  Description of Artificial Sequence: Synthetic oligonucleotide
cucuaaaucaugaugguuu

SEQ ID NO: 2778980 - RNA, 19 nt, Artificial Sequence
  Description of Artificial Sequence: Synthetic oligonucleotide
cuccccagucucaacacag

SEQ ID NO: 2778981 - RNA, 19 nt, Artificial Sequence
  Description of Artificial Sequence: Synthetic oligonucleotide
aagaaacaucuggaaacgu

SEQ ID NO: 2778982 - RNA, 19 nt, Artificial Sequence
  Description of Artificial Sequence: Synthetic oligonucleotide
acuguccucccagauagag

SEQ ID NO: 2778983 - RNA, 19 nt, Artificial Sequence
  Description of Artificial Sequence: Synthetic oligonucleotide
uccccagucucaacacagg

SEQ ID NO: 2778984 - RNA, 19 nt, Artificial Sequence
  Description of Artificial Sequence: Synthetic oligonucleotide
cugugugauccugagacac

SEQ ID NO: 2778985 - RNA, 19 nt, Artificial Sequence
  Description of Artificial Sequence: Synthetic oligonucleotide
gcaccauauuuacauaaag

SEQ ID NO: 2778986 - RNA, 19 nt, Artificial Sequence
  Description of Artificial Sequence: Synthetic oligonucleotide
agcaccaauucuaggggac

SEQ ID NO: 2778987 - RNA, 19 nt, Artificial Sequence
  Description of Artificial Sequence: Synthetic oligonucleotide
ugcgacagccugcuuggcc

SEQ ID NO: 2778988 - RNA, 19 nt, Artificial Sequence
  Description of Artificial Sequence: Synthetic oligonucleotide
aaggagucucuaaaucaug

SEQ ID NO: 2778989 - RNA, 19 nt, Artificial Sequence
  Description of Artificial Sequence: Synthetic oligonucleotide
uccucccagauagaguaag

SEQ ID NO: 2778990 - RNA, 19 nt, Artificial Sequence
  Description of Artificial Sequence: Synthetic oligonucleotide
agcaacacagcaggagcac

SEQ ID NO: 2778991 - RNA, 19 nt, Artificial Sequence
  Description of Artificial Sequence: Synthetic oligonucleotide
acacgcucaguucccuugg

SEQ ID NO: 2778992 - RNA, 19 nt, Artificial Sequence
  Description of Artificial Sequence: Synthetic oligonucleotide
ucugugugauccugagaca

SEQ ID NO: 2778993 - RNA, 19 nt, Artificial Sequence
  Description of Artificial Sequence: Synthetic oligonucleotide
cucagcaacacagcaggag

SEQ ID NO: 2778994 - RNA, 19 nt, Artificial Sequence
  Description of Artificial Sequence: Synthetic oligonucleotide
uccaaauguaauggugcca

SEQ ID NO: 2778995 - RNA, 19 nt, Artificial Sequence
  Description of Artificial Sequence: Synthetic oligonucleotide
gcaaggagucucuaaauca

SEQ ID NO: 2778996 - RNA, 19 nt, Artificial Sequence
  Description of Artificial Sequence: Synthetic oligonucleotide
cuucuuuuagaagaccaca

SEQ ID NO: 2778997 - RNA, 19 nt, Artificial Sequence
  Description of Artificial Sequence: Synthetic oligonucleotide
gguuccccaagcuagcccc

SEQ ID NO: 2778998 - RNA, 19 nt, Artificial Sequence
  Description of Artificial Sequence: Synthetic oligonucleotide
ugguuccccaagcuagccc

SEQ ID NO: 2778999 - RNA, 19 nt, Artificial Sequence
  Description of Artificial Sequence: Synthetic oligonucleotide
ccaugauccaaauguaaug

SEQ ID NO: 2779000 - RNA, 19 nt, Artificial Sequence
  Description of Artificial Sequence: Synthetic oligonucleotide
agaucucaggacagagcgc

SEQ ID NO: 2779001 - RNA, 19 nt, Artificial Sequence
  Description of Artificial Sequence: Synthetic oligonucleotide
cccucagcaacacagcagg

SEQ ID NO: 2779002 - RNA, 19 nt, Artificial Sequence
  Description of Artificial Sequence: Synthetic oligonucleotide
uucaccugcggcucuccug

SEQ ID NO: 2779003 - RNA, 19 nt, Artificial Sequence
  Description of Artificial Sequence: Synthetic oligonucleotide
aggagucucuaaaucauga

SEQ ID NO: 2779004 - RNA, 19 nt, Artificial Sequence
  Description of Artificial Sequence: Synthetic oligonucleotide
ggugccaaucaauuguuuc

SEQ ID NO: 2779005 - RNA, 19 nt, Artificial Sequence
  Description of Artificial Sequence: Synthetic oligonucleotide
uggccauccaugauccaaa

SEQ ID NO: 2779006 - RNA, 19 nt, Artificial Sequence
  Description of Artificial Sequence: Synthetic oligonucleotide
uggcccacuguccucccag

SEQ ID NO: 2779007 - RNA, 19 nt, Artificial Sequence
  Description of Artificial Sequence: Synthetic oligonucleotide
ccacuguccucccagauag

SEQ ID NO: 2779008 - RNA, 19 nt, Artificial Sequence
  Description of Artificial Sequence: Synthetic oligonucleotide
ucucuaaaucaugaugguu

SEQ ID NO: 2779009 - RNA, 19 nt, Artificial Sequence
  Description of Artificial Sequence: Synthetic oligonucleotide
cagagcgccuuccuaauuc

SEQ ID NO: 2779010 - RNA, 19 nt, Artificial Sequence
  Description of Artificial Sequence: Synthetic oligonucleotide
ugcggcucuccuguggagg

SEQ ID NO: 2779011 - RNA, 19 nt, Artificial Sequence
  Description of Artificial Sequence: Synthetic oligonucleotide
ucucugugugauccugaga

SEQ ID NO: 2779012 - RNA, 19 nt, Artificial Sequence
  Description of Artificial Sequence: Synthetic oligonucleotide
aggcaagcauggcauuuag

SEQ ID NO: 2779013 - RNA, 19 nt, Artificial Sequence
  Description of Artificial Sequence: Synthetic oligonucleotide
uaauucucugugugauccu

SEQ ID NO: 2779014 - RNA, 19 nt, Artificial Sequence
  Description of Artificial Sequence: Synthetic oligonucleotide
gugguggaggcaagcaugg

SEQ ID NO: 2779015 - RNA, 19 nt, Artificial Sequence
  Description of Artificial Sequence: Synthetic oligonucleotide
uuggccauccaugauccaa

SEQ ID NO: 2779016 - RNA, 19 nt, Artificial Sequence
  Description of Artificial Sequence: Synthetic oligonucleotide
ucuccccagucucaacaca

SEQ ID NO: 2779017 - RNA, 19 nt, Artificial Sequence
  Description of Artificial Sequence: Synthetic oligonucleotide
caccaauucuaggggaccg

SEQ ID NO: 2779018 - RNA, 19 nt, Artificial Sequence
  Description of Artificial Sequence: Synthetic oligonucleotide
gaggcuguucaccuuuaga

SEQ ID NO: 2779019 - RNA, 19 nt, Artificial Sequence
  Description of Artificial Sequence: Synthetic oligonucleotide
agaaacaucuggaaacguu

SEQ ID NO: 2779020 - RNA, 19 nt, Artificial Sequence
  Description of Artificial Sequence: Synthetic oligonucleotide
gagauccagauagaucuca

SEQ ID NO: 2779021 - RNA, 19 nt, Artificial Sequence
  Description of Artificial Sequence: Synthetic oligonucleotide
auucuaggggaccguggug

SEQ ID NO: 2779022 - RNA, 19 nt, Artificial Sequence
  Description of Artificial Sequence: Synthetic oligonucleotide
agagcgccuuccuaauucu

SEQ ID NO: 2779023 - RNA, 19 nt, Artificial Sequence
  Description of Artificial Sequence: Synthetic oligonucleotide
aggggaccgugguggaggc

SEQ ID NO: 2779024 - RNA, 19 nt, Artificial Sequence
  Description of Artificial Sequence: Synthetic oligonucleotide
ccagauagaucucaggaca

SEQ ID NO: 2779025 - RNA, 19 nt, Artificial Sequence
  Description of Artificial Sequence: Synthetic oligonucleotide
ccuuggccauccaugaucc

SEQ ID NO: 2779026 - RNA, 19 nt, Artificial Sequence
  Description of Artificial Sequence: Synthetic oligonucleotide
gaaacaucuggaaacguuu

SEQ ID NO: 2779027 - RNA, 19 nt, Artificial Sequence
  Description of Artificial Sequence: Synthetic oligonucleotide
caccauacacgcucaguuc

SEQ ID NO: 2779028 - RNA, 19 nt, Artificial Sequence
  Description of Artificial Sequence: Synthetic oligonucleotide
gagcaccaauucuagggga

SEQ ID NO: 2779029 - RNA, 19 nt, Artificial Sequence
  Description of Artificial Sequence: Synthetic oligonucleotide
agauccagauagaucucag

SEQ ID NO: 2779030 - RNA, 19 nt, Artificial Sequence
  Description of Artificial Sequence: Synthetic oligonucleotide
caggagcaccaauucuagg

SEQ ID NO: 2779031 - RNA, 19 nt, Artificial Sequence
  Description of Artificial Sequence: Synthetic oligonucleotide
ccauccaugauccaaaugu

SEQ ID NO: 2779032 - RNA, 19 nt, Artificial Sequence
  Description of Artificial Sequence: Synthetic oligonucleotide
ccagauagaguaagaacuc

SEQ ID NO: 2779033 - RNA, 19 nt, Artificial Sequence
  Description of Artificial Sequence: Synthetic oligonucleotide
cccagauagaguaagaacu

SEQ ID NO: 2779034 - RNA, 19 nt, Artificial Sequence
  Description of Artificial Sequence: Synthetic oligonucleotide
gugccaaucaauuguuucu

SEQ ID NO: 2779035 - RNA, 19 nt, Artificial Sequence
  Description of Artificial Sequence: Synthetic oligonucleotide
gcaagcauggcauuuagau

SEQ ID NO: 2779036 - RNA, 19 nt, Artificial Sequence
  Description of Artificial Sequence: Synthetic oligonucleotide
cauucuucaccugcggcuc

SEQ ID NO: 2779037 - RNA, 19 nt, Artificial Sequence
  Description of Artificial Sequence: Synthetic oligonucleotide
ucaguucccuuggccaucc

SEQ ID NO: 2779038 - RNA, 19 nt, Artificial Sequence
  Description of Artificial Sequence: Synthetic oligonucleotide
ggcauuuagaucaaagcua

SEQ ID NO: 2779039 - RNA, 19 nt, Artificial Sequence
  Description of Artificial Sequence: Synthetic oligonucleotide
caacacagcaggagcacca

SEQ ID NO: 2779040 - RNA, 19 nt, Artificial Sequence
  Description of Artificial Sequence: Synthetic oligonucleotide
agagauccagauagaucuc

SEQ ID NO: 2779041 - RNA, 19 nt, Artificial Sequence
  Description of Artificial Sequence: Synthetic oligonucleotide
ugccaaucaauuguuucuu

SEQ ID NO: 2779042 - RNA, 19 nt, Artificial Sequence
  Description of Artificial Sequence: Synthetic oligonucleotide
agcaggagcaccaauucua

SEQ ID NO: 2779043 - RNA, 19 nt, Artificial Sequence
  Description of Artificial Sequence: Synthetic oligonucleotide
guuuacauuggcaccauau

SEQ ID NO: 2779044 - RNA, 19 nt, Artificial Sequence
  Description of Artificial Sequence: Synthetic oligonucleotide
ucuaggggaccguggugga

SEQ ID NO: 2779045 - RNA, 19 nt, Artificial Sequence
  Description of Artificial Sequence: Synthetic oligonucleotide
ucaggacagagcgccuucc

SEQ ID NO: 2779046 - RNA, 19 nt, Artificial Sequence
  Description of Artificial Sequence: Synthetic oligonucleotide
aggguaagagauccagaua

SEQ ID NO: 2779047 - RNA, 19 nt, Artificial Sequence
  Description of Artificial Sequence: Synthetic oligonucleotide
accugcggcucuccugugg

SEQ ID NO: 2779048 - RNA, 19 nt, Artificial Sequence
  Description of Artificial Sequence: Synthetic oligonucleotide
aguucccuuggccauccau

SEQ ID NO: 2779049 - RNA, 19 nt, Artificial Sequence
  Description of Artificial Sequence: Synthetic oligonucleotide
gcgacagccugcuuggccc

SEQ ID NO: 2779050 - RNA, 19 nt, Artificial Sequence
  Description of Artificial Sequence: Synthetic oligonucleotide
agacaccauacacgcucag

SEQ ID NO: 2779051 - RNA, 19 nt, Artificial Sequence
  Description of Artificial Sequence: Synthetic oligonucleotide
gugugauccugagacacca

SEQ ID NO: 2779052 - RNA, 19 nt, Artificial Sequence
  Description of Artificial Sequence: Synthetic oligonucleotide
guugguuccccaagcuagc

SEQ ID NO: 2779053 - RNA, 19 nt, Artificial Sequence
  Description of Artificial Sequence: Synthetic oligonucleotide
uuggcaccauauuuacaua

SEQ ID NO: 2779054 - RNA, 19 nt, Artificial Sequence
  Description of Artificial Sequence: Synthetic oligonucleotide
guucaccuuuagaaaguug

SEQ ID NO: 2779055 - RNA, 19 nt, Artificial Sequence
  Description of Artificial Sequence: Synthetic oligonucleotide
cagcaacacagcaggagca

SEQ ID NO: 2779056 - RNA, 19 nt, Artificial Sequence
  Description of Artificial Sequence: Synthetic oligonucleotide
cagauagaguaagaacuca

SEQ ID NO: 2779057 - RNA, 19 nt, Artificial Sequence
  Description of Artificial Sequence: Synthetic oligonucleotide
uggaaacguuucccauucu

SEQ ID NO: 2779058 - RNA, 19 nt, Artificial Sequence
  Description of Artificial Sequence: Synthetic oligonucleotide
acacagguuuacauuggca

SEQ ID NO: 2779059 - RNA, 19 nt, Artificial Sequence
  Description of Artificial Sequence: Synthetic oligonucleotide
auccaugauccaaauguaa

SEQ ID NO: 2779060 - RNA, 19 nt, Artificial Sequence
  Description of Artificial Sequence: Synthetic oligonucleotide
agcuaaaaugcgacagccu

SEQ ID NO: 2779061 - RNA, 19 nt, Artificial Sequence
  Description of Artificial Sequence: Synthetic oligonucleotide
gaguaagaacucaggguaa

SEQ ID NO: 2779062 - RNA, 19 nt, Artificial Sequence
  Description of Artificial Sequence: Synthetic oligonucleotide
caagcuagccccucagcaa

SEQ ID NO: 2779063 - RNA, 19 nt, Artificial Sequence
  Description of Artificial Sequence: Synthetic oligonucleotide
agcgccuuccuaauucucu

SEQ ID NO: 2779064 - RNA, 19 nt, Artificial Sequence
  Description of Artificial Sequence: Synthetic oligonucleotide
caggguaagagauccagau

SEQ ID NO: 2779065 - RNA, 19 nt, Artificial Sequence
  Description of Artificial Sequence: Synthetic oligonucleotide
ccccaaacgagcaccauuc

SEQ ID NO: 2779066 - RNA, 19 nt, Artificial Sequence
  Description of Artificial Sequence: Synthetic oligonucleotide
caaggagucucuaaaucau

SEQ ID NO: 2779067 - RNA, 19 nt, Artificial Sequence
  Description of Artificial Sequence: Synthetic oligonucleotide
guaagaacucaggguaaga

SEQ ID NO: 2779068 - RNA, 19 nt, Artificial Sequence
  Description of Artificial Sequence: Synthetic oligonucleotide
gaacucaggguaagagauc

SEQ ID NO: 2779069 - RNA, 19 nt, Artificial Sequence
  Description of Artificial Sequence: Synthetic oligonucleotide
ugugauccugagacaccau

SEQ ID NO: 2779070 - RNA, 19 nt, Artificial Sequence
  Description of Artificial Sequence: Synthetic oligonucleotide
uccuguggaggcuguucac

SEQ ID NO: 2779071 - RNA, 19 nt, Artificial Sequence
  Description of Artificial Sequence: Synthetic oligonucleotide
agccccucagcaacacagc

SEQ ID NO: 2779072 - RNA, 19 nt, Artificial Sequence
  Description of Artificial Sequence: Synthetic oligonucleotide
auucuucaccugcggcucu

SEQ ID NO: 2779073 - RNA, 19 nt, Artificial Sequence
  Description of Artificial Sequence: Synthetic oligonucleotide
guuucccauucuucaccug

SEQ ID NO: 2779074 - RNA, 19 nt, Artificial Sequence
  Description of Artificial Sequence: Synthetic oligonucleotide
guaagagauccagauagau

SEQ ID NO: 2779075 - RNA, 19 nt, Artificial Sequence
  Description of Artificial Sequence: Synthetic oligonucleotide
gugauccugagacaccaua

SEQ ID NO: 2779076 - RNA, 19 nt, Artificial Sequence
  Description of Artificial Sequence: Synthetic oligonucleotide
ucuccuguggaggcuguuc

SEQ ID NO: 2779077 - RNA, 19 nt, Artificial Sequence
  Description of Artificial Sequence: Synthetic oligonucleotide
uccccaagcuagccccuca

SEQ ID NO: 2779078 - RNA, 19 nt, Artificial Sequence
  Description of Artificial Sequence: Synthetic oligonucleotide
cauuggcaccauauuuaca

SEQ ID NO: 2779079 - RNA, 19 nt, Artificial Sequence
  Description of Artificial Sequence: Synthetic oligonucleotide
guaauggugccaaucaauu

SEQ ID NO: 2779080 - RNA, 19 nt, Artificial Sequence
  Description of Artificial Sequence: Synthetic oligonucleotide
ccugcuuggcccacugucc

SEQ ID NO: 2779081 - RNA, 19 nt, Artificial Sequence
  Description of Artificial Sequence: Synthetic oligonucleotide
aaaaugcgacagccugcuu

SEQ ID NO: 2779082 - RNA, 19 nt, Artificial Sequence
  Description of Artificial Sequence: Synthetic oligonucleotide
gccuuccuaauucucugug

SEQ ID NO: 2779083 - RNA, 19 nt, Artificial Sequence
  Description of Artificial Sequence: Synthetic oligonucleotide
cucaacacagguuuacauu

SEQ ID NO: 2779084 - RNA, 19 nt, Artificial Sequence
  Description of Artificial Sequence: Synthetic oligonucleotide
gagacaccauacacgcuca

SEQ ID NO: 2779085 - RNA, 19 nt, Artificial Sequence
  Description of Artificial Sequence: Synthetic oligonucleotide
cauucuccccagucucaac

SEQ ID NO: 2779086 - RNA, 19 nt, Artificial Sequence
  Description of Artificial Sequence: Synthetic oligonucleotide
uggugccaaucaauuguuu

SEQ ID NO: 2779087 - RNA, 19 nt, Artificial Sequence
  Description of Artificial Sequence: Synthetic oligonucleotide
gucucuaaaucaugauggu

SEQ ID NO: 2779088 - RNA, 19 nt, Artificial Sequence
  Description of Artificial Sequence: Synthetic oligonucleotide
ggacagagcgccuuccuaa

SEQ ID NO: 2779089 - RNA, 19 nt, Artificial Sequence
  Description of Artificial Sequence: Synthetic oligonucleotide
caaucaauuguuucuucuu

SEQ ID NO: 2779090 - RNA, 19 nt, Artificial Sequence
  Description of Artificial Sequence: Synthetic oligonucleotide
auucucugugugauccuga

SEQ ID NO: 2779091 - RNA, 19 nt, Artificial Sequence
  Description of Artificial Sequence: Synthetic oligonucleotide
aggacagagcgccuuccua

SEQ ID NO: 2779092 - RNA, 19 nt, Artificial Sequence
  Description of Artificial Sequence: Synthetic oligonucleotide
cucaggacagagcgccuuc

SEQ ID NO: 2779093 - RNA, 19 nt, Artificial Sequence
  Description of Artificial Sequence: Synthetic oligonucleotide
gcaggagcaccaauucuag

SEQ ID NO: 2779094 - RNA, 19 nt, Artificial Sequence
  Description of Artificial Sequence: Synthetic oligonucleotide
uguggaggcuguucaccuu

SEQ ID NO: 2779095 - RNA, 19 nt, Artificial Sequence
  Description of Artificial Sequence: Synthetic oligonucleotide
ucuucaccugcggcucucc

SEQ ID NO: 2779096 - RNA, 19 nt, Artificial Sequence
  Description of Artificial Sequence: Synthetic oligonucleotide
ccauacacgcucaguuccc

SEQ ID NO: 2779097 - RNA, 19 nt, Artificial Sequence
  Description of Artificial Sequence: Synthetic oligonucleotide
gucucaacacagguuuaca

SEQ ID NO: 2779098 - RNA, 19 nt, Artificial Sequence
  Description of Artificial Sequence: Synthetic oligonucleotide
cgugguggaggcaagcaug

SEQ ID NO: 2779099 - RNA, 19 nt, Artificial Sequence
  Description of Artificial Sequence: Synthetic oligonucleotide
accaauucuaggggaccgu

SEQ ID NO: 2779100 - RNA, 19 nt, Artificial Sequence
  Description of Artificial Sequence: Synthetic oligonucleotide
uacacacagcaaggagucu

SEQ ID NO: 2779101 - RNA, 19 nt, Artificial Sequence
  Description of Artificial Sequence: Synthetic oligonucleotide
ccaaauguaauggugccaa

SEQ ID NO: 2779102 - RNA, 19 nt, Artificial Sequence
  Description of Artificial Sequence: Synthetic oligonucleotide
ucucaggacagagcgccuu

SEQ ID NO: 2779103 - RNA, 19 nt, Artificial Sequence
  Description of Artificial Sequence: Synthetic oligonucleotide
cauuuagaucaaagcuaaa

SEQ ID NO: 2779104 - RNA, 19 nt, Artificial Sequence
  Description of Artificial Sequence: Synthetic oligonucleotide
cccauucuucaccugcggc

SEQ ID NO: 2779105 - RNA, 19 nt, Artificial Sequence
  Description of Artificial Sequence: Synthetic oligonucleotide
cacgcucaguucccuuggc

SEQ ID NO: 2779106 - RNA, 19 nt, Artificial Sequence
  Description of Artificial Sequence: Synthetic oligonucleotide
ccaagcuagccccucagca

SEQ ID NO: 2779107 - RNA, 19 nt, Artificial Sequence
  Description of Artificial Sequence: Synthetic oligonucleotide
uggaggcuguucaccuuua

SEQ ID NO: 2779108 - RNA, 19 nt, Artificial Sequence
  Description of Artificial Sequence: Synthetic oligonucleotide
cccuuggccauccaugauc

SEQ ID NO: 2779109 - RNA, 19 nt, Artificial Sequence
  Description of Artificial Sequence: Synthetic oligonucleotide
auggugccaaucaauuguu

SEQ ID NO: 2779110 - RNA, 19 nt, Artificial Sequence
  Description of Artificial Sequence: Synthetic oligonucleotide
auacacgcucaguucccuu

SEQ ID NO: 2779111 - RNA, 19 nt, Artificial Sequence
  Description of Artificial Sequence: Synthetic oligonucleotide
uuggcccacuguccuccca

SEQ ID NO: 2779112 - RNA, 19 nt, Artificial Sequence
  Description of Artificial Sequence: Synthetic oligonucleotide
ccuaauucucugugugauc

SEQ ID NO: 2779113 - RNA, 19 nt, Artificial Sequence
  Description of Artificial Sequence: Synthetic oligonucleotide
accgugguggaggcaagca

SEQ ID NO: 2779114 - RNA, 19 nt, Artificial Sequence
  Description of Artificial Sequence: Synthetic oligonucleotide
ggaggcuguucaccuuuag

SEQ ID NO: 2779115 - RNA, 19 nt, Artificial Sequence
  Description of Artificial Sequence: Synthetic oligonucleotide
gguaagagauccagauaga

SEQ ID NO: 2779116 - RNA, 19 nt, Artificial Sequence
  Description of Artificial Sequence: Synthetic oligonucleotide
ucccuuggccauccaugau

SEQ ID NO: 2779117 - RNA, 19 nt, Artificial Sequence
  Description of Artificial Sequence: Synthetic oligonucleotide
cuuggcccacuguccuccc

SEQ ID NO: 2779118 - RNA, 19 nt, Artificial Sequence
  Description of Artificial Sequence: Synthetic oligonucleotide
acagagcgccuuccuaauu

SEQ ID NO: 2779119 - RNA, 19 nt, Artificial Sequence
  Description of Artificial Sequence: Synthetic oligonucleotide
accauucuccccagucuca

SEQ ID NO: 2779120 - RNA, 19 nt, Artificial Sequence
  Description of Artificial Sequence: Synthetic oligonucleotide
gccaaucaauuguuucuuc

SEQ ID NO: 2779121 - RNA, 19 nt, Artificial Sequence
  Description of Artificial Sequence: Synthetic oligonucleotide
gcgccuuccuaauucucug

SEQ ID NO: 2779122 - RNA, 19 nt, Artificial Sequence
  Description of Artificial Sequence: Synthetic oligonucleotide
gaccgugguggaggcaagc

SEQ ID NO: 2779123 - RNA, 19 nt, Artificial Sequence
  Description of Artificial Sequence: Synthetic oligonucleotide
gaggcaagcauggcauuua

SEQ ID NO: 2779124 - RNA, 19 nt, Artificial Sequence
  Description of Artificial Sequence: Synthetic oligonucleotide
gccauccaugauccaaaug

SEQ ID NO: 2779125 - RNA, 19 nt, Artificial Sequence
  Description of Artificial Sequence: Synthetic oligonucleotide
gccugcuuggcccacuguc

SEQ ID NO: 2779126 - RNA, 19 nt, Artificial Sequence
  Description of Artificial Sequence: Synthetic oligonucleotide
ccuguggaggcuguucacc

SEQ ID NO: 2779127 - RNA, 19 nt, Artificial Sequence
  Description of Artificial Sequence: Synthetic oligonucleotide
uggaggcaagcauggcauu

SEQ ID NO: 2779128 - RNA, 19 nt, Artificial Sequence
  Description of Artificial Sequence: Synthetic oligonucleotide
ugcuuggcccacuguccuc

SEQ ID NO: 2779129 - RNA, 19 nt, Artificial Sequence
  Description of Artificial Sequence: Synthetic oligonucleotide
ugguggaggcaagcauggc

SEQ ID NO: 2779130 - RNA, 19 nt, Artificial Sequence
  Description of Artificial Sequence: Synthetic oligonucleotide
cacagcaggagcaccaauu

SEQ ID NO: 2779131 - RNA, 19 nt, Artificial Sequence
  Description of Artificial Sequence: Synthetic oligonucleotide
augcgacagccugcuuggc

SEQ ID NO: 2779132 - RNA, 19 nt, Artificial Sequence
  Description of Artificial Sequence: Synthetic oligonucleotide
gacaccauacacgcucagu

SEQ ID NO: 2779133 - RNA, 19 nt, Artificial Sequence
  Description of Artificial Sequence: Synthetic oligonucleotide
cuaggggaccgugguggag

SEQ ID NO: 2779134 - RNA, 19 nt, Artificial Sequence
  Description of Artificial Sequence: Synthetic oligonucleotide
gcaccaauucuaggggacc

SEQ ID NO: 2779135 - RNA, 19 nt, Artificial Sequence
  Description of Artificial Sequence: Synthetic oligonucleotide
gcuuggcccacuguccucc

SEQ ID NO: 2779136 - RNA, 19 nt, Artificial Sequence
  Description of Artificial Sequence: Synthetic oligonucleotide
ccccucagcaacacagcag

SEQ ID NO: 2779137 - RNA, 19 nt, Artificial Sequence
  Description of Artificial Sequence: Synthetic oligonucleotide
gcaacacagcaggagcacc

SEQ ID NO: 2779138 - RNA, 19 nt, Artificial Sequence
  Description of Artificial Sequence: Synthetic oligonucleotide
uucuucaccugcggcucuc

SEQ ID NO: 2779139 - RNA, 19 nt, Artificial Sequence
  Description of Artificial Sequence: Synthetic oligonucleotide
cucaguucccuuggccauc

SEQ ID NO: 2779140 - RNA, 19 nt, Artificial Sequence
  Description of Artificial Sequence: Synthetic oligonucleotide
ccaaucaauuguuucuucu

SEQ ID NO: 2779141 - RNA, 19 nt, Artificial Sequence
  Description of Artificial Sequence: Synthetic oligonucleotide
gacagagcgccuuccuaau

SEQ ID NO: 2779142 - RNA, 19 nt, Artificial Sequence
  Description of Artificial Sequence: Synthetic oligonucleotide
cuguggaggcuguucaccu

SEQ ID NO: 2779143 - RNA, 19 nt, Artificial Sequence
  Description of Artificial Sequence: Synthetic oligonucleotide
cacacagcaaggagucucu

SEQ ID NO: 2779144 - RNA, 19 nt, Artificial Sequence
  Description of Artificial Sequence: Synthetic oligonucleotide
ggaaacguuucccauucuu

SEQ ID NO: 2779145 - RNA, 19 nt, Artificial Sequence
  Description of Artificial Sequence: Synthetic oligonucleotide
ccaauucuaggggaccgug

SEQ ID NO: 2779146 - RNA, 19 nt, Artificial Sequence
  Description of Artificial Sequence: Synthetic oligonucleotide
cugcggcucuccuguggag

SEQ ID NO: 2779147 - RNA, 19 nt, Artificial Sequence
  Description of Artificial Sequence: Synthetic oligonucleotide
gcggcucuccuguggaggc

SEQ ID NO: 2779148 - RNA, 19 nt, Artificial Sequence
  Description of Artificial Sequence: Synthetic oligonucleotide
ccagucucaacacagguuu

SEQ ID NO: 2779149 - RNA, 19 nt, Artificial Sequence
  Description of Artificial Sequence: Synthetic oligonucleotide
ggcaccauauuuacauaaa

SEQ ID NO: 2779150 - RNA, 19 nt, Artificial Sequence
  Description of Artificial Sequence: Synthetic oligonucleotide
cuaaaucaugaugguuucu

SEQ ID NO: 2779151 - RNA, 19 nt, Artificial Sequence
  Description of Artificial Sequence: Synthetic oligonucleotide
cagccugcuuggcccacug

SEQ ID NO: 2779152 - RNA, 19 nt, Artificial Sequence
  Description of Artificial Sequence: Synthetic oligonucleotide
gagcgccuuccuaauucuc

SEQ ID NO: 2779153 - RNA, 19 nt, Artificial Sequence
  Description of Artificial Sequence: Synthetic oligonucleotide
ggagucucuaaaucaugau

SEQ ID NO: 2779154 - RNA, 19 nt, Artificial Sequence
  Description of Artificial Sequence: Synthetic oligonucleotide
ccauucuucaccugcggcu

SEQ ID NO: 2779155 - RNA, 19 nt, Artificial Sequence
  Description of Artificial Sequence: Synthetic oligonucleotide
acucaggguaagagaucca

SEQ ID NO: 2779156 - RNA, 19 nt, Artificial Sequence
  Description of Artificial Sequence: Synthetic oligonucleotide
agcauggcauuuagaucaa

SEQ ID NO: 2779157 - RNA, 19 nt, Artificial Sequence
  Description of Artificial Sequence: Synthetic oligonucleotide
cuagccccucagcaacaca

SEQ ID NO: 2779158 - RNA, 19 nt, Artificial Sequence
  Description of Artificial Sequence: Synthetic oligonucleotide
cagcaaggagucucuaaau

SEQ ID NO: 2779159 - RNA, 19 nt, Artificial Sequence
  Description of Artificial Sequence: Synthetic oligonucleotide
agccugcuuggcccacugu

SEQ ID NO: 2779160 - RNA, 19 nt, Artificial Sequence
  Description of Artificial Sequence: Synthetic oligonucleotide
cuguccucccagauagagu

SEQ ID NO: 2779161 - RNA, 19 nt, Artificial Sequence
  Description of Artificial Sequence: Synthetic oligonucleotide
agcuagccccucagcaaca

SEQ ID NO: 2779162 - RNA, 19 nt, Artificial Sequence
  Description of Artificial Sequence: Synthetic oligonucleotide
gccccucagcaacacagca

SEQ ID NO: 2779163 - RNA, 19 nt, Artificial Sequence
  Description of Artificial Sequence: Synthetic oligonucleotide
uuccccaagcuagccccuc

SEQ ID NO: 2779164 - RNA, 19 nt, Artificial Sequence
  Description of Artificial Sequence: Synthetic oligonucleotide
cccaagcuagccccucagc

SEQ ID NO: 2779165 - RNA, 19 nt, Artificial Sequence
  Description of Artificial Sequence: Synthetic oligonucleotide
cagucucaacacagguuua

SEQ ID NO: 2779166 - RNA, 19 nt, Artificial Sequence
  Description of Artificial Sequence: Synthetic oligonucleotide
caccuuuagaaaguugguu

SEQ ID NO: 2779167 - RNA, 19 nt, Artificial Sequence
  Description of Artificial Sequence: Synthetic oligonucleotide
cuuggccauccaugaucca

SEQ ID NO: 2779168 - RNA, 19 nt, Artificial Sequence
  Description of Artificial Sequence: Synthetic oligonucleotide
gggaccgugguggaggcaa

SEQ ID NO: 2779169 - RNA, 19 nt, Artificial Sequence
  Description of Artificial Sequence: Synthetic oligonucleotide
gcaccauucuccccagucu

SEQ ID NO: 2779170 - RNA, 19 nt, Artificial Sequence
  Description of Artificial Sequence: Synthetic oligonucleotide
cagcaggagcaccaauucu

SEQ ID NO: 2779171 - RNA, 19 nt, Artificial Sequence
  Description of Artificial Sequence: Synthetic oligonucleotide
cugcuuggcccacuguccu

SEQ ID NO: 2779172 - RNA, 19 nt, Artificial Sequence
  Description of Artificial Sequence: Synthetic oligonucleotide
cgcucaguucccuuggcca

SEQ ID NO: 2779173 - RNA, 19 nt, Artificial Sequence
  Description of Artificial Sequence: Synthetic oligonucleotide
gacagccugcuuggcccac

SEQ ID NO: 2779174 - RNA, 19 nt, Artificial Sequence
  Description of Artificial Sequence: Synthetic oligonucleotide
acagccugcuuggcccacu

SEQ ID NO: 2779175 - RNA, 19 nt, Artificial Sequence
  Description of Artificial Sequence: Synthetic oligonucleotide
cugagacaccauacacgcu

SEQ ID NO: 2779176 - RNA, 19 nt, Artificial Sequence
  Description of Artificial Sequence: Synthetic oligonucleotide
gguuuacauuggcaccaua

SEQ ID NO: 2779177 - RNA, 19 nt, Artificial Sequence
  Description of Artificial Sequence: Synthetic oligonucleotide
acacagcaaggagucucua

SEQ ID NO: 2779178 - RNA, 19 nt, Artificial Sequence
  Description of Artificial Sequence: Synthetic oligonucleotide
cauacacgcucaguucccu

SEQ ID NO: 2779179 - RNA, 19 nt, Artificial Sequence
  Description of Artificial Sequence: Synthetic oligonucleotide
ccccaagcuagccccucag

SEQ ID NO: 2779180 - RNA, 19 nt, Artificial Sequence
  Description of Artificial Sequence: Synthetic oligonucleotide
cacuguccucccagauaga

SEQ ID NO: 2779181 - RNA, 19 nt, Artificial Sequence
  Description of Artificial Sequence: Synthetic oligonucleotide
ccuuccuaauucucugugu

SEQ ID NO: 2779182 - RNA, 19 nt, Artificial Sequence
  Description of Artificial Sequence: Synthetic oligonucleotide
gcuagccccucagcaacac

SEQ ID NO: 2779183 - RNA, 19 nt, Artificial Sequence
  Description of Artificial Sequence: Synthetic oligonucleotide
ccugcggcucuccugugga

SEQ ID NO: 2779184 - RNA, 19 nt, Artificial Sequence
  Description of Artificial Sequence: Synthetic oligonucleotide
caccugcggcucuccugug

SEQ ID NO: 2779185 - RNA, 19 nt, Artificial Sequence
  Description of Artificial Sequence: Synthetic oligonucleotide
caggacagagcgccuuccu

SEQ ID NO: 2779186 - RNA, 19 nt, Artificial Sequence
  Description of Artificial Sequence: Synthetic oligonucleotide
gcucaguucccuuggccau

SEQ ID NO: 2779187 - RNA, 19 nt, Artificial Sequence
  Description of Artificial Sequence: Synthetic oligonucleotide
cgagcaccauucuccccag

SEQ ID NO: 2779188 - RNA, 19 nt, Artificial Sequence
  Description of Artificial Sequence: Synthetic oligonucleotide
ggaccgugguggaggcaag

SEQ ID NO: 2779189 - RNA, 19 nt, Artificial Sequence
  Description of Artificial Sequence: Synthetic oligonucleotide
guccucccagauagaguaa

SEQ ID NO: 2779190 - RNA, 19 nt, Artificial Sequence
  Description of Artificial Sequence: Synthetic oligonucleotide
cuucaccugcggcucuccu

SEQ ID NO: 2779191 - RNA, 19 nt, Artificial Sequence
  Description of Artificial Sequence: Synthetic oligonucleotide
ccucagcaacacagcagga

SEQ ID NO: 2779192 - RNA, 19 nt, Artificial Sequence
  Description of Artificial Sequence: Synthetic oligonucleotide
ggcccacuguccucccaga

SEQ ID NO: 2779193 - RNA, 19 nt, Artificial Sequence
  Description of Artificial Sequence: Synthetic oligonucleotide
cguuucccauucuucaccu

SEQ ID NO: 2779194 - RNA, 19 nt, Artificial Sequence
  Description of Artificial Sequence: Synthetic oligonucleotide
ggaggcaagcauggcauuu

SEQ ID NO: 2779195 - RNA, 19 nt, Artificial Sequence
  Description of Artificial Sequence: Synthetic oligonucleotide
cccacuguccucccagaua

SEQ ID NO: 2779196 - RNA, 19 nt, Artificial Sequence
  Description of Artificial Sequence: Synthetic oligonucleotide
guuccccaagcuagccccu

SEQ ID NO: 2779197 - RNA, 19 nt, Artificial Sequence
  Description of Artificial Sequence: Synthetic oligonucleotide
ggccauccaugauccaaau

SEQ ID NO: 2779198 - RNA, 19 nt, Artificial Sequence
  Description of Artificial Sequence: Synthetic oligonucleotide
ccauucuccccagucucaa

SEQ ID NO: 2779199 - RNA, 19 nt, Artificial Sequence
  Description of Artificial Sequence: Synthetic oligonucleotide
ccccagucucaacacaggu

SEQ ID NO: 2779200 - RNA, 19 nt, Artificial Sequence
  Description of Artificial Sequence: Synthetic oligonucleotide
cccagucucaacacagguu

SEQ ID NO: 2779201 - RNA, 19 nt, Artificial Sequence
  Description of Artificial Sequence: Synthetic oligonucleotide
gcauggcauuuagaucaaa

SEQ ID NO: 2779202 - RNA, 19 nt, Artificial Sequence
  Description of Artificial Sequence: Synthetic oligonucleotide
gcccacuguccucccagau

SEQ ID NO: 2779203 - RNA, 19 nt, Artificial Sequence
  Description of Artificial Sequence: Synthetic oligonucleotide
cgacagccugcuuggccca

SEQ ID NO: 2779204 - RNA, 19 nt, Artificial Sequence
  Description of Artificial Sequence: Synthetic oligonucleotide
ccgugguggaggcaagcau

SEQ ID NO: 2779205 - RNA, 19 nt, Artificial Sequence
  Description of Artificial Sequence: Synthetic oligonucleotide
cgccuuccuaauucucugu

SEQ ID NO: 2779206 - RNA, 19 nt, Artificial Sequence
  Description of Artificial Sequence: Synthetic oligonucleotide
ggggaccgugguggaggca

SEQ ID NO: 2779207 - RNA, 19 nt, Artificial Sequence
  Description of Artificial Sequence: Synthetic oligonucleotide
cggcucuccuguggaggcu

SEQ ID NO: 2779208 - RNA, 19 nt, Artificial Sequence
  Description of Artificial Sequence: Synthetic oligonucleotide
gacauuuuaggccccgagg

SEQ ID NO: 2779209 - RNA, 19 nt, Artificial Sequence
  Description of Artificial Sequence: Synthetic oligonucleotide
acauuuuaggccccgaggu

SEQ ID NO: 2779210 - RNA, 19 nt, Artificial Sequence
  Description of Artificial Sequence: Synthetic oligonucleotide
cauaccagaacccgguacc

SEQ ID NO: 2779211 - RNA, 19 nt, Artificial Sequence
  Description of Artificial Sequence: Synthetic oligonucleotide
uggcagacauuuuaggccc

SEQ ID NO: 2779212 - RNA, 19 nt, Artificial Sequence
  Description of Artificial Sequence: Synthetic oligonucleotide
guggcagacauuuuaggcc

SEQ ID NO: 2779213 - RNA, 19 nt, Artificial Sequence
  Description of Artificial Sequence: Synthetic oligonucleotide
agacacuuuggggugaggg

SEQ ID NO: 2779214 - RNA, 19 nt, Artificial Sequence
  Description of Artificial Sequence: Synthetic oligonucleotide
ugucagacacuuuggggug

SEQ ID NO: 2779215 - RNA, 19 nt, Artificial Sequence
  Description of Artificial Sequence: Synthetic oligonucleotide
agggguggcauuguagggc

SEQ ID NO: 2779216 - RNA, 19 nt, Artificial Sequence
  Description of Artificial Sequence: Synthetic oligonucleotide
gaacccgguaccuccaccc

SEQ ID NO: 2779217 - RNA, 19 nt, Artificial Sequence
  Description of Artificial Sequence: Synthetic oligonucleotide
agacauuuuaggccccgag

SEQ ID NO: 2779218 - RNA, 19 nt, Artificial Sequence
  Description of Artificial Sequence: Synthetic oligonucleotide
gguggcagacauuuuaggc

SEQ ID NO: 2779219 - RNA, 19 nt, Artificial Sequence
  Description of Artificial Sequence: Synthetic oligonucleotide
agaacccgguaccuccacc

SEQ ID NO: 2779220 - RNA, 19 nt, Artificial Sequence
  Description of Artificial Sequence: Synthetic oligonucleotide
agguggcagacauuuuagg

SEQ ID NO: 2779221 - RNA, 19 nt, Artificial Sequence
  Description of Artificial Sequence: Synthetic oligonucleotide
uggggugaggguaccacac

SEQ ID NO: 2779222 - RNA, 19 nt, Artificial Sequence
  Description of Artificial Sequence: Synthetic oligonucleotide
cauuuuaggccccgaggug

SEQ ID NO: 2779223 - RNA, 19 nt, Artificial Sequence
  Description of Artificial Sequence: Synthetic oligonucleotide
gaaccagcuccugaauugc

SEQ ID NO: 2779224 - RNA, 19 nt, Artificial Sequence
  Description of Artificial Sequence: Synthetic oligonucleotide
gacagggguggcauuguag

SEQ ID NO: 2779225 - RNA, 19 nt, Artificial Sequence
  Description of Artificial Sequence: Synthetic oligonucleotide
uuuggggugaggguaccac

SEQ ID NO: 2779226 - RNA, 19 nt, Artificial Sequence
  Description of Artificial Sequence: Synthetic oligonucleotide
acagacagggguggcauug

SEQ ID NO: 2779227 - RNA, 19 nt, Artificial Sequence
  Description of Artificial Sequence: Synthetic oligonucleotide
accagcuccugaauugccg

SEQ ID NO: 2779228 - RNA, 19 nt, Artificial Sequence
  Description of Artificial Sequence: Synthetic oligonucleotide
cagggguggcauuguaggg

SEQ ID NO: 2779229 - RNA, 19 nt, Artificial Sequence
  Description of Artificial Sequence: Synthetic oligonucleotide
cacuuuggggugaggguac

SEQ ID NO: 2779230 - RNA, 19 nt, Artificial Sequence
  Description of Artificial Sequence: Synthetic oligonucleotide
ucagacacuuuggggugag

SEQ ID NO: 2779231 - RNA, 19 nt, Artificial Sequence
  Description of Artificial Sequence: Synthetic oligonucleotide
acuuuggggugaggguacc

SEQ ID NO: 2779232 - RNA, 19 nt, Artificial Sequence
  Description of Artificial Sequence: Synthetic oligonucleotide
aacccgguaccuccaccca

SEQ ID NO: 2779233 - RNA, 19 nt, Artificial Sequence
  Description of Artificial Sequence: Synthetic oligonucleotide
auggacagacagggguggc

SEQ ID NO: 2779234 - RNA, 19 nt, Artificial Sequence
  Description of Artificial Sequence: Synthetic oligonucleotide
acacuuuggggugagggua

SEQ ID NO: 2779235 - RNA, 19 nt, Artificial Sequence
  Description of Artificial Sequence: Synthetic oligonucleotide
acccgguaccuccacccag

SEQ ID NO: 2779236 - RNA, 19 nt, Artificial Sequence
  Description of Artificial Sequence: Synthetic oligonucleotide
uggacagacagggguggca

SEQ ID NO: 2779237 - RNA, 19 nt, Artificial Sequence
  Description of Artificial Sequence: Synthetic oligonucleotide
auaccagaacccgguaccu

SEQ ID NO: 2779238 - RNA, 19 nt, Artificial Sequence
  Description of Artificial Sequence: Synthetic oligonucleotide
ccauaccagaacccgguac

SEQ ID NO: 2779239 - RNA, 19 nt, Artificial Sequence
  Description of Artificial Sequence: Synthetic oligonucleotide
gcagacauuuuaggccccg

SEQ ID NO: 2779240 - RNA, 19 nt, Artificial Sequence
  Description of Artificial Sequence: Synthetic oligonucleotide
cagaacccgguaccuccac

SEQ ID NO: 2779241 - RNA, 19 nt, Artificial Sequence
  Description of Artificial Sequence: Synthetic oligonucleotide
cagacacuuuggggugagg

SEQ ID NO: 2779242 - RNA, 19 nt, Artificial Sequence
  Description of Artificial Sequence: Synthetic oligonucleotide
ggcagacauuuuaggcccc

SEQ ID NO: 2779243 - RNA, 19 nt, Artificial Sequence
  Description of Artificial Sequence: Synthetic oligonucleotide
cagacauuuuaggccccga

SEQ ID NO: 2779244 - RNA, 19 nt, Artificial Sequence
  Description of Artificial Sequence: Synthetic oligonucleotide
gacagacagggguggcauu

SEQ ID NO: 2779245 - RNA, 19 nt, Artificial Sequence
  Description of Artificial Sequence: Synthetic oligonucleotide
ccagaacccgguaccucca

SEQ ID NO: 2779246 - RNA, 19 nt, Artificial Sequence
  Description of Artificial Sequence: Synthetic oligonucleotide
gcccauaccagaacccggu

SEQ ID NO: 2779247 - RNA, 19 nt, Artificial Sequence
  Description of Artificial Sequence: Synthetic oligonucleotide
cagacagggguggcauugu

SEQ ID NO: 2779248 - RNA, 19 nt, Artificial Sequence
  Description of Artificial Sequence: Synthetic oligonucleotide
cccauaccagaacccggua

SEQ ID NO: 2779249 - RNA, 19 nt, Artificial Sequence
  Description of Artificial Sequence: Synthetic oligonucleotide
uuaauaaaaguguugcugg

SEQ ID NO: 2779250 - RNA, 19 nt, Artificial Sequence
  Description of Artificial Sequence: Synthetic oligonucleotide
aagaugaccagcaacaggc

SEQ ID NO: 2779251 - RNA, 19 nt, Artificial Sequence
  Description of Artificial Sequence: Synthetic oligonucleotide
acauuugaaauccugcugc

SEQ ID NO: 2779252 - RNA, 19 nt, Artificial Sequence
  Description of Artificial Sequence: Synthetic oligonucleotide
uuuaauaaaaguguugcug

SEQ ID NO: 2779253 - RNA, 19 nt, Artificial Sequence
  Description of Artificial Sequence: Synthetic oligonucleotide
uuugaaauccugcugcagc

SEQ ID NO: 2779254 - RNA, 19 nt, Artificial Sequence
  Description of Artificial Sequence: Synthetic oligonucleotide
aacauuugaaauccugcug

SEQ ID NO: 2779255 - RNA, 19 nt, Artificial Sequence
  Description of Artificial Sequence: Synthetic oligonucleotide
agacaggccaccccgaugc

SEQ ID NO: 2779256 - RNA, 19 nt, Artificial Sequence
  Description of Artificial Sequence: Synthetic oligonucleotide
acaacauuugaaauccugc

SEQ ID NO: 2779257 - RNA, 19 nt, Artificial Sequence
  Description of Artificial Sequence: Synthetic oligonucleotide
aauaaaaguguugcuggag

SEQ ID NO: 2779258 - RNA, 19 nt, Artificial Sequence
  Description of Artificial Sequence: Synthetic oligonucleotide
uccaccuuguagauguugg

SEQ ID NO: 2779259 - RNA, 19 nt, Artificial Sequence
  Description of Artificial Sequence: Synthetic oligonucleotide
uauacgugugccaggaccc

SEQ ID NO: 2779260 - RNA, 19 nt, Artificial Sequence
  Description of Artificial Sequence: Synthetic oligonucleotide
uccuuuaauaaaaguguug

SEQ ID NO: 2779261 - RNA, 19 nt, Artificial Sequence
  Description of Artificial Sequence: Synthetic oligonucleotide
gaagaugaccagcaacagg

SEQ ID NO: 2779262 - RNA, 19 nt, Artificial Sequence
  Description of Artificial Sequence: Synthetic oligonucleotide
ucaggaugugggaaugugg

SEQ ID NO: 2779263 - RNA, 19 nt, Artificial Sequence
  Description of Artificial Sequence: Synthetic oligonucleotide
gaggcugugaucucugcgg

SEQ ID NO: 2779264 - RNA, 19 nt, Artificial Sequence
  Description of Artificial Sequence: Synthetic oligonucleotide
ucugguaguauacgugugc

SEQ ID NO: 2779265 - RNA, 19 nt, Artificial Sequence
  Description of Artificial Sequence: Synthetic oligonucleotide
caggaugugggaauguggg

SEQ ID NO: 2779266 - RNA, 19 nt, Artificial Sequence
  Description of Artificial Sequence: Synthetic oligonucleotide
uccagcuuggccaugcagc

SEQ ID NO: 2779267 - RNA, 19 nt, Artificial Sequence
  Description of Artificial Sequence: Synthetic oligonucleotide
gaaugugggcccuuggcag

SEQ ID NO: 2779268 - RNA, 19 nt, Artificial Sequence
  Description of Artificial Sequence: Synthetic oligonucleotide
uugaaauccugcugcagcc

SEQ ID NO: 2779269 - RNA, 19 nt, Artificial Sequence
  Description of Artificial Sequence: Synthetic oligonucleotide
ucuugcagcaacugucggg

SEQ ID NO: 2779270 - RNA, 19 nt, Artificial Sequence
  Description of Artificial Sequence: Synthetic oligonucleotide
aaugugggcccuuggcagg

SEQ ID NO: 2779271 - RNA, 19 nt, Artificial Sequence
  Description of Artificial Sequence: Synthetic oligonucleotide
ucccgagacaagauguacg

SEQ ID NO: 2779272 - RNA, 19 nt, Artificial Sequence
  Description of Artificial Sequence: Synthetic oligonucleotide
guauacgugugccaggacc

SEQ ID NO: 2779273 - RNA, 19 nt, Artificial Sequence
  Description of Artificial Sequence: Synthetic oligonucleotide
acugccacaacauuugaaa

SEQ ID NO: 2779274 - RNA, 19 nt, Artificial Sequence
  Description of Artificial Sequence: Synthetic oligonucleotide
uguuacugccacaacauuu

SEQ ID NO: 2779275 - RNA, 19 nt, Artificial Sequence
  Description of Artificial Sequence: Synthetic oligonucleotide
guagugcucagucagggug

SEQ ID NO: 2779276 - RNA, 19 nt, Artificial Sequence
  Description of Artificial Sequence: Synthetic oligonucleotide
uaauaaaaguguugcugga

SEQ ID NO: 2779277 - RNA, 19 nt, Artificial Sequence
  Description of Artificial Sequence: Synthetic oligonucleotide
ccuuuaauaaaaguguugc

SEQ ID NO: 2779278 - RNA, 19 nt, Artificial Sequence
  Description of Artificial Sequence: Synthetic oligonucleotide
aaccagcuccaccaggaag

SEQ ID NO: 2779279 - RNA, 19 nt, Artificial Sequence
  Description of Artificial Sequence: Synthetic oligonucleotide
uguguugccagucggccga

SEQ ID NO: 2779280 - RNA, 19 nt, Artificial Sequence
  Description of Artificial Sequence: Synthetic oligonucleotide
gaccccugcaaccagcucc

SEQ ID NO: 2779281 - RNA, 19 nt, Artificial Sequence
  Description of Artificial Sequence: Synthetic oligonucleotide
agcuguuacugccacaaca

SEQ ID NO: 2779282 - RNA, 19 nt, Artificial Sequence
  Description of Artificial Sequence: Synthetic oligonucleotide
cacaacauuugaaauccug

SEQ ID NO: 2779283 - RNA, 19 nt, Artificial Sequence
  Description of Artificial Sequence: Synthetic oligonucleotide
cuugcagcaacugucgggc

SEQ ID NO: 2779284 - RNA, 19 nt, Artificial Sequence
  Description of Artificial Sequence: Synthetic oligonucleotide
guuacugccacaacauuug

SEQ ID NO: 2779285 - RNA, 19 nt, Artificial Sequence
  Description of Artificial Sequence: Synthetic oligonucleotide
guugcuggagccuucggug

SEQ ID NO: 2779286 - RNA, 19 nt, Artificial Sequence
  Description of Artificial Sequence: Synthetic oligonucleotide
cuuggcaggcuacaggggc

SEQ ID NO: 2779287 - RNA, 19 nt, Artificial Sequence
  Description of Artificial Sequence: Synthetic oligonucleotide
gacuuugcaggccugguuc

SEQ ID NO: 2779288 - RNA, 19 nt, Artificial Sequence
  Description of Artificial Sequence: Synthetic oligonucleotide
aggaugugggaaugugggc

SEQ ID NO: 2779289 - RNA, 19 nt, Artificial Sequence
  Description of Artificial Sequence: Synthetic oligonucleotide
cauccuuuaauaaaagugu

SEQ ID NO: 2779290 - RNA, 19 nt, Artificial Sequence
  Description of Artificial Sequence: Synthetic oligonucleotide
gcauccuuuaauaaaagug

SEQ ID NO: 2779291 - RNA, 19 nt, Artificial Sequence
  Description of Artificial Sequence: Synthetic oligonucleotide
ugccacaacauuugaaauc

SEQ ID NO: 2779292 - RNA, 19 nt, Artificial Sequence
  Description of Artificial Sequence: Synthetic oligonucleotide
uccaccgaggcugugaucu

SEQ ID NO: 2779293 - RNA, 19 nt, Artificial Sequence
  Description of Artificial Sequence: Synthetic oligonucleotide
cuucggugcaagcagcagg

SEQ ID NO: 2779294 - RNA, 19 nt, Artificial Sequence
  Description of Artificial Sequence: Synthetic oligonucleotide
agcuuggccaugcagccuc

SEQ ID NO: 2779295 - RNA, 19 nt, Artificial Sequence
  Description of Artificial Sequence: Synthetic oligonucleotide
uucggugcaagcagcaggu

SEQ ID NO: 2779296 - RNA, 19 nt, Artificial Sequence
  Description of Artificial Sequence: Synthetic oligonucleotide
aaaaguguugcuggagccu

SEQ ID NO: 2779297 - RNA, 19 nt, Artificial Sequence
  Description of Artificial Sequence: Synthetic oligonucleotide
caugcagccuccuuccacc

SEQ ID NO: 2779298 - RNA, 19 nt, Artificial Sequence
  Description of Artificial Sequence: Synthetic oligonucleotide
aagauguacgugcuguguu

SEQ ID NO: 2779299 - RNA, 19 nt, Artificial Sequence
  Description of Artificial Sequence: Synthetic oligonucleotide
caggugagaaccaucccgc

SEQ ID NO: 2779300 - RNA, 19 nt, Artificial Sequence
  Description of Artificial Sequence: Synthetic oligonucleotide
cucagcucgucacucagcc

SEQ ID NO: 2779301 - RNA, 19 nt, Artificial Sequence
  Description of Artificial Sequence: Synthetic oligonucleotide
cagguggucagccaggaac

SEQ ID NO: 2779302 - RNA, 19 nt, Artificial Sequence
  Description of Artificial Sequence: Synthetic oligonucleotide
cagggugcuguucaggugc

SEQ ID NO: 2779303 - RNA, 19 nt, Artificial Sequence
  Description of Artificial Sequence: Synthetic oligonucleotide
aggaagaugaccagcaaca

SEQ ID NO: 2779304 - RNA, 19 nt, Artificial Sequence
  Description of Artificial Sequence: Synthetic oligonucleotide
agauguacgugcuguguug

SEQ ID NO: 2779305 - RNA, 19 nt, Artificial Sequence
  Description of Artificial Sequence: Synthetic oligonucleotide
ucagccucugguaguauac

SEQ ID NO: 2779306 - RNA, 19 nt, Artificial Sequence
  Description of Artificial Sequence: Synthetic oligonucleotide
cagcaggugagaaccaucc

SEQ ID NO: 2779307 - RNA, 19 nt, Artificial Sequence
  Description of Artificial Sequence: Synthetic oligonucleotide
cugucuugcagcaacuguc

SEQ ID NO: 2779308 - RNA, 19 nt, Artificial Sequence
  Description of Artificial Sequence: Synthetic oligonucleotide
uguugcuggagccuucggu

SEQ ID NO: 2779309 - RNA, 19 nt, Artificial Sequence
  Description of Artificial Sequence: Synthetic oligonucleotide
aaccaucccgcagaucugg

SEQ ID NO: 2779310 - RNA, 19 nt, Artificial Sequence
  Description of Artificial Sequence: Synthetic oligonucleotide
agcugcugacuuugcaggc

SEQ ID NO: 2779311 - RNA, 19 nt, Artificial Sequence
  Description of Artificial Sequence: Synthetic oligonucleotide
gucacucagccucugguag

SEQ ID NO: 2779312 - RNA, 19 nt, Artificial Sequence
  Description of Artificial Sequence: Synthetic oligonucleotide
cuggagacaggccaccccg

SEQ ID NO: 2779313 - RNA, 19 nt, Artificial Sequence
  Description of Artificial Sequence: Synthetic oligonucleotide
guaguauacgugugccagg

SEQ ID NO: 2779314 - RNA, 19 nt, Artificial Sequence
  Description of Artificial Sequence: Synthetic oligonucleotide
gcaggugagaaccaucccg

SEQ ID NO: 2779315 - RNA, 19 nt, Artificial Sequence
  Description of Artificial Sequence: Synthetic oligonucleotide
aucccgcagaucuggagac

SEQ ID NO: 2779316 - RNA, 19 nt, Artificial Sequence
  Description of Artificial Sequence: Synthetic oligonucleotide
uagugcucagucagggugc

SEQ ID NO: 2779317 - RNA, 19 nt, Artificial Sequence
  Description of Artificial Sequence: Synthetic oligonucleotide
aggcugugaucucugcggc

SEQ ID NO: 2779318 - RNA, 19 nt, Artificial Sequence
  Description of Artificial Sequence: Synthetic oligonucleotide
cagcugcugacuuugcagg

SEQ ID NO: 2779319 - RNA, 19 nt, Artificial Sequence
  Description of Artificial Sequence: Synthetic oligonucleotide
ugcaaccagcuccaccagg

SEQ ID NO: 2779320 - RNA, 19 nt, Artificial Sequence
  Description of Artificial Sequence: Synthetic oligonucleotide
gguaguauacgugugccag

SEQ ID NO: 2779321 - RNA, 19 nt, Artificial Sequence
  Description of Artificial Sequence: Synthetic oligonucleotide
uuguagauguuggaggggu

SEQ ID NO: 2779322 - RNA, 19 nt, Artificial Sequence
  Description of Artificial Sequence: Synthetic oligonucleotide
ugaaauccugcugcagccg

SEQ ID NO: 2779323 - RNA, 19 nt, Artificial Sequence
  Description of Artificial Sequence: Synthetic oligonucleotide
agcaggugagaaccauccc

SEQ ID NO: 2779324 - RNA, 19 nt, Artificial Sequence
  Description of Artificial Sequence: Synthetic oligonucleotide
gauguuggaggggugggcc

SEQ ID NO: 2779325 - RNA, 19 nt, Artificial Sequence
  Description of Artificial Sequence: Synthetic oligonucleotide
auguuggaggggugggccc

SEQ ID NO: 2779326 - RNA, 19 nt, Artificial Sequence
  Description of Artificial Sequence: Synthetic oligonucleotide
ugugccaggaccccugcaa

SEQ ID NO: 2779327 - RNA, 19 nt, Artificial Sequence
  Description of Artificial Sequence: Synthetic oligonucleotide
acugucuugcagcaacugu

SEQ ID NO: 2779328 - RNA, 19 nt, Artificial Sequence
  Description of Artificial Sequence: Synthetic oligonucleotide
ccuuguagauguuggaggg

SEQ ID NO: 2779329 - RNA, 19 nt, Artificial Sequence
  Description of Artificial Sequence: Synthetic oligonucleotide
gagccuucggugcaagcag

SEQ ID NO: 2779330 - RNA, 19 nt, Artificial Sequence
  Description of Artificial Sequence: Synthetic oligonucleotide
augagcagcagguggucag

SEQ ID NO: 2779331 - RNA, 19 nt, Artificial Sequence
  Description of Artificial Sequence: Synthetic oligonucleotide
aucucugcggcccuuggcu

SEQ ID NO: 2779332 - RNA, 19 nt, Artificial Sequence
  Description of Artificial Sequence: Synthetic oligonucleotide
caggaagaugaccagcaac

SEQ ID NO: 2779333 - RNA, 19 nt, Artificial Sequence
  Description of Artificial Sequence: Synthetic oligonucleotide
acagcgugccaccacuguc

SEQ ID NO: 2779334 - RNA, 19 nt, Artificial Sequence
  Description of Artificial Sequence: Synthetic oligonucleotide
auguacgugcuguguugcc

SEQ ID NO: 2779335 - RNA, 19 nt, Artificial Sequence
  Description of Artificial Sequence: Synthetic oligonucleotide
aacugucgggcacccggcg

SEQ ID NO: 2779336 - RNA, 19 nt, Artificial Sequence
  Description of Artificial Sequence: Synthetic oligonucleotide
uguagauguuggaggggug

SEQ ID NO: 2779337 - RNA, 19 nt, Artificial Sequence
  Description of Artificial Sequence: Synthetic oligonucleotide
gauguacgugcuguguugc

SEQ ID NO: 2779338 - RNA, 19 nt, Artificial Sequence
  Description of Artificial Sequence: Synthetic oligonucleotide
acaagauguacgugcugug

SEQ ID NO: 2779339 - RNA, 19 nt, Artificial Sequence
  Description of Artificial Sequence: Synthetic oligonucleotide
uagauguuggagggguggg

SEQ ID NO: 2779340 - RNA, 19 nt, Artificial Sequence
  Description of Artificial Sequence: Synthetic oligonucleotide
aauccugcugcagccgguc

SEQ ID NO: 2779341 - RNA, 19 nt, Artificial Sequence
  Description of Artificial Sequence: Synthetic oligonucleotide
gugagaaccaucccgcaga

SEQ ID NO: 2779342 - RNA, 19 nt, Artificial Sequence
  Description of Artificial Sequence: Synthetic oligonucleotide
uacaggggcauccuuuaau

SEQ ID NO: 2779343 - RNA, 19 nt, Artificial Sequence
  Description of Artificial Sequence: Synthetic oligonucleotide
cugguaguauacgugugcc

SEQ ID NO: 2779344 - RNA, 19 nt, Artificial Sequence
  Description of Artificial Sequence: Synthetic oligonucleotide
auuugaaauccugcugcag

SEQ ID NO: 2779345 - RNA, 19 nt, Artificial Sequence
  Description of Artificial Sequence: Synthetic oligonucleotide
cgagacaagauguacgugc

SEQ ID NO: 2779346 - RNA, 19 nt, Artificial Sequence
  Description of Artificial Sequence: Synthetic oligonucleotide
uucaggaugugggaaugug

SEQ ID NO: 2779347 - RNA, 19 nt, Artificial Sequence
  Description of Artificial Sequence: Synthetic oligonucleotide
ucgucacucagccucuggu

SEQ ID NO: 2779348 - RNA, 19 nt, Artificial Sequence
  Description of Artificial Sequence: Synthetic oligonucleotide
agauguuggaggggugggc

SEQ ID NO: 2779349 - RNA, 19 nt, Artificial Sequence
  Description of Artificial Sequence: Synthetic oligonucleotide
guacgugcuguguugccag

SEQ ID NO: 2779350 - RNA, 19 nt, Artificial Sequence
  Description of Artificial Sequence: Synthetic oligonucleotide
aguauacgugugccaggac

SEQ ID NO: 2779351 - RNA, 19 nt, Artificial Sequence
  Description of Artificial Sequence: Synthetic oligonucleotide
aggggcauccuuuaauaaa

SEQ ID NO: 2779352 - RNA, 19 nt, Artificial Sequence
  Description of Artificial Sequence: Synthetic oligonucleotide
cagaucuggagacaggcca

SEQ ID NO: 2779353 - RNA, 19 nt, Artificial Sequence
  Description of Artificial Sequence: Synthetic oligonucleotide
augaccagcaacaggcaag

SEQ ID NO: 2779354 - RNA, 19 nt, Artificial Sequence
  Description of Artificial Sequence: Synthetic oligonucleotide
gcaacugucgggcacccgg

SEQ ID NO: 2779355 - RNA, 19 nt, Artificial Sequence
  Description of Artificial Sequence: Synthetic oligonucleotide
uuacugccacaacauuuga

SEQ ID NO: 2779356 - RNA, 19 nt, Artificial Sequence
  Description of Artificial Sequence: Synthetic oligonucleotide
caggugcugccucagcucg

SEQ ID NO: 2779357 - RNA, 19 nt, Artificial Sequence
  Description of Artificial Sequence: Synthetic oligonucleotide
ugcucagucagggugcugu

SEQ ID NO: 2779358 - RNA, 19 nt, Artificial Sequence
  Description of Artificial Sequence: Synthetic oligonucleotide
ugaucucugcggcccuugg

SEQ ID NO: 2779359 - RNA, 19 nt, Artificial Sequence
  Description of Artificial Sequence: Synthetic oligonucleotide
ugcuguguugccagucggc

SEQ ID NO: 2779360 - RNA, 19 nt, Artificial Sequence
  Description of Artificial Sequence: Synthetic oligonucleotide
uuugcaggccugguucagg

SEQ ID NO: 2779361 - RNA, 19 nt, Artificial Sequence
  Description of Artificial Sequence: Synthetic oligonucleotide
uguacgugcuguguugcca

SEQ ID NO: 2779362 - RNA, 19 nt, Artificial Sequence
  Description of Artificial Sequence: Synthetic oligonucleotide
ugcagcaacugucgggcac

SEQ ID NO: 2779363 - RNA, 19 nt, Artificial Sequence
  Description of Artificial Sequence: Synthetic oligonucleotide
cagcucgucacucagccuc

SEQ ID NO: 2779364 - RNA, 19 nt, Artificial Sequence
  Description of Artificial Sequence: Synthetic oligonucleotide
agaucuggagacaggccac

SEQ ID NO: 2779365 - RNA, 19 nt, Artificial Sequence
  Description of Artificial Sequence: Synthetic oligonucleotide
uacugccacaacauuugaa

SEQ ID NO: 2779366 - RNA, 19 nt, Artificial Sequence
  Description of Artificial Sequence: Synthetic oligonucleotide
ugcgcccaugagcagcagg

SEQ ID NO: 2779367 - RNA, 19 nt, Artificial Sequence
  Description of Artificial Sequence: Synthetic oligonucleotide
ggaugugggaaugugggcc

SEQ ID NO: 2779368 - RNA, 19 nt, Artificial Sequence
  Description of Artificial Sequence: Synthetic oligonucleotide
ugggaaugugggcccuugg

SEQ ID NO: 2779369 - RNA, 19 nt, Artificial Sequence
  Description of Artificial Sequence: Synthetic oligonucleotide
aaaguguugcuggagccuu

SEQ ID NO: 2779370 - RNA, 19 nt, Artificial Sequence
  Description of Artificial Sequence: Synthetic oligonucleotide
ugaccagcaacaggcaaga

SEQ ID NO: 2779371 - RNA, 19 nt, Artificial Sequence
  Description of Artificial Sequence: Synthetic oligonucleotide
ugcugcagccgguccaccg

SEQ ID NO: 2779372 - RNA, 19 nt, Artificial Sequence
  Description of Artificial Sequence: Synthetic oligonucleotide
uugcuggagccuucggugc

SEQ ID NO: 2779373 - RNA, 19 nt, Artificial Sequence
  Description of Artificial Sequence: Synthetic oligonucleotide
caccuuguagauguuggag

SEQ ID NO: 2779374 - RNA, 19 nt, Artificial Sequence
  Description of Artificial Sequence: Synthetic oligonucleotide
acaggggcauccuuuaaua

SEQ ID NO: 2779375 - RNA, 19 nt, Artificial Sequence
  Description of Artificial Sequence: Synthetic oligonucleotide
cuguguugccagucggccg

SEQ ID NO: 2779376 - RNA, 19 nt, Artificial Sequence
  Description of Artificial Sequence: Synthetic oligonucleotide
uuggcaggcuacaggggca

SEQ ID NO: 2779377 - RNA, 19 nt, Artificial Sequence
  Description of Artificial Sequence: Synthetic oligonucleotide
gacaagauguacgugcugu

SEQ ID NO: 2779378 - RNA, 19 nt, Artificial Sequence
  Description of Artificial Sequence: Synthetic oligonucleotide
uugcaggccugguucagga

SEQ ID NO: 2779379 - RNA, 19 nt, Artificial Sequence
  Description of Artificial Sequence: Synthetic oligonucleotide
ucagggugcuguucaggug

SEQ ID NO: 2779380 - RNA, 19 nt, Artificial Sequence
  Description of Artificial Sequence: Synthetic oligonucleotide
cuuuaauaaaaguguugcu

SEQ ID NO: 2779381 - RNA, 19 nt, Artificial Sequence
  Description of Artificial Sequence: Synthetic oligonucleotide
agacaagauguacgugcug

SEQ ID NO: 2779382 - RNA, 19 nt, Artificial Sequence
  Description of Artificial Sequence: Synthetic oligonucleotide
acccugggcuucccgagac

SEQ ID NO: 2779383 - RNA, 19 nt, Artificial Sequence
  Description of Artificial Sequence: Synthetic oligonucleotide
ugagaaccaucccgcagau

SEQ ID NO: 2779384 - RNA, 19 nt, Artificial Sequence
  Description of Artificial Sequence: Synthetic oligonucleotide
ggugcaagcagcaggugag

SEQ ID NO: 2779385 - RNA, 19 nt, Artificial Sequence
  Description of Artificial Sequence: Synthetic oligonucleotide
caacauuugaaauccugcu

SEQ ID NO: 2779386 - RNA, 19 nt, Artificial Sequence
  Description of Artificial Sequence: Synthetic oligonucleotide
agccucugguaguauacgu

SEQ ID NO: 2779387 - RNA, 19 nt, Artificial Sequence
  Description of Artificial Sequence: Synthetic oligonucleotide
cucugguaguauacgugug

SEQ ID NO: 2779388 - RNA, 19 nt, Artificial Sequence
  Description of Artificial Sequence: Synthetic oligonucleotide
auacgugugccaggacccc

SEQ ID NO: 2779389 - RNA, 19 nt, Artificial Sequence
  Description of Artificial Sequence: Synthetic oligonucleotide
gaucucugcggcccuuggc

SEQ ID NO: 2779390 - RNA, 19 nt, Artificial Sequence
  Description of Artificial Sequence: Synthetic oligonucleotide
ggugagaaccaucccgcag

SEQ ID NO: 2779391 - RNA, 19 nt, Artificial Sequence
  Description of Artificial Sequence: Synthetic oligonucleotide
gugcuguguugccagucgg

SEQ ID NO: 2779392 - RNA, 19 nt, Artificial Sequence
  Description of Artificial Sequence: Synthetic oligonucleotide
uuccaccuuguagauguug

SEQ ID NO: 2779393 - RNA, 19 nt, Artificial Sequence
  Description of Artificial Sequence: Synthetic oligonucleotide
ucacucagccucugguagu

SEQ ID NO: 2779394 - RNA, 19 nt, Artificial Sequence
  Description of Artificial Sequence: Synthetic oligonucleotide
agucagggugcuguucagg

SEQ ID NO: 2779395 - RNA, 19 nt, Artificial Sequence
  Description of Artificial Sequence: Synthetic oligonucleotide
ugccagucggccgagcugu

SEQ ID NO: 2779396 - RNA, 19 nt, Artificial Sequence
  Description of Artificial Sequence: Synthetic oligonucleotide
ugacuuugcaggccugguu

SEQ ID NO: 2779397 - RNA, 19 nt, Artificial Sequence
  Description of Artificial Sequence: Synthetic oligonucleotide
caccccgaugcccacugcg

SEQ ID NO: 2779398 - RNA, 19 nt, Artificial Sequence
  Description of Artificial Sequence: Synthetic oligonucleotide
ugcuggagccuucggugca

SEQ ID NO: 2779399 - RNA, 19 nt, Artificial Sequence
  Description of Artificial Sequence: Synthetic oligonucleotide
ugccaccacugucuugcag

SEQ ID NO: 2779400 - RNA, 19 nt, Artificial Sequence
  Description of Artificial Sequence: Synthetic oligonucleotide
agccgguccaccgaggcug

SEQ ID NO: 2779401 - RNA, 19 nt, Artificial Sequence
  Description of Artificial Sequence: Synthetic oligonucleotide
ggaaugugggcccuuggca

SEQ ID NO: 2779402 - RNA, 19 nt, Artificial Sequence
  Description of Artificial Sequence: Synthetic oligonucleotide
auccuuuaauaaaaguguu

SEQ ID NO: 2779403 - RNA, 19 nt, Artificial Sequence
  Description of Artificial Sequence: Synthetic oligonucleotide
ucggccgagcuguuacugc

SEQ ID NO: 2779404 - RNA, 19 nt, Artificial Sequence
  Description of Artificial Sequence: Synthetic oligonucleotide
caucccgcagaucuggaga

SEQ ID NO: 2779405 - RNA, 19 nt, Artificial Sequence
  Description of Artificial Sequence: Synthetic oligonucleotide
gcccaugagcagcaggugg

SEQ ID NO: 2779406 - RNA, 19 nt, Artificial Sequence
  Description of Artificial Sequence: Synthetic oligonucleotide
augugggcccuuggcaggc

SEQ ID NO: 2779407 - RNA, 19 nt, Artificial Sequence
  Description of Artificial Sequence: Synthetic oligonucleotide
gcagcagguggucagccag

SEQ ID NO: 2779408 - RNA, 19 nt, Artificial Sequence
  Description of Artificial Sequence: Synthetic oligonucleotide
ccuccuuccaccuuguaga

SEQ ID NO: 2779409 - RNA, 19 nt, Artificial Sequence
  Description of Artificial Sequence: Synthetic oligonucleotide
caacugucgggcacccggc

SEQ ID NO: 2779410 - RNA, 19 nt, Artificial Sequence
  Description of Artificial Sequence: Synthetic oligonucleotide
agccuucggugcaagcagc

SEQ ID NO: 2779411 - RNA, 19 nt, Artificial Sequence
  Description of Artificial Sequence: Synthetic oligonucleotide
cagucggccgagcuguuac

SEQ ID NO: 2779412 - RNA, 19 nt, Artificial Sequence
  Description of Artificial Sequence: Synthetic oligonucleotide
gccugguucaggauguggg

SEQ ID NO: 2779413 - RNA, 19 nt, Artificial Sequence
  Description of Artificial Sequence: Synthetic oligonucleotide
gugcuguucaggugcugcc

SEQ ID NO: 2779414 - RNA, 19 nt, Artificial Sequence
  Description of Artificial Sequence: Synthetic oligonucleotide
gcccguagugcucagucag

SEQ ID NO: 2779415 - RNA, 19 nt, Artificial Sequence
  Description of Artificial Sequence: Synthetic oligonucleotide
gccuccuuccaccuuguag

SEQ ID NO: 2779416 - RNA, 19 nt, Artificial Sequence
  Description of Artificial Sequence: Synthetic oligonucleotide
ggaagaugaccagcaacag

SEQ ID NO: 2779417 - RNA, 19 nt, Artificial Sequence
  Description of Artificial Sequence: Synthetic oligonucleotide
ugcagccgguccaccgagg

SEQ ID NO: 2779418 - RNA, 19 nt, Artificial Sequence
  Description of Artificial Sequence: Synthetic oligonucleotide
cugcccguagugcucaguc

SEQ ID NO: 2779419 - RNA, 19 nt, Artificial Sequence
  Description of Artificial Sequence: Synthetic oligonucleotide
ugcuccagcuuggccaugc

SEQ ID NO: 2779420 - RNA, 19 nt, Artificial Sequence
  Description of Artificial Sequence: Synthetic oligonucleotide
cagcagguggucagccagg

SEQ ID NO: 2779421 - RNA, 19 nt, Artificial Sequence
  Description of Artificial Sequence: Synthetic oligonucleotide
accccgaugcccacugcgc

SEQ ID NO: 2779422 - RNA, 19 nt, Artificial Sequence
  Description of Artificial Sequence: Synthetic oligonucleotide
ugcccguagugcucaguca

SEQ ID NO: 2779423 - RNA, 19 nt, Artificial Sequence
  Description of Artificial Sequence: Synthetic oligonucleotide
cucgucacucagccucugg

SEQ ID NO: 2779424 - RNA, 19 nt, Artificial Sequence
  Description of Artificial Sequence: Synthetic oligonucleotide
cuccagcuuggccaugcag

SEQ ID NO: 2779425 - RNA, 19 nt, Artificial Sequence
  Description of Artificial Sequence: Synthetic oligonucleotide
gcaggccugguucaggaug

SEQ ID NO: 2779426 - RNA, 19 nt, Artificial Sequence
  Description of Artificial Sequence: Synthetic oligonucleotide
uggagacaggccaccccga

SEQ ID NO: 2779427 - RNA, 19 nt, Artificial Sequence
  Description of Artificial Sequence: Synthetic oligonucleotide
ugcuguucaggugcugccu

SEQ ID NO: 2779428 - RNA, 19 nt, Artificial Sequence
  Description of Artificial Sequence: Synthetic oligonucleotide
agguggucagccaggaacu

SEQ ID NO: 2779429 - RNA, 19 nt, Artificial Sequence
  Description of Artificial Sequence: Synthetic oligonucleotide
cucugcggcccuuggcugc

SEQ ID NO: 2779430 - RNA, 19 nt, Artificial Sequence
  Description of Artificial Sequence: Synthetic oligonucleotide
caggaccccugcaaccagc

SEQ ID NO: 2779431 - RNA, 19 nt, Artificial Sequence
  Description of Artificial Sequence: Synthetic oligonucleotide
gcugugaucucugcggccc

SEQ ID NO: 2779432 - RNA, 19 nt, Artificial Sequence
  Description of Artificial Sequence: Synthetic oligonucleotide
gcagccuccuuccaccuug

SEQ ID NO: 2779433 - RNA, 19 nt, Artificial Sequence
  Description of Artificial Sequence: Synthetic oligonucleotide
aggugagaaccaucccgca

SEQ ID NO: 2779434 - RNA, 19 nt, Artificial Sequence
  Description of Artificial Sequence: Synthetic oligonucleotide
ugcugacuuugcaggccug

SEQ ID NO: 2779435 - RNA, 19 nt, Artificial Sequence
  Description of Artificial Sequence: Synthetic oligonucleotide
cacugcgcccaugagcagc

SEQ ID NO: 2779436 - RNA, 19 nt, Artificial Sequence
  Description of Artificial Sequence: Synthetic oligonucleotide
cagccucugguaguauacg

SEQ ID NO: 2779437 - RNA, 19 nt, Artificial Sequence
  Description of Artificial Sequence: Synthetic oligonucleotide
aaauccugcugcagccggu

SEQ ID NO: 2779438 - RNA, 19 nt, Artificial Sequence
  Description of Artificial Sequence: Synthetic oligonucleotide
gagacaagauguacgugcu

SEQ ID NO: 2779439 - RNA, 19 nt, Artificial Sequence
  Description of Artificial Sequence: Synthetic oligonucleotide
acugucgggcacccggcga

SEQ ID NO: 2779440 - RNA, 19 nt, Artificial Sequence
  Description of Artificial Sequence: Synthetic oligonucleotide
ccagcaacaggcaagaaau

SEQ ID NO: 2779441 - RNA, 19 nt, Artificial Sequence
  Description of Artificial Sequence: Synthetic oligonucleotide
ucagcucgucacucagccu

SEQ ID NO: 2779442 - RNA, 19 nt, Artificial Sequence
  Description of Artificial Sequence: Synthetic oligonucleotide
ggccaugcagccuccuucc

SEQ ID NO: 2779443 - RNA, 19 nt, Artificial Sequence
  Description of Artificial Sequence: Synthetic oligonucleotide
acgugcuguguugccaguc

SEQ ID NO: 2779444 - RNA, 19 nt, Artificial Sequence
  Description of Artificial Sequence: Synthetic oligonucleotide
cccacugcgcccaugagca

SEQ ID NO: 2779445 - RNA, 19 nt, Artificial Sequence
  Description of Artificial Sequence: Synthetic oligonucleotide
cuccaccaggaagaugacc

SEQ ID NO: 2779446 - RNA, 19 nt, Artificial Sequence
  Description of Artificial Sequence: Synthetic oligonucleotide
gucagggugcuguucaggu

SEQ ID NO: 2779447 - RNA, 19 nt, Artificial Sequence
  Description of Artificial Sequence: Synthetic oligonucleotide
ggcuucccgagacaagaug

SEQ ID NO: 2779448 - RNA, 19 nt, Artificial Sequence
  Description of Artificial Sequence: Synthetic oligonucleotide
cugucgggcacccggcgac

SEQ ID NO: 2779449 - RNA, 19 nt, Artificial Sequence
  Description of Artificial Sequence: Synthetic oligonucleotide
agcagcagguggucagcca

SEQ ID NO: 2779450 - RNA, 19 nt, Artificial Sequence
  Description of Artificial Sequence: Synthetic oligonucleotide
ugcggcccuuggcugcccg

SEQ ID NO: 2779451 - RNA, 19 nt, Artificial Sequence
  Description of Artificial Sequence: Synthetic oligonucleotide
ccuuccaccuuguagaugu

SEQ ID NO: 2779452 - RNA, 19 nt, Artificial Sequence
  Description of Artificial Sequence: Synthetic oligonucleotide
ggggcauccuuuaauaaaa

SEQ ID NO: 2779453 - RNA, 19 nt, Artificial Sequence
  Description of Artificial Sequence: Synthetic oligonucleotide
uccuuccaccuuguagaug

SEQ ID NO: 2779454 - RNA, 19 nt, Artificial Sequence
  Description of Artificial Sequence: Synthetic oligonucleotide
gguucaggaugugggaaug

SEQ ID NO: 2779455 - RNA, 19 nt, Artificial Sequence
  Description of Artificial Sequence: Synthetic oligonucleotide
cuuugcaggccugguucag

SEQ ID NO: 2779456 - RNA, 19 nt, Artificial Sequence
  Description of Artificial Sequence: Synthetic oligonucleotide
uggagccuucggugcaagc

SEQ ID NO: 2779457 - RNA, 19 nt, Artificial Sequence
  Description of Artificial Sequence: Synthetic oligonucleotide
gagcagcagguggucagcc

SEQ ID NO: 2779458 - RNA, 19 nt, Artificial Sequence
  Description of Artificial Sequence: Synthetic oligonucleotide
gcuguguugccagucggcc

SEQ ID NO: 2779459 - RNA, 19 nt, Artificial Sequence
  Description of Artificial Sequence: Synthetic oligonucleotide
gugccaggaccccugcaac

SEQ ID NO: 2779460 - RNA, 19 nt, Artificial Sequence
  Description of Artificial Sequence: Synthetic oligonucleotide
ugggcccuuggcaggcuac

SEQ ID NO: 2779461 - RNA, 19 nt, Artificial Sequence
  Description of Artificial Sequence: Synthetic oligonucleotide
gcugacuuugcaggccugg

SEQ ID NO: 2779462 - RNA, 19 nt, Artificial Sequence
  Description of Artificial Sequence: Synthetic oligonucleotide
cagucagggugcuguucag

SEQ ID NO: 2779463 - RNA, 19 nt, Artificial Sequence
  Description of Artificial Sequence: Synthetic oligonucleotide
cuuggcugcccguagugcu

SEQ ID NO: 2779464 - RNA, 19 nt, Artificial Sequence
  Description of Artificial Sequence: Synthetic oligonucleotide
gagcuguuacugccacaac

SEQ ID NO: 2779465 - RNA, 19 nt, Artificial Sequence
  Description of Artificial Sequence: Synthetic oligonucleotide
uuggccaugcagccuccuu

SEQ ID NO: 2779466 - RNA, 19 nt, Artificial Sequence
  Description of Artificial Sequence: Synthetic oligonucleotide
cugcagccgguccaccgag

SEQ ID NO: 2779467 - RNA, 19 nt, Artificial Sequence
  Description of Artificial Sequence: Synthetic oligonucleotide
agucggccgagcuguuacu

SEQ ID NO: 2779468 - RNA, 19 nt, Artificial Sequence
  Description of Artificial Sequence: Synthetic oligonucleotide
augcagccuccuuccaccu

SEQ ID NO: 2779469 - RNA, 19 nt, Artificial Sequence
  Description of Artificial Sequence: Synthetic oligonucleotide
ucugcggcccuuggcugcc

SEQ ID NO: 2779470 - RNA, 19 nt, Artificial Sequence
  Description of Artificial Sequence: Synthetic oligonucleotide
uacgugugccaggaccccu

SEQ ID NO: 2779471 - RNA, 19 nt, Artificial Sequence
  Description of Artificial Sequence: Synthetic oligonucleotide
gacaggccaccccgaugcc

SEQ ID NO: 2779472 - RNA, 19 nt, Artificial Sequence
  Description of Artificial Sequence: Synthetic oligonucleotide
gcccacugcgcccaugagc

SEQ ID NO: 2779473 - RNA, 19 nt, Artificial Sequence
  Description of Artificial Sequence: Synthetic oligonucleotide
gggcauccuuuaauaaaag

SEQ ID NO: 2779474 - RNA, 19 nt, Artificial Sequence
  Description of Artificial Sequence: Synthetic oligonucleotide
gucggccgagcuguuacug

SEQ ID NO: 2779475 - RNA, 19 nt, Artificial Sequence
  Description of Artificial Sequence: Synthetic oligonucleotide
agugcucagucagggugcu

SEQ ID NO: 2779476 - RNA, 19 nt, Artificial Sequence
  Description of Artificial Sequence: Synthetic oligonucleotide
gccucugguaguauacgug

SEQ ID NO: 2779477 - RNA, 19 nt, Artificial Sequence
  Description of Artificial Sequence: Synthetic oligonucleotide
acugcgcccaugagcagca

SEQ ID NO: 2779478 - RNA, 19 nt, Artificial Sequence
  Description of Artificial Sequence: Synthetic oligonucleotide
caggggcauccuuuaauaa

SEQ ID NO: 2779479 - RNA, 19 nt, Artificial Sequence
  Description of Artificial Sequence: Synthetic oligonucleotide
cuucccgagacaagaugua

SEQ ID NO: 2779480 - RNA, 19 nt, Artificial Sequence
  Description of Artificial Sequence: Synthetic oligonucleotide
gcaggcuacaggggcaucc

SEQ ID NO: 2779481 - RNA, 19 nt, Artificial Sequence
  Description of Artificial Sequence: Synthetic oligonucleotide
gccucagcucgucacucag

SEQ ID NO: 2779482 - RNA, 19 nt, Artificial Sequence
  Description of Artificial Sequence: Synthetic oligonucleotide
ccguagugcucagucaggg

SEQ ID NO: 2779483 - RNA, 19 nt, Artificial Sequence
  Description of Artificial Sequence: Synthetic oligonucleotide
gcaaccagcuccaccagga

SEQ ID NO: 2779484 - RNA, 19 nt, Artificial Sequence
  Description of Artificial Sequence: Synthetic oligonucleotide
cgugcuguguugccagucg

SEQ ID NO: 2779485 - RNA, 19 nt, Artificial Sequence
  Description of Artificial Sequence: Synthetic oligonucleotide
guugccagucggccgagcu

SEQ ID NO: 2779486 - RNA, 19 nt, Artificial Sequence
  Description of Artificial Sequence: Synthetic oligonucleotide
gcagcaacugucgggcacc

SEQ ID NO: 2779487 - RNA, 19 nt, Artificial Sequence
  Description of Artificial Sequence: Synthetic oligonucleotide
cgcagaucuggagacaggc

SEQ ID NO: 2779488 - RNA, 19 nt, Artificial Sequence
  Description of Artificial Sequence: Synthetic oligonucleotide
cugguucaggaugugggaa

SEQ ID NO: 2779489 - RNA, 19 nt, Artificial Sequence
  Description of Artificial Sequence: Synthetic oligonucleotide
ccuuggcaggcuacagggg

SEQ ID NO: 2779490 - RNA, 19 nt, Artificial Sequence
  Description of Artificial Sequence: Synthetic oligonucleotide
ggcugugaucucugcggcc

SEQ ID NO: 2779491 - RNA, 19 nt, Artificial Sequence
  Description of Artificial Sequence: Synthetic oligonucleotide
gugggaaugugggcccuug

SEQ ID NO: 2779492 - RNA, 19 nt, Artificial Sequence
  Description of Artificial Sequence: Synthetic oligonucleotide
ugcaggccugguucaggau

SEQ ID NO: 2779493 - RNA, 19 nt, Artificial Sequence
  Description of Artificial Sequence: Synthetic oligonucleotide
gcagccgguccaccgaggc

SEQ ID NO: 2779494 - RNA, 19 nt, Artificial Sequence
  Description of Artificial Sequence: Synthetic oligonucleotide
cucagccucugguaguaua

SEQ ID NO: 2779495 - RNA, 19 nt, Artificial Sequence
  Description of Artificial Sequence: Synthetic oligonucleotide
gacccugggcuucccgaga

SEQ ID NO: 2779496 - RNA, 19 nt, Artificial Sequence
  Description of Artificial Sequence: Synthetic oligonucleotide
cugccacaacauuugaaau

SEQ ID NO: 2779497 - RNA, 19 nt, Artificial Sequence
  Description of Artificial Sequence: Synthetic oligonucleotide
ggaacugcuccagcuuggc

SEQ ID NO: 2779498 - RNA, 19 nt, Artificial Sequence
  Description of Artificial Sequence: Synthetic oligonucleotide
gcagaucuggagacaggcc

SEQ ID NO: 2779499 - RNA, 19 nt, Artificial Sequence
  Description of Artificial Sequence: Synthetic oligonucleotide
cgaggcugugaucucugcg

SEQ ID NO: 2779500 - RNA, 19 nt, Artificial Sequence
  Description of Artificial Sequence: Synthetic oligonucleotide
cccguagugcucagucagg

SEQ ID NO: 2779501 - RNA, 19 nt, Artificial Sequence
  Description of Artificial Sequence: Synthetic oligonucleotide
caagauguacgugcugugu

SEQ ID NO: 2779502 - RNA, 19 nt, Artificial Sequence
  Description of Artificial Sequence: Synthetic oligonucleotide
accccugcaaccagcucca

SEQ ID NO: 2779503 - RNA, 19 nt, Artificial Sequence
  Description of Artificial Sequence: Synthetic oligonucleotide
ucggugcaagcagcaggug

SEQ ID NO: 2779504 - RNA, 19 nt, Artificial Sequence
  Description of Artificial Sequence: Synthetic oligonucleotide
agcaacugucgggcacccg

SEQ ID NO: 2779505 - RNA, 19 nt, Artificial Sequence
  Description of Artificial Sequence: Synthetic oligonucleotide
accgaggcugugaucucug

SEQ ID NO: 2779506 - RNA, 19 nt, Artificial Sequence
  Description of Artificial Sequence: Synthetic oligonucleotide
aggaccccugcaaccagcu

SEQ ID NO: 2779507 - RNA, 19 nt, Artificial Sequence
  Description of Artificial Sequence: Synthetic oligonucleotide
ggccugguucaggaugugg

SEQ ID NO: 2779508 - RNA, 19 nt, Artificial Sequence
  Description of Artificial Sequence: Synthetic oligonucleotide
cagcgugccaccacugucu

SEQ ID NO: 2779509 - RNA, 19 nt, Artificial Sequence
  Description of Artificial Sequence: Synthetic oligonucleotide
agcgugccaccacugucuu

SEQ ID NO: 2779510 - RNA, 19 nt, Artificial Sequence
  Description of Artificial Sequence: Synthetic oligonucleotide
ugucgggcacccggcgacc

SEQ ID NO: 2779511 - RNA, 19 nt, Artificial Sequence
  Description of Artificial Sequence: Synthetic oligonucleotide
ucccgcagaucuggagaca

SEQ ID NO: 2779512 - RNA, 19 nt, Artificial Sequence
  Description of Artificial Sequence: Synthetic oligonucleotide
acgugugccaggaccccug

SEQ ID NO: 2779513 - RNA, 19 nt, Artificial Sequence
  Description of Artificial Sequence: Synthetic oligonucleotide
gcuacaggggcauccuuua

SEQ ID NO: 2779514 - RNA, 19 nt, Artificial Sequence
  Description of Artificial Sequence: Synthetic oligonucleotide
ugcagccuccuuccaccuu

SEQ ID NO: 2779515 - RNA, 19 nt, Artificial Sequence
  Description of Artificial Sequence: Synthetic oligonucleotide
aggccaccccgaugcccac

SEQ ID NO: 2779516 - RNA, 19 nt, Artificial Sequence
  Description of Artificial Sequence: Synthetic oligonucleotide
cugccucagcucgucacuc

SEQ ID NO: 2779517 - RNA, 19 nt, Artificial Sequence
  Description of Artificial Sequence: Synthetic oligonucleotide
ccaugcagccuccuuccac

SEQ ID NO: 2779518 - RNA, 19 nt, Artificial Sequence
  Description of Artificial Sequence: Synthetic oligonucleotide
uggcaggcuacaggggcau

SEQ ID NO: 2779519 - RNA, 19 nt, Artificial Sequence
  Description of Artificial Sequence: Synthetic oligonucleotide
cccgcagaucuggagacag

SEQ ID NO: 2779520 - RNA, 19 nt, Artificial Sequence
  Description of Artificial Sequence: Synthetic oligonucleotide
uguugccagucggccgagc

SEQ ID NO: 2779521 - RNA, 19 nt, Artificial Sequence
  Description of Artificial Sequence: Synthetic oligonucleotide
ccaucccgcagaucuggag

SEQ ID NO: 2779522 - RNA, 19 nt, Artificial Sequence
  Description of Artificial Sequence: Synthetic oligonucleotide
gcuguuacugccacaacau

SEQ ID NO: 2779523 - RNA, 19 nt, Artificial Sequence
  Description of Artificial Sequence: Synthetic oligonucleotide
ccucugguaguauacgugu

SEQ ID NO: 2779524 - RNA, 19 nt, Artificial Sequence
  Description of Artificial Sequence: Synthetic oligonucleotide
ugugaucucugcggcccuu

SEQ ID NO: 2779525 - RNA, 19 nt, Artificial Sequence
  Description of Artificial Sequence: Synthetic oligonucleotide
cacccggcgacccugggcu

SEQ ID NO: 2779526 - RNA, 19 nt, Artificial Sequence
  Description of Artificial Sequence: Synthetic oligonucleotide
ccugguucaggauguggga

SEQ ID NO: 2779527 - RNA, 19 nt, Artificial Sequence
  Description of Artificial Sequence: Synthetic oligonucleotide
cagcaacugucgggcaccc

SEQ ID NO: 2779528 - RNA, 19 nt, Artificial Sequence
  Description of Artificial Sequence: Synthetic oligonucleotide
ccucagcucgucacucagc

SEQ ID NO: 2779529 - RNA, 19 nt, Artificial Sequence
  Description of Artificial Sequence: Synthetic oligonucleotide
agcucgucacucagccucu

SEQ ID NO: 2779530 - RNA, 19 nt, Artificial Sequence
  Description of Artificial Sequence: Synthetic oligonucleotide
ucgggcacccggcgacccu

SEQ ID NO: 2779531 - RNA, 19 nt, Artificial Sequence
  Description of Artificial Sequence: Synthetic oligonucleotide
augugggaaugugggcccu

SEQ ID NO: 2779532 - RNA, 19 nt, Artificial Sequence
  Description of Artificial Sequence: Synthetic oligonucleotide
cuggagccuucggugcaag

SEQ ID NO: 2779533 - RNA, 19 nt, Artificial Sequence
  Description of Artificial Sequence: Synthetic oligonucleotide
cugcugacuuugcaggccu

SEQ ID NO: 2779534 - RNA, 19 nt, Artificial Sequence
  Description of Artificial Sequence: Synthetic oligonucleotide
cagcaacaggcaagaaaua

SEQ ID NO: 2779535 - RNA, 19 nt, Artificial Sequence
  Description of Artificial Sequence: Synthetic oligonucleotide
gagaaccaucccgcagauc

SEQ ID NO: 2779536 - RNA, 19 nt, Artificial Sequence
  Description of Artificial Sequence: Synthetic oligonucleotide
cccugcaaccagcuccacc

SEQ ID NO: 2779537 - RNA, 19 nt, Artificial Sequence
  Description of Artificial Sequence: Synthetic oligonucleotide
gccgagcuguuacugccac

SEQ ID NO: 2779538 - RNA, 19 nt, Artificial Sequence
  Description of Artificial Sequence: Synthetic oligonucleotide
cuacaggggcauccuuuaa

SEQ ID NO: 2779539 - RNA, 19 nt, Artificial Sequence
  Description of Artificial Sequence: Synthetic oligonucleotide
gccaccccgaugcccacug

SEQ ID NO: 2779540 - RNA, 19 nt, Artificial Sequence
  Description of Artificial Sequence: Synthetic oligonucleotide
gguggucagccaggaacug

SEQ ID NO: 2779541 - RNA, 19 nt, Artificial Sequence
  Description of Artificial Sequence: Synthetic oligonucleotide
guuggaggggugggcccgc

SEQ ID NO: 2779542 - RNA, 19 nt, Artificial Sequence
  Description of Artificial Sequence: Synthetic oligonucleotide
ugugggaaugugggcccuu

SEQ ID NO: 2779543 - RNA, 19 nt, Artificial Sequence
  Description of Artificial Sequence: Synthetic oligonucleotide
ggcgacccugggcuucccg

SEQ ID NO: 2779544 - RNA, 19 nt, Artificial Sequence
  Description of Artificial Sequence: Synthetic oligonucleotide
aggcuacaggggcauccuu

SEQ ID NO: 2779545 - RNA, 19 nt, Artificial Sequence
  Description of Artificial Sequence: Synthetic oligonucleotide
ccccgaugcccacugcgcc

SEQ ID NO: 2779546 - RNA, 19 nt, Artificial Sequence
  Description of Artificial Sequence: Synthetic oligonucleotide
gcugcagccgguccaccga

SEQ ID NO: 2779547 - RNA, 19 nt, Artificial Sequence
  Description of Artificial Sequence: Synthetic oligonucleotide
cggccgagcuguuacugcc

SEQ ID NO: 2779548 - RNA, 19 nt, Artificial Sequence
  Description of Artificial Sequence: Synthetic oligonucleotide
ccuuggcugcccguagugc

SEQ ID NO: 2779549 - RNA, 19 nt, Artificial Sequence
  Description of Artificial Sequence: Synthetic oligonucleotide
gcuggccacagcgugccac

SEQ ID NO: 2779550 - RNA, 19 nt, Artificial Sequence
  Description of Artificial Sequence: Synthetic oligonucleotide
cccgagacaagauguacgu

SEQ ID NO: 2779551 - RNA, 19 nt, Artificial Sequence
  Description of Artificial Sequence: Synthetic oligonucleotide
ggcccuuggcugcccguag

SEQ ID NO: 2779552 - RNA, 19 nt, Artificial Sequence
  Description of Artificial Sequence: Synthetic oligonucleotide
guucaggaugugggaaugu

SEQ ID NO: 2779553 - RNA, 19 nt, Artificial Sequence
  Description of Artificial Sequence: Synthetic oligonucleotide
gcccgcuggccacagcgug

SEQ ID NO: 2779554 - RNA, 19 nt, Artificial Sequence
  Description of Artificial Sequence: Synthetic oligonucleotide
cccgcuggccacagcgugc

SEQ ID NO: 2779555 - RNA, 19 nt, Artificial Sequence
  Description of Artificial Sequence: Synthetic oligonucleotide
cacucagccucugguagua

SEQ ID NO: 2779556 - RNA, 19 nt, Artificial Sequence
  Description of Artificial Sequence: Synthetic oligonucleotide
cccuuggcugcccguagug

SEQ ID NO: 2779557 - RNA, 19 nt, Artificial Sequence
  Description of Artificial Sequence: Synthetic oligonucleotide
accaucccgcagaucugga

SEQ ID NO: 2779558 - RNA, 19 nt, Artificial Sequence
  Description of Artificial Sequence: Synthetic oligonucleotide
gucgggcacccggcgaccc

SEQ ID NO: 2779559 - RNA, 19 nt, Artificial Sequence
  Description of Artificial Sequence: Synthetic oligonucleotide
ugugggcccuuggcaggcu

SEQ ID NO: 2779560 - RNA, 19 nt, Artificial Sequence
  Description of Artificial Sequence: Synthetic oligonucleotide
ccaccacugucuugcagca

SEQ ID NO: 2779561 - RNA, 19 nt, Artificial Sequence
  Description of Artificial Sequence: Synthetic oligonucleotide
guguugccagucggccgag

SEQ ID NO: 2779562 - RNA, 19 nt, Artificial Sequence
  Description of Artificial Sequence: Synthetic oligonucleotide
gcacccggcgacccugggc

SEQ ID NO: 2779563 - RNA, 19 nt, Artificial Sequence
  Description of Artificial Sequence: Synthetic oligonucleotide
ggugcugccucagcucguc

SEQ ID NO: 2779564 - RNA, 19 nt, Artificial Sequence
  Description of Artificial Sequence: Synthetic oligonucleotide
ccuucggugcaagcagcag

SEQ ID NO: 2779565 - RNA, 19 nt, Artificial Sequence
  Description of Artificial Sequence: Synthetic oligonucleotide
ccaggaccccugcaaccag

SEQ ID NO: 2779566 - RNA, 19 nt, Artificial Sequence
  Description of Artificial Sequence: Synthetic oligonucleotide
guccaccgaggcugugauc

SEQ ID NO: 2779567 - RNA, 19 nt, Artificial Sequence
  Description of Artificial Sequence: Synthetic oligonucleotide
ccgaggcugugaucucugc

SEQ ID NO: 2779568 - RNA, 19 nt, Artificial Sequence
  Description of Artificial Sequence: Synthetic oligonucleotide
cuguuacugccacaacauu

SEQ ID NO: 2779569 - RNA, 19 nt, Artificial Sequence
  Description of Artificial Sequence: Synthetic oligonucleotide
cgagcuguuacugccacaa

SEQ ID NO: 2779570 - RNA, 19 nt, Artificial Sequence
  Description of Artificial Sequence: Synthetic oligonucleotide
ugggcccgcuggccacagc

SEQ ID NO: 2779571 - RNA, 19 nt, Artificial Sequence
  Description of Artificial Sequence: Synthetic oligonucleotide
ccgagacaagauguacgug

SEQ ID NO: 2779572 - RNA, 19 nt, Artificial Sequence
  Description of Artificial Sequence: Synthetic oligonucleotide
cacagcgugccaccacugu

SEQ ID NO: 2779573 - RNA, 19 nt, Artificial Sequence
  Description of Artificial Sequence: Synthetic oligonucleotide
gccacagcgugccaccacu

SEQ ID NO: 2779574 - RNA, 19 nt, Artificial Sequence
  Description of Artificial Sequence: Synthetic oligonucleotide
acucagccucugguaguau

SEQ ID NO: 2779575 - RNA, 19 nt, Artificial Sequence
  Description of Artificial Sequence: Synthetic oligonucleotide
cuccuuccaccuuguagau

SEQ ID NO: 2779576 - RNA, 19 nt, Artificial Sequence
  Description of Artificial Sequence: Synthetic oligonucleotide
ccacagcgugccaccacug

SEQ ID NO: 2779577 - RNA, 19 nt, Artificial Sequence
  Description of Artificial Sequence: Synthetic oligonucleotide
uuggaggggugggcccgcu

SEQ ID NO: 2779578 - RNA, 19 nt, Artificial Sequence
  Description of Artificial Sequence: Synthetic oligonucleotide
aggccugguucaggaugug

SEQ ID NO: 2779579 - RNA, 19 nt, Artificial Sequence
  Description of Artificial Sequence: Synthetic oligonucleotide
ggggugggcccgcuggcca

SEQ ID NO: 2779580 - RNA, 19 nt, Artificial Sequence
  Description of Artificial Sequence: Synthetic oligonucleotide
cgacccugggcuucccgag

SEQ ID NO: 2779581 - RNA, 19 nt, Artificial Sequence
  Description of Artificial Sequence: Synthetic oligonucleotide
cccaugagcagcagguggu

SEQ ID NO: 2779582 - RNA, 19 nt, Artificial Sequence
  Description of Artificial Sequence: Synthetic oligonucleotide
cugcugcagccgguccacc

SEQ ID NO: 2779583 - RNA, 19 nt, Artificial Sequence
  Description of Artificial Sequence: Synthetic oligonucleotide
cugacuuugcaggccuggu

SEQ ID NO: 2779584 - RNA, 19 nt, Artificial Sequence
  Description of Artificial Sequence: Synthetic oligonucleotide
gugccaccacugucuugca

SEQ ID NO: 2779585 - RNA, 19 nt, Artificial Sequence
  Description of Artificial Sequence: Synthetic oligonucleotide
cggugcaagcagcagguga

SEQ ID NO: 2779586 - RNA, 19 nt, Artificial Sequence
  Description of Artificial Sequence: Synthetic oligonucleotide
ggcacccggcgacccuggg

SEQ ID NO: 2779587 - RNA, 19 nt, Artificial Sequence
  Description of Artificial Sequence: Synthetic oligonucleotide
aggugcugccucagcucgu

SEQ ID NO: 2779588 - RNA, 19 nt, Artificial Sequence
  Description of Artificial Sequence: Synthetic oligonucleotide
gaccagcaacaggcaagaa

SEQ ID NO: 2779589 - RNA, 19 nt, Artificial Sequence
  Description of Artificial Sequence: Synthetic oligonucleotide
gguccaccgaggcugugau

SEQ ID NO: 2779590 - RNA, 19 nt, Artificial Sequence
  Description of Artificial Sequence: Synthetic oligonucleotide
ccgcuggccacagcgugcc

SEQ ID NO: 2779591 - RNA, 19 nt, Artificial Sequence
  Description of Artificial Sequence: Synthetic oligonucleotide
agccuccuuccaccuugua

SEQ ID NO: 2779592 - RNA, 19 nt, Artificial Sequence
  Description of Artificial Sequence: Synthetic oligonucleotide
gggugggcccgcuggccac

SEQ ID NO: 2779593 - RNA, 19 nt, Artificial Sequence
  Description of Artificial Sequence: Synthetic oligonucleotide
gccuucggugcaagcagca

SEQ ID NO: 2779594 - RNA, 19 nt, Artificial Sequence
  Description of Artificial Sequence: Synthetic oligonucleotide
gugcucagucagggugcug

SEQ ID NO: 2779595 - RNA, 19 nt, Artificial Sequence
  Description of Artificial Sequence: Synthetic oligonucleotide
gugggcccgcuggccacag

SEQ ID NO: 2779596 - RNA, 19 nt, Artificial Sequence
  Description of Artificial Sequence: Synthetic oligonucleotide
ggaccccugcaaccagcuc

SEQ ID NO: 2779597 - RNA, 19 nt, Artificial Sequence
  Description of Artificial Sequence: Synthetic oligonucleotide
ccugggcuucccgagacaa

SEQ ID NO: 2779598 - RNA, 19 nt, Artificial Sequence
  Description of Artificial Sequence: Synthetic oligonucleotide
gugggcccuuggcaggcua

SEQ ID NO: 2779599 - RNA, 19 nt, Artificial Sequence
  Description of Artificial Sequence: Synthetic oligonucleotide
ggucagccaggaacugcuc

SEQ ID NO: 2779600 - RNA, 19 nt, Artificial Sequence
  Description of Artificial Sequence: Synthetic oligonucleotide
ggagacaggccaccccgau

SEQ ID NO: 2779601 - RNA, 19 nt, Artificial Sequence
  Description of Artificial Sequence: Synthetic oligonucleotide
ggccgagcuguuacugcca

SEQ ID NO: 2779602 - RNA, 19 nt, Artificial Sequence
  Description of Artificial Sequence: Synthetic oligonucleotide
cgugugccaggaccccugc

SEQ ID NO: 2779603 - RNA, 19 nt, Artificial Sequence
  Description of Artificial Sequence: Synthetic oligonucleotide
gcuuggccaugcagccucc

SEQ ID NO: 2779604 - RNA, 19 nt, Artificial Sequence
  Description of Artificial Sequence: Synthetic oligonucleotide
caggcuacaggggcauccu

SEQ ID NO: 2779605 - RNA, 19 nt, Artificial Sequence
  Description of Artificial Sequence: Synthetic oligonucleotide
gcgugccaccacugucuug

SEQ ID NO: 2779606 - RNA, 19 nt, Artificial Sequence
  Description of Artificial Sequence: Synthetic oligonucleotide
gccaugcagccuccuucca

SEQ ID NO: 2779607 - RNA, 19 nt, Artificial Sequence
  Description of Artificial Sequence: Synthetic oligonucleotide
ggcuacaggggcauccuuu

SEQ ID NO: 2779608 - RNA, 19 nt, Artificial Sequence
  Description of Artificial Sequence: Synthetic oligonucleotide
caccgaggcugugaucucu

SEQ ID NO: 2779609 - RNA, 19 nt, Artificial Sequence
  Description of Artificial Sequence: Synthetic oligonucleotide
cugugaucucugcggcccu

SEQ ID NO: 2779610 - RNA, 19 nt, Artificial Sequence
  Description of Artificial Sequence: Synthetic oligonucleotide
ccacugcgcccaugagcag

SEQ ID NO: 2779611 - RNA, 19 nt, Artificial Sequence
  Description of Artificial Sequence: Synthetic oligonucleotide
cgucacucagccucuggua

SEQ ID NO: 2779612 - RNA, 19 nt, Artificial Sequence
  Description of Artificial Sequence: Synthetic oligonucleotide
gggcacccggcgacccugg

SEQ ID NO: 2779613 - RNA, 19 nt, Artificial Sequence
  Description of Artificial Sequence: Synthetic oligonucleotide
ccaccgaggcugugaucuc

SEQ ID NO: 2779614 - RNA, 19 nt, Artificial Sequence
  Description of Artificial Sequence: Synthetic oligonucleotide
gcucgucacucagccucug

SEQ ID NO: 2779615 - RNA, 19 nt, Artificial Sequence
  Description of Artificial Sequence: Synthetic oligonucleotide
acccggcgacccugggcuu

SEQ ID NO: 2779616 - RNA, 19 nt, Artificial Sequence
  Description of Artificial Sequence: Synthetic oligonucleotide
caccacugucuugcagcaa

SEQ ID NO: 2779617 - RNA, 19 nt, Artificial Sequence
  Description of Artificial Sequence: Synthetic oligonucleotide
gcuggagccuucggugcaa

SEQ ID NO: 2779618 - RNA, 19 nt, Artificial Sequence
  Description of Artificial Sequence: Synthetic oligonucleotide
ccacaacauuugaaauccu

SEQ ID NO: 2779619 - RNA, 19 nt, Artificial Sequence
  Description of Artificial Sequence: Synthetic oligonucleotide
cagccgguccaccgaggcu

SEQ ID NO: 2779620 - RNA, 19 nt, Artificial Sequence
  Description of Artificial Sequence: Synthetic oligonucleotide
cugcggcccuuggcugccc

SEQ ID NO: 2779621 - RNA, 19 nt, Artificial Sequence
  Description of Artificial Sequence: Synthetic oligonucleotide
ccaccccgaugcccacugc

SEQ ID NO: 2779622 - RNA, 19 nt, Artificial Sequence
  Description of Artificial Sequence: Synthetic oligonucleotide
ccgaugcccacugcgccca

SEQ ID NO: 2779623 - RNA, 19 nt, Artificial Sequence
  Description of Artificial Sequence: Synthetic oligonucleotide
cuuccaccuuguagauguu

SEQ ID NO: 2779624 - RNA, 19 nt, Artificial Sequence
  Description of Artificial Sequence: Synthetic oligonucleotide
cuuggccaugcagccuccu

SEQ ID NO: 2779625 - RNA, 19 nt, Artificial Sequence
  Description of Artificial Sequence: Synthetic oligonucleotide
ccggcgacccugggcuucc

SEQ ID NO: 2779626 - RNA, 19 nt, Artificial Sequence
  Description of Artificial Sequence: Synthetic oligonucleotide
cagcuuggccaugcagccu

SEQ ID NO: 2779627 - RNA, 19 nt, Artificial Sequence
  Description of Artificial Sequence: Synthetic oligonucleotide
cguagugcucagucagggu

SEQ ID NO: 2779628 - RNA, 19 nt, Artificial Sequence
  Description of Artificial Sequence: Synthetic oligonucleotide
gcccuuggcugcccguagu

SEQ ID NO: 2779629 - RNA, 19 nt, Artificial Sequence
  Description of Artificial Sequence: Synthetic oligonucleotide
ggcaggcuacaggggcauc

SEQ ID NO: 2779630 - RNA, 19 nt, Artificial Sequence
  Description of Artificial Sequence: Synthetic oligonucleotide
cgcccaugagcagcaggug

SEQ ID NO: 2779631 - RNA, 19 nt, Artificial Sequence
  Description of Artificial Sequence: Synthetic oligonucleotide
cccggcgacccugggcuuc

SEQ ID NO: 2779632 - RNA, 19 nt, Artificial Sequence
  Description of Artificial Sequence: Synthetic oligonucleotide
cccugggcuucccgagaca

SEQ ID NO: 2779633 - RNA, 19 nt, Artificial Sequence
  Description of Artificial Sequence: Synthetic oligonucleotide
gggcuucccgagacaagau

SEQ ID NO: 2779634 - RNA, 19 nt, Artificial Sequence
  Description of Artificial Sequence: Synthetic oligonucleotide
cgggcacccggcgacccug

SEQ ID NO: 2779635 - RNA, 19 nt, Artificial Sequence
  Description of Artificial Sequence: Synthetic oligonucleotide
cgguccaccgaggcuguga

SEQ ID NO: 2779636 - RNA, 19 nt, Artificial Sequence
  Description of Artificial Sequence: Synthetic oligonucleotide
ggcccgcuggccacagcgu

SEQ ID NO: 2779637 - RNA, 19 nt, Artificial Sequence
  Description of Artificial Sequence: Synthetic oligonucleotide
ccagucggccgagcuguua

SEQ ID NO: 2779638 - RNA, 19 nt, Artificial Sequence
  Description of Artificial Sequence: Synthetic oligonucleotide
ccagcuccaccaggaagau

SEQ ID NO: 2779639 - RNA, 19 nt, Artificial Sequence
  Description of Artificial Sequence: Synthetic oligonucleotide
gcggcccuuggcugcccgu

SEQ ID NO: 2779640 - RNA, 19 nt, Artificial Sequence
  Description of Artificial Sequence: Synthetic oligonucleotide
ccccugcaaccagcuccac

SEQ ID NO: 2779641 - RNA, 19 nt, Artificial Sequence
  Description of Artificial Sequence: Synthetic oligonucleotide
gccgguccaccgaggcugu

SEQ ID NO: 2779642 - RNA, 19 nt, Artificial Sequence
  Description of Artificial Sequence: Synthetic oligonucleotide
ggccaccccgaugcccacu

SEQ ID NO: 2779643 - RNA, 19 nt, Artificial Sequence
  Description of Artificial Sequence: Synthetic oligonucleotide
ccgguccaccgaggcugug

SEQ ID NO: 2779644 - RNA, 19 nt, Artificial Sequence
  Description of Artificial Sequence: Synthetic oligonucleotide
cggcccuuggcugcccgua

SEQ ID NO: 2779645 - RNA, 19 nt, Artificial Sequence
  Description of Artificial Sequence: Synthetic oligonucleotide
cggcgacccugggcuuccc

SEQ ID NO: 2779646 - RNA, 19 nt, Artificial Sequence
  Description of Artificial Sequence: Synthetic oligonucleotide
cgcuggccacagcgugcca

SEQ ID NO: 2779647 - RNA, 19 nt, Artificial Sequence
  Description of Artificial Sequence: Synthetic oligonucleotide
gccagucggccgagcuguu

SEQ ID NO: 2779648 - RNA, 19 nt, Artificial Sequence
  Description of Artificial Sequence: Synthetic oligonucleotide
aaagaaacuguauaauggg

SEQ ID NO: 2779649 - RNA, 19 nt, Artificial Sequence
  Description of Artificial Sequence: Synthetic oligonucleotide
acagcaacuguucauaggc

SEQ ID NO: 2779650 - RNA, 19 nt, Artificial Sequence
  Description of Artificial Sequence: Synthetic oligonucleotide
uuagcacucagcuucaccg

SEQ ID NO: 2779651 - RNA, 19 nt, Artificial Sequence
  Description of Artificial Sequence: Synthetic oligonucleotide
aacgagagagaguaugagc

SEQ ID NO: 2779652 - RNA, 19 nt, Artificial Sequence
  Description of Artificial Sequence: Synthetic oligonucleotide
uguauaaugggcagaacag

SEQ ID NO: 2779653 - RNA, 19 nt, Artificial Sequence
  Description of Artificial Sequence: Synthetic oligonucleotide
aaagagaaugccaaacacc

SEQ ID NO: 2779654 - RNA, 19 nt, Artificial Sequence
  Description of Artificial Sequence: Synthetic oligonucleotide
ugcagauacauccagaccu

SEQ ID NO: 2779655 - RNA, 19 nt, Artificial Sequence
  Description of Artificial Sequence: Synthetic oligonucleotide
uaaaagaaacuguauaaug

SEQ ID NO: 2779656 - RNA, 19 nt, Artificial Sequence
  Description of Artificial Sequence: Synthetic oligonucleotide
uccagaauccuccagcugg

SEQ ID NO: 2779657 - RNA, 19 nt, Artificial Sequence
  Description of Artificial Sequence: Synthetic oligonucleotide
uaggaugucaccaaacgag

SEQ ID NO: 2779658 - RNA, 19 nt, Artificial Sequence
  Description of Artificial Sequence: Synthetic oligonucleotide
gauuccuuaguguuaaaag

SEQ ID NO: 2779659 - RNA, 19 nt, Artificial Sequence
  Description of Artificial Sequence: Synthetic oligonucleotide
aacacaguccagaugacgc

SEQ ID NO: 2779660 - RNA, 19 nt, Artificial Sequence
  Description of Artificial Sequence: Synthetic oligonucleotide
uuaguguuaaaagaaacug

SEQ ID NO: 2779661 - RNA, 19 nt, Artificial Sequence
  Description of Artificial Sequence: Synthetic oligonucleotide
uuagagacccuucguaucg

SEQ ID NO: 2779662 - RNA, 19 nt, Artificial Sequence
  Description of Artificial Sequence: Synthetic oligonucleotide
uguuaaaagaaacuguaua

SEQ ID NO: 2779663 - RNA, 19 nt, Artificial Sequence
  Description of Artificial Sequence: Synthetic oligonucleotide
aacaggaugagguuuccag

SEQ ID NO: 2779664 - RNA, 19 nt, Artificial Sequence
  Description of Artificial Sequence: Synthetic oligonucleotide
ucugguugaacacagucca

SEQ ID NO: 2779665 - RNA, 19 nt, Artificial Sequence
  Description of Artificial Sequence: Synthetic oligonucleotide
ugcgauuucuuccaaaugu

SEQ ID NO: 2779666 - RNA, 19 nt, Artificial Sequence
  Description of Artificial Sequence: Synthetic oligonucleotide
agugcagauacauccagac

SEQ ID NO: 2779667 - RNA, 19 nt, Artificial Sequence
  Description of Artificial Sequence: Synthetic oligonucleotide
aagaaacuguauaaugggc

SEQ ID NO: 2779668 - RNA, 19 nt, Artificial Sequence
  Description of Artificial Sequence: Synthetic oligonucleotide
uguuguuagagacccuucg

SEQ ID NO: 2779669 - RNA, 19 nt, Artificial Sequence
  Description of Artificial Sequence: Synthetic oligonucleotide
guaguaacggcugaggucg

SEQ ID NO: 2779670 - RNA, 19 nt, Artificial Sequence
  Description of Artificial Sequence: Synthetic oligonucleotide
gagaaugccaaacaccaag

SEQ ID NO: 2779671 - RNA, 19 nt, Artificial Sequence
  Description of Artificial Sequence: Synthetic oligonucleotide
aaugccaaacaccaaggcu

SEQ ID NO: 2779672 - RNA, 19 nt, Artificial Sequence
  Description of Artificial Sequence: Synthetic oligonucleotide
uuucugucauuucugcugg

SEQ ID NO: 2779673 - RNA, 19 nt, Artificial Sequence
  Description of Artificial Sequence: Synthetic oligonucleotide
uccaaagcuacagagaagc

SEQ ID NO: 2779674 - RNA, 19 nt, Artificial Sequence
  Description of Artificial Sequence: Synthetic oligonucleotide
cuucguaucgguaguaacg

SEQ ID NO: 2779675 - RNA, 19 nt, Artificial Sequence
  Description of Artificial Sequence: Synthetic oligonucleotide
gaaacuguauaaugggcag

SEQ ID NO: 2779676 - RNA, 19 nt, Artificial Sequence
  Description of Artificial Sequence: Synthetic oligonucleotide
uguucauaggcacuguucu

SEQ ID NO: 2779677 - RNA, 19 nt, Artificial Sequence
  Description of Artificial Sequence: Synthetic oligonucleotide
aguaugagcugcuuagcac

SEQ ID NO: 2779678 - RNA, 19 nt, Artificial Sequence
  Description of Artificial Sequence: Synthetic oligonucleotide
gagaguaugagcugcuuag

SEQ ID NO: 2779679 - RNA, 19 nt, Artificial Sequence
  Description of Artificial Sequence: Synthetic oligonucleotide
uucagcugaaugaggaagg

SEQ ID NO: 2779680 - RNA, 19 nt, Artificial Sequence
  Description of Artificial Sequence: Synthetic oligonucleotide
aaugaggaaggccacgcug

SEQ ID NO: 2779681 - RNA, 19 nt, Artificial Sequence
  Description of Artificial Sequence: Synthetic oligonucleotide
aagagaaugccaaacacca

SEQ ID NO: 2779682 - RNA, 19 nt, Artificial Sequence
  Description of Artificial Sequence: Synthetic oligonucleotide
guuaaaagaaacuguauaa

SEQ ID NO: 2779683 - RNA, 19 nt, Artificial Sequence
  Description of Artificial Sequence: Synthetic oligonucleotide
uuucuuccaaaugugacag

SEQ ID NO: 2779684 - RNA, 19 nt, Artificial Sequence
  Description of Artificial Sequence: Synthetic oligonucleotide
auuccuuaguguuaaaaga

SEQ ID NO: 2779685 - RNA, 19 nt, Artificial Sequence
  Description of Artificial Sequence: Synthetic oligonucleotide
cuuauuaggcuccaguuuc

SEQ ID NO: 2779686 - RNA, 19 nt, Artificial Sequence
  Description of Artificial Sequence: Synthetic oligonucleotide
uaguguuaaaagaaacugu

SEQ ID NO: 2779687 - RNA, 19 nt, Artificial Sequence
  Description of Artificial Sequence: Synthetic oligonucleotide
uaaugggcagaacaggaug

SEQ ID NO: 2779688 - RNA, 19 nt, Artificial Sequence
  Description of Artificial Sequence: Synthetic oligonucleotide
uuccuuaguguuaaaagaa

SEQ ID NO: 2779689 - RNA, 19 nt, Artificial Sequence
  Description of Artificial Sequence: Synthetic oligonucleotide
aaugugacagcaacuguuc

SEQ ID NO: 2779690 - RNA, 19 nt, Artificial Sequence
  Description of Artificial Sequence: Synthetic oligonucleotide
acuucugugccugugcugc

SEQ ID NO: 2779691 - RNA, 19 nt, Artificial Sequence
  Description of Artificial Sequence: Synthetic oligonucleotide
aggaaggccacgcuggugg

SEQ ID NO: 2779692 - RNA, 19 nt, Artificial Sequence
  Description of Artificial Sequence: Synthetic oligonucleotide
uucguaucgguaguaacgg

SEQ ID NO: 2779693 - RNA, 19 nt, Artificial Sequence
  Description of Artificial Sequence: Synthetic oligonucleotide
auuucuuccaaaugugaca

SEQ ID NO: 2779694 - RNA, 19 nt, Artificial Sequence
  Description of Artificial Sequence: Synthetic oligonucleotide
uuaaaagaaacuguauaau

SEQ ID NO: 2779695 - RNA, 19 nt, Artificial Sequence
  Description of Artificial Sequence: Synthetic oligonucleotide
uuccaaaugugacagcaac

SEQ ID NO: 2779696 - RNA, 19 nt, Artificial Sequence
  Description of Artificial Sequence: Synthetic oligonucleotide
uucaaaacaaaggauuccu

SEQ ID NO: 2779697 - RNA, 19 nt, Artificial Sequence
  Description of Artificial Sequence: Synthetic oligonucleotide
aacaccaaggcuaggaugu

SEQ ID NO: 2779698 - RNA, 19 nt, Artificial Sequence
  Description of Artificial Sequence: Synthetic oligonucleotide
agcaaagagaaugccaaac

SEQ ID NO: 2779699 - RNA, 19 nt, Artificial Sequence
  Description of Artificial Sequence: Synthetic oligonucleotide
uucaccgucugguugaaca

SEQ ID NO: 2779700 - RNA, 19 nt, Artificial Sequence
  Description of Artificial Sequence: Synthetic oligonucleotide
ucuuccaaaugugacagca

SEQ ID NO: 2779701 - RNA, 19 nt, Artificial Sequence
  Description of Artificial Sequence: Synthetic oligonucleotide
caaagagaaugccaaacac

SEQ ID NO: 2779702 - RNA, 19 nt, Artificial Sequence
  Description of Artificial Sequence: Synthetic oligonucleotide
acuguucucuucuggacuc

SEQ ID NO: 2779703 - RNA, 19 nt, Artificial Sequence
  Description of Artificial Sequence: Synthetic oligonucleotide
ugggcuguagcuaacucca

SEQ ID NO: 2779704 - RNA, 19 nt, Artificial Sequence
  Description of Artificial Sequence: Synthetic oligonucleotide
ugggaucucaaucuuugug

SEQ ID NO: 2779705 - RNA, 19 nt, Artificial Sequence
  Description of Artificial Sequence: Synthetic oligonucleotide
guuuccagaauccuccagc

SEQ ID NO: 2779706 - RNA, 19 nt, Artificial Sequence
  Description of Artificial Sequence: Synthetic oligonucleotide
gagguguuguuagagaccc

SEQ ID NO: 2779707 - RNA, 19 nt, Artificial Sequence
  Description of Artificial Sequence: Synthetic oligonucleotide
ugucuucaaaacaaaggau

SEQ ID NO: 2779708 - RNA, 19 nt, Artificial Sequence
  Description of Artificial Sequence: Synthetic oligonucleotide
gauacauccagaccuggga

SEQ ID NO: 2779709 - RNA, 19 nt, Artificial Sequence
  Description of Artificial Sequence: Synthetic oligonucleotide
cugcuuagcacucagcuuc

SEQ ID NO: 2779710 - RNA, 19 nt, Artificial Sequence
  Description of Artificial Sequence: Synthetic oligonucleotide
acacaguccagaugacgcc

SEQ ID NO: 2779711 - RNA, 19 nt, Artificial Sequence
  Description of Artificial Sequence: Synthetic oligonucleotide
augucaccaaacgagagag

SEQ ID NO: 2779712 - RNA, 19 nt, Artificial Sequence
  Description of Artificial Sequence: Synthetic oligonucleotide
agacccuucguaucgguag

SEQ ID NO: 2779713 - RNA, 19 nt, Artificial Sequence
  Description of Artificial Sequence: Synthetic oligonucleotide
gacagcaacuguucauagg

SEQ ID NO: 2779714 - RNA, 19 nt, Artificial Sequence
  Description of Artificial Sequence: Synthetic oligonucleotide
ugucauuucugcugggcug

SEQ ID NO: 2779715 - RNA, 19 nt, Artificial Sequence
  Description of Artificial Sequence: Synthetic oligonucleotide
guauaaugggcagaacagg

SEQ ID NO: 2779716 - RNA, 19 nt, Artificial Sequence
  Description of Artificial Sequence: Synthetic oligonucleotide
uuggucucacuucugugcc

SEQ ID NO: 2779717 - RNA, 19 nt, Artificial Sequence
  Description of Artificial Sequence: Synthetic oligonucleotide
uuaggcuccaguuucuguc

SEQ ID NO: 2779718 - RNA, 19 nt, Artificial Sequence
  Description of Artificial Sequence: Synthetic oligonucleotide
cuguauaaugggcagaaca

SEQ ID NO: 2779719 - RNA, 19 nt, Artificial Sequence
  Description of Artificial Sequence: Synthetic oligonucleotide
acaaaggauuccuuagugu

SEQ ID NO: 2779720 - RNA, 19 nt, Artificial Sequence
  Description of Artificial Sequence: Synthetic oligonucleotide
agaaacuguauaaugggca

SEQ ID NO: 2779721 - RNA, 19 nt, Artificial Sequence
  Description of Artificial Sequence: Synthetic oligonucleotide
uaacggcugaggucgaggg

SEQ ID NO: 2779722 - RNA, 19 nt, Artificial Sequence
  Description of Artificial Sequence: Synthetic oligonucleotide
agaccugggaucucaaucu

SEQ ID NO: 2779723 - RNA, 19 nt, Artificial Sequence
  Description of Artificial Sequence: Synthetic oligonucleotide
uguuagagacccuucguau

SEQ ID NO: 2779724 - RNA, 19 nt, Artificial Sequence
  Description of Artificial Sequence: Synthetic oligonucleotide
gaaugccaaacaccaaggc

SEQ ID NO: 2779725 - RNA, 19 nt, Artificial Sequence
  Description of Artificial Sequence: Synthetic oligonucleotide
aacggcugaggucgagggc

SEQ ID NO: 2779726 - RNA, 19 nt, Artificial Sequence
  Description of Artificial Sequence: Synthetic oligonucleotide
cuuugugccuuccucugcg

SEQ ID NO: 2779727 - RNA, 19 nt, Artificial Sequence
  Description of Artificial Sequence: Synthetic oligonucleotide
aaaugugacagcaacuguu

SEQ ID NO: 2779728 - RNA, 19 nt, Artificial Sequence
  Description of Artificial Sequence: Synthetic oligonucleotide
ccugucuucaaaacaaagg

SEQ ID NO: 2779729 - RNA, 19 nt, Artificial Sequence
  Description of Artificial Sequence: Synthetic oligonucleotide
uccuuaguguuaaaagaaa

SEQ ID NO: 2779730 - RNA, 19 nt, Artificial Sequence
  Description of Artificial Sequence: Synthetic oligonucleotide
uucauaggcacuguucucu

SEQ ID NO: 2779731 - RNA, 19 nt, Artificial Sequence
  Description of Artificial Sequence: Synthetic oligonucleotide
guagcuaacuccaucuuug

SEQ ID NO: 2779732 - RNA, 19 nt, Artificial Sequence
  Description of Artificial Sequence: Synthetic oligonucleotide
gaugagguuuccagaaucc

SEQ ID NO: 2779733 - RNA, 19 nt, Artificial Sequence
  Description of Artificial Sequence: Synthetic oligonucleotide
cuucaaaacaaaggauucc

SEQ ID NO: 2779734 - RNA, 19 nt, Artificial Sequence
  Description of Artificial Sequence: Synthetic oligonucleotide
uccaaaugugacagcaacu

SEQ ID NO: 2779735 - RNA, 19 nt, Artificial Sequence
  Description of Artificial Sequence: Synthetic oligonucleotide
acgagagagaguaugagcu

SEQ ID NO: 2779736 - RNA, 19 nt, Artificial Sequence
  Description of Artificial Sequence: Synthetic oligonucleotide
ugcagggagguguuguuag

SEQ ID NO: 2779737 - RNA, 19 nt, Artificial Sequence
  Description of Artificial Sequence: Synthetic oligonucleotide
ucugcgauuucuuccaaau

SEQ ID NO: 2779738 - RNA, 19 nt, Artificial Sequence
  Description of Artificial Sequence: Synthetic oligonucleotide
auaggcacuguucucuucu

SEQ ID NO: 2779739 - RNA, 19 nt, Artificial Sequence
  Description of Artificial Sequence: Synthetic oligonucleotide
gaugacgccuggcugcagg

SEQ ID NO: 2779740 - RNA, 19 nt, Artificial Sequence
  Description of Artificial Sequence: Synthetic oligonucleotide
ugccucuucagcugaauga

SEQ ID NO: 2779741 - RNA, 19 nt, Artificial Sequence
  Description of Artificial Sequence: Synthetic oligonucleotide
ugaaugaggaaggccacgc

SEQ ID NO: 2779742 - RNA, 19 nt, Artificial Sequence
  Description of Artificial Sequence: Synthetic oligonucleotide
aacuguauaaugggcagaa

SEQ ID NO: 2779743 - RNA, 19 nt, Artificial Sequence
  Description of Artificial Sequence: Synthetic oligonucleotide
gggaucucaaucuuugugc

SEQ ID NO: 2779744 - RNA, 19 nt, Artificial Sequence
  Description of Artificial Sequence: Synthetic oligonucleotide
uggcuucuccuuauuaggc

SEQ ID NO: 2779745 - RNA, 19 nt, Artificial Sequence
  Description of Artificial Sequence: Synthetic oligonucleotide
aguguuaaaagaaacugua

SEQ ID NO: 2779746 - RNA, 19 nt, Artificial Sequence
  Description of Artificial Sequence: Synthetic oligonucleotide
uuguuagagacccuucgua

SEQ ID NO: 2779747 - RNA, 19 nt, Artificial Sequence
  Description of Artificial Sequence: Synthetic oligonucleotide
ugagguuuccagaauccuc

SEQ ID NO: 2779748 - RNA, 19 nt, Artificial Sequence
  Description of Artificial Sequence: Synthetic oligonucleotide
gaugucaccaaacgagaga

SEQ ID NO: 2779749 - RNA, 19 nt, Artificial Sequence
  Description of Artificial Sequence: Synthetic oligonucleotide
gcuaggaugucaccaaacg

SEQ ID NO: 2779750 - RNA, 19 nt, Artificial Sequence
  Description of Artificial Sequence: Synthetic oligonucleotide
gagagagaguaugagcugc

SEQ ID NO: 2779751 - RNA, 19 nt, Artificial Sequence
  Description of Artificial Sequence: Synthetic oligonucleotide
agaaugccaaacaccaagg

SEQ ID NO: 2779752 - RNA, 19 nt, Artificial Sequence
  Description of Artificial Sequence: Synthetic oligonucleotide
cuucagcugaaugaggaag

SEQ ID NO: 2779753 - RNA, 19 nt, Artificial Sequence
  Description of Artificial Sequence: Synthetic oligonucleotide
aagcccugucuucaaaaca

SEQ ID NO: 2779754 - RNA, 19 nt, Artificial Sequence
  Description of Artificial Sequence: Synthetic oligonucleotide
gaauccuccagcuggcuuc

SEQ ID NO: 2779755 - RNA, 19 nt, Artificial Sequence
  Description of Artificial Sequence: Synthetic oligonucleotide
uuccucugcgauuucuucc

SEQ ID NO: 2779756 - RNA, 19 nt, Artificial Sequence
  Description of Artificial Sequence: Synthetic oligonucleotide
ugccaaacaccaaggcuag

SEQ ID NO: 2779757 - RNA, 19 nt, Artificial Sequence
  Description of Artificial Sequence: Synthetic oligonucleotide
aaugggcagaacaggauga

SEQ ID NO: 2779758 - RNA, 19 nt, Artificial Sequence
  Description of Artificial Sequence: Synthetic oligonucleotide
uguagcuaacuccaucuuu

SEQ ID NO: 2779759 - RNA, 19 nt, Artificial Sequence
  Description of Artificial Sequence: Synthetic oligonucleotide
uagcuaacuccaucuuugg

SEQ ID NO: 2779760 - RNA, 19 nt, Artificial Sequence
  Description of Artificial Sequence: Synthetic oligonucleotide
agaguaugagcugcuuagc

SEQ ID NO: 2779761 - RNA, 19 nt, Artificial Sequence
  Description of Artificial Sequence: Synthetic oligonucleotide
uccagaugacgccuggcug

SEQ ID NO: 2779762 - RNA, 19 nt, Artificial Sequence
  Description of Artificial Sequence: Synthetic oligonucleotide
cugggcuguagcuaacucc

SEQ ID NO: 2779763 - RNA, 19 nt, Artificial Sequence
  Description of Artificial Sequence: Synthetic oligonucleotide
aaggauuccuuaguguuaa

SEQ ID NO: 2779764 - RNA, 19 nt, Artificial Sequence
  Description of Artificial Sequence: Synthetic oligonucleotide
ugacagcaacuguucauag

SEQ ID NO: 2779765 - RNA, 19 nt, Artificial Sequence
  Description of Artificial Sequence: Synthetic oligonucleotide
ucugugaauucgaggccag

SEQ ID NO: 2779766 - RNA, 19 nt, Artificial Sequence
  Description of Artificial Sequence: Synthetic oligonucleotide
uuauuaggcuccaguuucu

SEQ ID NO: 2779767 - RNA, 19 nt, Artificial Sequence
  Description of Artificial Sequence: Synthetic oligonucleotide
cuuaguguuaaaagaaacu

SEQ ID NO: 2779768 - RNA, 19 nt, Artificial Sequence
  Description of Artificial Sequence: Synthetic oligonucleotide
cuucuccuuauuaggcucc

SEQ ID NO: 2779769 - RNA, 19 nt, Artificial Sequence
  Description of Artificial Sequence: Synthetic oligonucleotide
ugugacagcaacuguucau

SEQ ID NO: 2779770 - RNA, 19 nt, Artificial Sequence
  Description of Artificial Sequence: Synthetic oligonucleotide
gaguaugagcugcuuagca

SEQ ID NO: 2779771 - RNA, 19 nt, Artificial Sequence
  Description of Artificial Sequence: Synthetic oligonucleotide
caguuucugucauuucugc

SEQ ID NO: 2779772 - RNA, 19 nt, Artificial Sequence
  Description of Artificial Sequence: Synthetic oligonucleotide
uccuuauuaggcuccaguu

SEQ ID NO: 2779773 - RNA, 19 nt, Artificial Sequence
  Description of Artificial Sequence: Synthetic oligonucleotide
gcuaacuccaucuuugguc

SEQ ID NO: 2779774 - RNA, 19 nt, Artificial Sequence
  Description of Artificial Sequence: Synthetic oligonucleotide
ucaaaacaaaggauuccuu

SEQ ID NO: 2779775 - RNA, 19 nt, Artificial Sequence
  Description of Artificial Sequence: Synthetic oligonucleotide
ucugcugggcuguagcuaa

SEQ ID NO: 2779776 - RNA, 19 nt, Artificial Sequence
  Description of Artificial Sequence: Synthetic oligonucleotide
caaaacaaaggauuccuua

SEQ ID NO: 2779777 - RNA, 19 nt, Artificial Sequence
  Description of Artificial Sequence: Synthetic oligonucleotide
cuuagcacucagcuucacc

SEQ ID NO: 2779778 - RNA, 19 nt, Artificial Sequence
  Description of Artificial Sequence: Synthetic oligonucleotide
gaagcccugucuucaaaac

SEQ ID NO: 2779779 - RNA, 19 nt, Artificial Sequence
  Description of Artificial Sequence: Synthetic oligonucleotide
ucuuugugccuuccucugc

SEQ ID NO: 2779780 - RNA, 19 nt, Artificial Sequence
  Description of Artificial Sequence: Synthetic oligonucleotide
acaggaugagguuuccaga

SEQ ID NO: 2779781 - RNA, 19 nt, Artificial Sequence
  Description of Artificial Sequence: Synthetic oligonucleotide
agcacucagcuucaccguc

SEQ ID NO: 2779782 - RNA, 19 nt, Artificial Sequence
  Description of Artificial Sequence: Synthetic oligonucleotide
ugguugaacacaguccaga

SEQ ID NO: 2779783 - RNA, 19 nt, Artificial Sequence
  Description of Artificial Sequence: Synthetic oligonucleotide
aguuucugucauuucugcu

SEQ ID NO: 2779784 - RNA, 19 nt, Artificial Sequence
  Description of Artificial Sequence: Synthetic oligonucleotide
aucuuugugccuuccucug

SEQ ID NO: 2779785 - RNA, 19 nt, Artificial Sequence
  Description of Artificial Sequence: Synthetic oligonucleotide
guuagagacccuucguauc

SEQ ID NO: 2779786 - RNA, 19 nt, Artificial Sequence
  Description of Artificial Sequence: Synthetic oligonucleotide
ucgguaguaacggcugagg

SEQ ID NO: 2779787 - RNA, 19 nt, Artificial Sequence
  Description of Artificial Sequence: Synthetic oligonucleotide
aaacuguauaaugggcaga

SEQ ID NO: 2779788 - RNA, 19 nt, Artificial Sequence
  Description of Artificial Sequence: Synthetic oligonucleotide
ucugucauuucugcugggc

SEQ ID NO: 2779789 - RNA, 19 nt, Artificial Sequence
  Description of Artificial Sequence: Synthetic oligonucleotide
cuguucauaggcacuguuc

SEQ ID NO: 2779790 - RNA, 19 nt, Artificial Sequence
  Description of Artificial Sequence: Synthetic oligonucleotide
ucacuucugugccugugcu

SEQ ID NO: 2779791 - RNA, 19 nt, Artificial Sequence
  Description of Artificial Sequence: Synthetic oligonucleotide
ggaucucaaucuuugugcc

SEQ ID NO: 2779792 - RNA, 19 nt, Artificial Sequence
  Description of Artificial Sequence: Synthetic oligonucleotide
auacauccagaccugggau

SEQ ID NO: 2779793 - RNA, 19 nt, Artificial Sequence
  Description of Artificial Sequence: Synthetic oligonucleotide
ccuuaguguuaaaagaaac

SEQ ID NO: 2779794 - RNA, 19 nt, Artificial Sequence
  Description of Artificial Sequence: Synthetic oligonucleotide
agaacaggaugagguuucc

SEQ ID NO: 2779795 - RNA, 19 nt, Artificial Sequence
  Description of Artificial Sequence: Synthetic oligonucleotide
accaaggcuaggaugucac

SEQ ID NO: 2779796 - RNA, 19 nt, Artificial Sequence
  Description of Artificial Sequence: Synthetic oligonucleotide
agcuucaccgucugguuga

SEQ ID NO: 2779797 - RNA, 19 nt, Artificial Sequence
  Description of Artificial Sequence: Synthetic oligonucleotide
cagaccugggaucucaauc

SEQ ID NO: 2779798 - RNA, 19 nt, Artificial Sequence
  Description of Artificial Sequence: Synthetic oligonucleotide
cagaacaggaugagguuuc

SEQ ID NO: 2779799 - RNA, 19 nt, Artificial Sequence
  Description of Artificial Sequence: Synthetic oligonucleotide
caaacgagagagaguauga

SEQ ID NO: 2779800 - RNA, 19 nt, Artificial Sequence
  Description of Artificial Sequence: Synthetic oligonucleotide
gucugguugaacacagucc

SEQ ID NO: 2779801 - RNA, 19 nt, Artificial Sequence
  Description of Artificial Sequence: Synthetic oligonucleotide
augccaaacaccaaggcua

SEQ ID NO: 2779802 - RNA, 19 nt, Artificial Sequence
  Description of Artificial Sequence: Synthetic oligonucleotide
uaugagcugcuuagcacuc

SEQ ID NO: 2779803 - RNA, 19 nt, Artificial Sequence
  Description of Artificial Sequence: Synthetic oligonucleotide
cugguggcagcaaagagaa

SEQ ID NO: 2779804 - RNA, 19 nt, Artificial Sequence
  Description of Artificial Sequence: Synthetic oligonucleotide
cucacuucugugccugugc

SEQ ID NO: 2779805 - RNA, 19 nt, Artificial Sequence
  Description of Artificial Sequence: Synthetic oligonucleotide
auuaggcuccaguuucugu

SEQ ID NO: 2779806 - RNA, 19 nt, Artificial Sequence
  Description of Artificial Sequence: Synthetic oligonucleotide
uacauccagaccugggauc

SEQ ID NO: 2779807 - RNA, 19 nt, Artificial Sequence
  Description of Artificial Sequence: Synthetic oligonucleotide
ucagcugaaugaggaaggc

SEQ ID NO: 2779808 - RNA, 19 nt, Artificial Sequence
  Description of Artificial Sequence: Synthetic oligonucleotide
uuucugcugggcuguagcu

SEQ ID NO: 2779809 - RNA, 19 nt, Artificial Sequence
  Description of Artificial Sequence: Synthetic oligonucleotide
agauacauccagaccuggg

SEQ ID NO: 2779810 - RNA, 19 nt, Artificial Sequence
  Description of Artificial Sequence: Synthetic oligonucleotide
uaucgguaguaacggcuga

SEQ ID NO: 2779811 - RNA, 19 nt, Artificial Sequence
  Description of Artificial Sequence: Synthetic oligonucleotide
gacgccuggcugcagggag

SEQ ID NO: 2779812 - RNA, 19 nt, Artificial Sequence
  Description of Artificial Sequence: Synthetic oligonucleotide
guaugagcugcuuagcacu

SEQ ID NO: 2779813 - RNA, 19 nt, Artificial Sequence
  Description of Artificial Sequence: Synthetic oligonucleotide
cuaggaugucaccaaacga

SEQ ID NO: 2779814 - RNA, 19 nt, Artificial Sequence
  Description of Artificial Sequence: Synthetic oligonucleotide
uaggcuccaguuucuguca

SEQ ID NO: 2779815 - RNA, 19 nt, Artificial Sequence
  Description of Artificial Sequence: Synthetic oligonucleotide
cuaacuccaucuuuggucu

SEQ ID NO: 2779816 - RNA, 19 nt, Artificial Sequence
  Description of Artificial Sequence: Synthetic oligonucleotide
aggcacuguucucuucugg

SEQ ID NO: 2779817 - RNA, 19 nt, Artificial Sequence
  Description of Artificial Sequence: Synthetic oligonucleotide
agagaguaugagcugcuua

SEQ ID NO: 2779818 - RNA, 19 nt, Artificial Sequence
  Description of Artificial Sequence: Synthetic oligonucleotide
aaaggauuccuuaguguua

SEQ ID NO: 2779819 - RNA, 19 nt, Artificial Sequence
  Description of Artificial Sequence: Synthetic oligonucleotide
guaucgguaguaacggcug

SEQ ID NO: 2779820 - RNA, 19 nt, Artificial Sequence
  Description of Artificial Sequence: Synthetic oligonucleotide
ucuucagcugaaugaggaa

SEQ ID NO: 2779821 - RNA, 19 nt, Artificial Sequence
  Description of Artificial Sequence: Synthetic oligonucleotide
uccuccagcuggcuucucc

SEQ ID NO: 2779822 - RNA, 19 nt, Artificial Sequence
  Description of Artificial Sequence: Synthetic oligonucleotide
ucaccgucugguugaacac

SEQ ID NO: 2779823 - RNA, 19 nt, Artificial Sequence
  Description of Artificial Sequence: Synthetic oligonucleotide
ccaaaugugacagcaacug

SEQ ID NO: 2779824 - RNA, 19 nt, Artificial Sequence
  Description of Artificial Sequence: Synthetic oligonucleotide
augacgccuggcugcaggg

SEQ ID NO: 2779825 - RNA, 19 nt, Artificial Sequence
  Description of Artificial Sequence: Synthetic oligonucleotide
gggagguguuguuagagac

SEQ ID NO: 2779826 - RNA, 19 nt, Artificial Sequence
  Description of Artificial Sequence: Synthetic oligonucleotide
acuguauaaugggcagaac

SEQ ID NO: 2779827 - RNA, 19 nt, Artificial Sequence
  Description of Artificial Sequence: Synthetic oligonucleotide
acauccagaccugggaucu

SEQ ID NO: 2779828 - RNA, 19 nt, Artificial Sequence
  Description of Artificial Sequence: Synthetic oligonucleotide
gguaguaacggcugagguc

SEQ ID NO: 2779829 - RNA, 19 nt, Artificial Sequence
  Description of Artificial Sequence: Synthetic oligonucleotide
ugaggucgagggcagcagu

SEQ ID NO: 2779830 - RNA, 19 nt, Artificial Sequence
  Description of Artificial Sequence: Synthetic oligonucleotide
gcaaagagaaugccaaaca

SEQ ID NO: 2779831 - RNA, 19 nt, Artificial Sequence
  Description of Artificial Sequence: Synthetic oligonucleotide
agcuaacuccaucuuuggu

SEQ ID NO: 2779832 - RNA, 19 nt, Artificial Sequence
  Description of Artificial Sequence: Synthetic oligonucleotide
ugcuuagcacucagcuuca

SEQ ID NO: 2779833 - RNA, 19 nt, Artificial Sequence
  Description of Artificial Sequence: Synthetic oligonucleotide
ggaugagguuuccagaauc

SEQ ID NO: 2779834 - RNA, 19 nt, Artificial Sequence
  Description of Artificial Sequence: Synthetic oligonucleotide
guaacggcugaggucgagg

SEQ ID NO: 2779835 - RNA, 19 nt, Artificial Sequence
  Description of Artificial Sequence: Synthetic oligonucleotide
uucugucauuucugcuggg

SEQ ID NO: 2779836 - RNA, 19 nt, Artificial Sequence
  Description of Artificial Sequence: Synthetic oligonucleotide
aggucgagggcagcagugc

SEQ ID NO: 2779837 - RNA, 19 nt, Artificial Sequence
  Description of Artificial Sequence: Synthetic oligonucleotide
cugaaugaggaaggccacg

SEQ ID NO: 2779838 - RNA, 19 nt, Artificial Sequence
  Description of Artificial Sequence: Synthetic oligonucleotide
ucguaucgguaguaacggc

SEQ ID NO: 2779839 - RNA, 19 nt, Artificial Sequence
  Description of Artificial Sequence: Synthetic oligonucleotide
caccaaacgagagagagua

SEQ ID NO: 2779840 - RNA, 19 nt, Artificial Sequence
  Description of Artificial Sequence: Synthetic oligonucleotide
augugacagcaacuguuca

SEQ ID NO: 2779841 - RNA, 19 nt, Artificial Sequence
  Description of Artificial Sequence: Synthetic oligonucleotide
uagagacccuucguaucgg

SEQ ID NO: 2779842 - RNA, 19 nt, Artificial Sequence
  Description of Artificial Sequence: Synthetic oligonucleotide
ugucaccaaacgagagaga

SEQ ID NO: 2779843 - RNA, 19 nt, Artificial Sequence
  Description of Artificial Sequence: Synthetic oligonucleotide
agggagguguuguuagaga

SEQ ID NO: 2779844 - RNA, 19 nt, Artificial Sequence
  Description of Artificial Sequence: Synthetic oligonucleotide
uucuuccaaaugugacagc

SEQ ID NO: 2779845 - RNA, 19 nt, Artificial Sequence
  Description of Artificial Sequence: Synthetic oligonucleotide
aguccagaugacgccuggc

SEQ ID NO: 2779846 - RNA, 19 nt, Artificial Sequence
  Description of Artificial Sequence: Synthetic oligonucleotide
caaaggauuccuuaguguu

SEQ ID NO: 2779847 - RNA, 19 nt, Artificial Sequence
  Description of Artificial Sequence: Synthetic oligonucleotide
acggcugaggucgagggca

SEQ ID NO: 2779848 - RNA, 19 nt, Artificial Sequence
  Description of Artificial Sequence: Synthetic oligonucleotide
ccagaugacgccuggcugc

SEQ ID NO: 2779849 - RNA, 19 nt, Artificial Sequence
  Description of Artificial Sequence: Synthetic oligonucleotide
cacgcugguggcagcaaag

SEQ ID NO: 2779850 - RNA, 19 nt, Artificial Sequence
  Description of Artificial Sequence: Synthetic oligonucleotide
gucuucaaaacaaaggauu

SEQ ID NO: 2779851 - RNA, 19 nt, Artificial Sequence
  Description of Artificial Sequence: Synthetic oligonucleotide
cugcgauuucuuccaaaug

SEQ ID NO: 2779852 - RNA, 19 nt, Artificial Sequence
  Description of Artificial Sequence: Synthetic oligonucleotide
cugguugaacacaguccag

SEQ ID NO: 2779853 - RNA, 19 nt, Artificial Sequence
  Description of Artificial Sequence: Synthetic oligonucleotide
aucgguaguaacggcugag

SEQ ID NO: 2779854 - RNA, 19 nt, Artificial Sequence
  Description of Artificial Sequence: Synthetic oligonucleotide
uagcacucagcuucaccgu

SEQ ID NO: 2779855 - RNA, 19 nt, Artificial Sequence
  Description of Artificial Sequence: Synthetic oligonucleotide
aggaugucaccaaacgaga

SEQ ID NO: 2779856 - RNA, 19 nt, Artificial Sequence
  Description of Artificial Sequence: Synthetic oligonucleotide
cagauacauccagaccugg

SEQ ID NO: 2779857 - RNA, 19 nt, Artificial Sequence
  Description of Artificial Sequence: Synthetic oligonucleotide
guucauaggcacuguucuc

SEQ ID NO: 2779858 - RNA, 19 nt, Artificial Sequence
  Description of Artificial Sequence: Synthetic oligonucleotide
uuugugccuuccucugcga

SEQ ID NO: 2779859 - RNA, 19 nt, Artificial Sequence
  Description of Artificial Sequence: Synthetic oligonucleotide
augagguuuccagaauccu

SEQ ID NO: 2779860 - RNA, 19 nt, Artificial Sequence
  Description of Artificial Sequence: Synthetic oligonucleotide
ccaaacgagagagaguaug

SEQ ID NO: 2779861 - RNA, 19 nt, Artificial Sequence
  Description of Artificial Sequence: Synthetic oligonucleotide
ugccugugcugccucuuca

SEQ ID NO: 2779862 - RNA, 19 nt, Artificial Sequence
  Description of Artificial Sequence: Synthetic oligonucleotide
ucgagggcagcagugcaga

SEQ ID NO: 2779863 - RNA, 19 nt, Artificial Sequence
  Description of Artificial Sequence: Synthetic oligonucleotide
accgucugguugaacacag

SEQ ID NO: 2779864 - RNA, 19 nt, Artificial Sequence
  Description of Artificial Sequence: Synthetic oligonucleotide
auaaugggcagaacaggau

SEQ ID NO: 2779865 - RNA, 19 nt, Artificial Sequence
  Description of Artificial Sequence: Synthetic oligonucleotide
agaauccuccagcuggcuu

SEQ ID NO: 2779866 - RNA, 19 nt, Artificial Sequence
  Description of Artificial Sequence: Synthetic oligonucleotide
aauccuccagcuggcuucu

SEQ ID NO: 2779867 - RNA, 19 nt, Artificial Sequence
  Description of Artificial Sequence: Synthetic oligonucleotide
ucagcuucaccgucugguu

SEQ ID NO: 2779868 - RNA, 19 nt, Artificial Sequence
  Description of Artificial Sequence: Synthetic oligonucleotide
ucucacuucugugccugug

SEQ ID NO: 2779869 - RNA, 19 nt, Artificial Sequence
  Description of Artificial Sequence: Synthetic oligonucleotide
uccagcuggcuucuccuua

SEQ ID NO: 2779870 - RNA, 19 nt, Artificial Sequence
  Description of Artificial Sequence: Synthetic oligonucleotide
aacuguucauaggcacugu

SEQ ID NO: 2779871 - RNA, 19 nt, Artificial Sequence
  Description of Artificial Sequence: Synthetic oligonucleotide
acuccaucuuuggucucac

SEQ ID NO: 2779872 - RNA, 19 nt, Artificial Sequence
  Description of Artificial Sequence: Synthetic oligonucleotide
cugccucuucagcugaaug

SEQ ID NO: 2779873 - RNA, 19 nt, Artificial Sequence
  Description of Artificial Sequence: Synthetic oligonucleotide
guuguuagagacccuucgu

SEQ ID NO: 2779874 - RNA, 19 nt, Artificial Sequence
  Description of Artificial Sequence: Synthetic oligonucleotide
cagcugaaugaggaaggcc

SEQ ID NO: 2779875 - RNA, 19 nt, Artificial Sequence
  Description of Artificial Sequence: Synthetic oligonucleotide
gaggucgagggcagcagug

SEQ ID NO: 2779876 - RNA, 19 nt, Artificial Sequence
  Description of Artificial Sequence: Synthetic oligonucleotide
uugugccuuccucugcgau

SEQ ID NO: 2779877 - RNA, 19 nt, Artificial Sequence
  Description of Artificial Sequence: Synthetic oligonucleotide
gccucuucagcugaaugag

SEQ ID NO: 2779878 - RNA, 19 nt, Artificial Sequence
  Description of Artificial Sequence: Synthetic oligonucleotide
ggaugucaccaaacgagag

SEQ ID NO: 2779879 - RNA, 19 nt, Artificial Sequence
  Description of Artificial Sequence: Synthetic oligonucleotide
cagcuucaccgucugguug

SEQ ID NO: 2779880 - RNA, 19 nt, Artificial Sequence
  Description of Artificial Sequence: Synthetic oligonucleotide
gcagcaaagagaaugccaa

SEQ ID NO: 2779881 - RNA, 19 nt, Artificial Sequence
  Description of Artificial Sequence: Synthetic oligonucleotide
ucugugccugugcugccuc

SEQ ID NO: 2779882 - RNA, 19 nt, Artificial Sequence
  Description of Artificial Sequence: Synthetic oligonucleotide
cauaggcacuguucucuuc

SEQ ID NO: 2779883 - RNA, 19 nt, Artificial Sequence
  Description of Artificial Sequence: Synthetic oligonucleotide
gcuguagcuaacuccaucu

SEQ ID NO: 2779884 - RNA, 19 nt, Artificial Sequence
  Description of Artificial Sequence: Synthetic oligonucleotide
gaucucaaucuuugugccu

SEQ ID NO: 2779885 - RNA, 19 nt, Artificial Sequence
  Description of Artificial Sequence: Synthetic oligonucleotide
gcgauuucuuccaaaugug

SEQ ID NO: 2779886 - RNA, 19 nt, Artificial Sequence
  Description of Artificial Sequence: Synthetic oligonucleotide
ggagguguuguuagagacc

SEQ ID NO: 2779887 - RNA, 19 nt, Artificial Sequence
  Description of Artificial Sequence: Synthetic oligonucleotide
caguccagaugacgccugg

SEQ ID NO: 2779888 - RNA, 19 nt, Artificial Sequence
  Description of Artificial Sequence: Synthetic oligonucleotide
ucuccuuauuaggcuccag

SEQ ID NO: 2779889 - RNA, 19 nt, Artificial Sequence
  Description of Artificial Sequence: Synthetic oligonucleotide
uucuccuuauuaggcucca

SEQ ID NO: 2779890 - RNA, 19 nt, Artificial Sequence
  Description of Artificial Sequence: Synthetic oligonucleotide
guucucuucuggacucucc

SEQ ID NO: 2779891 - RNA, 19 nt, Artificial Sequence
  Description of Artificial Sequence: Synthetic oligonucleotide
cacuucugugccugugcug

SEQ ID NO: 2779892 - RNA, 19 nt, Artificial Sequence
  Description of Artificial Sequence: Synthetic oligonucleotide
agagagaguaugagcugcu

SEQ ID NO: 2779893 - RNA, 19 nt, Artificial Sequence
  Description of Artificial Sequence: Synthetic oligonucleotide
cuuccaaaugugacagcaa

SEQ ID NO: 2779894 - RNA, 19 nt, Artificial Sequence
  Description of Artificial Sequence: Synthetic oligonucleotide
uggucucacuucugugccu

SEQ ID NO: 2779895 - RNA, 19 nt, Artificial Sequence
  Description of Artificial Sequence: Synthetic oligonucleotide
cuucugugccugugcugcc

SEQ ID NO: 2779896 - RNA, 19 nt, Artificial Sequence
  Description of Artificial Sequence: Synthetic oligonucleotide
agcuggcuucuccuuauua

SEQ ID NO: 2779897 - RNA, 19 nt, Artificial Sequence
  Description of Artificial Sequence: Synthetic oligonucleotide
gcugguggcagcaaagaga

SEQ ID NO: 2779898 - RNA, 19 nt, Artificial Sequence
  Description of Artificial Sequence: Synthetic oligonucleotide
aguaacggcugaggucgag

SEQ ID NO: 2779899 - RNA, 19 nt, Artificial Sequence
  Description of Artificial Sequence: Synthetic oligonucleotide
cacucagcuucaccgucug

SEQ ID NO: 2779900 - RNA, 19 nt, Artificial Sequence
  Description of Artificial Sequence: Synthetic oligonucleotide
ccuucguaucgguaguaac

SEQ ID NO: 2779901 - RNA, 19 nt, Artificial Sequence
  Description of Artificial Sequence: Synthetic oligonucleotide
ggcagcaaagagaaugcca

SEQ ID NO: 2779902 - RNA, 19 nt, Artificial Sequence
  Description of Artificial Sequence: Synthetic oligonucleotide
gucgagggcagcagugcag

SEQ ID NO: 2779903 - RNA, 19 nt, Artificial Sequence
  Description of Artificial Sequence: Synthetic oligonucleotide
cagcaacuguucauaggca

SEQ ID NO: 2779904 - RNA, 19 nt, Artificial Sequence
  Description of Artificial Sequence: Synthetic oligonucleotide
uccagaccugggaucucaa

SEQ ID NO: 2779905 - RNA, 19 nt, Artificial Sequence
  Description of Artificial Sequence: Synthetic oligonucleotide
ccagaauccuccagcuggc

SEQ ID NO: 2779906 - RNA, 19 nt, Artificial Sequence
  Description of Artificial Sequence: Synthetic oligonucleotide
aggcuaggaugucaccaaa

SEQ ID NO: 2779907 - RNA, 19 nt, Artificial Sequence
  Description of Artificial Sequence: Synthetic oligonucleotide
ccucuucagcugaaugagg

SEQ ID NO: 2779908 - RNA, 19 nt, Artificial Sequence
  Description of Artificial Sequence: Synthetic oligonucleotide
cauuucugcugggcuguag

SEQ ID NO: 2779909 - RNA, 19 nt, Artificial Sequence
  Description of Artificial Sequence: Synthetic oligonucleotide
gaaugaggaaggccacgcu

SEQ ID NO: 2779910 - RNA, 19 nt, Artificial Sequence
  Description of Artificial Sequence: Synthetic oligonucleotide
agcuacagagaagcccugu

SEQ ID NO: 2779911 - RNA, 19 nt, Artificial Sequence
  Description of Artificial Sequence: Synthetic oligonucleotide
acaccaaggcuaggauguc

SEQ ID NO: 2779912 - RNA, 19 nt, Artificial Sequence
  Description of Artificial Sequence: Synthetic oligonucleotide
gcacuguucucuucuggac

SEQ ID NO: 2779913 - RNA, 19 nt, Artificial Sequence
  Description of Artificial Sequence: Synthetic oligonucleotide
gaacaggaugagguuucca

SEQ ID NO: 2779914 - RNA, 19 nt, Artificial Sequence
  Description of Artificial Sequence: Synthetic oligonucleotide
uaguaacggcugaggucga

SEQ ID NO: 2779915 - RNA, 19 nt, Artificial Sequence
  Description of Artificial Sequence: Synthetic oligonucleotide
ugcugggcuguagcuaacu

SEQ ID NO: 2779916 - RNA, 19 nt, Artificial Sequence
  Description of Artificial Sequence: Synthetic oligonucleotide
cuccuuauuaggcuccagu

SEQ ID NO: 2779917 - RNA, 19 nt, Artificial Sequence
  Description of Artificial Sequence: Synthetic oligonucleotide
gcagauacauccagaccug

SEQ ID NO: 2779918 - RNA, 19 nt, Artificial Sequence
  Description of Artificial Sequence: Synthetic oligonucleotide
ggucucacuucugugccug

SEQ ID NO: 2779919 - RNA, 19 nt, Artificial Sequence
  Description of Artificial Sequence: Synthetic oligonucleotide
caaaugugacagcaacugu

SEQ ID NO: 2779920 - RNA, 19 nt, Artificial Sequence
  Description of Artificial Sequence: Synthetic oligonucleotide
ggauuccuuaguguuaaaa

SEQ ID NO: 2779921 - RNA, 19 nt, Artificial Sequence
  Description of Artificial Sequence: Synthetic oligonucleotide
cuccaguuucugucauuuc

SEQ ID NO: 2779922 - RNA, 19 nt, Artificial Sequence
  Description of Artificial Sequence: Synthetic oligonucleotide
uaacuccaucuuuggucuc

SEQ ID NO: 2779923 - RNA, 19 nt, Artificial Sequence
  Description of Artificial Sequence: Synthetic oligonucleotide
cugaggucgagggcagcag

SEQ ID NO: 2779924 - RNA, 19 nt, Artificial Sequence
  Description of Artificial Sequence: Synthetic oligonucleotide
cugugaauucgaggccagc

SEQ ID NO: 2779925 - RNA, 19 nt, Artificial Sequence
  Description of Artificial Sequence: Synthetic oligonucleotide
cacuguucucuucuggacu

SEQ ID NO: 2779926 - RNA, 19 nt, Artificial Sequence
  Description of Artificial Sequence: Synthetic oligonucleotide
guguuaaaagaaacuguau

SEQ ID NO: 2779927 - RNA, 19 nt, Artificial Sequence
  Description of Artificial Sequence: Synthetic oligonucleotide
cucagcuucaccgucuggu

SEQ ID NO: 2779928 - RNA, 19 nt, Artificial Sequence
  Description of Artificial Sequence: Synthetic oligonucleotide
guccagaugacgccuggcu

SEQ ID NO: 2779929 - RNA, 19 nt, Artificial Sequence
  Description of Artificial Sequence: Synthetic oligonucleotide
acaguccagaugacgccug

SEQ ID NO: 2779930 - RNA, 19 nt, Artificial Sequence
  Description of Artificial Sequence: Synthetic oligonucleotide
guguuguuagagacccuuc

SEQ ID NO: 2779931 - RNA, 19 nt, Artificial Sequence
  Description of Artificial Sequence: Synthetic oligonucleotide
cugucauuucugcugggcu

SEQ ID NO: 2779932 - RNA, 19 nt, Artificial Sequence
  Description of Artificial Sequence: Synthetic oligonucleotide
agagaaugccaaacaccaa

SEQ ID NO: 2779933 - RNA, 19 nt, Artificial Sequence
  Description of Artificial Sequence: Synthetic oligonucleotide
ccaaacaccaaggcuagga

SEQ ID NO: 2779934 - RNA, 19 nt, Artificial Sequence
  Description of Artificial Sequence: Synthetic oligonucleotide
cgucugguugaacacaguc

SEQ ID NO: 2779935 - RNA, 19 nt, Artificial Sequence
  Description of Artificial Sequence: Synthetic oligonucleotide
aggccacgcugguggcagc

SEQ ID NO: 2779936 - RNA, 19 nt, Artificial Sequence
  Description of Artificial Sequence: Synthetic oligonucleotide
gucauuucugcugggcugu

SEQ ID NO: 2779937 - RNA, 19 nt, Artificial Sequence
  Description of Artificial Sequence: Synthetic oligonucleotide
acgcugguggcagcaaaga

SEQ ID NO: 2779938 - RNA, 19 nt, Artificial Sequence
  Description of Artificial Sequence: Synthetic oligonucleotide
gacccuucguaucgguagu

SEQ ID NO: 2779939 - RNA, 19 nt, Artificial Sequence
  Description of Artificial Sequence: Synthetic oligonucleotide
augagcugcuuagcacuca

SEQ ID NO: 2779940 - RNA, 19 nt, Artificial Sequence
  Description of Artificial Sequence: Synthetic oligonucleotide
caaacaccaaggcuaggau

SEQ ID NO: 2779941 - RNA, 19 nt, Artificial Sequence
  Description of Artificial Sequence: Synthetic oligonucleotide
ggcuaggaugucaccaaac

SEQ ID NO: 2779942 - RNA, 19 nt, Artificial Sequence
  Description of Artificial Sequence: Synthetic oligonucleotide
gcugaaugaggaaggccac

SEQ ID NO: 2779943 - RNA, 19 nt, Artificial Sequence
  Description of Artificial Sequence: Synthetic oligonucleotide
cucugcgauuucuuccaaa

SEQ ID NO: 2779944 - RNA, 19 nt, Artificial Sequence
  Description of Artificial Sequence: Synthetic oligonucleotide
aggcuccaguuucugucau

SEQ ID NO: 2779945 - RNA, 19 nt, Artificial Sequence
  Description of Artificial Sequence: Synthetic oligonucleotide
ugacgccuggcugcaggga

SEQ ID NO: 2779946 - RNA, 19 nt, Artificial Sequence
  Description of Artificial Sequence: Synthetic oligonucleotide
gguugaacacaguccagau

SEQ ID NO: 2779947 - RNA, 19 nt, Artificial Sequence
  Description of Artificial Sequence: Synthetic oligonucleotide
ccugugcugccucuucagc

SEQ ID NO: 2779948 - RNA, 19 nt, Artificial Sequence
  Description of Artificial Sequence: Synthetic oligonucleotide
ccaaggcuaggaugucacc

SEQ ID NO: 2779949 - RNA, 19 nt, Artificial Sequence
  Description of Artificial Sequence: Synthetic oligonucleotide
acgccuggcugcagggagg

SEQ ID NO: 2779950 - RNA, 19 nt, Artificial Sequence
  Description of Artificial Sequence: Synthetic oligonucleotide
cgauuucuuccaaauguga

SEQ ID NO: 2779951 - RNA, 19 nt, Artificial Sequence
  Description of Artificial Sequence: Synthetic oligonucleotide
aggauuccuuaguguuaaa

SEQ ID NO: 2779952 - RNA, 19 nt, Artificial Sequence
  Description of Artificial Sequence: Synthetic oligonucleotide
gagggcagcagugcagaua

SEQ ID NO: 2779953 - RNA, 19 nt, Artificial Sequence
  Description of Artificial Sequence: Synthetic oligonucleotide
ggcuucuccuuauuaggcu

SEQ ID NO: 2779954 - RNA, 19 nt, Artificial Sequence
  Description of Artificial Sequence: Synthetic oligonucleotide
ggucgagggcagcagugca

SEQ ID NO: 2779955 - RNA, 19 nt, Artificial Sequence
  Description of Artificial Sequence: Synthetic oligonucleotide
ugugccugugcugccucuu

SEQ ID NO: 2779956 - RNA, 19 nt, Artificial Sequence
  Description of Artificial Sequence: Synthetic oligonucleotide
gagacccuucguaucggua

SEQ ID NO: 2779957 - RNA, 19 nt, Artificial Sequence
  Description of Artificial Sequence: Synthetic oligonucleotide
caccaaggcuaggauguca

SEQ ID NO: 2779958 - RNA, 19 nt, Artificial Sequence
  Description of Artificial Sequence: Synthetic oligonucleotide
caccgucugguugaacaca

SEQ ID NO: 2779959 - RNA, 19 nt, Artificial Sequence
  Description of Artificial Sequence: Synthetic oligonucleotide
gcugggcuguagcuaacuc

SEQ ID NO: 2779960 - RNA, 19 nt, Artificial Sequence
  Description of Artificial Sequence: Synthetic oligonucleotide
gugagugccaggacaggcu

SEQ ID NO: 2779961 - RNA, 19 nt, Artificial Sequence
  Description of Artificial Sequence: Synthetic oligonucleotide
cugcugggcuguagcuaac

SEQ ID NO: 2779962 - RNA, 19 nt, Artificial Sequence
  Description of Artificial Sequence: Synthetic oligonucleotide
gguguuguuagagacccuu

SEQ ID NO: 2779963 - RNA, 19 nt, Artificial Sequence
  Description of Artificial Sequence: Synthetic oligonucleotide
ugguggcagcaaagagaau

SEQ ID NO: 2779964 - RNA, 19 nt, Artificial Sequence
  Description of Artificial Sequence: Synthetic oligonucleotide
gcagcagugcagauacauc

SEQ ID NO: 2779965 - RNA, 19 nt, Artificial Sequence
  Description of Artificial Sequence: Synthetic oligonucleotide
accugggaucucaaucuuu

SEQ ID NO: 2779966 - RNA, 19 nt, Artificial Sequence
  Description of Artificial Sequence: Synthetic oligonucleotide
ucauuucugcugggcugua

SEQ ID NO: 2779967 - RNA, 19 nt, Artificial Sequence
  Description of Artificial Sequence: Synthetic oligonucleotide
cagaugacgccuggcugca

SEQ ID NO: 2779968 - RNA, 19 nt, Artificial Sequence
  Description of Artificial Sequence: Synthetic oligonucleotide
cacaguccagaugacgccu

SEQ ID NO: 2779969 - RNA, 19 nt, Artificial Sequence
  Description of Artificial Sequence: Synthetic oligonucleotide
cguaucgguaguaacggcu

SEQ ID NO: 2779970 - RNA, 19 nt, Artificial Sequence
  Description of Artificial Sequence: Synthetic oligonucleotide
agaugacgccuggcugcag

SEQ ID NO: 2779971 - RNA, 19 nt, Artificial Sequence
  Description of Artificial Sequence: Synthetic oligonucleotide
accaaacgagagagaguau

SEQ ID NO: 2779972 - RNA, 19 nt, Artificial Sequence
  Description of Artificial Sequence: Synthetic oligonucleotide
gaccugggaucucaaucuu

SEQ ID NO: 2779973 - RNA, 19 nt, Artificial Sequence
  Description of Artificial Sequence: Synthetic oligonucleotide
gcugaggucgagggcagca

SEQ ID NO: 2779974 - RNA, 19 nt, Artificial Sequence
  Description of Artificial Sequence: Synthetic oligonucleotide
cuucaccgucugguugaac

SEQ ID NO: 2779975 - RNA, 19 nt, Artificial Sequence
  Description of Artificial Sequence: Synthetic oligonucleotide
gcaacuguucauaggcacu

SEQ ID NO: 2779976 - RNA, 19 nt, Artificial Sequence
  Description of Artificial Sequence: Synthetic oligonucleotide
ggcagcagugcagauacau

SEQ ID NO: 2779977 - RNA, 19 nt, Artificial Sequence
  Description of Artificial Sequence: Synthetic oligonucleotide
gugccuuccucugcgauuu

SEQ ID NO: 2779978 - RNA, 19 nt, Artificial Sequence
  Description of Artificial Sequence: Synthetic oligonucleotide
ugccuuccucugcgauuuc

SEQ ID NO: 2779979 - RNA, 19 nt, Artificial Sequence
  Description of Artificial Sequence: Synthetic oligonucleotide
uggcugcagggagguguug

SEQ ID NO: 2779980 - RNA, 19 nt, Artificial Sequence
  Description of Artificial Sequence: Synthetic oligonucleotide
gccaaacaccaaggcuagg

SEQ ID NO: 2779981 - RNA, 19 nt, Artificial Sequence
  Description of Artificial Sequence: Synthetic oligonucleotide
agguguuguuagagacccu

SEQ ID NO: 2779982 - RNA, 19 nt, Artificial Sequence
  Description of Artificial Sequence: Synthetic oligonucleotide
ccuuauuaggcuccaguuu

SEQ ID NO: 2779983 - RNA, 19 nt, Artificial Sequence
  Description of Artificial Sequence: Synthetic oligonucleotide
acccuucguaucgguagua

SEQ ID NO: 2779984 - RNA, 19 nt, Artificial Sequence
  Description of Artificial Sequence: Synthetic oligonucleotide
gagagaguaugagcugcuu

SEQ ID NO: 2779985 - RNA, 19 nt, Artificial Sequence
  Description of Artificial Sequence: Synthetic oligonucleotide
cauccagaccugggaucuc

SEQ ID NO: 2779986 - RNA, 19 nt, Artificial Sequence
  Description of Artificial Sequence: Synthetic oligonucleotide
cuguagcuaacuccaucuu

SEQ ID NO: 2779987 - RNA, 19 nt, Artificial Sequence
  Description of Artificial Sequence: Synthetic oligonucleotide
cugcagggagguguuguua

SEQ ID NO: 2779988 - RNA, 19 nt, Artificial Sequence
  Description of Artificial Sequence: Synthetic oligonucleotide
gcugcuuagcacucagcuu

SEQ ID NO: 2779989 - RNA, 19 nt, Artificial Sequence
  Description of Artificial Sequence: Synthetic oligonucleotide
gcuccaguuucugucauuu

SEQ ID NO: 2779990 - RNA, 19 nt, Artificial Sequence
  Description of Artificial Sequence: Synthetic oligonucleotide
gucucacuucugugccugu

SEQ ID NO: 2779991 - RNA, 19 nt, Artificial Sequence
  Description of Artificial Sequence: Synthetic oligonucleotide
gcuuagcacucagcuucac

SEQ ID NO: 2779992 - RNA, 19 nt, Artificial Sequence
  Description of Artificial Sequence: Synthetic oligonucleotide
cuccaucuuuggucucacu

SEQ ID NO: 2779993 - RNA, 19 nt, Artificial Sequence
  Description of Artificial Sequence: Synthetic oligonucleotide
cuguucucuucuggacucu

SEQ ID NO: 2779994 - RNA, 19 nt, Artificial Sequence
  Description of Artificial Sequence: Synthetic oligonucleotide
cugugccugugcugccucu

SEQ ID NO: 2779995 - RNA, 19 nt, Artificial Sequence
  Description of Artificial Sequence: Synthetic oligonucleotide
gcacucagcuucaccgucu

SEQ ID NO: 2779996 - RNA, 19 nt, Artificial Sequence
  Description of Artificial Sequence: Synthetic oligonucleotide
ggcugaggucgagggcagc

SEQ ID NO: 2779997 - RNA, 19 nt, Artificial Sequence
  Description of Artificial Sequence: Synthetic oligonucleotide
ggccacgcugguggcagca

SEQ ID NO: 2779998 - RNA, 19 nt, Artificial Sequence
  Description of Artificial Sequence: Synthetic oligonucleotide
cagaauccuccagcuggcu

SEQ ID NO: 2779999 - RNA, 19 nt, Artificial Sequence
  Description of Artificial Sequence: Synthetic oligonucleotide
cggcugaggucgagggcag

SEQ ID NO: 2780000 - RNA, 19 nt, Artificial Sequence
  Description of Artificial Sequence: Synthetic oligonucleotide
cgguaguaacggcugaggu

SEQ ID NO: 2780001 - RNA, 19 nt, Artificial Sequence
  Description of Artificial Sequence: Synthetic oligonucleotide
cccuucguaucgguaguaa

SEQ ID NO: 2780002 - RNA, 19 nt, Artificial Sequence
  Description of Artificial Sequence: Synthetic oligonucleotide
gcugcagggagguguuguu

SEQ ID NO: 2780003 - RNA, 19 nt, Artificial Sequence
  Description of Artificial Sequence: Synthetic oligonucleotide
ccagcuggcuucuccuuau

SEQ ID NO: 2780004 - RNA, 19 nt, Artificial Sequence
  Description of Artificial Sequence: Synthetic oligonucleotide
ccacgcugguggcagcaaa

SEQ ID NO: 2780005 - RNA, 19 nt, Artificial Sequence
  Description of Artificial Sequence: Synthetic oligonucleotide
gcuucaccgucugguugaa

SEQ ID NO: 2780006 - RNA, 19 nt, Artificial Sequence
  Description of Artificial Sequence: Synthetic oligonucleotide
ggcuccaguuucugucauu

SEQ ID NO: 2780007 - RNA, 19 nt, Artificial Sequence
  Description of Artificial Sequence: Synthetic oligonucleotide
ccucugcgauuucuuccaa

SEQ ID NO: 2780008 - RNA, 19 nt, Artificial Sequence
  Description of Artificial Sequence: Synthetic oligonucleotide
ccagaccugggaucucaau

SEQ ID NO: 2780009 - RNA, 19 nt, Artificial Sequence
  Description of Artificial Sequence: Synthetic oligonucleotide
gcugccucuucagcugaau

SEQ ID NO: 2780010 - RNA, 19 nt, Artificial Sequence
  Description of Artificial Sequence: Synthetic oligonucleotide
cagcuggcuucuccuuauu

SEQ ID NO: 2780011 - RNA, 19 nt, Artificial Sequence
  Description of Artificial Sequence: Synthetic oligonucleotide
gggcagcagugcagauaca

SEQ ID NO: 2780012 - RNA, 19 nt, Artificial Sequence
  Description of Artificial Sequence: Synthetic oligonucleotide
gccacgcugguggcagcaa

SEQ ID NO: 2780013 - RNA, 19 nt, Artificial Sequence
  Description of Artificial Sequence: Synthetic oligonucleotide
ccgucugguugaacacagu

SEQ ID NO: 2780014 - RNA, 19 nt, Artificial Sequence
  Description of Artificial Sequence: Synthetic oligonucleotide
gggcuguagcuaacuccau

SEQ ID NO: 2780015 - RNA, 19 nt, Artificial Sequence
  Description of Artificial Sequence: Synthetic oligonucleotide
cgccuggcugcagggaggu

SEQ ID NO: 2780016 - RNA, 19 nt, Artificial Sequence
  Description of Artificial Sequence: Synthetic oligonucleotide
aaauguggcaccuggagcg

SEQ ID NO: 2780017 - RNA, 19 nt, Artificial Sequence
  Description of Artificial Sequence: Synthetic oligonucleotide
agaagaaguuguuacaagc

SEQ ID NO: 2780018 - RNA, 19 nt, Artificial Sequence
  Description of Artificial Sequence: Synthetic oligonucleotide
aaggggaagucuuauaagg

SEQ ID NO: 2780019 - RNA, 19 nt, Artificial Sequence
  Description of Artificial Sequence: Synthetic oligonucleotide
uuacaagccaccgugagcg

SEQ ID NO: 2780020 - RNA, 19 nt, Artificial Sequence
  Description of Artificial Sequence: Synthetic oligonucleotide
ucuuauaagggcaagugaa

SEQ ID NO: 2780021 - RNA, 19 nt, Artificial Sequence
  Description of Artificial Sequence: Synthetic oligonucleotide
ugggguaaggagaagaaag

SEQ ID NO: 2780022 - RNA, 19 nt, Artificial Sequence
  Description of Artificial Sequence: Synthetic oligonucleotide
acuccugaagucuacuucc

SEQ ID NO: 2780023 - RNA, 19 nt, Artificial Sequence
  Description of Artificial Sequence: Synthetic oligonucleotide
uauaagggcaagugaaggg

SEQ ID NO: 2780024 - RNA, 19 nt, Artificial Sequence
  Description of Artificial Sequence: Synthetic oligonucleotide
uggacauccaggaagccgg

SEQ ID NO: 2780025 - RNA, 19 nt, Artificial Sequence
  Description of Artificial Sequence: Synthetic oligonucleotide
gaagaaagcagggauaaag

SEQ ID NO: 2780026 - RNA, 19 nt, Artificial Sequence
  Description of Artificial Sequence: Synthetic oligonucleotide
agaaagcagggauaaaggg

SEQ ID NO: 2780027 - RNA, 19 nt, Artificial Sequence
  Description of Artificial Sequence: Synthetic oligonucleotide
uugaugagggucuccaugg

SEQ ID NO: 2780028 - RNA, 19 nt, Artificial Sequence
  Description of Artificial Sequence: Synthetic oligonucleotide
aagugcucaacuguucucc

SEQ ID NO: 2780029 - RNA, 19 nt, Artificial Sequence
  Description of Artificial Sequence: Synthetic oligonucleotide
gaagguucucgacagacag

SEQ ID NO: 2780030 - RNA, 19 nt, Artificial Sequence
  Description of Artificial Sequence: Synthetic oligonucleotide
gaaagcagggauaaagggg

SEQ ID NO: 2780031 - RNA, 19 nt, Artificial Sequence
  Description of Artificial Sequence: Synthetic oligonucleotide
uaaggagaagaaagcaggg

SEQ ID NO: 2780032 - RNA, 19 nt, Artificial Sequence
  Description of Artificial Sequence: Synthetic oligonucleotide
uauaggugggguaaggaga

SEQ ID NO: 2780033 - RNA, 19 nt, Artificial Sequence
  Description of Artificial Sequence: Synthetic oligonucleotide
uuauaagggcaagugaagg

SEQ ID NO: 2780034 - RNA, 19 nt, Artificial Sequence
  Description of Artificial Sequence: Synthetic oligonucleotide
aagaaguuguuacaagcca

SEQ ID NO: 2780035 - RNA, 19 nt, Artificial Sequence
  Description of Artificial Sequence: Synthetic oligonucleotide
uaaaggggaagucuuauaa

SEQ ID NO: 2780036 - RNA, 19 nt, Artificial Sequence
  Description of Artificial Sequence: Synthetic oligonucleotide
guuguuacaagccaccgug

SEQ ID NO: 2780037 - RNA, 19 nt, Artificial Sequence
  Description of Artificial Sequence: Synthetic oligonucleotide
aaaggggaagucuuauaag

SEQ ID NO: 2780038 - RNA, 19 nt, Artificial Sequence
  Description of Artificial Sequence: Synthetic oligonucleotide
guaaggagaagaaagcagg

SEQ ID NO: 2780039 - RNA, 19 nt, Artificial Sequence
  Description of Artificial Sequence: Synthetic oligonucleotide
aagaaagcagggauaaagg

SEQ ID NO: 2780040 - RNA, 19 nt, Artificial Sequence
  Description of Artificial Sequence: Synthetic oligonucleotide
auuuucauccaguuccuuc

SEQ ID NO: 2780041 - RNA, 19 nt, Artificial Sequence
  Description of Artificial Sequence: Synthetic oligonucleotide
auaagggcaagugaagggc

SEQ ID NO: 2780042 - RNA, 19 nt, Artificial Sequence
  Description of Artificial Sequence: Synthetic oligonucleotide
guucucgacagacagacag

SEQ ID NO: 2780043 - RNA, 19 nt, Artificial Sequence
  Description of Artificial Sequence: Synthetic oligonucleotide
uuuguagcaggucuuucag

SEQ ID NO: 2780044 - RNA, 19 nt, Artificial Sequence
  Description of Artificial Sequence: Synthetic oligonucleotide
uuuucauccaguuccuuca

SEQ ID NO: 2780045 - RNA, 19 nt, Artificial Sequence
  Description of Artificial Sequence: Synthetic oligonucleotide
aagugaagggcacugccag

SEQ ID NO: 2780046 - RNA, 19 nt, Artificial Sequence
  Description of Artificial Sequence: Synthetic oligonucleotide
uucauuaccuuguccacag

SEQ ID NO: 2780047 - RNA, 19 nt, Artificial Sequence
  Description of Artificial Sequence: Synthetic oligonucleotide
aaagcagggauaaagggga

SEQ ID NO: 2780048 - RNA, 19 nt, Artificial Sequence
  Description of Artificial Sequence: Synthetic oligonucleotide
auccaguuccuucauuacc

SEQ ID NO: 2780049 - RNA, 19 nt, Artificial Sequence
  Description of Artificial Sequence: Synthetic oligonucleotide
agcaucugcauccuucugg

SEQ ID NO: 2780050 - RNA, 19 nt, Artificial Sequence
  Description of Artificial Sequence: Synthetic oligonucleotide
gaagaaguuguuacaagcc

SEQ ID NO: 2780051 - RNA, 19 nt, Artificial Sequence
  Description of Artificial Sequence: Synthetic oligonucleotide
ugggccaccacucugguac

SEQ ID NO: 2780052 - RNA, 19 nt, Artificial Sequence
  Description of Artificial Sequence: Synthetic oligonucleotide
cuugguaggagacugagca

SEQ ID NO: 2780053 - RNA, 19 nt, Artificial Sequence
  Description of Artificial Sequence: Synthetic oligonucleotide
ucuugcucagcuuauauuu

SEQ ID NO: 2780054 - RNA, 19 nt, Artificial Sequence
  Description of Artificial Sequence: Synthetic oligonucleotide
ggacaugagguauaggugg

SEQ ID NO: 2780055 - RNA, 19 nt, Artificial Sequence
  Description of Artificial Sequence: Synthetic oligonucleotide
cucagcuuauauuuguccc

SEQ ID NO: 2780056 - RNA, 19 nt, Artificial Sequence
  Description of Artificial Sequence: Synthetic oligonucleotide
uucgguuuguagcaggucu

SEQ ID NO: 2780057 - RNA, 19 nt, Artificial Sequence
  Description of Artificial Sequence: Synthetic oligonucleotide
cuuauaagggcaagugaag

SEQ ID NO: 2780058 - RNA, 19 nt, Artificial Sequence
  Description of Artificial Sequence: Synthetic oligonucleotide
cuucuggacauccaggaag

SEQ ID NO: 2780059 - RNA, 19 nt, Artificial Sequence
  Description of Artificial Sequence: Synthetic oligonucleotide
ucuuucagcuccuucuugc

SEQ ID NO: 2780060 - RNA, 19 nt, Artificial Sequence
  Description of Artificial Sequence: Synthetic oligonucleotide
uguuacaagccaccgugag

SEQ ID NO: 2780061 - RNA, 19 nt, Artificial Sequence
  Description of Artificial Sequence: Synthetic oligonucleotide
ucgacagacagacaggcaa

SEQ ID NO: 2780062 - RNA, 19 nt, Artificial Sequence
  Description of Artificial Sequence: Synthetic oligonucleotide
ucagcuuauauuugucccc

SEQ ID NO: 2780063 - RNA, 19 nt, Artificial Sequence
  Description of Artificial Sequence: Synthetic oligonucleotide
agguucucgacagacagac

SEQ ID NO: 2780064 - RNA, 19 nt, Artificial Sequence
  Description of Artificial Sequence: Synthetic oligonucleotide
acucugguacccuugguag

SEQ ID NO: 2780065 - RNA, 19 nt, Artificial Sequence
  Description of Artificial Sequence: Synthetic oligonucleotide
uucuggacauccaggaagc

SEQ ID NO: 2780066 - RNA, 19 nt, Artificial Sequence
  Description of Artificial Sequence: Synthetic oligonucleotide
aaggauggggacaugaggu

SEQ ID NO: 2780067 - RNA, 19 nt, Artificial Sequence
  Description of Artificial Sequence: Synthetic oligonucleotide
guauaggugggguaaggag

SEQ ID NO: 2780068 - RNA, 19 nt, Artificial Sequence
  Description of Artificial Sequence: Synthetic oligonucleotide
agaaguuguuacaagccac

SEQ ID NO: 2780069 - RNA, 19 nt, Artificial Sequence
  Description of Artificial Sequence: Synthetic oligonucleotide
ugaagugggagaagguucu

SEQ ID NO: 2780070 - RNA, 19 nt, Artificial Sequence
  Description of Artificial Sequence: Synthetic oligonucleotide
ugcucaacuguucucccag

SEQ ID NO: 2780071 - RNA, 19 nt, Artificial Sequence
  Description of Artificial Sequence: Synthetic oligonucleotide
augggcauggaacacguug

SEQ ID NO: 2780072 - RNA, 19 nt, Artificial Sequence
  Description of Artificial Sequence: Synthetic oligonucleotide
acgacauacuccugaaguc

SEQ ID NO: 2780073 - RNA, 19 nt, Artificial Sequence
  Description of Artificial Sequence: Synthetic oligonucleotide
aaguuguuacaagccaccg

SEQ ID NO: 2780074 - RNA, 19 nt, Artificial Sequence
  Description of Artificial Sequence: Synthetic oligonucleotide
accagcacgacauacuccu

SEQ ID NO: 2780075 - RNA, 19 nt, Artificial Sequence
  Description of Artificial Sequence: Synthetic oligonucleotide
ucccagaagaaguuguuac

SEQ ID NO: 2780076 - RNA, 19 nt, Artificial Sequence
  Description of Artificial Sequence: Synthetic oligonucleotide
ugguaggagacugagcaag

SEQ ID NO: 2780077 - RNA, 19 nt, Artificial Sequence
  Description of Artificial Sequence: Synthetic oligonucleotide
uucucgacagacagacagg

SEQ ID NO: 2780078 - RNA, 19 nt, Artificial Sequence
  Description of Artificial Sequence: Synthetic oligonucleotide
caaggauggggacaugagg

SEQ ID NO: 2780079 - RNA, 19 nt, Artificial Sequence
  Description of Artificial Sequence: Synthetic oligonucleotide
agugcucaacuguucuccc

SEQ ID NO: 2780080 - RNA, 19 nt, Artificial Sequence
  Description of Artificial Sequence: Synthetic oligonucleotide
aucugcauccuucuggaca

SEQ ID NO: 2780081 - RNA, 19 nt, Artificial Sequence
  Description of Artificial Sequence: Synthetic oligonucleotide
aagcugcaaauguggcacc

SEQ ID NO: 2780082 - RNA, 19 nt, Artificial Sequence
  Description of Artificial Sequence: Synthetic oligonucleotide
caaauguggcaccuggagc

SEQ ID NO: 2780083 - RNA, 19 nt, Artificial Sequence
  Description of Artificial Sequence: Synthetic oligonucleotide
ggcacugccaguuagcccc

SEQ ID NO: 2780084 - RNA, 19 nt, Artificial Sequence
  Description of Artificial Sequence: Synthetic oligonucleotide
gagaguucgguuuguagca

SEQ ID NO: 2780085 - RNA, 19 nt, Artificial Sequence
  Description of Artificial Sequence: Synthetic oligonucleotide
ggagaguucgguuuguagc

SEQ ID NO: 2780086 - RNA, 19 nt, Artificial Sequence
  Description of Artificial Sequence: Synthetic oligonucleotide
ucauccaguuccuucauua

SEQ ID NO: 2780087 - RNA, 19 nt, Artificial Sequence
  Description of Artificial Sequence: Synthetic oligonucleotide
agucuuauaagggcaagug

SEQ ID NO: 2780088 - RNA, 19 nt, Artificial Sequence
  Description of Artificial Sequence: Synthetic oligonucleotide
guugaugagggucuccaug

SEQ ID NO: 2780089 - RNA, 19 nt, Artificial Sequence
  Description of Artificial Sequence: Synthetic oligonucleotide
aacacguugaugagggucu

SEQ ID NO: 2780090 - RNA, 19 nt, Artificial Sequence
  Description of Artificial Sequence: Synthetic oligonucleotide
aagugggagaagguucucg

SEQ ID NO: 2780091 - RNA, 19 nt, Artificial Sequence
  Description of Artificial Sequence: Synthetic oligonucleotide
ugggcauggaacacguuga

SEQ ID NO: 2780092 - RNA, 19 nt, Artificial Sequence
  Description of Artificial Sequence: Synthetic oligonucleotide
agaaugggcauggaacacg

SEQ ID NO: 2780093 - RNA, 19 nt, Artificial Sequence
  Description of Artificial Sequence: Synthetic oligonucleotide
uccuucuggacauccagga

SEQ ID NO: 2780094 - RNA, 19 nt, Artificial Sequence
  Description of Artificial Sequence: Synthetic oligonucleotide
gcauggaacacguugauga

SEQ ID NO: 2780095 - RNA, 19 nt, Artificial Sequence
  Description of Artificial Sequence: Synthetic oligonucleotide
ugccaguuagccccaagug

SEQ ID NO: 2780096 - RNA, 19 nt, Artificial Sequence
  Description of Artificial Sequence: Synthetic oligonucleotide
cugaagugggagaagguuc

SEQ ID NO: 2780097 - RNA, 19 nt, Artificial Sequence
  Description of Artificial Sequence: Synthetic oligonucleotide
ucugcauccuucuggacau

SEQ ID NO: 2780098 - RNA, 19 nt, Artificial Sequence
  Description of Artificial Sequence: Synthetic oligonucleotide
ucucgacagacagacaggc

SEQ ID NO: 2780099 - RNA, 19 nt, Artificial Sequence
  Description of Artificial Sequence: Synthetic oligonucleotide
ucagagcccauuucagcag

SEQ ID NO: 2780100 - RNA, 19 nt, Artificial Sequence
  Description of Artificial Sequence: Synthetic oligonucleotide
uacuccugaagucuacuuc

SEQ ID NO: 2780101 - RNA, 19 nt, Artificial Sequence
  Description of Artificial Sequence: Synthetic oligonucleotide
caacuguucucccagaaga

SEQ ID NO: 2780102 - RNA, 19 nt, Artificial Sequence
  Description of Artificial Sequence: Synthetic oligonucleotide
auuucagcagcacacgguu

SEQ ID NO: 2780103 - RNA, 19 nt, Artificial Sequence
  Description of Artificial Sequence: Synthetic oligonucleotide
uuaccuuguccacagcauc

SEQ ID NO: 2780104 - RNA, 19 nt, Artificial Sequence
  Description of Artificial Sequence: Synthetic oligonucleotide
cagaagaaguuguuacaag

SEQ ID NO: 2780105 - RNA, 19 nt, Artificial Sequence
  Description of Artificial Sequence: Synthetic oligonucleotide
cuugccagaaugggcaugg

SEQ ID NO: 2780106 - RNA, 19 nt, Artificial Sequence
  Description of Artificial Sequence: Synthetic oligonucleotide
uaccuuguccacagcaucu

SEQ ID NO: 2780107 - RNA, 19 nt, Artificial Sequence
  Description of Artificial Sequence: Synthetic oligonucleotide
gaguucgguuuguagcagg

SEQ ID NO: 2780108 - RNA, 19 nt, Artificial Sequence
  Description of Artificial Sequence: Synthetic oligonucleotide
gaagggcacugccaguuag

SEQ ID NO: 2780109 - RNA, 19 nt, Artificial Sequence
  Description of Artificial Sequence: Synthetic oligonucleotide
ugagguauaggugggguaa

SEQ ID NO: 2780110 - RNA, 19 nt, Artificial Sequence
  Description of Artificial Sequence: Synthetic oligonucleotide
gacaugagguauagguggg

SEQ ID NO: 2780111 - RNA, 19 nt, Artificial Sequence
  Description of Artificial Sequence: Synthetic oligonucleotide
cauccaggaagccggagag

SEQ ID NO: 2780112 - RNA, 19 nt, Artificial Sequence
  Description of Artificial Sequence: Synthetic oligonucleotide
gguaaggagaagaaagcag

SEQ ID NO: 2780113 - RNA, 19 nt, Artificial Sequence
  Description of Artificial Sequence: Synthetic oligonucleotide
acugagcaaggauggggac

SEQ ID NO: 2780114 - RNA, 19 nt, Artificial Sequence
  Description of Artificial Sequence: Synthetic oligonucleotide
guuuguagcaggucuuuca

SEQ ID NO: 2780115 - RNA, 19 nt, Artificial Sequence
  Description of Artificial Sequence: Synthetic oligonucleotide
cuugcucagcuuauauuug

SEQ ID NO: 2780116 - RNA, 19 nt, Artificial Sequence
  Description of Artificial Sequence: Synthetic oligonucleotide
uccauggcagucuccagcu

SEQ ID NO: 2780117 - RNA, 19 nt, Artificial Sequence
  Description of Artificial Sequence: Synthetic oligonucleotide
aagucuuauaagggcaagu

SEQ ID NO: 2780118 - RNA, 19 nt, Artificial Sequence
  Description of Artificial Sequence: Synthetic oligonucleotide
gagaagguucucgacagac

SEQ ID NO: 2780119 - RNA, 19 nt, Artificial Sequence
  Description of Artificial Sequence: Synthetic oligonucleotide
cacacgguuggccugggcc

SEQ ID NO: 2780120 - RNA, 19 nt, Artificial Sequence
  Description of Artificial Sequence: Synthetic oligonucleotide
caggaagccggagaguucg

SEQ ID NO: 2780121 - RNA, 19 nt, Artificial Sequence
  Description of Artificial Sequence: Synthetic oligonucleotide
gagcgcagccaccagcacg

SEQ ID NO: 2780122 - RNA, 19 nt, Artificial Sequence
  Description of Artificial Sequence: Synthetic oligonucleotide
agugggagaagguucucga

SEQ ID NO: 2780123 - RNA, 19 nt, Artificial Sequence
  Description of Artificial Sequence: Synthetic oligonucleotide
uugcucagcuuauauuugu

SEQ ID NO: 2780124 - RNA, 19 nt, Artificial Sequence
  Description of Artificial Sequence: Synthetic oligonucleotide
aguuguuacaagccaccgu

SEQ ID NO: 2780125 - RNA, 19 nt, Artificial Sequence
  Description of Artificial Sequence: Synthetic oligonucleotide
ugucuuuagcuguccuucc

SEQ ID NO: 2780126 - RNA, 19 nt, Artificial Sequence
  Description of Artificial Sequence: Synthetic oligonucleotide
cauccuucuggacauccag

SEQ ID NO: 2780127 - RNA, 19 nt, Artificial Sequence
  Description of Artificial Sequence: Synthetic oligonucleotide
auggaacacguugaugagg

SEQ ID NO: 2780128 - RNA, 19 nt, Artificial Sequence
  Description of Artificial Sequence: Synthetic oligonucleotide
aagggcacugccaguuagc

SEQ ID NO: 2780129 - RNA, 19 nt, Artificial Sequence
  Description of Artificial Sequence: Synthetic oligonucleotide
cauggaacacguugaugag

SEQ ID NO: 2780130 - RNA, 19 nt, Artificial Sequence
  Description of Artificial Sequence: Synthetic oligonucleotide
aggagacugagcaaggaug

SEQ ID NO: 2780131 - RNA, 19 nt, Artificial Sequence
  Description of Artificial Sequence: Synthetic oligonucleotide
gagaagaaagcagggauaa

SEQ ID NO: 2780132 - RNA, 19 nt, Artificial Sequence
  Description of Artificial Sequence: Synthetic oligonucleotide
cucagagcccauuucagca

SEQ ID NO: 2780133 - RNA, 19 nt, Artificial Sequence
  Description of Artificial Sequence: Synthetic oligonucleotide
gaacacguugaugaggguc

SEQ ID NO: 2780134 - RNA, 19 nt, Artificial Sequence
  Description of Artificial Sequence: Synthetic oligonucleotide
accacucugguacccuugg

SEQ ID NO: 2780135 - RNA, 19 nt, Artificial Sequence
  Description of Artificial Sequence: Synthetic oligonucleotide
ucugguacccuugguagga

SEQ ID NO: 2780136 - RNA, 19 nt, Artificial Sequence
  Description of Artificial Sequence: Synthetic oligonucleotide
aguuccuucauuaccuugu

SEQ ID NO: 2780137 - RNA, 19 nt, Artificial Sequence
  Description of Artificial Sequence: Synthetic oligonucleotide
uccugaagucuacuucccc

SEQ ID NO: 2780138 - RNA, 19 nt, Artificial Sequence
  Description of Artificial Sequence: Synthetic oligonucleotide
ggagacugagcaaggaugg

SEQ ID NO: 2780139 - RNA, 19 nt, Artificial Sequence
  Description of Artificial Sequence: Synthetic oligonucleotide
gaagucuuauaagggcaag

SEQ ID NO: 2780140 - RNA, 19 nt, Artificial Sequence
  Description of Artificial Sequence: Synthetic oligonucleotide
uaggagacugagcaaggau

SEQ ID NO: 2780141 - RNA, 19 nt, Artificial Sequence
  Description of Artificial Sequence: Synthetic oligonucleotide
uguucucccagaagaaguu

SEQ ID NO: 2780142 - RNA, 19 nt, Artificial Sequence
  Description of Artificial Sequence: Synthetic oligonucleotide
ucuacuuccccaucuccau

SEQ ID NO: 2780143 - RNA, 19 nt, Artificial Sequence
  Description of Artificial Sequence: Synthetic oligonucleotide
cauuaccuuguccacagca

SEQ ID NO: 2780144 - RNA, 19 nt, Artificial Sequence
  Description of Artificial Sequence: Synthetic oligonucleotide
uuguuacaagccaccguga

SEQ ID NO: 2780145 - RNA, 19 nt, Artificial Sequence
  Description of Artificial Sequence: Synthetic oligonucleotide
ggggaagucuuauaagggc

SEQ ID NO: 2780146 - RNA, 19 nt, Artificial Sequence
  Description of Artificial Sequence: Synthetic oligonucleotide
acauccaggaagccggaga

SEQ ID NO: 2780147 - RNA, 19 nt, Artificial Sequence
  Description of Artificial Sequence: Synthetic oligonucleotide
agggauaaaggggaagucu

SEQ ID NO: 2780148 - RNA, 19 nt, Artificial Sequence
  Description of Artificial Sequence: Synthetic oligonucleotide
gucuuauaagggcaaguga

SEQ ID NO: 2780149 - RNA, 19 nt, Artificial Sequence
  Description of Artificial Sequence: Synthetic oligonucleotide
acuguucucccagaagaag

SEQ ID NO: 2780150 - RNA, 19 nt, Artificial Sequence
  Description of Artificial Sequence: Synthetic oligonucleotide
cuccauggcagucuccagc

SEQ ID NO: 2780151 - RNA, 19 nt, Artificial Sequence
  Description of Artificial Sequence: Synthetic oligonucleotide
cuggacauccaggaagccg

SEQ ID NO: 2780152 - RNA, 19 nt, Artificial Sequence
  Description of Artificial Sequence: Synthetic oligonucleotide
cuccuugccagaaugggca

SEQ ID NO: 2780153 - RNA, 19 nt, Artificial Sequence
  Description of Artificial Sequence: Synthetic oligonucleotide
uacccuugguaggagacug

SEQ ID NO: 2780154 - RNA, 19 nt, Artificial Sequence
  Description of Artificial Sequence: Synthetic oligonucleotide
ugagcaaggauggggacau

SEQ ID NO: 2780155 - RNA, 19 nt, Artificial Sequence
  Description of Artificial Sequence: Synthetic oligonucleotide
cucugguacccuugguagg

SEQ ID NO: 2780156 - RNA, 19 nt, Artificial Sequence
  Description of Artificial Sequence: Synthetic oligonucleotide
cugucuuuagcuguccuuc

SEQ ID NO: 2780157 - RNA, 19 nt, Artificial Sequence
  Description of Artificial Sequence: Synthetic oligonucleotide
agcagcacacgguuggccu

SEQ ID NO: 2780158 - RNA, 19 nt, Artificial Sequence
  Description of Artificial Sequence: Synthetic oligonucleotide
agacaggcaagcugcaaau

SEQ ID NO: 2780159 - RNA, 19 nt, Artificial Sequence
  Description of Artificial Sequence: Synthetic oligonucleotide
ugcucagcuuauauuuguc

SEQ ID NO: 2780160 - RNA, 19 nt, Artificial Sequence
  Description of Artificial Sequence: Synthetic oligonucleotide
agugacagaccugggccac

SEQ ID NO: 2780161 - RNA, 19 nt, Artificial Sequence
  Description of Artificial Sequence: Synthetic oligonucleotide
cauccaguuccuucauuac

SEQ ID NO: 2780162 - RNA, 19 nt, Artificial Sequence
  Description of Artificial Sequence: Synthetic oligonucleotide
uucuugcucagcuuauauu

SEQ ID NO: 2780163 - RNA, 19 nt, Artificial Sequence
  Description of Artificial Sequence: Synthetic oligonucleotide
ugcauccuucuggacaucc

SEQ ID NO: 2780164 - RNA, 19 nt, Artificial Sequence
  Description of Artificial Sequence: Synthetic oligonucleotide
gucuuuagcuguccuuccc

SEQ ID NO: 2780165 - RNA, 19 nt, Artificial Sequence
  Description of Artificial Sequence: Synthetic oligonucleotide
gacugagcaaggaugggga

SEQ ID NO: 2780166 - RNA, 19 nt, Artificial Sequence
  Description of Artificial Sequence: Synthetic oligonucleotide
auaaaggggaagucuuaua

SEQ ID NO: 2780167 - RNA, 19 nt, Artificial Sequence
  Description of Artificial Sequence: Synthetic oligonucleotide
gcucagcuuauauuugucc

SEQ ID NO: 2780168 - RNA, 19 nt, Artificial Sequence
  Description of Artificial Sequence: Synthetic oligonucleotide
gccaguuagccccaagugc

SEQ ID NO: 2780169 - RNA, 19 nt, Artificial Sequence
  Description of Artificial Sequence: Synthetic oligonucleotide
acagaccugggccaccacu

SEQ ID NO: 2780170 - RNA, 19 nt, Artificial Sequence
  Description of Artificial Sequence: Synthetic oligonucleotide
cuccugaagucuacuuccc

SEQ ID NO: 2780171 - RNA, 19 nt, Artificial Sequence
  Description of Artificial Sequence: Synthetic oligonucleotide
uacuuccccaucuccauuu

SEQ ID NO: 2780172 - RNA, 19 nt, Artificial Sequence
  Description of Artificial Sequence: Synthetic oligonucleotide
gagaccugucuuuagcugu

SEQ ID NO: 2780173 - RNA, 19 nt, Artificial Sequence
  Description of Artificial Sequence: Synthetic oligonucleotide
acacgguuggccugggccu

SEQ ID NO: 2780174 - RNA, 19 nt, Artificial Sequence
  Description of Artificial Sequence: Synthetic oligonucleotide
cacgacauacuccugaagu

SEQ ID NO: 2780175 - RNA, 19 nt, Artificial Sequence
  Description of Artificial Sequence: Synthetic oligonucleotide
agcccauuucagcagcaca

SEQ ID NO: 2780176 - RNA, 19 nt, Artificial Sequence
  Description of Artificial Sequence: Synthetic oligonucleotide
uguccacagcaucugcauc

SEQ ID NO: 2780177 - RNA, 19 nt, Artificial Sequence
  Description of Artificial Sequence: Synthetic oligonucleotide
agcaaggauggggacauga

SEQ ID NO: 2780178 - RNA, 19 nt, Artificial Sequence
  Description of Artificial Sequence: Synthetic oligonucleotide
agccccaagugcucaacug

SEQ ID NO: 2780179 - RNA, 19 nt, Artificial Sequence
  Description of Artificial Sequence: Synthetic oligonucleotide
uccaggaagccggagaguu

SEQ ID NO: 2780180 - RNA, 19 nt, Artificial Sequence
  Description of Artificial Sequence: Synthetic oligonucleotide
uuucauccaguuccuucau

SEQ ID NO: 2780181 - RNA, 19 nt, Artificial Sequence
  Description of Artificial Sequence: Synthetic oligonucleotide
acauacuccugaagucuac

SEQ ID NO: 2780182 - RNA, 19 nt, Artificial Sequence
  Description of Artificial Sequence: Synthetic oligonucleotide
acaugagguauaggugggg

SEQ ID NO: 2780183 - RNA, 19 nt, Artificial Sequence
  Description of Artificial Sequence: Synthetic oligonucleotide
caagccaccgugagcgcag

SEQ ID NO: 2780184 - RNA, 19 nt, Artificial Sequence
  Description of Artificial Sequence: Synthetic oligonucleotide
ggggacaugagguauaggu

SEQ ID NO: 2780185 - RNA, 19 nt, Artificial Sequence
  Description of Artificial Sequence: Synthetic oligonucleotide
gcaagugaagggcacugcc

SEQ ID NO: 2780186 - RNA, 19 nt, Artificial Sequence
  Description of Artificial Sequence: Synthetic oligonucleotide
agguauaggugggguaagg

SEQ ID NO: 2780187 - RNA, 19 nt, Artificial Sequence
  Description of Artificial Sequence: Synthetic oligonucleotide
auccuucuggacauccagg

SEQ ID NO: 2780188 - RNA, 19 nt, Artificial Sequence
  Description of Artificial Sequence: Synthetic oligonucleotide
gagacugagcaaggauggg

SEQ ID NO: 2780189 - RNA, 19 nt, Artificial Sequence
  Description of Artificial Sequence: Synthetic oligonucleotide
cagagcccauuucagcagc

SEQ ID NO: 2780190 - RNA, 19 nt, Artificial Sequence
  Description of Artificial Sequence: Synthetic oligonucleotide
ucauuaccuuguccacagc

SEQ ID NO: 2780191 - RNA, 19 nt, Artificial Sequence
  Description of Artificial Sequence: Synthetic oligonucleotide
caagugaagggcacugcca

SEQ ID NO: 2780192 - RNA, 19 nt, Artificial Sequence
  Description of Artificial Sequence: Synthetic oligonucleotide
caguuccuucauuaccuug

SEQ ID NO: 2780193 - RNA, 19 nt, Artificial Sequence
  Description of Artificial Sequence: Synthetic oligonucleotide
uguggcaccuggagcggug

SEQ ID NO: 2780194 - RNA, 19 nt, Artificial Sequence
  Description of Artificial Sequence: Synthetic oligonucleotide
uguggggagaccugucuuu

SEQ ID NO: 2780195 - RNA, 19 nt, Artificial Sequence
  Description of Artificial Sequence: Synthetic oligonucleotide
caagugcucaacuguucuc

SEQ ID NO: 2780196 - RNA, 19 nt, Artificial Sequence
  Description of Artificial Sequence: Synthetic oligonucleotide
aacuguucucccagaagaa

SEQ ID NO: 2780197 - RNA, 19 nt, Artificial Sequence
  Description of Artificial Sequence: Synthetic oligonucleotide
gccagaaugggcauggaac

SEQ ID NO: 2780198 - RNA, 19 nt, Artificial Sequence
  Description of Artificial Sequence: Synthetic oligonucleotide
caccagcacgacauacucc

SEQ ID NO: 2780199 - RNA, 19 nt, Artificial Sequence
  Description of Artificial Sequence: Synthetic oligonucleotide
uccagcucagagcccauuu

SEQ ID NO: 2780200 - RNA, 19 nt, Artificial Sequence
  Description of Artificial Sequence: Synthetic oligonucleotide
cagaccugggccaccacuc

SEQ ID NO: 2780201 - RNA, 19 nt, Artificial Sequence
  Description of Artificial Sequence: Synthetic oligonucleotide
agccaccagcacgacauac

SEQ ID NO: 2780202 - RNA, 19 nt, Artificial Sequence
  Description of Artificial Sequence: Synthetic oligonucleotide
auuaccuuguccacagcau

SEQ ID NO: 2780203 - RNA, 19 nt, Artificial Sequence
  Description of Artificial Sequence: Synthetic oligonucleotide
uugguaggagacugagcaa

SEQ ID NO: 2780204 - RNA, 19 nt, Artificial Sequence
  Description of Artificial Sequence: Synthetic oligonucleotide
auacuccugaagucuacuu

SEQ ID NO: 2780205 - RNA, 19 nt, Artificial Sequence
  Description of Artificial Sequence: Synthetic oligonucleotide
ucgguuuguagcaggucuu

SEQ ID NO: 2780206 - RNA, 19 nt, Artificial Sequence
  Description of Artificial Sequence: Synthetic oligonucleotide
ggagaccugucuuuagcug

SEQ ID NO: 2780207 - RNA, 19 nt, Artificial Sequence
  Description of Artificial Sequence: Synthetic oligonucleotide
uggggagaccugucuuuag

SEQ ID NO: 2780208 - RNA, 19 nt, Artificial Sequence
  Description of Artificial Sequence: Synthetic oligonucleotide
gagguauaggugggguaag

SEQ ID NO: 2780209 - RNA, 19 nt, Artificial Sequence
  Description of Artificial Sequence: Synthetic oligonucleotide
agcagggauaaaggggaag

SEQ ID NO: 2780210 - RNA, 19 nt, Artificial Sequence
  Description of Artificial Sequence: Synthetic oligonucleotide
agcacgacauacuccugaa

SEQ ID NO: 2780211 - RNA, 19 nt, Artificial Sequence
  Description of Artificial Sequence: Synthetic oligonucleotide
agaguucgguuuguagcag

SEQ ID NO: 2780212 - RNA, 19 nt, Artificial Sequence
  Description of Artificial Sequence: Synthetic oligonucleotide
agaccugucuuuagcuguc

SEQ ID NO: 2780213 - RNA, 19 nt, Artificial Sequence
  Description of Artificial Sequence: Synthetic oligonucleotide
auggggacaugagguauag

SEQ ID NO: 2780214 - RNA, 19 nt, Artificial Sequence
  Description of Artificial Sequence: Synthetic oligonucleotide
gggguaaggagaagaaagc

SEQ ID NO: 2780215 - RNA, 19 nt, Artificial Sequence
  Description of Artificial Sequence: Synthetic oligonucleotide
uagccccaagugcucaacu

SEQ ID NO: 2780216 - RNA, 19 nt, Artificial Sequence
  Description of Artificial Sequence: Synthetic oligonucleotide
acguugaugagggucucca

SEQ ID NO: 2780217 - RNA, 19 nt, Artificial Sequence
  Description of Artificial Sequence: Synthetic oligonucleotide
agugaagggcacugccagu

SEQ ID NO: 2780218 - RNA, 19 nt, Artificial Sequence
  Description of Artificial Sequence: Synthetic oligonucleotide
uccuucuugcucagcuuau

SEQ ID NO: 2780219 - RNA, 19 nt, Artificial Sequence
  Description of Artificial Sequence: Synthetic oligonucleotide
ugguacccuugguaggaga

SEQ ID NO: 2780220 - RNA, 19 nt, Artificial Sequence
  Description of Artificial Sequence: Synthetic oligonucleotide
ugggccugaagugggagaa

SEQ ID NO: 2780221 - RNA, 19 nt, Artificial Sequence
  Description of Artificial Sequence: Synthetic oligonucleotide
ggcagucuccagcucagag

SEQ ID NO: 2780222 - RNA, 19 nt, Artificial Sequence
  Description of Artificial Sequence: Synthetic oligonucleotide
ugagggucuccauggcagu

SEQ ID NO: 2780223 - RNA, 19 nt, Artificial Sequence
  Description of Artificial Sequence: Synthetic oligonucleotide
augagguauagguggggua

SEQ ID NO: 2780224 - RNA, 19 nt, Artificial Sequence
  Description of Artificial Sequence: Synthetic oligonucleotide
gauaaaggggaagucuuau

SEQ ID NO: 2780225 - RNA, 19 nt, Artificial Sequence
  Description of Artificial Sequence: Synthetic oligonucleotide
ccauuucagcagcacacgg

SEQ ID NO: 2780226 - RNA, 19 nt, Artificial Sequence
  Description of Artificial Sequence: Synthetic oligonucleotide
cuucauuaccuuguccaca

SEQ ID NO: 2780227 - RNA, 19 nt, Artificial Sequence
  Description of Artificial Sequence: Synthetic oligonucleotide
gguaggagacugagcaagg

SEQ ID NO: 2780228 - RNA, 19 nt, Artificial Sequence
  Description of Artificial Sequence: Synthetic oligonucleotide
agccggagaguucgguuug

SEQ ID NO: 2780229 - RNA, 19 nt, Artificial Sequence
  Description of Artificial Sequence: Synthetic oligonucleotide
guuccuucauuaccuuguc

SEQ ID NO: 2780230 - RNA, 19 nt, Artificial Sequence
  Description of Artificial Sequence: Synthetic oligonucleotide
aagguucucgacagacaga

SEQ ID NO: 2780231 - RNA, 19 nt, Artificial Sequence
  Description of Artificial Sequence: Synthetic oligonucleotide
gggacaugagguauaggug

SEQ ID NO: 2780232 - RNA, 19 nt, Artificial Sequence
  Description of Artificial Sequence: Synthetic oligonucleotide
acugccaguuagccccaag

SEQ ID NO: 2780233 - RNA, 19 nt, Artificial Sequence
  Description of Artificial Sequence: Synthetic oligonucleotide
uucauccaguuccuucauu

SEQ ID NO: 2780234 - RNA, 19 nt, Artificial Sequence
  Description of Artificial Sequence: Synthetic oligonucleotide
agaagguucucgacagaca

SEQ ID NO: 2780235 - RNA, 19 nt, Artificial Sequence
  Description of Artificial Sequence: Synthetic oligonucleotide
guuggccugggccugaagu

SEQ ID NO: 2780236 - RNA, 19 nt, Artificial Sequence
  Description of Artificial Sequence: Synthetic oligonucleotide
ggggagaccugucuuuagc

SEQ ID NO: 2780237 - RNA, 19 nt, Artificial Sequence
  Description of Artificial Sequence: Synthetic oligonucleotide
gggaagucuuauaagggca

SEQ ID NO: 2780238 - RNA, 19 nt, Artificial Sequence
  Description of Artificial Sequence: Synthetic oligonucleotide
aguucgguuuguagcaggu

SEQ ID NO: 2780239 - RNA, 19 nt, Artificial Sequence
  Description of Artificial Sequence: Synthetic oligonucleotide
aagccaccgugagcgcagc

SEQ ID NO: 2780240 - RNA, 19 nt, Artificial Sequence
  Description of Artificial Sequence: Synthetic oligonucleotide
gugggagaagguucucgac

SEQ ID NO: 2780241 - RNA, 19 nt, Artificial Sequence
  Description of Artificial Sequence: Synthetic oligonucleotide
ugacagaccugggccacca

SEQ ID NO: 2780242 - RNA, 19 nt, Artificial Sequence
  Description of Artificial Sequence: Synthetic oligonucleotide
ucuggacauccaggaagcc

SEQ ID NO: 2780243 - RNA, 19 nt, Artificial Sequence
  Description of Artificial Sequence: Synthetic oligonucleotide
cagaaugggcauggaacac

SEQ ID NO: 2780244 - RNA, 19 nt, Artificial Sequence
  Description of Artificial Sequence: Synthetic oligonucleotide
aguuagccccaagugcuca

SEQ ID NO: 2780245 - RNA, 19 nt, Artificial Sequence
  Description of Artificial Sequence: Synthetic oligonucleotide
cagacaggcaagcugcaaa

SEQ ID NO: 2780246 - RNA, 19 nt, Artificial Sequence
  Description of Artificial Sequence: Synthetic oligonucleotide
acagacagacaggcaagcu

SEQ ID NO: 2780247 - RNA, 19 nt, Artificial Sequence
  Description of Artificial Sequence: Synthetic oligonucleotide
uccccaucuccauuuucau

SEQ ID NO: 2780248 - RNA, 19 nt, Artificial Sequence
  Description of Artificial Sequence: Synthetic oligonucleotide
aggauggggacaugaggua

SEQ ID NO: 2780249 - RNA, 19 nt, Artificial Sequence
  Description of Artificial Sequence: Synthetic oligonucleotide
gaccugggccaccacucug

SEQ ID NO: 2780250 - RNA, 19 nt, Artificial Sequence
  Description of Artificial Sequence: Synthetic oligonucleotide
ccagaaugggcauggaaca

SEQ ID NO: 2780251 - RNA, 19 nt, Artificial Sequence
  Description of Artificial Sequence: Synthetic oligonucleotide
ggguaaggagaagaaagca

SEQ ID NO: 2780252 - RNA, 19 nt, Artificial Sequence
  Description of Artificial Sequence: Synthetic oligonucleotide
uacaagccaccgugagcgc

SEQ ID NO: 2780253 - RNA, 19 nt, Artificial Sequence
  Description of Artificial Sequence: Synthetic oligonucleotide
accuggagcggugugggga

SEQ ID NO: 2780254 - RNA, 19 nt, Artificial Sequence
  Description of Artificial Sequence: Synthetic oligonucleotide
ucagcagcacacgguuggc

SEQ ID NO: 2780255 - RNA, 19 nt, Artificial Sequence
  Description of Artificial Sequence: Synthetic oligonucleotide
cauuucagcagcacacggu

SEQ ID NO: 2780256 - RNA, 19 nt, Artificial Sequence
  Description of Artificial Sequence: Synthetic oligonucleotide
cagcacgacauacuccuga

SEQ ID NO: 2780257 - RNA, 19 nt, Artificial Sequence
  Description of Artificial Sequence: Synthetic oligonucleotide
gcaucugcauccuucugga

SEQ ID NO: 2780258 - RNA, 19 nt, Artificial Sequence
  Description of Artificial Sequence: Synthetic oligonucleotide
gacauacuccugaagucua

SEQ ID NO: 2780259 - RNA, 19 nt, Artificial Sequence
  Description of Artificial Sequence: Synthetic oligonucleotide
accuuguccacagcaucug

SEQ ID NO: 2780260 - RNA, 19 nt, Artificial Sequence
  Description of Artificial Sequence: Synthetic oligonucleotide
uccacagcaucugcauccu

SEQ ID NO: 2780261 - RNA, 19 nt, Artificial Sequence
  Description of Artificial Sequence: Synthetic oligonucleotide
gacauccaggaagccggag

SEQ ID NO: 2780262 - RNA, 19 nt, Artificial Sequence
  Description of Artificial Sequence: Synthetic oligonucleotide
gcaagcugcaaauguggca

SEQ ID NO: 2780263 - RNA, 19 nt, Artificial Sequence
  Description of Artificial Sequence: Synthetic oligonucleotide
uggggacaugagguauagg

SEQ ID NO: 2780264 - RNA, 19 nt, Artificial Sequence
  Description of Artificial Sequence: Synthetic oligonucleotide
agaccugggccaccacucu

SEQ ID NO: 2780265 - RNA, 19 nt, Artificial Sequence
  Description of Artificial Sequence: Synthetic oligonucleotide
ccuccuugccagaaugggc

SEQ ID NO: 2780266 - RNA, 19 nt, Artificial Sequence
  Description of Artificial Sequence: Synthetic oligonucleotide
gaaugggcauggaacacgu

SEQ ID NO: 2780267 - RNA, 19 nt, Artificial Sequence
  Description of Artificial Sequence: Synthetic oligonucleotide
gucuccagcucagagccca

SEQ ID NO: 2780268 - RNA, 19 nt, Artificial Sequence
  Description of Artificial Sequence: Synthetic oligonucleotide
cucaacuguucucccagaa

SEQ ID NO: 2780269 - RNA, 19 nt, Artificial Sequence
  Description of Artificial Sequence: Synthetic oligonucleotide
gguacccuugguaggagac

SEQ ID NO: 2780270 - RNA, 19 nt, Artificial Sequence
  Description of Artificial Sequence: Synthetic oligonucleotide
agccaccgugagcgcagcc

SEQ ID NO: 2780271 - RNA, 19 nt, Artificial Sequence
  Description of Artificial Sequence: Synthetic oligonucleotide
cagggauaaaggggaaguc

SEQ ID NO: 2780272 - RNA, 19 nt, Artificial Sequence
  Description of Artificial Sequence: Synthetic oligonucleotide
ccugaagucuacuucccca

SEQ ID NO: 2780273 - RNA, 19 nt, Artificial Sequence
  Description of Artificial Sequence: Synthetic oligonucleotide
agcugcaaauguggcaccu

SEQ ID NO: 2780274 - RNA, 19 nt, Artificial Sequence
  Description of Artificial Sequence: Synthetic oligonucleotide
guaggagacugagcaagga

SEQ ID NO: 2780275 - RNA, 19 nt, Artificial Sequence
  Description of Artificial Sequence: Synthetic oligonucleotide
cacucugguacccuuggua

SEQ ID NO: 2780276 - RNA, 19 nt, Artificial Sequence
  Description of Artificial Sequence: Synthetic oligonucleotide
cuuccccaucuccauuuuc

SEQ ID NO: 2780277 - RNA, 19 nt, Artificial Sequence
  Description of Artificial Sequence: Synthetic oligonucleotide
gcccauuucagcagcacac

SEQ ID NO: 2780278 - RNA, 19 nt, Artificial Sequence
  Description of Artificial Sequence: Synthetic oligonucleotide
accgugagcgcagccacca

SEQ ID NO: 2780279 - RNA, 19 nt, Artificial Sequence
  Description of Artificial Sequence: Synthetic oligonucleotide
cugagcaaggauggggaca

SEQ ID NO: 2780280 - RNA, 19 nt, Artificial Sequence
  Description of Artificial Sequence: Synthetic oligonucleotide
caguuagccccaagugcuc

SEQ ID NO: 2780281 - RNA, 19 nt, Artificial Sequence
  Description of Artificial Sequence: Synthetic oligonucleotide
acacguugaugagggucuc

SEQ ID NO: 2780282 - RNA, 19 nt, Artificial Sequence
  Description of Artificial Sequence: Synthetic oligonucleotide
gugagcgcagccaccagca

SEQ ID NO: 2780283 - RNA, 19 nt, Artificial Sequence
  Description of Artificial Sequence: Synthetic oligonucleotide
gguauaggugggguaagga

SEQ ID NO: 2780284 - RNA, 19 nt, Artificial Sequence
  Description of Artificial Sequence: Synthetic oligonucleotide
cagcacacgguuggccugg

SEQ ID NO: 2780285 - RNA, 19 nt, Artificial Sequence
  Description of Artificial Sequence: Synthetic oligonucleotide
ggcaagcugcaaauguggc

SEQ ID NO: 2780286 - RNA, 19 nt, Artificial Sequence
  Description of Artificial Sequence: Synthetic oligonucleotide
caucugcauccuucuggac

SEQ ID NO: 2780287 - RNA, 19 nt, Artificial Sequence
  Description of Artificial Sequence: Synthetic oligonucleotide
gaccugucuuuagcugucc

SEQ ID NO: 2780288 - RNA, 19 nt, Artificial Sequence
  Description of Artificial Sequence: Synthetic oligonucleotide
agucuccagcucagagccc

SEQ ID NO: 2780289 - RNA, 19 nt, Artificial Sequence
  Description of Artificial Sequence: Synthetic oligonucleotide
gauggggacaugagguaua

SEQ ID NO: 2780290 - RNA, 19 nt, Artificial Sequence
  Description of Artificial Sequence: Synthetic oligonucleotide
gcaaggauggggacaugag

SEQ ID NO: 2780291 - RNA, 19 nt, Artificial Sequence
  Description of Artificial Sequence: Synthetic oligonucleotide
uccuugccagaaugggcau

SEQ ID NO: 2780292 - RNA, 19 nt, Artificial Sequence
  Description of Artificial Sequence: Synthetic oligonucleotide
agggucuccauggcagucu

SEQ ID NO: 2780293 - RNA, 19 nt, Artificial Sequence
  Description of Artificial Sequence: Synthetic oligonucleotide
agaagaaagcagggauaaa

SEQ ID NO: 2780294 - RNA, 19 nt, Artificial Sequence
  Description of Artificial Sequence: Synthetic oligonucleotide
gugcucaacuguucuccca

SEQ ID NO: 2780295 - RNA, 19 nt, Artificial Sequence
  Description of Artificial Sequence: Synthetic oligonucleotide
cacguugaugagggucucc

SEQ ID NO: 2780296 - RNA, 19 nt, Artificial Sequence
  Description of Artificial Sequence: Synthetic oligonucleotide
cucgacagacagacaggca

SEQ ID NO: 2780297 - RNA, 19 nt, Artificial Sequence
  Description of Artificial Sequence: Synthetic oligonucleotide
cccauuucagcagcacacg

SEQ ID NO: 2780298 - RNA, 19 nt, Artificial Sequence
  Description of Artificial Sequence: Synthetic oligonucleotide
ggagaagaaagcagggaua

SEQ ID NO: 2780299 - RNA, 19 nt, Artificial Sequence
  Description of Artificial Sequence: Synthetic oligonucleotide
cagcagcacacgguuggcc

SEQ ID NO: 2780300 - RNA, 19 nt, Artificial Sequence
  Description of Artificial Sequence: Synthetic oligonucleotide
ggaagucuuauaagggcaa

SEQ ID NO: 2780301 - RNA, 19 nt, Artificial Sequence
  Description of Artificial Sequence: Synthetic oligonucleotide
gagcccauuucagcagcac

SEQ ID NO: 2780302 - RNA, 19 nt, Artificial Sequence
  Description of Artificial Sequence: Synthetic oligonucleotide
agggcaagugaagggcacu

SEQ ID NO: 2780303 - RNA, 19 nt, Artificial Sequence
  Description of Artificial Sequence: Synthetic oligonucleotide
ccaguuagccccaagugcu

SEQ ID NO: 2780304 - RNA, 19 nt, Artificial Sequence
  Description of Artificial Sequence: Synthetic oligonucleotide
cugaagucuacuuccccau

SEQ ID NO: 2780305 - RNA, 19 nt, Artificial Sequence
  Description of Artificial Sequence: Synthetic oligonucleotide
cuucuugcucagcuuauau

SEQ ID NO: 2780306 - RNA, 19 nt, Artificial Sequence
  Description of Artificial Sequence: Synthetic oligonucleotide
gaagugggagaagguucuc

SEQ ID NO: 2780307 - RNA, 19 nt, Artificial Sequence
  Description of Artificial Sequence: Synthetic oligonucleotide
gaagccggagaguucgguu

SEQ ID NO: 2780308 - RNA, 19 nt, Artificial Sequence
  Description of Artificial Sequence: Synthetic oligonucleotide
gacagacaggcaagcugca

SEQ ID NO: 2780309 - RNA, 19 nt, Artificial Sequence
  Description of Artificial Sequence: Synthetic oligonucleotide
uggagcgguguggggagac

SEQ ID NO: 2780310 - RNA, 19 nt, Artificial Sequence
  Description of Artificial Sequence: Synthetic oligonucleotide
guuagccccaagugcucaa

SEQ ID NO: 2780311 - RNA, 19 nt, Artificial Sequence
  Description of Artificial Sequence: Synthetic oligonucleotide
caccgugagcgcagccacc

SEQ ID NO: 2780312 - RNA, 19 nt, Artificial Sequence
  Description of Artificial Sequence: Synthetic oligonucleotide
cccagaagaaguuguuaca

SEQ ID NO: 2780313 - RNA, 19 nt, Artificial Sequence
  Description of Artificial Sequence: Synthetic oligonucleotide
gagggucuccauggcaguc

SEQ ID NO: 2780314 - RNA, 19 nt, Artificial Sequence
  Description of Artificial Sequence: Synthetic oligonucleotide
gugggguaaggagaagaaa

SEQ ID NO: 2780315 - RNA, 19 nt, Artificial Sequence
  Description of Artificial Sequence: Synthetic oligonucleotide
acuuccccaucuccauuuu

SEQ ID NO: 2780316 - RNA, 19 nt, Artificial Sequence
  Description of Artificial Sequence: Synthetic oligonucleotide
ccuuguccacagcaucugc

SEQ ID NO: 2780317 - RNA, 19 nt, Artificial Sequence
  Description of Artificial Sequence: Synthetic oligonucleotide
ccagaagaaguuguuacaa

SEQ ID NO: 2780318 - RNA, 19 nt, Artificial Sequence
  Description of Artificial Sequence: Synthetic oligonucleotide
guucgguuuguagcagguc

SEQ ID NO: 2780319 - RNA, 19 nt, Artificial Sequence
  Description of Artificial Sequence: Synthetic oligonucleotide
ccuggagcgguguggggag

SEQ ID NO: 2780320 - RNA, 19 nt, Artificial Sequence
  Description of Artificial Sequence: Synthetic oligonucleotide
cugguacccuugguaggag

SEQ ID NO: 2780321 - RNA, 19 nt, Artificial Sequence
  Description of Artificial Sequence: Synthetic oligonucleotide
acagacaggcaagcugcaa

SEQ ID NO: 2780322 - RNA, 19 nt, Artificial Sequence
  Description of Artificial Sequence: Synthetic oligonucleotide
caugagguauagguggggu

SEQ ID NO: 2780323 - RNA, 19 nt, Artificial Sequence
  Description of Artificial Sequence: Synthetic oligonucleotide
cugggccugaagugggaga

SEQ ID NO: 2780324 - RNA, 19 nt, Artificial Sequence
  Description of Artificial Sequence: Synthetic oligonucleotide
cccuccuugccagaauggg

SEQ ID NO: 2780325 - RNA, 19 nt, Artificial Sequence
  Description of Artificial Sequence: Synthetic oligonucleotide
caccuggagcggugugggg

SEQ ID NO: 2780326 - RNA, 19 nt, Artificial Sequence
  Description of Artificial Sequence: Synthetic oligonucleotide
cugccaguuagccccaagu

SEQ ID NO: 2780327 - RNA, 19 nt, Artificial Sequence
  Description of Artificial Sequence: Synthetic oligonucleotide
ggcaagugaagggcacugc

SEQ ID NO: 2780328 - RNA, 19 nt, Artificial Sequence
  Description of Artificial Sequence: Synthetic oligonucleotide
gggcaagugaagggcacug

SEQ ID NO: 2780329 - RNA, 19 nt, Artificial Sequence
  Description of Artificial Sequence: Synthetic oligonucleotide
agagcccauuucagcagca

SEQ ID NO: 2780330 - RNA, 19 nt, Artificial Sequence
  Description of Artificial Sequence: Synthetic oligonucleotide
gggcacugccaguuagccc

SEQ ID NO: 2780331 - RNA, 19 nt, Artificial Sequence
  Description of Artificial Sequence: Synthetic oligonucleotide
gacagaccugggccaccac

SEQ ID NO: 2780332 - RNA, 19 nt, Artificial Sequence
  Description of Artificial Sequence: Synthetic oligonucleotide
ggugggguaaggagaagaa

SEQ ID NO: 2780333 - RNA, 19 nt, Artificial Sequence
  Description of Artificial Sequence: Synthetic oligonucleotide
cggagaguucgguuuguag

SEQ ID NO: 2780334 - RNA, 19 nt, Artificial Sequence
  Description of Artificial Sequence: Synthetic oligonucleotide
aggaagccggagaguucgg

SEQ ID NO: 2780335 - RNA, 19 nt, Artificial Sequence
  Description of Artificial Sequence: Synthetic oligonucleotide
cccaagugcucaacuguuc

SEQ ID NO: 2780336 - RNA, 19 nt, Artificial Sequence
  Description of Artificial Sequence: Synthetic oligonucleotide
ccccuccuugccagaaugg

SEQ ID NO: 2780337 - RNA, 19 nt, Artificial Sequence
  Description of Artificial Sequence: Synthetic oligonucleotide
aaugggcauggaacacguu

SEQ ID NO: 2780338 - RNA, 19 nt, Artificial Sequence
  Description of Artificial Sequence: Synthetic oligonucleotide
gcagggauaaaggggaagu

SEQ ID NO: 2780339 - RNA, 19 nt, Artificial Sequence
  Description of Artificial Sequence: Synthetic oligonucleotide
cccuugguaggagacugag

SEQ ID NO: 2780340 - RNA, 19 nt, Artificial Sequence
  Description of Artificial Sequence: Synthetic oligonucleotide
cucccagaagaaguuguua

SEQ ID NO: 2780341 - RNA, 19 nt, Artificial Sequence
  Description of Artificial Sequence: Synthetic oligonucleotide
gugacagaccugggccacc

SEQ ID NO: 2780342 - RNA, 19 nt, Artificial Sequence
  Description of Artificial Sequence: Synthetic oligonucleotide
cauacuccugaagucuacu

SEQ ID NO: 2780343 - RNA, 19 nt, Artificial Sequence
  Description of Artificial Sequence: Synthetic oligonucleotide
ggauaaaggggaagucuua

SEQ ID NO: 2780344 - RNA, 19 nt, Artificial Sequence
  Description of Artificial Sequence: Synthetic oligonucleotide
ggagaagguucucgacaga

SEQ ID NO: 2780345 - RNA, 19 nt, Artificial Sequence
  Description of Artificial Sequence: Synthetic oligonucleotide
cgugagcgcagccaccagc

SEQ ID NO: 2780346 - RNA, 19 nt, Artificial Sequence
  Description of Artificial Sequence: Synthetic oligonucleotide
ggccugggccugaaguggg

SEQ ID NO: 2780347 - RNA, 19 nt, Artificial Sequence
  Description of Artificial Sequence: Synthetic oligonucleotide
uugccagaaugggcaugga

SEQ ID NO: 2780348 - RNA, 19 nt, Artificial Sequence
  Description of Artificial Sequence: Synthetic oligonucleotide
agcgguguggggagaccug

SEQ ID NO: 2780349 - RNA, 19 nt, Artificial Sequence
  Description of Artificial Sequence: Synthetic oligonucleotide
ccaccgugagcgcagccac

SEQ ID NO: 2780350 - RNA, 19 nt, Artificial Sequence
  Description of Artificial Sequence: Synthetic oligonucleotide
gguguggggagaccugucu

SEQ ID NO: 2780351 - RNA, 19 nt, Artificial Sequence
  Description of Artificial Sequence: Synthetic oligonucleotide
gggauaaaggggaagucuu

SEQ ID NO: 2780352 - RNA, 19 nt, Artificial Sequence
  Description of Artificial Sequence: Synthetic oligonucleotide
agcaggucuuucagcuccu

SEQ ID NO: 2780353 - RNA, 19 nt, Artificial Sequence
  Description of Artificial Sequence: Synthetic oligonucleotide
gugaagggcacugccaguu

SEQ ID NO: 2780354 - RNA, 19 nt, Artificial Sequence
  Description of Artificial Sequence: Synthetic oligonucleotide
gggucuccauggcagucuc

SEQ ID NO: 2780355 - RNA, 19 nt, Artificial Sequence
  Description of Artificial Sequence: Synthetic oligonucleotide
ccaagugcucaacuguucu

SEQ ID NO: 2780356 - RNA, 19 nt, Artificial Sequence
  Description of Artificial Sequence: Synthetic oligonucleotide
guggggagaccugucuuua

SEQ ID NO: 2780357 - RNA, 19 nt, Artificial Sequence
  Description of Artificial Sequence: Synthetic oligonucleotide
gcucaacuguucucccaga

SEQ ID NO: 2780358 - RNA, 19 nt, Artificial Sequence
  Description of Artificial Sequence: Synthetic oligonucleotide
acccuugguaggagacuga

SEQ ID NO: 2780359 - RNA, 19 nt, Artificial Sequence
  Description of Artificial Sequence: Synthetic oligonucleotide
guacccuugguaggagacu

SEQ ID NO: 2780360 - RNA, 19 nt, Artificial Sequence
  Description of Artificial Sequence: Synthetic oligonucleotide
ccaggaagccggagaguuc

SEQ ID NO: 2780361 - RNA, 19 nt, Artificial Sequence
  Description of Artificial Sequence: Synthetic oligonucleotide
gguuggccugggccugaag

SEQ ID NO: 2780362 - RNA, 19 nt, Artificial Sequence
  Description of Artificial Sequence: Synthetic oligonucleotide
gggccaccacucugguacc

SEQ ID NO: 2780363 - RNA, 19 nt, Artificial Sequence
  Description of Artificial Sequence: Synthetic oligonucleotide
guguggggagaccugucuu

SEQ ID NO: 2780364 - RNA, 19 nt, Artificial Sequence
  Description of Artificial Sequence: Synthetic oligonucleotide
ccugggccugaagugggag

SEQ ID NO: 2780365 - RNA, 19 nt, Artificial Sequence
  Description of Artificial Sequence: Synthetic oligonucleotide
gccaccgugagcgcagcca

SEQ ID NO: 2780366 - RNA, 19 nt, Artificial Sequence
  Description of Artificial Sequence: Synthetic oligonucleotide
ggauggggacaugagguau

SEQ ID NO: 2780367 - RNA, 19 nt, Artificial Sequence
  Description of Artificial Sequence: Synthetic oligonucleotide
ggagcgguguggggagacc

SEQ ID NO: 2780368 - RNA, 19 nt, Artificial Sequence
  Description of Artificial Sequence: Synthetic oligonucleotide
ccagcacgacauacuccug

SEQ ID NO: 2780369 - RNA, 19 nt, Artificial Sequence
  Description of Artificial Sequence: Synthetic oligonucleotide
ccuugccagaaugggcaug

SEQ ID NO: 2780370 - RNA, 19 nt, Artificial Sequence
  Description of Artificial Sequence: Synthetic oligonucleotide
gcauccuucuggacaucca

SEQ ID NO: 2780371 - RNA, 19 nt, Artificial Sequence
  Description of Artificial Sequence: Synthetic oligonucleotide
ccuucuggacauccaggaa

SEQ ID NO: 2780372 - RNA, 19 nt, Artificial Sequence
  Description of Artificial Sequence: Synthetic oligonucleotide
cuacuuccccaucuccauu

SEQ ID NO: 2780373 - RNA, 19 nt, Artificial Sequence
  Description of Artificial Sequence: Synthetic oligonucleotide
gguucucgacagacagaca

SEQ ID NO: 2780374 - RNA, 19 nt, Artificial Sequence
  Description of Artificial Sequence: Synthetic oligonucleotide
ggccaccacucugguaccc

SEQ ID NO: 2780375 - RNA, 19 nt, Artificial Sequence
  Description of Artificial Sequence: Synthetic oligonucleotide
acgguuggccugggccuga

SEQ ID NO: 2780376 - RNA, 19 nt, Artificial Sequence
  Description of Artificial Sequence: Synthetic oligonucleotide
cugcauccuucuggacauc

SEQ ID NO: 2780377 - RNA, 19 nt, Artificial Sequence
  Description of Artificial Sequence: Synthetic oligonucleotide
ggaacacguugaugagggu

SEQ ID NO: 2780378 - RNA, 19 nt, Artificial Sequence
  Description of Artificial Sequence: Synthetic oligonucleotide
cgacauacuccugaagucu

SEQ ID NO: 2780379 - RNA, 19 nt, Artificial Sequence
  Description of Artificial Sequence: Synthetic oligonucleotide
ggacauccaggaagccgga

SEQ ID NO: 2780380 - RNA, 19 nt, Artificial Sequence
  Description of Artificial Sequence: Synthetic oligonucleotide
ccugaagugggagaagguu

SEQ ID NO: 2780381 - RNA, 19 nt, Artificial Sequence
  Description of Artificial Sequence: Synthetic oligonucleotide
ggaagccggagaguucggu

SEQ ID NO: 2780382 - RNA, 19 nt, Artificial Sequence
  Description of Artificial Sequence: Synthetic oligonucleotide
guggcaccuggagcggugu

SEQ ID NO: 2780383 - RNA, 19 nt, Artificial Sequence
  Description of Artificial Sequence: Synthetic oligonucleotide
cuggagcgguguggggaga

SEQ ID NO: 2780384 - RNA, 19 nt, Artificial Sequence
  Description of Artificial Sequence: Synthetic oligonucleotide
ccgugagcgcagccaccag

SEQ ID NO: 2780385 - RNA, 19 nt, Artificial Sequence
  Description of Artificial Sequence: Synthetic oligonucleotide
ccuucuugcucagcuuaua

SEQ ID NO: 2780386 - RNA, 19 nt, Artificial Sequence
  Description of Artificial Sequence: Synthetic oligonucleotide
ccccaagugcucaacuguu

SEQ ID NO: 2780387 - RNA, 19 nt, Artificial Sequence
  Description of Artificial Sequence: Synthetic oligonucleotide
gcgguguggggagaccugu

SEQ ID NO: 2780388 - RNA, 19 nt, Artificial Sequence
  Description of Artificial Sequence: Synthetic oligonucleotide
cgguguggggagaccuguc

SEQ ID NO: 2780389 - RNA, 19 nt, Artificial Sequence
  Description of Artificial Sequence: Synthetic oligonucleotide
ccaguuccuucauuaccuu

SEQ ID NO: 2780390 - RNA, 19 nt, Artificial Sequence
  Description of Artificial Sequence: Synthetic oligonucleotide
gccaccacucugguacccu

SEQ ID NO: 2780391 - RNA, 19 nt, Artificial Sequence
  Description of Artificial Sequence: Synthetic oligonucleotide
gccugggccugaaguggga

SEQ ID NO: 2780392 - RNA, 19 nt, Artificial Sequence
  Description of Artificial Sequence: Synthetic oligonucleotide
cuccagcucagagcccauu

SEQ ID NO: 2780393 - RNA, 19 nt, Artificial Sequence
  Description of Artificial Sequence: Synthetic oligonucleotide
gccggagaguucgguuugu

SEQ ID NO: 2780394 - RNA, 19 nt, Artificial Sequence
  Description of Artificial Sequence: Synthetic oligonucleotide
ccaccacucugguacccuu

SEQ ID NO: 2780395 - RNA, 19 nt, Artificial Sequence
  Description of Artificial Sequence: Synthetic oligonucleotide
ccggagaguucgguuugua

SEQ ID NO: 2780396 - RNA, 19 nt, Artificial Sequence
  Description of Artificial Sequence: Synthetic oligonucleotide
gcgcagccaccagcacgac

SEQ ID NO: 2780397 - RNA, 19 nt, Artificial Sequence
  Description of Artificial Sequence: Synthetic oligonucleotide
cgguuuguagcaggucuuu

SEQ ID NO: 2780398 - RNA, 19 nt, Artificial Sequence
  Description of Artificial Sequence: Synthetic oligonucleotide
cgguuggccugggccugaa

SEQ ID NO: 2780399 - RNA, 19 nt, Artificial Sequence
  Description of Artificial Sequence: Synthetic oligonucleotide
aacaguuccgaucuguggc

SEQ ID NO: 2780400 - RNA, 19 nt, Artificial Sequence
  Description of Artificial Sequence: Synthetic oligonucleotide
aauuuauuuggccugcucu

SEQ ID NO: 2780401 - RNA, 19 nt, Artificial Sequence
  Description of Artificial Sequence: Synthetic oligonucleotide
aaacacuuguccgucaucc

SEQ ID NO: 2780402 - RNA, 19 nt, Artificial Sequence
  Description of Artificial Sequence: Synthetic oligonucleotide
gaugcccuuacucaaaccg

SEQ ID NO: 2780403 - RNA, 19 nt, Artificial Sequence
  Description of Artificial Sequence: Synthetic oligonucleotide
uagcgguccauacacaugg

SEQ ID NO: 2780404 - RNA, 19 nt, Artificial Sequence
  Description of Artificial Sequence: Synthetic oligonucleotide
auuuauuuggccugcucuc

SEQ ID NO: 2780405 - RNA, 19 nt, Artificial Sequence
  Description of Artificial Sequence: Synthetic oligonucleotide
aaacaguuccgaucugugg

SEQ ID NO: 2780406 - RNA, 19 nt, Artificial Sequence
  Description of Artificial Sequence: Synthetic oligonucleotide
uucaccugcuccaugauga

SEQ ID NO: 2780407 - RNA, 19 nt, Artificial Sequence
  Description of Artificial Sequence: Synthetic oligonucleotide
agcagcaauuuauuuggcc

SEQ ID NO: 2780408 - RNA, 19 nt, Artificial Sequence
  Description of Artificial Sequence: Synthetic oligonucleotide
uccgaguuauccaaggagc

SEQ ID NO: 2780409 - RNA, 19 nt, Artificial Sequence
  Description of Artificial Sequence: Synthetic oligonucleotide
aacucggagcccuccgugc

SEQ ID NO: 2780410 - RNA, 19 nt, Artificial Sequence
  Description of Artificial Sequence: Synthetic oligonucleotide
acaguuccgaucuguggcc

SEQ ID NO: 2780411 - RNA, 19 nt, Artificial Sequence
  Description of Artificial Sequence: Synthetic oligonucleotide
cauguagcgguccauacac

SEQ ID NO: 2780412 - RNA, 19 nt, Artificial Sequence
  Description of Artificial Sequence: Synthetic oligonucleotide
guuccaggcauccauguag

SEQ ID NO: 2780413 - RNA, 19 nt, Artificial Sequence
  Description of Artificial Sequence: Synthetic oligonucleotide
uuccggaaacacuuguccg

SEQ ID NO: 2780414 - RNA, 19 nt, Artificial Sequence
  Description of Artificial Sequence: Synthetic oligonucleotide
gaggccucaacucggagcc

SEQ ID NO: 2780415 - RNA, 19 nt, Artificial Sequence
  Description of Artificial Sequence: Synthetic oligonucleotide
cuugcgagugggaaaacag

SEQ ID NO: 2780416 - RNA, 19 nt, Artificial Sequence
  Description of Artificial Sequence: Synthetic oligonucleotide
accugcuccaugaugaccc

SEQ ID NO: 2780417 - RNA, 19 nt, Artificial Sequence
  Description of Artificial Sequence: Synthetic oligonucleotide
ugcacuuccggaaacacuu

SEQ ID NO: 2780418 - RNA, 19 nt, Artificial Sequence
  Description of Artificial Sequence: Synthetic oligonucleotide
cuuccggaaacacuugucc

SEQ ID NO: 2780419 - RNA, 19 nt, Artificial Sequence
  Description of Artificial Sequence: Synthetic oligonucleotide
ucacauguuggcucguucc

SEQ ID NO: 2780420 - RNA, 19 nt, Artificial Sequence
  Description of Artificial Sequence: Synthetic oligonucleotide
agucgagaguuguacgcgc

SEQ ID NO: 2780421 - RNA, 19 nt, Artificial Sequence
  Description of Artificial Sequence: Synthetic oligonucleotide
uuguccgucauccucugca

SEQ ID NO: 2780422 - RNA, 19 nt, Artificial Sequence
  Description of Artificial Sequence: Synthetic oligonucleotide
acaggucucggucacaugu

SEQ ID NO: 2780423 - RNA, 19 nt, Artificial Sequence
  Description of Artificial Sequence: Synthetic oligonucleotide
ugucccgaggcacaggucu

SEQ ID NO: 2780424 - RNA, 19 nt, Artificial Sequence
  Description of Artificial Sequence: Synthetic oligonucleotide
agcaauuuauuuggccugc

SEQ ID NO: 2780425 - RNA, 19 nt, Artificial Sequence
  Description of Artificial Sequence: Synthetic oligonucleotide
gaugcauuucugcuccgag

SEQ ID NO: 2780426 - RNA, 19 nt, Artificial Sequence
  Description of Artificial Sequence: Synthetic oligonucleotide
ugcauuucugcuccgaguu

SEQ ID NO: 2780427 - RNA, 19 nt, Artificial Sequence
  Description of Artificial Sequence: Synthetic oligonucleotide
uuauuuggccugcucucag

SEQ ID NO: 2780428 - RNA, 19 nt, Artificial Sequence
  Description of Artificial Sequence: Synthetic oligonucleotide
gaguuauccaaggagcccc

SEQ ID NO: 2780429 - RNA, 19 nt, Artificial Sequence
  Description of Artificial Sequence: Synthetic oligonucleotide
cuuuggggccgucagauac

SEQ ID NO: 2780430 - RNA, 19 nt, Artificial Sequence
  Description of Artificial Sequence: Synthetic oligonucleotide
acuuucaccugcuccauga

SEQ ID NO: 2780431 - RNA, 19 nt, Artificial Sequence
  Description of Artificial Sequence: Synthetic oligonucleotide
ugggaaaacaguuccgauc

SEQ ID NO: 2780432 - RNA, 19 nt, Artificial Sequence
  Description of Artificial Sequence: Synthetic oligonucleotide
ugcagucgagaguuguacg

SEQ ID NO: 2780433 - RNA, 19 nt, Artificial Sequence
  Description of Artificial Sequence: Synthetic oligonucleotide
aaaacaguuccgaucugug

SEQ ID NO: 2780434 - RNA, 19 nt, Artificial Sequence
  Description of Artificial Sequence: Synthetic oligonucleotide
ucggucacauguuggcucg

SEQ ID NO: 2780435 - RNA, 19 nt, Artificial Sequence
  Description of Artificial Sequence: Synthetic oligonucleotide
uauuuggccugcucucagg

SEQ ID NO: 2780436 - RNA, 19 nt, Artificial Sequence
  Description of Artificial Sequence: Synthetic oligonucleotide
aguuguacgcgcgggacac

SEQ ID NO: 2780437 - RNA, 19 nt, Artificial Sequence
  Description of Artificial Sequence: Synthetic oligonucleotide
ucugcuccgaguuauccaa

SEQ ID NO: 2780438 - RNA, 19 nt, Artificial Sequence
  Description of Artificial Sequence: Synthetic oligonucleotide
agaugcccuuacucaaacc

SEQ ID NO: 2780439 - RNA, 19 nt, Artificial Sequence
  Description of Artificial Sequence: Synthetic oligonucleotide
cauggcgaugcauuucugc

SEQ ID NO: 2780440 - RNA, 19 nt, Artificial Sequence
  Description of Artificial Sequence: Synthetic oligonucleotide
ugcuccgaguuauccaagg

SEQ ID NO: 2780441 - RNA, 19 nt, Artificial Sequence
  Description of Artificial Sequence: Synthetic oligonucleotide
cuccgaguuauccaaggag

SEQ ID NO: 2780442 - RNA, 19 nt, Artificial Sequence
  Description of Artificial Sequence: Synthetic oligonucleotide
uuccaggcauccauguagc

SEQ ID NO: 2780443 - RNA, 19 nt, Artificial Sequence
  Description of Artificial Sequence: Synthetic oligonucleotide
ucgagaguuguacgcgcgg

SEQ ID NO: 2780444 - RNA, 19 nt, Artificial Sequence
  Description of Artificial Sequence: Synthetic oligonucleotide
uuuauuuggccugcucuca

SEQ ID NO: 2780445 - RNA, 19 nt, Artificial Sequence
  Description of Artificial Sequence: Synthetic oligonucleotide
aggcgcagcaaccuagggg

SEQ ID NO: 2780446 - RNA, 19 nt, Artificial Sequence
  Description of Artificial Sequence: Synthetic oligonucleotide
uguagcgguccauacacau

SEQ ID NO: 2780447 - RNA, 19 nt, Artificial Sequence
  Description of Artificial Sequence: Synthetic oligonucleotide
auggcgaugcauuucugcu

SEQ ID NO: 2780448 - RNA, 19 nt, Artificial Sequence
  Description of Artificial Sequence: Synthetic oligonucleotide
aggggagaggccucaacuc

SEQ ID NO: 2780449 - RNA, 19 nt, Artificial Sequence
  Description of Artificial Sequence: Synthetic oligonucleotide
uccauacacauggcgaugc

SEQ ID NO: 2780450 - RNA, 19 nt, Artificial Sequence
  Description of Artificial Sequence: Synthetic oligonucleotide
ugcgagugggaaaacaguu

SEQ ID NO: 2780451 - RNA, 19 nt, Artificial Sequence
  Description of Artificial Sequence: Synthetic oligonucleotide
uccggaaacacuuguccgu

SEQ ID NO: 2780452 - RNA, 19 nt, Artificial Sequence
  Description of Artificial Sequence: Synthetic oligonucleotide
auggcugcgcagucaaccg

SEQ ID NO: 2780453 - RNA, 19 nt, Artificial Sequence
  Description of Artificial Sequence: Synthetic oligonucleotide
cagcaauuuauuuggccug

SEQ ID NO: 2780454 - RNA, 19 nt, Artificial Sequence
  Description of Artificial Sequence: Synthetic oligonucleotide
cugggacugggcuaggcgc

SEQ ID NO: 2780455 - RNA, 19 nt, Artificial Sequence
  Description of Artificial Sequence: Synthetic oligonucleotide
ugcccuuacucaaaccggu

SEQ ID NO: 2780456 - RNA, 19 nt, Artificial Sequence
  Description of Artificial Sequence: Synthetic oligonucleotide
uugcgagugggaaaacagu

SEQ ID NO: 2780457 - RNA, 19 nt, Artificial Sequence
  Description of Artificial Sequence: Synthetic oligonucleotide
auuuggccugcucucaggu

SEQ ID NO: 2780458 - RNA, 19 nt, Artificial Sequence
  Description of Artificial Sequence: Synthetic oligonucleotide
uuucugcuccgaguuaucc

SEQ ID NO: 2780459 - RNA, 19 nt, Artificial Sequence
  Description of Artificial Sequence: Synthetic oligonucleotide
cauggcugcgcagucaacc

SEQ ID NO: 2780460 - RNA, 19 nt, Artificial Sequence
  Description of Artificial Sequence: Synthetic oligonucleotide
aaccgguccucacuuuucu

SEQ ID NO: 2780461 - RNA, 19 nt, Artificial Sequence
  Description of Artificial Sequence: Synthetic oligonucleotide
aggcagaugcccuuacuca

SEQ ID NO: 2780462 - RNA, 19 nt, Artificial Sequence
  Description of Artificial Sequence: Synthetic oligonucleotide
agauacgcgcugcccuugc

SEQ ID NO: 2780463 - RNA, 19 nt, Artificial Sequence
  Description of Artificial Sequence: Synthetic oligonucleotide
uucccgaugcacuuccgga

SEQ ID NO: 2780464 - RNA, 19 nt, Artificial Sequence
  Description of Artificial Sequence: Synthetic oligonucleotide
ugcgcguuggccacggcga

SEQ ID NO: 2780465 - RNA, 19 nt, Artificial Sequence
  Description of Artificial Sequence: Synthetic oligonucleotide
uucugcuccgaguuaucca

SEQ ID NO: 2780466 - RNA, 19 nt, Artificial Sequence
  Description of Artificial Sequence: Synthetic oligonucleotide
uucccucugcagucgagag

SEQ ID NO: 2780467 - RNA, 19 nt, Artificial Sequence
  Description of Artificial Sequence: Synthetic oligonucleotide
cacauguuggcucguuccc

SEQ ID NO: 2780468 - RNA, 19 nt, Artificial Sequence
  Description of Artificial Sequence: Synthetic oligonucleotide
acucaaaccgguccucacu

SEQ ID NO: 2780469 - RNA, 19 nt, Artificial Sequence
  Description of Artificial Sequence: Synthetic oligonucleotide
aaaccgguccucacuuuuc

SEQ ID NO: 2780470 - RNA, 19 nt, Artificial Sequence
  Description of Artificial Sequence: Synthetic oligonucleotide
uuguacgcgcgggacacgg

SEQ ID NO: 2780471 - RNA, 19 nt, Artificial Sequence
  Description of Artificial Sequence: Synthetic oligonucleotide
cacacuuuggggccgucag

SEQ ID NO: 2780472 - RNA, 19 nt, Artificial Sequence
  Description of Artificial Sequence: Synthetic oligonucleotide
uacgcgcugcccuugcgag

SEQ ID NO: 2780473 - RNA, 19 nt, Artificial Sequence
  Description of Artificial Sequence: Synthetic oligonucleotide
gucucggucacauguuggc

SEQ ID NO: 2780474 - RNA, 19 nt, Artificial Sequence
  Description of Artificial Sequence: Synthetic oligonucleotide
uccauguagcgguccauac

SEQ ID NO: 2780475 - RNA, 19 nt, Artificial Sequence
  Description of Artificial Sequence: Synthetic oligonucleotide
cuucccgaugcacuuccgg

SEQ ID NO: 2780476 - RNA, 19 nt, Artificial Sequence
  Description of Artificial Sequence: Synthetic oligonucleotide
ggcgaugcauuucugcucc

SEQ ID NO: 2780477 - RNA, 19 nt, Artificial Sequence
  Description of Artificial Sequence: Synthetic oligonucleotide
ggcgcagcaaccuagggga

SEQ ID NO: 2780478 - RNA, 19 nt, Artificial Sequence
  Description of Artificial Sequence: Synthetic oligonucleotide
uggcugcgcagucaaccgg

SEQ ID NO: 2780479 - RNA, 19 nt, Artificial Sequence
  Description of Artificial Sequence: Synthetic oligonucleotide
cucggucacauguuggcuc

SEQ ID NO: 2780480 - RNA, 19 nt, Artificial Sequence
  Description of Artificial Sequence: Synthetic oligonucleotide
gaugcacuuccggaaacac

SEQ ID NO: 2780481 - RNA, 19 nt, Artificial Sequence
  Description of Artificial Sequence: Synthetic oligonucleotide
ggggagaggccucaacucg

SEQ ID NO: 2780482 - RNA, 19 nt, Artificial Sequence
  Description of Artificial Sequence: Synthetic oligonucleotide
gggaaaacaguuccgaucu

SEQ ID NO: 2780483 - RNA, 19 nt, Artificial Sequence
  Description of Artificial Sequence: Synthetic oligonucleotide
ucaacucggagcccuccgu

SEQ ID NO: 2780484 - RNA, 19 nt, Artificial Sequence
  Description of Artificial Sequence: Synthetic oligonucleotide
uccgugcugccacacuuug

SEQ ID NO: 2780485 - RNA, 19 nt, Artificial Sequence
  Description of Artificial Sequence: Synthetic oligonucleotide
caauuuauuuggccugcuc

SEQ ID NO: 2780486 - RNA, 19 nt, Artificial Sequence
  Description of Artificial Sequence: Synthetic oligonucleotide
aguuccgaucuguggcccg

SEQ ID NO: 2780487 - RNA, 19 nt, Artificial Sequence
  Description of Artificial Sequence: Synthetic oligonucleotide
cagucgagaguuguacgcg

SEQ ID NO: 2780488 - RNA, 19 nt, Artificial Sequence
  Description of Artificial Sequence: Synthetic oligonucleotide
uacacauggcgaugcauuu

SEQ ID NO: 2780489 - RNA, 19 nt, Artificial Sequence
  Description of Artificial Sequence: Synthetic oligonucleotide
gauacgcgcugcccuugcg

SEQ ID NO: 2780490 - RNA, 19 nt, Artificial Sequence
  Description of Artificial Sequence: Synthetic oligonucleotide
gcagucgagaguuguacgc

SEQ ID NO: 2780491 - RNA, 19 nt, Artificial Sequence
  Description of Artificial Sequence: Synthetic oligonucleotide
uguuggcucguucccucug

SEQ ID NO: 2780492 - RNA, 19 nt, Artificial Sequence
  Description of Artificial Sequence: Synthetic oligonucleotide
cacuuuucugggacugggc

SEQ ID NO: 2780493 - RNA, 19 nt, Artificial Sequence
  Description of Artificial Sequence: Synthetic oligonucleotide
cuuuccgcugcccgugccg

SEQ ID NO: 2780494 - RNA, 19 nt, Artificial Sequence
  Description of Artificial Sequence: Synthetic oligonucleotide
augcccuuacucaaaccgg

SEQ ID NO: 2780495 - RNA, 19 nt, Artificial Sequence
  Description of Artificial Sequence: Synthetic oligonucleotide
ggggccgucagauacgcgc

SEQ ID NO: 2780496 - RNA, 19 nt, Artificial Sequence
  Description of Artificial Sequence: Synthetic oligonucleotide
acuuccggaaacacuuguc

SEQ ID NO: 2780497 - RNA, 19 nt, Artificial Sequence
  Description of Artificial Sequence: Synthetic oligonucleotide
cucaacucggagcccuccg

SEQ ID NO: 2780498 - RNA, 19 nt, Artificial Sequence
  Description of Artificial Sequence: Synthetic oligonucleotide
gaaaacaguuccgaucugu

SEQ ID NO: 2780499 - RNA, 19 nt, Artificial Sequence
  Description of Artificial Sequence: Synthetic oligonucleotide
cauguuggcucguucccuc

SEQ ID NO: 2780500 - RNA, 19 nt, Artificial Sequence
  Description of Artificial Sequence: Synthetic oligonucleotide
ucugcagucgagaguugua

SEQ ID NO: 2780501 - RNA, 19 nt, Artificial Sequence
  Description of Artificial Sequence: Synthetic oligonucleotide
uacucaaaccgguccucac

SEQ ID NO: 2780502 - RNA, 19 nt, Artificial Sequence
  Description of Artificial Sequence: Synthetic oligonucleotide
ugccgccgaaguccgagcc

SEQ ID NO: 2780503 - RNA, 19 nt, Artificial Sequence
  Description of Artificial Sequence: Synthetic oligonucleotide
acacauggcgaugcauuuc

SEQ ID NO: 2780504 - RNA, 19 nt, Artificial Sequence
  Description of Artificial Sequence: Synthetic oligonucleotide
cagaugcccuuacucaaac

SEQ ID NO: 2780505 - RNA, 19 nt, Artificial Sequence
  Description of Artificial Sequence: Synthetic oligonucleotide
cugggcuaggcgcagcaac

SEQ ID NO: 2780506 - RNA, 19 nt, Artificial Sequence
  Description of Artificial Sequence: Synthetic oligonucleotide
auacacauggcgaugcauu

SEQ ID NO: 2780507 - RNA, 19 nt, Artificial Sequence
  Description of Artificial Sequence: Synthetic oligonucleotide
cugcgcguuggccacggcg

SEQ ID NO: 2780508 - RNA, 19 nt, Artificial Sequence
  Description of Artificial Sequence: Synthetic oligonucleotide
ucccgaugcacuuccggaa

SEQ ID NO: 2780509 - RNA, 19 nt, Artificial Sequence
  Description of Artificial Sequence: Synthetic oligonucleotide
agcuuuccgcugcccgugc

SEQ ID NO: 2780510 - RNA, 19 nt, Artificial Sequence
  Description of Artificial Sequence: Synthetic oligonucleotide
uguuccaggcauccaugua

SEQ ID NO: 2780511 - RNA, 19 nt, Artificial Sequence
  Description of Artificial Sequence: Synthetic oligonucleotide
uggcgaugcauuucugcuc

SEQ ID NO: 2780512 - RNA, 19 nt, Artificial Sequence
  Description of Artificial Sequence: Synthetic oligonucleotide
guuggcucguucccucugc

SEQ ID NO: 2780513 - RNA, 19 nt, Artificial Sequence
  Description of Artificial Sequence: Synthetic oligonucleotide
gcagcaauuuauuuggccu

SEQ ID NO: 2780514 - RNA, 19 nt, Artificial Sequence
  Description of Artificial Sequence: Synthetic oligonucleotide
gucgagaguuguacgcgcg

SEQ ID NO: 2780515 - RNA, 19 nt, Artificial Sequence
  Description of Artificial Sequence: Synthetic oligonucleotide
auacgcgcugcccuugcga

SEQ ID NO: 2780516 - RNA, 19 nt, Artificial Sequence
  Description of Artificial Sequence: Synthetic oligonucleotide
ucagauacgcgcugcccuu

SEQ ID NO: 2780517 - RNA, 19 nt, Artificial Sequence
  Description of Artificial Sequence: Synthetic oligonucleotide
gacacgguguuccaggcau

SEQ ID NO: 2780518 - RNA, 19 nt, Artificial Sequence
  Description of Artificial Sequence: Synthetic oligonucleotide
gaucuguggcccgcgcacg

SEQ ID NO: 2780519 - RNA, 19 nt, Artificial Sequence
  Description of Artificial Sequence: Synthetic oligonucleotide
cugcagucgagaguuguac

SEQ ID NO: 2780520 - RNA, 19 nt, Artificial Sequence
  Description of Artificial Sequence: Synthetic oligonucleotide
ccgaguuauccaaggagcc

SEQ ID NO: 2780521 - RNA, 19 nt, Artificial Sequence
  Description of Artificial Sequence: Synthetic oligonucleotide
ccgguccucacuuuucugg

SEQ ID NO: 2780522 - RNA, 19 nt, Artificial Sequence
  Description of Artificial Sequence: Synthetic oligonucleotide
uccucacuuuucugggacu

SEQ ID NO: 2780523 - RNA, 19 nt, Artificial Sequence
  Description of Artificial Sequence: Synthetic oligonucleotide
cucacuuuucugggacugg

SEQ ID NO: 2780524 - RNA, 19 nt, Artificial Sequence
  Description of Artificial Sequence: Synthetic oligonucleotide
gcugccacacuuuggggcc

SEQ ID NO: 2780525 - RNA, 19 nt, Artificial Sequence
  Description of Artificial Sequence: Synthetic oligonucleotide
guacgcgcgggacacggug

SEQ ID NO: 2780526 - RNA, 19 nt, Artificial Sequence
  Description of Artificial Sequence: Synthetic oligonucleotide
uuggcucguucccucugca

SEQ ID NO: 2780527 - RNA, 19 nt, Artificial Sequence
  Description of Artificial Sequence: Synthetic oligonucleotide
cuuacucaaaccgguccuc

SEQ ID NO: 2780528 - RNA, 19 nt, Artificial Sequence
  Description of Artificial Sequence: Synthetic oligonucleotide
aagccgcucuccauggcug

SEQ ID NO: 2780529 - RNA, 19 nt, Artificial Sequence
  Description of Artificial Sequence: Synthetic oligonucleotide
ucucggucacauguuggcu

SEQ ID NO: 2780530 - RNA, 19 nt, Artificial Sequence
  Description of Artificial Sequence: Synthetic oligonucleotide
acuuguccgucauccucug

SEQ ID NO: 2780531 - RNA, 19 nt, Artificial Sequence
  Description of Artificial Sequence: Synthetic oligonucleotide
cagcagcaauuuauuuggc

SEQ ID NO: 2780532 - RNA, 19 nt, Artificial Sequence
  Description of Artificial Sequence: Synthetic oligonucleotide
ucccucugcagucgagagu

SEQ ID NO: 2780533 - RNA, 19 nt, Artificial Sequence
  Description of Artificial Sequence: Synthetic oligonucleotide
gcgguccauacacauggcg

SEQ ID NO: 2780534 - RNA, 19 nt, Artificial Sequence
  Description of Artificial Sequence: Synthetic oligonucleotide
ggcgaucugcacuuucacc

SEQ ID NO: 2780535 - RNA, 19 nt, Artificial Sequence
  Description of Artificial Sequence: Synthetic oligonucleotide
uggcucguucccucugcag

SEQ ID NO: 2780536 - RNA, 19 nt, Artificial Sequence
  Description of Artificial Sequence: Synthetic oligonucleotide
ugcucucaggucacagcuc

SEQ ID NO: 2780537 - RNA, 19 nt, Artificial Sequence
  Description of Artificial Sequence: Synthetic oligonucleotide
uuuccgcugcccgugccgc

SEQ ID NO: 2780538 - RNA, 19 nt, Artificial Sequence
  Description of Artificial Sequence: Synthetic oligonucleotide
ucccgaggcacaggucucg

SEQ ID NO: 2780539 - RNA, 19 nt, Artificial Sequence
  Description of Artificial Sequence: Synthetic oligonucleotide
cccuuacucaaaccggucc

SEQ ID NO: 2780540 - RNA, 19 nt, Artificial Sequence
  Description of Artificial Sequence: Synthetic oligonucleotide
uccgagccgaagccgcucu

SEQ ID NO: 2780541 - RNA, 19 nt, Artificial Sequence
  Description of Artificial Sequence: Synthetic oligonucleotide
gucacauguuggcucguuc

SEQ ID NO: 2780542 - RNA, 19 nt, Artificial Sequence
  Description of Artificial Sequence: Synthetic oligonucleotide
auuucugcuccgaguuauc

SEQ ID NO: 2780543 - RNA, 19 nt, Artificial Sequence
  Description of Artificial Sequence: Synthetic oligonucleotide
caacucggagcccuccgug

SEQ ID NO: 2780544 - RNA, 19 nt, Artificial Sequence
  Description of Artificial Sequence: Synthetic oligonucleotide
aaccuaggggagaggccuc

SEQ ID NO: 2780545 - RNA, 19 nt, Artificial Sequence
  Description of Artificial Sequence: Synthetic oligonucleotide
gucagauacgcgcugcccu

SEQ ID NO: 2780546 - RNA, 19 nt, Artificial Sequence
  Description of Artificial Sequence: Synthetic oligonucleotide
uacgcgcgggacacggugu

SEQ ID NO: 2780547 - RNA, 19 nt, Artificial Sequence
  Description of Artificial Sequence: Synthetic oligonucleotide
ucccagcagcaauuuauuu

SEQ ID NO: 2780548 - RNA, 19 nt, Artificial Sequence
  Description of Artificial Sequence: Synthetic oligonucleotide
acauguuggcucguucccu

SEQ ID NO: 2780549 - RNA, 19 nt, Artificial Sequence
  Description of Artificial Sequence: Synthetic oligonucleotide
gaagccgcucuccauggcu

SEQ ID NO: 2780550 - RNA, 19 nt, Artificial Sequence
  Description of Artificial Sequence: Synthetic oligonucleotide
cuaggggagaggccucaac

SEQ ID NO: 2780551 - RNA, 19 nt, Artificial Sequence
  Description of Artificial Sequence: Synthetic oligonucleotide
cucguucccucugcagucg

SEQ ID NO: 2780552 - RNA, 19 nt, Artificial Sequence
  Description of Artificial Sequence: Synthetic oligonucleotide
cuuuucugggacugggcua

SEQ ID NO: 2780553 - RNA, 19 nt, Artificial Sequence
  Description of Artificial Sequence: Synthetic oligonucleotide
guuggccacggcgaucugc

SEQ ID NO: 2780554 - RNA, 19 nt, Artificial Sequence
  Description of Artificial Sequence: Synthetic oligonucleotide
ugcccuugcgagugggaaa

SEQ ID NO: 2780555 - RNA, 19 nt, Artificial Sequence
  Description of Artificial Sequence: Synthetic oligonucleotide
uguggcccgcgcacggugu

SEQ ID NO: 2780556 - RNA, 19 nt, Artificial Sequence
  Description of Artificial Sequence: Synthetic oligonucleotide
gcucucaggucacagcuca

SEQ ID NO: 2780557 - RNA, 19 nt, Artificial Sequence
  Description of Artificial Sequence: Synthetic oligonucleotide
ggucucggucacauguugg

SEQ ID NO: 2780558 - RNA, 19 nt, Artificial Sequence
  Description of Artificial Sequence: Synthetic oligonucleotide
auguuggcucguucccucu

SEQ ID NO: 2780559 - RNA, 19 nt, Artificial Sequence
  Description of Artificial Sequence: Synthetic oligonucleotide
accgguccucacuuuucug

SEQ ID NO: 2780560 - RNA, 19 nt, Artificial Sequence
  Description of Artificial Sequence: Synthetic oligonucleotide
ccaggcauccauguagcgg

SEQ ID NO: 2780561 - RNA, 19 nt, Artificial Sequence
  Description of Artificial Sequence: Synthetic oligonucleotide
gacugggcuaggcgcagca

SEQ ID NO: 2780562 - RNA, 19 nt, Artificial Sequence
  Description of Artificial Sequence: Synthetic oligonucleotide
ccgaaguccgagccgaagc

SEQ ID NO: 2780563 - RNA, 19 nt, Artificial Sequence
  Description of Artificial Sequence: Synthetic oligonucleotide
cugcuccgaguuauccaag

SEQ ID NO: 2780564 - RNA, 19 nt, Artificial Sequence
  Description of Artificial Sequence: Synthetic oligonucleotide
guccgucauccucugcagc

SEQ ID NO: 2780565 - RNA, 19 nt, Artificial Sequence
  Description of Artificial Sequence: Synthetic oligonucleotide
gcagcaaccuaggggagag

SEQ ID NO: 2780566 - RNA, 19 nt, Artificial Sequence
  Description of Artificial Sequence: Synthetic oligonucleotide
agcgguccauacacauggc

SEQ ID NO: 2780567 - RNA, 19 nt, Artificial Sequence
  Description of Artificial Sequence: Synthetic oligonucleotide
ucaaaccgguccucacuuu

SEQ ID NO: 2780568 - RNA, 19 nt, Artificial Sequence
  Description of Artificial Sequence: Synthetic oligonucleotide
ucggagcccuccgugcugc

SEQ ID NO: 2780569 - RNA, 19 nt, Artificial Sequence
  Description of Artificial Sequence: Synthetic oligonucleotide
guccauacacauggcgaug

SEQ ID NO: 2780570 - RNA, 19 nt, Artificial Sequence
  Description of Artificial Sequence: Synthetic oligonucleotide
cuuguccgucauccucugc

SEQ ID NO: 2780571 - RNA, 19 nt, Artificial Sequence
  Description of Artificial Sequence: Synthetic oligonucleotide
uuccgaucuguggcccgcg

SEQ ID NO: 2780572 - RNA, 19 nt, Artificial Sequence
  Description of Artificial Sequence: Synthetic oligonucleotide
gccgaagccgcucuccaug

SEQ ID NO: 2780573 - RNA, 19 nt, Artificial Sequence
  Description of Artificial Sequence: Synthetic oligonucleotide
ggcugcgcagucaaccggg

SEQ ID NO: 2780574 - RNA, 19 nt, Artificial Sequence
  Description of Artificial Sequence: Synthetic oligonucleotide
cucucaggucacagcucag

SEQ ID NO: 2780575 - RNA, 19 nt, Artificial Sequence
  Description of Artificial Sequence: Synthetic oligonucleotide
cugcucucaggucacagcu

SEQ ID NO: 2780576 - RNA, 19 nt, Artificial Sequence
  Description of Artificial Sequence: Synthetic oligonucleotide
uguacgcgcgggacacggu

SEQ ID NO: 2780577 - RNA, 19 nt, Artificial Sequence
  Description of Artificial Sequence: Synthetic oligonucleotide
ggcagaugcccuuacucaa

SEQ ID NO: 2780578 - RNA, 19 nt, Artificial Sequence
  Description of Artificial Sequence: Synthetic oligonucleotide
uccugcgcguuggccacgg

SEQ ID NO: 2780579 - RNA, 19 nt, Artificial Sequence
  Description of Artificial Sequence: Synthetic oligonucleotide
cacuuguccgucauccucu

SEQ ID NO: 2780580 - RNA, 19 nt, Artificial Sequence
  Description of Artificial Sequence: Synthetic oligonucleotide
caccugcuccaugaugacc

SEQ ID NO: 2780581 - RNA, 19 nt, Artificial Sequence
  Description of Artificial Sequence: Synthetic oligonucleotide
uggggccgucagauacgcg

SEQ ID NO: 2780582 - RNA, 19 nt, Artificial Sequence
  Description of Artificial Sequence: Synthetic oligonucleotide
caguuccgaucuguggccc

SEQ ID NO: 2780583 - RNA, 19 nt, Artificial Sequence
  Description of Artificial Sequence: Synthetic oligonucleotide
guuccgaucuguggcccgc

SEQ ID NO: 2780584 - RNA, 19 nt, Artificial Sequence
  Description of Artificial Sequence: Synthetic oligonucleotide
cccggguccagcuuuccgc

SEQ ID NO: 2780585 - RNA, 19 nt, Artificial Sequence
  Description of Artificial Sequence: Synthetic oligonucleotide
acggcgaucugcacuuuca

SEQ ID NO: 2780586 - RNA, 19 nt, Artificial Sequence
  Description of Artificial Sequence: Synthetic oligonucleotide
guucccucugcagucgaga

SEQ ID NO: 2780587 - RNA, 19 nt, Artificial Sequence
  Description of Artificial Sequence: Synthetic oligonucleotide
caaccuaggggagaggccu

SEQ ID NO: 2780588 - RNA, 19 nt, Artificial Sequence
  Description of Artificial Sequence: Synthetic oligonucleotide
auccauguagcgguccaua

SEQ ID NO: 2780589 - RNA, 19 nt, Artificial Sequence
  Description of Artificial Sequence: Synthetic oligonucleotide
guuguacgcgcgggacacg

SEQ ID NO: 2780590 - RNA, 19 nt, Artificial Sequence
  Description of Artificial Sequence: Synthetic oligonucleotide
ccgaagccgcucuccaugg

SEQ ID NO: 2780591 - RNA, 19 nt, Artificial Sequence
  Description of Artificial Sequence: Synthetic oligonucleotide
gcucguucccucugcaguc

SEQ ID NO: 2780592 - RNA, 19 nt, Artificial Sequence
  Description of Artificial Sequence: Synthetic oligonucleotide
cacaggucucggucacaug

SEQ ID NO: 2780593 - RNA, 19 nt, Artificial Sequence
  Description of Artificial Sequence: Synthetic oligonucleotide
cuguggcccgcgcacggug

SEQ ID NO: 2780594 - RNA, 19 nt, Artificial Sequence
  Description of Artificial Sequence: Synthetic oligonucleotide
cacggcgaucugcacuuuc

SEQ ID NO: 2780595 - RNA, 19 nt, Artificial Sequence
  Description of Artificial Sequence: Synthetic oligonucleotide
gguccauacacauggcgau

SEQ ID NO: 2780596 - RNA, 19 nt, Artificial Sequence
  Description of Artificial Sequence: Synthetic oligonucleotide
cauuucugcuccgaguuau

SEQ ID NO: 2780597 - RNA, 19 nt, Artificial Sequence
  Description of Artificial Sequence: Synthetic oligonucleotide
ugcccgugccgccgaaguc

SEQ ID NO: 2780598 - RNA, 19 nt, Artificial Sequence
  Description of Artificial Sequence: Synthetic oligonucleotide
acuuuggggccgucagaua

SEQ ID NO: 2780599 - RNA, 19 nt, Artificial Sequence
  Description of Artificial Sequence: Synthetic oligonucleotide
cagcuuuccgcugcccgug

SEQ ID NO: 2780600 - RNA, 19 nt, Artificial Sequence
  Description of Artificial Sequence: Synthetic oligonucleotide
cucggagcccuccgugcug

SEQ ID NO: 2780601 - RNA, 19 nt, Artificial Sequence
  Description of Artificial Sequence: Synthetic oligonucleotide
cgguccucacuuuucuggg

SEQ ID NO: 2780602 - RNA, 19 nt, Artificial Sequence
  Description of Artificial Sequence: Synthetic oligonucleotide
gugggaaaacaguuccgau

SEQ ID NO: 2780603 - RNA, 19 nt, Artificial Sequence
  Description of Artificial Sequence: Synthetic oligonucleotide
cucaaaccgguccucacuu

SEQ ID NO: 2780604 - RNA, 19 nt, Artificial Sequence
  Description of Artificial Sequence: Synthetic oligonucleotide
cugccacacuuuggggccg

SEQ ID NO: 2780605 - RNA, 19 nt, Artificial Sequence
  Description of Artificial Sequence: Synthetic oligonucleotide
cagauacgcgcugcccuug

SEQ ID NO: 2780606 - RNA, 19 nt, Artificial Sequence
  Description of Artificial Sequence: Synthetic oligonucleotide
ccucacuuuucugggacug

SEQ ID NO: 2780607 - RNA, 19 nt, Artificial Sequence
  Description of Artificial Sequence: Synthetic oligonucleotide
cgaguuauccaaggagccc

SEQ ID NO: 2780608 - RNA, 19 nt, Artificial Sequence
  Description of Artificial Sequence: Synthetic oligonucleotide
gcuccgaguuauccaagga

SEQ ID NO: 2780609 - RNA, 19 nt, Artificial Sequence
  Description of Artificial Sequence: Synthetic oligonucleotide
auguagcgguccauacaca

SEQ ID NO: 2780610 - RNA, 19 nt, Artificial Sequence
  Description of Artificial Sequence: Synthetic oligonucleotide
gccgccgaaguccgagccg

SEQ ID NO: 2780611 - RNA, 19 nt, Artificial Sequence
  Description of Artificial Sequence: Synthetic oligonucleotide
agccgaagccgcucuccau

SEQ ID NO: 2780612 - RNA, 19 nt, Artificial Sequence
  Description of Artificial Sequence: Synthetic oligonucleotide
acauggcgaugcauuucug

SEQ ID NO: 2780613 - RNA, 19 nt, Artificial Sequence
  Description of Artificial Sequence: Synthetic oligonucleotide
gcgagugggaaaacaguuc

SEQ ID NO: 2780614 - RNA, 19 nt, Artificial Sequence
  Description of Artificial Sequence: Synthetic oligonucleotide
gugccgccgaaguccgagc

SEQ ID NO: 2780615 - RNA, 19 nt, Artificial Sequence
  Description of Artificial Sequence: Synthetic oligonucleotide
accuaggggagaggccuca

SEQ ID NO: 2780616 - RNA, 19 nt, Artificial Sequence
  Description of Artificial Sequence: Synthetic oligonucleotide
gcccgugccgccgaagucc

SEQ ID NO: 2780617 - RNA, 19 nt, Artificial Sequence
  Description of Artificial Sequence: Synthetic oligonucleotide
ggcucguucccucugcagu

SEQ ID NO: 2780618 - RNA, 19 nt, Artificial Sequence
  Description of Artificial Sequence: Synthetic oligonucleotide
ggaaacacuuguccgucau

SEQ ID NO: 2780619 - RNA, 19 nt, Artificial Sequence
  Description of Artificial Sequence: Synthetic oligonucleotide
ggcauccauguagcggucc

SEQ ID NO: 2780620 - RNA, 19 nt, Artificial Sequence
  Description of Artificial Sequence: Synthetic oligonucleotide
cgguccauacacauggcga

SEQ ID NO: 2780621 - RNA, 19 nt, Artificial Sequence
  Description of Artificial Sequence: Synthetic oligonucleotide
cgaggcacaggucucgguc

SEQ ID NO: 2780622 - RNA, 19 nt, Artificial Sequence
  Description of Artificial Sequence: Synthetic oligonucleotide
ccauguagcgguccauaca

SEQ ID NO: 2780623 - RNA, 19 nt, Artificial Sequence
  Description of Artificial Sequence: Synthetic oligonucleotide
cucuccauggcugcgcagu

SEQ ID NO: 2780624 - RNA, 19 nt, Artificial Sequence
  Description of Artificial Sequence: Synthetic oligonucleotide
caaaccgguccucacuuuu

SEQ ID NO: 2780625 - RNA, 19 nt, Artificial Sequence
  Description of Artificial Sequence: Synthetic oligonucleotide
gcgcacggugucccgaggc

SEQ ID NO: 2780626 - RNA, 19 nt, Artificial Sequence
  Description of Artificial Sequence: Synthetic oligonucleotide
cacuuuggggccgucagau

SEQ ID NO: 2780627 - RNA, 19 nt, Artificial Sequence
  Description of Artificial Sequence: Synthetic oligonucleotide
gcgaugcauuucugcuccg

SEQ ID NO: 2780628 - RNA, 19 nt, Artificial Sequence
  Description of Artificial Sequence: Synthetic oligonucleotide
acgcgcugcccuugcgagu

SEQ ID NO: 2780629 - RNA, 19 nt, Artificial Sequence
  Description of Artificial Sequence: Synthetic oligonucleotide
cgaucuguggcccgcgcac

SEQ ID NO: 2780630 - RNA, 19 nt, Artificial Sequence
  Description of Artificial Sequence: Synthetic oligonucleotide
cagcaaccuaggggagagg

SEQ ID NO: 2780631 - RNA, 19 nt, Artificial Sequence
  Description of Artificial Sequence: Synthetic oligonucleotide
cauacacauggcgaugcau

SEQ ID NO: 2780632 - RNA, 19 nt, Artificial Sequence
  Description of Artificial Sequence: Synthetic oligonucleotide
cccgugccgccgaaguccg

SEQ ID NO: 2780633 - RNA, 19 nt, Artificial Sequence
  Description of Artificial Sequence: Synthetic oligonucleotide
ccgaugcacuuccggaaac

SEQ ID NO: 2780634 - RNA, 19 nt, Artificial Sequence
  Description of Artificial Sequence: Synthetic oligonucleotide
ugccacacuuuggggccgu

SEQ ID NO: 2780635 - RNA, 19 nt, Artificial Sequence
  Description of Artificial Sequence: Synthetic oligonucleotide
acgguguuccaggcaucca

SEQ ID NO: 2780636 - RNA, 19 nt, Artificial Sequence
  Description of Artificial Sequence: Synthetic oligonucleotide
ccgucagauacgcgcugcc

SEQ ID NO: 2780637 - RNA, 19 nt, Artificial Sequence
  Description of Artificial Sequence: Synthetic oligonucleotide
gccgucagauacgcgcugc

SEQ ID NO: 2780638 - RNA, 19 nt, Artificial Sequence
  Description of Artificial Sequence: Synthetic oligonucleotide
ggcaggcagaugcccuuac

SEQ ID NO: 2780639 - RNA, 19 nt, Artificial Sequence
  Description of Artificial Sequence: Synthetic oligonucleotide
gcgcgggacacgguguucc

SEQ ID NO: 2780640 - RNA, 19 nt, Artificial Sequence
  Description of Artificial Sequence: Synthetic oligonucleotide
uggcccgcgcacggugucc

SEQ ID NO: 2780641 - RNA, 19 nt, Artificial Sequence
  Description of Artificial Sequence: Synthetic oligonucleotide
ccggaaacacuuguccguc

SEQ ID NO: 2780642 - RNA, 19 nt, Artificial Sequence
  Description of Artificial Sequence: Synthetic oligonucleotide
ccuuacucaaaccgguccu

SEQ ID NO: 2780643 - RNA, 19 nt, Artificial Sequence
  Description of Artificial Sequence: Synthetic oligonucleotide
cugcccuugcgagugggaa

SEQ ID NO: 2780644 - RNA, 19 nt, Artificial Sequence
  Description of Artificial Sequence: Synthetic oligonucleotide
uggccacggcgaucugcac

SEQ ID NO: 2780645 - RNA, 19 nt, Artificial Sequence
  Description of Artificial Sequence: Synthetic oligonucleotide
agcccuccgugcugccaca

SEQ ID NO: 2780646 - RNA, 19 nt, Artificial Sequence
  Description of Artificial Sequence: Synthetic oligonucleotide
ggccgucagauacgcgcug

SEQ ID NO: 2780647 - RNA, 19 nt, Artificial Sequence
  Description of Artificial Sequence: Synthetic oligonucleotide
gccgaaguccgagccgaag

SEQ ID NO: 2780648 - RNA, 19 nt, Artificial Sequence
  Description of Artificial Sequence: Synthetic oligonucleotide
acgcgcgggacacgguguu

SEQ ID NO: 2780649 - RNA, 19 nt, Artificial Sequence
  Description of Artificial Sequence: Synthetic oligonucleotide
acugggcuaggcgcagcaa

SEQ ID NO: 2780650 - RNA, 19 nt, Artificial Sequence
  Description of Artificial Sequence: Synthetic oligonucleotide
cucugcagucgagaguugu

SEQ ID NO: 2780651 - RNA, 19 nt, Artificial Sequence
  Description of Artificial Sequence: Synthetic oligonucleotide
ggagaggccucaacucgga

SEQ ID NO: 2780652 - RNA, 19 nt, Artificial Sequence
  Description of Artificial Sequence: Synthetic oligonucleotide
guccagcuuuccgcugccc

SEQ ID NO: 2780653 - RNA, 19 nt, Artificial Sequence
  Description of Artificial Sequence: Synthetic oligonucleotide
gcccuugcgagugggaaaa

SEQ ID NO: 2780654 - RNA, 19 nt, Artificial Sequence
  Description of Artificial Sequence: Synthetic oligonucleotide
gcucuccauggcugcgcag

SEQ ID NO: 2780655 - RNA, 19 nt, Artificial Sequence
  Description of Artificial Sequence: Synthetic oligonucleotide
gcagaugcccuuacucaaa

SEQ ID NO: 2780656 - RNA, 19 nt, Artificial Sequence
  Description of Artificial Sequence: Synthetic oligonucleotide
cuuucaccugcuccaugau

SEQ ID NO: 2780657 - RNA, 19 nt, Artificial Sequence
  Description of Artificial Sequence: Synthetic oligonucleotide
gucccgaggcacaggucuc

SEQ ID NO: 2780658 - RNA, 19 nt, Artificial Sequence
  Description of Artificial Sequence: Synthetic oligonucleotide
ccucaacucggagcccucc

SEQ ID NO: 2780659 - RNA, 19 nt, Artificial Sequence
  Description of Artificial Sequence: Synthetic oligonucleotide
gggacugggcuaggcgcag

SEQ ID NO: 2780660 - RNA, 19 nt, Artificial Sequence
  Description of Artificial Sequence: Synthetic oligonucleotide
cgucagauacgcgcugccc

SEQ ID NO: 2780661 - RNA, 19 nt, Artificial Sequence
  Description of Artificial Sequence: Synthetic oligonucleotide
ccuugcgagugggaaaaca

SEQ ID NO: 2780662 - RNA, 19 nt, Artificial Sequence
  Description of Artificial Sequence: Synthetic oligonucleotide
gcacggugucccgaggcac

SEQ ID NO: 2780663 - RNA, 19 nt, Artificial Sequence
  Description of Artificial Sequence: Synthetic oligonucleotide
cuccugcgcguuggccacg

SEQ ID NO: 2780664 - RNA, 19 nt, Artificial Sequence
  Description of Artificial Sequence: Synthetic oligonucleotide
guggcccgcgcacgguguc

SEQ ID NO: 2780665 - RNA, 19 nt, Artificial Sequence
  Description of Artificial Sequence: Synthetic oligonucleotide
ggccacggcgaucugcacu

SEQ ID NO: 2780666 - RNA, 19 nt, Artificial Sequence
  Description of Artificial Sequence: Synthetic oligonucleotide
guccgagccgaagccgcuc

SEQ ID NO: 2780667 - RNA, 19 nt, Artificial Sequence
  Description of Artificial Sequence: Synthetic oligonucleotide
gccgcucuccauggcugcg

SEQ ID NO: 2780668 - RNA, 19 nt, Artificial Sequence
  Description of Artificial Sequence: Synthetic oligonucleotide
gucccagcagcaauuuauu

SEQ ID NO: 2780669 - RNA, 19 nt, Artificial Sequence
  Description of Artificial Sequence: Synthetic oligonucleotide
gcgggacacgguguuccag

SEQ ID NO: 2780670 - RNA, 19 nt, Artificial Sequence
  Description of Artificial Sequence: Synthetic oligonucleotide
cgugccgccgaaguccgag

SEQ ID NO: 2780671 - RNA, 19 nt, Artificial Sequence
  Description of Artificial Sequence: Synthetic oligonucleotide
gcugcgcagucaaccgggc

SEQ ID NO: 2780672 - RNA, 19 nt, Artificial Sequence
  Description of Artificial Sequence: Synthetic oligonucleotide
gccacggcgaucugcacuu

SEQ ID NO: 2780673 - RNA, 19 nt, Artificial Sequence
  Description of Artificial Sequence: Synthetic oligonucleotide
cugcccgugccgccgaagu

SEQ ID NO: 2780674 - RNA, 19 nt, Artificial Sequence
  Description of Artificial Sequence: Synthetic oligonucleotide
gcccuuacucaaaccgguc

SEQ ID NO: 2780675 - RNA, 19 nt, Artificial Sequence
  Description of Artificial Sequence: Synthetic oligonucleotide
cccgaugcacuuccggaaa

SEQ ID NO: 2780676 - RNA, 19 nt, Artificial Sequence
  Description of Artificial Sequence: Synthetic oligonucleotide
gugucccgaggcacagguc

SEQ ID NO: 2780677 - RNA, 19 nt, Artificial Sequence
  Description of Artificial Sequence: Synthetic oligonucleotide
caggucucggucacauguu

SEQ ID NO: 2780678 - RNA, 19 nt, Artificial Sequence
  Description of Artificial Sequence: Synthetic oligonucleotide
cgcgcugcccuugcgagug

SEQ ID NO: 2780679 - RNA, 19 nt, Artificial Sequence
  Description of Artificial Sequence: Synthetic oligonucleotide
cggcgaucugcacuuucac

SEQ ID NO: 2780680 - RNA, 19 nt, Artificial Sequence
  Description of Artificial Sequence: Synthetic oligonucleotide
gcaauuuauuuggccugcu

SEQ ID NO: 2780681 - RNA, 19 nt, Artificial Sequence
  Description of Artificial Sequence: Synthetic oligonucleotide
ggacugggcuaggcgcagc

SEQ ID NO: 2780682 - RNA, 19 nt, Artificial Sequence
  Description of Artificial Sequence: Synthetic oligonucleotide
ccauggcugcgcagucaac

SEQ ID NO: 2780683 - RNA, 19 nt, Artificial Sequence
  Description of Artificial Sequence: Synthetic oligonucleotide
ggcccgcgcacgguguccc

SEQ ID NO: 2780684 - RNA, 19 nt, Artificial Sequence
  Description of Artificial Sequence: Synthetic oligonucleotide
cccucugcagucgagaguu

SEQ ID NO: 2780685 - RNA, 19 nt, Artificial Sequence
  Description of Artificial Sequence: Synthetic oligonucleotide
ccgcgcacggugucccgag

SEQ ID NO: 2780686 - RNA, 19 nt, Artificial Sequence
  Description of Artificial Sequence: Synthetic oligonucleotide
gcgcagcaaccuaggggag

SEQ ID NO: 2780687 - RNA, 19 nt, Artificial Sequence
  Description of Artificial Sequence: Synthetic oligonucleotide
ggccucaacucggagcccu

SEQ ID NO: 2780688 - RNA, 19 nt, Artificial Sequence
  Description of Artificial Sequence: Synthetic oligonucleotide
gcaggcagaugcccuuacu

SEQ ID NO: 2780689 - RNA, 19 nt, Artificial Sequence
  Description of Artificial Sequence: Synthetic oligonucleotide
cuccgugcugccacacuuu

SEQ ID NO: 2780690 - RNA, 19 nt, Artificial Sequence
  Description of Artificial Sequence: Synthetic oligonucleotide
cgaagccgcucuccauggc

SEQ ID NO: 2780691 - RNA, 19 nt, Artificial Sequence
  Description of Artificial Sequence: Synthetic oligonucleotide
ccgaucuguggcccgcgca

SEQ ID NO: 2780692 - RNA, 19 nt, Artificial Sequence
  Description of Artificial Sequence: Synthetic oligonucleotide
ccagcuuuccgcugcccgu

SEQ ID NO: 2780693 - RNA, 19 nt, Artificial Sequence
  Description of Artificial Sequence: Synthetic oligonucleotide
gcugcccgugccgccgaag

SEQ ID NO: 2780694 - RNA, 19 nt, Artificial Sequence
  Description of Artificial Sequence: Synthetic oligonucleotide
ggagcccuccgugcugcca

SEQ ID NO: 2780695 - RNA, 19 nt, Artificial Sequence
  Description of Artificial Sequence: Synthetic oligonucleotide
cggaaacacuuguccguca

SEQ ID NO: 2780696 - RNA, 19 nt, Artificial Sequence
  Description of Artificial Sequence: Synthetic oligonucleotide
cgaugcacuuccggaaaca

SEQ ID NO: 2780697 - RNA, 19 nt, Artificial Sequence
  Description of Artificial Sequence: Synthetic oligonucleotide
gcgcugcccuugcgagugg

SEQ ID NO: 2780698 - RNA, 19 nt, Artificial Sequence
  Description of Artificial Sequence: Synthetic oligonucleotide
ccgccgaaguccgagccga

SEQ ID NO: 2780699 - RNA, 19 nt, Artificial Sequence
  Description of Artificial Sequence: Synthetic oligonucleotide
gcccgcgcacggugucccg

SEQ ID NO: 2780700 - RNA, 19 nt, Artificial Sequence
  Description of Artificial Sequence: Synthetic oligonucleotide
gggccgucagauacgcgcu

SEQ ID NO: 2780701 - RNA, 19 nt, Artificial Sequence
  Description of Artificial Sequence: Synthetic oligonucleotide
ccgggcuucccgaugcacu

SEQ ID NO: 2780702 - RNA, 19 nt, Artificial Sequence
  Description of Artificial Sequence: Synthetic oligonucleotide
gcugcccuugcgaguggga

SEQ ID NO: 2780703 - RNA, 19 nt, Artificial Sequence
  Description of Artificial Sequence: Synthetic oligonucleotide
ccacacuuuggggccguca

SEQ ID NO: 2780704 - RNA, 19 nt, Artificial Sequence
  Description of Artificial Sequence: Synthetic oligonucleotide
gggcuaggcgcagcaaccu

SEQ ID NO: 2780705 - RNA, 19 nt, Artificial Sequence
  Description of Artificial Sequence: Synthetic oligonucleotide
cgaugcauuucugcuccga

SEQ ID NO: 2780706 - RNA, 19 nt, Artificial Sequence
  Description of Artificial Sequence: Synthetic oligonucleotide
ccggguccagcuuuccgcu

SEQ ID NO: 2780707 - RNA, 19 nt, Artificial Sequence
  Description of Artificial Sequence: Synthetic oligonucleotide
cgcgcacggugucccgagg

SEQ ID NO: 2780708 - RNA, 19 nt, Artificial Sequence
  Description of Artificial Sequence: Synthetic oligonucleotide
ccuccgugcugccacacuu

SEQ ID NO: 2780709 - RNA, 19 nt, Artificial Sequence
  Description of Artificial Sequence: Synthetic oligonucleotide
gccucaacucggagcccuc

SEQ ID NO: 2780710 - RNA, 19 nt, Artificial Sequence
  Description of Artificial Sequence: Synthetic oligonucleotide
cggguccagcuuuccgcug

SEQ ID NO: 2780711 - RNA, 19 nt, Artificial Sequence
  Description of Artificial Sequence: Synthetic oligonucleotide
ccgagccgaagccgcucuc

SEQ ID NO: 2780712 - RNA, 19 nt, Artificial Sequence
  Description of Artificial Sequence: Synthetic oligonucleotide
cccuugcgagugggaaaac

SEQ ID NO: 2780713 - RNA, 19 nt, Artificial Sequence
  Description of Artificial Sequence: Synthetic oligonucleotide
ggucacauguuggcucguu

SEQ ID NO: 2780714 - RNA, 19 nt, Artificial Sequence
  Description of Artificial Sequence: Synthetic oligonucleotide
ggccugcucucaggucaca

SEQ ID NO: 2780715 - RNA, 19 nt, Artificial Sequence
  Description of Artificial Sequence: Synthetic oligonucleotide
ccuaggggagaggccucaa

SEQ ID NO: 2780716 - RNA, 19 nt, Artificial Sequence
  Description of Artificial Sequence: Synthetic oligonucleotide
cgcgggacacgguguucca

SEQ ID NO: 2780717 - RNA, 19 nt, Artificial Sequence
  Description of Artificial Sequence: Synthetic oligonucleotide
cgcguuggccacggcgauc

SEQ ID NO: 2780718 - RNA, 19 nt, Artificial Sequence
  Description of Artificial Sequence: Synthetic oligonucleotide
ccgaggcacaggucucggu

SEQ ID NO: 2780719 - RNA, 19 nt, Artificial Sequence
  Description of Artificial Sequence: Synthetic oligonucleotide
gcgcguuggccacggcgau

SEQ ID NO: 2780720 - RNA, 19 nt, Artificial Sequence
  Description of Artificial Sequence: Synthetic oligonucleotide
cccgcgcacggugucccga

SEQ ID NO: 2780721 - RNA, 19 nt, Artificial Sequence
  Description of Artificial Sequence: Synthetic oligonucleotide
cgcgcgggacacgguguuc

SEQ ID NO: 2780722 - RNA, 19 nt, Artificial Sequence
  Description of Artificial Sequence: Synthetic oligonucleotide
cccuccgugcugccacacu

SEQ ID NO: 2780723 - RNA, 19 nt, Artificial Sequence
  Description of Artificial Sequence: Synthetic oligonucleotide
ccgugccgccgaaguccga

SEQ ID NO: 2780724 - RNA, 19 nt, Artificial Sequence
  Description of Artificial Sequence: Synthetic oligonucleotide
cgccgaaguccgagccgaa

SEQ ID NO: 2780725 - RNA, 19 nt, Artificial Sequence
  Description of Artificial Sequence: Synthetic oligonucleotide
cggucacauguuggcucgu

SEQ ID NO: 2780726 - RNA, 19 nt, Artificial Sequence
  Description of Artificial Sequence: Synthetic oligonucleotide
cgcugcccgugccgccgaa

SEQ ID NO: 2780727 - RNA, 19 nt, Artificial Sequence
  Description of Artificial Sequence: Synthetic oligonucleotide
ccacggcgaucugcacuuu

SEQ ID NO: 2780728 - RNA, 19 nt, Artificial Sequence
  Description of Artificial Sequence: Synthetic oligonucleotide
aguacuuagauacacaucg

SEQ ID NO: 2780729 - RNA, 19 nt, Artificial Sequence
  Description of Artificial Sequence: Synthetic oligonucleotide
acuuuaauaagguaugugg

SEQ ID NO: 2780730 - RNA, 19 nt, Artificial Sequence
  Description of Artificial Sequence: Synthetic oligonucleotide
uauccaaguacuuagauac

SEQ ID NO: 2780731 - RNA, 19 nt, Artificial Sequence
  Description of Artificial Sequence: Synthetic oligonucleotide
cuuagauacacaucggucc

SEQ ID NO: 2780732 - RNA, 19 nt, Artificial Sequence
  Description of Artificial Sequence: Synthetic oligonucleotide
aaaccagcgugacaagucc

SEQ ID NO: 2780733 - RNA, 19 nt, Artificial Sequence
  Description of Artificial Sequence: Synthetic oligonucleotide
cuuuaauaagguauguggc

SEQ ID NO: 2780734 - RNA, 19 nt, Artificial Sequence
  Description of Artificial Sequence: Synthetic oligonucleotide
acauaugauacccacuagg

SEQ ID NO: 2780735 - RNA, 19 nt, Artificial Sequence
  Description of Artificial Sequence: Synthetic oligonucleotide
uuuaauaagguauguggca

SEQ ID NO: 2780736 - RNA, 19 nt, Artificial Sequence
  Description of Artificial Sequence: Synthetic oligonucleotide
uaugauacccacuagggaa

SEQ ID NO: 2780737 - RNA, 19 nt, Artificial Sequence
  Description of Artificial Sequence: Synthetic oligonucleotide
cauaugauacccacuaggg

SEQ ID NO: 2780738 - RNA, 19 nt, Artificial Sequence
  Description of Artificial Sequence: Synthetic oligonucleotide
aaguaugacaguuuucaca

SEQ ID NO: 2780739 - RNA, 19 nt, Artificial Sequence
  Description of Artificial Sequence: Synthetic oligonucleotide
uccaugucaaccuagcacc

SEQ ID NO: 2780740 - RNA, 19 nt, Artificial Sequence
  Description of Artificial Sequence: Synthetic oligonucleotide
ucugcuuccuuguaguggg

SEQ ID NO: 2780741 - RNA, 19 nt, Artificial Sequence
  Description of Artificial Sequence: Synthetic oligonucleotide
auccaugucaaccuagcac

SEQ ID NO: 2780742 - RNA, 19 nt, Artificial Sequence
  Description of Artificial Sequence: Synthetic oligonucleotide
aguaugacaguuuucacau

SEQ ID NO: 2780743 - RNA, 19 nt, Artificial Sequence
  Description of Artificial Sequence: Synthetic oligonucleotide
ucauggauauccaaguacu

SEQ ID NO: 2780744 - RNA, 19 nt, Artificial Sequence
  Description of Artificial Sequence: Synthetic oligonucleotide
agcucuaccacacccaggg

SEQ ID NO: 2780745 - RNA, 19 nt, Artificial Sequence
  Description of Artificial Sequence: Synthetic oligonucleotide
acagucacaaaccagcgug

SEQ ID NO: 2780746 - RNA, 19 nt, Artificial Sequence
  Description of Artificial Sequence: Synthetic oligonucleotide
aguuuucacauaugauacc

SEQ ID NO: 2780747 - RNA, 19 nt, Artificial Sequence
  Description of Artificial Sequence: Synthetic oligonucleotide
uaugacaguuuucacauau

SEQ ID NO: 2780748 - RNA, 19 nt, Artificial Sequence
  Description of Artificial Sequence: Synthetic oligonucleotide
aagcggauccaugucaacc

SEQ ID NO: 2780749 - RNA, 19 nt, Artificial Sequence
  Description of Artificial Sequence: Synthetic oligonucleotide
uacacaucgguccaggcac

SEQ ID NO: 2780750 - RNA, 19 nt, Artificial Sequence
  Description of Artificial Sequence: Synthetic oligonucleotide
acauacacagucacaaacc

SEQ ID NO: 2780751 - RNA, 19 nt, Artificial Sequence
  Description of Artificial Sequence: Synthetic oligonucleotide
cuggagaugcuccagagag

SEQ ID NO: 2780752 - RNA, 19 nt, Artificial Sequence
  Description of Artificial Sequence: Synthetic oligonucleotide
ucacauaugauacccacua

SEQ ID NO: 2780753 - RNA, 19 nt, Artificial Sequence
  Description of Artificial Sequence: Synthetic oligonucleotide
uuugcccauccucucaugg

SEQ ID NO: 2780754 - RNA, 19 nt, Artificial Sequence
  Description of Artificial Sequence: Synthetic oligonucleotide
ucuaagcggauccauguca

SEQ ID NO: 2780755 - RNA, 19 nt, Artificial Sequence
  Description of Artificial Sequence: Synthetic oligonucleotide
ugcauagacaauucuguca

SEQ ID NO: 2780756 - RNA, 19 nt, Artificial Sequence
  Description of Artificial Sequence: Synthetic oligonucleotide
uuagauacacaucggucca

SEQ ID NO: 2780757 - RNA, 19 nt, Artificial Sequence
  Description of Artificial Sequence: Synthetic oligonucleotide
uggggcaggucacagaucc

SEQ ID NO: 2780758 - RNA, 19 nt, Artificial Sequence
  Description of Artificial Sequence: Synthetic oligonucleotide
uuucacauaugauacccac

SEQ ID NO: 2780759 - RNA, 19 nt, Artificial Sequence
  Description of Artificial Sequence: Synthetic oligonucleotide
gagagccuaaguaugacag

SEQ ID NO: 2780760 - RNA, 19 nt, Artificial Sequence
  Description of Artificial Sequence: Synthetic oligonucleotide
uacuuagauacacaucggu

SEQ ID NO: 2780761 - RNA, 19 nt, Artificial Sequence
  Description of Artificial Sequence: Synthetic oligonucleotide
ucugcguggggccucaugc

SEQ ID NO: 2780762 - RNA, 19 nt, Artificial Sequence
  Description of Artificial Sequence: Synthetic oligonucleotide
uguacccucuucaucagcu

SEQ ID NO: 2780763 - RNA, 19 nt, Artificial Sequence
  Description of Artificial Sequence: Synthetic oligonucleotide
cacagauucgccuuuggac

SEQ ID NO: 2780764 - RNA, 19 nt, Artificial Sequence
  Description of Artificial Sequence: Synthetic oligonucleotide
uuaauaagguauguggcaa

SEQ ID NO: 2780765 - RNA, 19 nt, Artificial Sequence
  Description of Artificial Sequence: Synthetic oligonucleotide
uaauaagguauguggcaag

SEQ ID NO: 2780766 - RNA, 19 nt, Artificial Sequence
  Description of Artificial Sequence: Synthetic oligonucleotide
uucgccuuuggacagcucu

SEQ ID NO: 2780767 - RNA, 19 nt, Artificial Sequence
  Description of Artificial Sequence: Synthetic oligonucleotide
acuuagauacacaucgguc

SEQ ID NO: 2780768 - RNA, 19 nt, Artificial Sequence
  Description of Artificial Sequence: Synthetic oligonucleotide
cucauggauauccaaguac

SEQ ID NO: 2780769 - RNA, 19 nt, Artificial Sequence
  Description of Artificial Sequence: Synthetic oligonucleotide
cuuuggacagcucugcuuc

SEQ ID NO: 2780770 - RNA, 19 nt, Artificial Sequence
  Description of Artificial Sequence: Synthetic oligonucleotide
uucuuuagccaggagagcu

SEQ ID NO: 2780771 - RNA, 19 nt, Artificial Sequence
  Description of Artificial Sequence: Synthetic oligonucleotide
aaguacuuagauacacauc

SEQ ID NO: 2780772 - RNA, 19 nt, Artificial Sequence
  Description of Artificial Sequence: Synthetic oligonucleotide
cauccucucauggauaucc

SEQ ID NO: 2780773 - RNA, 19 nt, Artificial Sequence
  Description of Artificial Sequence: Synthetic oligonucleotide
auaugauacccacuaggga

SEQ ID NO: 2780774 - RNA, 19 nt, Artificial Sequence
  Description of Artificial Sequence: Synthetic oligonucleotide
auagacaauucugucaacu

SEQ ID NO: 2780775 - RNA, 19 nt, Artificial Sequence
  Description of Artificial Sequence: Synthetic oligonucleotide
uucacauaugauacccacu

SEQ ID NO: 2780776 - RNA, 19 nt, Artificial Sequence
  Description of Artificial Sequence: Synthetic oligonucleotide
ucuuuccacggccuggggc

SEQ ID NO: 2780777 - RNA, 19 nt, Artificial Sequence
  Description of Artificial Sequence: Synthetic oligonucleotide
uccaaguacuuagauacac

SEQ ID NO: 2780778 - RNA, 19 nt, Artificial Sequence
  Description of Artificial Sequence: Synthetic oligonucleotide
uguggcaaggugcacccca

SEQ ID NO: 2780779 - RNA, 19 nt, Artificial Sequence
  Description of Artificial Sequence: Synthetic oligonucleotide
ccuucuuuagccaggagag

SEQ ID NO: 2780780 - RNA, 19 nt, Artificial Sequence
  Description of Artificial Sequence: Synthetic oligonucleotide
agcgugacaaguccccuuc

SEQ ID NO: 2780781 - RNA, 19 nt, Artificial Sequence
  Description of Artificial Sequence: Synthetic oligonucleotide
ucuaccacacccagggguc

SEQ ID NO: 2780782 - RNA, 19 nt, Artificial Sequence
  Description of Artificial Sequence: Synthetic oligonucleotide
uaaguaugacaguuuucac

SEQ ID NO: 2780783 - RNA, 19 nt, Artificial Sequence
  Description of Artificial Sequence: Synthetic oligonucleotide
auacacaucgguccaggca

SEQ ID NO: 2780784 - RNA, 19 nt, Artificial Sequence
  Description of Artificial Sequence: Synthetic oligonucleotide
uucuguuguacaugucagc

SEQ ID NO: 2780785 - RNA, 19 nt, Artificial Sequence
  Description of Artificial Sequence: Synthetic oligonucleotide
caucgguccaggcacacag

SEQ ID NO: 2780786 - RNA, 19 nt, Artificial Sequence
  Description of Artificial Sequence: Synthetic oligonucleotide
gguccaggcacacagauuc

SEQ ID NO: 2780787 - RNA, 19 nt, Artificial Sequence
  Description of Artificial Sequence: Synthetic oligonucleotide
ucaaccuagcaccgugcag

SEQ ID NO: 2780788 - RNA, 19 nt, Artificial Sequence
  Description of Artificial Sequence: Synthetic oligonucleotide
agagcucuaccacacccag

SEQ ID NO: 2780789 - RNA, 19 nt, Artificial Sequence
  Description of Artificial Sequence: Synthetic oligonucleotide
cacagaucccacgaggucc

SEQ ID NO: 2780790 - RNA, 19 nt, Artificial Sequence
  Description of Artificial Sequence: Synthetic oligonucleotide
augauacccacuagggaac

SEQ ID NO: 2780791 - RNA, 19 nt, Artificial Sequence
  Description of Artificial Sequence: Synthetic oligonucleotide
aaccuagcaccgugcagag

SEQ ID NO: 2780792 - RNA, 19 nt, Artificial Sequence
  Description of Artificial Sequence: Synthetic oligonucleotide
gugaauucugcguggggcc

SEQ ID NO: 2780793 - RNA, 19 nt, Artificial Sequence
  Description of Artificial Sequence: Synthetic oligonucleotide
aaccagcgugacaaguccc

SEQ ID NO: 2780794 - RNA, 19 nt, Artificial Sequence
  Description of Artificial Sequence: Synthetic oligonucleotide
caaaccagcgugacaaguc

SEQ ID NO: 2780795 - RNA, 19 nt, Artificial Sequence
  Description of Artificial Sequence: Synthetic oligonucleotide
agguccagagcucugcugu

SEQ ID NO: 2780796 - RNA, 19 nt, Artificial Sequence
  Description of Artificial Sequence: Synthetic oligonucleotide
augucaaccuagcaccgug

SEQ ID NO: 2780797 - RNA, 19 nt, Artificial Sequence
  Description of Artificial Sequence: Synthetic oligonucleotide
ugucaaccuagcaccgugc

SEQ ID NO: 2780798 - RNA, 19 nt, Artificial Sequence
  Description of Artificial Sequence: Synthetic oligonucleotide
cauacacagucacaaacca

SEQ ID NO: 2780799 - RNA, 19 nt, Artificial Sequence
  Description of Artificial Sequence: Synthetic oligonucleotide
ugacaaguccccuucuuua

SEQ ID NO: 2780800 - RNA, 19 nt, Artificial Sequence
  Description of Artificial Sequence: Synthetic oligonucleotide
agagagccuaaguaugaca

SEQ ID NO: 2780801 - RNA, 19 nt, Artificial Sequence
  Description of Artificial Sequence: Synthetic oligonucleotide
agcggauccaugucaaccu

SEQ ID NO: 2780802 - RNA, 19 nt, Artificial Sequence
  Description of Artificial Sequence: Synthetic oligonucleotide
gauacacaucgguccaggc

SEQ ID NO: 2780803 - RNA, 19 nt, Artificial Sequence
  Description of Artificial Sequence: Synthetic oligonucleotide
cuucauccugcauagacaa

SEQ ID NO: 2780804 - RNA, 19 nt, Artificial Sequence
  Description of Artificial Sequence: Synthetic oligonucleotide
uccuggagaugcuccagag

SEQ ID NO: 2780805 - RNA, 19 nt, Artificial Sequence
  Description of Artificial Sequence: Synthetic oligonucleotide
uccgcagccagcugcuggg

SEQ ID NO: 2780806 - RNA, 19 nt, Artificial Sequence
  Description of Artificial Sequence: Synthetic oligonucleotide
ggagaugcuccagagagcc

SEQ ID NO: 2780807 - RNA, 19 nt, Artificial Sequence
  Description of Artificial Sequence: Synthetic oligonucleotide
ucuuuagccaggagagcuc

SEQ ID NO: 2780808 - RNA, 19 nt, Artificial Sequence
  Description of Artificial Sequence: Synthetic oligonucleotide
uggucauucuguuguacau

SEQ ID NO: 2780809 - RNA, 19 nt, Artificial Sequence
  Description of Artificial Sequence: Synthetic oligonucleotide
ugcguggggccucaugcag

SEQ ID NO: 2780810 - RNA, 19 nt, Artificial Sequence
  Description of Artificial Sequence: Synthetic oligonucleotide
agucacaaaccagcgugac

SEQ ID NO: 2780811 - RNA, 19 nt, Artificial Sequence
  Description of Artificial Sequence: Synthetic oligonucleotide
cucugcuuccuuguagugg

SEQ ID NO: 2780812 - RNA, 19 nt, Artificial Sequence
  Description of Artificial Sequence: Synthetic oligonucleotide
guacuuagauacacaucgg

SEQ ID NO: 2780813 - RNA, 19 nt, Artificial Sequence
  Description of Artificial Sequence: Synthetic oligonucleotide
cagauucgccuuuggacag

SEQ ID NO: 2780814 - RNA, 19 nt, Artificial Sequence
  Description of Artificial Sequence: Synthetic oligonucleotide
acuggucauucuguuguac

SEQ ID NO: 2780815 - RNA, 19 nt, Artificial Sequence
  Description of Artificial Sequence: Synthetic oligonucleotide
uggagaugcuccagagagc

SEQ ID NO: 2780816 - RNA, 19 nt, Artificial Sequence
  Description of Artificial Sequence: Synthetic oligonucleotide
uuccuuguaguggggaggc

SEQ ID NO: 2780817 - RNA, 19 nt, Artificial Sequence
  Description of Artificial Sequence: Synthetic oligonucleotide
caaggugcaccccagguga

SEQ ID NO: 2780818 - RNA, 19 nt, Artificial Sequence
  Description of Artificial Sequence: Synthetic oligonucleotide
ggugaauucugcguggggc

SEQ ID NO: 2780819 - RNA, 19 nt, Artificial Sequence
  Description of Artificial Sequence: Synthetic oligonucleotide
cuuuccacggccuggggca

SEQ ID NO: 2780820 - RNA, 19 nt, Artificial Sequence
  Description of Artificial Sequence: Synthetic oligonucleotide
accagcgugacaagucccc

SEQ ID NO: 2780821 - RNA, 19 nt, Artificial Sequence
  Description of Artificial Sequence: Synthetic oligonucleotide
ggagagcucuaccacaccc

SEQ ID NO: 2780822 - RNA, 19 nt, Artificial Sequence
  Description of Artificial Sequence: Synthetic oligonucleotide
caggagagcucuaccacac

SEQ ID NO: 2780823 - RNA, 19 nt, Artificial Sequence
  Description of Artificial Sequence: Synthetic oligonucleotide
acacagauucgccuuugga

SEQ ID NO: 2780824 - RNA, 19 nt, Artificial Sequence
  Description of Artificial Sequence: Synthetic oligonucleotide
cacauaugauacccacuag

SEQ ID NO: 2780825 - RNA, 19 nt, Artificial Sequence
  Description of Artificial Sequence: Synthetic oligonucleotide
ugcuccagagagccuaagu

SEQ ID NO: 2780826 - RNA, 19 nt, Artificial Sequence
  Description of Artificial Sequence: Synthetic oligonucleotide
accccaggugaauucugcg

SEQ ID NO: 2780827 - RNA, 19 nt, Artificial Sequence
  Description of Artificial Sequence: Synthetic oligonucleotide
ugcccauccucucauggau

SEQ ID NO: 2780828 - RNA, 19 nt, Artificial Sequence
  Description of Artificial Sequence: Synthetic oligonucleotide
acacacuuccgguggcagg

SEQ ID NO: 2780829 - RNA, 19 nt, Artificial Sequence
  Description of Artificial Sequence: Synthetic oligonucleotide
uuagccaggagagcucuac

SEQ ID NO: 2780830 - RNA, 19 nt, Artificial Sequence
  Description of Artificial Sequence: Synthetic oligonucleotide
gcauagacaauucugucaa

SEQ ID NO: 2780831 - RNA, 19 nt, Artificial Sequence
  Description of Artificial Sequence: Synthetic oligonucleotide
uuuggacagcucugcuucc

SEQ ID NO: 2780832 - RNA, 19 nt, Artificial Sequence
  Description of Artificial Sequence: Synthetic oligonucleotide
cugcauagacaauucuguc

SEQ ID NO: 2780833 - RNA, 19 nt, Artificial Sequence
  Description of Artificial Sequence: Synthetic oligonucleotide
acacagucacaaaccagcg

SEQ ID NO: 2780834 - RNA, 19 nt, Artificial Sequence
  Description of Artificial Sequence: Synthetic oligonucleotide
aggugaauucugcgugggg

SEQ ID NO: 2780835 - RNA, 19 nt, Artificial Sequence
  Description of Artificial Sequence: Synthetic oligonucleotide
auacacagucacaaaccag

SEQ ID NO: 2780836 - RNA, 19 nt, Artificial Sequence
  Description of Artificial Sequence: Synthetic oligonucleotide
ucacagaucccacgagguc

SEQ ID NO: 2780837 - RNA, 19 nt, Artificial Sequence
  Description of Artificial Sequence: Synthetic oligonucleotide
cacacuuccgguggcaggc

SEQ ID NO: 2780838 - RNA, 19 nt, Artificial Sequence
  Description of Artificial Sequence: Synthetic oligonucleotide
agccuccuggucuuuccac

SEQ ID NO: 2780839 - RNA, 19 nt, Artificial Sequence
  Description of Artificial Sequence: Synthetic oligonucleotide
agagccuaaguaugacagu

SEQ ID NO: 2780840 - RNA, 19 nt, Artificial Sequence
  Description of Artificial Sequence: Synthetic oligonucleotide
uggucuuuccacggccugg

SEQ ID NO: 2780841 - RNA, 19 nt, Artificial Sequence
  Description of Artificial Sequence: Synthetic oligonucleotide
uccgguggcaggcacuggu

SEQ ID NO: 2780842 - RNA, 19 nt, Artificial Sequence
  Description of Artificial Sequence: Synthetic oligonucleotide
gauccaugucaaccuagca

SEQ ID NO: 2780843 - RNA, 19 nt, Artificial Sequence
  Description of Artificial Sequence: Synthetic oligonucleotide
gucauucuguuguacaugu

SEQ ID NO: 2780844 - RNA, 19 nt, Artificial Sequence
  Description of Artificial Sequence: Synthetic oligonucleotide
ucgccuuuggacagcucug

SEQ ID NO: 2780845 - RNA, 19 nt, Artificial Sequence
  Description of Artificial Sequence: Synthetic oligonucleotide
ucgguccaggcacacagau

SEQ ID NO: 2780846 - RNA, 19 nt, Artificial Sequence
  Description of Artificial Sequence: Synthetic oligonucleotide
caaguacuuagauacacau

SEQ ID NO: 2780847 - RNA, 19 nt, Artificial Sequence
  Description of Artificial Sequence: Synthetic oligonucleotide
acagaucccacgagguccg

SEQ ID NO: 2780848 - RNA, 19 nt, Artificial Sequence
  Description of Artificial Sequence: Synthetic oligonucleotide
ccucucauggauauccaag

SEQ ID NO: 2780849 - RNA, 19 nt, Artificial Sequence
  Description of Artificial Sequence: Synthetic oligonucleotide
uccaggcacacagauucgc

SEQ ID NO: 2780850 - RNA, 19 nt, Artificial Sequence
  Description of Artificial Sequence: Synthetic oligonucleotide
agcaccgugcagagcagcc

SEQ ID NO: 2780851 - RNA, 19 nt, Artificial Sequence
  Description of Artificial Sequence: Synthetic oligonucleotide
caaccuagcaccgugcaga

SEQ ID NO: 2780852 - RNA, 19 nt, Artificial Sequence
  Description of Artificial Sequence: Synthetic oligonucleotide
uagccaggagagcucuacc

SEQ ID NO: 2780853 - RNA, 19 nt, Artificial Sequence
  Description of Artificial Sequence: Synthetic oligonucleotide
uagauacacaucgguccag

SEQ ID NO: 2780854 - RNA, 19 nt, Artificial Sequence
  Description of Artificial Sequence: Synthetic oligonucleotide
acaaaccagcgugacaagu

SEQ ID NO: 2780855 - RNA, 19 nt, Artificial Sequence
  Description of Artificial Sequence: Synthetic oligonucleotide
cuggucauucuguuguaca

SEQ ID NO: 2780856 - RNA, 19 nt, Artificial Sequence
  Description of Artificial Sequence: Synthetic oligonucleotide
agauucgccuuuggacagc

SEQ ID NO: 2780857 - RNA, 19 nt, Artificial Sequence
  Description of Artificial Sequence: Synthetic oligonucleotide
acacccagggguccuggag

SEQ ID NO: 2780858 - RNA, 19 nt, Artificial Sequence
  Description of Artificial Sequence: Synthetic oligonucleotide
cauagacaauucugucaac

SEQ ID NO: 2780859 - RNA, 19 nt, Artificial Sequence
  Description of Artificial Sequence: Synthetic oligonucleotide
uacccacuagggaacacuu

SEQ ID NO: 2780860 - RNA, 19 nt, Artificial Sequence
  Description of Artificial Sequence: Synthetic oligonucleotide
cacacagauucgccuuugg

SEQ ID NO: 2780861 - RNA, 19 nt, Artificial Sequence
  Description of Artificial Sequence: Synthetic oligonucleotide
uuuugcccauccucucaug

SEQ ID NO: 2780862 - RNA, 19 nt, Artificial Sequence
  Description of Artificial Sequence: Synthetic oligonucleotide
uggcaaggugcaccccagg

SEQ ID NO: 2780863 - RNA, 19 nt, Artificial Sequence
  Description of Artificial Sequence: Synthetic oligonucleotide
uccucucauggauauccaa

SEQ ID NO: 2780864 - RNA, 19 nt, Artificial Sequence
  Description of Artificial Sequence: Synthetic oligonucleotide
auacccacuagggaacacu

SEQ ID NO: 2780865 - RNA, 19 nt, Artificial Sequence
  Description of Artificial Sequence: Synthetic oligonucleotide
ugaauucugcguggggccu

SEQ ID NO: 2780866 - RNA, 19 nt, Artificial Sequence
  Description of Artificial Sequence: Synthetic oligonucleotide
caccccaggugaauucugc

SEQ ID NO: 2780867 - RNA, 19 nt, Artificial Sequence
  Description of Artificial Sequence: Synthetic oligonucleotide
ccuagcaccgugcagagca

SEQ ID NO: 2780868 - RNA, 19 nt, Artificial Sequence
  Description of Artificial Sequence: Synthetic oligonucleotide
cuuguaguggggaggcaca

SEQ ID NO: 2780869 - RNA, 19 nt, Artificial Sequence
  Description of Artificial Sequence: Synthetic oligonucleotide
agaugcuccagagagccua

SEQ ID NO: 2780870 - RNA, 19 nt, Artificial Sequence
  Description of Artificial Sequence: Synthetic oligonucleotide
cuaagcggauccaugucaa

SEQ ID NO: 2780871 - RNA, 19 nt, Artificial Sequence
  Description of Artificial Sequence: Synthetic oligonucleotide
gacaauucugucaacuuuu

SEQ ID NO: 2780872 - RNA, 19 nt, Artificial Sequence
  Description of Artificial Sequence: Synthetic oligonucleotide
ucccacgagguccgcaacu

SEQ ID NO: 2780873 - RNA, 19 nt, Artificial Sequence
  Description of Artificial Sequence: Synthetic oligonucleotide
agguauguggcaaggugca

SEQ ID NO: 2780874 - RNA, 19 nt, Artificial Sequence
  Description of Artificial Sequence: Synthetic oligonucleotide
ugauacccacuagggaaca

SEQ ID NO: 2780875 - RNA, 19 nt, Artificial Sequence
  Description of Artificial Sequence: Synthetic oligonucleotide
gaucccacgagguccgcaa

SEQ ID NO: 2780876 - RNA, 19 nt, Artificial Sequence
  Description of Artificial Sequence: Synthetic oligonucleotide
uaagcggauccaugucaac

SEQ ID NO: 2780877 - RNA, 19 nt, Artificial Sequence
  Description of Artificial Sequence: Synthetic oligonucleotide
caggugaauucugcguggg

SEQ ID NO: 2780878 - RNA, 19 nt, Artificial Sequence
  Description of Artificial Sequence: Synthetic oligonucleotide
cucuaagcggauccauguc

SEQ ID NO: 2780879 - RNA, 19 nt, Artificial Sequence
  Description of Artificial Sequence: Synthetic oligonucleotide
cucucauggauauccaagu

SEQ ID NO: 2780880 - RNA, 19 nt, Artificial Sequence
  Description of Artificial Sequence: Synthetic oligonucleotide
cuccgcagccagcugcugg

SEQ ID NO: 2780881 - RNA, 19 nt, Artificial Sequence
  Description of Artificial Sequence: Synthetic oligonucleotide
ugcuuccuuguagugggga

SEQ ID NO: 2780882 - RNA, 19 nt, Artificial Sequence
  Description of Artificial Sequence: Synthetic oligonucleotide
aucccacgagguccgcaac

SEQ ID NO: 2780883 - RNA, 19 nt, Artificial Sequence
  Description of Artificial Sequence: Synthetic oligonucleotide
caggucacagaucccacga

SEQ ID NO: 2780884 - RNA, 19 nt, Artificial Sequence
  Description of Artificial Sequence: Synthetic oligonucleotide
gccucaugcagguccagag

SEQ ID NO: 2780885 - RNA, 19 nt, Artificial Sequence
  Description of Artificial Sequence: Synthetic oligonucleotide
aauucugcguggggccuca

SEQ ID NO: 2780886 - RNA, 19 nt, Artificial Sequence
  Description of Artificial Sequence: Synthetic oligonucleotide
uucugcguggggccucaug

SEQ ID NO: 2780887 - RNA, 19 nt, Artificial Sequence
  Description of Artificial Sequence: Synthetic oligonucleotide
gcaggucacagaucccacg

SEQ ID NO: 2780888 - RNA, 19 nt, Artificial Sequence
  Description of Artificial Sequence: Synthetic oligonucleotide
gucaaccuagcaccgugca

SEQ ID NO: 2780889 - RNA, 19 nt, Artificial Sequence
  Description of Artificial Sequence: Synthetic oligonucleotide
gggaggcacacacuuccgg

SEQ ID NO: 2780890 - RNA, 19 nt, Artificial Sequence
  Description of Artificial Sequence: Synthetic oligonucleotide
gcuuccuuguaguggggag

SEQ ID NO: 2780891 - RNA, 19 nt, Artificial Sequence
  Description of Artificial Sequence: Synthetic oligonucleotide
ugcaccccaggugaauucu

SEQ ID NO: 2780892 - RNA, 19 nt, Artificial Sequence
  Description of Artificial Sequence: Synthetic oligonucleotide
cuguacccucuucaucagc

SEQ ID NO: 2780893 - RNA, 19 nt, Artificial Sequence
  Description of Artificial Sequence: Synthetic oligonucleotide
uguaguggggaggcacaca

SEQ ID NO: 2780894 - RNA, 19 nt, Artificial Sequence
  Description of Artificial Sequence: Synthetic oligonucleotide
gucacaaaccagcgugaca

SEQ ID NO: 2780895 - RNA, 19 nt, Artificial Sequence
  Description of Artificial Sequence: Synthetic oligonucleotide
gagagcucuaccacaccca

SEQ ID NO: 2780896 - RNA, 19 nt, Artificial Sequence
  Description of Artificial Sequence: Synthetic oligonucleotide
ggucauucuguuguacaug

SEQ ID NO: 2780897 - RNA, 19 nt, Artificial Sequence
  Description of Artificial Sequence: Synthetic oligonucleotide
ccaggugaauucugcgugg

SEQ ID NO: 2780898 - RNA, 19 nt, Artificial Sequence
  Description of Artificial Sequence: Synthetic oligonucleotide
aggcacacagauucgccuu

SEQ ID NO: 2780899 - RNA, 19 nt, Artificial Sequence
  Description of Artificial Sequence: Synthetic oligonucleotide
gcaaggugcaccccaggug

SEQ ID NO: 2780900 - RNA, 19 nt, Artificial Sequence
  Description of Artificial Sequence: Synthetic oligonucleotide
uuguaguggggaggcacac

SEQ ID NO: 2780901 - RNA, 19 nt, Artificial Sequence
  Description of Artificial Sequence: Synthetic oligonucleotide
gagcucuaccacacccagg

SEQ ID NO: 2780902 - RNA, 19 nt, Artificial Sequence
  Description of Artificial Sequence: Synthetic oligonucleotide
cuagcaccgugcagagcag

SEQ ID NO: 2780903 - RNA, 19 nt, Artificial Sequence
  Description of Artificial Sequence: Synthetic oligonucleotide
ggauccaugucaaccuagc

SEQ ID NO: 2780904 - RNA, 19 nt, Artificial Sequence
  Description of Artificial Sequence: Synthetic oligonucleotide
ccaugucaaccuagcaccg

SEQ ID NO: 2780905 - RNA, 19 nt, Artificial Sequence
  Description of Artificial Sequence: Synthetic oligonucleotide
cagagagccuaaguaugac

SEQ ID NO: 2780906 - RNA, 19 nt, Artificial Sequence
  Description of Artificial Sequence: Synthetic oligonucleotide
cccaggugaauucugcgug

SEQ ID NO: 2780907 - RNA, 19 nt, Artificial Sequence
  Description of Artificial Sequence: Synthetic oligonucleotide
ggcacuggucauucuguug

SEQ ID NO: 2780908 - RNA, 19 nt, Artificial Sequence
  Description of Artificial Sequence: Synthetic oligonucleotide
accgugcagagcagccucc

SEQ ID NO: 2780909 - RNA, 19 nt, Artificial Sequence
  Description of Artificial Sequence: Synthetic oligonucleotide
cucuaccacacccaggggu

SEQ ID NO: 2780910 - RNA, 19 nt, Artificial Sequence
  Description of Artificial Sequence: Synthetic oligonucleotide
cuuccgguggcaggcacug

SEQ ID NO: 2780911 - RNA, 19 nt, Artificial Sequence
  Description of Artificial Sequence: Synthetic oligonucleotide
ccuaaguaugacaguuuuc

SEQ ID NO: 2780912 - RNA, 19 nt, Artificial Sequence
  Description of Artificial Sequence: Synthetic oligonucleotide
cagucacaaaccagcguga

SEQ ID NO: 2780913 - RNA, 19 nt, Artificial Sequence
  Description of Artificial Sequence: Synthetic oligonucleotide
caccgugcagagcagccuc

SEQ ID NO: 2780914 - RNA, 19 nt, Artificial Sequence
  Description of Artificial Sequence: Synthetic oligonucleotide
uccccuucuuuagccagga

SEQ ID NO: 2780915 - RNA, 19 nt, Artificial Sequence
  Description of Artificial Sequence: Synthetic oligonucleotide
cugcuguacccucuucauc

SEQ ID NO: 2780916 - RNA, 19 nt, Artificial Sequence
  Description of Artificial Sequence: Synthetic oligonucleotide
gauacccacuagggaacac

SEQ ID NO: 2780917 - RNA, 19 nt, Artificial Sequence
  Description of Artificial Sequence: Synthetic oligonucleotide
gagccuaaguaugacaguu

SEQ ID NO: 2780918 - RNA, 19 nt, Artificial Sequence
  Description of Artificial Sequence: Synthetic oligonucleotide
cacacacuuccgguggcag

SEQ ID NO: 2780919 - RNA, 19 nt, Artificial Sequence
  Description of Artificial Sequence: Synthetic oligonucleotide
cagguccagagcucugcug

SEQ ID NO: 2780920 - RNA, 19 nt, Artificial Sequence
  Description of Artificial Sequence: Synthetic oligonucleotide
cuggucuuuccacggccug

SEQ ID NO: 2780921 - RNA, 19 nt, Artificial Sequence
  Description of Artificial Sequence: Synthetic oligonucleotide
ccagggguccuggagaugc

SEQ ID NO: 2780922 - RNA, 19 nt, Artificial Sequence
  Description of Artificial Sequence: Synthetic oligonucleotide
cccuucuuuagccaggaga

SEQ ID NO: 2780923 - RNA, 19 nt, Artificial Sequence
  Description of Artificial Sequence: Synthetic oligonucleotide
uuuagccaggagagcucua

SEQ ID NO: 2780924 - RNA, 19 nt, Artificial Sequence
  Description of Artificial Sequence: Synthetic oligonucleotide
gcacuggucauucuguugu

SEQ ID NO: 2780925 - RNA, 19 nt, Artificial Sequence
  Description of Artificial Sequence: Synthetic oligonucleotide
ugggcucuaagcggaucca

SEQ ID NO: 2780926 - RNA, 19 nt, Artificial Sequence
  Description of Artificial Sequence: Synthetic oligonucleotide
cugcugggcucuaagcgga

SEQ ID NO: 2780927 - RNA, 19 nt, Artificial Sequence
  Description of Artificial Sequence: Synthetic oligonucleotide
uuuccacggccuggggcag

SEQ ID NO: 2780928 - RNA, 19 nt, Artificial Sequence
  Description of Artificial Sequence: Synthetic oligonucleotide
auguggcaaggugcacccc

SEQ ID NO: 2780929 - RNA, 19 nt, Artificial Sequence
  Description of Artificial Sequence: Synthetic oligonucleotide
uagcaccgugcagagcagc

SEQ ID NO: 2780930 - RNA, 19 nt, Artificial Sequence
  Description of Artificial Sequence: Synthetic oligonucleotide
ccugcauagacaauucugu

SEQ ID NO: 2780931 - RNA, 19 nt, Artificial Sequence
  Description of Artificial Sequence: Synthetic oligonucleotide
auccaaguacuuagauaca

SEQ ID NO: 2780932 - RNA, 19 nt, Artificial Sequence
  Description of Artificial Sequence: Synthetic oligonucleotide
ccaaguacuuagauacaca

SEQ ID NO: 2780933 - RNA, 19 nt, Artificial Sequence
  Description of Artificial Sequence: Synthetic oligonucleotide
guccaggcacacagauucg

SEQ ID NO: 2780934 - RNA, 19 nt, Artificial Sequence
  Description of Artificial Sequence: Synthetic oligonucleotide
accuagcaccgugcagagc

SEQ ID NO: 2780935 - RNA, 19 nt, Artificial Sequence
  Description of Artificial Sequence: Synthetic oligonucleotide
ccucaugcagguccagagc

SEQ ID NO: 2780936 - RNA, 19 nt, Artificial Sequence
  Description of Artificial Sequence: Synthetic oligonucleotide
cagagcagccuccuggucu

SEQ ID NO: 2780937 - RNA, 19 nt, Artificial Sequence
  Description of Artificial Sequence: Synthetic oligonucleotide
agcagccuccuggucuuuc

SEQ ID NO: 2780938 - RNA, 19 nt, Artificial Sequence
  Description of Artificial Sequence: Synthetic oligonucleotide
gucacagaucccacgaggu

SEQ ID NO: 2780939 - RNA, 19 nt, Artificial Sequence
  Description of Artificial Sequence: Synthetic oligonucleotide
guggcaaggugcaccccag

SEQ ID NO: 2780940 - RNA, 19 nt, Artificial Sequence
  Description of Artificial Sequence: Synthetic oligonucleotide
gaauucugcguggggccuc

SEQ ID NO: 2780941 - RNA, 19 nt, Artificial Sequence
  Description of Artificial Sequence: Synthetic oligonucleotide
ggauauccaaguacuuaga

SEQ ID NO: 2780942 - RNA, 19 nt, Artificial Sequence
  Description of Artificial Sequence: Synthetic oligonucleotide
cacccagggguccuggaga

SEQ ID NO: 2780943 - RNA, 19 nt, Artificial Sequence
  Description of Artificial Sequence: Synthetic oligonucleotide
aggcacuggucauucuguu

SEQ ID NO: 2780944 - RNA, 19 nt, Artificial Sequence
  Description of Artificial Sequence: Synthetic oligonucleotide
ccuuguaguggggaggcac

SEQ ID NO: 2780945 - RNA, 19 nt, Artificial Sequence
  Description of Artificial Sequence: Synthetic oligonucleotide
gcucuaagcggauccaugu

SEQ ID NO: 2780946 - RNA, 19 nt, Artificial Sequence
  Description of Artificial Sequence: Synthetic oligonucleotide
gugcaccccaggugaauuc

SEQ ID NO: 2780947 - RNA, 19 nt, Artificial Sequence
  Description of Artificial Sequence: Synthetic oligonucleotide
ggcucuaagcggauccaug

SEQ ID NO: 2780948 - RNA, 19 nt, Artificial Sequence
  Description of Artificial Sequence: Synthetic oligonucleotide
ccagagagccuaaguauga

SEQ ID NO: 2780949 - RNA, 19 nt, Artificial Sequence
  Description of Artificial Sequence: Synthetic oligonucleotide
cuuuagccaggagagcucu

SEQ ID NO: 2780950 - RNA, 19 nt, Artificial Sequence
  Description of Artificial Sequence: Synthetic oligonucleotide
guaugacaguuuucacaua

SEQ ID NO: 2780951 - RNA, 19 nt, Artificial Sequence
  Description of Artificial Sequence: Synthetic oligonucleotide
gauucgccuuuggacagcu

SEQ ID NO: 2780952 - RNA, 19 nt, Artificial Sequence
  Description of Artificial Sequence: Synthetic oligonucleotide
ggcacacacuuccgguggc

SEQ ID NO: 2780953 - RNA, 19 nt, Artificial Sequence
  Description of Artificial Sequence: Synthetic oligonucleotide
agaucccacgagguccgca

SEQ ID NO: 2780954 - RNA, 19 nt, Artificial Sequence
  Description of Artificial Sequence: Synthetic oligonucleotide
gaugcuccagagagccuaa

SEQ ID NO: 2780955 - RNA, 19 nt, Artificial Sequence
  Description of Artificial Sequence: Synthetic oligonucleotide
agccuaaguaugacaguuu

SEQ ID NO: 2780956 - RNA, 19 nt, Artificial Sequence
  Description of Artificial Sequence: Synthetic oligonucleotide
uaccacacccagggguccu

SEQ ID NO: 2780957 - RNA, 19 nt, Artificial Sequence
  Description of Artificial Sequence: Synthetic oligonucleotide
auccucucauggauaucca

SEQ ID NO: 2780958 - RNA, 19 nt, Artificial Sequence
  Description of Artificial Sequence: Synthetic oligonucleotide
uuccacggccuggggcagg

SEQ ID NO: 2780959 - RNA, 19 nt, Artificial Sequence
  Description of Artificial Sequence: Synthetic oligonucleotide
ccaggagagcucuaccaca

SEQ ID NO: 2780960 - RNA, 19 nt, Artificial Sequence
  Description of Artificial Sequence: Synthetic oligonucleotide
cauggauauccaaguacuu

SEQ ID NO: 2780961 - RNA, 19 nt, Artificial Sequence
  Description of Artificial Sequence: Synthetic oligonucleotide
uccuuguaguggggaggca

SEQ ID NO: 2780962 - RNA, 19 nt, Artificial Sequence
  Description of Artificial Sequence: Synthetic oligonucleotide
acuuccgguggcaggcacu

SEQ ID NO: 2780963 - RNA, 19 nt, Artificial Sequence
  Description of Artificial Sequence: Synthetic oligonucleotide
caugcagguccagagcucu

SEQ ID NO: 2780964 - RNA, 19 nt, Artificial Sequence
  Description of Artificial Sequence: Synthetic oligonucleotide
cccacuagggaacacuuua

SEQ ID NO: 2780965 - RNA, 19 nt, Artificial Sequence
  Description of Artificial Sequence: Synthetic oligonucleotide
ggaggcacacacuuccggu

SEQ ID NO: 2780966 - RNA, 19 nt, Artificial Sequence
  Description of Artificial Sequence: Synthetic oligonucleotide
aaggugcaccccaggugaa

SEQ ID NO: 2780967 - RNA, 19 nt, Artificial Sequence
  Description of Artificial Sequence: Synthetic oligonucleotide
acaucgguccaggcacaca

SEQ ID NO: 2780968 - RNA, 19 nt, Artificial Sequence
  Description of Artificial Sequence: Synthetic oligonucleotide
cacagucacaaaccagcgu

SEQ ID NO: 2780969 - RNA, 19 nt, Artificial Sequence
  Description of Artificial Sequence: Synthetic oligonucleotide
cugcguggggccucaugca

SEQ ID NO: 2780970 - RNA, 19 nt, Artificial Sequence
  Description of Artificial Sequence: Synthetic oligonucleotide
augcuccagagagccuaag

SEQ ID NO: 2780971 - RNA, 19 nt, Artificial Sequence
  Description of Artificial Sequence: Synthetic oligonucleotide
cggauccaugucaaccuag

SEQ ID NO: 2780972 - RNA, 19 nt, Artificial Sequence
  Description of Artificial Sequence: Synthetic oligonucleotide
gccuaaguaugacaguuuu

SEQ ID NO: 2780973 - RNA, 19 nt, Artificial Sequence
  Description of Artificial Sequence: Synthetic oligonucleotide
ggggaggcacacacuuccg

SEQ ID NO: 2780974 - RNA, 19 nt, Artificial Sequence
  Description of Artificial Sequence: Synthetic oligonucleotide
auucgccuuuggacagcuc

SEQ ID NO: 2780975 - RNA, 19 nt, Artificial Sequence
  Description of Artificial Sequence: Synthetic oligonucleotide
acacaucgguccaggcaca

SEQ ID NO: 2780976 - RNA, 19 nt, Artificial Sequence
  Description of Artificial Sequence: Synthetic oligonucleotide
ggcaaggugcaccccaggu

SEQ ID NO: 2780977 - RNA, 19 nt, Artificial Sequence
  Description of Artificial Sequence: Synthetic oligonucleotide
acccucuucaucagcucuu

SEQ ID NO: 2780978 - RNA, 19 nt, Artificial Sequence
  Description of Artificial Sequence: Synthetic oligonucleotide
gguauguggcaaggugcac

SEQ ID NO: 2780979 - RNA, 19 nt, Artificial Sequence
  Description of Artificial Sequence: Synthetic oligonucleotide
ggguccuggagaugcucca

SEQ ID NO: 2780980 - RNA, 19 nt, Artificial Sequence
  Description of Artificial Sequence: Synthetic oligonucleotide
aucgguccaggcacacaga

SEQ ID NO: 2780981 - RNA, 19 nt, Artificial Sequence
  Description of Artificial Sequence: Synthetic oligonucleotide
guggggaggcacacacuuc

SEQ ID NO: 2780982 - RNA, 19 nt, Artificial Sequence
  Description of Artificial Sequence: Synthetic oligonucleotide
acacuuccgguggcaggca

SEQ ID NO: 2780983 - RNA, 19 nt, Artificial Sequence
  Description of Artificial Sequence: Synthetic oligonucleotide
gcacacagauucgccuuug

SEQ ID NO: 2780984 - RNA, 19 nt, Artificial Sequence
  Description of Artificial Sequence: Synthetic oligonucleotide
ccacuagggaacacuuuaa

SEQ ID NO: 2780985 - RNA, 19 nt, Artificial Sequence
  Description of Artificial Sequence: Synthetic oligonucleotide
aggugcaccccaggugaau

SEQ ID NO: 2780986 - RNA, 19 nt, Artificial Sequence
  Description of Artificial Sequence: Synthetic oligonucleotide
ccuggagaugcuccagaga

SEQ ID NO: 2780987 - RNA, 19 nt, Artificial Sequence
  Description of Artificial Sequence: Synthetic oligonucleotide
augcagguccagagcucug

SEQ ID NO: 2780988 - RNA, 19 nt, Artificial Sequence
  Description of Artificial Sequence: Synthetic oligonucleotide
caugucaaccuagcaccgu

SEQ ID NO: 2780989 - RNA, 19 nt, Artificial Sequence
  Description of Artificial Sequence: Synthetic oligonucleotide
acccacuagggaacacuuu

SEQ ID NO: 2780990 - RNA, 19 nt, Artificial Sequence
  Description of Artificial Sequence: Synthetic oligonucleotide
cagaucccacgagguccgc

SEQ ID NO: 2780991 - RNA, 19 nt, Artificial Sequence
  Description of Artificial Sequence: Synthetic oligonucleotide
gguccagagcucugcugua

SEQ ID NO: 2780992 - RNA, 19 nt, Artificial Sequence
  Description of Artificial Sequence: Synthetic oligonucleotide
cgccuuuggacagcucugc

SEQ ID NO: 2780993 - RNA, 19 nt, Artificial Sequence
  Description of Artificial Sequence: Synthetic oligonucleotide
gagaugcuccagagagccu

SEQ ID NO: 2780994 - RNA, 19 nt, Artificial Sequence
  Description of Artificial Sequence: Synthetic oligonucleotide
gcggauccaugucaaccua

SEQ ID NO: 2780995 - RNA, 19 nt, Artificial Sequence
  Description of Artificial Sequence: Synthetic oligonucleotide
gguggcaggcacuggucau

SEQ ID NO: 2780996 - RNA, 19 nt, Artificial Sequence
  Description of Artificial Sequence: Synthetic oligonucleotide
ccgguggcaggcacugguc

SEQ ID NO: 2780997 - RNA, 19 nt, Artificial Sequence
  Description of Artificial Sequence: Synthetic oligonucleotide
ggccucaugcagguccaga

SEQ ID NO: 2780998 - RNA, 19 nt, Artificial Sequence
  Description of Artificial Sequence: Synthetic oligonucleotide
ggggcaggucacagauccc

SEQ ID NO: 2780999 - RNA, 19 nt, Artificial Sequence
  Description of Artificial Sequence: Synthetic oligonucleotide
gcacacacuuccgguggca

SEQ ID NO: 2781000 - RNA, 19 nt, Artificial Sequence
  Description of Artificial Sequence: Synthetic oligonucleotide
cccauccucucauggauau

SEQ ID NO: 2781001 - RNA, 19 nt, Artificial Sequence
  Description of Artificial Sequence: Synthetic oligonucleotide
ccccaggugaauucugcgu

SEQ ID NO: 2781002 - RNA, 19 nt, Artificial Sequence
  Description of Artificial Sequence: Synthetic oligonucleotide
cagcgugacaaguccccuu

SEQ ID NO: 2781003 - RNA, 19 nt, Artificial Sequence
  Description of Artificial Sequence: Synthetic oligonucleotide
ggugcaccccaggugaauu

SEQ ID NO: 2781004 - RNA, 19 nt, Artificial Sequence
  Description of Artificial Sequence: Synthetic oligonucleotide
auucugcguggggccucau

SEQ ID NO: 2781005 - RNA, 19 nt, Artificial Sequence
  Description of Artificial Sequence: Synthetic oligonucleotide
gcgugacaaguccccuucu

SEQ ID NO: 2781006 - RNA, 19 nt, Artificial Sequence
  Description of Artificial Sequence: Synthetic oligonucleotide
gcccauccucucauggaua

SEQ ID NO: 2781007 - RNA, 19 nt, Artificial Sequence
  Description of Artificial Sequence: Synthetic oligonucleotide
guggggccucaugcagguc

SEQ ID NO: 2781008 - RNA, 19 nt, Artificial Sequence
  Description of Artificial Sequence: Synthetic oligonucleotide
gggcucuaagcggauccau

SEQ ID NO: 2781009 - RNA, 19 nt, Artificial Sequence
  Description of Artificial Sequence: Synthetic oligonucleotide
cguggggccucaugcaggu

SEQ ID NO: 2781010 - RNA, 19 nt, Artificial Sequence
  Description of Artificial Sequence: Synthetic oligonucleotide
ccagcgugacaaguccccu

SEQ ID NO: 2781011 - RNA, 19 nt, Artificial Sequence
  Description of Artificial Sequence: Synthetic oligonucleotide
ccgugcagagcagccuccu

SEQ ID NO: 2781012 - RNA, 19 nt, Artificial Sequence
  Description of Artificial Sequence: Synthetic oligonucleotide
cgguccaggcacacagauu

SEQ ID NO: 2781013 - RNA, 19 nt, Artificial Sequence
  Description of Artificial Sequence: Synthetic oligonucleotide
aaaaccauucauuacauca

SEQ ID NO: 2781014 - RNA, 19 nt, Artificial Sequence
  Description of Artificial Sequence: Synthetic oligonucleotide
aaauauagugaucauuuuc

SEQ ID NO: 2781015 - RNA, 19 nt, Artificial Sequence
  Description of Artificial Sequence: Synthetic oligonucleotide
ucacauuuuacacagaaga

SEQ ID NO: 2781016 - RNA, 19 nt, Artificial Sequence
  Description of Artificial Sequence: Synthetic oligonucleotide
uucagaacuacauagaaac

SEQ ID NO: 2781017 - RNA, 19 nt, Artificial Sequence
  Description of Artificial Sequence: Synthetic oligonucleotide
uucauuacaucacagaugu

SEQ ID NO: 2781018 - RNA, 19 nt, Artificial Sequence
  Description of Artificial Sequence: Synthetic oligonucleotide
gauguucagaacuacauag

SEQ ID NO: 2781019 - RNA, 19 nt, Artificial Sequence
  Description of Artificial Sequence: Synthetic oligonucleotide
aaagaauucacagacaccu

SEQ ID NO: 2781020 - RNA, 19 nt, Artificial Sequence
  Description of Artificial Sequence: Synthetic oligonucleotide
aaauaugcuacacauaaaa

SEQ ID NO: 2781021 - RNA, 19 nt, Artificial Sequence
  Description of Artificial Sequence: Synthetic oligonucleotide
ugaauuaccacacagguuu

SEQ ID NO: 2781022 - RNA, 19 nt, Artificial Sequence
  Description of Artificial Sequence: Synthetic oligonucleotide
aaaacauacaccuuuguua

SEQ ID NO: 2781023 - RNA, 19 nt, Artificial Sequence
  Description of Artificial Sequence: Synthetic oligonucleotide
guagcauuaaaauuguuag

SEQ ID NO: 2781024 - RNA, 19 nt, Artificial Sequence
  Description of Artificial Sequence: Synthetic oligonucleotide
auuguuagggacuaaugac

SEQ ID NO: 2781025 - RNA, 19 nt, Artificial Sequence
  Description of Artificial Sequence: Synthetic oligonucleotide
aauuguuagggacuaauga

SEQ ID NO: 2781026 - RNA, 19 nt, Artificial Sequence
  Description of Artificial Sequence: Synthetic oligonucleotide
agcauuaaaauuguuaggg

SEQ ID NO: 2781027 - RNA, 19 nt, Artificial Sequence
  Description of Artificial Sequence: Synthetic oligonucleotide
aacaucccuguuuugaaac

SEQ ID NO: 2781028 - RNA, 19 nt, Artificial Sequence
  Description of Artificial Sequence: Synthetic oligonucleotide
uucauuuagacccaggaaa

SEQ ID NO: 2781029 - RNA, 19 nt, Artificial Sequence
  Description of Artificial Sequence: Synthetic oligonucleotide
uugcguagcauuaaaauug

SEQ ID NO: 2781030 - RNA, 19 nt, Artificial Sequence
  Description of Artificial Sequence: Synthetic oligonucleotide
aagacuagcaaugacuggg

SEQ ID NO: 2781031 - RNA, 19 nt, Artificial Sequence
  Description of Artificial Sequence: Synthetic oligonucleotide
acuacauagaaacccuucc

SEQ ID NO: 2781032 - RNA, 19 nt, Artificial Sequence
  Description of Artificial Sequence: Synthetic oligonucleotide
uaaaacagaaacaucccug

SEQ ID NO: 2781033 - RNA, 19 nt, Artificial Sequence
  Description of Artificial Sequence: Synthetic oligonucleotide
uguugaauuaccacacagg

SEQ ID NO: 2781034 - RNA, 19 nt, Artificial Sequence
  Description of Artificial Sequence: Synthetic oligonucleotide
aaugacuagcugugaaggc

SEQ ID NO: 2781035 - RNA, 19 nt, Artificial Sequence
  Description of Artificial Sequence: Synthetic oligonucleotide
auagugaucauuuucuuca

SEQ ID NO: 2781036 - RNA, 19 nt, Artificial Sequence
  Description of Artificial Sequence: Synthetic oligonucleotide
uuucagacaaacuugugug

SEQ ID NO: 2781037 - RNA, 19 nt, Artificial Sequence
  Description of Artificial Sequence: Synthetic oligonucleotide
aagacuauggcacuuuaca

SEQ ID NO: 2781038 - RNA, 19 nt, Artificial Sequence
  Description of Artificial Sequence: Synthetic oligonucleotide
agguuuaaagaauucacag

SEQ ID NO: 2781039 - RNA, 19 nt, Artificial Sequence
  Description of Artificial Sequence: Synthetic oligonucleotide
aaacauacaccuuuguuau

SEQ ID NO: 2781040 - RNA, 19 nt, Artificial Sequence
  Description of Artificial Sequence: Synthetic oligonucleotide
aaaacagaaacaucccugu

SEQ ID NO: 2781041 - RNA, 19 nt, Artificial Sequence
  Description of Artificial Sequence: Synthetic oligonucleotide
uauggcacuuuacagaaug

SEQ ID NO: 2781042 - RNA, 19 nt, Artificial Sequence
  Description of Artificial Sequence: Synthetic oligonucleotide
cauuaaaauuguuagggac

SEQ ID NO: 2781043 - RNA, 19 nt, Artificial Sequence
  Description of Artificial Sequence: Synthetic oligonucleotide
ugugaaggcaaauaugucu

SEQ ID NO: 2781044 - RNA, 19 nt, Artificial Sequence
  Description of Artificial Sequence: Synthetic oligonucleotide
agaauucacagacaccugg

SEQ ID NO: 2781045 - RNA, 19 nt, Artificial Sequence
  Description of Artificial Sequence: Synthetic oligonucleotide
aaacgcccggcuuuggucc

SEQ ID NO: 2781046 - RNA, 19 nt, Artificial Sequence
  Description of Artificial Sequence: Synthetic oligonucleotide
aaauaugucuaacucuccu

SEQ ID NO: 2781047 - RNA, 19 nt, Artificial Sequence
  Description of Artificial Sequence: Synthetic oligonucleotide
uaaugacuagcugugaagg

SEQ ID NO: 2781048 - RNA, 19 nt, Artificial Sequence
  Description of Artificial Sequence: Synthetic oligonucleotide
uuuguuauugcacaucuuu

SEQ ID NO: 2781049 - RNA, 19 nt, Artificial Sequence
  Description of Artificial Sequence: Synthetic oligonucleotide
aaaccauucauuacaucac

SEQ ID NO: 2781050 - RNA, 19 nt, Artificial Sequence
  Description of Artificial Sequence: Synthetic oligonucleotide
ugucuguugaauuaccaca

SEQ ID NO: 2781051 - RNA, 19 nt, Artificial Sequence
  Description of Artificial Sequence: Synthetic oligonucleotide
uguuauugcacaucuuuca

SEQ ID NO: 2781052 - RNA, 19 nt, Artificial Sequence
  Description of Artificial Sequence: Synthetic oligonucleotide
uuuaaagaauucacagaca

SEQ ID NO: 2781053 - RNA, 19 nt, Artificial Sequence
  Description of Artificial Sequence: Synthetic oligonucleotide
aggcaaauaugucuaacuc

SEQ ID NO: 2781054 - RNA, 19 nt, Artificial Sequence
  Description of Artificial Sequence: Synthetic oligonucleotide
uuguuagggacuaaugacu

SEQ ID NO: 2781055 - RNA, 19 nt, Artificial Sequence
  Description of Artificial Sequence: Synthetic oligonucleotide
uuuacacagaagacuagca

SEQ ID NO: 2781056 - RNA, 19 nt, Artificial Sequence
  Description of Artificial Sequence: Synthetic oligonucleotide
uacauagaaacccuuccac

SEQ ID NO: 2781057 - RNA, 19 nt, Artificial Sequence
  Description of Artificial Sequence: Synthetic oligonucleotide
ucacauaagguuugcguag

SEQ ID NO: 2781058 - RNA, 19 nt, Artificial Sequence
  Description of Artificial Sequence: Synthetic oligonucleotide
aacaugacuucauaccagu

SEQ ID NO: 2781059 - RNA, 19 nt, Artificial Sequence
  Description of Artificial Sequence: Synthetic oligonucleotide
uguucagaacuacauagaa

SEQ ID NO: 2781060 - RNA, 19 nt, Artificial Sequence
  Description of Artificial Sequence: Synthetic oligonucleotide
uaugugauauauauauuua

SEQ ID NO: 2781061 - RNA, 19 nt, Artificial Sequence
  Description of Artificial Sequence: Synthetic oligonucleotide
acagguuuaaagaauucac

SEQ ID NO: 2781062 - RNA, 19 nt, Artificial Sequence
  Description of Artificial Sequence: Synthetic oligonucleotide
cagaacuacauagaaaccc

SEQ ID NO: 2781063 - RNA, 19 nt, Artificial Sequence
  Description of Artificial Sequence: Synthetic oligonucleotide
uuuacagaaugcauguuua

SEQ ID NO: 2781064 - RNA, 19 nt, Artificial Sequence
  Description of Artificial Sequence: Synthetic oligonucleotide
uuuuacacagaagacuagc

SEQ ID NO: 2781065 - RNA, 19 nt, Artificial Sequence
  Description of Artificial Sequence: Synthetic oligonucleotide
augucuguugaauuaccac

SEQ ID NO: 2781066 - RNA, 19 nt, Artificial Sequence
  Description of Artificial Sequence: Synthetic oligonucleotide
aaugacugggccuggcuug

SEQ ID NO: 2781067 - RNA, 19 nt, Artificial Sequence
  Description of Artificial Sequence: Synthetic oligonucleotide
uaaagaauucacagacacc

SEQ ID NO: 2781068 - RNA, 19 nt, Artificial Sequence
  Description of Artificial Sequence: Synthetic oligonucleotide
uuuguaaaacagaaacauc

SEQ ID NO: 2781069 - RNA, 19 nt, Artificial Sequence
  Description of Artificial Sequence: Synthetic oligonucleotide
aacagaaacaucccuguuu

SEQ ID NO: 2781070 - RNA, 19 nt, Artificial Sequence
  Description of Artificial Sequence: Synthetic oligonucleotide
uuuagacccaggaaaacau

SEQ ID NO: 2781071 - RNA, 19 nt, Artificial Sequence
  Description of Artificial Sequence: Synthetic oligonucleotide
uuaccacacagguuuaaag

SEQ ID NO: 2781072 - RNA, 19 nt, Artificial Sequence
  Description of Artificial Sequence: Synthetic oligonucleotide
aaaaggcaaaaugggcagc

SEQ ID NO: 2781073 - RNA, 19 nt, Artificial Sequence
  Description of Artificial Sequence: Synthetic oligonucleotide
uuuugaaacauguccaguu

SEQ ID NO: 2781074 - RNA, 19 nt, Artificial Sequence
  Description of Artificial Sequence: Synthetic oligonucleotide
ucauuuagacccaggaaaa

SEQ ID NO: 2781075 - RNA, 19 nt, Artificial Sequence
  Description of Artificial Sequence: Synthetic oligonucleotide
auuaaaauuguuagggacu

SEQ ID NO: 2781076 - RNA, 19 nt, Artificial Sequence
  Description of Artificial Sequence: Synthetic oligonucleotide
gcagcuacuaguuaucagg

SEQ ID NO: 2781077 - RNA, 19 nt, Artificial Sequence
  Description of Artificial Sequence: Synthetic oligonucleotide
cuaaugacuagcugugaag

SEQ ID NO: 2781078 - RNA, 19 nt, Artificial Sequence
  Description of Artificial Sequence: Synthetic oligonucleotide
aguuuccccaaacaaaaca

SEQ ID NO: 2781079 - RNA, 19 nt, Artificial Sequence
  Description of Artificial Sequence: Synthetic oligonucleotide
aaaauuguuagggacuaau

SEQ ID NO: 2781080 - RNA, 19 nt, Artificial Sequence
  Description of Artificial Sequence: Synthetic oligonucleotide
uaugucuguugaauuacca

SEQ ID NO: 2781081 - RNA, 19 nt, Artificial Sequence
  Description of Artificial Sequence: Synthetic oligonucleotide
aacuacauagaaacccuuc

SEQ ID NO: 2781082 - RNA, 19 nt, Artificial Sequence
  Description of Artificial Sequence: Synthetic oligonucleotide
acagaagacuagcaaugac

SEQ ID NO: 2781083 - RNA, 19 nt, Artificial Sequence
  Description of Artificial Sequence: Synthetic oligonucleotide
uuugcguagcauuaaaauu

SEQ ID NO: 2781084 - RNA, 19 nt, Artificial Sequence
  Description of Artificial Sequence: Synthetic oligonucleotide
uacacagaagacuagcaau

SEQ ID NO: 2781085 - RNA, 19 nt, Artificial Sequence
  Description of Artificial Sequence: Synthetic oligonucleotide
uuagggacuaaugacuagc

SEQ ID NO: 2781086 - RNA, 19 nt, Artificial Sequence
  Description of Artificial Sequence: Synthetic oligonucleotide
aaccauucauuacaucaca

SEQ ID NO: 2781087 - RNA, 19 nt, Artificial Sequence
  Description of Artificial Sequence: Synthetic oligonucleotide
agacuauggcacuuuacag

SEQ ID NO: 2781088 - RNA, 19 nt, Artificial Sequence
  Description of Artificial Sequence: Synthetic oligonucleotide
uagacccaggaaaacauga

SEQ ID NO: 2781089 - RNA, 19 nt, Artificial Sequence
  Description of Artificial Sequence: Synthetic oligonucleotide
uauagugaucauuuucuuc

SEQ ID NO: 2781090 - RNA, 19 nt, Artificial Sequence
  Description of Artificial Sequence: Synthetic oligonucleotide
aauaugucuaacucuccuu

SEQ ID NO: 2781091 - RNA, 19 nt, Artificial Sequence
  Description of Artificial Sequence: Synthetic oligonucleotide
ucagaacuacauagaaacc

SEQ ID NO: 2781092 - RNA, 19 nt, Artificial Sequence
  Description of Artificial Sequence: Synthetic oligonucleotide
uucacauaagguuugcgua

SEQ ID NO: 2781093 - RNA, 19 nt, Artificial Sequence
  Description of Artificial Sequence: Synthetic oligonucleotide
acuauggcacuuuacagaa

SEQ ID NO: 2781094 - RNA, 19 nt, Artificial Sequence
  Description of Artificial Sequence: Synthetic oligonucleotide
aaagacuauggcacuuuac

SEQ ID NO: 2781095 - RNA, 19 nt, Artificial Sequence
  Description of Artificial Sequence: Synthetic oligonucleotide
uuaugucuguugaauuacc

SEQ ID NO: 2781096 - RNA, 19 nt, Artificial Sequence
  Description of Artificial Sequence: Synthetic oligonucleotide
aaauuguuagggacuaaug

SEQ ID NO: 2781097 - RNA, 19 nt, Artificial Sequence
  Description of Artificial Sequence: Synthetic oligonucleotide
gaagacuagcaaugacugg

SEQ ID NO: 2781098 - RNA, 19 nt, Artificial Sequence
  Description of Artificial Sequence: Synthetic oligonucleotide
uuauugcacaucuuucaga

SEQ ID NO: 2781099 - RNA, 19 nt, Artificial Sequence
  Description of Artificial Sequence: Synthetic oligonucleotide
gacuauggcacuuuacaga

SEQ ID NO: 2781100 - RNA, 19 nt, Artificial Sequence
  Description of Artificial Sequence: Synthetic oligonucleotide
agaagacuagcaaugacug

SEQ ID NO: 2781101 - RNA, 19 nt, Artificial Sequence
  Description of Artificial Sequence: Synthetic oligonucleotide
augugauauauauauuuaa

SEQ ID NO: 2781102 - RNA, 19 nt, Artificial Sequence
  Description of Artificial Sequence: Synthetic oligonucleotide
acauacaccuuuguuauug

SEQ ID NO: 2781103 - RNA, 19 nt, Artificial Sequence
  Description of Artificial Sequence: Synthetic oligonucleotide
uuuucuucauuuagaccca

SEQ ID NO: 2781104 - RNA, 19 nt, Artificial Sequence
  Description of Artificial Sequence: Synthetic oligonucleotide
uccaguuuccccaaacaaa

SEQ ID NO: 2781105 - RNA, 19 nt, Artificial Sequence
  Description of Artificial Sequence: Synthetic oligonucleotide
aacaaaacauacaccuuug

SEQ ID NO: 2781106 - RNA, 19 nt, Artificial Sequence
  Description of Artificial Sequence: Synthetic oligonucleotide
gaaugcauguuuaacaaaa

SEQ ID NO: 2781107 - RNA, 19 nt, Artificial Sequence
  Description of Artificial Sequence: Synthetic oligonucleotide
guguaugugauauauauau

SEQ ID NO: 2781108 - RNA, 19 nt, Artificial Sequence
  Description of Artificial Sequence: Synthetic oligonucleotide
uuguuauugcacaucuuuc

SEQ ID NO: 2781109 - RNA, 19 nt, Artificial Sequence
  Description of Artificial Sequence: Synthetic oligonucleotide
aaacaugacuucauaccag

SEQ ID NO: 2781110 - RNA, 19 nt, Artificial Sequence
  Description of Artificial Sequence: Synthetic oligonucleotide
uuaaaauuguuagggacua

SEQ ID NO: 2781111 - RNA, 19 nt, Artificial Sequence
  Description of Artificial Sequence: Synthetic oligonucleotide
cauuuuacacagaagacua

SEQ ID NO: 2781112 - RNA, 19 nt, Artificial Sequence
  Description of Artificial Sequence: Synthetic oligonucleotide
acauagaaacccuuccaca

SEQ ID NO: 2781113 - RNA, 19 nt, Artificial Sequence
  Description of Artificial Sequence: Synthetic oligonucleotide
uguuagggacuaaugacua

SEQ ID NO: 2781114 - RNA, 19 nt, Artificial Sequence
  Description of Artificial Sequence: Synthetic oligonucleotide
aggcaaaaugggcagcuuc

SEQ ID NO: 2781115 - RNA, 19 nt, Artificial Sequence
  Description of Artificial Sequence: Synthetic oligonucleotide
uuugaaacauguccaguuu

SEQ ID NO: 2781116 - RNA, 19 nt, Artificial Sequence
  Description of Artificial Sequence: Synthetic oligonucleotide
guugaauuaccacacaggu

SEQ ID NO: 2781117 - RNA, 19 nt, Artificial Sequence
  Description of Artificial Sequence: Synthetic oligonucleotide
aguuaugucuguugaauua

SEQ ID NO: 2781118 - RNA, 19 nt, Artificial Sequence
  Description of Artificial Sequence: Synthetic oligonucleotide
aaaggcaaaaugggcagcu

SEQ ID NO: 2781119 - RNA, 19 nt, Artificial Sequence
  Description of Artificial Sequence: Synthetic oligonucleotide
agaaacaucccuguuuuga

SEQ ID NO: 2781120 - RNA, 19 nt, Artificial Sequence
  Description of Artificial Sequence: Synthetic oligonucleotide
uggauugagucucccauaa

SEQ ID NO: 2781121 - RNA, 19 nt, Artificial Sequence
  Description of Artificial Sequence: Synthetic oligonucleotide
uaugucuaacucuccuuug

SEQ ID NO: 2781122 - RNA, 19 nt, Artificial Sequence
  Description of Artificial Sequence: Synthetic oligonucleotide
gucucccauaaauauagug

SEQ ID NO: 2781123 - RNA, 19 nt, Artificial Sequence
  Description of Artificial Sequence: Synthetic oligonucleotide
auuuagacccaggaaaaca

SEQ ID NO: 2781124 - RNA, 19 nt, Artificial Sequence
  Description of Artificial Sequence: Synthetic oligonucleotide
acuuguguguaugugauau

SEQ ID NO: 2781125 - RNA, 19 nt, Artificial Sequence
  Description of Artificial Sequence: Synthetic oligonucleotide
acuaaugacuagcugugaa

SEQ ID NO: 2781126 - RNA, 19 nt, Artificial Sequence
  Description of Artificial Sequence: Synthetic oligonucleotide
auaugucuaacucuccuuu

SEQ ID NO: 2781127 - RNA, 19 nt, Artificial Sequence
  Description of Artificial Sequence: Synthetic oligonucleotide
uccccaaacaaaacauaca

SEQ ID NO: 2781128 - RNA, 19 nt, Artificial Sequence
  Description of Artificial Sequence: Synthetic oligonucleotide
acuagcaaugacugggccu

SEQ ID NO: 2781129 - RNA, 19 nt, Artificial Sequence
  Description of Artificial Sequence: Synthetic oligonucleotide
auucauuacaucacagaug

SEQ ID NO: 2781130 - RNA, 19 nt, Artificial Sequence
  Description of Artificial Sequence: Synthetic oligonucleotide
ugcguagcauuaaaauugu

SEQ ID NO: 2781131 - RNA, 19 nt, Artificial Sequence
  Description of Artificial Sequence: Synthetic oligonucleotide
uguguaugugauauauaua

SEQ ID NO: 2781132 - RNA, 19 nt, Artificial Sequence
  Description of Artificial Sequence: Synthetic oligonucleotide
ggaaaacaugacuucauac

SEQ ID NO: 2781133 - RNA, 19 nt, Artificial Sequence
  Description of Artificial Sequence: Synthetic oligonucleotide
acuucauaccagucuuuuc

SEQ ID NO: 2781134 - RNA, 19 nt, Artificial Sequence
  Description of Artificial Sequence: Synthetic oligonucleotide
caaauaugucuaacucucc

SEQ ID NO: 2781135 - RNA, 19 nt, Artificial Sequence
  Description of Artificial Sequence: Synthetic oligonucleotide
uuacaucacagauguucag

SEQ ID NO: 2781136 - RNA, 19 nt, Artificial Sequence
  Description of Artificial Sequence: Synthetic oligonucleotide
cagcuacuaguuaucaggc

SEQ ID NO: 2781137 - RNA, 19 nt, Artificial Sequence
  Description of Artificial Sequence: Synthetic oligonucleotide
caaacuuguguguauguga

SEQ ID NO: 2781138 - RNA, 19 nt, Artificial Sequence
  Description of Artificial Sequence: Synthetic oligonucleotide
uucagacaaacuugugugu

SEQ ID NO: 2781139 - RNA, 19 nt, Artificial Sequence
  Description of Artificial Sequence: Synthetic oligonucleotide
aaacaucccuguuuugaaa

SEQ ID NO: 2781140 - RNA, 19 nt, Artificial Sequence
  Description of Artificial Sequence: Synthetic oligonucleotide
cuagcaaugacugggccug

SEQ ID NO: 2781141 - RNA, 19 nt, Artificial Sequence
  Description of Artificial Sequence: Synthetic oligonucleotide
ucuuucagacaaacuugug

SEQ ID NO: 2781142 - RNA, 19 nt, Artificial Sequence
  Description of Artificial Sequence: Synthetic oligonucleotide
guaugugauauauauauuu

SEQ ID NO: 2781143 - RNA, 19 nt, Artificial Sequence
  Description of Artificial Sequence: Synthetic oligonucleotide
aaaagacuauggcacuuua

SEQ ID NO: 2781144 - RNA, 19 nt, Artificial Sequence
  Description of Artificial Sequence: Synthetic oligonucleotide
uguaugugauauauauauu

SEQ ID NO: 2781145 - RNA, 19 nt, Artificial Sequence
  Description of Artificial Sequence: Synthetic oligonucleotide
gauugagucucccauaaau

SEQ ID NO: 2781146 - RNA, 19 nt, Artificial Sequence
  Description of Artificial Sequence: Synthetic oligonucleotide
ucuguugaauuaccacaca

SEQ ID NO: 2781147 - RNA, 19 nt, Artificial Sequence
  Description of Artificial Sequence: Synthetic oligonucleotide
ucuucacauaagguuugcg

SEQ ID NO: 2781148 - RNA, 19 nt, Artificial Sequence
  Description of Artificial Sequence: Synthetic oligonucleotide
auagaaacccuuccacagu

SEQ ID NO: 2781149 - RNA, 19 nt, Artificial Sequence
  Description of Artificial Sequence: Synthetic oligonucleotide
gaauucacagacaccuggc

SEQ ID NO: 2781150 - RNA, 19 nt, Artificial Sequence
  Description of Artificial Sequence: Synthetic oligonucleotide
uaaauauagugaucauuuu

SEQ ID NO: 2781151 - RNA, 19 nt, Artificial Sequence
  Description of Artificial Sequence: Synthetic oligonucleotide
acuaguuaucaggcuaaac

SEQ ID NO: 2781152 - RNA, 19 nt, Artificial Sequence
  Description of Artificial Sequence: Synthetic oligonucleotide
guuaugucuguugaauuac

SEQ ID NO: 2781153 - RNA, 19 nt, Artificial Sequence
  Description of Artificial Sequence: Synthetic oligonucleotide
agaacuacauagaaacccu

SEQ ID NO: 2781154 - RNA, 19 nt, Artificial Sequence
  Description of Artificial Sequence: Synthetic oligonucleotide
ugacuagcugugaaggcaa

SEQ ID NO: 2781155 - RNA, 19 nt, Artificial Sequence
  Description of Artificial Sequence: Synthetic oligonucleotide
uagaaacccuuccacaguu

SEQ ID NO: 2781156 - RNA, 19 nt, Artificial Sequence
  Description of Artificial Sequence: Synthetic oligonucleotide
uagggacuaaugacuagcu

SEQ ID NO: 2781157 - RNA, 19 nt, Artificial Sequence
  Description of Artificial Sequence: Synthetic oligonucleotide
augucuaacucuccuuugu

SEQ ID NO: 2781158 - RNA, 19 nt, Artificial Sequence
  Description of Artificial Sequence: Synthetic oligonucleotide
gguuuaaagaauucacaga

SEQ ID NO: 2781159 - RNA, 19 nt, Artificial Sequence
  Description of Artificial Sequence: Synthetic oligonucleotide
cagguuuaaagaauucaca

SEQ ID NO: 2781160 - RNA, 19 nt, Artificial Sequence
  Description of Artificial Sequence: Synthetic oligonucleotide
uggcuugcuggauugaguc

SEQ ID NO: 2781161 - RNA, 19 nt, Artificial Sequence
  Description of Artificial Sequence: Synthetic oligonucleotide
gaaacauguccaguuuccc

SEQ ID NO: 2781162 - RNA, 19 nt, Artificial Sequence
  Description of Artificial Sequence: Synthetic oligonucleotide
uaacucuccuuuguaaaac

SEQ ID NO: 2781163 - RNA, 19 nt, Artificial Sequence
  Description of Artificial Sequence: Synthetic oligonucleotide
uugaauuaccacacagguu

SEQ ID NO: 2781164 - RNA, 19 nt, Artificial Sequence
  Description of Artificial Sequence: Synthetic oligonucleotide
guuaucaggcuaaacagaa

SEQ ID NO: 2781165 - RNA, 19 nt, Artificial Sequence
  Description of Artificial Sequence: Synthetic oligonucleotide
ucacagauguucagaacua

SEQ ID NO: 2781166 - RNA, 19 nt, Artificial Sequence
  Description of Artificial Sequence: Synthetic oligonucleotide
cuuuguaaaacagaaacau

SEQ ID NO: 2781167 - RNA, 19 nt, Artificial Sequence
  Description of Artificial Sequence: Synthetic oligonucleotide
acaguuaugucuguugaau

SEQ ID NO: 2781168 - RNA, 19 nt, Artificial Sequence
  Description of Artificial Sequence: Synthetic oligonucleotide
acaaacuuguguguaugug

SEQ ID NO: 2781169 - RNA, 19 nt, Artificial Sequence
  Description of Artificial Sequence: Synthetic oligonucleotide
cauacaccuuuguuauugc

SEQ ID NO: 2781170 - RNA, 19 nt, Artificial Sequence
  Description of Artificial Sequence: Synthetic oligonucleotide
uuacagaaugcauguuuaa

SEQ ID NO: 2781171 - RNA, 19 nt, Artificial Sequence
  Description of Artificial Sequence: Synthetic oligonucleotide
agacuagcaaugacugggc

SEQ ID NO: 2781172 - RNA, 19 nt, Artificial Sequence
  Description of Artificial Sequence: Synthetic oligonucleotide
cuucauaccagucuuuucu

SEQ ID NO: 2781173 - RNA, 19 nt, Artificial Sequence
  Description of Artificial Sequence: Synthetic oligonucleotide
guguguaugugauauauau

SEQ ID NO: 2781174 - RNA, 19 nt, Artificial Sequence
  Description of Artificial Sequence: Synthetic oligonucleotide
cauaccagucuuuucuuca

SEQ ID NO: 2781175 - RNA, 19 nt, Artificial Sequence
  Description of Artificial Sequence: Synthetic oligonucleotide
guuagggacuaaugacuag

SEQ ID NO: 2781176 - RNA, 19 nt, Artificial Sequence
  Description of Artificial Sequence: Synthetic oligonucleotide
augacuagcugugaaggca

SEQ ID NO: 2781177 - RNA, 19 nt, Artificial Sequence
  Description of Artificial Sequence: Synthetic oligonucleotide
agcagcuacuaguuaucag

SEQ ID NO: 2781178 - RNA, 19 nt, Artificial Sequence
  Description of Artificial Sequence: Synthetic oligonucleotide
aacgcccggcuuugguccc

SEQ ID NO: 2781179 - RNA, 19 nt, Artificial Sequence
  Description of Artificial Sequence: Synthetic oligonucleotide
uuaucaggcuaaacagaaa

SEQ ID NO: 2781180 - RNA, 19 nt, Artificial Sequence
  Description of Artificial Sequence: Synthetic oligonucleotide
agauguucagaacuacaua

SEQ ID NO: 2781181 - RNA, 19 nt, Artificial Sequence
  Description of Artificial Sequence: Synthetic oligonucleotide
uggcacuuuacagaaugca

SEQ ID NO: 2781182 - RNA, 19 nt, Artificial Sequence
  Description of Artificial Sequence: Synthetic oligonucleotide
agaaugcauguuuaacaaa

SEQ ID NO: 2781183 - RNA, 19 nt, Artificial Sequence
  Description of Artificial Sequence: Synthetic oligonucleotide
cagucuuuucuucacauaa

SEQ ID NO: 2781184 - RNA, 19 nt, Artificial Sequence
  Description of Artificial Sequence: Synthetic oligonucleotide
aaacagaaacaucccuguu

SEQ ID NO: 2781185 - RNA, 19 nt, Artificial Sequence
  Description of Artificial Sequence: Synthetic oligonucleotide
gaaggcaaauaugucuaac

SEQ ID NO: 2781186 - RNA, 19 nt, Artificial Sequence
  Description of Artificial Sequence: Synthetic oligonucleotide
ucccauaaauauagugauc

SEQ ID NO: 2781187 - RNA, 19 nt, Artificial Sequence
  Description of Artificial Sequence: Synthetic oligonucleotide
ugucuaacucuccuuugua

SEQ ID NO: 2781188 - RNA, 19 nt, Artificial Sequence
  Description of Artificial Sequence: Synthetic oligonucleotide
gucuguugaauuaccacac

SEQ ID NO: 2781189 - RNA, 19 nt, Artificial Sequence
  Description of Artificial Sequence: Synthetic oligonucleotide
ucagacaaacuugugugua

SEQ ID NO: 2781190 - RNA, 19 nt, Artificial Sequence
  Description of Artificial Sequence: Synthetic oligonucleotide
auauagugaucauuuucuu

SEQ ID NO: 2781191 - RNA, 19 nt, Artificial Sequence
  Description of Artificial Sequence: Synthetic oligonucleotide
ucauaccagucuuuucuuc

SEQ ID NO: 2781192 - RNA, 19 nt, Artificial Sequence
  Description of Artificial Sequence: Synthetic oligonucleotide
cuuucagacaaacuugugu

SEQ ID NO: 2781193 - RNA, 19 nt, Artificial Sequence
  Description of Artificial Sequence: Synthetic oligonucleotide
uguguguaugugauauaua

SEQ ID NO: 2781194 - RNA, 19 nt, Artificial Sequence
  Description of Artificial Sequence: Synthetic oligonucleotide
ucuccaaacgcccggcuuu

SEQ ID NO: 2781195 - RNA, 19 nt, Artificial Sequence
  Description of Artificial Sequence: Synthetic oligonucleotide
cauucauuacaucacagau

SEQ ID NO: 2781196 - RNA, 19 nt, Artificial Sequence
  Description of Artificial Sequence: Synthetic oligonucleotide
auacaccuuuguuauugca

SEQ ID NO: 2781197 - RNA, 19 nt, Artificial Sequence
  Description of Artificial Sequence: Synthetic oligonucleotide
accuuuguuauugcacauc

SEQ ID NO: 2781198 - RNA, 19 nt, Artificial Sequence
  Description of Artificial Sequence: Synthetic oligonucleotide
aggaaaacaugacuucaua

SEQ ID NO: 2781199 - RNA, 19 nt, Artificial Sequence
  Description of Artificial Sequence: Synthetic oligonucleotide
guuugcguagcauuaaaau

SEQ ID NO: 2781200 - RNA, 19 nt, Artificial Sequence
  Description of Artificial Sequence: Synthetic oligonucleotide
agggacuaaugacuagcug

SEQ ID NO: 2781201 - RNA, 19 nt, Artificial Sequence
  Description of Artificial Sequence: Synthetic oligonucleotide
agacccaggaaaacaugac

SEQ ID NO: 2781202 - RNA, 19 nt, Artificial Sequence
  Description of Artificial Sequence: Synthetic oligonucleotide
cagaagacuagcaaugacu

SEQ ID NO: 2781203 - RNA, 19 nt, Artificial Sequence
  Description of Artificial Sequence: Synthetic oligonucleotide
agucuuuucuucacauaag

SEQ ID NO: 2781204 - RNA, 19 nt, Artificial Sequence
  Description of Artificial Sequence: Synthetic oligonucleotide
ugaaggcaaauaugucuaa

SEQ ID NO: 2781205 - RNA, 19 nt, Artificial Sequence
  Description of Artificial Sequence: Synthetic oligonucleotide
accauucauuacaucacag

SEQ ID NO: 2781206 - RNA, 19 nt, Artificial Sequence
  Description of Artificial Sequence: Synthetic oligonucleotide
caucacagauguucagaac

SEQ ID NO: 2781207 - RNA, 19 nt, Artificial Sequence
  Description of Artificial Sequence: Synthetic oligonucleotide
cuucacauaagguuugcgu

SEQ ID NO: 2781208 - RNA, 19 nt, Artificial Sequence
  Description of Artificial Sequence: Synthetic oligonucleotide
ccuuccacaguuaugucug

SEQ ID NO: 2781209 - RNA, 19 nt, Artificial Sequence
  Description of Artificial Sequence: Synthetic oligonucleotide
cuugcuggauugagucucc

SEQ ID NO: 2781210 - RNA, 19 nt, Artificial Sequence
  Description of Artificial Sequence: Synthetic oligonucleotide
uucauaccagucuuuucuu

SEQ ID NO: 2781211 - RNA, 19 nt, Artificial Sequence
  Description of Artificial Sequence: Synthetic oligonucleotide
cucuccuuuguaaaacaga

SEQ ID NO: 2781212 - RNA, 19 nt, Artificial Sequence
  Description of Artificial Sequence: Synthetic oligonucleotide
cacauaagguuugcguagc

SEQ ID NO: 2781213 - RNA, 19 nt, Artificial Sequence
  Description of Artificial Sequence: Synthetic oligonucleotide
cccauaaauauagugauca

SEQ ID NO: 2781214 - RNA, 19 nt, Artificial Sequence
  Description of Artificial Sequence: Synthetic oligonucleotide
cuaacucuccuuuguaaaa

SEQ ID NO: 2781215 - RNA, 19 nt, Artificial Sequence
  Description of Artificial Sequence: Synthetic oligonucleotide
gggacuaaugacuagcugu

SEQ ID NO: 2781216 - RNA, 19 nt, Artificial Sequence
  Description of Artificial Sequence: Synthetic oligonucleotide
aauuaccacacagguuuaa

SEQ ID NO: 2781217 - RNA, 19 nt, Artificial Sequence
  Description of Artificial Sequence: Synthetic oligonucleotide
cuacuaguuaucaggcuaa

SEQ ID NO: 2781218 - RNA, 19 nt, Artificial Sequence
  Description of Artificial Sequence: Synthetic oligonucleotide
gugaucauuuucuucauuu

SEQ ID NO: 2781219 - RNA, 19 nt, Artificial Sequence
  Description of Artificial Sequence: Synthetic oligonucleotide
cugugaaggcaaauauguc

SEQ ID NO: 2781220 - RNA, 19 nt, Artificial Sequence
  Description of Artificial Sequence: Synthetic oligonucleotide
agcuacuaguuaucaggcu

SEQ ID NO: 2781221 - RNA, 19 nt, Artificial Sequence
  Description of Artificial Sequence: Synthetic oligonucleotide
gcacuuuacagaaugcaug

SEQ ID NO: 2781222 - RNA, 19 nt, Artificial Sequence
  Description of Artificial Sequence: Synthetic oligonucleotide
acacagguuuaaagaauuc

SEQ ID NO: 2781223 - RNA, 19 nt, Artificial Sequence
  Description of Artificial Sequence: Synthetic oligonucleotide
cuucauuuagacccaggaa

SEQ ID NO: 2781224 - RNA, 19 nt, Artificial Sequence
  Description of Artificial Sequence: Synthetic oligonucleotide
agcugugaaggcaaauaug

SEQ ID NO: 2781225 - RNA, 19 nt, Artificial Sequence
  Description of Artificial Sequence: Synthetic oligonucleotide
cauuuagacccaggaaaac

SEQ ID NO: 2781226 - RNA, 19 nt, Artificial Sequence
  Description of Artificial Sequence: Synthetic oligonucleotide
auugagucucccauaaaua

SEQ ID NO: 2781227 - RNA, 19 nt, Artificial Sequence
  Description of Artificial Sequence: Synthetic oligonucleotide
uucuucacauaagguuugc

SEQ ID NO: 2781228 - RNA, 19 nt, Artificial Sequence
  Description of Artificial Sequence: Synthetic oligonucleotide
ggacuaaugacuagcugug

SEQ ID NO: 2781229 - RNA, 19 nt, Artificial Sequence
  Description of Artificial Sequence: Synthetic oligonucleotide
caaacgcccggcuuugguc

SEQ ID NO: 2781230 - RNA, 19 nt, Artificial Sequence
  Description of Artificial Sequence: Synthetic oligonucleotide
caugacuucauaccagucu

SEQ ID NO: 2781231 - RNA, 19 nt, Artificial Sequence
  Description of Artificial Sequence: Synthetic oligonucleotide
aaacccuuccacaguuaug

SEQ ID NO: 2781232 - RNA, 19 nt, Artificial Sequence
  Description of Artificial Sequence: Synthetic oligonucleotide
gucuaacucuccuuuguaa

SEQ ID NO: 2781233 - RNA, 19 nt, Artificial Sequence
  Description of Artificial Sequence: Synthetic oligonucleotide
acauaagguuugcguagca

SEQ ID NO: 2781234 - RNA, 19 nt, Artificial Sequence
  Description of Artificial Sequence: Synthetic oligonucleotide
aacauacaccuuuguuauu

SEQ ID NO: 2781235 - RNA, 19 nt, Artificial Sequence
  Description of Artificial Sequence: Synthetic oligonucleotide
aacuuguguguaugugaua

SEQ ID NO: 2781236 - RNA, 19 nt, Artificial Sequence
  Description of Artificial Sequence: Synthetic oligonucleotide
auguucagaacuacauaga

SEQ ID NO: 2781237 - RNA, 19 nt, Artificial Sequence
  Description of Artificial Sequence: Synthetic oligonucleotide
agcaaugacugggccuggc

SEQ ID NO: 2781238 - RNA, 19 nt, Artificial Sequence
  Description of Artificial Sequence: Synthetic oligonucleotide
gcuacuaguuaucaggcua

SEQ ID NO: 2781239 - RNA, 19 nt, Artificial Sequence
  Description of Artificial Sequence: Synthetic oligonucleotide
gugaaggcaaauaugucua

SEQ ID NO: 2781240 - RNA, 19 nt, Artificial Sequence
  Description of Artificial Sequence: Synthetic oligonucleotide
uagugaucauuuucuucau

SEQ ID NO: 2781241 - RNA, 19 nt, Artificial Sequence
  Description of Artificial Sequence: Synthetic oligonucleotide
cuuuacagaaugcauguuu

SEQ ID NO: 2781242 - RNA, 19 nt, Artificial Sequence
  Description of Artificial Sequence: Synthetic oligonucleotide
aagguuugcguagcauuaa

SEQ ID NO: 2781243 - RNA, 19 nt, Artificial Sequence
  Description of Artificial Sequence: Synthetic oligonucleotide
caguuuccccaaacaaaac

SEQ ID NO: 2781244 - RNA, 19 nt, Artificial Sequence
  Description of Artificial Sequence: Synthetic oligonucleotide
auuaccacacagguuuaaa

SEQ ID NO: 2781245 - RNA, 19 nt, Artificial Sequence
  Description of Artificial Sequence: Synthetic oligonucleotide
gacaaacuuguguguaugu

SEQ ID NO: 2781246 - RNA, 19 nt, Artificial Sequence
  Description of Artificial Sequence: Synthetic oligonucleotide
agugaucauuuucuucauu

SEQ ID NO: 2781247 - RNA, 19 nt, Artificial Sequence
  Description of Artificial Sequence: Synthetic oligonucleotide
guucagaacuacauagaaa

SEQ ID NO: 2781248 - RNA, 19 nt, Artificial Sequence
  Description of Artificial Sequence: Synthetic oligonucleotide
gaaacccuuccacaguuau

SEQ ID NO: 2781249 - RNA, 19 nt, Artificial Sequence
  Description of Artificial Sequence: Synthetic oligonucleotide
cagcuucacauuuuacaca

SEQ ID NO: 2781250 - RNA, 19 nt, Artificial Sequence
  Description of Artificial Sequence: Synthetic oligonucleotide
uaaaauuguuagggacuaa

SEQ ID NO: 2781251 - RNA, 19 nt, Artificial Sequence
  Description of Artificial Sequence: Synthetic oligonucleotide
agguuugcguagcauuaaa

SEQ ID NO: 2781252 - RNA, 19 nt, Artificial Sequence
  Description of Artificial Sequence: Synthetic oligonucleotide
cagauguucagaacuacau

SEQ ID NO: 2781253 - RNA, 19 nt, Artificial Sequence
  Description of Artificial Sequence: Synthetic oligonucleotide
gcugugaaggcaaauaugu

SEQ ID NO: 2781254 - RNA, 19 nt, Artificial Sequence
  Description of Artificial Sequence: Synthetic oligonucleotide
gcagucuccaaacgcccgg

SEQ ID NO: 2781255 - RNA, 19 nt, Artificial Sequence
  Description of Artificial Sequence: Synthetic oligonucleotide
caaaacauacaccuuuguu

SEQ ID NO: 2781256 - RNA, 19 nt, Artificial Sequence
  Description of Artificial Sequence: Synthetic oligonucleotide
cagaaacaucccuguuuug

SEQ ID NO: 2781257 - RNA, 19 nt, Artificial Sequence
  Description of Artificial Sequence: Synthetic oligonucleotide
cuagcugugaaggcaaaua

SEQ ID NO: 2781258 - RNA, 19 nt, Artificial Sequence
  Description of Artificial Sequence: Synthetic oligonucleotide
aucccuguuuugaaacaug

SEQ ID NO: 2781259 - RNA, 19 nt, Artificial Sequence
  Description of Artificial Sequence: Synthetic oligonucleotide
gacuaaugacuagcuguga

SEQ ID NO: 2781260 - RNA, 19 nt, Artificial Sequence
  Description of Artificial Sequence: Synthetic oligonucleotide
cacagaagacuagcaauga

SEQ ID NO: 2781261 - RNA, 19 nt, Artificial Sequence
  Description of Artificial Sequence: Synthetic oligonucleotide
ccauucauuacaucacaga

SEQ ID NO: 2781262 - RNA, 19 nt, Artificial Sequence
  Description of Artificial Sequence: Synthetic oligonucleotide
cacacagguuuaaagaauu

SEQ ID NO: 2781263 - RNA, 19 nt, Artificial Sequence
  Description of Artificial Sequence: Synthetic oligonucleotide
ggcaaaaugggcagcuuca

SEQ ID NO: 2781264 - RNA, 19 nt, Artificial Sequence
  Description of Artificial Sequence: Synthetic oligonucleotide
cguagcauuaaaauuguua

SEQ ID NO: 2781265 - RNA, 19 nt, Artificial Sequence
  Description of Artificial Sequence: Synthetic oligonucleotide
agucuccaaacgcccggcu

SEQ ID NO: 2781266 - RNA, 19 nt, Artificial Sequence
  Description of Artificial Sequence: Synthetic oligonucleotide
uacuaguuaucaggcuaaa

SEQ ID NO: 2781267 - RNA, 19 nt, Artificial Sequence
  Description of Artificial Sequence: Synthetic oligonucleotide
cacaguuaugucuguugaa

SEQ ID NO: 2781268 - RNA, 19 nt, Artificial Sequence
  Description of Artificial Sequence: Synthetic oligonucleotide
gcuugcuggauugagucuc

SEQ ID NO: 2781269 - RNA, 19 nt, Artificial Sequence
  Description of Artificial Sequence: Synthetic oligonucleotide
acuagcugugaaggcaaau

SEQ ID NO: 2781270 - RNA, 19 nt, Artificial Sequence
  Description of Artificial Sequence: Synthetic oligonucleotide
uagcaaugacugggccugg

SEQ ID NO: 2781271 - RNA, 19 nt, Artificial Sequence
  Description of Artificial Sequence: Synthetic oligonucleotide
aaggcaaaaugggcagcuu

SEQ ID NO: 2781272 - RNA, 19 nt, Artificial Sequence
  Description of Artificial Sequence: Synthetic oligonucleotide
gcacaucuuucagacaaac

SEQ ID NO: 2781273 - RNA, 19 nt, Artificial Sequence
  Description of Artificial Sequence: Synthetic oligonucleotide
ggcagucuccaaacgcccg

SEQ ID NO: 2781274 - RNA, 19 nt, Artificial Sequence
  Description of Artificial Sequence: Synthetic oligonucleotide
cuggauugagucucccaua

SEQ ID NO: 2781275 - RNA, 19 nt, Artificial Sequence
  Description of Artificial Sequence: Synthetic oligonucleotide
cgggcagucuccaaacgcc

SEQ ID NO: 2781276 - RNA, 19 nt, Artificial Sequence
  Description of Artificial Sequence: Synthetic oligonucleotide
gaauuaccacacagguuua

SEQ ID NO: 2781277 - RNA, 19 nt, Artificial Sequence
  Description of Artificial Sequence: Synthetic oligonucleotide
cuuguguguaugugauaua

SEQ ID NO: 2781278 - RNA, 19 nt, Artificial Sequence
  Description of Artificial Sequence: Synthetic oligonucleotide
ccuuuguuauugcacaucu

SEQ ID NO: 2781279 - RNA, 19 nt, Artificial Sequence
  Description of Artificial Sequence: Synthetic oligonucleotide
ccacaguuaugucuguuga

SEQ ID NO: 2781280 - RNA, 19 nt, Artificial Sequence
  Description of Artificial Sequence: Synthetic oligonucleotide
gacuucauaccagucuuuu

SEQ ID NO: 2781281 - RNA, 19 nt, Artificial Sequence
  Description of Artificial Sequence: Synthetic oligonucleotide
uuccacaguuaugucuguu

SEQ ID NO: 2781282 - RNA, 19 nt, Artificial Sequence
  Description of Artificial Sequence: Synthetic oligonucleotide
ccgggcagucuccaaacgc

SEQ ID NO: 2781283 - RNA, 19 nt, Artificial Sequence
  Description of Artificial Sequence: Synthetic oligonucleotide
gcuggauugagucucccau

SEQ ID NO: 2781284 - RNA, 19 nt, Artificial Sequence
  Description of Artificial Sequence: Synthetic oligonucleotide
gguuugcguagcauuaaaa

SEQ ID NO: 2781285 - RNA, 19 nt, Artificial Sequence
  Description of Artificial Sequence: Synthetic oligonucleotide
ggccuggcuugcuggauug

SEQ ID NO: 2781286 - RNA, 19 nt, Artificial Sequence
  Description of Artificial Sequence: Synthetic oligonucleotide
caguuaugucuguugaauu

SEQ ID NO: 2781287 - RNA, 19 nt, Artificial Sequence
  Description of Artificial Sequence: Synthetic oligonucleotide
cagacaaacuuguguguau

SEQ ID NO: 2781288 - RNA, 19 nt, Artificial Sequence
  Description of Artificial Sequence: Synthetic oligonucleotide
gaacuacauagaaacccuu

SEQ ID NO: 2781289 - RNA, 19 nt, Artificial Sequence
  Description of Artificial Sequence: Synthetic oligonucleotide
accuggccgggcagucucc

SEQ ID NO: 2781290 - RNA, 19 nt, Artificial Sequence
  Description of Artificial Sequence: Synthetic oligonucleotide
gccgggcagucuccaaacg

SEQ ID NO: 2781291 - RNA, 19 nt, Artificial Sequence
  Description of Artificial Sequence: Synthetic oligonucleotide
gacaccuggccgggcaguc

SEQ ID NO: 2781292 - RNA, 19 nt, Artificial Sequence
  Description of Artificial Sequence: Synthetic oligonucleotide
cuggcuugcuggauugagu

SEQ ID NO: 2781293 - RNA, 19 nt, Artificial Sequence
  Description of Artificial Sequence: Synthetic oligonucleotide
agaaacccuuccacaguua

SEQ ID NO: 2781294 - RNA, 19 nt, Artificial Sequence
  Description of Artificial Sequence: Synthetic oligonucleotide
ggccgggcagucuccaaac

SEQ ID NO: 2781295 - RNA, 19 nt, Artificial Sequence
  Description of Artificial Sequence: Synthetic oligonucleotide
cauaagguuugcguagcau

SEQ ID NO: 2781296 - RNA, 19 nt, Artificial Sequence
  Description of Artificial Sequence: Synthetic oligonucleotide
agacaccuggccgggcagu

SEQ ID NO: 2781297 - RNA, 19 nt, Artificial Sequence
  Description of Artificial Sequence: Synthetic oligonucleotide
ggcacuuuacagaaugcau

SEQ ID NO: 2781298 - RNA, 19 nt, Artificial Sequence
  Description of Artificial Sequence: Synthetic oligonucleotide
cuuuguuauugcacaucuu

SEQ ID NO: 2781299 - RNA, 19 nt, Artificial Sequence
  Description of Artificial Sequence: Synthetic oligonucleotide
gacuagcugugaaggcaaa

SEQ ID NO: 2781300 - RNA, 19 nt, Artificial Sequence
  Description of Artificial Sequence: Synthetic oligonucleotide
ggauugagucucccauaaa

SEQ ID NO: 2781301 - RNA, 19 nt, Artificial Sequence
  Description of Artificial Sequence: Synthetic oligonucleotide
cugggccuggcuugcugga

SEQ ID NO: 2781302 - RNA, 19 nt, Artificial Sequence
  Description of Artificial Sequence: Synthetic oligonucleotide
caccuuuguuauugcacau

SEQ ID NO: 2781303 - RNA, 19 nt, Artificial Sequence
  Description of Artificial Sequence: Synthetic oligonucleotide
acaccuggccgggcagucu

SEQ ID NO: 2781304 - RNA, 19 nt, Artificial Sequence
  Description of Artificial Sequence: Synthetic oligonucleotide
gucuccaaacgcccggcuu

SEQ ID NO: 2781305 - RNA, 19 nt, Artificial Sequence
  Description of Artificial Sequence: Synthetic oligonucleotide
ugacugggccuggcuugcu

SEQ ID NO: 2781306 - RNA, 19 nt, Artificial Sequence
  Description of Artificial Sequence: Synthetic oligonucleotide
gcaaugacugggccuggcu

SEQ ID NO: 2781307 - RNA, 19 nt, Artificial Sequence
  Description of Artificial Sequence: Synthetic oligonucleotide
cuauggcacuuuacagaau

SEQ ID NO: 2781308 - RNA, 19 nt, Artificial Sequence
  Description of Artificial Sequence: Synthetic oligonucleotide
ggcuugcuggauugagucu

SEQ ID NO: 2781309 - RNA, 19 nt, Artificial Sequence
  Description of Artificial Sequence: Synthetic oligonucleotide
acgcccggcuuuggucccg

SEQ ID NO: 2781310 - RNA, 19 nt, Artificial Sequence
  Description of Artificial Sequence: Synthetic oligonucleotide
gggcagcuucacauuuuac

SEQ ID NO: 2781311 - RNA, 19 nt, Artificial Sequence
  Description of Artificial Sequence: Synthetic oligonucleotide
cuggccgggcagucuccaa

SEQ ID NO: 2781312 - RNA, 19 nt, Artificial Sequence
  Description of Artificial Sequence: Synthetic oligonucleotide
ccaaacgcccggcuuuggu

SEQ ID NO: 2781313 - RNA, 19 nt, Artificial Sequence
  Description of Artificial Sequence: Synthetic oligonucleotide
gcccggcuuuggucccggg

SEQ ID NO: 2781314 - RNA, 19 nt, Artificial Sequence
  Description of Artificial Sequence: Synthetic oligonucleotide
gggccuggcuugcuggauu

SEQ ID NO: 2781315 - RNA, 19 nt, Artificial Sequence
  Description of Artificial Sequence: Synthetic oligonucleotide
ccuggccgggcagucucca

SEQ ID NO: 2781316 - RNA, 19 nt, Artificial Sequence
  Description of Artificial Sequence: Synthetic oligonucleotide
gcguagcauuaaaauuguu

SEQ ID NO: 2781317 - RNA, 19 nt, Artificial Sequence
  Description of Artificial Sequence: Synthetic oligonucleotide
cgcccggcuuuggucccgg

SEQ ID NO: 2781318 - RNA, 19 nt, Artificial Sequence
  Description of Artificial Sequence: Synthetic oligonucleotide
agacauuuaucucagaccc

SEQ ID NO: 2781319 - RNA, 19 nt, Artificial Sequence
  Description of Artificial Sequence: Synthetic oligonucleotide
aaagacauuuaucucagac

SEQ ID NO: 2781320 - RNA, 19 nt, Artificial Sequence
  Description of Artificial Sequence: Synthetic oligonucleotide
aagacauuuaucucagacc

SEQ ID NO: 2781321 - RNA, 19 nt, Artificial Sequence
  Description of Artificial Sequence: Synthetic oligonucleotide
auagaaaagacauuuaucu

SEQ ID NO: 2781322 - RNA, 19 nt, Artificial Sequence
  Description of Artificial Sequence: Synthetic oligonucleotide
ucaguuuaaaaugugaccg

SEQ ID NO: 2781323 - RNA, 19 nt, Artificial Sequence
  Description of Artificial Sequence: Synthetic oligonucleotide
augaguguuacccucagcc

SEQ ID NO: 2781324 - RNA, 19 nt, Artificial Sequence
  Description of Artificial Sequence: Synthetic oligonucleotide
uaaaaugugaccgacacug

SEQ ID NO: 2781325 - RNA, 19 nt, Artificial Sequence
  Description of Artificial Sequence: Synthetic oligonucleotide
uuuaaaaugugaccgacac

SEQ ID NO: 2781326 - RNA, 19 nt, Artificial Sequence
  Description of Artificial Sequence: Synthetic oligonucleotide
aucaguuuaaaaugugacc

SEQ ID NO: 2781327 - RNA, 19 nt, Artificial Sequence
  Description of Artificial Sequence: Synthetic oligonucleotide
uaucucagacccuagaagg

SEQ ID NO: 2781328 - RNA, 19 nt, Artificial Sequence
  Description of Artificial Sequence: Synthetic oligonucleotide
aagaauccaagauuggaag

SEQ ID NO: 2781329 - RNA, 19 nt, Artificial Sequence
  Description of Artificial Sequence: Synthetic oligonucleotide
uucuguuuuauuuagaaau

SEQ ID NO: 2781330 - RNA, 19 nt, Artificial Sequence
  Description of Artificial Sequence: Synthetic oligonucleotide
ucuaagggcaagaugagug

SEQ ID NO: 2781331 - RNA, 19 nt, Artificial Sequence
  Description of Artificial Sequence: Synthetic oligonucleotide
aagauuggaagccucuagg

SEQ ID NO: 2781332 - RNA, 19 nt, Artificial Sequence
  Description of Artificial Sequence: Synthetic oligonucleotide
aaacauuauacaaaggcug

SEQ ID NO: 2781333 - RNA, 19 nt, Artificial Sequence
  Description of Artificial Sequence: Synthetic oligonucleotide
aagaauagaaaagacauuu

SEQ ID NO: 2781334 - RNA, 19 nt, Artificial Sequence
  Description of Artificial Sequence: Synthetic oligonucleotide
auuauacaaaggcugauca

SEQ ID NO: 2781335 - RNA, 19 nt, Artificial Sequence
  Description of Artificial Sequence: Synthetic oligonucleotide
aaaacauuauacaaaggcu

SEQ ID NO: 2781336 - RNA, 19 nt, Artificial Sequence
  Description of Artificial Sequence: Synthetic oligonucleotide
aagagaagaauagaaaaga

SEQ ID NO: 2781337 - RNA, 19 nt, Artificial Sequence
  Description of Artificial Sequence: Synthetic oligonucleotide
aguaccaggagccaacagg

SEQ ID NO: 2781338 - RNA, 19 nt, Artificial Sequence
  Description of Artificial Sequence: Synthetic oligonucleotide
agaagagaagaauagaaaa

SEQ ID NO: 2781339 - RNA, 19 nt, Artificial Sequence
  Description of Artificial Sequence: Synthetic oligonucleotide
aaaugcugugaugucaccc

SEQ ID NO: 2781340 - RNA, 19 nt, Artificial Sequence
  Description of Artificial Sequence: Synthetic oligonucleotide
aucccuuacaucugcagcc

SEQ ID NO: 2781341 - RNA, 19 nt, Artificial Sequence
  Description of Artificial Sequence: Synthetic oligonucleotide
agaauccaagauuggaagc

SEQ ID NO: 2781342 - RNA, 19 nt, Artificial Sequence
  Description of Artificial Sequence: Synthetic oligonucleotide
ucuguuuuauuuagaaaug

SEQ ID NO: 2781343 - RNA, 19 nt, Artificial Sequence
  Description of Artificial Sequence: Synthetic oligonucleotide
agauuggaagccucuaggc

SEQ ID NO: 2781344 - RNA, 19 nt, Artificial Sequence
  Description of Artificial Sequence: Synthetic oligonucleotide
uagaaggacccacaguugg

SEQ ID NO: 2781345 - RNA, 19 nt, Artificial Sequence
  Description of Artificial Sequence: Synthetic oligonucleotide
uuaucucagacccuagaag

SEQ ID NO: 2781346 - RNA, 19 nt, Artificial Sequence
  Description of Artificial Sequence: Synthetic oligonucleotide
gaagagaagaauagaaaag

SEQ ID NO: 2781347 - RNA, 19 nt, Artificial Sequence
  Description of Artificial Sequence: Synthetic oligonucleotide
aagaagugagagcaccaac

SEQ ID NO: 2781348 - RNA, 19 nt, Artificial Sequence
  Description of Artificial Sequence: Synthetic oligonucleotide
agaagaauagaaaagacau

SEQ ID NO: 2781349 - RNA, 19 nt, Artificial Sequence
  Description of Artificial Sequence: Synthetic oligonucleotide
uuauuuagaaaugauuuaa

SEQ ID NO: 2781350 - RNA, 19 nt, Artificial Sequence
  Description of Artificial Sequence: Synthetic oligonucleotide
ucuuggaguaccaggagcc

SEQ ID NO: 2781351 - RNA, 19 nt, Artificial Sequence
  Description of Artificial Sequence: Synthetic oligonucleotide
agaagugagagcaccaacc

SEQ ID NO: 2781352 - RNA, 19 nt, Artificial Sequence
  Description of Artificial Sequence: Synthetic oligonucleotide
ugaucaguuuaaaauguga

SEQ ID NO: 2781353 - RNA, 19 nt, Artificial Sequence
  Description of Artificial Sequence: Synthetic oligonucleotide
gagagcaccaaccugagga

SEQ ID NO: 2781354 - RNA, 19 nt, Artificial Sequence
  Description of Artificial Sequence: Synthetic oligonucleotide
gaagccucuaggcugagcc

SEQ ID NO: 2781355 - RNA, 19 nt, Artificial Sequence
  Description of Artificial Sequence: Synthetic oligonucleotide
auuggaagccucuaggcug

SEQ ID NO: 2781356 - RNA, 19 nt, Artificial Sequence
  Description of Artificial Sequence: Synthetic oligonucleotide
auuuagaaaugauuuaaaa

SEQ ID NO: 2781357 - RNA, 19 nt, Artificial Sequence
  Description of Artificial Sequence: Synthetic oligonucleotide
agagcuuucaagaagugag

SEQ ID NO: 2781358 - RNA, 19 nt, Artificial Sequence
  Description of Artificial Sequence: Synthetic oligonucleotide
uauacaaaggcugaucagu

SEQ ID NO: 2781359 - RNA, 19 nt, Artificial Sequence
  Description of Artificial Sequence: Synthetic oligonucleotide
aaugcugugaugucaccca

SEQ ID NO: 2781360 - RNA, 19 nt, Artificial Sequence
  Description of Artificial Sequence: Synthetic oligonucleotide
uucucaacuggucuuggag

SEQ ID NO: 2781361 - RNA, 19 nt, Artificial Sequence
  Description of Artificial Sequence: Synthetic oligonucleotide
gugauggacaaacagauga

SEQ ID NO: 2781362 - RNA, 19 nt, Artificial Sequence
  Description of Artificial Sequence: Synthetic oligonucleotide
gaggagacggaccaggaag

SEQ ID NO: 2781363 - RNA, 19 nt, Artificial Sequence
  Description of Artificial Sequence: Synthetic oligonucleotide
gaaaagacauuuaucucag

SEQ ID NO: 2781364 - RNA, 19 nt, Artificial Sequence
  Description of Artificial Sequence: Synthetic oligonucleotide
uuuaucucagacccuagaa

SEQ ID NO: 2781365 - RNA, 19 nt, Artificial Sequence
  Description of Artificial Sequence: Synthetic oligonucleotide
cuuucaagaagugagagca

SEQ ID NO: 2781366 - RNA, 19 nt, Artificial Sequence
  Description of Artificial Sequence: Synthetic oligonucleotide
uauuuagaaaugauuuaaa

SEQ ID NO: 2781367 - RNA, 19 nt, Artificial Sequence
  Description of Artificial Sequence: Synthetic oligonucleotide
agauaagaccucccugugc

SEQ ID NO: 2781368 - RNA, 19 nt, Artificial Sequence
  Description of Artificial Sequence: Synthetic oligonucleotide
aguuuaaaaugugaccgac

SEQ ID NO: 2781369 - RNA, 19 nt, Artificial Sequence
  Description of Artificial Sequence: Synthetic oligonucleotide
ugcuuugccccucugacug

SEQ ID NO: 2781370 - RNA, 19 nt, Artificial Sequence
  Description of Artificial Sequence: Synthetic oligonucleotide
uguuuuauuuagaaaugau

SEQ ID NO: 2781371 - RNA, 19 nt, Artificial Sequence
  Description of Artificial Sequence: Synthetic oligonucleotide
agagaagaauagaaaagac

SEQ ID NO: 2781372 - RNA, 19 nt, Artificial Sequence
  Description of Artificial Sequence: Synthetic oligonucleotide
ugaaaugcugugaugucac

SEQ ID NO: 2781373 - RNA, 19 nt, Artificial Sequence
  Description of Artificial Sequence: Synthetic oligonucleotide
uuauacaaaggcugaucag

SEQ ID NO: 2781374 - RNA, 19 nt, Artificial Sequence
  Description of Artificial Sequence: Synthetic oligonucleotide
caguugggaacacagaccc

SEQ ID NO: 2781375 - RNA, 19 nt, Artificial Sequence
  Description of Artificial Sequence: Synthetic oligonucleotide
gaauccaagauuggaagcc

SEQ ID NO: 2781376 - RNA, 19 nt, Artificial Sequence
  Description of Artificial Sequence: Synthetic oligonucleotide
uggacaaacagaugacugc

SEQ ID NO: 2781377 - RNA, 19 nt, Artificial Sequence
  Description of Artificial Sequence: Synthetic oligonucleotide
gaucaguuuaaaaugugac

SEQ ID NO: 2781378 - RNA, 19 nt, Artificial Sequence
  Description of Artificial Sequence: Synthetic oligonucleotide
uggggugauggacaaacag

SEQ ID NO: 2781379 - RNA, 19 nt, Artificial Sequence
  Description of Artificial Sequence: Synthetic oligonucleotide
ugcagaagaauccaagauu

SEQ ID NO: 2781380 - RNA, 19 nt, Artificial Sequence
  Description of Artificial Sequence: Synthetic oligonucleotide
aacauuauacaaaggcuga

SEQ ID NO: 2781381 - RNA, 19 nt, Artificial Sequence
  Description of Artificial Sequence: Synthetic oligonucleotide
gugaccgacacugaaaugc

SEQ ID NO: 2781382 - RNA, 19 nt, Artificial Sequence
  Description of Artificial Sequence: Synthetic oligonucleotide
uucaagaagugagagcacc

SEQ ID NO: 2781383 - RNA, 19 nt, Artificial Sequence
  Description of Artificial Sequence: Synthetic oligonucleotide
aggcugaucaguuuaaaau

SEQ ID NO: 2781384 - RNA, 19 nt, Artificial Sequence
  Description of Artificial Sequence: Synthetic oligonucleotide
gagaagaauagaaaagaca

SEQ ID NO: 2781385 - RNA, 19 nt, Artificial Sequence
  Description of Artificial Sequence: Synthetic oligonucleotide
uggucuuggaguaccagga

SEQ ID NO: 2781386 - RNA, 19 nt, Artificial Sequence
  Description of Artificial Sequence: Synthetic oligonucleotide
acugccugcagaagaaucc

SEQ ID NO: 2781387 - RNA, 19 nt, Artificial Sequence
  Description of Artificial Sequence: Synthetic oligonucleotide
ucuaggcugagcccucugg

SEQ ID NO: 2781388 - RNA, 19 nt, Artificial Sequence
  Description of Artificial Sequence: Synthetic oligonucleotide
acaaacagaugacugccug

SEQ ID NO: 2781389 - RNA, 19 nt, Artificial Sequence
  Description of Artificial Sequence: Synthetic oligonucleotide
aaaugugaccgacacugaa

SEQ ID NO: 2781390 - RNA, 19 nt, Artificial Sequence
  Description of Artificial Sequence: Synthetic oligonucleotide
aacacagacccagccaggg

SEQ ID NO: 2781391 - RNA, 19 nt, Artificial Sequence
  Description of Artificial Sequence: Synthetic oligonucleotide
aaccugaggagacggacca

SEQ ID NO: 2781392 - RNA, 19 nt, Artificial Sequence
  Description of Artificial Sequence: Synthetic oligonucleotide
aaacagaugacugccugca

SEQ ID NO: 2781393 - RNA, 19 nt, Artificial Sequence
  Description of Artificial Sequence: Synthetic oligonucleotide
aagccucuaggcugagccc

SEQ ID NO: 2781394 - RNA, 19 nt, Artificial Sequence
  Description of Artificial Sequence: Synthetic oligonucleotide
uauuucuguuuuauuuaga

SEQ ID NO: 2781395 - RNA, 19 nt, Artificial Sequence
  Description of Artificial Sequence: Synthetic oligonucleotide
gaugacugccugcagaaga

SEQ ID NO: 2781396 - RNA, 19 nt, Artificial Sequence
  Description of Artificial Sequence: Synthetic oligonucleotide
ucaagaagugagagcacca

SEQ ID NO: 2781397 - RNA, 19 nt, Artificial Sequence
  Description of Artificial Sequence: Synthetic oligonucleotide
gaauagaaaagacauuuau

SEQ ID NO: 2781398 - RNA, 19 nt, Artificial Sequence
  Description of Artificial Sequence: Synthetic oligonucleotide
guaccaggagccaacaggg

SEQ ID NO: 2781399 - RNA, 19 nt, Artificial Sequence
  Description of Artificial Sequence: Synthetic oligonucleotide
acugaaaugcugugauguc

SEQ ID NO: 2781400 - RNA, 19 nt, Artificial Sequence
  Description of Artificial Sequence: Synthetic oligonucleotide
acaguugggaacacagacc

SEQ ID NO: 2781401 - RNA, 19 nt, Artificial Sequence
  Description of Artificial Sequence: Synthetic oligonucleotide
uuaaaaugugaccgacacu

SEQ ID NO: 2781402 - RNA, 19 nt, Artificial Sequence
  Description of Artificial Sequence: Synthetic oligonucleotide
ucucaacuggucuuggagu

SEQ ID NO: 2781403 - RNA, 19 nt, Artificial Sequence
  Description of Artificial Sequence: Synthetic oligonucleotide
ugauggacaaacagaugac

SEQ ID NO: 2781404 - RNA, 19 nt, Artificial Sequence
  Description of Artificial Sequence: Synthetic oligonucleotide
ggcaagaugaguguuaccc

SEQ ID NO: 2781405 - RNA, 19 nt, Artificial Sequence
  Description of Artificial Sequence: Synthetic oligonucleotide
aagugagagcaccaaccug

SEQ ID NO: 2781406 - RNA, 19 nt, Artificial Sequence
  Description of Artificial Sequence: Synthetic oligonucleotide
ucagacccuagaaggaccc

SEQ ID NO: 2781407 - RNA, 19 nt, Artificial Sequence
  Description of Artificial Sequence: Synthetic oligonucleotide
cuggucuuggaguaccagg

SEQ ID NO: 2781408 - RNA, 19 nt, Artificial Sequence
  Description of Artificial Sequence: Synthetic oligonucleotide
ggcugaucaguuuaaaaug

SEQ ID NO: 2781409 - RNA, 19 nt, Artificial Sequence
  Description of Artificial Sequence: Synthetic oligonucleotide
guugggaacacagacccag

SEQ ID NO: 2781410 - RNA, 19 nt, Artificial Sequence
  Description of Artificial Sequence: Synthetic oligonucleotide
agugagagcaccaaccuga

SEQ ID NO: 2781411 - RNA, 19 nt, Artificial Sequence
  Description of Artificial Sequence: Synthetic oligonucleotide
aaggcugaucaguuuaaaa

SEQ ID NO: 2781412 - RNA, 19 nt, Artificial Sequence
  Description of Artificial Sequence: Synthetic oligonucleotide
agacggaccaggaaguugg

SEQ ID NO: 2781413 - RNA, 19 nt, Artificial Sequence
  Description of Artificial Sequence: Synthetic oligonucleotide
agaagaauccaagauugga

SEQ ID NO: 2781414 - RNA, 19 nt, Artificial Sequence
  Description of Artificial Sequence: Synthetic oligonucleotide
acaaaggcugaucaguuua

SEQ ID NO: 2781415 - RNA, 19 nt, Artificial Sequence
  Description of Artificial Sequence: Synthetic oligonucleotide
ggaacacagacccagccag

SEQ ID NO: 2781416 - RNA, 19 nt, Artificial Sequence
  Description of Artificial Sequence: Synthetic oligonucleotide
auuuaucucagacccuaga

SEQ ID NO: 2781417 - RNA, 19 nt, Artificial Sequence
  Description of Artificial Sequence: Synthetic oligonucleotide
gcuucuaagggcaagauga

SEQ ID NO: 2781418 - RNA, 19 nt, Artificial Sequence
  Description of Artificial Sequence: Synthetic oligonucleotide
ugcuucuaagggcaagaug

SEQ ID NO: 2781419 - RNA, 19 nt, Artificial Sequence
  Description of Artificial Sequence: Synthetic oligonucleotide
caaacagaugacugccugc

SEQ ID NO: 2781420 - RNA, 19 nt, Artificial Sequence
  Description of Artificial Sequence: Synthetic oligonucleotide
caagaugaguguuacccuc

SEQ ID NO: 2781421 - RNA, 19 nt, Artificial Sequence
  Description of Artificial Sequence: Synthetic oligonucleotide
aacagggagccugcggggc

SEQ ID NO: 2781422 - RNA, 19 nt, Artificial Sequence
  Description of Artificial Sequence: Synthetic oligonucleotide
gcagaagaauccaagauug

SEQ ID NO: 2781423 - RNA, 19 nt, Artificial Sequence
  Description of Artificial Sequence: Synthetic oligonucleotide
cacagacccagccagggcc

SEQ ID NO: 2781424 - RNA, 19 nt, Artificial Sequence
  Description of Artificial Sequence: Synthetic oligonucleotide
ugggaacacagacccagcc

SEQ ID NO: 2781425 - RNA, 19 nt, Artificial Sequence
  Description of Artificial Sequence: Synthetic oligonucleotide
acagaugacugccugcaga

SEQ ID NO: 2781426 - RNA, 19 nt, Artificial Sequence
  Description of Artificial Sequence: Synthetic oligonucleotide
gaagaauccaagauuggaa

SEQ ID NO: 2781427 - RNA, 19 nt, Artificial Sequence
  Description of Artificial Sequence: Synthetic oligonucleotide
caagauuggaagccucuag

SEQ ID NO: 2781428 - RNA, 19 nt, Artificial Sequence
  Description of Artificial Sequence: Synthetic oligonucleotide
aggacccacaguugggaac

SEQ ID NO: 2781429 - RNA, 19 nt, Artificial Sequence
  Description of Artificial Sequence: Synthetic oligonucleotide
agcuuucaagaagugagag

SEQ ID NO: 2781430 - RNA, 19 nt, Artificial Sequence
  Description of Artificial Sequence: Synthetic oligonucleotide
gaguguuacccucagccuc

SEQ ID NO: 2781431 - RNA, 19 nt, Artificial Sequence
  Description of Artificial Sequence: Synthetic oligonucleotide
uccaagauuggaagccucu

SEQ ID NO: 2781432 - RNA, 19 nt, Artificial Sequence
  Description of Artificial Sequence: Synthetic oligonucleotide
cugaucaguuuaaaaugug

SEQ ID NO: 2781433 - RNA, 19 nt, Artificial Sequence
  Description of Artificial Sequence: Synthetic oligonucleotide
augugaccgacacugaaau

SEQ ID NO: 2781434 - RNA, 19 nt, Artificial Sequence
  Description of Artificial Sequence: Synthetic oligonucleotide
aacagaugacugccugcag

SEQ ID NO: 2781435 - RNA, 19 nt, Artificial Sequence
  Description of Artificial Sequence: Synthetic oligonucleotide
cagaagaauccaagauugg

SEQ ID NO: 2781436 - RNA, 19 nt, Artificial Sequence
  Description of Artificial Sequence: Synthetic oligonucleotide
aaaagacauuuaucucaga

SEQ ID NO: 2781437 - RNA, 19 nt, Artificial Sequence
  Description of Artificial Sequence: Synthetic oligonucleotide
agagcaccaaccugaggag

SEQ ID NO: 2781438 - RNA, 19 nt, Artificial Sequence
  Description of Artificial Sequence: Synthetic oligonucleotide
uuggaagccucuaggcuga

SEQ ID NO: 2781439 - RNA, 19 nt, Artificial Sequence
  Description of Artificial Sequence: Synthetic oligonucleotide
uccugcuuguucucaacug

SEQ ID NO: 2781440 - RNA, 19 nt, Artificial Sequence
  Description of Artificial Sequence: Synthetic oligonucleotide
ugaguguuacccucagccu

SEQ ID NO: 2781441 - RNA, 19 nt, Artificial Sequence
  Description of Artificial Sequence: Synthetic oligonucleotide
auggacaaacagaugacug

SEQ ID NO: 2781442 - RNA, 19 nt, Artificial Sequence
  Description of Artificial Sequence: Synthetic oligonucleotide
ugaggggaagcugagcucu

SEQ ID NO: 2781443 - RNA, 19 nt, Artificial Sequence
  Description of Artificial Sequence: Synthetic oligonucleotide
cuaggcugagcccucuggg

SEQ ID NO: 2781444 - RNA, 19 nt, Artificial Sequence
  Description of Artificial Sequence: Synthetic oligonucleotide
gucuuggaguaccaggagc

SEQ ID NO: 2781445 - RNA, 19 nt, Artificial Sequence
  Description of Artificial Sequence: Synthetic oligonucleotide
cuucuaagggcaagaugag

SEQ ID NO: 2781446 - RNA, 19 nt, Artificial Sequence
  Description of Artificial Sequence: Synthetic oligonucleotide
cucagacccuagaaggacc

SEQ ID NO: 2781447 - RNA, 19 nt, Artificial Sequence
  Description of Artificial Sequence: Synthetic oligonucleotide
agggcaagaugaguguuac

SEQ ID NO: 2781448 - RNA, 19 nt, Artificial Sequence
  Description of Artificial Sequence: Synthetic oligonucleotide
cauuauacaaaggcugauc

SEQ ID NO: 2781449 - RNA, 19 nt, Artificial Sequence
  Description of Artificial Sequence: Synthetic oligonucleotide
uuucaagaagugagagcac

SEQ ID NO: 2781450 - RNA, 19 nt, Artificial Sequence
  Description of Artificial Sequence: Synthetic oligonucleotide
aaugugaccgacacugaaa

SEQ ID NO: 2781451 - RNA, 19 nt, Artificial Sequence
  Description of Artificial Sequence: Synthetic oligonucleotide
ugugcuucuaagggcaaga

SEQ ID NO: 2781452 - RNA, 19 nt, Artificial Sequence
  Description of Artificial Sequence: Synthetic oligonucleotide
ugaccgacacugaaaugcu

SEQ ID NO: 2781453 - RNA, 19 nt, Artificial Sequence
  Description of Artificial Sequence: Synthetic oligonucleotide
uagagcuuucaagaaguga

SEQ ID NO: 2781454 - RNA, 19 nt, Artificial Sequence
  Description of Artificial Sequence: Synthetic oligonucleotide
cuuacaucugcagccuggg

SEQ ID NO: 2781455 - RNA, 19 nt, Artificial Sequence
  Description of Artificial Sequence: Synthetic oligonucleotide
uggaguaccaggagccaac

SEQ ID NO: 2781456 - RNA, 19 nt, Artificial Sequence
  Description of Artificial Sequence: Synthetic oligonucleotide
acacagacccagccagggc

SEQ ID NO: 2781457 - RNA, 19 nt, Artificial Sequence
  Description of Artificial Sequence: Synthetic oligonucleotide
cuagaaggacccacaguug

SEQ ID NO: 2781458 - RNA, 19 nt, Artificial Sequence
  Description of Artificial Sequence: Synthetic oligonucleotide
caaccugaggagacggacc

SEQ ID NO: 2781459 - RNA, 19 nt, Artificial Sequence
  Description of Artificial Sequence: Synthetic oligonucleotide
agaugaguguuacccucag

SEQ ID NO: 2781460 - RNA, 19 nt, Artificial Sequence
  Description of Artificial Sequence: Synthetic oligonucleotide
cagaagagaagaauagaaa

SEQ ID NO: 2781461 - RNA, 19 nt, Artificial Sequence
  Description of Artificial Sequence: Synthetic oligonucleotide
agcaccaaccugaggagac

SEQ ID NO: 2781462 - RNA, 19 nt, Artificial Sequence
  Description of Artificial Sequence: Synthetic oligonucleotide
aggggcagauaagaccucc

SEQ ID NO: 2781463 - RNA, 19 nt, Artificial Sequence
  Description of Artificial Sequence: Synthetic oligonucleotide
agacccuagaaggacccac

SEQ ID NO: 2781464 - RNA, 19 nt, Artificial Sequence
  Description of Artificial Sequence: Synthetic oligonucleotide
gaaaugcugugaugucacc

SEQ ID NO: 2781465 - RNA, 19 nt, Artificial Sequence
  Description of Artificial Sequence: Synthetic oligonucleotide
uguucucaacuggucuugg

SEQ ID NO: 2781466 - RNA, 19 nt, Artificial Sequence
  Description of Artificial Sequence: Synthetic oligonucleotide
ucccugugcuucuaagggc

SEQ ID NO: 2781467 - RNA, 19 nt, Artificial Sequence
  Description of Artificial Sequence: Synthetic oligonucleotide
agccagggccacuggaugg

SEQ ID NO: 2781468 - RNA, 19 nt, Artificial Sequence
  Description of Artificial Sequence: Synthetic oligonucleotide
cauuuaucucagacccuag

SEQ ID NO: 2781469 - RNA, 19 nt, Artificial Sequence
  Description of Artificial Sequence: Synthetic oligonucleotide
ucucagacccuagaaggac

SEQ ID NO: 2781470 - RNA, 19 nt, Artificial Sequence
  Description of Artificial Sequence: Synthetic oligonucleotide
acauuuaucucagacccua

SEQ ID NO: 2781471 - RNA, 19 nt, Artificial Sequence
  Description of Artificial Sequence: Synthetic oligonucleotide
gauuggaagccucuaggcu

SEQ ID NO: 2781472 - RNA, 19 nt, Artificial Sequence
  Description of Artificial Sequence: Synthetic oligonucleotide
gaugaguguuacccucagc

SEQ ID NO: 2781473 - RNA, 19 nt, Artificial Sequence
  Description of Artificial Sequence: Synthetic oligonucleotide
cuguuuuauuuagaaauga

SEQ ID NO: 2781474 - RNA, 19 nt, Artificial Sequence
  Description of Artificial Sequence: Synthetic oligonucleotide
gacacugaaaugcugugau

SEQ ID NO: 2781475 - RNA, 19 nt, Artificial Sequence
  Description of Artificial Sequence: Synthetic oligonucleotide
uaggcugagcccucugggc

SEQ ID NO: 2781476 - RNA, 19 nt, Artificial Sequence
  Description of Artificial Sequence: Synthetic oligonucleotide
ggacaaacagaugacugcc

SEQ ID NO: 2781477 - RNA, 19 nt, Artificial Sequence
  Description of Artificial Sequence: Synthetic oligonucleotide
gaagugagagcaccaaccu

SEQ ID NO: 2781478 - RNA, 19 nt, Artificial Sequence
  Description of Artificial Sequence: Synthetic oligonucleotide
aagaccucccugugcuucu

SEQ ID NO: 2781479 - RNA, 19 nt, Artificial Sequence
  Description of Artificial Sequence: Synthetic oligonucleotide
gaugucacccaggcugagg

SEQ ID NO: 2781480 - RNA, 19 nt, Artificial Sequence
  Description of Artificial Sequence: Synthetic oligonucleotide
agggccacuggauggcagg

SEQ ID NO: 2781481 - RNA, 19 nt, Artificial Sequence
  Description of Artificial Sequence: Synthetic oligonucleotide
ugcuuguucucaacugguc

SEQ ID NO: 2781482 - RNA, 19 nt, Artificial Sequence
  Description of Artificial Sequence: Synthetic oligonucleotide
cuagagcuuucaagaagug

SEQ ID NO: 2781483 - RNA, 19 nt, Artificial Sequence
  Description of Artificial Sequence: Synthetic oligonucleotide
ccaacagggagccugcggg

SEQ ID NO: 2781484 - RNA, 19 nt, Artificial Sequence
  Description of Artificial Sequence: Synthetic oligonucleotide
uuacaucugcagccugggc

SEQ ID NO: 2781485 - RNA, 19 nt, Artificial Sequence
  Description of Artificial Sequence: Synthetic oligonucleotide
ugugaccgacacugaaaug

SEQ ID NO: 2781486 - RNA, 19 nt, Artificial Sequence
  Description of Artificial Sequence: Synthetic oligonucleotide
acacugaaaugcugugaug

SEQ ID NO: 2781487 - RNA, 19 nt, Artificial Sequence
  Description of Artificial Sequence: Synthetic oligonucleotide
acccuagaaggacccacag

SEQ ID NO: 2781488 - RNA, 19 nt, Artificial Sequence
  Description of Artificial Sequence: Synthetic oligonucleotide
ucugacugcucuggccugg

SEQ ID NO: 2781489 - RNA, 19 nt, Artificial Sequence
  Description of Artificial Sequence: Synthetic oligonucleotide
gcuuucaagaagugagagc

SEQ ID NO: 2781490 - RNA, 19 nt, Artificial Sequence
  Description of Artificial Sequence: Synthetic oligonucleotide
aaaaugugaccgacacuga

SEQ ID NO: 2781491 - RNA, 19 nt, Artificial Sequence
  Description of Artificial Sequence: Synthetic oligonucleotide
ugaggagacggaccaggaa

SEQ ID NO: 2781492 - RNA, 19 nt, Artificial Sequence
  Description of Artificial Sequence: Synthetic oligonucleotide
uucuaagggcaagaugagu

SEQ ID NO: 2781493 - RNA, 19 nt, Artificial Sequence
  Description of Artificial Sequence: Synthetic oligonucleotide
ccugcuuguucucaacugg

SEQ ID NO: 2781494 - RNA, 19 nt, Artificial Sequence
  Description of Artificial Sequence: Synthetic oligonucleotide
uaagaccucccugugcuuc

SEQ ID NO: 2781495 - RNA, 19 nt, Artificial Sequence
  Description of Artificial Sequence: Synthetic oligonucleotide
ggugcuuugccccucugac

SEQ ID NO: 2781496 - RNA, 19 nt, Artificial Sequence
  Description of Artificial Sequence: Synthetic oligonucleotide
ugucacccaggcugagggg

SEQ ID NO: 2781497 - RNA, 19 nt, Artificial Sequence
  Description of Artificial Sequence: Synthetic oligonucleotide
aaggacccacaguugggaa

SEQ ID NO: 2781498 - RNA, 19 nt, Artificial Sequence
  Description of Artificial Sequence: Synthetic oligonucleotide
gaacacagacccagccagg

SEQ ID NO: 2781499 - RNA, 19 nt, Artificial Sequence
  Description of Artificial Sequence: Synthetic oligonucleotide
caguuuaaaaugugaccga

SEQ ID NO: 2781500 - RNA, 19 nt, Artificial Sequence
  Description of Artificial Sequence: Synthetic oligonucleotide
cagauaagaccucccugug

SEQ ID NO: 2781501 - RNA, 19 nt, Artificial Sequence
  Description of Artificial Sequence: Synthetic oligonucleotide
gauggcaggggcagauaag

SEQ ID NO: 2781502 - RNA, 19 nt, Artificial Sequence
  Description of Artificial Sequence: Synthetic oligonucleotide
caacuggucuuggaguacc

SEQ ID NO: 2781503 - RNA, 19 nt, Artificial Sequence
  Description of Artificial Sequence: Synthetic oligonucleotide
caacagggagccugcgggg

SEQ ID NO: 2781504 - RNA, 19 nt, Artificial Sequence
  Description of Artificial Sequence: Synthetic oligonucleotide
accgacacugaaaugcugu

SEQ ID NO: 2781505 - RNA, 19 nt, Artificial Sequence
  Description of Artificial Sequence: Synthetic oligonucleotide
cccacaguugggaacacag

SEQ ID NO: 2781506 - RNA, 19 nt, Artificial Sequence
  Description of Artificial Sequence: Synthetic oligonucleotide
aaaggcugaucaguuuaaa

SEQ ID NO: 2781507 - RNA, 19 nt, Artificial Sequence
  Description of Artificial Sequence: Synthetic oligonucleotide
uacaaaggcugaucaguuu

SEQ ID NO: 2781508 - RNA, 19 nt, Artificial Sequence
  Description of Artificial Sequence: Synthetic oligonucleotide
gggaagcugagcucugggg

SEQ ID NO: 2781509 - RNA, 19 nt, Artificial Sequence
  Description of Artificial Sequence: Synthetic oligonucleotide
ugcaucccuuacaucugca

SEQ ID NO: 2781510 - RNA, 19 nt, Artificial Sequence
  Description of Artificial Sequence: Synthetic oligonucleotide
gccuagagcuuucaagaag

SEQ ID NO: 2781511 - RNA, 19 nt, Artificial Sequence
  Description of Artificial Sequence: Synthetic oligonucleotide
ggcagauaagaccucccug

SEQ ID NO: 2781512 - RNA, 19 nt, Artificial Sequence
  Description of Artificial Sequence: Synthetic oligonucleotide
cugcaucccuuacaucugc

SEQ ID NO: 2781513 - RNA, 19 nt, Artificial Sequence
  Description of Artificial Sequence: Synthetic oligonucleotide
gaaggacccacaguuggga

SEQ ID NO: 2781514 - RNA, 19 nt, Artificial Sequence
  Description of Artificial Sequence: Synthetic oligonucleotide
ccagaagagaagaauagaa

SEQ ID NO: 2781515 - RNA, 19 nt, Artificial Sequence
  Description of Artificial Sequence: Synthetic oligonucleotide
gauggacaaacagaugacu

SEQ ID NO: 2781516 - RNA, 19 nt, Artificial Sequence
  Description of Artificial Sequence: Synthetic oligonucleotide
ccuuacaucugcagccugg

SEQ ID NO: 2781517 - RNA, 19 nt, Artificial Sequence
  Description of Artificial Sequence: Synthetic oligonucleotide
agaauagaaaagacauuua

SEQ ID NO: 2781518 - RNA, 19 nt, Artificial Sequence
  Description of Artificial Sequence: Synthetic oligonucleotide
gagacggaccaggaaguug

SEQ ID NO: 2781519 - RNA, 19 nt, Artificial Sequence
  Description of Artificial Sequence: Synthetic oligonucleotide
gagccugcggggccuagag

SEQ ID NO: 2781520 - RNA, 19 nt, Artificial Sequence
  Description of Artificial Sequence: Synthetic oligonucleotide
caggcugaggggaagcuga

SEQ ID NO: 2781521 - RNA, 19 nt, Artificial Sequence
  Description of Artificial Sequence: Synthetic oligonucleotide
caccaaccugaggagacgg

SEQ ID NO: 2781522 - RNA, 19 nt, Artificial Sequence
  Description of Artificial Sequence: Synthetic oligonucleotide
acauuauacaaaggcugau

SEQ ID NO: 2781523 - RNA, 19 nt, Artificial Sequence
  Description of Artificial Sequence: Synthetic oligonucleotide
ggagccaacagggagccug

SEQ ID NO: 2781524 - RNA, 19 nt, Artificial Sequence
  Description of Artificial Sequence: Synthetic oligonucleotide
cacugaaaugcugugaugu

SEQ ID NO: 2781525 - RNA, 19 nt, Artificial Sequence
  Description of Artificial Sequence: Synthetic oligonucleotide
auccaagauuggaagccuc

SEQ ID NO: 2781526 - RNA, 19 nt, Artificial Sequence
  Description of Artificial Sequence: Synthetic oligonucleotide
accucccugugcuucuaag

SEQ ID NO: 2781527 - RNA, 19 nt, Artificial Sequence
  Description of Artificial Sequence: Synthetic oligonucleotide
uugccccucugacugcucu

SEQ ID NO: 2781528 - RNA, 19 nt, Artificial Sequence
  Description of Artificial Sequence: Synthetic oligonucleotide
auacaaaggcugaucaguu

SEQ ID NO: 2781529 - RNA, 19 nt, Artificial Sequence
  Description of Artificial Sequence: Synthetic oligonucleotide
cucaacuggucuuggagua

SEQ ID NO: 2781530 - RNA, 19 nt, Artificial Sequence
  Description of Artificial Sequence: Synthetic oligonucleotide
cagaugacugccugcagaa

SEQ ID NO: 2781531 - RNA, 19 nt, Artificial Sequence
  Description of Artificial Sequence: Synthetic oligonucleotide
ucaacuggucuuggaguac

SEQ ID NO: 2781532 - RNA, 19 nt, Artificial Sequence
  Description of Artificial Sequence: Synthetic oligonucleotide
gacugccugcagaagaauc

SEQ ID NO: 2781533 - RNA, 19 nt, Artificial Sequence
  Description of Artificial Sequence: Synthetic oligonucleotide
ccaggagccaacagggagc

SEQ ID NO: 2781534 - RNA, 19 nt, Artificial Sequence
  Description of Artificial Sequence: Synthetic oligonucleotide
ugacugcucuggccugggg

SEQ ID NO: 2781535 - RNA, 19 nt, Artificial Sequence
  Description of Artificial Sequence: Synthetic oligonucleotide
caggagccaacagggagcc

SEQ ID NO: 2781536 - RNA, 19 nt, Artificial Sequence
  Description of Artificial Sequence: Synthetic oligonucleotide
gagcuuucaagaagugaga

SEQ ID NO: 2781537 - RNA, 19 nt, Artificial Sequence
  Description of Artificial Sequence: Synthetic oligonucleotide
uaccaggagccaacaggga

SEQ ID NO: 2781538 - RNA, 19 nt, Artificial Sequence
  Description of Artificial Sequence: Synthetic oligonucleotide
agccugcggggccuagagc

SEQ ID NO: 2781539 - RNA, 19 nt, Artificial Sequence
  Description of Artificial Sequence: Synthetic oligonucleotide
gcagauaagaccucccugu

SEQ ID NO: 2781540 - RNA, 19 nt, Artificial Sequence
  Description of Artificial Sequence: Synthetic oligonucleotide
acuggucuuggaguaccag

SEQ ID NO: 2781541 - RNA, 19 nt, Artificial Sequence
  Description of Artificial Sequence: Synthetic oligonucleotide
uuggaguaccaggagccaa

SEQ ID NO: 2781542 - RNA, 19 nt, Artificial Sequence
  Description of Artificial Sequence: Synthetic oligonucleotide
uaagggcaagaugaguguu

SEQ ID NO: 2781543 - RNA, 19 nt, Artificial Sequence
  Description of Artificial Sequence: Synthetic oligonucleotide
aucucagacccuagaagga

SEQ ID NO: 2781544 - RNA, 19 nt, Artificial Sequence
  Description of Artificial Sequence: Synthetic oligonucleotide
aagggcaagaugaguguua

SEQ ID NO: 2781545 - RNA, 19 nt, Artificial Sequence
  Description of Artificial Sequence: Synthetic oligonucleotide
agccucuaggcugagcccu

SEQ ID NO: 2781546 - RNA, 19 nt, Artificial Sequence
  Description of Artificial Sequence: Synthetic oligonucleotide
ucccuuacaucugcagccu

SEQ ID NO: 2781547 - RNA, 19 nt, Artificial Sequence
  Description of Artificial Sequence: Synthetic oligonucleotide
ugccugcagaagaauccaa

SEQ ID NO: 2781548 - RNA, 19 nt, Artificial Sequence
  Description of Artificial Sequence: Synthetic oligonucleotide
ggucuuggaguaccaggag

SEQ ID NO: 2781549 - RNA, 19 nt, Artificial Sequence
  Description of Artificial Sequence: Synthetic oligonucleotide
ccucccugugcuucuaagg

SEQ ID NO: 2781550 - RNA, 19 nt, Artificial Sequence
  Description of Artificial Sequence: Synthetic oligonucleotide
cugaggggaagcugagcuc

SEQ ID NO: 2781551 - RNA, 19 nt, Artificial Sequence
  Description of Artificial Sequence: Synthetic oligonucleotide
gcugccugccuccaucucc

SEQ ID NO: 2781552 - RNA, 19 nt, Artificial Sequence
  Description of Artificial Sequence: Synthetic oligonucleotide
agccugggcugccugccuc

SEQ ID NO: 2781553 - RNA, 19 nt, Artificial Sequence
  Description of Artificial Sequence: Synthetic oligonucleotide
caaaggcugaucaguuuaa

SEQ ID NO: 2781554 - RNA, 19 nt, Artificial Sequence
  Description of Artificial Sequence: Synthetic oligonucleotide
aggagacggaccaggaagu

SEQ ID NO: 2781555 - RNA, 19 nt, Artificial Sequence
  Description of Artificial Sequence: Synthetic oligonucleotide
cuaagggcaagaugagugu

SEQ ID NO: 2781556 - RNA, 19 nt, Artificial Sequence
  Description of Artificial Sequence: Synthetic oligonucleotide
agaugacugccugcagaag

SEQ ID NO: 2781557 - RNA, 19 nt, Artificial Sequence
  Description of Artificial Sequence: Synthetic oligonucleotide
ggggaagcugagcucuggg

SEQ ID NO: 2781558 - RNA, 19 nt, Artificial Sequence
  Description of Artificial Sequence: Synthetic oligonucleotide
cucuggccuggggugaugg

SEQ ID NO: 2781559 - RNA, 19 nt, Artificial Sequence
  Description of Artificial Sequence: Synthetic oligonucleotide
acccaggcugaggggaagc

SEQ ID NO: 2781560 - RNA, 19 nt, Artificial Sequence
  Description of Artificial Sequence: Synthetic oligonucleotide
gaagaauagaaaagacauu

SEQ ID NO: 2781561 - RNA, 19 nt, Artificial Sequence
  Description of Artificial Sequence: Synthetic oligonucleotide
agggaggcccagaagagaa

SEQ ID NO: 2781562 - RNA, 19 nt, Artificial Sequence
  Description of Artificial Sequence: Synthetic oligonucleotide
guucucaacuggucuugga

SEQ ID NO: 2781563 - RNA, 19 nt, Artificial Sequence
  Description of Artificial Sequence: Synthetic oligonucleotide
ccuggggugauggacaaac

SEQ ID NO: 2781564 - RNA, 19 nt, Artificial Sequence
  Description of Artificial Sequence: Synthetic oligonucleotide
gccacuggauggcaggggc

SEQ ID NO: 2781565 - RNA, 19 nt, Artificial Sequence
  Description of Artificial Sequence: Synthetic oligonucleotide
ucacccaggcugaggggaa

SEQ ID NO: 2781566 - RNA, 19 nt, Artificial Sequence
  Description of Artificial Sequence: Synthetic oligonucleotide
gugagagcaccaaccugag

SEQ ID NO: 2781567 - RNA, 19 nt, Artificial Sequence
  Description of Artificial Sequence: Synthetic oligonucleotide
cuggccuggggugauggac

SEQ ID NO: 2781568 - RNA, 19 nt, Artificial Sequence
  Description of Artificial Sequence: Synthetic oligonucleotide
augacugccugcagaagaa

SEQ ID NO: 2781569 - RNA, 19 nt, Artificial Sequence
  Description of Artificial Sequence: Synthetic oligonucleotide
gacugcucuggccuggggu

SEQ ID NO: 2781570 - RNA, 19 nt, Artificial Sequence
  Description of Artificial Sequence: Synthetic oligonucleotide
gaccgacacugaaaugcug

SEQ ID NO: 2781571 - RNA, 19 nt, Artificial Sequence
  Description of Artificial Sequence: Synthetic oligonucleotide
ggggugauggacaaacaga

SEQ ID NO: 2781572 - RNA, 19 nt, Artificial Sequence
  Description of Artificial Sequence: Synthetic oligonucleotide
aacuggucuuggaguacca

SEQ ID NO: 2781573 - RNA, 19 nt, Artificial Sequence
  Description of Artificial Sequence: Synthetic oligonucleotide
gacccagccagggccacug

SEQ ID NO: 2781574 - RNA, 19 nt, Artificial Sequence
  Description of Artificial Sequence: Synthetic oligonucleotide
aggcccagaagagaagaau

SEQ ID NO: 2781575 - RNA, 19 nt, Artificial Sequence
  Description of Artificial Sequence: Synthetic oligonucleotide
ccugaggagacggaccagg

SEQ ID NO: 2781576 - RNA, 19 nt, Artificial Sequence
  Description of Artificial Sequence: Synthetic oligonucleotide
gucacccaggcugagggga

SEQ ID NO: 2781577 - RNA, 19 nt, Artificial Sequence
  Description of Artificial Sequence: Synthetic oligonucleotide
cagccagggccacuggaug

SEQ ID NO: 2781578 - RNA, 19 nt, Artificial Sequence
  Description of Artificial Sequence: Synthetic oligonucleotide
gggaacacagacccagcca

SEQ ID NO: 2781579 - RNA, 19 nt, Artificial Sequence
  Description of Artificial Sequence: Synthetic oligonucleotide
ccuagagcuuucaagaagu

SEQ ID NO: 2781580 - RNA, 19 nt, Artificial Sequence
  Description of Artificial Sequence: Synthetic oligonucleotide
gacccuagaaggacccaca

SEQ ID NO: 2781581 - RNA, 19 nt, Artificial Sequence
  Description of Artificial Sequence: Synthetic oligonucleotide
gagccaacagggagccugc

SEQ ID NO: 2781582 - RNA, 19 nt, Artificial Sequence
  Description of Artificial Sequence: Synthetic oligonucleotide
cugugcuucuaagggcaag

SEQ ID NO: 2781583 - RNA, 19 nt, Artificial Sequence
  Description of Artificial Sequence: Synthetic oligonucleotide
gccaacagggagccugcgg

SEQ ID NO: 2781584 - RNA, 19 nt, Artificial Sequence
  Description of Artificial Sequence: Synthetic oligonucleotide
cuuguucucaacuggucuu

SEQ ID NO: 2781585 - RNA, 19 nt, Artificial Sequence
  Description of Artificial Sequence: Synthetic oligonucleotide
ccugcagaagaauccaaga

SEQ ID NO: 2781586 - RNA, 19 nt, Artificial Sequence
  Description of Artificial Sequence: Synthetic oligonucleotide
gccugcagaagaauccaag

SEQ ID NO: 2781587 - RNA, 19 nt, Artificial Sequence
  Description of Artificial Sequence: Synthetic oligonucleotide
cugcagaagaauccaagau

SEQ ID NO: 2781588 - RNA, 19 nt, Artificial Sequence
  Description of Artificial Sequence: Synthetic oligonucleotide
ccuagaaggacccacaguu

SEQ ID NO: 2781589 - RNA, 19 nt, Artificial Sequence
  Description of Artificial Sequence: Synthetic oligonucleotide
caagaagugagagcaccaa

SEQ ID NO: 2781590 - RNA, 19 nt, Artificial Sequence
  Description of Artificial Sequence: Synthetic oligonucleotide
ugggcccggcccugcaucc

SEQ ID NO: 2781591 - RNA, 19 nt, Artificial Sequence
  Description of Artificial Sequence: Synthetic oligonucleotide
aucugcagccugggcugcc

SEQ ID NO: 2781592 - RNA, 19 nt, Artificial Sequence
  Description of Artificial Sequence: Synthetic oligonucleotide
cugaggagacggaccagga

SEQ ID NO: 2781593 - RNA, 19 nt, Artificial Sequence
  Description of Artificial Sequence: Synthetic oligonucleotide
ucuggccuggggugaugga

SEQ ID NO: 2781594 - RNA, 19 nt, Artificial Sequence
  Description of Artificial Sequence: Synthetic oligonucleotide
gcuuguucucaacuggucu

SEQ ID NO: 2781595 - RNA, 19 nt, Artificial Sequence
  Description of Artificial Sequence: Synthetic oligonucleotide
gcugaucaguuuaaaaugu

SEQ ID NO: 2781596 - RNA, 19 nt, Artificial Sequence
  Description of Artificial Sequence: Synthetic oligonucleotide
ggauggcaggggcagauaa

SEQ ID NO: 2781597 - RNA, 19 nt, Artificial Sequence
  Description of Artificial Sequence: Synthetic oligonucleotide
acacuguauuucuguuuua

SEQ ID NO: 2781598 - RNA, 19 nt, Artificial Sequence
  Description of Artificial Sequence: Synthetic oligonucleotide
gugaugucacccaggcuga

SEQ ID NO: 2781599 - RNA, 19 nt, Artificial Sequence
  Description of Artificial Sequence: Synthetic oligonucleotide
cagggccacuggauggcag

SEQ ID NO: 2781600 - RNA, 19 nt, Artificial Sequence
  Description of Artificial Sequence: Synthetic oligonucleotide
cccugcaucccuuacaucu

SEQ ID NO: 2781601 - RNA, 19 nt, Artificial Sequence
  Description of Artificial Sequence: Synthetic oligonucleotide
ggacccacaguugggaaca

SEQ ID NO: 2781602 - RNA, 19 nt, Artificial Sequence
  Description of Artificial Sequence: Synthetic oligonucleotide
ggaggcccagaagagaaga

SEQ ID NO: 2781603 - RNA, 19 nt, Artificial Sequence
  Description of Artificial Sequence: Synthetic oligonucleotide
ugacugccugcagaagaau

SEQ ID NO: 2781604 - RNA, 19 nt, Artificial Sequence
  Description of Artificial Sequence: Synthetic oligonucleotide
gcaggggcagauaagaccu

SEQ ID NO: 2781605 - RNA, 19 nt, Artificial Sequence
  Description of Artificial Sequence: Synthetic oligonucleotide
uuugccccucugacugcuc

SEQ ID NO: 2781606 - RNA, 19 nt, Artificial Sequence
  Description of Artificial Sequence: Synthetic oligonucleotide
ggcugagcccucugggccc

SEQ ID NO: 2781607 - RNA, 19 nt, Artificial Sequence
  Description of Artificial Sequence: Synthetic oligonucleotide
cugacugcucuggccuggg

SEQ ID NO: 2781608 - RNA, 19 nt, Artificial Sequence
  Description of Artificial Sequence: Synthetic oligonucleotide
cugcuuguucucaacuggu

SEQ ID NO: 2781609 - RNA, 19 nt, Artificial Sequence
  Description of Artificial Sequence: Synthetic oligonucleotide
cugccugcagaagaaucca

SEQ ID NO: 2781610 - RNA, 19 nt, Artificial Sequence
  Description of Artificial Sequence: Synthetic oligonucleotide
cccugugcuucuaagggca

SEQ ID NO: 2781611 - RNA, 19 nt, Artificial Sequence
  Description of Artificial Sequence: Synthetic oligonucleotide
gggugauggacaaacagau

SEQ ID NO: 2781612 - RNA, 19 nt, Artificial Sequence
  Description of Artificial Sequence: Synthetic oligonucleotide
acagacccagccagggcca

SEQ ID NO: 2781613 - RNA, 19 nt, Artificial Sequence
  Description of Artificial Sequence: Synthetic oligonucleotide
ccaaccugaggagacggac

SEQ ID NO: 2781614 - RNA, 19 nt, Artificial Sequence
  Description of Artificial Sequence: Synthetic oligonucleotide
cccucugacugcucuggcc

SEQ ID NO: 2781615 - RNA, 19 nt, Artificial Sequence
  Description of Artificial Sequence: Synthetic oligonucleotide
ucugggcccggcccugcau

SEQ ID NO: 2781616 - RNA, 19 nt, Artificial Sequence
  Description of Artificial Sequence: Synthetic oligonucleotide
cucuaggcugagcccucug

SEQ ID NO: 2781617 - RNA, 19 nt, Artificial Sequence
  Description of Artificial Sequence: Synthetic oligonucleotide
ccgacacugaaaugcugug

SEQ ID NO: 2781618 - RNA, 19 nt, Artificial Sequence
  Description of Artificial Sequence: Synthetic oligonucleotide
gggcccggugcuuugcccc

SEQ ID NO: 2781619 - RNA, 19 nt, Artificial Sequence
  Description of Artificial Sequence: Synthetic oligonucleotide
cuggggugauggacaaaca

SEQ ID NO: 2781620 - RNA, 19 nt, Artificial Sequence
  Description of Artificial Sequence: Synthetic oligonucleotide
gcaagaugaguguuacccu

SEQ ID NO: 2781621 - RNA, 19 nt, Artificial Sequence
  Description of Artificial Sequence: Synthetic oligonucleotide
aguugggaacacagaccca

SEQ ID NO: 2781622 - RNA, 19 nt, Artificial Sequence
  Description of Artificial Sequence: Synthetic oligonucleotide
gcaccaaccugaggagacg

SEQ ID NO: 2781623 - RNA, 19 nt, Artificial Sequence
  Description of Artificial Sequence: Synthetic oligonucleotide
cugggcccggcccugcauc

SEQ ID NO: 2781624 - RNA, 19 nt, Artificial Sequence
  Description of Artificial Sequence: Synthetic oligonucleotide
agccaacagggagccugcg

SEQ ID NO: 2781625 - RNA, 19 nt, Artificial Sequence
  Description of Artificial Sequence: Synthetic oligonucleotide
ggcccagaagagaagaaua

SEQ ID NO: 2781626 - RNA, 19 nt, Artificial Sequence
  Description of Artificial Sequence: Synthetic oligonucleotide
gccugcggggccuagagcu

SEQ ID NO: 2781627 - RNA, 19 nt, Artificial Sequence
  Description of Artificial Sequence: Synthetic oligonucleotide
accugaggagacggaccag

SEQ ID NO: 2781628 - RNA, 19 nt, Artificial Sequence
  Description of Artificial Sequence: Synthetic oligonucleotide
caucugcagccugggcugc

SEQ ID NO: 2781629 - RNA, 19 nt, Artificial Sequence
  Description of Artificial Sequence: Synthetic oligonucleotide
gaggcccagaagagaagaa

SEQ ID NO: 2781630 - RNA, 19 nt, Artificial Sequence
  Description of Artificial Sequence: Synthetic oligonucleotide
ggccuagagcuuucaagaa

SEQ ID NO: 2781631 - RNA, 19 nt, Artificial Sequence
  Description of Artificial Sequence: Synthetic oligonucleotide
gggcaagaugaguguuacc

SEQ ID NO: 2781632 - RNA, 19 nt, Artificial Sequence
  Description of Artificial Sequence: Synthetic oligonucleotide
caggggcagauaagaccuc

SEQ ID NO: 2781633 - RNA, 19 nt, Artificial Sequence
  Description of Artificial Sequence: Synthetic oligonucleotide
ugcggggccuagagcuuuc

SEQ ID NO: 2781634 - RNA, 19 nt, Artificial Sequence
  Description of Artificial Sequence: Synthetic oligonucleotide
ggggagggaggcccagaag

SEQ ID NO: 2781635 - RNA, 19 nt, Artificial Sequence
  Description of Artificial Sequence: Synthetic oligonucleotide
caucuccugcuuguucuca

SEQ ID NO: 2781636 - RNA, 19 nt, Artificial Sequence
  Description of Artificial Sequence: Synthetic oligonucleotide
gccccucugacugcucugg

SEQ ID NO: 2781637 - RNA, 19 nt, Artificial Sequence
  Description of Artificial Sequence: Synthetic oligonucleotide
accaaccugaggagacgga

SEQ ID NO: 2781638 - RNA, 19 nt, Artificial Sequence
  Description of Artificial Sequence: Synthetic oligonucleotide
ggggcagauaagaccuccc

SEQ ID NO: 2781639 - RNA, 19 nt, Artificial Sequence
  Description of Artificial Sequence: Synthetic oligonucleotide
aggcugaggggaagcugag

SEQ ID NO: 2781640 - RNA, 19 nt, Artificial Sequence
  Description of Artificial Sequence: Synthetic oligonucleotide
uggaagccucuaggcugag

SEQ ID NO: 2781641 - RNA, 19 nt, Artificial Sequence
  Description of Artificial Sequence: Synthetic oligonucleotide
gugcuuugccccucugacu

SEQ ID NO: 2781642 - RNA, 19 nt, Artificial Sequence
  Description of Artificial Sequence: Synthetic oligonucleotide
gggccacuggauggcaggg

SEQ ID NO: 2781643 - RNA, 19 nt, Artificial Sequence
  Description of Artificial Sequence: Synthetic oligonucleotide
acccacaguugggaacaca

SEQ ID NO: 2781644 - RNA, 19 nt, Artificial Sequence
  Description of Artificial Sequence: Synthetic oligonucleotide
gccugccuccaucuccugc

SEQ ID NO: 2781645 - RNA, 19 nt, Artificial Sequence
  Description of Artificial Sequence: Synthetic oligonucleotide
cugccugccuccaucuccu

SEQ ID NO: 2781646 - RNA, 19 nt, Artificial Sequence
  Description of Artificial Sequence: Synthetic oligonucleotide
ggaguaccaggagccaaca

SEQ ID NO: 2781647 - RNA, 19 nt, Artificial Sequence
  Description of Artificial Sequence: Synthetic oligonucleotide
uggauggcaggggcagaua

SEQ ID NO: 2781648 - RNA, 19 nt, Artificial Sequence
  Description of Artificial Sequence: Synthetic oligonucleotide
ggccacuggauggcagggg

SEQ ID NO: 2781649 - RNA, 19 nt, Artificial Sequence
  Description of Artificial Sequence: Synthetic oligonucleotide
ugccugccuccaucuccug

SEQ ID NO: 2781650 - RNA, 19 nt, Artificial Sequence
  Description of Artificial Sequence: Synthetic oligonucleotide
ugagcccucugggcccggc

SEQ ID NO: 2781651 - RNA, 19 nt, Artificial Sequence
  Description of Artificial Sequence: Synthetic oligonucleotide
gggcagauaagaccucccu

SEQ ID NO: 2781652 - RNA, 19 nt, Artificial Sequence
  Description of Artificial Sequence: Synthetic oligonucleotide
cugcagccugggcugccug

SEQ ID NO: 2781653 - RNA, 19 nt, Artificial Sequence
  Description of Artificial Sequence: Synthetic oligonucleotide
gaccucccugugcuucuaa

SEQ ID NO: 2781654 - RNA, 19 nt, Artificial Sequence
  Description of Artificial Sequence: Synthetic oligonucleotide
cacccaggcugaggggaag

SEQ ID NO: 2781655 - RNA, 19 nt, Artificial Sequence
  Description of Artificial Sequence: Synthetic oligonucleotide
gggaggcccagaagagaag

SEQ ID NO: 2781656 - RNA, 19 nt, Artificial Sequence
  Description of Artificial Sequence: Synthetic oligonucleotide
gacccacaguugggaacac

SEQ ID NO: 2781657 - RNA, 19 nt, Artificial Sequence
  Description of Artificial Sequence: Synthetic oligonucleotide
ccaucuccugcuuguucuc

SEQ ID NO: 2781658 - RNA, 19 nt, Artificial Sequence
  Description of Artificial Sequence: Synthetic oligonucleotide
gccagggccacuggauggc

SEQ ID NO: 2781659 - RNA, 19 nt, Artificial Sequence
  Description of Artificial Sequence: Synthetic oligonucleotide
ugcucuggccuggggugau

SEQ ID NO: 2781660 - RNA, 19 nt, Artificial Sequence
  Description of Artificial Sequence: Synthetic oligonucleotide
ggggcccggugcuuugccc

SEQ ID NO: 2781661 - RNA, 19 nt, Artificial Sequence
  Description of Artificial Sequence: Synthetic oligonucleotide
gcugagcccucugggcccg

SEQ ID NO: 2781662 - RNA, 19 nt, Artificial Sequence
  Description of Artificial Sequence: Synthetic oligonucleotide
ccucugacugcucuggccu

SEQ ID NO: 2781663 - RNA, 19 nt, Artificial Sequence
  Description of Artificial Sequence: Synthetic oligonucleotide
ggcugaggggaagcugagc

SEQ ID NO: 2781664 - RNA, 19 nt, Artificial Sequence
  Description of Artificial Sequence: Synthetic oligonucleotide
ggaagccucuaggcugagc

SEQ ID NO: 2781665 - RNA, 19 nt, Artificial Sequence
  Description of Artificial Sequence: Synthetic oligonucleotide
ggcccugcaucccuuacau

SEQ ID NO: 2781666 - RNA, 19 nt, Artificial Sequence
  Description of Artificial Sequence: Synthetic oligonucleotide
cccuuacaucugcagccug

SEQ ID NO: 2781667 - RNA, 19 nt, Artificial Sequence
  Description of Artificial Sequence: Synthetic oligonucleotide
cuuugccccucugacugcu

SEQ ID NO: 2781668 - RNA, 19 nt, Artificial Sequence
  Description of Artificial Sequence: Synthetic oligonucleotide
agacccagccagggccacu

SEQ ID NO: 2781669 - RNA, 19 nt, Artificial Sequence
  Description of Artificial Sequence: Synthetic oligonucleotide
cagacccuagaaggaccca

SEQ ID NO: 2781670 - RNA, 19 nt, Artificial Sequence
  Description of Artificial Sequence: Synthetic oligonucleotide
gugcuucuaagggcaagau

SEQ ID NO: 2781671 - RNA, 19 nt, Artificial Sequence
  Description of Artificial Sequence: Synthetic oligonucleotide
guguuacccucagccucuc

SEQ ID NO: 2781672 - RNA, 19 nt, Artificial Sequence
  Description of Artificial Sequence: Synthetic oligonucleotide
ccacuggauggcaggggca

SEQ ID NO: 2781673 - RNA, 19 nt, Artificial Sequence
  Description of Artificial Sequence: Synthetic oligonucleotide
cuggauggcaggggcagau

SEQ ID NO: 2781674 - RNA, 19 nt, Artificial Sequence
  Description of Artificial Sequence: Synthetic oligonucleotide
ccccucugacugcucuggc

SEQ ID NO: 2781675 - RNA, 19 nt, Artificial Sequence
  Description of Artificial Sequence: Synthetic oligonucleotide
ccaagauuggaagccucua

SEQ ID NO: 2781676 - RNA, 19 nt, Artificial Sequence
  Description of Artificial Sequence: Synthetic oligonucleotide
agaccucccugugcuucua

SEQ ID NO: 2781677 - RNA, 19 nt, Artificial Sequence
  Description of Artificial Sequence: Synthetic oligonucleotide
cgacacugaaaugcuguga

SEQ ID NO: 2781678 - RNA, 19 nt, Artificial Sequence
  Description of Artificial Sequence: Synthetic oligonucleotide
aggagccaacagggagccu

SEQ ID NO: 2781679 - RNA, 19 nt, Artificial Sequence
  Description of Artificial Sequence: Synthetic oligonucleotide
cucugggcccggcccugca

SEQ ID NO: 2781680 - RNA, 19 nt, Artificial Sequence
  Description of Artificial Sequence: Synthetic oligonucleotide
cugagcccucugggcccgg

SEQ ID NO: 2781681 - RNA, 19 nt, Artificial Sequence
  Description of Artificial Sequence: Synthetic oligonucleotide
gcccugcaucccuuacauc

SEQ ID NO: 2781682 - RNA, 19 nt, Artificial Sequence
  Description of Artificial Sequence: Synthetic oligonucleotide
ccugugcuucuaagggcaa

SEQ ID NO: 2781683 - RNA, 19 nt, Artificial Sequence
  Description of Artificial Sequence: Synthetic oligonucleotide
gggcugccugccuccaucu

SEQ ID NO: 2781684 - RNA, 19 nt, Artificial Sequence
  Description of Artificial Sequence: Synthetic oligonucleotide
ccggcccugcaucccuuac

SEQ ID NO: 2781685 - RNA, 19 nt, Artificial Sequence
  Description of Artificial Sequence: Synthetic oligonucleotide
ggagccugcggggccuaga

SEQ ID NO: 2781686 - RNA, 19 nt, Artificial Sequence
  Description of Artificial Sequence: Synthetic oligonucleotide
ccagccagggccacuggau

SEQ ID NO: 2781687 - RNA, 19 nt, Artificial Sequence
  Description of Artificial Sequence: Synthetic oligonucleotide
gccucuaggcugagcccuc

SEQ ID NO: 2781688 - RNA, 19 nt, Artificial Sequence
  Description of Artificial Sequence: Synthetic oligonucleotide
cggugcuuugccccucuga

SEQ ID NO: 2781689 - RNA, 19 nt, Artificial Sequence
  Description of Artificial Sequence: Synthetic oligonucleotide
gcucuggccuggggugaug

SEQ ID NO: 2781690 - RNA, 19 nt, Artificial Sequence
  Description of Artificial Sequence: Synthetic oligonucleotide
cagggagccugcggggccu

SEQ ID NO: 2781691 - RNA, 19 nt, Artificial Sequence
  Description of Artificial Sequence: Synthetic oligonucleotide
ggagacggaccaggaaguu

SEQ ID NO: 2781692 - RNA, 19 nt, Artificial Sequence
  Description of Artificial Sequence: Synthetic oligonucleotide
gggagccugcggggccuag

SEQ ID NO: 2781693 - RNA, 19 nt, Artificial Sequence
  Description of Artificial Sequence: Synthetic oligonucleotide
ggcccggugcuuugccccu

SEQ ID NO: 2781694 - RNA, 19 nt, Artificial Sequence
  Description of Artificial Sequence: Synthetic oligonucleotide
gggcccggcccugcauccc

SEQ ID NO: 2781695 - RNA, 19 nt, Artificial Sequence
  Description of Artificial Sequence: Synthetic oligonucleotide
ccggugcuuugccccucug

SEQ ID NO: 2781696 - RNA, 19 nt, Artificial Sequence
  Description of Artificial Sequence: Synthetic oligonucleotide
agggagccugcggggccua

SEQ ID NO: 2781697 - RNA, 19 nt, Artificial Sequence
  Description of Artificial Sequence: Synthetic oligonucleotide
ggcccggcccugcaucccu

SEQ ID NO: 2781698 - RNA, 19 nt, Artificial Sequence
  Description of Artificial Sequence: Synthetic oligonucleotide
cugccuccaucuccugcuu

SEQ ID NO: 2781699 - RNA, 19 nt, Artificial Sequence
  Description of Artificial Sequence: Synthetic oligonucleotide
cugcggggccuagagcuuu

SEQ ID NO: 2781700 - RNA, 19 nt, Artificial Sequence
  Description of Artificial Sequence: Synthetic oligonucleotide
cggcccugcaucccuuaca

SEQ ID NO: 2781701 - RNA, 19 nt, Artificial Sequence
  Description of Artificial Sequence: Synthetic oligonucleotide
gcggggccuagagcuuuca

SEQ ID NO: 2781702 - RNA, 19 nt, Artificial Sequence
  Description of Artificial Sequence: Synthetic oligonucleotide
cccucugggcccggcccug

SEQ ID NO: 2781703 - RNA, 19 nt, Artificial Sequence
  Description of Artificial Sequence: Synthetic oligonucleotide
gccuggggugauggacaaa

SEQ ID NO: 2781704 - RNA, 19 nt, Artificial Sequence
  Description of Artificial Sequence: Synthetic oligonucleotide
gcccggugcuuugccccuc

SEQ ID NO: 2781705 - RNA, 19 nt, Artificial Sequence
  Description of Artificial Sequence: Synthetic oligonucleotide
cggggccuagagcuuucaa

SEQ ID NO: 2781706 - RNA, 19 nt, Artificial Sequence
  Description of Artificial Sequence: Synthetic oligonucleotide
ccugcggggccuagagcuu

SEQ ID NO: 2781707 - RNA, 19 nt, Artificial Sequence
  Description of Artificial Sequence: Synthetic oligonucleotide
cccggcccugcaucccuua

SEQ ID NO: 2781708 - RNA, 19 nt, Artificial Sequence
  Description of Artificial Sequence: Synthetic oligonucleotide
ccucuaggcugagcccucu

SEQ ID NO: 2781709 - RNA, 19 nt, Artificial Sequence
  Description of Artificial Sequence: Synthetic oligonucleotide
cccggugcuuugccccucu

SEQ ID NO: 2781710 - RNA, 19 nt, Artificial Sequence
  Description of Artificial Sequence: Synthetic oligonucleotide
gcccggcccugcaucccuu

SEQ ID NO: 2781711 - RNA, 19 nt, Artificial Sequence
  Description of Artificial Sequence: Synthetic oligonucleotide
aaagaguaggccuugcagg

SEQ ID NO: 2781712 - RNA, 19 nt, Artificial Sequence
  Description of Artificial Sequence: Synthetic oligonucleotide
aacuugcugauuuaauagc

SEQ ID NO: 2781713 - RNA, 19 nt, Artificial Sequence
  Description of Artificial Sequence: Synthetic oligonucleotide
ucugauuuaacacuuguuc

SEQ ID NO: 2781714 - RNA, 19 nt, Artificial Sequence
  Description of Artificial Sequence: Synthetic oligonucleotide
aaaagaguaggccuugcag

SEQ ID NO: 2781715 - RNA, 19 nt, Artificial Sequence
  Description of Artificial Sequence: Synthetic oligonucleotide
aacuggacaacuucuggac

SEQ ID NO: 2781716 - RNA, 19 nt, Artificial Sequence
  Description of Artificial Sequence: Synthetic oligonucleotide
aguaaugacagucuuuucu

SEQ ID NO: 2781717 - RNA, 19 nt, Artificial Sequence
  Description of Artificial Sequence: Synthetic oligonucleotide
aacacuuguucuaaaagag

SEQ ID NO: 2781718 - RNA, 19 nt, Artificial Sequence
  Description of Artificial Sequence: Synthetic oligonucleotide
uguucuaaaagaguaggcc

SEQ ID NO: 2781719 - RNA, 19 nt, Artificial Sequence
  Description of Artificial Sequence: Synthetic oligonucleotide
uaacacuuguucuaaaaga

SEQ ID NO: 2781720 - RNA, 19 nt, Artificial Sequence
  Description of Artificial Sequence: Synthetic oligonucleotide
ucuuuucugauuuaacacu

SEQ ID NO: 2781721 - RNA, 19 nt, Artificial Sequence
  Description of Artificial Sequence: Synthetic oligonucleotide
uuugcuugacaauggagag

SEQ ID NO: 2781722 - RNA, 19 nt, Artificial Sequence
  Description of Artificial Sequence: Synthetic oligonucleotide
uguucuuugcuugacaaug

SEQ ID NO: 2781723 - RNA, 19 nt, Artificial Sequence
  Description of Artificial Sequence: Synthetic oligonucleotide
gaaacuggacaacuucugg

SEQ ID NO: 2781724 - RNA, 19 nt, Artificial Sequence
  Description of Artificial Sequence: Synthetic oligonucleotide
cuuguucuaaaagaguagg

SEQ ID NO: 2781725 - RNA, 19 nt, Artificial Sequence
  Description of Artificial Sequence: Synthetic oligonucleotide
uauguugucuguacuuucc

SEQ ID NO: 2781726 - RNA, 19 nt, Artificial Sequence
  Description of Artificial Sequence: Synthetic oligonucleotide
gacaauggagaguauguug

SEQ ID NO: 2781727 - RNA, 19 nt, Artificial Sequence
  Description of Artificial Sequence: Synthetic oligonucleotide
uugacaauggagaguaugu

SEQ ID NO: 2781728 - RNA, 19 nt, Artificial Sequence
  Description of Artificial Sequence: Synthetic oligonucleotide
aaacuggacaacuucugga

SEQ ID NO: 2781729 - RNA, 19 nt, Artificial Sequence
  Description of Artificial Sequence: Synthetic oligonucleotide
uucuguagaaacuggacaa

SEQ ID NO: 2781730 - RNA, 19 nt, Artificial Sequence
  Description of Artificial Sequence: Synthetic oligonucleotide
guaaugacagucuuuucug

SEQ ID NO: 2781731 - RNA, 19 nt, Artificial Sequence
  Description of Artificial Sequence: Synthetic oligonucleotide
uuuaacacuuguucuaaaa

SEQ ID NO: 2781732 - RNA, 19 nt, Artificial Sequence
  Description of Artificial Sequence: Synthetic oligonucleotide
uugcugauuuaauagcugc

SEQ ID NO: 2781733 - RNA, 19 nt, Artificial Sequence
  Description of Artificial Sequence: Synthetic oligonucleotide
gacuucucaguaaugacag

SEQ ID NO: 2781734 - RNA, 19 nt, Artificial Sequence
  Description of Artificial Sequence: Synthetic oligonucleotide
ucuuugcuugacaauggag

SEQ ID NO: 2781735 - RNA, 19 nt, Artificial Sequence
  Description of Artificial Sequence: Synthetic oligonucleotide
guugucuguacuuuccucc

SEQ ID NO: 2781736 - RNA, 19 nt, Artificial Sequence
  Description of Artificial Sequence: Synthetic oligonucleotide
uagaaacuggacaacuucu

SEQ ID NO: 2781737 - RNA, 19 nt, Artificial Sequence
  Description of Artificial Sequence: Synthetic oligonucleotide
uuguacuuguccuuguaca

SEQ ID NO: 2781738 - RNA, 19 nt, Artificial Sequence
  Description of Artificial Sequence: Synthetic oligonucleotide
cuuugcuugacaauggaga

SEQ ID NO: 2781739 - RNA, 19 nt, Artificial Sequence
  Description of Artificial Sequence: Synthetic oligonucleotide
ugauuuaauagcugcugcu

SEQ ID NO: 2781740 - RNA, 19 nt, Artificial Sequence
  Description of Artificial Sequence: Synthetic oligonucleotide
gucuuuucugauuuaacac

SEQ ID NO: 2781741 - RNA, 19 nt, Artificial Sequence
  Description of Artificial Sequence: Synthetic oligonucleotide
gaaagauccuguucuuugc

SEQ ID NO: 2781742 - RNA, 19 nt, Artificial Sequence
  Description of Artificial Sequence: Synthetic oligonucleotide
aaagauccuguucuuugcu

SEQ ID NO: 2781743 - RNA, 19 nt, Artificial Sequence
  Description of Artificial Sequence: Synthetic oligonucleotide
gauuuaauagcugcugcug

SEQ ID NO: 2781744 - RNA, 19 nt, Artificial Sequence
  Description of Artificial Sequence: Synthetic oligonucleotide
ugauuuaacacuuguucua

SEQ ID NO: 2781745 - RNA, 19 nt, Artificial Sequence
  Description of Artificial Sequence: Synthetic oligonucleotide
uccagcuugacguugccug

SEQ ID NO: 2781746 - RNA, 19 nt, Artificial Sequence
  Description of Artificial Sequence: Synthetic oligonucleotide
uugacguugccugugcugg

SEQ ID NO: 2781747 - RNA, 19 nt, Artificial Sequence
  Description of Artificial Sequence: Synthetic oligonucleotide
aaugacagucuuuucugau

SEQ ID NO: 2781748 - RNA, 19 nt, Artificial Sequence
  Description of Artificial Sequence: Synthetic oligonucleotide
auuuaauagcugcugcugu

SEQ ID NO: 2781749 - RNA, 19 nt, Artificial Sequence
  Description of Artificial Sequence: Synthetic oligonucleotide
guaggugcaggucuuggcg

SEQ ID NO: 2781750 - RNA, 19 nt, Artificial Sequence
  Description of Artificial Sequence: Synthetic oligonucleotide
ugcuucuugcacauccagg

SEQ ID NO: 2781751 - RNA, 19 nt, Artificial Sequence
  Description of Artificial Sequence: Synthetic oligonucleotide
cugauuuaauagcugcugc

SEQ ID NO: 2781752 - RNA, 19 nt, Artificial Sequence
  Description of Artificial Sequence: Synthetic oligonucleotide
uucuugcacauccagggcu

SEQ ID NO: 2781753 - RNA, 19 nt, Artificial Sequence
  Description of Artificial Sequence: Synthetic oligonucleotide
uucucaguaaugacagucu

SEQ ID NO: 2781754 - RNA, 19 nt, Artificial Sequence
  Description of Artificial Sequence: Synthetic oligonucleotide
ucuuugcuccaaaacuugc

SEQ ID NO: 2781755 - RNA, 19 nt, Artificial Sequence
  Description of Artificial Sequence: Synthetic oligonucleotide
uuuucugauuuaacacuug

SEQ ID NO: 2781756 - RNA, 19 nt, Artificial Sequence
  Description of Artificial Sequence: Synthetic oligonucleotide
uuguacaucuuguugcggu

SEQ ID NO: 2781757 - RNA, 19 nt, Artificial Sequence
  Description of Artificial Sequence: Synthetic oligonucleotide
uaaaagaguaggccuugca

SEQ ID NO: 2781758 - RNA, 19 nt, Artificial Sequence
  Description of Artificial Sequence: Synthetic oligonucleotide
ugcgccuggaaacugcugc

SEQ ID NO: 2781759 - RNA, 19 nt, Artificial Sequence
  Description of Artificial Sequence: Synthetic oligonucleotide
ugucuuugcuccaaaacuu

SEQ ID NO: 2781760 - RNA, 19 nt, Artificial Sequence
  Description of Artificial Sequence: Synthetic oligonucleotide
aacuucuggacuucucagu

SEQ ID NO: 2781761 - RNA, 19 nt, Artificial Sequence
  Description of Artificial Sequence: Synthetic oligonucleotide
ucaguaaugacagucuuuu

SEQ ID NO: 2781762 - RNA, 19 nt, Artificial Sequence
  Description of Artificial Sequence: Synthetic oligonucleotide
aauggagaguauguugucu

SEQ ID NO: 2781763 - RNA, 19 nt, Artificial Sequence
  Description of Artificial Sequence: Synthetic oligonucleotide
acccucguccuccagcucc

SEQ ID NO: 2781764 - RNA, 19 nt, Artificial Sequence
  Description of Artificial Sequence: Synthetic oligonucleotide
uucuaaaagaguaggccuu

SEQ ID NO: 2781765 - RNA, 19 nt, Artificial Sequence
  Description of Artificial Sequence: Synthetic oligonucleotide
gaguaggccuugcagggcg

SEQ ID NO: 2781766 - RNA, 19 nt, Artificial Sequence
  Description of Artificial Sequence: Synthetic oligonucleotide
auggagaguauguugucug

SEQ ID NO: 2781767 - RNA, 19 nt, Artificial Sequence
  Description of Artificial Sequence: Synthetic oligonucleotide
guagaaacuggacaacuuc

SEQ ID NO: 2781768 - RNA, 19 nt, Artificial Sequence
  Description of Artificial Sequence: Synthetic oligonucleotide
gaaacugcugcugucuuug

SEQ ID NO: 2781769 - RNA, 19 nt, Artificial Sequence
  Description of Artificial Sequence: Synthetic oligonucleotide
agauccuguucuuugcuug

SEQ ID NO: 2781770 - RNA, 19 nt, Artificial Sequence
  Description of Artificial Sequence: Synthetic oligonucleotide
gagaguauguugucuguac

SEQ ID NO: 2781771 - RNA, 19 nt, Artificial Sequence
  Description of Artificial Sequence: Synthetic oligonucleotide
aauagcugcugcuguuucu

SEQ ID NO: 2781772 - RNA, 19 nt, Artificial Sequence
  Description of Artificial Sequence: Synthetic oligonucleotide
ugacagucuuuucugauuu

SEQ ID NO: 2781773 - RNA, 19 nt, Artificial Sequence
  Description of Artificial Sequence: Synthetic oligonucleotide
uuguccuuguacaucuugu

SEQ ID NO: 2781774 - RNA, 19 nt, Artificial Sequence
  Description of Artificial Sequence: Synthetic oligonucleotide
uaggugcaggucuuggcgg

SEQ ID NO: 2781775 - RNA, 19 nt, Artificial Sequence
  Description of Artificial Sequence: Synthetic oligonucleotide
ugcuuggccaccuggcagg

SEQ ID NO: 2781776 - RNA, 19 nt, Artificial Sequence
  Description of Artificial Sequence: Synthetic oligonucleotide
cuugcugauuuaauagcug

SEQ ID NO: 2781777 - RNA, 19 nt, Artificial Sequence
  Description of Artificial Sequence: Synthetic oligonucleotide
ugcuugacaauggagagua

SEQ ID NO: 2781778 - RNA, 19 nt, Artificial Sequence
  Description of Artificial Sequence: Synthetic oligonucleotide
uaaugacagucuuuucuga

SEQ ID NO: 2781779 - RNA, 19 nt, Artificial Sequence
  Description of Artificial Sequence: Synthetic oligonucleotide
uguacaucuuguugcggug

SEQ ID NO: 2781780 - RNA, 19 nt, Artificial Sequence
  Description of Artificial Sequence: Synthetic oligonucleotide
cuugacaauggagaguaug

SEQ ID NO: 2781781 - RNA, 19 nt, Artificial Sequence
  Description of Artificial Sequence: Synthetic oligonucleotide
ucuaaaagaguaggccuug

SEQ ID NO: 2781782 - RNA, 19 nt, Artificial Sequence
  Description of Artificial Sequence: Synthetic oligonucleotide
uucuuugcuugacaaugga

SEQ ID NO: 2781783 - RNA, 19 nt, Artificial Sequence
  Description of Artificial Sequence: Synthetic oligonucleotide
cuguuucuguagaaacugg

SEQ ID NO: 2781784 - RNA, 19 nt, Artificial Sequence
  Description of Artificial Sequence: Synthetic oligonucleotide
uguagaaacuggacaacuu

SEQ ID NO: 2781785 - RNA, 19 nt, Artificial Sequence
  Description of Artificial Sequence: Synthetic oligonucleotide
cuuguacuuguccuuguac

SEQ ID NO: 2781786 - RNA, 19 nt, Artificial Sequence
  Description of Artificial Sequence: Synthetic oligonucleotide
cuuuccuccagcuugacgu

SEQ ID NO: 2781787 - RNA, 19 nt, Artificial Sequence
  Description of Artificial Sequence: Synthetic oligonucleotide
uucuggacuucucaguaau

SEQ ID NO: 2781788 - RNA, 19 nt, Artificial Sequence
  Description of Artificial Sequence: Synthetic oligonucleotide
agaguauguugucuguacu

SEQ ID NO: 2781789 - RNA, 19 nt, Artificial Sequence
  Description of Artificial Sequence: Synthetic oligonucleotide
uuuaauagcugcugcuguu

SEQ ID NO: 2781790 - RNA, 19 nt, Artificial Sequence
  Description of Artificial Sequence: Synthetic oligonucleotide
cugcuguuucuguagaaac

SEQ ID NO: 2781791 - RNA, 19 nt, Artificial Sequence
  Description of Artificial Sequence: Synthetic oligonucleotide
uugcuccaaaacuugcuga

SEQ ID NO: 2781792 - RNA, 19 nt, Artificial Sequence
  Description of Artificial Sequence: Synthetic oligonucleotide
guucuaaaagaguaggccu

SEQ ID NO: 2781793 - RNA, 19 nt, Artificial Sequence
  Description of Artificial Sequence: Synthetic oligonucleotide
ucuguacuuuccuccagcu

SEQ ID NO: 2781794 - RNA, 19 nt, Artificial Sequence
  Description of Artificial Sequence: Synthetic oligonucleotide
agcuugacguugccugugc

SEQ ID NO: 2781795 - RNA, 19 nt, Artificial Sequence
  Description of Artificial Sequence: Synthetic oligonucleotide
acuuguucuaaaagaguag

SEQ ID NO: 2781796 - RNA, 19 nt, Artificial Sequence
  Description of Artificial Sequence: Synthetic oligonucleotide
uggacuucucaguaaugac

SEQ ID NO: 2781797 - RNA, 19 nt, Artificial Sequence
  Description of Artificial Sequence: Synthetic oligonucleotide
guucuuugcuugacaaugg

SEQ ID NO: 2781798 - RNA, 19 nt, Artificial Sequence
  Description of Artificial Sequence: Synthetic oligonucleotide
uucugauuuaacacuuguu

SEQ ID NO: 2781799 - RNA, 19 nt, Artificial Sequence
  Description of Artificial Sequence: Synthetic oligonucleotide
uugucuguacuuuccucca

SEQ ID NO: 2781800 - RNA, 19 nt, Artificial Sequence
  Description of Artificial Sequence: Synthetic oligonucleotide
guccuuguacaucuuguug

SEQ ID NO: 2781801 - RNA, 19 nt, Artificial Sequence
  Description of Artificial Sequence: Synthetic oligonucleotide
cacuuguucuaaaagagua

SEQ ID NO: 2781802 - RNA, 19 nt, Artificial Sequence
  Description of Artificial Sequence: Synthetic oligonucleotide
uccgagguguccaggaggu

SEQ ID NO: 2781803 - RNA, 19 nt, Artificial Sequence
  Description of Artificial Sequence: Synthetic oligonucleotide
acuugcugauuuaauagcu

SEQ ID NO: 2781804 - RNA, 19 nt, Artificial Sequence
  Description of Artificial Sequence: Synthetic oligonucleotide
gauuuaacacuuguucuaa

SEQ ID NO: 2781805 - RNA, 19 nt, Artificial Sequence
  Description of Artificial Sequence: Synthetic oligonucleotide
ugucuguacuuuccuccag

SEQ ID NO: 2781806 - RNA, 19 nt, Artificial Sequence
  Description of Artificial Sequence: Synthetic oligonucleotide
ucuggacuucucaguaaug

SEQ ID NO: 2781807 - RNA, 19 nt, Artificial Sequence
  Description of Artificial Sequence: Synthetic oligonucleotide
acuucuggacuucucagua

SEQ ID NO: 2781808 - RNA, 19 nt, Artificial Sequence
  Description of Artificial Sequence: Synthetic oligonucleotide
ugugcuggccgccgaggcg

SEQ ID NO: 2781809 - RNA, 19 nt, Artificial Sequence
  Description of Artificial Sequence: Synthetic oligonucleotide
ucucaguaaugacagucuu

SEQ ID NO: 2781810 - RNA, 19 nt, Artificial Sequence
  Description of Artificial Sequence: Synthetic oligonucleotide
uaauagcugcugcuguuuc

SEQ ID NO: 2781811 - RNA, 19 nt, Artificial Sequence
  Description of Artificial Sequence: Synthetic oligonucleotide
agcuccucggggcuggccg

SEQ ID NO: 2781812 - RNA, 19 nt, Artificial Sequence
  Description of Artificial Sequence: Synthetic oligonucleotide
ugcacauccagggcuugcg

SEQ ID NO: 2781813 - RNA, 19 nt, Artificial Sequence
  Description of Artificial Sequence: Synthetic oligonucleotide
aagauccuguucuuugcuu

SEQ ID NO: 2781814 - RNA, 19 nt, Artificial Sequence
  Description of Artificial Sequence: Synthetic oligonucleotide
cuugacguugccugugcug

SEQ ID NO: 2781815 - RNA, 19 nt, Artificial Sequence
  Description of Artificial Sequence: Synthetic oligonucleotide
uguugucuguacuuuccuc

SEQ ID NO: 2781816 - RNA, 19 nt, Artificial Sequence
  Description of Artificial Sequence: Synthetic oligonucleotide
ugcuccaaaacuugcugau

SEQ ID NO: 2781817 - RNA, 19 nt, Artificial Sequence
  Description of Artificial Sequence: Synthetic oligonucleotide
cucgcggcagcccugguag

SEQ ID NO: 2781818 - RNA, 19 nt, Artificial Sequence
  Description of Artificial Sequence: Synthetic oligonucleotide
cugauuuaacacuuguucu

SEQ ID NO: 2781819 - RNA, 19 nt, Artificial Sequence
  Description of Artificial Sequence: Synthetic oligonucleotide
acuggacaacuucuggacu

SEQ ID NO: 2781820 - RNA, 19 nt, Artificial Sequence
  Description of Artificial Sequence: Synthetic oligonucleotide
uacaucuuguugcggugcu

SEQ ID NO: 2781821 - RNA, 19 nt, Artificial Sequence
  Description of Artificial Sequence: Synthetic oligonucleotide
gucuguacuuuccuccagc

SEQ ID NO: 2781822 - RNA, 19 nt, Artificial Sequence
  Description of Artificial Sequence: Synthetic oligonucleotide
guccgagguguccaggagg

SEQ ID NO: 2781823 - RNA, 19 nt, Artificial Sequence
  Description of Artificial Sequence: Synthetic oligonucleotide
agaaacuggacaacuucug

SEQ ID NO: 2781824 - RNA, 19 nt, Artificial Sequence
  Description of Artificial Sequence: Synthetic oligonucleotide
guugcggugcuucuugcac

SEQ ID NO: 2781825 - RNA, 19 nt, Artificial Sequence
  Description of Artificial Sequence: Synthetic oligonucleotide
cuuacacuggugcgccugg

SEQ ID NO: 2781826 - RNA, 19 nt, Artificial Sequence
  Description of Artificial Sequence: Synthetic oligonucleotide
ucgcucuucuucuucuugu

SEQ ID NO: 2781827 - RNA, 19 nt, Artificial Sequence
  Description of Artificial Sequence: Synthetic oligonucleotide
cagucuuuucugauuuaac

SEQ ID NO: 2781828 - RNA, 19 nt, Artificial Sequence
  Description of Artificial Sequence: Synthetic oligonucleotide
guauguugucuguacuuuc

SEQ ID NO: 2781829 - RNA, 19 nt, Artificial Sequence
  Description of Artificial Sequence: Synthetic oligonucleotide
uggagaguauguugucugu

SEQ ID NO: 2781830 - RNA, 19 nt, Artificial Sequence
  Description of Artificial Sequence: Synthetic oligonucleotide
ucuuguacuuguccuugua

SEQ ID NO: 2781831 - RNA, 19 nt, Artificial Sequence
  Description of Artificial Sequence: Synthetic oligonucleotide
agaguaggccuugcagggc

SEQ ID NO: 2781832 - RNA, 19 nt, Artificial Sequence
  Description of Artificial Sequence: Synthetic oligonucleotide
auuuaacacuuguucuaaa

SEQ ID NO: 2781833 - RNA, 19 nt, Artificial Sequence
  Description of Artificial Sequence: Synthetic oligonucleotide
cacuggugcgccuggaaac

SEQ ID NO: 2781834 - RNA, 19 nt, Artificial Sequence
  Description of Artificial Sequence: Synthetic oligonucleotide
aguauguugucuguacuuu

SEQ ID NO: 2781835 - RNA, 19 nt, Artificial Sequence
  Description of Artificial Sequence: Synthetic oligonucleotide
augacagucuuuucugauu

SEQ ID NO: 2781836 - RNA, 19 nt, Artificial Sequence
  Description of Artificial Sequence: Synthetic oligonucleotide
gauccuguucuuugcuuga

SEQ ID NO: 2781837 - RNA, 19 nt, Artificial Sequence
  Description of Artificial Sequence: Synthetic oligonucleotide
ccuuguacaucuuguugcg

SEQ ID NO: 2781838 - RNA, 19 nt, Artificial Sequence
  Description of Artificial Sequence: Synthetic oligonucleotide
uuaauagcugcugcuguuu

SEQ ID NO: 2781839 - RNA, 19 nt, Artificial Sequence
  Description of Artificial Sequence: Synthetic oligonucleotide
uccaaaacuugcugauuua

SEQ ID NO: 2781840 - RNA, 19 nt, Artificial Sequence
  Description of Artificial Sequence: Synthetic oligonucleotide
cuuguacaucuuguugcgg

SEQ ID NO: 2781841 - RNA, 19 nt, Artificial Sequence
  Description of Artificial Sequence: Synthetic oligonucleotide
cuaaaagaguaggccuugc

SEQ ID NO: 2781842 - RNA, 19 nt, Artificial Sequence
  Description of Artificial Sequence: Synthetic oligonucleotide
uguccuuguacaucuuguu

SEQ ID NO: 2781843 - RNA, 19 nt, Artificial Sequence
  Description of Artificial Sequence: Synthetic oligonucleotide
cugucuuugcuccaaaacu

SEQ ID NO: 2781844 - RNA, 19 nt, Artificial Sequence
  Description of Artificial Sequence: Synthetic oligonucleotide
uguugcggugcuucuugca

SEQ ID NO: 2781845 - RNA, 19 nt, Artificial Sequence
  Description of Artificial Sequence: Synthetic oligonucleotide
gagguguccaggaggucgg

SEQ ID NO: 2781846 - RNA, 19 nt, Artificial Sequence
  Description of Artificial Sequence: Synthetic oligonucleotide
ugguaggugcaggucuugg

SEQ ID NO: 2781847 - RNA, 19 nt, Artificial Sequence
  Description of Artificial Sequence: Synthetic oligonucleotide
aggucggcgucgucguccc

SEQ ID NO: 2781848 - RNA, 19 nt, Artificial Sequence
  Description of Artificial Sequence: Synthetic oligonucleotide
gucuuugcuccaaaacuug

SEQ ID NO: 2781849 - RNA, 19 nt, Artificial Sequence
  Description of Artificial Sequence: Synthetic oligonucleotide
gcugauuuaauagcugcug

SEQ ID NO: 2781850 - RNA, 19 nt, Artificial Sequence
  Description of Artificial Sequence: Synthetic oligonucleotide
uugcggugcuucuugcaca

SEQ ID NO: 2781851 - RNA, 19 nt, Artificial Sequence
  Description of Artificial Sequence: Synthetic oligonucleotide
uccccgaaagauccuguuc

SEQ ID NO: 2781852 - RNA, 19 nt, Artificial Sequence
  Description of Artificial Sequence: Synthetic oligonucleotide
agggcuugcgcugcuuggc

SEQ ID NO: 2781853 - RNA, 19 nt, Artificial Sequence
  Description of Artificial Sequence: Synthetic oligonucleotide
uggcagguggucucgcggc

SEQ ID NO: 2781854 - RNA, 19 nt, Artificial Sequence
  Description of Artificial Sequence: Synthetic oligonucleotide
gugcuucuugcacauccag

SEQ ID NO: 2781855 - RNA, 19 nt, Artificial Sequence
  Description of Artificial Sequence: Synthetic oligonucleotide
cuggcagguggucucgcgg

SEQ ID NO: 2781856 - RNA, 19 nt, Artificial Sequence
  Description of Artificial Sequence: Synthetic oligonucleotide
acacuuguucuaaaagagu

SEQ ID NO: 2781857 - RNA, 19 nt, Artificial Sequence
  Description of Artificial Sequence: Synthetic oligonucleotide
uggugcgccuggaaacugc

SEQ ID NO: 2781858 - RNA, 19 nt, Artificial Sequence
  Description of Artificial Sequence: Synthetic oligonucleotide
cuggacuucucaguaauga

SEQ ID NO: 2781859 - RNA, 19 nt, Artificial Sequence
  Description of Artificial Sequence: Synthetic oligonucleotide
agggcgauccccgaaagau

SEQ ID NO: 2781860 - RNA, 19 nt, Artificial Sequence
  Description of Artificial Sequence: Synthetic oligonucleotide
gcugucuuugcuccaaaac

SEQ ID NO: 2781861 - RNA, 19 nt, Artificial Sequence
  Description of Artificial Sequence: Synthetic oligonucleotide
caauggagaguauguuguc

SEQ ID NO: 2781862 - RNA, 19 nt, Artificial Sequence
  Description of Artificial Sequence: Synthetic oligonucleotide
guacaucuuguugcggugc

SEQ ID NO: 2781863 - RNA, 19 nt, Artificial Sequence
  Description of Artificial Sequence: Synthetic oligonucleotide
ggagcccagggccuggucg

SEQ ID NO: 2781864 - RNA, 19 nt, Artificial Sequence
  Description of Artificial Sequence: Synthetic oligonucleotide
ugcagggcgauccccgaaa

SEQ ID NO: 2781865 - RNA, 19 nt, Artificial Sequence
  Description of Artificial Sequence: Synthetic oligonucleotide
uggucgcucuucuucuucu

SEQ ID NO: 2781866 - RNA, 19 nt, Artificial Sequence
  Description of Artificial Sequence: Synthetic oligonucleotide
uugcuugacaauggagagu

SEQ ID NO: 2781867 - RNA, 19 nt, Artificial Sequence
  Description of Artificial Sequence: Synthetic oligonucleotide
ggcgauccccgaaagaucc

SEQ ID NO: 2781868 - RNA, 19 nt, Artificial Sequence
  Description of Artificial Sequence: Synthetic oligonucleotide
ugacaauggagaguauguu

SEQ ID NO: 2781869 - RNA, 19 nt, Artificial Sequence
  Description of Artificial Sequence: Synthetic oligonucleotide
ugcaggucuuggcggcccg

SEQ ID NO: 2781870 - RNA, 19 nt, Artificial Sequence
  Description of Artificial Sequence: Synthetic oligonucleotide
acguugccugugcuggccg

SEQ ID NO: 2781871 - RNA, 19 nt, Artificial Sequence
  Description of Artificial Sequence: Synthetic oligonucleotide
cuuuucugauuuaacacuu

SEQ ID NO: 2781872 - RNA, 19 nt, Artificial Sequence
  Description of Artificial Sequence: Synthetic oligonucleotide
acacuggugcgccuggaaa

SEQ ID NO: 2781873 - RNA, 19 nt, Artificial Sequence
  Description of Artificial Sequence: Synthetic oligonucleotide
uacacuggugcgccuggaa

SEQ ID NO: 2781874 - RNA, 19 nt, Artificial Sequence
  Description of Artificial Sequence: Synthetic oligonucleotide
gagcccagggccuggucgc

SEQ ID NO: 2781875 - RNA, 19 nt, Artificial Sequence
  Description of Artificial Sequence: Synthetic oligonucleotide
ggacuucucaguaaugaca

SEQ ID NO: 2781876 - RNA, 19 nt, Artificial Sequence
  Description of Artificial Sequence: Synthetic oligonucleotide
ugcugucuuugcuccaaaa

SEQ ID NO: 2781877 - RNA, 19 nt, Artificial Sequence
  Description of Artificial Sequence: Synthetic oligonucleotide
cgaaagauccuguucuuug

SEQ ID NO: 2781878 - RNA, 19 nt, Artificial Sequence
  Description of Artificial Sequence: Synthetic oligonucleotide
cagggcuugcgcugcuugg

SEQ ID NO: 2781879 - RNA, 19 nt, Artificial Sequence
  Description of Artificial Sequence: Synthetic oligonucleotide
gaguauguugucuguacuu

SEQ ID NO: 2781880 - RNA, 19 nt, Artificial Sequence
  Description of Artificial Sequence: Synthetic oligonucleotide
uguccaggaggucggcguc

SEQ ID NO: 2781881 - RNA, 19 nt, Artificial Sequence
  Description of Artificial Sequence: Synthetic oligonucleotide
cucguccuccgcauccgcc

SEQ ID NO: 2781882 - RNA, 19 nt, Artificial Sequence
  Description of Artificial Sequence: Synthetic oligonucleotide
gacguugccugugcuggcc

SEQ ID NO: 2781883 - RNA, 19 nt, Artificial Sequence
  Description of Artificial Sequence: Synthetic oligonucleotide
gucggcgucgucguccccg

SEQ ID NO: 2781884 - RNA, 19 nt, Artificial Sequence
  Description of Artificial Sequence: Synthetic oligonucleotide
aggaggucggcgucgucgu

SEQ ID NO: 2781885 - RNA, 19 nt, Artificial Sequence
  Description of Artificial Sequence: Synthetic oligonucleotide
caguaaugacagucuuuuc

SEQ ID NO: 2781886 - RNA, 19 nt, Artificial Sequence
  Description of Artificial Sequence: Synthetic oligonucleotide
acuggugcgccuggaaacu

SEQ ID NO: 2781887 - RNA, 19 nt, Artificial Sequence
  Description of Artificial Sequence: Synthetic oligonucleotide
ugacguugccugugcuggc

SEQ ID NO: 2781888 - RNA, 19 nt, Artificial Sequence
  Description of Artificial Sequence: Synthetic oligonucleotide
gcuggccgcacucucgccg

SEQ ID NO: 2781889 - RNA, 19 nt, Artificial Sequence
  Description of Artificial Sequence: Synthetic oligonucleotide
uggacaacuucuggacuuc

SEQ ID NO: 2781890 - RNA, 19 nt, Artificial Sequence
  Description of Artificial Sequence: Synthetic oligonucleotide
ucggcgucgucguccccgg

SEQ ID NO: 2781891 - RNA, 19 nt, Artificial Sequence
  Description of Artificial Sequence: Synthetic oligonucleotide
cugugcuggccgccgaggc

SEQ ID NO: 2781892 - RNA, 19 nt, Artificial Sequence
  Description of Artificial Sequence: Synthetic oligonucleotide
gucguccccggccucgucc

SEQ ID NO: 2781893 - RNA, 19 nt, Artificial Sequence
  Description of Artificial Sequence: Synthetic oligonucleotide
agcccugguaggugcaggu

SEQ ID NO: 2781894 - RNA, 19 nt, Artificial Sequence
  Description of Artificial Sequence: Synthetic oligonucleotide
ccuugcagggcgauccccg

SEQ ID NO: 2781895 - RNA, 19 nt, Artificial Sequence
  Description of Artificial Sequence: Synthetic oligonucleotide
cuggccgcacucucgccgc

SEQ ID NO: 2781896 - RNA, 19 nt, Artificial Sequence
  Description of Artificial Sequence: Synthetic oligonucleotide
agguggucucgcggcagcc

SEQ ID NO: 2781897 - RNA, 19 nt, Artificial Sequence
  Description of Artificial Sequence: Synthetic oligonucleotide
caaaacuugcugauuuaau

SEQ ID NO: 2781898 - RNA, 19 nt, Artificial Sequence
  Description of Artificial Sequence: Synthetic oligonucleotide
uugccugugcuggccgccg

SEQ ID NO: 2781899 - RNA, 19 nt, Artificial Sequence
  Description of Artificial Sequence: Synthetic oligonucleotide
cuccaaaacuugcugauuu

SEQ ID NO: 2781900 - RNA, 19 nt, Artificial Sequence
  Description of Artificial Sequence: Synthetic oligonucleotide
uugcacauccagggcuugc

SEQ ID NO: 2781901 - RNA, 19 nt, Artificial Sequence
  Description of Artificial Sequence: Synthetic oligonucleotide
cuggucgcucuucuucuuc

SEQ ID NO: 2781902 - RNA, 19 nt, Artificial Sequence
  Description of Artificial Sequence: Synthetic oligonucleotide
ucucgcggcagcccuggua

SEQ ID NO: 2781903 - RNA, 19 nt, Artificial Sequence
  Description of Artificial Sequence: Synthetic oligonucleotide
gugcuggccgccgaggcgc

SEQ ID NO: 2781904 - RNA, 19 nt, Artificial Sequence
  Description of Artificial Sequence: Synthetic oligonucleotide
cuucuggacuucucaguaa

SEQ ID NO: 2781905 - RNA, 19 nt, Artificial Sequence
  Description of Artificial Sequence: Synthetic oligonucleotide
guacuuuccuccagcuuga

SEQ ID NO: 2781906 - RNA, 19 nt, Artificial Sequence
  Description of Artificial Sequence: Synthetic oligonucleotide
gucuuggcggcccgccugc

SEQ ID NO: 2781907 - RNA, 19 nt, Artificial Sequence
  Description of Artificial Sequence: Synthetic oligonucleotide
gacagucuuuucugauuua

SEQ ID NO: 2781908 - RNA, 19 nt, Artificial Sequence
  Description of Artificial Sequence: Synthetic oligonucleotide
cgagguguccaggaggucg

SEQ ID NO: 2781909 - RNA, 19 nt, Artificial Sequence
  Description of Artificial Sequence: Synthetic oligonucleotide
cuccgcacccucguccucc

SEQ ID NO: 2781910 - RNA, 19 nt, Artificial Sequence
  Description of Artificial Sequence: Synthetic oligonucleotide
cggugcuucuugcacaucc

SEQ ID NO: 2781911 - RNA, 19 nt, Artificial Sequence
  Description of Artificial Sequence: Synthetic oligonucleotide
uugcagggcgauccccgaa

SEQ ID NO: 2781912 - RNA, 19 nt, Artificial Sequence
  Description of Artificial Sequence: Synthetic oligonucleotide
auccccgaaagauccuguu

SEQ ID NO: 2781913 - RNA, 19 nt, Artificial Sequence
  Description of Artificial Sequence: Synthetic oligonucleotide
ccuguucuuugcuugacaa

SEQ ID NO: 2781914 - RNA, 19 nt, Artificial Sequence
  Description of Artificial Sequence: Synthetic oligonucleotide
acucucgccgccgcccgcg

SEQ ID NO: 2781915 - RNA, 19 nt, Artificial Sequence
  Description of Artificial Sequence: Synthetic oligonucleotide
gccgccggagcccagggcc

SEQ ID NO: 2781916 - RNA, 19 nt, Artificial Sequence
  Description of Artificial Sequence: Synthetic oligonucleotide
ugcgcugcuuggccaccug

SEQ ID NO: 2781917 - RNA, 19 nt, Artificial Sequence
  Description of Artificial Sequence: Synthetic oligonucleotide
cuguagaaacuggacaacu

SEQ ID NO: 2781918 - RNA, 19 nt, Artificial Sequence
  Description of Artificial Sequence: Synthetic oligonucleotide
uuacacuggugcgccugga

SEQ ID NO: 2781919 - RNA, 19 nt, Artificial Sequence
  Description of Artificial Sequence: Synthetic oligonucleotide
gguccgagguguccaggag

SEQ ID NO: 2781920 - RNA, 19 nt, Artificial Sequence
  Description of Artificial Sequence: Synthetic oligonucleotide
uggucucgcggcagcccug

SEQ ID NO: 2781921 - RNA, 19 nt, Artificial Sequence
  Description of Artificial Sequence: Synthetic oligonucleotide
guugccugugcuggccgcc

SEQ ID NO: 2781922 - RNA, 19 nt, Artificial Sequence
  Description of Artificial Sequence: Synthetic oligonucleotide
agguguccaggaggucggc

SEQ ID NO: 2781923 - RNA, 19 nt, Artificial Sequence
  Description of Artificial Sequence: Synthetic oligonucleotide
cuggacaacuucuggacuu

SEQ ID NO: 2781924 - RNA, 19 nt, Artificial Sequence
  Description of Artificial Sequence: Synthetic oligonucleotide
ucgcggcagcccugguagg

SEQ ID NO: 2781925 - RNA, 19 nt, Artificial Sequence
  Description of Artificial Sequence: Synthetic oligonucleotide
accuggcagguggucucgc

SEQ ID NO: 2781926 - RNA, 19 nt, Artificial Sequence
  Description of Artificial Sequence: Synthetic oligonucleotide
ggcgucgucguccccggcc

SEQ ID NO: 2781927 - RNA, 19 nt, Artificial Sequence
  Description of Artificial Sequence: Synthetic oligonucleotide
ggucuuggcggcccgccug

SEQ ID NO: 2781928 - RNA, 19 nt, Artificial Sequence
  Description of Artificial Sequence: Synthetic oligonucleotide
ggccuggucgcucuucuuc

SEQ ID NO: 2781929 - RNA, 19 nt, Artificial Sequence
  Description of Artificial Sequence: Synthetic oligonucleotide
cuugcacauccagggcuug

SEQ ID NO: 2781930 - RNA, 19 nt, Artificial Sequence
  Description of Artificial Sequence: Synthetic oligonucleotide
cuccgcauccgccgccgcc

SEQ ID NO: 2781931 - RNA, 19 nt, Artificial Sequence
  Description of Artificial Sequence: Synthetic oligonucleotide
ggccucguccuccgcaucc

SEQ ID NO: 2781932 - RNA, 19 nt, Artificial Sequence
  Description of Artificial Sequence: Synthetic oligonucleotide
gguguccaggaggucggcg

SEQ ID NO: 2781933 - RNA, 19 nt, Artificial Sequence
  Description of Artificial Sequence: Synthetic oligonucleotide
guguccaggaggucggcgu

SEQ ID NO: 2781934 - RNA, 19 nt, Artificial Sequence
  Description of Artificial Sequence: Synthetic oligonucleotide
cucaguaaugacagucuuu

SEQ ID NO: 2781935 - RNA, 19 nt, Artificial Sequence
  Description of Artificial Sequence: Synthetic oligonucleotide
cuugcagggcgauccccga

SEQ ID NO: 2781936 - RNA, 19 nt, Artificial Sequence
  Description of Artificial Sequence: Synthetic oligonucleotide
caggucuuggcggcccgcc

SEQ ID NO: 2781937 - RNA, 19 nt, Artificial Sequence
  Description of Artificial Sequence: Synthetic oligonucleotide
ucuuggcggcccgccugcg

SEQ ID NO: 2781938 - RNA, 19 nt, Artificial Sequence
  Description of Artificial Sequence: Synthetic oligonucleotide
uccaggaggucggcgucgu

SEQ ID NO: 2781939 - RNA, 19 nt, Artificial Sequence
  Description of Artificial Sequence: Synthetic oligonucleotide
aggucuuggcggcccgccu

SEQ ID NO: 2781940 - RNA, 19 nt, Artificial Sequence
  Description of Artificial Sequence: Synthetic oligonucleotide
cacauccagggcuugcgcu

SEQ ID NO: 2781941 - RNA, 19 nt, Artificial Sequence
  Description of Artificial Sequence: Synthetic oligonucleotide
gcagggcgauccccgaaag

SEQ ID NO: 2781942 - RNA, 19 nt, Artificial Sequence
  Description of Artificial Sequence: Synthetic oligonucleotide
cuugcgcugcuuggccacc

SEQ ID NO: 2781943 - RNA, 19 nt, Artificial Sequence
  Description of Artificial Sequence: Synthetic oligonucleotide
gcacauccagggcuugcgc

SEQ ID NO: 2781944 - RNA, 19 nt, Artificial Sequence
  Description of Artificial Sequence: Synthetic oligonucleotide
uccgcacccucguccucca

SEQ ID NO: 2781945 - RNA, 19 nt, Artificial Sequence
  Description of Artificial Sequence: Synthetic oligonucleotide
caccuggcagguggucucg

SEQ ID NO: 2781946 - RNA, 19 nt, Artificial Sequence
  Description of Artificial Sequence: Synthetic oligonucleotide
ugccugugcuggccgccga

SEQ ID NO: 2781947 - RNA, 19 nt, Artificial Sequence
  Description of Artificial Sequence: Synthetic oligonucleotide
uacuuuccuccagcuugac

SEQ ID NO: 2781948 - RNA, 19 nt, Artificial Sequence
  Description of Artificial Sequence: Synthetic oligonucleotide
gcuugcgcugcuuggccac

SEQ ID NO: 2781949 - RNA, 19 nt, Artificial Sequence
  Description of Artificial Sequence: Synthetic oligonucleotide
uggccaccuggcagguggu

SEQ ID NO: 2781950 - RNA, 19 nt, Artificial Sequence
  Description of Artificial Sequence: Synthetic oligonucleotide
gcugcuguuucuguagaaa

SEQ ID NO: 2781951 - RNA, 19 nt, Artificial Sequence
  Description of Artificial Sequence: Synthetic oligonucleotide
gggcuugcgcugcuuggcc

SEQ ID NO: 2781952 - RNA, 19 nt, Artificial Sequence
  Description of Artificial Sequence: Synthetic oligonucleotide
cugguaggugcaggucuug

SEQ ID NO: 2781953 - RNA, 19 nt, Artificial Sequence
  Description of Artificial Sequence: Synthetic oligonucleotide
gcgcugcuuggccaccugg

SEQ ID NO: 2781954 - RNA, 19 nt, Artificial Sequence
  Description of Artificial Sequence: Synthetic oligonucleotide
ccaaaacuugcugauuuaa

SEQ ID NO: 2781955 - RNA, 19 nt, Artificial Sequence
  Description of Artificial Sequence: Synthetic oligonucleotide
gcugcuuggccaccuggca

SEQ ID NO: 2781956 - RNA, 19 nt, Artificial Sequence
  Description of Artificial Sequence: Synthetic oligonucleotide
cucggggcuggccgcacuc

SEQ ID NO: 2781957 - RNA, 19 nt, Artificial Sequence
  Description of Artificial Sequence: Synthetic oligonucleotide
cuggugcgccuggaaacug

SEQ ID NO: 2781958 - RNA, 19 nt, Artificial Sequence
  Description of Artificial Sequence: Synthetic oligonucleotide
ugcuggccgccgaggcgcc

SEQ ID NO: 2781959 - RNA, 19 nt, Artificial Sequence
  Description of Artificial Sequence: Synthetic oligonucleotide
ccuggcagguggucucgcg

SEQ ID NO: 2781960 - RNA, 19 nt, Artificial Sequence
  Description of Artificial Sequence: Synthetic oligonucleotide
ggucucgcggcagcccugg

SEQ ID NO: 2781961 - RNA, 19 nt, Artificial Sequence
  Description of Artificial Sequence: Synthetic oligonucleotide
ccuuacacuggugcgccug

SEQ ID NO: 2781962 - RNA, 19 nt, Artificial Sequence
  Description of Artificial Sequence: Synthetic oligonucleotide
gauccccgaaagauccugu

SEQ ID NO: 2781963 - RNA, 19 nt, Artificial Sequence
  Description of Artificial Sequence: Synthetic oligonucleotide
gggcuggccgcacucucgc

SEQ ID NO: 2781964 - RNA, 19 nt, Artificial Sequence
  Description of Artificial Sequence: Synthetic oligonucleotide
ggguccgagguguccagga

SEQ ID NO: 2781965 - RNA, 19 nt, Artificial Sequence
  Description of Artificial Sequence: Synthetic oligonucleotide
gcacucucgccgccgcccg

SEQ ID NO: 2781966 - RNA, 19 nt, Artificial Sequence
  Description of Artificial Sequence: Synthetic oligonucleotide
uggccgcacucucgccgcc

SEQ ID NO: 2781967 - RNA, 19 nt, Artificial Sequence
  Description of Artificial Sequence: Synthetic oligonucleotide
cuguucuuugcuugacaau

SEQ ID NO: 2781968 - RNA, 19 nt, Artificial Sequence
  Description of Artificial Sequence: Synthetic oligonucleotide
gcccuccgcacccucgucc

SEQ ID NO: 2781969 - RNA, 19 nt, Artificial Sequence
  Description of Artificial Sequence: Synthetic oligonucleotide
ggagaguauguugucugua

SEQ ID NO: 2781970 - RNA, 19 nt, Artificial Sequence
  Description of Artificial Sequence: Synthetic oligonucleotide
uugcgcugcuuggccaccu

SEQ ID NO: 2781971 - RNA, 19 nt, Artificial Sequence
  Description of Artificial Sequence: Synthetic oligonucleotide
aguaggccuugcagggcga

SEQ ID NO: 2781972 - RNA, 19 nt, Artificial Sequence
  Description of Artificial Sequence: Synthetic oligonucleotide
guggucucgcggcagcccu

SEQ ID NO: 2781973 - RNA, 19 nt, Artificial Sequence
  Description of Artificial Sequence: Synthetic oligonucleotide
ccccgaaagauccuguucu

SEQ ID NO: 2781974 - RNA, 19 nt, Artificial Sequence
  Description of Artificial Sequence: Synthetic oligonucleotide
gguggucucgcggcagccc

SEQ ID NO: 2781975 - RNA, 19 nt, Artificial Sequence
  Description of Artificial Sequence: Synthetic oligonucleotide
acaucuuguugcggugcuu

SEQ ID NO: 2781976 - RNA, 19 nt, Artificial Sequence
  Description of Artificial Sequence: Synthetic oligonucleotide
cagggcgauccccgaaaga

SEQ ID NO: 2781977 - RNA, 19 nt, Artificial Sequence
  Description of Artificial Sequence: Synthetic oligonucleotide
ucggggcuggccgcacucu

SEQ ID NO: 2781978 - RNA, 19 nt, Artificial Sequence
  Description of Artificial Sequence: Synthetic oligonucleotide
ccagggcuugcgcugcuug

SEQ ID NO: 2781979 - RNA, 19 nt, Artificial Sequence
  Description of Artificial Sequence: Synthetic oligonucleotide
cugcgcgccgcgccgccgc

SEQ ID NO: 2781980 - RNA, 19 nt, Artificial Sequence
  Description of Artificial Sequence: Synthetic oligonucleotide
uggcggcccgccugcgcgc

SEQ ID NO: 2781981 - RNA, 19 nt, Artificial Sequence
  Description of Artificial Sequence: Synthetic oligonucleotide
cuggccgccgaggcgccgc

SEQ ID NO: 2781982 - RNA, 19 nt, Artificial Sequence
  Description of Artificial Sequence: Synthetic oligonucleotide
cgcugcuuggccaccuggc

SEQ ID NO: 2781983 - RNA, 19 nt, Artificial Sequence
  Description of Artificial Sequence: Synthetic oligonucleotide
ccaccuggcagguggucuc

SEQ ID NO: 2781984 - RNA, 19 nt, Artificial Sequence
  Description of Artificial Sequence: Synthetic oligonucleotide
cucucgccgccgcccgcgg

SEQ ID NO: 2781985 - RNA, 19 nt, Artificial Sequence
  Description of Artificial Sequence: Synthetic oligonucleotide
ggugcaggucuuggcggcc

SEQ ID NO: 2781986 - RNA, 19 nt, Artificial Sequence
  Description of Artificial Sequence: Synthetic oligonucleotide
gcagguggucucgcggcag

SEQ ID NO: 2781987 - RNA, 19 nt, Artificial Sequence
  Description of Artificial Sequence: Synthetic oligonucleotide
gugcgccuggaaacugcug

SEQ ID NO: 2781988 - RNA, 19 nt, Artificial Sequence
  Description of Artificial Sequence: Synthetic oligonucleotide
cacucucgccgccgcccgc

SEQ ID NO: 2781989 - RNA, 19 nt, Artificial Sequence
  Description of Artificial Sequence: Synthetic oligonucleotide
ggccuugcagggcgauccc

SEQ ID NO: 2781990 - RNA, 19 nt, Artificial Sequence
  Description of Artificial Sequence: Synthetic oligonucleotide
ugcgcgccgcgccgccgcc

SEQ ID NO: 2781991 - RNA, 19 nt, Artificial Sequence
  Description of Artificial Sequence: Synthetic oligonucleotide
gccucguccuccgcauccg

SEQ ID NO: 2781992 - RNA, 19 nt, Artificial Sequence
  Description of Artificial Sequence: Synthetic oligonucleotide
ggcagguggucucgcggca

SEQ ID NO: 2781993 - RNA, 19 nt, Artificial Sequence
  Description of Artificial Sequence: Synthetic oligonucleotide
gcuccucggggcuggccgc

SEQ ID NO: 2781994 - RNA, 19 nt, Artificial Sequence
  Description of Artificial Sequence: Synthetic oligonucleotide
cgcacccucguccuccagc

SEQ ID NO: 2781995 - RNA, 19 nt, Artificial Sequence
  Description of Artificial Sequence: Synthetic oligonucleotide
gggguccgagguguccagg

SEQ ID NO: 2781996 - RNA, 19 nt, Artificial Sequence
  Description of Artificial Sequence: Synthetic oligonucleotide
ucgucguccccggccucgu

SEQ ID NO: 2781997 - RNA, 19 nt, Artificial Sequence
  Description of Artificial Sequence: Synthetic oligonucleotide
gggcgauccccgaaagauc

SEQ ID NO: 2781998 - RNA, 19 nt, Artificial Sequence
  Description of Artificial Sequence: Synthetic oligonucleotide
gccgccgcccuccgcaccc

SEQ ID NO: 2781999 - RNA, 19 nt, Artificial Sequence
  Description of Artificial Sequence: Synthetic oligonucleotide
gcacccucguccuccagcu

SEQ ID NO: 2782000 - RNA, 19 nt, Artificial Sequence
  Description of Artificial Sequence: Synthetic oligonucleotide
gaggcgccgccggagccca

SEQ ID NO: 2782001 - RNA, 19 nt, Artificial Sequence
  Description of Artificial Sequence: Synthetic oligonucleotide
gccuggaaacugcugcugu

SEQ ID NO: 2782002 - RNA, 19 nt, Artificial Sequence
  Description of Artificial Sequence: Synthetic oligonucleotide
ccuccagcuugacguugcc

SEQ ID NO: 2782003 - RNA, 19 nt, Artificial Sequence
  Description of Artificial Sequence: Synthetic oligonucleotide
cugcugucuuugcuccaaa

SEQ ID NO: 2782004 - RNA, 19 nt, Artificial Sequence
  Description of Artificial Sequence: Synthetic oligonucleotide
cuguacuuuccuccagcuu

SEQ ID NO: 2782005 - RNA, 19 nt, Artificial Sequence
  Description of Artificial Sequence: Synthetic oligonucleotide
gccuugcagggcgaucccc

SEQ ID NO: 2782006 - RNA, 19 nt, Artificial Sequence
  Description of Artificial Sequence: Synthetic oligonucleotide
cgauccccgaaagauccug

SEQ ID NO: 2782007 - RNA, 19 nt, Artificial Sequence
  Description of Artificial Sequence: Synthetic oligonucleotide
cagggccuggucgcucuuc

SEQ ID NO: 2782008 - RNA, 19 nt, Artificial Sequence
  Description of Artificial Sequence: Synthetic oligonucleotide
cacccucguccuccagcuc

SEQ ID NO: 2782009 - RNA, 19 nt, Artificial Sequence
  Description of Artificial Sequence: Synthetic oligonucleotide
ccucguccuccgcauccgc

SEQ ID NO: 2782010 - RNA, 19 nt, Artificial Sequence
  Description of Artificial Sequence: Synthetic oligonucleotide
gccgcacucucgccgccgc

SEQ ID NO: 2782011 - RNA, 19 nt, Artificial Sequence
  Description of Artificial Sequence: Synthetic oligonucleotide
cguugccugugcuggccgc

SEQ ID NO: 2782012 - RNA, 19 nt, Artificial Sequence
  Description of Artificial Sequence: Synthetic oligonucleotide
ggcuggccgcacucucgcc

SEQ ID NO: 2782013 - RNA, 19 nt, Artificial Sequence
  Description of Artificial Sequence: Synthetic oligonucleotide
cggcagcccugguaggugc

SEQ ID NO: 2782014 - RNA, 19 nt, Artificial Sequence
  Description of Artificial Sequence: Synthetic oligonucleotide
ggccgcacucucgccgccg

SEQ ID NO: 2782015 - RNA, 19 nt, Artificial Sequence
  Description of Artificial Sequence: Synthetic oligonucleotide
ggcgccgccggagcccagg

SEQ ID NO: 2782016 - RNA, 19 nt, Artificial Sequence
  Description of Artificial Sequence: Synthetic oligonucleotide
uccucggggcuggccgcac

SEQ ID NO: 2782017 - RNA, 19 nt, Artificial Sequence
  Description of Artificial Sequence: Synthetic oligonucleotide
gcuugacguugccugugcu

SEQ ID NO: 2782018 - RNA, 19 nt, Artificial Sequence
  Description of Artificial Sequence: Synthetic oligonucleotide
cccgccugcgcgccgcgcc

SEQ ID NO: 2782019 - RNA, 19 nt, Artificial Sequence
  Description of Artificial Sequence: Synthetic oligonucleotide
gcgccgccggagcccaggg

SEQ ID NO: 2782020 - RNA, 19 nt, Artificial Sequence
  Description of Artificial Sequence: Synthetic oligonucleotide
ccgaggcgccgccggagcc

SEQ ID NO: 2782021 - RNA, 19 nt, Artificial Sequence
  Description of Artificial Sequence: Synthetic oligonucleotide
cgcacucucgccgccgccc

SEQ ID NO: 2782022 - RNA, 19 nt, Artificial Sequence
  Description of Artificial Sequence: Synthetic oligonucleotide
cuccagcuugacguugccu

SEQ ID NO: 2782023 - RNA, 19 nt, Artificial Sequence
  Description of Artificial Sequence: Synthetic oligonucleotide
ggugcgccuggaaacugcu

SEQ ID NO: 2782024 - RNA, 19 nt, Artificial Sequence
  Description of Artificial Sequence: Synthetic oligonucleotide
ggacaacuucuggacuucu

SEQ ID NO: 2782025 - RNA, 19 nt, Artificial Sequence
  Description of Artificial Sequence: Synthetic oligonucleotide
gcgccuggaaacugcugcu

SEQ ID NO: 2782026 - RNA, 19 nt, Artificial Sequence
  Description of Artificial Sequence: Synthetic oligonucleotide
gcaggucuuggcggcccgc

SEQ ID NO: 2782027 - RNA, 19 nt, Artificial Sequence
  Description of Artificial Sequence: Synthetic oligonucleotide
gcgggguccgaggugucca

SEQ ID NO: 2782028 - RNA, 19 nt, Artificial Sequence
  Description of Artificial Sequence: Synthetic oligonucleotide
ggaggucggcgucgucguc

SEQ ID NO: 2782029 - RNA, 19 nt, Artificial Sequence
  Description of Artificial Sequence: Synthetic oligonucleotide
ccagcuugacguugccugu

SEQ ID NO: 2782030 - RNA, 19 nt, Artificial Sequence
  Description of Artificial Sequence: Synthetic oligonucleotide
ucgccgccgcccgcggggu

SEQ ID NO: 2782031 - RNA, 19 nt, Artificial Sequence
  Description of Artificial Sequence: Synthetic oligonucleotide
ccgcccgcgggguccgagg

SEQ ID NO: 2782032 - RNA, 19 nt, Artificial Sequence
  Description of Artificial Sequence: Synthetic oligonucleotide
ggcagcccugguaggugca

SEQ ID NO: 2782033 - RNA, 19 nt, Artificial Sequence
  Description of Artificial Sequence: Synthetic oligonucleotide
gccaccuggcagguggucu

SEQ ID NO: 2782034 - RNA, 19 nt, Artificial Sequence
  Description of Artificial Sequence: Synthetic oligonucleotide
gcgucgucguccccggccu

SEQ ID NO: 2782035 - RNA, 19 nt, Artificial Sequence
  Description of Artificial Sequence: Synthetic oligonucleotide
gcccugguaggugcagguc

SEQ ID NO: 2782036 - RNA, 19 nt, Artificial Sequence
  Description of Artificial Sequence: Synthetic oligonucleotide
gccggagcccagggccugg

SEQ ID NO: 2782037 - RNA, 19 nt, Artificial Sequence
  Description of Artificial Sequence: Synthetic oligonucleotide
cgccuggaaacugcugcug

SEQ ID NO: 2782038 - RNA, 19 nt, Artificial Sequence
  Description of Artificial Sequence: Synthetic oligonucleotide
ccgccugcgcgccgcgccg

SEQ ID NO: 2782039 - RNA, 19 nt, Artificial Sequence
  Description of Artificial Sequence: Synthetic oligonucleotide
cuccucggggcuggccgca

SEQ ID NO: 2782040 - RNA, 19 nt, Artificial Sequence
  Description of Artificial Sequence: Synthetic oligonucleotide
guaggccuugcagggcgau

SEQ ID NO: 2782041 - RNA, 19 nt, Artificial Sequence
  Description of Artificial Sequence: Synthetic oligonucleotide
ggucgcucuucuucuucuu

SEQ ID NO: 2782042 - RNA, 19 nt, Artificial Sequence
  Description of Artificial Sequence: Synthetic oligonucleotide
gcuccaaaacuugcugauu

SEQ ID NO: 2782043 - RNA, 19 nt, Artificial Sequence
  Description of Artificial Sequence: Synthetic oligonucleotide
gcccgcgggguccgaggug

SEQ ID NO: 2782044 - RNA, 19 nt, Artificial Sequence
  Description of Artificial Sequence: Synthetic oligonucleotide
cgggguccgagguguccag

SEQ ID NO: 2782045 - RNA, 19 nt, Artificial Sequence
  Description of Artificial Sequence: Synthetic oligonucleotide
ggucggcgucgucgucccc

SEQ ID NO: 2782046 - RNA, 19 nt, Artificial Sequence
  Description of Artificial Sequence: Synthetic oligonucleotide
ccgcacucucgccgccgcc

SEQ ID NO: 2782047 - RNA, 19 nt, Artificial Sequence
  Description of Artificial Sequence: Synthetic oligonucleotide
ggcccgccugcgcgccgcg

SEQ ID NO: 2782048 - RNA, 19 nt, Artificial Sequence
  Description of Artificial Sequence: Synthetic oligonucleotide
ccuccgcauccgccgccgc

SEQ ID NO: 2782049 - RNA, 19 nt, Artificial Sequence
  Description of Artificial Sequence: Synthetic oligonucleotide
ggccaccuggcaggugguc

SEQ ID NO: 2782050 - RNA, 19 nt, Artificial Sequence
  Description of Artificial Sequence: Synthetic oligonucleotide
gcuggccgccgaggcgccg

SEQ ID NO: 2782051 - RNA, 19 nt, Artificial Sequence
  Description of Artificial Sequence: Synthetic oligonucleotide
gccugcgcgccgcgccgcc

SEQ ID NO: 2782052 - RNA, 19 nt, Artificial Sequence
  Description of Artificial Sequence: Synthetic oligonucleotide
ggcggcccgccugcgcgcc

SEQ ID NO: 2782053 - RNA, 19 nt, Artificial Sequence
  Description of Artificial Sequence: Synthetic oligonucleotide
cccgaaagauccuguucuu

SEQ ID NO: 2782054 - RNA, 19 nt, Artificial Sequence
  Description of Artificial Sequence: Synthetic oligonucleotide
ggccgccgaggcgccgccg

SEQ ID NO: 2782055 - RNA, 19 nt, Artificial Sequence
  Description of Artificial Sequence: Synthetic oligonucleotide
ccugcgcgccgcgccgccg

SEQ ID NO: 2782056 - RNA, 19 nt, Artificial Sequence
  Description of Artificial Sequence: Synthetic oligonucleotide
ccgaaagauccuguucuuu

SEQ ID NO: 2782057 - RNA, 19 nt, Artificial Sequence
  Description of Artificial Sequence: Synthetic oligonucleotide
ccaggaggucggcgucguc

SEQ ID NO: 2782058 - RNA, 19 nt, Artificial Sequence
  Description of Artificial Sequence: Synthetic oligonucleotide
ccuccgcacccucguccuc

SEQ ID NO: 2782059 - RNA, 19 nt, Artificial Sequence
  Description of Artificial Sequence: Synthetic oligonucleotide
gccgcccgcgggguccgag

SEQ ID NO: 2782060 - RNA, 19 nt, Artificial Sequence
  Description of Artificial Sequence: Synthetic oligonucleotide
ccgagguguccaggagguc

SEQ ID NO: 2782061 - RNA, 19 nt, Artificial Sequence
  Description of Artificial Sequence: Synthetic oligonucleotide
cccagggccuggucgcucu

SEQ ID NO: 2782062 - RNA, 19 nt, Artificial Sequence
  Description of Artificial Sequence: Synthetic oligonucleotide
gucucgcggcagcccuggu

SEQ ID NO: 2782063 - RNA, 19 nt, Artificial Sequence
  Description of Artificial Sequence: Synthetic oligonucleotide
gcggugcuucuugcacauc

SEQ ID NO: 2782064 - RNA, 19 nt, Artificial Sequence
  Description of Artificial Sequence: Synthetic oligonucleotide
cccgcgggguccgaggugu

SEQ ID NO: 2782065 - RNA, 19 nt, Artificial Sequence
  Description of Artificial Sequence: Synthetic oligonucleotide
ccagcuccucggggcuggc

SEQ ID NO: 2782066 - RNA, 19 nt, Artificial Sequence
  Description of Artificial Sequence: Synthetic oligonucleotide
gcuugacaauggagaguau

SEQ ID NO: 2782067 - RNA, 19 nt, Artificial Sequence
  Description of Artificial Sequence: Synthetic oligonucleotide
gcgauccccgaaagauccu

SEQ ID NO: 2782068 - RNA, 19 nt, Artificial Sequence
  Description of Artificial Sequence: Synthetic oligonucleotide
gcccagggccuggucgcuc

SEQ ID NO: 2782069 - RNA, 19 nt, Artificial Sequence
  Description of Artificial Sequence: Synthetic oligonucleotide
ccgcacccucguccuccag

SEQ ID NO: 2782070 - RNA, 19 nt, Artificial Sequence
  Description of Artificial Sequence: Synthetic oligonucleotide
cgccgccggagcccagggc

SEQ ID NO: 2782071 - RNA, 19 nt, Artificial Sequence
  Description of Artificial Sequence: Synthetic oligonucleotide
ccuggucgcucuucuucuu

SEQ ID NO: 2782072 - RNA, 19 nt, Artificial Sequence
  Description of Artificial Sequence: Synthetic oligonucleotide
aggcgccgccggagcccag

SEQ ID NO: 2782073 - RNA, 19 nt, Artificial Sequence
  Description of Artificial Sequence: Synthetic oligonucleotide
cgucgucguccccggccuc

SEQ ID NO: 2782074 - RNA, 19 nt, Artificial Sequence
  Description of Artificial Sequence: Synthetic oligonucleotide
ccggccucguccuccgcau

SEQ ID NO: 2782075 - RNA, 19 nt, Artificial Sequence
  Description of Artificial Sequence: Synthetic oligonucleotide
gggccuggucgcucuucuu

SEQ ID NO: 2782076 - RNA, 19 nt, Artificial Sequence
  Description of Artificial Sequence: Synthetic oligonucleotide
ccgcgggguccgagguguc

SEQ ID NO: 2782077 - RNA, 19 nt, Artificial Sequence
  Description of Artificial Sequence: Synthetic oligonucleotide
cggccucguccuccgcauc

SEQ ID NO: 2782078 - RNA, 19 nt, Artificial Sequence
  Description of Artificial Sequence: Synthetic oligonucleotide
gcccgccugcgcgccgcgc

SEQ ID NO: 2782079 - RNA, 19 nt, Artificial Sequence
  Description of Artificial Sequence: Synthetic oligonucleotide
ccgccggagcccagggccu

SEQ ID NO: 2782080 - RNA, 19 nt, Artificial Sequence
  Description of Artificial Sequence: Synthetic oligonucleotide
cgcccuccgcacccucguc

SEQ ID NO: 2782081 - RNA, 19 nt, Artificial Sequence
  Description of Artificial Sequence: Synthetic oligonucleotide
cgccggagcccagggccug

SEQ ID NO: 2782082 - RNA, 19 nt, Artificial Sequence
  Description of Artificial Sequence: Synthetic oligonucleotide
cggcccgccugcgcgccgc

SEQ ID NO: 2782083 - RNA, 19 nt, Artificial Sequence
  Description of Artificial Sequence: Synthetic oligonucleotide
cggcgucgucguccccggc

SEQ ID NO: 2782084 - RNA, 19 nt, Artificial Sequence
  Description of Artificial Sequence: Synthetic oligonucleotide
ccgcccuccgcacccucgu

SEQ ID NO: 2782085 - RNA, 19 nt, Artificial Sequence
  Description of Artificial Sequence: Synthetic oligonucleotide
ccgccgaggcgccgccgga

SEQ ID NO: 2782086 - RNA, 19 nt, Artificial Sequence
  Description of Artificial Sequence: Synthetic oligonucleotide
cgcggcagcccugguaggu

SEQ ID NO: 2782087 - RNA, 19 nt, Artificial Sequence
  Description of Artificial Sequence: Synthetic oligonucleotide
cgccgcccuccgcacccuc

SEQ ID NO: 2782088 - RNA, 19 nt, Artificial Sequence
  Description of Artificial Sequence: Synthetic oligonucleotide
cgcccgcgggguccgaggu

SEQ ID NO: 2782089 - RNA, 19 nt, Artificial Sequence
  Description of Artificial Sequence: Synthetic oligonucleotide
gcgccgcgccgccgcccuc

SEQ ID NO: 2782090 - RNA, 19 nt, Artificial Sequence
  Description of Artificial Sequence: Synthetic oligonucleotide
ccggagcccagggccuggu

SEQ ID NO: 2782091 - RNA, 19 nt, Artificial Sequence
  Description of Artificial Sequence: Synthetic oligonucleotide
ccagggccuggucgcucuu

SEQ ID NO: 2782092 - RNA, 19 nt, Artificial Sequence
  Description of Artificial Sequence: Synthetic oligonucleotide
cgcgccgcgccgccgcccu

SEQ ID NO: 2782093 - RNA, 19 nt, Artificial Sequence
  Description of Artificial Sequence: Synthetic oligonucleotide
ccgccgcccuccgcacccu

SEQ ID NO: 2782094 - RNA, 19 nt, Artificial Sequence
  Description of Artificial Sequence: Synthetic oligonucleotide
cgccgcccgcgggguccga

SEQ ID NO: 2782095 - RNA, 19 nt, Artificial Sequence
  Description of Artificial Sequence: Synthetic oligonucleotide
aaggcaucagaguacuggc

SEQ ID NO: 2782096 - RNA, 19 nt, Artificial Sequence
  Description of Artificial Sequence: Synthetic oligonucleotide
uugacuacugaccuguucc

SEQ ID NO: 2782097 - RNA, 19 nt, Artificial Sequence
  Description of Artificial Sequence: Synthetic oligonucleotide
aggcaaauuguucaggugg

SEQ ID NO: 2782098 - RNA, 19 nt, Artificial Sequence
  Description of Artificial Sequence: Synthetic oligonucleotide
aaauuguucaggugggcag

SEQ ID NO: 2782099 - RNA, 19 nt, Artificial Sequence
  Description of Artificial Sequence: Synthetic oligonucleotide
uguguuggcagccaagaag

SEQ ID NO: 2782100 - RNA, 19 nt, Artificial Sequence
  Description of Artificial Sequence: Synthetic oligonucleotide
ucugggaugauauucccag

SEQ ID NO: 2782101 - RNA, 19 nt, Artificial Sequence
  Description of Artificial Sequence: Synthetic oligonucleotide
ucaguaggcaaauuguuca

SEQ ID NO: 2782102 - RNA, 19 nt, Artificial Sequence
  Description of Artificial Sequence: Synthetic oligonucleotide
gaugauauucccagguugg

SEQ ID NO: 2782103 - RNA, 19 nt, Artificial Sequence
  Description of Artificial Sequence: Synthetic oligonucleotide
uggacuuuagauucugucc

SEQ ID NO: 2782104 - RNA, 19 nt, Artificial Sequence
  Description of Artificial Sequence: Synthetic oligonucleotide
ugagccuugacuacugacc

SEQ ID NO: 2782105 - RNA, 19 nt, Artificial Sequence
  Description of Artificial Sequence: Synthetic oligonucleotide
ucagaguacuggcugacag

SEQ ID NO: 2782106 - RNA, 19 nt, Artificial Sequence
  Description of Artificial Sequence: Synthetic oligonucleotide
uaugugaccccacagguuc

SEQ ID NO: 2782107 - RNA, 19 nt, Artificial Sequence
  Description of Artificial Sequence: Synthetic oligonucleotide
agcccagccucucauaugc

SEQ ID NO: 2782108 - RNA, 19 nt, Artificial Sequence
  Description of Artificial Sequence: Synthetic oligonucleotide
ucuaugugaccccacaggu

SEQ ID NO: 2782109 - RNA, 19 nt, Artificial Sequence
  Description of Artificial Sequence: Synthetic oligonucleotide
uuagauucuguccagccau

SEQ ID NO: 2782110 - RNA, 19 nt, Artificial Sequence
  Description of Artificial Sequence: Synthetic oligonucleotide
uuuagauucuguccagcca

SEQ ID NO: 2782111 - RNA, 19 nt, Artificial Sequence
  Description of Artificial Sequence: Synthetic oligonucleotide
gagucuggacuuuagauuc

SEQ ID NO: 2782112 - RNA, 19 nt, Artificial Sequence
  Description of Artificial Sequence: Synthetic oligonucleotide
ucauccagggauguguugg

SEQ ID NO: 2782113 - RNA, 19 nt, Artificial Sequence
  Description of Artificial Sequence: Synthetic oligonucleotide
uuuucgcucucguucaucc

SEQ ID NO: 2782114 - RNA, 19 nt, Artificial Sequence
  Description of Artificial Sequence: Synthetic oligonucleotide
cuuuagauucuguccagcc

SEQ ID NO: 2782115 - RNA, 19 nt, Artificial Sequence
  Description of Artificial Sequence: Synthetic oligonucleotide
ugcucaguaggcaaauugu

SEQ ID NO: 2782116 - RNA, 19 nt, Artificial Sequence
  Description of Artificial Sequence: Synthetic oligonucleotide
ucggcuuccacuuuucgcu

SEQ ID NO: 2782117 - RNA, 19 nt, Artificial Sequence
  Description of Artificial Sequence: Synthetic oligonucleotide
uucaggaccugccuguggc

SEQ ID NO: 2782118 - RNA, 19 nt, Artificial Sequence
  Description of Artificial Sequence: Synthetic oligonucleotide
agcggcucaacccuccagc

SEQ ID NO: 2782119 - RNA, 19 nt, Artificial Sequence
  Description of Artificial Sequence: Synthetic oligonucleotide
gucaaaguggcccacugug

SEQ ID NO: 2782120 - RNA, 19 nt, Artificial Sequence
  Description of Artificial Sequence: Synthetic oligonucleotide
caacccuccagccacauug

SEQ ID NO: 2782121 - RNA, 19 nt, Artificial Sequence
  Description of Artificial Sequence: Synthetic oligonucleotide
ugggaugauauucccaggu

SEQ ID NO: 2782122 - RNA, 19 nt, Artificial Sequence
  Description of Artificial Sequence: Synthetic oligonucleotide
aauaagcccagccucucau

SEQ ID NO: 2782123 - RNA, 19 nt, Artificial Sequence
  Description of Artificial Sequence: Synthetic oligonucleotide
aguuccugggcuguguccc

SEQ ID NO: 2782124 - RNA, 19 nt, Artificial Sequence
  Description of Artificial Sequence: Synthetic oligonucleotide
ugauauucccagguugggg

SEQ ID NO: 2782125 - RNA, 19 nt, Artificial Sequence
  Description of Artificial Sequence: Synthetic oligonucleotide
cacccguuggucaaagugg

SEQ ID NO: 2782126 - RNA, 19 nt, Artificial Sequence
  Description of Artificial Sequence: Synthetic oligonucleotide
agcaggucaucccggagac

SEQ ID NO: 2782127 - RNA, 19 nt, Artificial Sequence
  Description of Artificial Sequence: Synthetic oligonucleotide
cacagguucucccuggacc

SEQ ID NO: 2782128 - RNA, 19 nt, Artificial Sequence
  Description of Artificial Sequence: Synthetic oligonucleotide
acuuuagauucuguccagc

SEQ ID NO: 2782129 - RNA, 19 nt, Artificial Sequence
  Description of Artificial Sequence: Synthetic oligonucleotide
uucuguccagccauccuag

SEQ ID NO: 2782130 - RNA, 19 nt, Artificial Sequence
  Description of Artificial Sequence: Synthetic oligonucleotide
ugcucccuccacuugagcc

SEQ ID NO: 2782131 - RNA, 19 nt, Artificial Sequence
  Description of Artificial Sequence: Synthetic oligonucleotide
ugugugcugggccagcgug

SEQ ID NO: 2782132 - RNA, 19 nt, Artificial Sequence
  Description of Artificial Sequence: Synthetic oligonucleotide
agccacauuggccacacca

SEQ ID NO: 2782133 - RNA, 19 nt, Artificial Sequence
  Description of Artificial Sequence: Synthetic oligonucleotide
aagccgugagccuugacua

SEQ ID NO: 2782134 - RNA, 19 nt, Artificial Sequence
  Description of Artificial Sequence: Synthetic oligonucleotide
cucaguaggcaaauuguuc

SEQ ID NO: 2782135 - RNA, 19 nt, Artificial Sequence
  Description of Artificial Sequence: Synthetic oligonucleotide
gacuuuagauucuguccag

SEQ ID NO: 2782136 - RNA, 19 nt, Artificial Sequence
  Description of Artificial Sequence: Synthetic oligonucleotide
ucucauaugcucccuccac

SEQ ID NO: 2782137 - RNA, 19 nt, Artificial Sequence
  Description of Artificial Sequence: Synthetic oligonucleotide
caggucaucccggagacgg

SEQ ID NO: 2782138 - RNA, 19 nt, Artificial Sequence
  Description of Artificial Sequence: Synthetic oligonucleotide
uucggcuuccacuuuucgc

SEQ ID NO: 2782139 - RNA, 19 nt, Artificial Sequence
  Description of Artificial Sequence: Synthetic oligonucleotide
uugucuaugugaccccaca

SEQ ID NO: 2782140 - RNA, 19 nt, Artificial Sequence
  Description of Artificial Sequence: Synthetic oligonucleotide
aguaggcaaauuguucagg

SEQ ID NO: 2782141 - RNA, 19 nt, Artificial Sequence
  Description of Artificial Sequence: Synthetic oligonucleotide
ucucguucauccagggaug

SEQ ID NO: 2782142 - RNA, 19 nt, Artificial Sequence
  Description of Artificial Sequence: Synthetic oligonucleotide
gauggcauggacuucggcu

SEQ ID NO: 2782143 - RNA, 19 nt, Artificial Sequence
  Description of Artificial Sequence: Synthetic oligonucleotide
ggaugauauucccagguug

SEQ ID NO: 2782144 - RNA, 19 nt, Artificial Sequence
  Description of Artificial Sequence: Synthetic oligonucleotide
auccuagucggcuuguccu

SEQ ID NO: 2782145 - RNA, 19 nt, Artificial Sequence
  Description of Artificial Sequence: Synthetic oligonucleotide
cuggacuuuagauucuguc

SEQ ID NO: 2782146 - RNA, 19 nt, Artificial Sequence
  Description of Artificial Sequence: Synthetic oligonucleotide
uccagggauguguuggcag

SEQ ID NO: 2782147 - RNA, 19 nt, Artificial Sequence
  Description of Artificial Sequence: Synthetic oligonucleotide
ucaaaguggcccacugugu

SEQ ID NO: 2782148 - RNA, 19 nt, Artificial Sequence
  Description of Artificial Sequence: Synthetic oligonucleotide
agcuugucuaugugacccc

SEQ ID NO: 2782149 - RNA, 19 nt, Artificial Sequence
  Description of Artificial Sequence: Synthetic oligonucleotide
agauucuguccagccaucc

SEQ ID NO: 2782150 - RNA, 19 nt, Artificial Sequence
  Description of Artificial Sequence: Synthetic oligonucleotide
cagcuugucuaugugaccc

SEQ ID NO: 2782151 - RNA, 19 nt, Artificial Sequence
  Description of Artificial Sequence: Synthetic oligonucleotide
auaugcucccuccacuuga

SEQ ID NO: 2782152 - RNA, 19 nt, Artificial Sequence
  Description of Artificial Sequence: Synthetic oligonucleotide
uaggcaaauuguucaggug

SEQ ID NO: 2782153 - RNA, 19 nt, Artificial Sequence
  Description of Artificial Sequence: Synthetic oligonucleotide
acugaccuguuccuggaug

SEQ ID NO: 2782154 - RNA, 19 nt, Artificial Sequence
  Description of Artificial Sequence: Synthetic oligonucleotide
uaugcucccuccacuugag

SEQ ID NO: 2782155 - RNA, 19 nt, Artificial Sequence
  Description of Artificial Sequence: Synthetic oligonucleotide
uuguccuggccucaccuca

SEQ ID NO: 2782156 - RNA, 19 nt, Artificial Sequence
  Description of Artificial Sequence: Synthetic oligonucleotide
caaaguggcccacugugug

SEQ ID NO: 2782157 - RNA, 19 nt, Artificial Sequence
  Description of Artificial Sequence: Synthetic oligonucleotide
cugcucaguaggcaaauug

SEQ ID NO: 2782158 - RNA, 19 nt, Artificial Sequence
  Description of Artificial Sequence: Synthetic oligonucleotide
ggacuuuagauucugucca

SEQ ID NO: 2782159 - RNA, 19 nt, Artificial Sequence
  Description of Artificial Sequence: Synthetic oligonucleotide
uaagcccagccucucauau

SEQ ID NO: 2782160 - RNA, 19 nt, Artificial Sequence
  Description of Artificial Sequence: Synthetic oligonucleotide
cagcgugugguucagcuug

SEQ ID NO: 2782161 - RNA, 19 nt, Artificial Sequence
  Description of Artificial Sequence: Synthetic oligonucleotide
cagccugaagccgugagcc

SEQ ID NO: 2782162 - RNA, 19 nt, Artificial Sequence
  Description of Artificial Sequence: Synthetic oligonucleotide
uugagcuuuuccagcuccc

SEQ ID NO: 2782163 - RNA, 19 nt, Artificial Sequence
  Description of Artificial Sequence: Synthetic oligonucleotide
ucgcucucguucauccagg

SEQ ID NO: 2782164 - RNA, 19 nt, Artificial Sequence
  Description of Artificial Sequence: Synthetic oligonucleotide
gauguguuggcagccaaga

SEQ ID NO: 2782165 - RNA, 19 nt, Artificial Sequence
  Description of Artificial Sequence: Synthetic oligonucleotide
auucuguccagccauccua

SEQ ID NO: 2782166 - RNA, 19 nt, Artificial Sequence
  Description of Artificial Sequence: Synthetic oligonucleotide
acccguuggucaaaguggc

SEQ ID NO: 2782167 - RNA, 19 nt, Artificial Sequence
  Description of Artificial Sequence: Synthetic oligonucleotide
augauauucccagguuggg

SEQ ID NO: 2782168 - RNA, 19 nt, Artificial Sequence
  Description of Artificial Sequence: Synthetic oligonucleotide
caguaggcaaauuguucag

SEQ ID NO: 2782169 - RNA, 19 nt, Artificial Sequence
  Description of Artificial Sequence: Synthetic oligonucleotide
acgggcaauguccugugug

SEQ ID NO: 2782170 - RNA, 19 nt, Artificial Sequence
  Description of Artificial Sequence: Synthetic oligonucleotide
gaagccgugagccuugacu

SEQ ID NO: 2782171 - RNA, 19 nt, Artificial Sequence
  Description of Artificial Sequence: Synthetic oligonucleotide
uuuuccagcuccccucgaa

SEQ ID NO: 2782172 - RNA, 19 nt, Artificial Sequence
  Description of Artificial Sequence: Synthetic oligonucleotide
ucauaugcucccuccacuu

SEQ ID NO: 2782173 - RNA, 19 nt, Artificial Sequence
  Description of Artificial Sequence: Synthetic oligonucleotide
cauccuagucggcuugucc

SEQ ID NO: 2782174 - RNA, 19 nt, Artificial Sequence
  Description of Artificial Sequence: Synthetic oligonucleotide
ugacuacugaccuguuccu

SEQ ID NO: 2782175 - RNA, 19 nt, Artificial Sequence
  Description of Artificial Sequence: Synthetic oligonucleotide
ggcaucagaguacuggcug

SEQ ID NO: 2782176 - RNA, 19 nt, Artificial Sequence
  Description of Artificial Sequence: Synthetic oligonucleotide
uugagccacccguugguca

SEQ ID NO: 2782177 - RNA, 19 nt, Artificial Sequence
  Description of Artificial Sequence: Synthetic oligonucleotide
uguuggcagccaagaaggc

SEQ ID NO: 2782178 - RNA, 19 nt, Artificial Sequence
  Description of Artificial Sequence: Synthetic oligonucleotide
cacuugagccacccguugg

SEQ ID NO: 2782179 - RNA, 19 nt, Artificial Sequence
  Description of Artificial Sequence: Synthetic oligonucleotide
ugacagagucacugaggcc

SEQ ID NO: 2782180 - RNA, 19 nt, Artificial Sequence
  Description of Artificial Sequence: Synthetic oligonucleotide
agguucaggaccugccugu

SEQ ID NO: 2782181 - RNA, 19 nt, Artificial Sequence
  Description of Artificial Sequence: Synthetic oligonucleotide
uacuggcugacagagucac

SEQ ID NO: 2782182 - RNA, 19 nt, Artificial Sequence
  Description of Artificial Sequence: Synthetic oligonucleotide
cugggaugauauucccagg

SEQ ID NO: 2782183 - RNA, 19 nt, Artificial Sequence
  Description of Artificial Sequence: Synthetic oligonucleotide
ggcaaauuguucagguggg

SEQ ID NO: 2782184 - RNA, 19 nt, Artificial Sequence
  Description of Artificial Sequence: Synthetic oligonucleotide
uccuagucggcuuguccug

SEQ ID NO: 2782185 - RNA, 19 nt, Artificial Sequence
  Description of Artificial Sequence: Synthetic oligonucleotide
ugugugugcugggccagcg

SEQ ID NO: 2782186 - RNA, 19 nt, Artificial Sequence
  Description of Artificial Sequence: Synthetic oligonucleotide
cuugacuacugaccuguuc

SEQ ID NO: 2782187 - RNA, 19 nt, Artificial Sequence
  Description of Artificial Sequence: Synthetic oligonucleotide
aagcccagccucucauaug

SEQ ID NO: 2782188 - RNA, 19 nt, Artificial Sequence
  Description of Artificial Sequence: Synthetic oligonucleotide
uccccucgaagguucagga

SEQ ID NO: 2782189 - RNA, 19 nt, Artificial Sequence
  Description of Artificial Sequence: Synthetic oligonucleotide
ugagcuuuuccagcucccc

SEQ ID NO: 2782190 - RNA, 19 nt, Artificial Sequence
  Description of Artificial Sequence: Synthetic oligonucleotide
gagcucugcaguccagcag

SEQ ID NO: 2782191 - RNA, 19 nt, Artificial Sequence
  Description of Artificial Sequence: Synthetic oligonucleotide
uggauggcauggacuucgg

SEQ ID NO: 2782192 - RNA, 19 nt, Artificial Sequence
  Description of Artificial Sequence: Synthetic oligonucleotide
uguccuggccucaccucag

SEQ ID NO: 2782193 - RNA, 19 nt, Artificial Sequence
  Description of Artificial Sequence: Synthetic oligonucleotide
gugugguucagcuugucua

SEQ ID NO: 2782194 - RNA, 19 nt, Artificial Sequence
  Description of Artificial Sequence: Synthetic oligonucleotide
guaggcaaauuguucaggu

SEQ ID NO: 2782195 - RNA, 19 nt, Artificial Sequence
  Description of Artificial Sequence: Synthetic oligonucleotide
cccucgaagguucaggacc

SEQ ID NO: 2782196 - RNA, 19 nt, Artificial Sequence
  Description of Artificial Sequence: Synthetic oligonucleotide
ucaggugggcagccaauaa

SEQ ID NO: 2782197 - RNA, 19 nt, Artificial Sequence
  Description of Artificial Sequence: Synthetic oligonucleotide
agccgugagccuugacuac

SEQ ID NO: 2782198 - RNA, 19 nt, Artificial Sequence
  Description of Artificial Sequence: Synthetic oligonucleotide
gaguuccugggcugugucc

SEQ ID NO: 2782199 - RNA, 19 nt, Artificial Sequence
  Description of Artificial Sequence: Synthetic oligonucleotide
aacccuccagccacauugg

SEQ ID NO: 2782200 - RNA, 19 nt, Artificial Sequence
  Description of Artificial Sequence: Synthetic oligonucleotide
caaauuguucaggugggca

SEQ ID NO: 2782201 - RNA, 19 nt, Artificial Sequence
  Description of Artificial Sequence: Synthetic oligonucleotide
cuucggcuuccacuuuucg

SEQ ID NO: 2782202 - RNA, 19 nt, Artificial Sequence
  Description of Artificial Sequence: Synthetic oligonucleotide
uuccacuuuucgcucucgu

SEQ ID NO: 2782203 - RNA, 19 nt, Artificial Sequence
  Description of Artificial Sequence: Synthetic oligonucleotide
ucgaagguucaggaccugc

SEQ ID NO: 2782204 - RNA, 19 nt, Artificial Sequence
  Description of Artificial Sequence: Synthetic oligonucleotide
gugagccuugacuacugac

SEQ ID NO: 2782205 - RNA, 19 nt, Artificial Sequence
  Description of Artificial Sequence: Synthetic oligonucleotide
cacuuuucgcucucguuca

SEQ ID NO: 2782206 - RNA, 19 nt, Artificial Sequence
  Description of Artificial Sequence: Synthetic oligonucleotide
cauaugcucccuccacuug

SEQ ID NO: 2782207 - RNA, 19 nt, Artificial Sequence
  Description of Artificial Sequence: Synthetic oligonucleotide
cuugucuaugugaccccac

SEQ ID NO: 2782208 - RNA, 19 nt, Artificial Sequence
  Description of Artificial Sequence: Synthetic oligonucleotide
ccggagacgggcaaugucc

SEQ ID NO: 2782209 - RNA, 19 nt, Artificial Sequence
  Description of Artificial Sequence: Synthetic oligonucleotide
augcucccuccacuugagc

SEQ ID NO: 2782210 - RNA, 19 nt, Artificial Sequence
  Description of Artificial Sequence: Synthetic oligonucleotide
gagccuugacuacugaccu

SEQ ID NO: 2782211 - RNA, 19 nt, Artificial Sequence
  Description of Artificial Sequence: Synthetic oligonucleotide
agucggcuuguccuggccu

SEQ ID NO: 2782212 - RNA, 19 nt, Artificial Sequence
  Description of Artificial Sequence: Synthetic oligonucleotide
ccacuuuucgcucucguuc

SEQ ID NO: 2782213 - RNA, 19 nt, Artificial Sequence
  Description of Artificial Sequence: Synthetic oligonucleotide
ggcucaacccuccagccac

SEQ ID NO: 2782214 - RNA, 19 nt, Artificial Sequence
  Description of Artificial Sequence: Synthetic oligonucleotide
cagccucucauaugcuccc

SEQ ID NO: 2782215 - RNA, 19 nt, Artificial Sequence
  Description of Artificial Sequence: Synthetic oligonucleotide
gacuacugaccuguuccug

SEQ ID NO: 2782216 - RNA, 19 nt, Artificial Sequence
  Description of Artificial Sequence: Synthetic oligonucleotide
uagucggcuuguccuggcc

SEQ ID NO: 2782217 - RNA, 19 nt, Artificial Sequence
  Description of Artificial Sequence: Synthetic oligonucleotide
ccagccucucauaugcucc

SEQ ID NO: 2782218 - RNA, 19 nt, Artificial Sequence
  Description of Artificial Sequence: Synthetic oligonucleotide
ggcugacagagucacugag

SEQ ID NO: 2782219 - RNA, 19 nt, Artificial Sequence
  Description of Artificial Sequence: Synthetic oligonucleotide
cuguggccagccugaagcc

SEQ ID NO: 2782220 - RNA, 19 nt, Artificial Sequence
  Description of Artificial Sequence: Synthetic oligonucleotide
uccacuuuucgcucucguu

SEQ ID NO: 2782221 - RNA, 19 nt, Artificial Sequence
  Description of Artificial Sequence: Synthetic oligonucleotide
gcugacagagucacugagg

SEQ ID NO: 2782222 - RNA, 19 nt, Artificial Sequence
  Description of Artificial Sequence: Synthetic oligonucleotide
uggcugacagagucacuga

SEQ ID NO: 2782223 - RNA, 19 nt, Artificial Sequence
  Description of Artificial Sequence: Synthetic oligonucleotide
cuuguccuggccucaccuc

SEQ ID NO: 2782224 - RNA, 19 nt, Artificial Sequence
  Description of Artificial Sequence: Synthetic oligonucleotide
cuagucggcuuguccuggc

SEQ ID NO: 2782225 - RNA, 19 nt, Artificial Sequence
  Description of Artificial Sequence: Synthetic oligonucleotide
guuggcagccaagaaggca

SEQ ID NO: 2782226 - RNA, 19 nt, Artificial Sequence
  Description of Artificial Sequence: Synthetic oligonucleotide
ccaagaaggcaucagagua

SEQ ID NO: 2782227 - RNA, 19 nt, Artificial Sequence
  Description of Artificial Sequence: Synthetic oligonucleotide
ucaucccggagacgggcaa

SEQ ID NO: 2782228 - RNA, 19 nt, Artificial Sequence
  Description of Artificial Sequence: Synthetic oligonucleotide
guuccugggcugugucccg

SEQ ID NO: 2782229 - RNA, 19 nt, Artificial Sequence
  Description of Artificial Sequence: Synthetic oligonucleotide
acuucggcuuccacuuuuc

SEQ ID NO: 2782230 - RNA, 19 nt, Artificial Sequence
  Description of Artificial Sequence: Synthetic oligonucleotide
ugaccuguuccuggauggc

SEQ ID NO: 2782231 - RNA, 19 nt, Artificial Sequence
  Description of Artificial Sequence: Synthetic oligonucleotide
aggaccugccuguggccag

SEQ ID NO: 2782232 - RNA, 19 nt, Artificial Sequence
  Description of Artificial Sequence: Synthetic oligonucleotide
gucuggacuuuagauucug

SEQ ID NO: 2782233 - RNA, 19 nt, Artificial Sequence
  Description of Artificial Sequence: Synthetic oligonucleotide
cagaguacuggcugacaga

SEQ ID NO: 2782234 - RNA, 19 nt, Artificial Sequence
  Description of Artificial Sequence: Synthetic oligonucleotide
ccucucauaugcucccucc

SEQ ID NO: 2782235 - RNA, 19 nt, Artificial Sequence
  Description of Artificial Sequence: Synthetic oligonucleotide
gauucuguccagccauccu

SEQ ID NO: 2782236 - RNA, 19 nt, Artificial Sequence
  Description of Artificial Sequence: Synthetic oligonucleotide
ccacccguuggucaaagug

SEQ ID NO: 2782237 - RNA, 19 nt, Artificial Sequence
  Description of Artificial Sequence: Synthetic oligonucleotide
ucuguccagccauccuagu

SEQ ID NO: 2782238 - RNA, 19 nt, Artificial Sequence
  Description of Artificial Sequence: Synthetic oligonucleotide
ccguuggucaaaguggccc

SEQ ID NO: 2782239 - RNA, 19 nt, Artificial Sequence
  Description of Artificial Sequence: Synthetic oligonucleotide
cuuccacuuuucgcucucg

SEQ ID NO: 2782240 - RNA, 19 nt, Artificial Sequence
  Description of Artificial Sequence: Synthetic oligonucleotide
ccagggauguguuggcagc

SEQ ID NO: 2782241 - RNA, 19 nt, Artificial Sequence
  Description of Artificial Sequence: Synthetic oligonucleotide
uuccugggcugugucccgg

SEQ ID NO: 2782242 - RNA, 19 nt, Artificial Sequence
  Description of Artificial Sequence: Synthetic oligonucleotide
auaagcccagccucucaua

SEQ ID NO: 2782243 - RNA, 19 nt, Artificial Sequence
  Description of Artificial Sequence: Synthetic oligonucleotide
uuggucaaaguggcccacu

SEQ ID NO: 2782244 - RNA, 19 nt, Artificial Sequence
  Description of Artificial Sequence: Synthetic oligonucleotide
cucucauaugcucccucca

SEQ ID NO: 2782245 - RNA, 19 nt, Artificial Sequence
  Description of Artificial Sequence: Synthetic oligonucleotide
uacugaccuguuccuggau

SEQ ID NO: 2782246 - RNA, 19 nt, Artificial Sequence
  Description of Artificial Sequence: Synthetic oligonucleotide
cuuuucgcucucguucauc

SEQ ID NO: 2782247 - RNA, 19 nt, Artificial Sequence
  Description of Artificial Sequence: Synthetic oligonucleotide
gccacauuggccacaccag

SEQ ID NO: 2782248 - RNA, 19 nt, Artificial Sequence
  Description of Artificial Sequence: Synthetic oligonucleotide
aucagaguacuggcugaca

SEQ ID NO: 2782249 - RNA, 19 nt, Artificial Sequence
  Description of Artificial Sequence: Synthetic oligonucleotide
caauaagcccagccucuca

SEQ ID NO: 2782250 - RNA, 19 nt, Artificial Sequence
  Description of Artificial Sequence: Synthetic oligonucleotide
ggugggcagccaauaagcc

SEQ ID NO: 2782251 - RNA, 19 nt, Artificial Sequence
  Description of Artificial Sequence: Synthetic oligonucleotide
gagacgggcaauguccugu

SEQ ID NO: 2782252 - RNA, 19 nt, Artificial Sequence
  Description of Artificial Sequence: Synthetic oligonucleotide
gucggcuuguccuggccuc

SEQ ID NO: 2782253 - RNA, 19 nt, Artificial Sequence
  Description of Artificial Sequence: Synthetic oligonucleotide
uggaguuccugggcugugu

SEQ ID NO: 2782254 - RNA, 19 nt, Artificial Sequence
  Description of Artificial Sequence: Synthetic oligonucleotide
ucguucauccagggaugug

SEQ ID NO: 2782255 - RNA, 19 nt, Artificial Sequence
  Description of Artificial Sequence: Synthetic oligonucleotide
uccagccauccuagucggc

SEQ ID NO: 2782256 - RNA, 19 nt, Artificial Sequence
  Description of Artificial Sequence: Synthetic oligonucleotide
cauggacuucggcuuccac

SEQ ID NO: 2782257 - RNA, 19 nt, Artificial Sequence
  Description of Artificial Sequence: Synthetic oligonucleotide
cucauaugcucccuccacu

SEQ ID NO: 2782258 - RNA, 19 nt, Artificial Sequence
  Description of Artificial Sequence: Synthetic oligonucleotide
acuuuucgcucucguucau

SEQ ID NO: 2782259 - RNA, 19 nt, Artificial Sequence
  Description of Artificial Sequence: Synthetic oligonucleotide
ggauguguuggcagccaag

SEQ ID NO: 2782260 - RNA, 19 nt, Artificial Sequence
  Description of Artificial Sequence: Synthetic oligonucleotide
ugaagccgugagccuugac

SEQ ID NO: 2782261 - RNA, 19 nt, Artificial Sequence
  Description of Artificial Sequence: Synthetic oligonucleotide
cuccacuugagccacccgu

SEQ ID NO: 2782262 - RNA, 19 nt, Artificial Sequence
  Description of Artificial Sequence: Synthetic oligonucleotide
ucccggcagcggcucaacc

SEQ ID NO: 2782263 - RNA, 19 nt, Artificial Sequence
  Description of Artificial Sequence: Synthetic oligonucleotide
gccacaccagccuugagcu

SEQ ID NO: 2782264 - RNA, 19 nt, Artificial Sequence
  Description of Artificial Sequence: Synthetic oligonucleotide
cagcugagcucugcagucc

SEQ ID NO: 2782265 - RNA, 19 nt, Artificial Sequence
  Description of Artificial Sequence: Synthetic oligonucleotide
guuggucaaaguggcccac

SEQ ID NO: 2782266 - RNA, 19 nt, Artificial Sequence
  Description of Artificial Sequence: Synthetic oligonucleotide
ggagucuggacuuuagauu

SEQ ID NO: 2782267 - RNA, 19 nt, Artificial Sequence
  Description of Artificial Sequence: Synthetic oligonucleotide
cagcuccccucgaagguuc

SEQ ID NO: 2782268 - RNA, 19 nt, Artificial Sequence
  Description of Artificial Sequence: Synthetic oligonucleotide
cuugagccacccguugguc

SEQ ID NO: 2782269 - RNA, 19 nt, Artificial Sequence
  Description of Artificial Sequence: Synthetic oligonucleotide
ugugaccccacagguucuc

SEQ ID NO: 2782270 - RNA, 19 nt, Artificial Sequence
  Description of Artificial Sequence: Synthetic oligonucleotide
agucuggacuuuagauucu

SEQ ID NO: 2782271 - RNA, 19 nt, Artificial Sequence
  Description of Artificial Sequence: Synthetic oligonucleotide
agccugaagccgugagccu

SEQ ID NO: 2782272 - RNA, 19 nt, Artificial Sequence
  Description of Artificial Sequence: Synthetic oligonucleotide
gggagucuggacuuuagau

SEQ ID NO: 2782273 - RNA, 19 nt, Artificial Sequence
  Description of Artificial Sequence: Synthetic oligonucleotide
aucccggagacgggcaaug

SEQ ID NO: 2782274 - RNA, 19 nt, Artificial Sequence
  Description of Artificial Sequence: Synthetic oligonucleotide
gcaaauuguucaggugggc

SEQ ID NO: 2782275 - RNA, 19 nt, Artificial Sequence
  Description of Artificial Sequence: Synthetic oligonucleotide
aggcaucagaguacuggcu

SEQ ID NO: 2782276 - RNA, 19 nt, Artificial Sequence
  Description of Artificial Sequence: Synthetic oligonucleotide
cagccaauaagcccagccu

SEQ ID NO: 2782277 - RNA, 19 nt, Artificial Sequence
  Description of Artificial Sequence: Synthetic oligonucleotide
ccagcugagcucugcaguc

SEQ ID NO: 2782278 - RNA, 19 nt, Artificial Sequence
  Description of Artificial Sequence: Synthetic oligonucleotide
cucccuccacuugagccac

SEQ ID NO: 2782279 - RNA, 19 nt, Artificial Sequence
  Description of Artificial Sequence: Synthetic oligonucleotide
agggauguguuggcagcca

SEQ ID NO: 2782280 - RNA, 19 nt, Artificial Sequence
  Description of Artificial Sequence: Synthetic oligonucleotide
cccggcagcggcucaaccc

SEQ ID NO: 2782281 - RNA, 19 nt, Artificial Sequence
  Description of Artificial Sequence: Synthetic oligonucleotide
ugugucccggcagcggcuc

SEQ ID NO: 2782282 - RNA, 19 nt, Artificial Sequence
  Description of Artificial Sequence: Synthetic oligonucleotide
ccugccuguggccagccug

SEQ ID NO: 2782283 - RNA, 19 nt, Artificial Sequence
  Description of Artificial Sequence: Synthetic oligonucleotide
agcugcucaguaggcaaau

SEQ ID NO: 2782284 - RNA, 19 nt, Artificial Sequence
  Description of Artificial Sequence: Synthetic oligonucleotide
gcggcucaacccuccagcc

SEQ ID NO: 2782285 - RNA, 19 nt, Artificial Sequence
  Description of Artificial Sequence: Synthetic oligonucleotide
uggccacaccagccuugag

SEQ ID NO: 2782286 - RNA, 19 nt, Artificial Sequence
  Description of Artificial Sequence: Synthetic oligonucleotide
cagcggcucaacccuccag

SEQ ID NO: 2782287 - RNA, 19 nt, Artificial Sequence
  Description of Artificial Sequence: Synthetic oligonucleotide
guacuggcugacagaguca

SEQ ID NO: 2782288 - RNA, 19 nt, Artificial Sequence
  Description of Artificial Sequence: Synthetic oligonucleotide
ggaguuccugggcuguguc

SEQ ID NO: 2782289 - RNA, 19 nt, Artificial Sequence
  Description of Artificial Sequence: Synthetic oligonucleotide
gacuucggcuuccacuuuu

SEQ ID NO: 2782290 - RNA, 19 nt, Artificial Sequence
  Description of Artificial Sequence: Synthetic oligonucleotide
ccugaagccgugagccuug

SEQ ID NO: 2782291 - RNA, 19 nt, Artificial Sequence
  Description of Artificial Sequence: Synthetic oligonucleotide
agccacccguuggucaaag

SEQ ID NO: 2782292 - RNA, 19 nt, Artificial Sequence
  Description of Artificial Sequence: Synthetic oligonucleotide
ccucagcugcucaguaggc

SEQ ID NO: 2782293 - RNA, 19 nt, Artificial Sequence
  Description of Artificial Sequence: Synthetic oligonucleotide
ggagacgggcaauguccug

SEQ ID NO: 2782294 - RNA, 19 nt, Artificial Sequence
  Description of Artificial Sequence: Synthetic oligonucleotide
ccuagucggcuuguccugg

SEQ ID NO: 2782295 - RNA, 19 nt, Artificial Sequence
  Description of Artificial Sequence: Synthetic oligonucleotide
cccagccucucauaugcuc

SEQ ID NO: 2782296 - RNA, 19 nt, Artificial Sequence
  Description of Artificial Sequence: Synthetic oligonucleotide
augugaccccacagguucu

SEQ ID NO: 2782297 - RNA, 19 nt, Artificial Sequence
  Description of Artificial Sequence: Synthetic oligonucleotide
ccccacagguucucccugg

SEQ ID NO: 2782298 - RNA, 19 nt, Artificial Sequence
  Description of Artificial Sequence: Synthetic oligonucleotide
ucccggagacgggcaaugu

SEQ ID NO: 2782299 - RNA, 19 nt, Artificial Sequence
  Description of Artificial Sequence: Synthetic oligonucleotide
ucccuccacuugagccacc

SEQ ID NO: 2782300 - RNA, 19 nt, Artificial Sequence
  Description of Artificial Sequence: Synthetic oligonucleotide
ugucccggcagcggcucaa

SEQ ID NO: 2782301 - RNA, 19 nt, Artificial Sequence
  Description of Artificial Sequence: Synthetic oligonucleotide
gcuugucuaugugacccca

SEQ ID NO: 2782302 - RNA, 19 nt, Artificial Sequence
  Description of Artificial Sequence: Synthetic oligonucleotide
ccacuugagccacccguug

SEQ ID NO: 2782303 - RNA, 19 nt, Artificial Sequence
  Description of Artificial Sequence: Synthetic oligonucleotide
cagcugcucaguaggcaaa

SEQ ID NO: 2782304 - RNA, 19 nt, Artificial Sequence
  Description of Artificial Sequence: Synthetic oligonucleotide
gcuuccacuuuucgcucuc

SEQ ID NO: 2782305 - RNA, 19 nt, Artificial Sequence
  Description of Artificial Sequence: Synthetic oligonucleotide
cuggaguuccugggcugug

SEQ ID NO: 2782306 - RNA, 19 nt, Artificial Sequence
  Description of Artificial Sequence: Synthetic oligonucleotide
gccuugacuacugaccugu

SEQ ID NO: 2782307 - RNA, 19 nt, Artificial Sequence
  Description of Artificial Sequence: Synthetic oligonucleotide
ggcugugucccggcagcgg

SEQ ID NO: 2782308 - RNA, 19 nt, Artificial Sequence
  Description of Artificial Sequence: Synthetic oligonucleotide
agcgugugguucagcuugu

SEQ ID NO: 2782309 - RNA, 19 nt, Artificial Sequence
  Description of Artificial Sequence: Synthetic oligonucleotide
ggcauggacuucggcuucc

SEQ ID NO: 2782310 - RNA, 19 nt, Artificial Sequence
  Description of Artificial Sequence: Synthetic oligonucleotide
cagccagcugagcucugca

SEQ ID NO: 2782311 - RNA, 19 nt, Artificial Sequence
  Description of Artificial Sequence: Synthetic oligonucleotide
cucgaagguucaggaccug

SEQ ID NO: 2782312 - RNA, 19 nt, Artificial Sequence
  Description of Artificial Sequence: Synthetic oligonucleotide
agccucucauaugcucccu

SEQ ID NO: 2782313 - RNA, 19 nt, Artificial Sequence
  Description of Artificial Sequence: Synthetic oligonucleotide
cucugcaguccagcagguc

SEQ ID NO: 2782314 - RNA, 19 nt, Artificial Sequence
  Description of Artificial Sequence: Synthetic oligonucleotide
gggauguguuggcagccaa

SEQ ID NO: 2782315 - RNA, 19 nt, Artificial Sequence
  Description of Artificial Sequence: Synthetic oligonucleotide
cccguuggucaaaguggcc

SEQ ID NO: 2782316 - RNA, 19 nt, Artificial Sequence
  Description of Artificial Sequence: Synthetic oligonucleotide
gccagcugagcucugcagu

SEQ ID NO: 2782317 - RNA, 19 nt, Artificial Sequence
  Description of Artificial Sequence: Synthetic oligonucleotide
ggcuuguccuggccucacc

SEQ ID NO: 2782318 - RNA, 19 nt, Artificial Sequence
  Description of Artificial Sequence: Synthetic oligonucleotide
gccagcgugugguucagcu

SEQ ID NO: 2782319 - RNA, 19 nt, Artificial Sequence
  Description of Artificial Sequence: Synthetic oligonucleotide
ccgugagccuugacuacug

SEQ ID NO: 2782320 - RNA, 19 nt, Artificial Sequence
  Description of Artificial Sequence: Synthetic oligonucleotide
ccuggccucaccucagcca

SEQ ID NO: 2782321 - RNA, 19 nt, Artificial Sequence
  Description of Artificial Sequence: Synthetic oligonucleotide
ccaauaagcccagccucuc

SEQ ID NO: 2782322 - RNA, 19 nt, Artificial Sequence
  Description of Artificial Sequence: Synthetic oligonucleotide
gccucucauaugcucccuc

SEQ ID NO: 2782323 - RNA, 19 nt, Artificial Sequence
  Description of Artificial Sequence: Synthetic oligonucleotide
cgcucucguucauccaggg

SEQ ID NO: 2782324 - RNA, 19 nt, Artificial Sequence
  Description of Artificial Sequence: Synthetic oligonucleotide
guggccagccugaagccgu

SEQ ID NO: 2782325 - RNA, 19 nt, Artificial Sequence
  Description of Artificial Sequence: Synthetic oligonucleotide
gcucucguucauccaggga

SEQ ID NO: 2782326 - RNA, 19 nt, Artificial Sequence
  Description of Artificial Sequence: Synthetic oligonucleotide
gggaugauauucccagguu

SEQ ID NO: 2782327 - RNA, 19 nt, Artificial Sequence
  Description of Artificial Sequence: Synthetic oligonucleotide
gacgggcaauguccugugu

SEQ ID NO: 2782328 - RNA, 19 nt, Artificial Sequence
  Description of Artificial Sequence: Synthetic oligonucleotide
cguuggucaaaguggccca

SEQ ID NO: 2782329 - RNA, 19 nt, Artificial Sequence
  Description of Artificial Sequence: Synthetic oligonucleotide
gccaauaagcccagccucu

SEQ ID NO: 2782330 - RNA, 19 nt, Artificial Sequence
  Description of Artificial Sequence: Synthetic oligonucleotide
ccacagguucucccuggac

SEQ ID NO: 2782331 - RNA, 19 nt, Artificial Sequence
  Description of Artificial Sequence: Synthetic oligonucleotide
ccuccacuugagccacccg

SEQ ID NO: 2782332 - RNA, 19 nt, Artificial Sequence
  Description of Artificial Sequence: Synthetic oligonucleotide
cccuccacuugagccaccc

SEQ ID NO: 2782333 - RNA, 19 nt, Artificial Sequence
  Description of Artificial Sequence: Synthetic oligonucleotide
cccggagacgggcaauguc

SEQ ID NO: 2782334 - RNA, 19 nt, Artificial Sequence
  Description of Artificial Sequence: Synthetic oligonucleotide
gcaggucaucccggagacg

SEQ ID NO: 2782335 - RNA, 19 nt, Artificial Sequence
  Description of Artificial Sequence: Synthetic oligonucleotide
ccucgaagguucaggaccu

SEQ ID NO: 2782336 - RNA, 19 nt, Artificial Sequence
  Description of Artificial Sequence: Synthetic oligonucleotide
cagccacauuggccacacc

SEQ ID NO: 2782337 - RNA, 19 nt, Artificial Sequence
  Description of Artificial Sequence: Synthetic oligonucleotide
cucguucauccagggaugu

SEQ ID NO: 2782338 - RNA, 19 nt, Artificial Sequence
  Description of Artificial Sequence: Synthetic oligonucleotide
ggaccugccuguggccagc

SEQ ID NO: 2782339 - RNA, 19 nt, Artificial Sequence
  Description of Artificial Sequence: Synthetic oligonucleotide
ggcuuccacuuuucgcucu

SEQ ID NO: 2782340 - RNA, 19 nt, Artificial Sequence
  Description of Artificial Sequence: Synthetic oligonucleotide
gcucaguaggcaaauuguu

SEQ ID NO: 2782341 - RNA, 19 nt, Artificial Sequence
  Description of Artificial Sequence: Synthetic oligonucleotide
agcuccccucgaagguuca

SEQ ID NO: 2782342 - RNA, 19 nt, Artificial Sequence
  Description of Artificial Sequence: Synthetic oligonucleotide
cguucauccagggaugugu

SEQ ID NO: 2782343 - RNA, 19 nt, Artificial Sequence
  Description of Artificial Sequence: Synthetic oligonucleotide
gugugcugggccagcgugu

SEQ ID NO: 2782344 - RNA, 19 nt, Artificial Sequence
  Description of Artificial Sequence: Synthetic oligonucleotide
cugugucccggcagcggcu

SEQ ID NO: 2782345 - RNA, 19 nt, Artificial Sequence
  Description of Artificial Sequence: Synthetic oligonucleotide
ggcccacugugugcuggag

SEQ ID NO: 2782346 - RNA, 19 nt, Artificial Sequence
  Description of Artificial Sequence: Synthetic oligonucleotide
gcagcggcucaacccucca

SEQ ID NO: 2782347 - RNA, 19 nt, Artificial Sequence
  Description of Artificial Sequence: Synthetic oligonucleotide
gcuccccucgaagguucag

SEQ ID NO: 2782348 - RNA, 19 nt, Artificial Sequence
  Description of Artificial Sequence: Synthetic oligonucleotide
gugucccggcagcggcuca

SEQ ID NO: 2782349 - RNA, 19 nt, Artificial Sequence
  Description of Artificial Sequence: Synthetic oligonucleotide
gagccacccguuggucaaa

SEQ ID NO: 2782350 - RNA, 19 nt, Artificial Sequence
  Description of Artificial Sequence: Synthetic oligonucleotide
gucccggcagcggcucaac

SEQ ID NO: 2782351 - RNA, 19 nt, Artificial Sequence
  Description of Artificial Sequence: Synthetic oligonucleotide
ccagccauccuagucggcu

SEQ ID NO: 2782352 - RNA, 19 nt, Artificial Sequence
  Description of Artificial Sequence: Synthetic oligonucleotide
cggcuuccacuuuucgcuc

SEQ ID NO: 2782353 - RNA, 19 nt, Artificial Sequence
  Description of Artificial Sequence: Synthetic oligonucleotide
gccgugagccuugacuacu

SEQ ID NO: 2782354 - RNA, 19 nt, Artificial Sequence
  Description of Artificial Sequence: Synthetic oligonucleotide
ccacugugugcuggaguuc

SEQ ID NO: 2782355 - RNA, 19 nt, Artificial Sequence
  Description of Artificial Sequence: Synthetic oligonucleotide
gcauggacuucggcuucca

SEQ ID NO: 2782356 - RNA, 19 nt, Artificial Sequence
  Description of Artificial Sequence: Synthetic oligonucleotide
ggccucaccucagccagcu

SEQ ID NO: 2782357 - RNA, 19 nt, Artificial Sequence
  Description of Artificial Sequence: Synthetic oligonucleotide
ccauccuagucggcuuguc

SEQ ID NO: 2782358 - RNA, 19 nt, Artificial Sequence
  Description of Artificial Sequence: Synthetic oligonucleotide
cgggcaauguccugugugu

SEQ ID NO: 2782359 - RNA, 19 nt, Artificial Sequence
  Description of Artificial Sequence: Synthetic oligonucleotide
ccggcagcggcucaacccu

SEQ ID NO: 2782360 - RNA, 19 nt, Artificial Sequence
  Description of Artificial Sequence: Synthetic oligonucleotide
gccucaccucagccagcug

SEQ ID NO: 2782361 - RNA, 19 nt, Artificial Sequence
  Description of Artificial Sequence: Synthetic oligonucleotide
caccagccuugagcuuuuc

SEQ ID NO: 2782362 - RNA, 19 nt, Artificial Sequence
  Description of Artificial Sequence: Synthetic oligonucleotide
gcucaacccuccagccaca

SEQ ID NO: 2782363 - RNA, 19 nt, Artificial Sequence
  Description of Artificial Sequence: Synthetic oligonucleotide
cgugugguucagcuugucu

SEQ ID NO: 2782364 - RNA, 19 nt, Artificial Sequence
  Description of Artificial Sequence: Synthetic oligonucleotide
cgugagccuugacuacuga

SEQ ID NO: 2782365 - RNA, 19 nt, Artificial Sequence
  Description of Artificial Sequence: Synthetic oligonucleotide
cucaacccuccagccacau

SEQ ID NO: 2782366 - RNA, 19 nt, Artificial Sequence
  Description of Artificial Sequence: Synthetic oligonucleotide
ggccagcgugugguucagc

SEQ ID NO: 2782367 - RNA, 19 nt, Artificial Sequence
  Description of Artificial Sequence: Synthetic oligonucleotide
caucccggagacgggcaau

SEQ ID NO: 2782368 - RNA, 19 nt, Artificial Sequence
  Description of Artificial Sequence: Synthetic oligonucleotide
gcgugugguucagcuuguc

SEQ ID NO: 2782369 - RNA, 19 nt, Artificial Sequence
  Description of Artificial Sequence: Synthetic oligonucleotide
cggcucaacccuccagcca

SEQ ID NO: 2782370 - RNA, 19 nt, Artificial Sequence
  Description of Artificial Sequence: Synthetic oligonucleotide
cggagacgggcaauguccu

SEQ ID NO: 2782371 - RNA, 19 nt, Artificial Sequence
  Description of Artificial Sequence: Synthetic oligonucleotide
gcucugcaguccagcaggu

SEQ ID NO: 2782372 - RNA, 19 nt, Artificial Sequence
  Description of Artificial Sequence: Synthetic oligonucleotide
gccauccuagucggcuugu

SEQ ID NO: 2782373 - RNA, 19 nt, Artificial Sequence
  Description of Artificial Sequence: Synthetic oligonucleotide
ggccagccugaagccguga

SEQ ID NO: 2782374 - RNA, 19 nt, Artificial Sequence
  Description of Artificial Sequence: Synthetic oligonucleotide
gccacccguuggucaaagu

SEQ ID NO: 2782375 - RNA, 19 nt, Artificial Sequence
  Description of Artificial Sequence: Synthetic oligonucleotide
ccagcgugugguucagcuu

SEQ ID NO: 2782376 - RNA, 19 nt, Artificial Sequence
  Description of Artificial Sequence: Synthetic oligonucleotide
gcugcucaguaggcaaauu

SEQ ID NO: 2782377 - RNA, 19 nt, Artificial Sequence
  Description of Artificial Sequence: Synthetic oligonucleotide
ccuugacuacugaccuguu

SEQ ID NO: 2782378 - RNA, 19 nt, Artificial Sequence
  Description of Artificial Sequence: Synthetic oligonucleotide
ccagcuccccucgaagguu

SEQ ID NO: 2782379 - RNA, 19 nt, Artificial Sequence
  Description of Artificial Sequence: Synthetic oligonucleotide
gcccagccucucauaugcu

SEQ ID NO: 2782380 - RNA, 19 nt, Artificial Sequence
  Description of Artificial Sequence: Synthetic oligonucleotide
aauucaaauaaauuucaag

SEQ ID NO: 2782381 - RNA, 19 nt, Artificial Sequence
  Description of Artificial Sequence: Synthetic oligonucleotide
aacaggaguucauagaugg

SEQ ID NO: 2782382 - RNA, 19 nt, Artificial Sequence
  Description of Artificial Sequence: Synthetic oligonucleotide
aaugccuccaugcaaauug

SEQ ID NO: 2782383 - RNA, 19 nt, Artificial Sequence
  Description of Artificial Sequence: Synthetic oligonucleotide
uaaacuggaauucuguggc

SEQ ID NO: 2782384 - RNA, 19 nt, Artificial Sequence
  Description of Artificial Sequence: Synthetic oligonucleotide
uugugaaucuugcaggucg

SEQ ID NO: 2782385 - RNA, 19 nt, Artificial Sequence
  Description of Artificial Sequence: Synthetic oligonucleotide
aaauugcuccuucacauag

SEQ ID NO: 2782386 - RNA, 19 nt, Artificial Sequence
  Description of Artificial Sequence: Synthetic oligonucleotide
aaauuucaaggucacuggg

SEQ ID NO: 2782387 - RNA, 19 nt, Artificial Sequence
  Description of Artificial Sequence: Synthetic oligonucleotide
uaaauuucaaggucacugg

SEQ ID NO: 2782388 - RNA, 19 nt, Artificial Sequence
  Description of Artificial Sequence: Synthetic oligonucleotide
aauucuguggcugagccag

SEQ ID NO: 2782389 - RNA, 19 nt, Artificial Sequence
  Description of Artificial Sequence: Synthetic oligonucleotide
uugggcaucaacaucgcgg

SEQ ID NO: 2782390 - RNA, 19 nt, Artificial Sequence
  Description of Artificial Sequence: Synthetic oligonucleotide
auaaauuucaaggucacug

SEQ ID NO: 2782391 - RNA, 19 nt, Artificial Sequence
  Description of Artificial Sequence: Synthetic oligonucleotide
gagguaaucccguagauac

SEQ ID NO: 2782392 - RNA, 19 nt, Artificial Sequence
  Description of Artificial Sequence: Synthetic oligonucleotide
uuucuugucggcaccaggg

SEQ ID NO: 2782393 - RNA, 19 nt, Artificial Sequence
  Description of Artificial Sequence: Synthetic oligonucleotide
aguucauagauggcgaucc

SEQ ID NO: 2782394 - RNA, 19 nt, Artificial Sequence
  Description of Artificial Sequence: Synthetic oligonucleotide
auugcuccuucacauagcc

SEQ ID NO: 2782395 - RNA, 19 nt, Artificial Sequence
  Description of Artificial Sequence: Synthetic oligonucleotide
cuaaacuggaauucugugg

SEQ ID NO: 2782396 - RNA, 19 nt, Artificial Sequence
  Description of Artificial Sequence: Synthetic oligonucleotide
aaauaaauuucaaggucac

SEQ ID NO: 2782397 - RNA, 19 nt, Artificial Sequence
  Description of Artificial Sequence: Synthetic oligonucleotide
uaaacaggaguucauagau

SEQ ID NO: 2782398 - RNA, 19 nt, Artificial Sequence
  Description of Artificial Sequence: Synthetic oligonucleotide
cuuaaacaggaguucauag

SEQ ID NO: 2782399 - RNA, 19 nt, Artificial Sequence
  Description of Artificial Sequence: Synthetic oligonucleotide
uuucaggacggcuacggcg

SEQ ID NO: 2782400 - RNA, 19 nt, Artificial Sequence
  Description of Artificial Sequence: Synthetic oligonucleotide
accuucuggaccuuugggc

SEQ ID NO: 2782401 - RNA, 19 nt, Artificial Sequence
  Description of Artificial Sequence: Synthetic oligonucleotide
uuaaacaggaguucauaga

SEQ ID NO: 2782402 - RNA, 19 nt, Artificial Sequence
  Description of Artificial Sequence: Synthetic oligonucleotide
aaagccuccucuaaacugg

SEQ ID NO: 2782403 - RNA, 19 nt, Artificial Sequence
  Description of Artificial Sequence: Synthetic oligonucleotide
aauuucaaggucacugggg

SEQ ID NO: 2782404 - RNA, 19 nt, Artificial Sequence
  Description of Artificial Sequence: Synthetic oligonucleotide
uucaugacaugaagguugg

SEQ ID NO: 2782405 - RNA, 19 nt, Artificial Sequence
  Description of Artificial Sequence: Synthetic oligonucleotide
ucuaaacuggaauucugug

SEQ ID NO: 2782406 - RNA, 19 nt, Artificial Sequence
  Description of Artificial Sequence: Synthetic oligonucleotide
cucuugugaaucuugcagg

SEQ ID NO: 2782407 - RNA, 19 nt, Artificial Sequence
  Description of Artificial Sequence: Synthetic oligonucleotide
gacugcaucgccuucauga

SEQ ID NO: 2782408 - RNA, 19 nt, Artificial Sequence
  Description of Artificial Sequence: Synthetic oligonucleotide
agguaaguggagguaaucc

SEQ ID NO: 2782409 - RNA, 19 nt, Artificial Sequence
  Description of Artificial Sequence: Synthetic oligonucleotide
accaaagccuccucuaaac

SEQ ID NO: 2782410 - RNA, 19 nt, Artificial Sequence
  Description of Artificial Sequence: Synthetic oligonucleotide
ugcuccuucacauagccuc

SEQ ID NO: 2782411 - RNA, 19 nt, Artificial Sequence
  Description of Artificial Sequence: Synthetic oligonucleotide
augacaugaagguugggca

SEQ ID NO: 2782412 - RNA, 19 nt, Artificial Sequence
  Description of Artificial Sequence: Synthetic oligonucleotide
ugcaaauugcuccuucaca

SEQ ID NO: 2782413 - RNA, 19 nt, Artificial Sequence
  Description of Artificial Sequence: Synthetic oligonucleotide
uacuggaugcccucguugg

SEQ ID NO: 2782414 - RNA, 19 nt, Artificial Sequence
  Description of Artificial Sequence: Synthetic oligonucleotide
auguggacauccuucuugg

SEQ ID NO: 2782415 - RNA, 19 nt, Artificial Sequence
  Description of Artificial Sequence: Synthetic oligonucleotide
uccuucuuggccaccauca

SEQ ID NO: 2782416 - RNA, 19 nt, Artificial Sequence
  Description of Artificial Sequence: Synthetic oligonucleotide
uucaggacggcuacggcgc

SEQ ID NO: 2782417 - RNA, 19 nt, Artificial Sequence
  Description of Artificial Sequence: Synthetic oligonucleotide
guaaguggagguaaucccg

SEQ ID NO: 2782418 - RNA, 19 nt, Artificial Sequence
  Description of Artificial Sequence: Synthetic oligonucleotide
caugacaugaagguugggc

SEQ ID NO: 2782419 - RNA, 19 nt, Artificial Sequence
  Description of Artificial Sequence: Synthetic oligonucleotide
ugccucagcuuucuugucg

SEQ ID NO: 2782420 - RNA, 19 nt, Artificial Sequence
  Description of Artificial Sequence: Synthetic oligonucleotide
aauugcuccuucacauagc

SEQ ID NO: 2782421 - RNA, 19 nt, Artificial Sequence
  Description of Artificial Sequence: Synthetic oligonucleotide
augcaaauugcuccuucac

SEQ ID NO: 2782422 - RNA, 19 nt, Artificial Sequence
  Description of Artificial Sequence: Synthetic oligonucleotide
auagccucgcgacuucagc

SEQ ID NO: 2782423 - RNA, 19 nt, Artificial Sequence
  Description of Artificial Sequence: Synthetic oligonucleotide
cuucacauagccucgcgac

SEQ ID NO: 2782424 - RNA, 19 nt, Artificial Sequence
  Description of Artificial Sequence: Synthetic oligonucleotide
uucauagauggcgauccgg

SEQ ID NO: 2782425 - RNA, 19 nt, Artificial Sequence
  Description of Artificial Sequence: Synthetic oligonucleotide
gaucuccggagguaagugg

SEQ ID NO: 2782426 - RNA, 19 nt, Artificial Sequence
  Description of Artificial Sequence: Synthetic oligonucleotide
ucuugugaaucuugcaggu

SEQ ID NO: 2782427 - RNA, 19 nt, Artificial Sequence
  Description of Artificial Sequence: Synthetic oligonucleotide
ugggcaucaacaucgcggc

SEQ ID NO: 2782428 - RNA, 19 nt, Artificial Sequence
  Description of Artificial Sequence: Synthetic oligonucleotide
acugcaucgccuucaugac

SEQ ID NO: 2782429 - RNA, 19 nt, Artificial Sequence
  Description of Artificial Sequence: Synthetic oligonucleotide
caaagccuccucuaaacug

SEQ ID NO: 2782430 - RNA, 19 nt, Artificial Sequence
  Description of Artificial Sequence: Synthetic oligonucleotide
gaaucuugcaggucgcuca

SEQ ID NO: 2782431 - RNA, 19 nt, Artificial Sequence
  Description of Artificial Sequence: Synthetic oligonucleotide
uucuugucggcaccagggg

SEQ ID NO: 2782432 - RNA, 19 nt, Artificial Sequence
  Description of Artificial Sequence: Synthetic oligonucleotide
cauguggacauccuucuug

SEQ ID NO: 2782433 - RNA, 19 nt, Artificial Sequence
  Description of Artificial Sequence: Synthetic oligonucleotide
uagccucgcgacuucagcg

SEQ ID NO: 2782434 - RNA, 19 nt, Artificial Sequence
  Description of Artificial Sequence: Synthetic oligonucleotide
ugcaucgccuucaugacau

SEQ ID NO: 2782435 - RNA, 19 nt, Artificial Sequence
  Description of Artificial Sequence: Synthetic oligonucleotide
acagcacuccuccuguagg

SEQ ID NO: 2782436 - RNA, 19 nt, Artificial Sequence
  Description of Artificial Sequence: Synthetic oligonucleotide
aucccguagauacuggaug

SEQ ID NO: 2782437 - RNA, 19 nt, Artificial Sequence
  Description of Artificial Sequence: Synthetic oligonucleotide
ucaccuucuggaccuuugg

SEQ ID NO: 2782438 - RNA, 19 nt, Artificial Sequence
  Description of Artificial Sequence: Synthetic oligonucleotide
ucccguagauacuggaugc

SEQ ID NO: 2782439 - RNA, 19 nt, Artificial Sequence
  Description of Artificial Sequence: Synthetic oligonucleotide
uuugggcaucaacaucgcg

SEQ ID NO: 2782440 - RNA, 19 nt, Artificial Sequence
  Description of Artificial Sequence: Synthetic oligonucleotide
aguuucaggacggcuacgg

SEQ ID NO: 2782441 - RNA, 19 nt, Artificial Sequence
  Description of Artificial Sequence: Synthetic oligonucleotide
ugugaaucuugcaggucgc

SEQ ID NO: 2782442 - RNA, 19 nt, Artificial Sequence
  Description of Artificial Sequence: Synthetic oligonucleotide
uuggugagauaccaguaaa

SEQ ID NO: 2782443 - RNA, 19 nt, Artificial Sequence
  Description of Artificial Sequence: Synthetic oligonucleotide
guggacauccuucuuggcc

SEQ ID NO: 2782444 - RNA, 19 nt, Artificial Sequence
  Description of Artificial Sequence: Synthetic oligonucleotide
aguggagguaaucccguag

SEQ ID NO: 2782445 - RNA, 19 nt, Artificial Sequence
  Description of Artificial Sequence: Synthetic oligonucleotide
ucguuggugagauaccagu

SEQ ID NO: 2782446 - RNA, 19 nt, Artificial Sequence
  Description of Artificial Sequence: Synthetic oligonucleotide
gacaugaagguugggcacg

SEQ ID NO: 2782447 - RNA, 19 nt, Artificial Sequence
  Description of Artificial Sequence: Synthetic oligonucleotide
ucagcuuucuugucggcac

SEQ ID NO: 2782448 - RNA, 19 nt, Artificial Sequence
  Description of Artificial Sequence: Synthetic oligonucleotide
acuucagcgacugcaucgc

SEQ ID NO: 2782449 - RNA, 19 nt, Artificial Sequence
  Description of Artificial Sequence: Synthetic oligonucleotide
uggaccuuugggccgaggc

SEQ ID NO: 2782450 - RNA, 19 nt, Artificial Sequence
  Description of Artificial Sequence: Synthetic oligonucleotide
uaaguggagguaaucccgu

SEQ ID NO: 2782451 - RNA, 19 nt, Artificial Sequence
  Description of Artificial Sequence: Synthetic oligonucleotide
gguaaguggagguaauccc

SEQ ID NO: 2782452 - RNA, 19 nt, Artificial Sequence
  Description of Artificial Sequence: Synthetic oligonucleotide
ucgccuucaugacaugaag

SEQ ID NO: 2782453 - RNA, 19 nt, Artificial Sequence
  Description of Artificial Sequence: Synthetic oligonucleotide
ucuugcaggucgcucaccu

SEQ ID NO: 2782454 - RNA, 19 nt, Artificial Sequence
  Description of Artificial Sequence: Synthetic oligonucleotide
aacuggaauucuguggcug

SEQ ID NO: 2782455 - RNA, 19 nt, Artificial Sequence
  Description of Artificial Sequence: Synthetic oligonucleotide
uugggcacguucuugucug

SEQ ID NO: 2782456 - RNA, 19 nt, Artificial Sequence
  Description of Artificial Sequence: Synthetic oligonucleotide
acggcuacggcgcagggug

SEQ ID NO: 2782457 - RNA, 19 nt, Artificial Sequence
  Description of Artificial Sequence: Synthetic oligonucleotide
ugacaugaagguugggcac

SEQ ID NO: 2782458 - RNA, 19 nt, Artificial Sequence
  Description of Artificial Sequence: Synthetic oligonucleotide
ggaauucuguggcugagcc

SEQ ID NO: 2782459 - RNA, 19 nt, Artificial Sequence
  Description of Artificial Sequence: Synthetic oligonucleotide
uucuugucugccagcucgg

SEQ ID NO: 2782460 - RNA, 19 nt, Artificial Sequence
  Description of Artificial Sequence: Synthetic oligonucleotide
uggugagauaccaguaaaa

SEQ ID NO: 2782461 - RNA, 19 nt, Artificial Sequence
  Description of Artificial Sequence: Synthetic oligonucleotide
aaacuggaauucuguggcu

SEQ ID NO: 2782462 - RNA, 19 nt, Artificial Sequence
  Description of Artificial Sequence: Synthetic oligonucleotide
uguuugggcauguggacau

SEQ ID NO: 2782463 - RNA, 19 nt, Artificial Sequence
  Description of Artificial Sequence: Synthetic oligonucleotide
auacuggaugcccucguug

SEQ ID NO: 2782464 - RNA, 19 nt, Artificial Sequence
  Description of Artificial Sequence: Synthetic oligonucleotide
aaacaggaguucauagaug

SEQ ID NO: 2782465 - RNA, 19 nt, Artificial Sequence
  Description of Artificial Sequence: Synthetic oligonucleotide
uaaucccguagauacugga

SEQ ID NO: 2782466 - RNA, 19 nt, Artificial Sequence
  Description of Artificial Sequence: Synthetic oligonucleotide
uucacauagccucgcgacu

SEQ ID NO: 2782467 - RNA, 19 nt, Artificial Sequence
  Description of Artificial Sequence: Synthetic oligonucleotide
cuuucuugucggcaccagg

SEQ ID NO: 2782468 - RNA, 19 nt, Artificial Sequence
  Description of Artificial Sequence: Synthetic oligonucleotide
uuuugggcaucaacaucgc

SEQ ID NO: 2782469 - RNA, 19 nt, Artificial Sequence
  Description of Artificial Sequence: Synthetic oligonucleotide
cuguggcugagccagcucc

SEQ ID NO: 2782470 - RNA, 19 nt, Artificial Sequence
  Description of Artificial Sequence: Synthetic oligonucleotide
ucaacaucgcggcggcugc

SEQ ID NO: 2782471 - RNA, 19 nt, Artificial Sequence
  Description of Artificial Sequence: Synthetic oligonucleotide
ccuccaugcaaauugcucc

SEQ ID NO: 2782472 - RNA, 19 nt, Artificial Sequence
  Description of Artificial Sequence: Synthetic oligonucleotide
cuucuggaccuuugggccg

SEQ ID NO: 2782473 - RNA, 19 nt, Artificial Sequence
  Description of Artificial Sequence: Synthetic oligonucleotide
cacguccacgaccaaagcc

SEQ ID NO: 2782474 - RNA, 19 nt, Artificial Sequence
  Description of Artificial Sequence: Synthetic oligonucleotide
aaaaugccuccaugcaaau

SEQ ID NO: 2782475 - RNA, 19 nt, Artificial Sequence
  Description of Artificial Sequence: Synthetic oligonucleotide
uccuucacauagccucgcg

SEQ ID NO: 2782476 - RNA, 19 nt, Artificial Sequence
  Description of Artificial Sequence: Synthetic oligonucleotide
uucagcgacugcaucgccu

SEQ ID NO: 2782477 - RNA, 19 nt, Artificial Sequence
  Description of Artificial Sequence: Synthetic oligonucleotide
uuugggcauguggacaucc

SEQ ID NO: 2782478 - RNA, 19 nt, Artificial Sequence
  Description of Artificial Sequence: Synthetic oligonucleotide
cuguaggugucucugucug

SEQ ID NO: 2782479 - RNA, 19 nt, Artificial Sequence
  Description of Artificial Sequence: Synthetic oligonucleotide
acuggaauucuguggcuga

SEQ ID NO: 2782480 - RNA, 19 nt, Artificial Sequence
  Description of Artificial Sequence: Synthetic oligonucleotide
gguaaucccguagauacug

SEQ ID NO: 2782481 - RNA, 19 nt, Artificial Sequence
  Description of Artificial Sequence: Synthetic oligonucleotide
aggugucucugucugccuc

SEQ ID NO: 2782482 - RNA, 19 nt, Artificial Sequence
  Description of Artificial Sequence: Synthetic oligonucleotide
auccuucuuggccaccauc

SEQ ID NO: 2782483 - RNA, 19 nt, Artificial Sequence
  Description of Artificial Sequence: Synthetic oligonucleotide
uccucuaaacuggaauucu

SEQ ID NO: 2782484 - RNA, 19 nt, Artificial Sequence
  Description of Artificial Sequence: Synthetic oligonucleotide
cuugucugccagcucgggg

SEQ ID NO: 2782485 - RNA, 19 nt, Artificial Sequence
  Description of Artificial Sequence: Synthetic oligonucleotide
ccucuugugaaucuugcag

SEQ ID NO: 2782486 - RNA, 19 nt, Artificial Sequence
  Description of Artificial Sequence: Synthetic oligonucleotide
ucuccggagguaaguggag

SEQ ID NO: 2782487 - RNA, 19 nt, Artificial Sequence
  Description of Artificial Sequence: Synthetic oligonucleotide
uccuuaaacaggaguucau

SEQ ID NO: 2782488 - RNA, 19 nt, Artificial Sequence
  Description of Artificial Sequence: Synthetic oligonucleotide
aucaacaucgcggcggcug

SEQ ID NO: 2782489 - RNA, 19 nt, Artificial Sequence
  Description of Artificial Sequence: Synthetic oligonucleotide
cugaccacguccacgacca

SEQ ID NO: 2782490 - RNA, 19 nt, Artificial Sequence
  Description of Artificial Sequence: Synthetic oligonucleotide
uguaggugucucugucugc

SEQ ID NO: 2782491 - RNA, 19 nt, Artificial Sequence
  Description of Artificial Sequence: Synthetic oligonucleotide
guucauagauggcgauccg

SEQ ID NO: 2782492 - RNA, 19 nt, Artificial Sequence
  Description of Artificial Sequence: Synthetic oligonucleotide
acguccacgaccaaagccu

SEQ ID NO: 2782493 - RNA, 19 nt, Artificial Sequence
  Description of Artificial Sequence: Synthetic oligonucleotide
guuggugagauaccaguaa

SEQ ID NO: 2782494 - RNA, 19 nt, Artificial Sequence
  Description of Artificial Sequence: Synthetic oligonucleotide
ccuucuggaccuuugggcc

SEQ ID NO: 2782495 - RNA, 19 nt, Artificial Sequence
  Description of Artificial Sequence: Synthetic oligonucleotide
uccuguaggugucucuguc

SEQ ID NO: 2782496 - RNA, 19 nt, Artificial Sequence
  Description of Artificial Sequence: Synthetic oligonucleotide
ggcaucaacaucgcggcgg

SEQ ID NO: 2782497 - RNA, 19 nt, Artificial Sequence
  Description of Artificial Sequence: Synthetic oligonucleotide
aagguugggcacguucuug

SEQ ID NO: 2782498 - RNA, 19 nt, Artificial Sequence
  Description of Artificial Sequence: Synthetic oligonucleotide
ucgcucaccuucuggaccu

SEQ ID NO: 2782499 - RNA, 19 nt, Artificial Sequence
  Description of Artificial Sequence: Synthetic oligonucleotide
uccggagguaaguggaggu

SEQ ID NO: 2782500 - RNA, 19 nt, Artificial Sequence
  Description of Artificial Sequence: Synthetic oligonucleotide
gucgcucaccuucuggacc

SEQ ID NO: 2782501 - RNA, 19 nt, Artificial Sequence
  Description of Artificial Sequence: Synthetic oligonucleotide
uccccucuugugaaucuug

SEQ ID NO: 2782502 - RNA, 19 nt, Artificial Sequence
  Description of Artificial Sequence: Synthetic oligonucleotide
acuggggcggcugaccacg

SEQ ID NO: 2782503 - RNA, 19 nt, Artificial Sequence
  Description of Artificial Sequence: Synthetic oligonucleotide
acaggaguucauagauggc

SEQ ID NO: 2782504 - RNA, 19 nt, Artificial Sequence
  Description of Artificial Sequence: Synthetic oligonucleotide
aggucgcucaccuucugga

SEQ ID NO: 2782505 - RNA, 19 nt, Artificial Sequence
  Description of Artificial Sequence: Synthetic oligonucleotide
accacguccacgaccaaag

SEQ ID NO: 2782506 - RNA, 19 nt, Artificial Sequence
  Description of Artificial Sequence: Synthetic oligonucleotide
ucacuggggcggcugacca

SEQ ID NO: 2782507 - RNA, 19 nt, Artificial Sequence
  Description of Artificial Sequence: Synthetic oligonucleotide
caccuucuggaccuuuggg

SEQ ID NO: 2782508 - RNA, 19 nt, Artificial Sequence
  Description of Artificial Sequence: Synthetic oligonucleotide
agguugggcacguucuugu

SEQ ID NO: 2782509 - RNA, 19 nt, Artificial Sequence
  Description of Artificial Sequence: Synthetic oligonucleotide
uggaugcccucguugguga

SEQ ID NO: 2782510 - RNA, 19 nt, Artificial Sequence
  Description of Artificial Sequence: Synthetic oligonucleotide
uggagguaaucccguagau

SEQ ID NO: 2782511 - RNA, 19 nt, Artificial Sequence
  Description of Artificial Sequence: Synthetic oligonucleotide
caugcaaauugcuccuuca

SEQ ID NO: 2782512 - RNA, 19 nt, Artificial Sequence
  Description of Artificial Sequence: Synthetic oligonucleotide
cucguuggugagauaccag

SEQ ID NO: 2782513 - RNA, 19 nt, Artificial Sequence
  Description of Artificial Sequence: Synthetic oligonucleotide
aaucccguagauacuggau

SEQ ID NO: 2782514 - RNA, 19 nt, Artificial Sequence
  Description of Artificial Sequence: Synthetic oligonucleotide
guaaucccguagauacugg

SEQ ID NO: 2782515 - RNA, 19 nt, Artificial Sequence
  Description of Artificial Sequence: Synthetic oligonucleotide
augccuccaugcaaauugc

SEQ ID NO: 2782516 - RNA, 19 nt, Artificial Sequence
  Description of Artificial Sequence: Synthetic oligonucleotide
guggagguaaucccguaga

SEQ ID NO: 2782517 - RNA, 19 nt, Artificial Sequence
  Description of Artificial Sequence: Synthetic oligonucleotide
guggcaggcacgaucuccg

SEQ ID NO: 2782518 - RNA, 19 nt, Artificial Sequence
  Description of Artificial Sequence: Synthetic oligonucleotide
ugaaucuugcaggucgcuc

SEQ ID NO: 2782519 - RNA, 19 nt, Artificial Sequence
  Description of Artificial Sequence: Synthetic oligonucleotide
agauacuggaugcccucgu

SEQ ID NO: 2782520 - RNA, 19 nt, Artificial Sequence
  Description of Artificial Sequence: Synthetic oligonucleotide
cacagcacuccuccuguag

SEQ ID NO: 2782521 - RNA, 19 nt, Artificial Sequence
  Description of Artificial Sequence: Synthetic oligonucleotide
gaauucuguggcugagcca

SEQ ID NO: 2782522 - RNA, 19 nt, Artificial Sequence
  Description of Artificial Sequence: Synthetic oligonucleotide
uggaauucuguggcugagc

SEQ ID NO: 2782523 - RNA, 19 nt, Artificial Sequence
  Description of Artificial Sequence: Synthetic oligonucleotide
uguggacauccuucuuggc

SEQ ID NO: 2782524 - RNA, 19 nt, Artificial Sequence
  Description of Artificial Sequence: Synthetic oligonucleotide
agcucgggguguuugggca

SEQ ID NO: 2782525 - RNA, 19 nt, Artificial Sequence
  Description of Artificial Sequence: Synthetic oligonucleotide
uguggcugagccagcuccu

SEQ ID NO: 2782526 - RNA, 19 nt, Artificial Sequence
  Description of Artificial Sequence: Synthetic oligonucleotide
ucagcgacugcaucgccuu

SEQ ID NO: 2782527 - RNA, 19 nt, Artificial Sequence
  Description of Artificial Sequence: Synthetic oligonucleotide
gcaggcacgaucuccggag

SEQ ID NO: 2782528 - RNA, 19 nt, Artificial Sequence
  Description of Artificial Sequence: Synthetic oligonucleotide
caucgcggcggcugcaggg

SEQ ID NO: 2782529 - RNA, 19 nt, Artificial Sequence
  Description of Artificial Sequence: Synthetic oligonucleotide
guuucaggacggcuacggc

SEQ ID NO: 2782530 - RNA, 19 nt, Artificial Sequence
  Description of Artificial Sequence: Synthetic oligonucleotide
ugucugccagcucggggug

SEQ ID NO: 2782531 - RNA, 19 nt, Artificial Sequence
  Description of Artificial Sequence: Synthetic oligonucleotide
ucuugucugccagcucggg

SEQ ID NO: 2782532 - RNA, 19 nt, Artificial Sequence
  Description of Artificial Sequence: Synthetic oligonucleotide
aacaucgcggcggcugcag

SEQ ID NO: 2782533 - RNA, 19 nt, Artificial Sequence
  Description of Artificial Sequence: Synthetic oligonucleotide
aggaguucauagauggcga

SEQ ID NO: 2782534 - RNA, 19 nt, Artificial Sequence
  Description of Artificial Sequence: Synthetic oligonucleotide
ugcaggucgcucaccuucu

SEQ ID NO: 2782535 - RNA, 19 nt, Artificial Sequence
  Description of Artificial Sequence: Synthetic oligonucleotide
cuccucuaaacuggaauuc

SEQ ID NO: 2782536 - RNA, 19 nt, Artificial Sequence
  Description of Artificial Sequence: Synthetic oligonucleotide
cauagccucgcgacuucag

SEQ ID NO: 2782537 - RNA, 19 nt, Artificial Sequence
  Description of Artificial Sequence: Synthetic oligonucleotide
ucacauagccucgcgacuu

SEQ ID NO: 2782538 - RNA, 19 nt, Artificial Sequence
  Description of Artificial Sequence: Synthetic oligonucleotide
cucaccuucuggaccuuug

SEQ ID NO: 2782539 - RNA, 19 nt, Artificial Sequence
  Description of Artificial Sequence: Synthetic oligonucleotide
uacggcgcaggguggcagg

SEQ ID NO: 2782540 - RNA, 19 nt, Artificial Sequence
  Description of Artificial Sequence: Synthetic oligonucleotide
gaguucauagauggcgauc

SEQ ID NO: 2782541 - RNA, 19 nt, Artificial Sequence
  Description of Artificial Sequence: Synthetic oligonucleotide
uugggccgaggccugccag

SEQ ID NO: 2782542 - RNA, 19 nt, Artificial Sequence
  Description of Artificial Sequence: Synthetic oligonucleotide
uugggcauguggacauccu

SEQ ID NO: 2782543 - RNA, 19 nt, Artificial Sequence
  Description of Artificial Sequence: Synthetic oligonucleotide
gguguuugggcauguggac

SEQ ID NO: 2782544 - RNA, 19 nt, Artificial Sequence
  Description of Artificial Sequence: Synthetic oligonucleotide
cucuaaacuggaauucugu

SEQ ID NO: 2782545 - RNA, 19 nt, Artificial Sequence
  Description of Artificial Sequence: Synthetic oligonucleotide
caggucgcucaccuucugg

SEQ ID NO: 2782546 - RNA, 19 nt, Artificial Sequence
  Description of Artificial Sequence: Synthetic oligonucleotide
ccugccaguuucaggacgg

SEQ ID NO: 2782547 - RNA, 19 nt, Artificial Sequence
  Description of Artificial Sequence: Synthetic oligonucleotide
aucuccggagguaagugga

SEQ ID NO: 2782548 - RNA, 19 nt, Artificial Sequence
  Description of Artificial Sequence: Synthetic oligonucleotide
uggcugagccagcuccugc

SEQ ID NO: 2782549 - RNA, 19 nt, Artificial Sequence
  Description of Artificial Sequence: Synthetic oligonucleotide
uuugggccgaggccugcca

SEQ ID NO: 2782550 - RNA, 19 nt, Artificial Sequence
  Description of Artificial Sequence: Synthetic oligonucleotide
auggcgauccgguucuuuu

SEQ ID NO: 2782551 - RNA, 19 nt, Artificial Sequence
  Description of Artificial Sequence: Synthetic oligonucleotide
aaggucacuggggcggcug

SEQ ID NO: 2782552 - RNA, 19 nt, Artificial Sequence
  Description of Artificial Sequence: Synthetic oligonucleotide
gaccaaagccuccucuaaa

SEQ ID NO: 2782553 - RNA, 19 nt, Artificial Sequence
  Description of Artificial Sequence: Synthetic oligonucleotide
ucaugacaugaagguuggg

SEQ ID NO: 2782554 - RNA, 19 nt, Artificial Sequence
  Description of Artificial Sequence: Synthetic oligonucleotide
aaguggagguaaucccgua

SEQ ID NO: 2782555 - RNA, 19 nt, Artificial Sequence
  Description of Artificial Sequence: Synthetic oligonucleotide
cacguucuugucugccagc

SEQ ID NO: 2782556 - RNA, 19 nt, Artificial Sequence
  Description of Artificial Sequence: Synthetic oligonucleotide
agccucgcgacuucagcga

SEQ ID NO: 2782557 - RNA, 19 nt, Artificial Sequence
  Description of Artificial Sequence: Synthetic oligonucleotide
acgaccaaagccuccucua

SEQ ID NO: 2782558 - RNA, 19 nt, Artificial Sequence
  Description of Artificial Sequence: Synthetic oligonucleotide
cuccuuaaacaggaguuca

SEQ ID NO: 2782559 - RNA, 19 nt, Artificial Sequence
  Description of Artificial Sequence: Synthetic oligonucleotide
uugcuccuucacauagccu

SEQ ID NO: 2782560 - RNA, 19 nt, Artificial Sequence
  Description of Artificial Sequence: Synthetic oligonucleotide
cuccggagguaaguggagg

SEQ ID NO: 2782561 - RNA, 19 nt, Artificial Sequence
  Description of Artificial Sequence: Synthetic oligonucleotide
ugggcauguggacauccuu

SEQ ID NO: 2782562 - RNA, 19 nt, Artificial Sequence
  Description of Artificial Sequence: Synthetic oligonucleotide
gcaaauugcuccuucacau

SEQ ID NO: 2782563 - RNA, 19 nt, Artificial Sequence
  Description of Artificial Sequence: Synthetic oligonucleotide
aaaugccuccaugcaaauu

SEQ ID NO: 2782564 - RNA, 19 nt, Artificial Sequence
  Description of Artificial Sequence: Synthetic oligonucleotide
caggguggcaggcacgauc

SEQ ID NO: 2782565 - RNA, 19 nt, Artificial Sequence
  Description of Artificial Sequence: Synthetic oligonucleotide
ggugucucugucugccucc

SEQ ID NO: 2782566 - RNA, 19 nt, Artificial Sequence
  Description of Artificial Sequence: Synthetic oligonucleotide
acguucuugucugccagcu

SEQ ID NO: 2782567 - RNA, 19 nt, Artificial Sequence
  Description of Artificial Sequence: Synthetic oligonucleotide
acuggaugcccucguuggu

SEQ ID NO: 2782568 - RNA, 19 nt, Artificial Sequence
  Description of Artificial Sequence: Synthetic oligonucleotide
gagguaaguggagguaauc

SEQ ID NO: 2782569 - RNA, 19 nt, Artificial Sequence
  Description of Artificial Sequence: Synthetic oligonucleotide
gcugaccacguccacgacc

SEQ ID NO: 2782570 - RNA, 19 nt, Artificial Sequence
  Description of Artificial Sequence: Synthetic oligonucleotide
ggaccuuugggccgaggcc

SEQ ID NO: 2782571 - RNA, 19 nt, Artificial Sequence
  Description of Artificial Sequence: Synthetic oligonucleotide
acauccuucuuggccacca

SEQ ID NO: 2782572 - RNA, 19 nt, Artificial Sequence
  Description of Artificial Sequence: Synthetic oligonucleotide
caggguccgaggcggaggc

SEQ ID NO: 2782573 - RNA, 19 nt, Artificial Sequence
  Description of Artificial Sequence: Synthetic oligonucleotide
cuggaugcccucguuggug

SEQ ID NO: 2782574 - RNA, 19 nt, Artificial Sequence
  Description of Artificial Sequence: Synthetic oligonucleotide
cuugugaaucuugcagguc

SEQ ID NO: 2782575 - RNA, 19 nt, Artificial Sequence
  Description of Artificial Sequence: Synthetic oligonucleotide
cuggaauucuguggcugag

SEQ ID NO: 2782576 - RNA, 19 nt, Artificial Sequence
  Description of Artificial Sequence: Synthetic oligonucleotide
cucgcgacuucagcgacug

SEQ ID NO: 2782577 - RNA, 19 nt, Artificial Sequence
  Description of Artificial Sequence: Synthetic oligonucleotide
cugucugccuccccucuug

SEQ ID NO: 2782578 - RNA, 19 nt, Artificial Sequence
  Description of Artificial Sequence: Synthetic oligonucleotide
gcugcaggguccgaggcgg

SEQ ID NO: 2782579 - RNA, 19 nt, Artificial Sequence
  Description of Artificial Sequence: Synthetic oligonucleotide
cagcuuucuugucggcacc

SEQ ID NO: 2782580 - RNA, 19 nt, Artificial Sequence
  Description of Artificial Sequence: Synthetic oligonucleotide
ccucuaaacuggaauucug

SEQ ID NO: 2782581 - RNA, 19 nt, Artificial Sequence
  Description of Artificial Sequence: Synthetic oligonucleotide
uucuguggcugagccagcu

SEQ ID NO: 2782582 - RNA, 19 nt, Artificial Sequence
  Description of Artificial Sequence: Synthetic oligonucleotide
aggacggcuacggcgcagg

SEQ ID NO: 2782583 - RNA, 19 nt, Artificial Sequence
  Description of Artificial Sequence: Synthetic oligonucleotide
acaucgcggcggcugcagg

SEQ ID NO: 2782584 - RNA, 19 nt, Artificial Sequence
  Description of Artificial Sequence: Synthetic oligonucleotide
ugucugccuccccucuugu

SEQ ID NO: 2782585 - RNA, 19 nt, Artificial Sequence
  Description of Artificial Sequence: Synthetic oligonucleotide
gcacguucuugucugccag

SEQ ID NO: 2782586 - RNA, 19 nt, Artificial Sequence
  Description of Artificial Sequence: Synthetic oligonucleotide
uucuggaccuuugggccga

SEQ ID NO: 2782587 - RNA, 19 nt, Artificial Sequence
  Description of Artificial Sequence: Synthetic oligonucleotide
caggcacgaucuccggagg

SEQ ID NO: 2782588 - RNA, 19 nt, Artificial Sequence
  Description of Artificial Sequence: Synthetic oligonucleotide
cacgaucuccggagguaag

SEQ ID NO: 2782589 - RNA, 19 nt, Artificial Sequence
  Description of Artificial Sequence: Synthetic oligonucleotide
caaauugcuccuucacaua

SEQ ID NO: 2782590 - RNA, 19 nt, Artificial Sequence
  Description of Artificial Sequence: Synthetic oligonucleotide
guguuugggcauguggaca

SEQ ID NO: 2782591 - RNA, 19 nt, Artificial Sequence
  Description of Artificial Sequence: Synthetic oligonucleotide
cuucagcgacugcaucgcc

SEQ ID NO: 2782592 - RNA, 19 nt, Artificial Sequence
  Description of Artificial Sequence: Synthetic oligonucleotide
gccugccaguuucaggacg

SEQ ID NO: 2782593 - RNA, 19 nt, Artificial Sequence
  Description of Artificial Sequence: Synthetic oligonucleotide
ggcugagccagcuccugcc

SEQ ID NO: 2782594 - RNA, 19 nt, Artificial Sequence
  Description of Artificial Sequence: Synthetic oligonucleotide
ugucucugucugccucccc

SEQ ID NO: 2782595 - RNA, 19 nt, Artificial Sequence
  Description of Artificial Sequence: Synthetic oligonucleotide
uaggugucucugucugccu

SEQ ID NO: 2782596 - RNA, 19 nt, Artificial Sequence
  Description of Artificial Sequence: Synthetic oligonucleotide
acgaucuccggagguaagu

SEQ ID NO: 2782597 - RNA, 19 nt, Artificial Sequence
  Description of Artificial Sequence: Synthetic oligonucleotide
cacuccuccuguagguguc

SEQ ID NO: 2782598 - RNA, 19 nt, Artificial Sequence
  Description of Artificial Sequence: Synthetic oligonucleotide
gguggcaggcacgaucucc

SEQ ID NO: 2782599 - RNA, 19 nt, Artificial Sequence
  Description of Artificial Sequence: Synthetic oligonucleotide
agcgacugcaucgccuuca

SEQ ID NO: 2782600 - RNA, 19 nt, Artificial Sequence
  Description of Artificial Sequence: Synthetic oligonucleotide
cgccuucaugacaugaagg

SEQ ID NO: 2782601 - RNA, 19 nt, Artificial Sequence
  Description of Artificial Sequence: Synthetic oligonucleotide
gaccuuugggccgaggccu

SEQ ID NO: 2782602 - RNA, 19 nt, Artificial Sequence
  Description of Artificial Sequence: Synthetic oligonucleotide
aggcacgaucuccggaggu

SEQ ID NO: 2782603 - RNA, 19 nt, Artificial Sequence
  Description of Artificial Sequence: Synthetic oligonucleotide
ggguguuugggcaugugga

SEQ ID NO: 2782604 - RNA, 19 nt, Artificial Sequence
  Description of Artificial Sequence: Synthetic oligonucleotide
ugccaguuucaggacggcu

SEQ ID NO: 2782605 - RNA, 19 nt, Artificial Sequence
  Description of Artificial Sequence: Synthetic oligonucleotide
gcaucaacaucgcggcggc

SEQ ID NO: 2782606 - RNA, 19 nt, Artificial Sequence
  Description of Artificial Sequence: Synthetic oligonucleotide
auucuguggcugagccagc

SEQ ID NO: 2782607 - RNA, 19 nt, Artificial Sequence
  Description of Artificial Sequence: Synthetic oligonucleotide
agcacuccuccuguaggug

SEQ ID NO: 2782608 - RNA, 19 nt, Artificial Sequence
  Description of Artificial Sequence: Synthetic oligonucleotide
ucaggacggcuacggcgca

SEQ ID NO: 2782609 - RNA, 19 nt, Artificial Sequence
  Description of Artificial Sequence: Synthetic oligonucleotide
ggggcggcugaccacgucc

SEQ ID NO: 2782610 - RNA, 19 nt, Artificial Sequence
  Description of Artificial Sequence: Synthetic oligonucleotide
ccaguuucaggacggcuac

SEQ ID NO: 2782611 - RNA, 19 nt, Artificial Sequence
  Description of Artificial Sequence: Synthetic oligonucleotide
acaugaagguugggcacgu

SEQ ID NO: 2782612 - RNA, 19 nt, Artificial Sequence
  Description of Artificial Sequence: Synthetic oligonucleotide
guugggcacguucuugucu

SEQ ID NO: 2782613 - RNA, 19 nt, Artificial Sequence
  Description of Artificial Sequence: Synthetic oligonucleotide
ucugucugccuccccucuu

SEQ ID NO: 2782614 - RNA, 19 nt, Artificial Sequence
  Description of Artificial Sequence: Synthetic oligonucleotide
cucagcuuucuugucggca

SEQ ID NO: 2782615 - RNA, 19 nt, Artificial Sequence
  Description of Artificial Sequence: Synthetic oligonucleotide
agcuuucuugucggcacca

SEQ ID NO: 2782616 - RNA, 19 nt, Artificial Sequence
  Description of Artificial Sequence: Synthetic oligonucleotide
gcuccuucacauagccucg

SEQ ID NO: 2782617 - RNA, 19 nt, Artificial Sequence
  Description of Artificial Sequence: Synthetic oligonucleotide
ugggcacguucuugucugc

SEQ ID NO: 2782618 - RNA, 19 nt, Artificial Sequence
  Description of Artificial Sequence: Synthetic oligonucleotide
aucgccuucaugacaugaa

SEQ ID NO: 2782619 - RNA, 19 nt, Artificial Sequence
  Description of Artificial Sequence: Synthetic oligonucleotide
ggcugcaggguccgaggcg

SEQ ID NO: 2782620 - RNA, 19 nt, Artificial Sequence
  Description of Artificial Sequence: Synthetic oligonucleotide
gcccucguuggugagauac

SEQ ID NO: 2782621 - RNA, 19 nt, Artificial Sequence
  Description of Artificial Sequence: Synthetic oligonucleotide
ugccagcucgggguguuug

SEQ ID NO: 2782622 - RNA, 19 nt, Artificial Sequence
  Description of Artificial Sequence: Synthetic oligonucleotide
ugcaggguccgaggcggag

SEQ ID NO: 2782623 - RNA, 19 nt, Artificial Sequence
  Description of Artificial Sequence: Synthetic oligonucleotide
ugggccgaggccugccagu

SEQ ID NO: 2782624 - RNA, 19 nt, Artificial Sequence
  Description of Artificial Sequence: Synthetic oligonucleotide
cacauagccucgcgacuuc

SEQ ID NO: 2782625 - RNA, 19 nt, Artificial Sequence
  Description of Artificial Sequence: Synthetic oligonucleotide
caguuucaggacggcuacg

SEQ ID NO: 2782626 - RNA, 19 nt, Artificial Sequence
  Description of Artificial Sequence: Synthetic oligonucleotide
gucacuggggcggcugacc

SEQ ID NO: 2782627 - RNA, 19 nt, Artificial Sequence
  Description of Artificial Sequence: Synthetic oligonucleotide
agguaaucccguagauacu

SEQ ID NO: 2782628 - RNA, 19 nt, Artificial Sequence
  Description of Artificial Sequence: Synthetic oligonucleotide
cuuugggccgaggccugcc

SEQ ID NO: 2782629 - RNA, 19 nt, Artificial Sequence
  Description of Artificial Sequence: Synthetic oligonucleotide
cuccaugcaaauugcuccu

SEQ ID NO: 2782630 - RNA, 19 nt, Artificial Sequence
  Description of Artificial Sequence: Synthetic oligonucleotide
ccccucuugugaaucuugc

SEQ ID NO: 2782631 - RNA, 19 nt, Artificial Sequence
  Description of Artificial Sequence: Synthetic oligonucleotide
acauagccucgcgacuuca

SEQ ID NO: 2782632 - RNA, 19 nt, Artificial Sequence
  Description of Artificial Sequence: Synthetic oligonucleotide
aggucacuggggcggcuga

SEQ ID NO: 2782633 - RNA, 19 nt, Artificial Sequence
  Description of Artificial Sequence: Synthetic oligonucleotide
ccguagauacuggaugccc

SEQ ID NO: 2782634 - RNA, 19 nt, Artificial Sequence
  Description of Artificial Sequence: Synthetic oligonucleotide
gucugccuccccucuugug

SEQ ID NO: 2782635 - RNA, 19 nt, Artificial Sequence
  Description of Artificial Sequence: Synthetic oligonucleotide
cugcaucgccuucaugaca

SEQ ID NO: 2782636 - RNA, 19 nt, Artificial Sequence
  Description of Artificial Sequence: Synthetic oligonucleotide
gggcauguggacauccuuc

SEQ ID NO: 2782637 - RNA, 19 nt, Artificial Sequence
  Description of Artificial Sequence: Synthetic oligonucleotide
gacauccuucuuggccacc

SEQ ID NO: 2782638 - RNA, 19 nt, Artificial Sequence
  Description of Artificial Sequence: Synthetic oligonucleotide
gauacuggaugcccucguu

SEQ ID NO: 2782639 - RNA, 19 nt, Artificial Sequence
  Description of Artificial Sequence: Synthetic oligonucleotide
ggucgcucaccuucuggac

SEQ ID NO: 2782640 - RNA, 19 nt, Artificial Sequence
  Description of Artificial Sequence: Synthetic oligonucleotide
agcuccugccucagcuuuc

SEQ ID NO: 2782641 - RNA, 19 nt, Artificial Sequence
  Description of Artificial Sequence: Synthetic oligonucleotide
gccagcucgggguguuugg

SEQ ID NO: 2782642 - RNA, 19 nt, Artificial Sequence
  Description of Artificial Sequence: Synthetic oligonucleotide
cuacggcgcaggguggcag

SEQ ID NO: 2782643 - RNA, 19 nt, Artificial Sequence
  Description of Artificial Sequence: Synthetic oligonucleotide
gaccacguccacgaccaaa

SEQ ID NO: 2782644 - RNA, 19 nt, Artificial Sequence
  Description of Artificial Sequence: Synthetic oligonucleotide
ggcacguucuugucugcca

SEQ ID NO: 2782645 - RNA, 19 nt, Artificial Sequence
  Description of Artificial Sequence: Synthetic oligonucleotide
ggcauguggacauccuucu

SEQ ID NO: 2782646 - RNA, 19 nt, Artificial Sequence
  Description of Artificial Sequence: Synthetic oligonucleotide
gugucucugucugccuccc

SEQ ID NO: 2782647 - RNA, 19 nt, Artificial Sequence
  Description of Artificial Sequence: Synthetic oligonucleotide
ccaugcaaauugcuccuuc

SEQ ID NO: 2782648 - RNA, 19 nt, Artificial Sequence
  Description of Artificial Sequence: Synthetic oligonucleotide
uccaugcaaauugcuccuu

SEQ ID NO: 2782649 - RNA, 19 nt, Artificial Sequence
  Description of Artificial Sequence: Synthetic oligonucleotide
aggcggaggccggaaagga

SEQ ID NO: 2782650 - RNA, 19 nt, Artificial Sequence
  Description of Artificial Sequence: Synthetic oligonucleotide
gcggcugcaggguccgagg

SEQ ID NO: 2782651 - RNA, 19 nt, Artificial Sequence
  Description of Artificial Sequence: Synthetic oligonucleotide
gccgaggccugccaguuuc

SEQ ID NO: 2782652 - RNA, 19 nt, Artificial Sequence
  Description of Artificial Sequence: Synthetic oligonucleotide
gggcaucaacaucgcggcg

SEQ ID NO: 2782653 - RNA, 19 nt, Artificial Sequence
  Description of Artificial Sequence: Synthetic oligonucleotide
gccuccaugcaaauugcuc

SEQ ID NO: 2782654 - RNA, 19 nt, Artificial Sequence
  Description of Artificial Sequence: Synthetic oligonucleotide
ggacauccuucuuggccac

SEQ ID NO: 2782655 - RNA, 19 nt, Artificial Sequence
  Description of Artificial Sequence: Synthetic oligonucleotide
gcggcugaccacguccacg

SEQ ID NO: 2782656 - RNA, 19 nt, Artificial Sequence
  Description of Artificial Sequence: Synthetic oligonucleotide
cucgggguguuugggcaug

SEQ ID NO: 2782657 - RNA, 19 nt, Artificial Sequence
  Description of Artificial Sequence: Synthetic oligonucleotide
aucgcggcggcugcagggu

SEQ ID NO: 2782658 - RNA, 19 nt, Artificial Sequence
  Description of Artificial Sequence: Synthetic oligonucleotide
ggagguaaucccguagaua

SEQ ID NO: 2782659 - RNA, 19 nt, Artificial Sequence
  Description of Artificial Sequence: Synthetic oligonucleotide
cacuggggcggcugaccac

SEQ ID NO: 2782660 - RNA, 19 nt, Artificial Sequence
  Description of Artificial Sequence: Synthetic oligonucleotide
cugccuccccucuugugaa

SEQ ID NO: 2782661 - RNA, 19 nt, Artificial Sequence
  Description of Artificial Sequence: Synthetic oligonucleotide
ucugccagcucgggguguu

SEQ ID NO: 2782662 - RNA, 19 nt, Artificial Sequence
  Description of Artificial Sequence: Synthetic oligonucleotide
gguugggcacguucuuguc

SEQ ID NO: 2782663 - RNA, 19 nt, Artificial Sequence
  Description of Artificial Sequence: Synthetic oligonucleotide
gcaggguccgaggcggagg

SEQ ID NO: 2782664 - RNA, 19 nt, Artificial Sequence
  Description of Artificial Sequence: Synthetic oligonucleotide
cacgaccaaagccuccucu

SEQ ID NO: 2782665 - RNA, 19 nt, Artificial Sequence
  Description of Artificial Sequence: Synthetic oligonucleotide
cugccaguuucaggacggc

SEQ ID NO: 2782666 - RNA, 19 nt, Artificial Sequence
  Description of Artificial Sequence: Synthetic oligonucleotide
ccuucuuggccaccaucac

SEQ ID NO: 2782667 - RNA, 19 nt, Artificial Sequence
  Description of Artificial Sequence: Synthetic oligonucleotide
cccucguuggugagauacc

SEQ ID NO: 2782668 - RNA, 19 nt, Artificial Sequence
  Description of Artificial Sequence: Synthetic oligonucleotide
ucgcgacuucagcgacugc

SEQ ID NO: 2782669 - RNA, 19 nt, Artificial Sequence
  Description of Artificial Sequence: Synthetic oligonucleotide
guggcugagccagcuccug

SEQ ID NO: 2782670 - RNA, 19 nt, Artificial Sequence
  Description of Artificial Sequence: Synthetic oligonucleotide
acuccuccuguaggugucu

SEQ ID NO: 2782671 - RNA, 19 nt, Artificial Sequence
  Description of Artificial Sequence: Synthetic oligonucleotide
ccuucacauagccucgcga

SEQ ID NO: 2782672 - RNA, 19 nt, Artificial Sequence
  Description of Artificial Sequence: Synthetic oligonucleotide
gccaguuucaggacggcua

SEQ ID NO: 2782673 - RNA, 19 nt, Artificial Sequence
  Description of Artificial Sequence: Synthetic oligonucleotide
cccguagauacuggaugcc

SEQ ID NO: 2782674 - RNA, 19 nt, Artificial Sequence
  Description of Artificial Sequence: Synthetic oligonucleotide
ucuggaccuuugggccgag

SEQ ID NO: 2782675 - RNA, 19 nt, Artificial Sequence
  Description of Artificial Sequence: Synthetic oligonucleotide
cagcacuccuccuguaggu

SEQ ID NO: 2782676 - RNA, 19 nt, Artificial Sequence
  Description of Artificial Sequence: Synthetic oligonucleotide
gccuccucuaaacuggaau

SEQ ID NO: 2782677 - RNA, 19 nt, Artificial Sequence
  Description of Artificial Sequence: Synthetic oligonucleotide
ucgggguguuugggcaugu

SEQ ID NO: 2782678 - RNA, 19 nt, Artificial Sequence
  Description of Artificial Sequence: Synthetic oligonucleotide
cauagauggcgauccgguu

SEQ ID NO: 2782679 - RNA, 19 nt, Artificial Sequence
  Description of Artificial Sequence: Synthetic oligonucleotide
ggcacagcacuccuccugu

SEQ ID NO: 2782680 - RNA, 19 nt, Artificial Sequence
  Description of Artificial Sequence: Synthetic oligonucleotide
ggcaggcacgaucuccgga

SEQ ID NO: 2782681 - RNA, 19 nt, Artificial Sequence
  Description of Artificial Sequence: Synthetic oligonucleotide
ugccuccccucuugugaau

SEQ ID NO: 2782682 - RNA, 19 nt, Artificial Sequence
  Description of Artificial Sequence: Synthetic oligonucleotide
ugaccacguccacgaccaa

SEQ ID NO: 2782683 - RNA, 19 nt, Artificial Sequence
  Description of Artificial Sequence: Synthetic oligonucleotide
guuugggcauguggacauc

SEQ ID NO: 2782684 - RNA, 19 nt, Artificial Sequence
  Description of Artificial Sequence: Synthetic oligonucleotide
ggacggcuacggcgcaggg

SEQ ID NO: 2782685 - RNA, 19 nt, Artificial Sequence
  Description of Artificial Sequence: Synthetic oligonucleotide
uggggcggcugaccacguc

SEQ ID NO: 2782686 - RNA, 19 nt, Artificial Sequence
  Description of Artificial Sequence: Synthetic oligonucleotide
ccuuaaacaggaguucaua

SEQ ID NO: 2782687 - RNA, 19 nt, Artificial Sequence
  Description of Artificial Sequence: Synthetic oligonucleotide
gggcacguucuugucugcc

SEQ ID NO: 2782688 - RNA, 19 nt, Artificial Sequence
  Description of Artificial Sequence: Synthetic oligonucleotide
uccgaggcggaggccggaa

SEQ ID NO: 2782689 - RNA, 19 nt, Artificial Sequence
  Description of Artificial Sequence: Synthetic oligonucleotide
ucgcggcggcugcaggguc

SEQ ID NO: 2782690 - RNA, 19 nt, Artificial Sequence
  Description of Artificial Sequence: Synthetic oligonucleotide
ccucguuggugagauacca

SEQ ID NO: 2782691 - RNA, 19 nt, Artificial Sequence
  Description of Artificial Sequence: Synthetic oligonucleotide
ccucagcuuucuugucggc

SEQ ID NO: 2782692 - RNA, 19 nt, Artificial Sequence
  Description of Artificial Sequence: Synthetic oligonucleotide
cuggaccuuugggccgagg

SEQ ID NO: 2782693 - RNA, 19 nt, Artificial Sequence
  Description of Artificial Sequence: Synthetic oligonucleotide
cgaggcggaggccggaaag

SEQ ID NO: 2782694 - RNA, 19 nt, Artificial Sequence
  Description of Artificial Sequence: Synthetic oligonucleotide
ggcggcugcaggguccgag

SEQ ID NO: 2782695 - RNA, 19 nt, Artificial Sequence
  Description of Artificial Sequence: Synthetic oligonucleotide
caggacggcuacggcgcag

SEQ ID NO: 2782696 - RNA, 19 nt, Artificial Sequence
  Description of Artificial Sequence: Synthetic oligonucleotide
ccacguccacgaccaaagc

SEQ ID NO: 2782697 - RNA, 19 nt, Artificial Sequence
  Description of Artificial Sequence: Synthetic oligonucleotide
cccuccuuaaacaggaguu

SEQ ID NO: 2782698 - RNA, 19 nt, Artificial Sequence
  Description of Artificial Sequence: Synthetic oligonucleotide
gccucgcgacuucagcgac

SEQ ID NO: 2782699 - RNA, 19 nt, Artificial Sequence
  Description of Artificial Sequence: Synthetic oligonucleotide
cuccuccuguaggugucuc

SEQ ID NO: 2782700 - RNA, 19 nt, Artificial Sequence
  Description of Artificial Sequence: Synthetic oligonucleotide
gguccgaggcggaggccgg

SEQ ID NO: 2782701 - RNA, 19 nt, Artificial Sequence
  Description of Artificial Sequence: Synthetic oligonucleotide
gcacuccuccuguaggugu

SEQ ID NO: 2782702 - RNA, 19 nt, Artificial Sequence
  Description of Artificial Sequence: Synthetic oligonucleotide
cccucuugugaaucuugca

SEQ ID NO: 2782703 - RNA, 19 nt, Artificial Sequence
  Description of Artificial Sequence: Synthetic oligonucleotide
gugaaucuugcaggucgcu

SEQ ID NO: 2782704 - RNA, 19 nt, Artificial Sequence
  Description of Artificial Sequence: Synthetic oligonucleotide
ccuccucuaaacuggaauu

SEQ ID NO: 2782705 - RNA, 19 nt, Artificial Sequence
  Description of Artificial Sequence: Synthetic oligonucleotide
ggcuacggcgcaggguggc

SEQ ID NO: 2782706 - RNA, 19 nt, Artificial Sequence
  Description of Artificial Sequence: Synthetic oligonucleotide
cgaucuccggagguaagug

SEQ ID NO: 2782707 - RNA, 19 nt, Artificial Sequence
  Description of Artificial Sequence: Synthetic oligonucleotide
ggccugccaguuucaggac

SEQ ID NO: 2782708 - RNA, 19 nt, Artificial Sequence
  Description of Artificial Sequence: Synthetic oligonucleotide
cagcgacugcaucgccuuc

SEQ ID NO: 2782709 - RNA, 19 nt, Artificial Sequence
  Description of Artificial Sequence: Synthetic oligonucleotide
gcaggucgcucaccuucug

SEQ ID NO: 2782710 - RNA, 19 nt, Artificial Sequence
  Description of Artificial Sequence: Synthetic oligonucleotide
gacggcuacggcgcagggu

SEQ ID NO: 2782711 - RNA, 19 nt, Artificial Sequence
  Description of Artificial Sequence: Synthetic oligonucleotide
cgcgacuucagcgacugca

SEQ ID NO: 2782712 - RNA, 19 nt, Artificial Sequence
  Description of Artificial Sequence: Synthetic oligonucleotide
gcacgaucuccggagguaa

SEQ ID NO: 2782713 - RNA, 19 nt, Artificial Sequence
  Description of Artificial Sequence: Synthetic oligonucleotide
ccaaagccuccucuaaacu

SEQ ID NO: 2782714 - RNA, 19 nt, Artificial Sequence
  Description of Artificial Sequence: Synthetic oligonucleotide
cguagauacuggaugcccu

SEQ ID NO: 2782715 - RNA, 19 nt, Artificial Sequence
  Description of Artificial Sequence: Synthetic oligonucleotide
cucugucugccuccccucu

SEQ ID NO: 2782716 - RNA, 19 nt, Artificial Sequence
  Description of Artificial Sequence: Synthetic oligonucleotide
cguccacgaccaaagccuc

SEQ ID NO: 2782717 - RNA, 19 nt, Artificial Sequence
  Description of Artificial Sequence: Synthetic oligonucleotide
ccuguaggugucucugucu

SEQ ID NO: 2782718 - RNA, 19 nt, Artificial Sequence
  Description of Artificial Sequence: Synthetic oligonucleotide
cguuggugagauaccagua

SEQ ID NO: 2782719 - RNA, 19 nt, Artificial Sequence
  Description of Artificial Sequence: Synthetic oligonucleotide
gauggcgauccgguucuuu

SEQ ID NO: 2782720 - RNA, 19 nt, Artificial Sequence
  Description of Artificial Sequence: Synthetic oligonucleotide
ggcacgaucuccggaggua

SEQ ID NO: 2782721 - RNA, 19 nt, Artificial Sequence
  Description of Artificial Sequence: Synthetic oligonucleotide
agccuccucuaaacuggaa

SEQ ID NO: 2782722 - RNA, 19 nt, Artificial Sequence
  Description of Artificial Sequence: Synthetic oligonucleotide
cggcugaccacguccacga

SEQ ID NO: 2782723 - RNA, 19 nt, Artificial Sequence
  Description of Artificial Sequence: Synthetic oligonucleotide
gccuccccucuugugaauc

SEQ ID NO: 2782724 - RNA, 19 nt, Artificial Sequence
  Description of Artificial Sequence: Synthetic oligonucleotide
gcggcggcugcaggguccg

SEQ ID NO: 2782725 - RNA, 19 nt, Artificial Sequence
  Description of Artificial Sequence: Synthetic oligonucleotide
ggcugaccacguccacgac

SEQ ID NO: 2782726 - RNA, 19 nt, Artificial Sequence
  Description of Artificial Sequence: Synthetic oligonucleotide
caacaucgcggcggcugca

SEQ ID NO: 2782727 - RNA, 19 nt, Artificial Sequence
  Description of Artificial Sequence: Synthetic oligonucleotide
ggagguaaguggagguaau

SEQ ID NO: 2782728 - RNA, 19 nt, Artificial Sequence
  Description of Artificial Sequence: Synthetic oligonucleotide
ugcccucguuggugagaua

SEQ ID NO: 2782729 - RNA, 19 nt, Artificial Sequence
  Description of Artificial Sequence: Synthetic oligonucleotide
cagcuccugccucagcuuu

SEQ ID NO: 2782730 - RNA, 19 nt, Artificial Sequence
  Description of Artificial Sequence: Synthetic oligonucleotide
ggcggcugaccacguccac

SEQ ID NO: 2782731 - RNA, 19 nt, Artificial Sequence
  Description of Artificial Sequence: Synthetic oligonucleotide
cugcaggguccgaggcgga

SEQ ID NO: 2782732 - RNA, 19 nt, Artificial Sequence
  Description of Artificial Sequence: Synthetic oligonucleotide
cguucuugucugccagcuc

SEQ ID NO: 2782733 - RNA, 19 nt, Artificial Sequence
  Description of Artificial Sequence: Synthetic oligonucleotide
gggcggcugaccacgucca

SEQ ID NO: 2782734 - RNA, 19 nt, Artificial Sequence
  Description of Artificial Sequence: Synthetic oligonucleotide
ccccuccuuaaacaggagu

SEQ ID NO: 2782735 - RNA, 19 nt, Artificial Sequence
  Description of Artificial Sequence: Synthetic oligonucleotide
cggagguaaguggagguaa

SEQ ID NO: 2782736 - RNA, 19 nt, Artificial Sequence
  Description of Artificial Sequence: Synthetic oligonucleotide
cgcggcggcugcagggucc

SEQ ID NO: 2782737 - RNA, 19 nt, Artificial Sequence
  Description of Artificial Sequence: Synthetic oligonucleotide
cgaccaaagccuccucuaa

SEQ ID NO: 2782738 - RNA, 19 nt, Artificial Sequence
  Description of Artificial Sequence: Synthetic oligonucleotide
agauggcgauccgguucuu

SEQ ID NO: 2782739 - RNA, 19 nt, Artificial Sequence
  Description of Artificial Sequence: Synthetic oligonucleotide
gcgacuucagcgacugcau

SEQ ID NO: 2782740 - RNA, 19 nt, Artificial Sequence
  Description of Artificial Sequence: Synthetic oligonucleotide
gcuacggcgcaggguggca

SEQ ID NO: 2782741 - RNA, 19 nt, Artificial Sequence
  Description of Artificial Sequence: Synthetic oligonucleotide
ggguggcaggcacgaucuc

SEQ ID NO: 2782742 - RNA, 19 nt, Artificial Sequence
  Description of Artificial Sequence: Synthetic oligonucleotide
cggcuacggcgcagggugg

SEQ ID NO: 2782743 - RNA, 19 nt, Artificial Sequence
  Description of Artificial Sequence: Synthetic oligonucleotide
guccgaggcggaggccgga

SEQ ID NO: 2782744 - RNA, 19 nt, Artificial Sequence
  Description of Artificial Sequence: Synthetic oligonucleotide
gcacagcacuccuccugua

SEQ ID NO: 2782745 - RNA, 19 nt, Artificial Sequence
  Description of Artificial Sequence: Synthetic oligonucleotide
gcauguggacauccuucuu

SEQ ID NO: 2782746 - RNA, 19 nt, Artificial Sequence
  Description of Artificial Sequence: Synthetic oligonucleotide
gcuccugccucagcuuucu

SEQ ID NO: 2782747 - RNA, 19 nt, Artificial Sequence
  Description of Artificial Sequence: Synthetic oligonucleotide
cgacugcaucgccuucaug

SEQ ID NO: 2782748 - RNA, 19 nt, Artificial Sequence
  Description of Artificial Sequence: Synthetic oligonucleotide
gcucgggguguuugggcau

SEQ ID NO: 2782749 - RNA, 19 nt, Artificial Sequence
  Description of Artificial Sequence: Synthetic oligonucleotide
ccgaggccugccaguuuca

SEQ ID NO: 2782750 - RNA, 19 nt, Artificial Sequence
  Description of Artificial Sequence: Synthetic oligonucleotide
ccuccccucuugugaaucu

SEQ ID NO: 2782751 - RNA, 19 nt, Artificial Sequence
  Description of Artificial Sequence: Synthetic oligonucleotide
gcgacugcaucgccuucau

SEQ ID NO: 2782752 - RNA, 19 nt, Artificial Sequence
  Description of Artificial Sequence: Synthetic oligonucleotide
ccggagguaaguggaggua

SEQ ID NO: 2782753 - RNA, 19 nt, Artificial Sequence
  Description of Artificial Sequence: Synthetic oligonucleotide
cuccccucuugugaaucuu

SEQ ID NO: 2782754 - RNA, 19 nt, Artificial Sequence
  Description of Artificial Sequence: Synthetic oligonucleotide
caucaacaucgcggcggcu

SEQ ID NO: 2782755 - RNA, 19 nt, Artificial Sequence
  Description of Artificial Sequence: Synthetic oligonucleotide
cgcaggguggcaggcacga

SEQ ID NO: 2782756 - RNA, 19 nt, Artificial Sequence
  Description of Artificial Sequence: Synthetic oligonucleotide
cuggggcggcugaccacgu

SEQ ID NO: 2782757 - RNA, 19 nt, Artificial Sequence
  Description of Artificial Sequence: Synthetic oligonucleotide
caaggucacuggggcggcu

SEQ ID NO: 2782758 - RNA, 19 nt, Artificial Sequence
  Description of Artificial Sequence: Synthetic oligonucleotide
caugaagguugggcacguu

SEQ ID NO: 2782759 - RNA, 19 nt, Artificial Sequence
  Description of Artificial Sequence: Synthetic oligonucleotide
ccucgcgacuucagcgacu

SEQ ID NO: 2782760 - RNA, 19 nt, Artificial Sequence
  Description of Artificial Sequence: Synthetic oligonucleotide
ccgaggcggaggccggaaa

SEQ ID NO: 2782761 - RNA, 19 nt, Artificial Sequence
  Description of Artificial Sequence: Synthetic oligonucleotide
cgggguguuugggcaugug

SEQ ID NO: 2782762 - RNA, 19 nt, Artificial Sequence
  Description of Artificial Sequence: Synthetic oligonucleotide
cuccugccucagcuuucuu

SEQ ID NO: 2782763 - RNA, 19 nt, Artificial Sequence
  Description of Artificial Sequence: Synthetic oligonucleotide
gcucaccuucuggaccuuu

SEQ ID NO: 2782764 - RNA, 19 nt, Artificial Sequence
  Description of Artificial Sequence: Synthetic oligonucleotide
ggccgaggccugccaguuu

SEQ ID NO: 2782765 - RNA, 19 nt, Artificial Sequence
  Description of Artificial Sequence: Synthetic oligonucleotide
cugccagcucgggguguuu

SEQ ID NO: 2782766 - RNA, 19 nt, Artificial Sequence
  Description of Artificial Sequence: Synthetic oligonucleotide
gcaggguggcaggcacgau

SEQ ID NO: 2782767 - RNA, 19 nt, Artificial Sequence
  Description of Artificial Sequence: Synthetic oligonucleotide
cgcucaccuucuggaccuu

SEQ ID NO: 2782768 - RNA, 19 nt, Artificial Sequence
  Description of Artificial Sequence: Synthetic oligonucleotide
cggcggcugcaggguccga

SEQ ID NO: 2782769 - RNA, 19 nt, Artificial Sequence
  Description of Artificial Sequence: Synthetic oligonucleotide
aagaguccugcucaaggcc

SEQ ID NO: 2782770 - RNA, 19 nt, Artificial Sequence
  Description of Artificial Sequence: Synthetic oligonucleotide
uuaucaagaguccugcuca

SEQ ID NO: 2782771 - RNA, 19 nt, Artificial Sequence
  Description of Artificial Sequence: Synthetic oligonucleotide
ucaagaguccugcucaagg

SEQ ID NO: 2782772 - RNA, 19 nt, Artificial Sequence
  Description of Artificial Sequence: Synthetic oligonucleotide
uacuuguuuucauagacug

SEQ ID NO: 2782773 - RNA, 19 nt, Artificial Sequence
  Description of Artificial Sequence: Synthetic oligonucleotide
aauguacuugccugucccc

SEQ ID NO: 2782774 - RNA, 19 nt, Artificial Sequence
  Description of Artificial Sequence: Synthetic oligonucleotide
gaaaacuucacauacuugu

SEQ ID NO: 2782775 - RNA, 19 nt, Artificial Sequence
  Description of Artificial Sequence: Synthetic oligonucleotide
acguauccuucuuugaccc

SEQ ID NO: 2782776 - RNA, 19 nt, Artificial Sequence
  Description of Artificial Sequence: Synthetic oligonucleotide
cauacuuguuuucauagac

SEQ ID NO: 2782777 - RNA, 19 nt, Artificial Sequence
  Description of Artificial Sequence: Synthetic oligonucleotide
guuuucauagacugggacc

SEQ ID NO: 2782778 - RNA, 19 nt, Artificial Sequence
  Description of Artificial Sequence: Synthetic oligonucleotide
uuuucauagacugggaccu

SEQ ID NO: 2782779 - RNA, 19 nt, Artificial Sequence
  Description of Artificial Sequence: Synthetic oligonucleotide
uuccuuaggcucuugaucu

SEQ ID NO: 2782780 - RNA, 19 nt, Artificial Sequence
  Description of Artificial Sequence: Synthetic oligonucleotide
agcagagucggacgcaucc

SEQ ID NO: 2782781 - RNA, 19 nt, Artificial Sequence
  Description of Artificial Sequence: Synthetic oligonucleotide
cacauacuuguuuucauag

SEQ ID NO: 2782782 - RNA, 19 nt, Artificial Sequence
  Description of Artificial Sequence: Synthetic oligonucleotide
ugugguggcagcagagucg

SEQ ID NO: 2782783 - RNA, 19 nt, Artificial Sequence
  Description of Artificial Sequence: Synthetic oligonucleotide
uguuuucauagacugggac

SEQ ID NO: 2782784 - RNA, 19 nt, Artificial Sequence
  Description of Artificial Sequence: Synthetic oligonucleotide
agagacaccuuaucaagag

SEQ ID NO: 2782785 - RNA, 19 nt, Artificial Sequence
  Description of Artificial Sequence: Synthetic oligonucleotide
auccggggcagcuagaggg

SEQ ID NO: 2782786 - RNA, 19 nt, Artificial Sequence
  Description of Artificial Sequence: Synthetic oligonucleotide
gaggcaauguacuugccug

SEQ ID NO: 2782787 - RNA, 19 nt, Artificial Sequence
  Description of Artificial Sequence: Synthetic oligonucleotide
guugaggcaauguacuugc

SEQ ID NO: 2782788 - RNA, 19 nt, Artificial Sequence
  Description of Artificial Sequence: Synthetic oligonucleotide
ucugguuugcucuuggaaa

SEQ ID NO: 2782789 - RNA, 19 nt, Artificial Sequence
  Description of Artificial Sequence: Synthetic oligonucleotide
aacuucacauacuuguuuu

SEQ ID NO: 2782790 - RNA, 19 nt, Artificial Sequence
  Description of Artificial Sequence: Synthetic oligonucleotide
accuuaucaagaguccugc

SEQ ID NO: 2782791 - RNA, 19 nt, Artificial Sequence
  Description of Artificial Sequence: Synthetic oligonucleotide
aaacuucacauacuuguuu

SEQ ID NO: 2782792 - RNA, 19 nt, Artificial Sequence
  Description of Artificial Sequence: Synthetic oligonucleotide
uucuuugacccuccguugc

SEQ ID NO: 2782793 - RNA, 19 nt, Artificial Sequence
  Description of Artificial Sequence: Synthetic oligonucleotide
caauguacuugccuguccc

SEQ ID NO: 2782794 - RNA, 19 nt, Artificial Sequence
  Description of Artificial Sequence: Synthetic oligonucleotide
uuggcugucuuggagaggc

SEQ ID NO: 2782795 - RNA, 19 nt, Artificial Sequence
  Description of Artificial Sequence: Synthetic oligonucleotide
cuuaucaagaguccugcuc

SEQ ID NO: 2782796 - RNA, 19 nt, Artificial Sequence
  Description of Artificial Sequence: Synthetic oligonucleotide
aggaaguucugguuugcuc

SEQ ID NO: 2782797 - RNA, 19 nt, Artificial Sequence
  Description of Artificial Sequence: Synthetic oligonucleotide
ugaggcaauguacuugccu

SEQ ID NO: 2782798 - RNA, 19 nt, Artificial Sequence
  Description of Artificial Sequence: Synthetic oligonucleotide
uugcguuuggcugucuugg

SEQ ID NO: 2782799 - RNA, 19 nt, Artificial Sequence
  Description of Artificial Sequence: Synthetic oligonucleotide
cacguauccuucuuugacc

SEQ ID NO: 2782800 - RNA, 19 nt, Artificial Sequence
  Description of Artificial Sequence: Synthetic oligonucleotide
ucccagagacaccuuauca

SEQ ID NO: 2782801 - RNA, 19 nt, Artificial Sequence
  Description of Artificial Sequence: Synthetic oligonucleotide
ucuuggagaggccugcuuc

SEQ ID NO: 2782802 - RNA, 19 nt, Artificial Sequence
  Description of Artificial Sequence: Synthetic oligonucleotide
caagaguccugcucaaggc

SEQ ID NO: 2782803 - RNA, 19 nt, Artificial Sequence
  Description of Artificial Sequence: Synthetic oligonucleotide
ucuuggaaaacuucacaua

SEQ ID NO: 2782804 - RNA, 19 nt, Artificial Sequence
  Description of Artificial Sequence: Synthetic oligonucleotide
agaggccugcuucaccacc

SEQ ID NO: 2782805 - RNA, 19 nt, Artificial Sequence
  Description of Artificial Sequence: Synthetic oligonucleotide
agucggacgcauccggggc

SEQ ID NO: 2782806 - RNA, 19 nt, Artificial Sequence
  Description of Artificial Sequence: Synthetic oligonucleotide
accucgccagccuggaugc

SEQ ID NO: 2782807 - RNA, 19 nt, Artificial Sequence
  Description of Artificial Sequence: Synthetic oligonucleotide
aguucugguuugcucuugg

SEQ ID NO: 2782808 - RNA, 19 nt, Artificial Sequence
  Description of Artificial Sequence: Synthetic oligonucleotide
auagacugggaccuccucu

SEQ ID NO: 2782809 - RNA, 19 nt, Artificial Sequence
  Description of Artificial Sequence: Synthetic oligonucleotide
cuuccuuaggcucuugauc

SEQ ID NO: 2782810 - RNA, 19 nt, Artificial Sequence
  Description of Artificial Sequence: Synthetic oligonucleotide
ucagguugcguuuggcugu

SEQ ID NO: 2782811 - RNA, 19 nt, Artificial Sequence
  Description of Artificial Sequence: Synthetic oligonucleotide
cuccuuucgcuucagguug

SEQ ID NO: 2782812 - RNA, 19 nt, Artificial Sequence
  Description of Artificial Sequence: Synthetic oligonucleotide
guuuggcugucuuggagag

SEQ ID NO: 2782813 - RNA, 19 nt, Artificial Sequence
  Description of Artificial Sequence: Synthetic oligonucleotide
uucuuggcuuucucugugg

SEQ ID NO: 2782814 - RNA, 19 nt, Artificial Sequence
  Description of Artificial Sequence: Synthetic oligonucleotide
uuucgcuucagguugcguu

SEQ ID NO: 2782815 - RNA, 19 nt, Artificial Sequence
  Description of Artificial Sequence: Synthetic oligonucleotide
ugcucuuggaaaacuucac

SEQ ID NO: 2782816 - RNA, 19 nt, Artificial Sequence
  Description of Artificial Sequence: Synthetic oligonucleotide
uggaggaaguucugguuug

SEQ ID NO: 2782817 - RNA, 19 nt, Artificial Sequence
  Description of Artificial Sequence: Synthetic oligonucleotide
accugccgcagcuucuucc

SEQ ID NO: 2782818 - RNA, 19 nt, Artificial Sequence
  Description of Artificial Sequence: Synthetic oligonucleotide
acauacuuguuuucauaga

SEQ ID NO: 2782819 - RNA, 19 nt, Artificial Sequence
  Description of Artificial Sequence: Synthetic oligonucleotide
gaugcgcugcugcagcucc

SEQ ID NO: 2782820 - RNA, 19 nt, Artificial Sequence
  Description of Artificial Sequence: Synthetic oligonucleotide
ucacauacuuguuuucaua

SEQ ID NO: 2782821 - RNA, 19 nt, Artificial Sequence
  Description of Artificial Sequence: Synthetic oligonucleotide
uuguuuucauagacuggga

SEQ ID NO: 2782822 - RNA, 19 nt, Artificial Sequence
  Description of Artificial Sequence: Synthetic oligonucleotide
gacugggaccuccucuugg

SEQ ID NO: 2782823 - RNA, 19 nt, Artificial Sequence
  Description of Artificial Sequence: Synthetic oligonucleotide
gacaccuuaucaagagucc

SEQ ID NO: 2782824 - RNA, 19 nt, Artificial Sequence
  Description of Artificial Sequence: Synthetic oligonucleotide
gaccucgccagccuggaug

SEQ ID NO: 2782825 - RNA, 19 nt, Artificial Sequence
  Description of Artificial Sequence: Synthetic oligonucleotide
acuugccuguccccguagc

SEQ ID NO: 2782826 - RNA, 19 nt, Artificial Sequence
  Description of Artificial Sequence: Synthetic oligonucleotide
gagucggacgcauccgggg

SEQ ID NO: 2782827 - RNA, 19 nt, Artificial Sequence
  Description of Artificial Sequence: Synthetic oligonucleotide
uauccuucuuugacccucc

SEQ ID NO: 2782828 - RNA, 19 nt, Artificial Sequence
  Description of Artificial Sequence: Synthetic oligonucleotide
cagggcucagcccuggagg

SEQ ID NO: 2782829 - RNA, 19 nt, Artificial Sequence
  Description of Artificial Sequence: Synthetic oligonucleotide
acuuguuuucauagacugg

SEQ ID NO: 2782830 - RNA, 19 nt, Artificial Sequence
  Description of Artificial Sequence: Synthetic oligonucleotide
ucagggcucagcccuggag

SEQ ID NO: 2782831 - RNA, 19 nt, Artificial Sequence
  Description of Artificial Sequence: Synthetic oligonucleotide
auguacuugccuguccccg

SEQ ID NO: 2782832 - RNA, 19 nt, Artificial Sequence
  Description of Artificial Sequence: Synthetic oligonucleotide
ucuuggcuuucucuguggu

SEQ ID NO: 2782833 - RNA, 19 nt, Artificial Sequence
  Description of Artificial Sequence: Synthetic oligonucleotide
cuucuuugacccuccguug

SEQ ID NO: 2782834 - RNA, 19 nt, Artificial Sequence
  Description of Artificial Sequence: Synthetic oligonucleotide
ucuuccuuaggcucuugau

SEQ ID NO: 2782835 - RNA, 19 nt, Artificial Sequence
  Description of Artificial Sequence: Synthetic oligonucleotide
guggcagcagagucggacg

SEQ ID NO: 2782836 - RNA, 19 nt, Artificial Sequence
  Description of Artificial Sequence: Synthetic oligonucleotide
ucuuugacccuccguugcu

SEQ ID NO: 2782837 - RNA, 19 nt, Artificial Sequence
  Description of Artificial Sequence: Synthetic oligonucleotide
caccuuaucaagaguccug

SEQ ID NO: 2782838 - RNA, 19 nt, Artificial Sequence
  Description of Artificial Sequence: Synthetic oligonucleotide
guugcguuuggcugucuug

SEQ ID NO: 2782839 - RNA, 19 nt, Artificial Sequence
  Description of Artificial Sequence: Synthetic oligonucleotide
auacuuguuuucauagacu

SEQ ID NO: 2782840 - RNA, 19 nt, Artificial Sequence
  Description of Artificial Sequence: Synthetic oligonucleotide
ccagagacaccuuaucaag

SEQ ID NO: 2782841 - RNA, 19 nt, Artificial Sequence
  Description of Artificial Sequence: Synthetic oligonucleotide
ucauagacugggaccuccu

SEQ ID NO: 2782842 - RNA, 19 nt, Artificial Sequence
  Description of Artificial Sequence: Synthetic oligonucleotide
ucucugugguggcagcaga

SEQ ID NO: 2782843 - RNA, 19 nt, Artificial Sequence
  Description of Artificial Sequence: Synthetic oligonucleotide
uguccccguagccuccggg

SEQ ID NO: 2782844 - RNA, 19 nt, Artificial Sequence
  Description of Artificial Sequence: Synthetic oligonucleotide
uucgggucugcauggggug

SEQ ID NO: 2782845 - RNA, 19 nt, Artificial Sequence
  Description of Artificial Sequence: Synthetic oligonucleotide
guugcuugcgccagguccc

SEQ ID NO: 2782846 - RNA, 19 nt, Artificial Sequence
  Description of Artificial Sequence: Synthetic oligonucleotide
uggcagcagagucggacgc

SEQ ID NO: 2782847 - RNA, 19 nt, Artificial Sequence
  Description of Artificial Sequence: Synthetic oligonucleotide
cagagucggacgcauccgg

SEQ ID NO: 2782848 - RNA, 19 nt, Artificial Sequence
  Description of Artificial Sequence: Synthetic oligonucleotide
ucuugaucuucuuggcuuu

SEQ ID NO: 2782849 - RNA, 19 nt, Artificial Sequence
  Description of Artificial Sequence: Synthetic oligonucleotide
uguacuugccuguccccgu

SEQ ID NO: 2782850 - RNA, 19 nt, Artificial Sequence
  Description of Artificial Sequence: Synthetic oligonucleotide
ugggcggcgucucccagag

SEQ ID NO: 2782851 - RNA, 19 nt, Artificial Sequence
  Description of Artificial Sequence: Synthetic oligonucleotide
ggcgcuggguguuugggcg

SEQ ID NO: 2782852 - RNA, 19 nt, Artificial Sequence
  Description of Artificial Sequence: Synthetic oligonucleotide
gugguggcagcagagucgg

SEQ ID NO: 2782853 - RNA, 19 nt, Artificial Sequence
  Description of Artificial Sequence: Synthetic oligonucleotide
guggccucagggcucagcc

SEQ ID NO: 2782854 - RNA, 19 nt, Artificial Sequence
  Description of Artificial Sequence: Synthetic oligonucleotide
cuugccuguccccguagcc

SEQ ID NO: 2782855 - RNA, 19 nt, Artificial Sequence
  Description of Artificial Sequence: Synthetic oligonucleotide
ucuuggggcacguauccuu

SEQ ID NO: 2782856 - RNA, 19 nt, Artificial Sequence
  Description of Artificial Sequence: Synthetic oligonucleotide
cuuucucugugguggcagc

SEQ ID NO: 2782857 - RNA, 19 nt, Artificial Sequence
  Description of Artificial Sequence: Synthetic oligonucleotide
cuuggcuuucucuguggug

SEQ ID NO: 2782858 - RNA, 19 nt, Artificial Sequence
  Description of Artificial Sequence: Synthetic oligonucleotide
uucgcuucagguugcguuu

SEQ ID NO: 2782859 - RNA, 19 nt, Artificial Sequence
  Description of Artificial Sequence: Synthetic oligonucleotide
uccucuuggggcacguauc

SEQ ID NO: 2782860 - RNA, 19 nt, Artificial Sequence
  Description of Artificial Sequence: Synthetic oligonucleotide
uagacugggaccuccucuu

SEQ ID NO: 2782861 - RNA, 19 nt, Artificial Sequence
  Description of Artificial Sequence: Synthetic oligonucleotide
uggagaggccugcuucacc

SEQ ID NO: 2782862 - RNA, 19 nt, Artificial Sequence
  Description of Artificial Sequence: Synthetic oligonucleotide
ucucccagagacaccuuau

SEQ ID NO: 2782863 - RNA, 19 nt, Artificial Sequence
  Description of Artificial Sequence: Synthetic oligonucleotide
ugacccuccguugcuugcg

SEQ ID NO: 2782864 - RNA, 19 nt, Artificial Sequence
  Description of Artificial Sequence: Synthetic oligonucleotide
uaucaagaguccugcucaa

SEQ ID NO: 2782865 - RNA, 19 nt, Artificial Sequence
  Description of Artificial Sequence: Synthetic oligonucleotide
gucugcauggggugacggg

SEQ ID NO: 2782866 - RNA, 19 nt, Artificial Sequence
  Description of Artificial Sequence: Synthetic oligonucleotide
uccuucuuugacccuccgu

SEQ ID NO: 2782867 - RNA, 19 nt, Artificial Sequence
  Description of Artificial Sequence: Synthetic oligonucleotide
cucugugguggcagcagag

SEQ ID NO: 2782868 - RNA, 19 nt, Artificial Sequence
  Description of Artificial Sequence: Synthetic oligonucleotide
uccuuucgcuucagguugc

SEQ ID NO: 2782869 - RNA, 19 nt, Artificial Sequence
  Description of Artificial Sequence: Synthetic oligonucleotide
ucgggucucuguguugagg

SEQ ID NO: 2782870 - RNA, 19 nt, Artificial Sequence
  Description of Artificial Sequence: Synthetic oligonucleotide
aggcaauguacuugccugu

SEQ ID NO: 2782871 - RNA, 19 nt, Artificial Sequence
  Description of Artificial Sequence: Synthetic oligonucleotide
cuuggggcacguauccuuc

SEQ ID NO: 2782872 - RNA, 19 nt, Artificial Sequence
  Description of Artificial Sequence: Synthetic oligonucleotide
caccuucgggucugcaugg

SEQ ID NO: 2782873 - RNA, 19 nt, Artificial Sequence
  Description of Artificial Sequence: Synthetic oligonucleotide
cugguuugcucuuggaaaa

SEQ ID NO: 2782874 - RNA, 19 nt, Artificial Sequence
  Description of Artificial Sequence: Synthetic oligonucleotide
uguuugggcggcgucuccc

SEQ ID NO: 2782875 - RNA, 19 nt, Artificial Sequence
  Description of Artificial Sequence: Synthetic oligonucleotide
uugaggcaauguacuugcc

SEQ ID NO: 2782876 - RNA, 19 nt, Artificial Sequence
  Description of Artificial Sequence: Synthetic oligonucleotide
uucaccaccuucgggucug

SEQ ID NO: 2782877 - RNA, 19 nt, Artificial Sequence
  Description of Artificial Sequence: Synthetic oligonucleotide
guccccguagccuccgggg

SEQ ID NO: 2782878 - RNA, 19 nt, Artificial Sequence
  Description of Artificial Sequence: Synthetic oligonucleotide
uuuggcugucuuggagagg

SEQ ID NO: 2782879 - RNA, 19 nt, Artificial Sequence
  Description of Artificial Sequence: Synthetic oligonucleotide
ugcgccaggucccgucggg

SEQ ID NO: 2782880 - RNA, 19 nt, Artificial Sequence
  Description of Artificial Sequence: Synthetic oligonucleotide
cuugcgccaggucccgucg

SEQ ID NO: 2782881 - RNA, 19 nt, Artificial Sequence
  Description of Artificial Sequence: Synthetic oligonucleotide
guauccuucuuugacccuc

SEQ ID NO: 2782882 - RNA, 19 nt, Artificial Sequence
  Description of Artificial Sequence: Synthetic oligonucleotide
uacuugccuguccccguag

SEQ ID NO: 2782883 - RNA, 19 nt, Artificial Sequence
  Description of Artificial Sequence: Synthetic oligonucleotide
ugcucaaggccuccgccuc

SEQ ID NO: 2782884 - RNA, 19 nt, Artificial Sequence
  Description of Artificial Sequence: Synthetic oligonucleotide
ggugucguggccucagggc

SEQ ID NO: 2782885 - RNA, 19 nt, Artificial Sequence
  Description of Artificial Sequence: Synthetic oligonucleotide
cagagacaccuuaucaaga

SEQ ID NO: 2782886 - RNA, 19 nt, Artificial Sequence
  Description of Artificial Sequence: Synthetic oligonucleotide
ggcggcgucucccagagac

SEQ ID NO: 2782887 - RNA, 19 nt, Artificial Sequence
  Description of Artificial Sequence: Synthetic oligonucleotide
cugugguggcagcagaguc

SEQ ID NO: 2782888 - RNA, 19 nt, Artificial Sequence
  Description of Artificial Sequence: Synthetic oligonucleotide
uuugggcggcgucucccag

SEQ ID NO: 2782889 - RNA, 19 nt, Artificial Sequence
  Description of Artificial Sequence: Synthetic oligonucleotide
gagccuuggagggcgcugg

SEQ ID NO: 2782890 - RNA, 19 nt, Artificial Sequence
  Description of Artificial Sequence: Synthetic oligonucleotide
uccugcucaaggccuccgc

SEQ ID NO: 2782891 - RNA, 19 nt, Artificial Sequence
  Description of Artificial Sequence: Synthetic oligonucleotide
acgcauccggggcagcuag

SEQ ID NO: 2782892 - RNA, 19 nt, Artificial Sequence
  Description of Artificial Sequence: Synthetic oligonucleotide
aaguucugguuugcucuug

SEQ ID NO: 2782893 - RNA, 19 nt, Artificial Sequence
  Description of Artificial Sequence: Synthetic oligonucleotide
ucugugguggcagcagagu

SEQ ID NO: 2782894 - RNA, 19 nt, Artificial Sequence
  Description of Artificial Sequence: Synthetic oligonucleotide
agaguccugcucaaggccu

SEQ ID NO: 2782895 - RNA, 19 nt, Artificial Sequence
  Description of Artificial Sequence: Synthetic oligonucleotide
ucucugcugggcuggcuga

SEQ ID NO: 2782896 - RNA, 19 nt, Artificial Sequence
  Description of Artificial Sequence: Synthetic oligonucleotide
gcacguauccuucuuugac

SEQ ID NO: 2782897 - RNA, 19 nt, Artificial Sequence
  Description of Artificial Sequence: Synthetic oligonucleotide
ugcauggggugacgggugu

SEQ ID NO: 2782898 - RNA, 19 nt, Artificial Sequence
  Description of Artificial Sequence: Synthetic oligonucleotide
acccuccguugcuugcgcc

SEQ ID NO: 2782899 - RNA, 19 nt, Artificial Sequence
  Description of Artificial Sequence: Synthetic oligonucleotide
aucaagaguccugcucaag

SEQ ID NO: 2782900 - RNA, 19 nt, Artificial Sequence
  Description of Artificial Sequence: Synthetic oligonucleotide
uugccuguccccguagccu

SEQ ID NO: 2782901 - RNA, 19 nt, Artificial Sequence
  Description of Artificial Sequence: Synthetic oligonucleotide
agggcucagcccuggagga

SEQ ID NO: 2782902 - RNA, 19 nt, Artificial Sequence
  Description of Artificial Sequence: Synthetic oligonucleotide
aguccugcucaaggccucc

SEQ ID NO: 2782903 - RNA, 19 nt, Artificial Sequence
  Description of Artificial Sequence: Synthetic oligonucleotide
agagucggacgcauccggg

SEQ ID NO: 2782904 - RNA, 19 nt, Artificial Sequence
  Description of Artificial Sequence: Synthetic oligonucleotide
auccuucuuugacccuccg

SEQ ID NO: 2782905 - RNA, 19 nt, Artificial Sequence
  Description of Artificial Sequence: Synthetic oligonucleotide
cugcuucaccaccuucggg

SEQ ID NO: 2782906 - RNA, 19 nt, Artificial Sequence
  Description of Artificial Sequence: Synthetic oligonucleotide
ugcguuuggcugucuugga

SEQ ID NO: 2782907 - RNA, 19 nt, Artificial Sequence
  Description of Artificial Sequence: Synthetic oligonucleotide
cuggcugaccucgccagcc

SEQ ID NO: 2782908 - RNA, 19 nt, Artificial Sequence
  Description of Artificial Sequence: Synthetic oligonucleotide
cguugcuugcgccaggucc

SEQ ID NO: 2782909 - RNA, 19 nt, Artificial Sequence
  Description of Artificial Sequence: Synthetic oligonucleotide
uugcgccaggucccgucgg

SEQ ID NO: 2782910 - RNA, 19 nt, Artificial Sequence
  Description of Artificial Sequence: Synthetic oligonucleotide
ccuggggagccuuggaggg

SEQ ID NO: 2782911 - RNA, 19 nt, Artificial Sequence
  Description of Artificial Sequence: Synthetic oligonucleotide
cugggaccuccucuugggg

SEQ ID NO: 2782912 - RNA, 19 nt, Artificial Sequence
  Description of Artificial Sequence: Synthetic oligonucleotide
uggcuuucucugugguggc

SEQ ID NO: 2782913 - RNA, 19 nt, Artificial Sequence
  Description of Artificial Sequence: Synthetic oligonucleotide
ugucguggccucagggcuc

SEQ ID NO: 2782914 - RNA, 19 nt, Artificial Sequence
  Description of Artificial Sequence: Synthetic oligonucleotide
gcaauguacuugccugucc

SEQ ID NO: 2782915 - RNA, 19 nt, Artificial Sequence
  Description of Artificial Sequence: Synthetic oligonucleotide
ugguuugcucuuggaaaac

SEQ ID NO: 2782916 - RNA, 19 nt, Artificial Sequence
  Description of Artificial Sequence: Synthetic oligonucleotide
ugccuguccccguagccuc

SEQ ID NO: 2782917 - RNA, 19 nt, Artificial Sequence
  Description of Artificial Sequence: Synthetic oligonucleotide
ugggcuggcugaccucgcc

SEQ ID NO: 2782918 - RNA, 19 nt, Artificial Sequence
  Description of Artificial Sequence: Synthetic oligonucleotide
agcugcucucugcugggcu

SEQ ID NO: 2782919 - RNA, 19 nt, Artificial Sequence
  Description of Artificial Sequence: Synthetic oligonucleotide
gagggcgcuggguguuugg

SEQ ID NO: 2782920 - RNA, 19 nt, Artificial Sequence
  Description of Artificial Sequence: Synthetic oligonucleotide
accaccuucgggucugcau

SEQ ID NO: 2782921 - RNA, 19 nt, Artificial Sequence
  Description of Artificial Sequence: Synthetic oligonucleotide
ucgccagccuggaugcgcu

SEQ ID NO: 2782922 - RNA, 19 nt, Artificial Sequence
  Description of Artificial Sequence: Synthetic oligonucleotide
ggggugacgggugucgugg

SEQ ID NO: 2782923 - RNA, 19 nt, Artificial Sequence
  Description of Artificial Sequence: Synthetic oligonucleotide
ucagcccuggaggaaguuc

SEQ ID NO: 2782924 - RNA, 19 nt, Artificial Sequence
  Description of Artificial Sequence: Synthetic oligonucleotide
cauccggggcagcuagagg

SEQ ID NO: 2782925 - RNA, 19 nt, Artificial Sequence
  Description of Artificial Sequence: Synthetic oligonucleotide
cucccagagacaccuuauc

SEQ ID NO: 2782926 - RNA, 19 nt, Artificial Sequence
  Description of Artificial Sequence: Synthetic oligonucleotide
uccccguagccuccggggu

SEQ ID NO: 2782927 - RNA, 19 nt, Artificial Sequence
  Description of Artificial Sequence: Synthetic oligonucleotide
aggggaggccuggggagcc

SEQ ID NO: 2782928 - RNA, 19 nt, Artificial Sequence
  Description of Artificial Sequence: Synthetic oligonucleotide
gggcacguauccuucuuug

SEQ ID NO: 2782929 - RNA, 19 nt, Artificial Sequence
  Description of Artificial Sequence: Synthetic oligonucleotide
agacugggaccuccucuug

SEQ ID NO: 2782930 - RNA, 19 nt, Artificial Sequence
  Description of Artificial Sequence: Synthetic oligonucleotide
agcuagaggggaggccugg

SEQ ID NO: 2782931 - RNA, 19 nt, Artificial Sequence
  Description of Artificial Sequence: Synthetic oligonucleotide
gucccgucgggucucugug

SEQ ID NO: 2782932 - RNA, 19 nt, Artificial Sequence
  Description of Artificial Sequence: Synthetic oligonucleotide
uggggugacgggugucgug

SEQ ID NO: 2782933 - RNA, 19 nt, Artificial Sequence
  Description of Artificial Sequence: Synthetic oligonucleotide
gggugucguggccucaggg

SEQ ID NO: 2782934 - RNA, 19 nt, Artificial Sequence
  Description of Artificial Sequence: Synthetic oligonucleotide
uuggggcacguauccuucu

SEQ ID NO: 2782935 - RNA, 19 nt, Artificial Sequence
  Description of Artificial Sequence: Synthetic oligonucleotide
ugccgcagcuucuuccuua

SEQ ID NO: 2782936 - RNA, 19 nt, Artificial Sequence
  Description of Artificial Sequence: Synthetic oligonucleotide
ccucuuggggcacguaucc

SEQ ID NO: 2782937 - RNA, 19 nt, Artificial Sequence
  Description of Artificial Sequence: Synthetic oligonucleotide
uuaggcucuugaucuucuu

SEQ ID NO: 2782938 - RNA, 19 nt, Artificial Sequence
  Description of Artificial Sequence: Synthetic oligonucleotide
uggaugcgcugcugcagcu

SEQ ID NO: 2782939 - RNA, 19 nt, Artificial Sequence
  Description of Artificial Sequence: Synthetic oligonucleotide
gguggcagcagagucggac

SEQ ID NO: 2782940 - RNA, 19 nt, Artificial Sequence
  Description of Artificial Sequence: Synthetic oligonucleotide
gcguuuggcugucuuggag

SEQ ID NO: 2782941 - RNA, 19 nt, Artificial Sequence
  Description of Artificial Sequence: Synthetic oligonucleotide
ucucuguguugaggcaaug

SEQ ID NO: 2782942 - RNA, 19 nt, Artificial Sequence
  Description of Artificial Sequence: Synthetic oligonucleotide
cuucagguugcguuuggcu

SEQ ID NO: 2782943 - RNA, 19 nt, Artificial Sequence
  Description of Artificial Sequence: Synthetic oligonucleotide
uugcuugcgccaggucccg

SEQ ID NO: 2782944 - RNA, 19 nt, Artificial Sequence
  Description of Artificial Sequence: Synthetic oligonucleotide
ucugcugggcuggcugacc

SEQ ID NO: 2782945 - RNA, 19 nt, Artificial Sequence
  Description of Artificial Sequence: Synthetic oligonucleotide
uugggcggcgucucccaga

SEQ ID NO: 2782946 - RNA, 19 nt, Artificial Sequence
  Description of Artificial Sequence: Synthetic oligonucleotide
gacccuccguugcuugcgc

SEQ ID NO: 2782947 - RNA, 19 nt, Artificial Sequence
  Description of Artificial Sequence: Synthetic oligonucleotide
cucgccagccuggaugcgc

SEQ ID NO: 2782948 - RNA, 19 nt, Artificial Sequence
  Description of Artificial Sequence: Synthetic oligonucleotide
agggcgcuggguguuuggg

SEQ ID NO: 2782949 - RNA, 19 nt, Artificial Sequence
  Description of Artificial Sequence: Synthetic oligonucleotide
uggguguuugggcggcguc

SEQ ID NO: 2782950 - RNA, 19 nt, Artificial Sequence
  Description of Artificial Sequence: Synthetic oligonucleotide
ucggacgcauccggggcag

SEQ ID NO: 2782951 - RNA, 19 nt, Artificial Sequence
  Description of Artificial Sequence: Synthetic oligonucleotide
uccguugcuugcgccaggu

SEQ ID NO: 2782952 - RNA, 19 nt, Artificial Sequence
  Description of Artificial Sequence: Synthetic oligonucleotide
gcuuucucugugguggcag

SEQ ID NO: 2782953 - RNA, 19 nt, Artificial Sequence
  Description of Artificial Sequence: Synthetic oligonucleotide
ccaccuucgggucugcaug

SEQ ID NO: 2782954 - RNA, 19 nt, Artificial Sequence
  Description of Artificial Sequence: Synthetic oligonucleotide
uuucauagacugggaccuc

SEQ ID NO: 2782955 - RNA, 19 nt, Artificial Sequence
  Description of Artificial Sequence: Synthetic oligonucleotide
uuggagaggccugcuucac

SEQ ID NO: 2782956 - RNA, 19 nt, Artificial Sequence
  Description of Artificial Sequence: Synthetic oligonucleotide
gcugggcuggcugaccucg

SEQ ID NO: 2782957 - RNA, 19 nt, Artificial Sequence
  Description of Artificial Sequence: Synthetic oligonucleotide
cugcucucugcugggcugg

SEQ ID NO: 2782958 - RNA, 19 nt, Artificial Sequence
  Description of Artificial Sequence: Synthetic oligonucleotide
agccuuggagggcgcuggg

SEQ ID NO: 2782959 - RNA, 19 nt, Artificial Sequence
  Description of Artificial Sequence: Synthetic oligonucleotide
gugucguggccucagggcu

SEQ ID NO: 2782960 - RNA, 19 nt, Artificial Sequence
  Description of Artificial Sequence: Synthetic oligonucleotide
cuucgggucugcauggggu

SEQ ID NO: 2782961 - RNA, 19 nt, Artificial Sequence
  Description of Artificial Sequence: Synthetic oligonucleotide
uccuuaggcucuugaucuu

SEQ ID NO: 2782962 - RNA, 19 nt, Artificial Sequence
  Description of Artificial Sequence: Synthetic oligonucleotide
ccuuggagggcgcugggug

SEQ ID NO: 2782963 - RNA, 19 nt, Artificial Sequence
  Description of Artificial Sequence: Synthetic oligonucleotide
guuugggcggcgucuccca

SEQ ID NO: 2782964 - RNA, 19 nt, Artificial Sequence
  Description of Artificial Sequence: Synthetic oligonucleotide
gcugcucucugcugggcug

SEQ ID NO: 2782965 - RNA, 19 nt, Artificial Sequence
  Description of Artificial Sequence: Synthetic oligonucleotide
cuuaggcucuugaucuucu

SEQ ID NO: 2782966 - RNA, 19 nt, Artificial Sequence
  Description of Artificial Sequence: Synthetic oligonucleotide
ucgggucugcaugggguga

SEQ ID NO: 2782967 - RNA, 19 nt, Artificial Sequence
  Description of Artificial Sequence: Synthetic oligonucleotide
gaaguucugguuugcucuu

SEQ ID NO: 2782968 - RNA, 19 nt, Artificial Sequence
  Description of Artificial Sequence: Synthetic oligonucleotide
uggcugucuuggagaggcc

SEQ ID NO: 2782969 - RNA, 19 nt, Artificial Sequence
  Description of Artificial Sequence: Synthetic oligonucleotide
gucucccagagacaccuua

SEQ ID NO: 2782970 - RNA, 19 nt, Artificial Sequence
  Description of Artificial Sequence: Synthetic oligonucleotide
gggaccuccucuuggggca

SEQ ID NO: 2782971 - RNA, 19 nt, Artificial Sequence
  Description of Artificial Sequence: Synthetic oligonucleotide
ugacgggugucguggccuc

SEQ ID NO: 2782972 - RNA, 19 nt, Artificial Sequence
  Description of Artificial Sequence: Synthetic oligonucleotide
ggucugcauggggugacgg

SEQ ID NO: 2782973 - RNA, 19 nt, Artificial Sequence
  Description of Artificial Sequence: Synthetic oligonucleotide
ggcucagcccuggaggaag

SEQ ID NO: 2782974 - RNA, 19 nt, Artificial Sequence
  Description of Artificial Sequence: Synthetic oligonucleotide
ucccgucgggucucugugu

SEQ ID NO: 2782975 - RNA, 19 nt, Artificial Sequence
  Description of Artificial Sequence: Synthetic oligonucleotide
cccagagacaccuuaucaa

SEQ ID NO: 2782976 - RNA, 19 nt, Artificial Sequence
  Description of Artificial Sequence: Synthetic oligonucleotide
accuucgggucugcauggg

SEQ ID NO: 2782977 - RNA, 19 nt, Artificial Sequence
  Description of Artificial Sequence: Synthetic oligonucleotide
ggcacguauccuucuuuga

SEQ ID NO: 2782978 - RNA, 19 nt, Artificial Sequence
  Description of Artificial Sequence: Synthetic oligonucleotide
gucggacgcauccggggca

SEQ ID NO: 2782979 - RNA, 19 nt, Artificial Sequence
  Description of Artificial Sequence: Synthetic oligonucleotide
cagcuagaggggaggccug

SEQ ID NO: 2782980 - RNA, 19 nt, Artificial Sequence
  Description of Artificial Sequence: Synthetic oligonucleotide
guguuugggcggcgucucc

SEQ ID NO: 2782981 - RNA, 19 nt, Artificial Sequence
  Description of Artificial Sequence: Synthetic oligonucleotide
gccgcagcuucuuccuuag

SEQ ID NO: 2782982 - RNA, 19 nt, Artificial Sequence
  Description of Artificial Sequence: Synthetic oligonucleotide
ggaggaaguucugguuugc

SEQ ID NO: 2782983 - RNA, 19 nt, Artificial Sequence
  Description of Artificial Sequence: Synthetic oligonucleotide
cagcccuggaggaaguucu

SEQ ID NO: 2782984 - RNA, 19 nt, Artificial Sequence
  Description of Artificial Sequence: Synthetic oligonucleotide
gucgggucucuguguugag

SEQ ID NO: 2782985 - RNA, 19 nt, Artificial Sequence
  Description of Artificial Sequence: Synthetic oligonucleotide
cuccguugcuugcgccagg

SEQ ID NO: 2782986 - RNA, 19 nt, Artificial Sequence
  Description of Artificial Sequence: Synthetic oligonucleotide
acgggugucguggccucag

SEQ ID NO: 2782987 - RNA, 19 nt, Artificial Sequence
  Description of Artificial Sequence: Synthetic oligonucleotide
gcugaccucgccagccugg

SEQ ID NO: 2782988 - RNA, 19 nt, Artificial Sequence
  Description of Artificial Sequence: Synthetic oligonucleotide
gaguccugcucaaggccuc

SEQ ID NO: 2782989 - RNA, 19 nt, Artificial Sequence
  Description of Artificial Sequence: Synthetic oligonucleotide
gcuucaccaccuucggguc

SEQ ID NO: 2782990 - RNA, 19 nt, Artificial Sequence
  Description of Artificial Sequence: Synthetic oligonucleotide
ccuucgggucugcaugggg

SEQ ID NO: 2782991 - RNA, 19 nt, Artificial Sequence
  Description of Artificial Sequence: Synthetic oligonucleotide
gcugucuuggagaggccug

SEQ ID NO: 2782992 - RNA, 19 nt, Artificial Sequence
  Description of Artificial Sequence: Synthetic oligonucleotide
gcauccggggcagcuagag

SEQ ID NO: 2782993 - RNA, 19 nt, Artificial Sequence
  Description of Artificial Sequence: Synthetic oligonucleotide
ggcaauguacuugccuguc

SEQ ID NO: 2782994 - RNA, 19 nt, Artificial Sequence
  Description of Artificial Sequence: Synthetic oligonucleotide
guccugcucaaggccuccg

SEQ ID NO: 2782995 - RNA, 19 nt, Artificial Sequence
  Description of Artificial Sequence: Synthetic oligonucleotide
cuggggagccuuggagggc

SEQ ID NO: 2782996 - RNA, 19 nt, Artificial Sequence
  Description of Artificial Sequence: Synthetic oligonucleotide
cguuuggcugucuuggaga

SEQ ID NO: 2782997 - RNA, 19 nt, Artificial Sequence
  Description of Artificial Sequence: Synthetic oligonucleotide
ggucucuguguugaggcaa

SEQ ID NO: 2782998 - RNA, 19 nt, Artificial Sequence
  Description of Artificial Sequence: Synthetic oligonucleotide
cuuggagggcgcugggugu

SEQ ID NO: 2782999 - RNA, 19 nt, Artificial Sequence
  Description of Artificial Sequence: Synthetic oligonucleotide
guuugcucuuggaaaacuu

SEQ ID NO: 2783000 - RNA, 19 nt, Artificial Sequence
  Description of Artificial Sequence: Synthetic oligonucleotide
guacuugccuguccccgua

SEQ ID NO: 2783001 - RNA, 19 nt, Artificial Sequence
  Description of Artificial Sequence: Synthetic oligonucleotide
ccuccucuucuccuuucgc

SEQ ID NO: 2783002 - RNA, 19 nt, Artificial Sequence
  Description of Artificial Sequence: Synthetic oligonucleotide
gcuucagguugcguuuggc

SEQ ID NO: 2783003 - RNA, 19 nt, Artificial Sequence
  Description of Artificial Sequence: Synthetic oligonucleotide
uagccuccggggugccggc

SEQ ID NO: 2783004 - RNA, 19 nt, Artificial Sequence
  Description of Artificial Sequence: Synthetic oligonucleotide
gggcgcuggguguuugggc

SEQ ID NO: 2783005 - RNA, 19 nt, Artificial Sequence
  Description of Artificial Sequence: Synthetic oligonucleotide
gcuagaggggaggccuggg

SEQ ID NO: 2783006 - RNA, 19 nt, Artificial Sequence
  Description of Artificial Sequence: Synthetic oligonucleotide
ugaccucgccagccuggau

SEQ ID NO: 2783007 - RNA, 19 nt, Artificial Sequence
  Description of Artificial Sequence: Synthetic oligonucleotide
gaggccugcuucaccaccu

SEQ ID NO: 2783008 - RNA, 19 nt, Artificial Sequence
  Description of Artificial Sequence: Synthetic oligonucleotide
cugcucaaggccuccgccu

SEQ ID NO: 2783009 - RNA, 19 nt, Artificial Sequence
  Description of Artificial Sequence: Synthetic oligonucleotide
ccuucuuugacccuccguu

SEQ ID NO: 2783010 - RNA, 19 nt, Artificial Sequence
  Description of Artificial Sequence: Synthetic oligonucleotide
gcgcuggguguuugggcgg

SEQ ID NO: 2783011 - RNA, 19 nt, Artificial Sequence
  Description of Artificial Sequence: Synthetic oligonucleotide
cagcagagucggacgcauc

SEQ ID NO: 2783012 - RNA, 19 nt, Artificial Sequence
  Description of Artificial Sequence: Synthetic oligonucleotide
ggcugaccucgccagccug

SEQ ID NO: 2783013 - RNA, 19 nt, Artificial Sequence
  Description of Artificial Sequence: Synthetic oligonucleotide
gcucaaggccuccgccucc

SEQ ID NO: 2783014 - RNA, 19 nt, Artificial Sequence
  Description of Artificial Sequence: Synthetic oligonucleotide
cucugcugggcuggcugac

SEQ ID NO: 2783015 - RNA, 19 nt, Artificial Sequence
  Description of Artificial Sequence: Synthetic oligonucleotide
ccuuaggcucuugaucuuc

SEQ ID NO: 2783016 - RNA, 19 nt, Artificial Sequence
  Description of Artificial Sequence: Synthetic oligonucleotide
gguguuugggcggcgucuc

SEQ ID NO: 2783017 - RNA, 19 nt, Artificial Sequence
  Description of Artificial Sequence: Synthetic oligonucleotide
auggggugacgggugucgu

SEQ ID NO: 2783018 - RNA, 19 nt, Artificial Sequence
  Description of Artificial Sequence: Synthetic oligonucleotide
ggccucagggcucagcccu

SEQ ID NO: 2783019 - RNA, 19 nt, Artificial Sequence
  Description of Artificial Sequence: Synthetic oligonucleotide
ugcucucugcugggcuggc

SEQ ID NO: 2783020 - RNA, 19 nt, Artificial Sequence
  Description of Artificial Sequence: Synthetic oligonucleotide
cucuguguugaggcaaugu

SEQ ID NO: 2783021 - RNA, 19 nt, Artificial Sequence
  Description of Artificial Sequence: Synthetic oligonucleotide
gcagcuagaggggaggccu

SEQ ID NO: 2783022 - RNA, 19 nt, Artificial Sequence
  Description of Artificial Sequence: Synthetic oligonucleotide
cagguugcguuuggcuguc

SEQ ID NO: 2783023 - RNA, 19 nt, Artificial Sequence
  Description of Artificial Sequence: Synthetic oligonucleotide
cuucuuccuuaggcucuug

SEQ ID NO: 2783024 - RNA, 19 nt, Artificial Sequence
  Description of Artificial Sequence: Synthetic oligonucleotide
cuccucuuggggcacguau

SEQ ID NO: 2783025 - RNA, 19 nt, Artificial Sequence
  Description of Artificial Sequence: Synthetic oligonucleotide
gguuugcucuuggaaaacu

SEQ ID NO: 2783026 - RNA, 19 nt, Artificial Sequence
  Description of Artificial Sequence: Synthetic oligonucleotide
cuguccccguagccuccgg

SEQ ID NO: 2783027 - RNA, 19 nt, Artificial Sequence
  Description of Artificial Sequence: Synthetic oligonucleotide
agcccuggaggaaguucug

SEQ ID NO: 2783028 - RNA, 19 nt, Artificial Sequence
  Description of Artificial Sequence: Synthetic oligonucleotide
gcuggcugaccucgccagc

SEQ ID NO: 2783029 - RNA, 19 nt, Artificial Sequence
  Description of Artificial Sequence: Synthetic oligonucleotide
gugacgggugucguggccu

SEQ ID NO: 2783030 - RNA, 19 nt, Artificial Sequence
  Description of Artificial Sequence: Synthetic oligonucleotide
ggagccuuggagggcgcug

SEQ ID NO: 2783031 - RNA, 19 nt, Artificial Sequence
  Description of Artificial Sequence: Synthetic oligonucleotide
cagcugcucucugcugggc

SEQ ID NO: 2783032 - RNA, 19 nt, Artificial Sequence
  Description of Artificial Sequence: Synthetic oligonucleotide
gcuugcgccaggucccguc

SEQ ID NO: 2783033 - RNA, 19 nt, Artificial Sequence
  Description of Artificial Sequence: Synthetic oligonucleotide
gucguggccucagggcuca

SEQ ID NO: 2783034 - RNA, 19 nt, Artificial Sequence
  Description of Artificial Sequence: Synthetic oligonucleotide
ucaccaccuucgggucugc

SEQ ID NO: 2783035 - RNA, 19 nt, Artificial Sequence
  Description of Artificial Sequence: Synthetic oligonucleotide
gccuccggggugccggcgg

SEQ ID NO: 2783036 - RNA, 19 nt, Artificial Sequence
  Description of Artificial Sequence: Synthetic oligonucleotide
gggucugcauggggugacg

SEQ ID NO: 2783037 - RNA, 19 nt, Artificial Sequence
  Description of Artificial Sequence: Synthetic oligonucleotide
cuucaccaccuucgggucu

SEQ ID NO: 2783038 - RNA, 19 nt, Artificial Sequence
  Description of Artificial Sequence: Synthetic oligonucleotide
gggugacgggugucguggc

SEQ ID NO: 2783039 - RNA, 19 nt, Artificial Sequence
  Description of Artificial Sequence: Synthetic oligonucleotide
aggccugcuucaccaccuu

SEQ ID NO: 2783040 - RNA, 19 nt, Artificial Sequence
  Description of Artificial Sequence: Synthetic oligonucleotide
gacgcauccggggcagcua

SEQ ID NO: 2783041 - RNA, 19 nt, Artificial Sequence
  Description of Artificial Sequence: Synthetic oligonucleotide
ccuuucgcuucagguugcg

SEQ ID NO: 2783042 - RNA, 19 nt, Artificial Sequence
  Description of Artificial Sequence: Synthetic oligonucleotide
gccagccuggaugcgcugc

SEQ ID NO: 2783043 - RNA, 19 nt, Artificial Sequence
  Description of Artificial Sequence: Synthetic oligonucleotide
uccggggugccggcgguuu

SEQ ID NO: 2783044 - RNA, 19 nt, Artificial Sequence
  Description of Artificial Sequence: Synthetic oligonucleotide
gccuggaugcgcugcugca

SEQ ID NO: 2783045 - RNA, 19 nt, Artificial Sequence
  Description of Artificial Sequence: Synthetic oligonucleotide
gggcuggcugaccucgcca

SEQ ID NO: 2783046 - RNA, 19 nt, Artificial Sequence
  Description of Artificial Sequence: Synthetic oligonucleotide
cugaccucgccagccugga

SEQ ID NO: 2783047 - RNA, 19 nt, Artificial Sequence
  Description of Artificial Sequence: Synthetic oligonucleotide
ccuccguugcuugcgccag

SEQ ID NO: 2783048 - RNA, 19 nt, Artificial Sequence
  Description of Artificial Sequence: Synthetic oligonucleotide
agccuccggggugccggcg

SEQ ID NO: 2783049 - RNA, 19 nt, Artificial Sequence
  Description of Artificial Sequence: Synthetic oligonucleotide
gcgucucccagagacaccu

SEQ ID NO: 2783050 - RNA, 19 nt, Artificial Sequence
  Description of Artificial Sequence: Synthetic oligonucleotide
cccguagccuccggggugc

SEQ ID NO: 2783051 - RNA, 19 nt, Artificial Sequence
  Description of Artificial Sequence: Synthetic oligonucleotide
gacgggugucguggccuca

SEQ ID NO: 2783052 - RNA, 19 nt, Artificial Sequence
  Description of Artificial Sequence: Synthetic oligonucleotide
gucucuguguugaggcaau

SEQ ID NO: 2783053 - RNA, 19 nt, Artificial Sequence
  Description of Artificial Sequence: Synthetic oligonucleotide
ugcuugcgccaggucccgu

SEQ ID NO: 2783054 - RNA, 19 nt, Artificial Sequence
  Description of Artificial Sequence: Synthetic oligonucleotide
ggcugucuuggagaggccu

SEQ ID NO: 2783055 - RNA, 19 nt, Artificial Sequence
  Description of Artificial Sequence: Synthetic oligonucleotide
ggcagcagagucggacgca

SEQ ID NO: 2783056 - RNA, 19 nt, Artificial Sequence
  Description of Artificial Sequence: Synthetic oligonucleotide
cucagggcucagcccugga

SEQ ID NO: 2783057 - RNA, 19 nt, Artificial Sequence
  Description of Artificial Sequence: Synthetic oligonucleotide
cgcuucagguugcguuugg

SEQ ID NO: 2783058 - RNA, 19 nt, Artificial Sequence
  Description of Artificial Sequence: Synthetic oligonucleotide
ccccguagccuccggggug

SEQ ID NO: 2783059 - RNA, 19 nt, Artificial Sequence
  Description of Artificial Sequence: Synthetic oligonucleotide
ggcgucucccagagacacc

SEQ ID NO: 2783060 - RNA, 19 nt, Artificial Sequence
  Description of Artificial Sequence: Synthetic oligonucleotide
gcuggguguuugggcggcg

SEQ ID NO: 2783061 - RNA, 19 nt, Artificial Sequence
  Description of Artificial Sequence: Synthetic oligonucleotide
cccuccguugcuugcgcca

SEQ ID NO: 2783062 - RNA, 19 nt, Artificial Sequence
  Description of Artificial Sequence: Synthetic oligonucleotide
ggagggcgcuggguguuug

SEQ ID NO: 2783063 - RNA, 19 nt, Artificial Sequence
  Description of Artificial Sequence: Synthetic oligonucleotide
ggcuuucucugugguggca

SEQ ID NO: 2783064 - RNA, 19 nt, Artificial Sequence
  Description of Artificial Sequence: Synthetic oligonucleotide
cggcgucucccagagacac

SEQ ID NO: 2783065 - RNA, 19 nt, Artificial Sequence
  Description of Artificial Sequence: Synthetic oligonucleotide
ggucccgucgggucucugu

SEQ ID NO: 2783066 - RNA, 19 nt, Artificial Sequence
  Description of Artificial Sequence: Synthetic oligonucleotide
uggagggcgcuggguguuu

SEQ ID NO: 2783067 - RNA, 19 nt, Artificial Sequence
  Description of Artificial Sequence: Synthetic oligonucleotide
ccuguccccguagccuccg

SEQ ID NO: 2783068 - RNA, 19 nt, Artificial Sequence
  Description of Artificial Sequence: Synthetic oligonucleotide
gguugcguuuggcugucuu

SEQ ID NO: 2783069 - RNA, 19 nt, Artificial Sequence
  Description of Artificial Sequence: Synthetic oligonucleotide
augcgcugcugcagcuccu

SEQ ID NO: 2783070 - RNA, 19 nt, Artificial Sequence
  Description of Artificial Sequence: Synthetic oligonucleotide
cuuucgcuucagguugcgu

SEQ ID NO: 2783071 - RNA, 19 nt, Artificial Sequence
  Description of Artificial Sequence: Synthetic oligonucleotide
ggguguuugggcggcgucu

SEQ ID NO: 2783072 - RNA, 19 nt, Artificial Sequence
  Description of Artificial Sequence: Synthetic oligonucleotide
ccuuaucaagaguccugcu

SEQ ID NO: 2783073 - RNA, 19 nt, Artificial Sequence
  Description of Artificial Sequence: Synthetic oligonucleotide
ggaggccuggggagccuug

SEQ ID NO: 2783074 - RNA, 19 nt, Artificial Sequence
  Description of Artificial Sequence: Synthetic oligonucleotide
gccaggucccgucgggucu

SEQ ID NO: 2783075 - RNA, 19 nt, Artificial Sequence
  Description of Artificial Sequence: Synthetic oligonucleotide
ccgucgggucucuguguug

SEQ ID NO: 2783076 - RNA, 19 nt, Artificial Sequence
  Description of Artificial Sequence: Synthetic oligonucleotide
cucaaggccuccgccuccu

SEQ ID NO: 2783077 - RNA, 19 nt, Artificial Sequence
  Description of Artificial Sequence: Synthetic oligonucleotide
agguugcguuuggcugucu

SEQ ID NO: 2783078 - RNA, 19 nt, Artificial Sequence
  Description of Artificial Sequence: Synthetic oligonucleotide
ccgcagcuucuuccuuagg

SEQ ID NO: 2783079 - RNA, 19 nt, Artificial Sequence
  Description of Artificial Sequence: Synthetic oligonucleotide
cucuuggggcacguauccu

SEQ ID NO: 2783080 - RNA, 19 nt, Artificial Sequence
  Description of Artificial Sequence: Synthetic oligonucleotide
ccugccgcagcuucuuccu

SEQ ID NO: 2783081 - RNA, 19 nt, Artificial Sequence
  Description of Artificial Sequence: Synthetic oligonucleotide
cgucgggucucuguguuga

SEQ ID NO: 2783082 - RNA, 19 nt, Artificial Sequence
  Description of Artificial Sequence: Synthetic oligonucleotide
ucguggccucagggcucag

SEQ ID NO: 2783083 - RNA, 19 nt, Artificial Sequence
  Description of Artificial Sequence: Synthetic oligonucleotide
ggggcacguauccuucuuu

SEQ ID NO: 2783084 - RNA, 19 nt, Artificial Sequence
  Description of Artificial Sequence: Synthetic oligonucleotide
gccuguccccguagccucc

SEQ ID NO: 2783085 - RNA, 19 nt, Artificial Sequence
  Description of Artificial Sequence: Synthetic oligonucleotide
gcauggggugacggguguc

SEQ ID NO: 2783086 - RNA, 19 nt, Artificial Sequence
  Description of Artificial Sequence: Synthetic oligonucleotide
aggucccgucgggucucug

SEQ ID NO: 2783087 - RNA, 19 nt, Artificial Sequence
  Description of Artificial Sequence: Synthetic oligonucleotide
cuggguguuugggcggcgu

SEQ ID NO: 2783088 - RNA, 19 nt, Artificial Sequence
  Description of Artificial Sequence: Synthetic oligonucleotide
gcagcagagucggacgcau

SEQ ID NO: 2783089 - RNA, 19 nt, Artificial Sequence
  Description of Artificial Sequence: Synthetic oligonucleotide
cgccaggucccgucggguc

SEQ ID NO: 2783090 - RNA, 19 nt, Artificial Sequence
  Description of Artificial Sequence: Synthetic oligonucleotide
ccaggucccgucgggucuc

SEQ ID NO: 2783091 - RNA, 19 nt, Artificial Sequence
  Description of Artificial Sequence: Synthetic oligonucleotide
ggacgcauccggggcagcu

SEQ ID NO: 2783092 - RNA, 19 nt, Artificial Sequence
  Description of Artificial Sequence: Synthetic oligonucleotide
cgggugucguggccucagg

SEQ ID NO: 2783093 - RNA, 19 nt, Artificial Sequence
  Description of Artificial Sequence: Synthetic oligonucleotide
caccaccuucgggucugca

SEQ ID NO: 2783094 - RNA, 19 nt, Artificial Sequence
  Description of Artificial Sequence: Synthetic oligonucleotide
cgcuggguguuugggcggc

SEQ ID NO: 2783095 - RNA, 19 nt, Artificial Sequence
  Description of Artificial Sequence: Synthetic oligonucleotide
cguggccucagggcucagc

SEQ ID NO: 2783096 - RNA, 19 nt, Artificial Sequence
  Description of Artificial Sequence: Synthetic oligonucleotide
ccguugcuugcgccagguc

SEQ ID NO: 2783097 - RNA, 19 nt, Artificial Sequence
  Description of Artificial Sequence: Synthetic oligonucleotide
gcggcgucucccagagaca

SEQ ID NO: 2783098 - RNA, 19 nt, Artificial Sequence
  Description of Artificial Sequence: Synthetic oligonucleotide
cggggugccggcgguuucc

SEQ ID NO: 2783099 - RNA, 19 nt, Artificial Sequence
  Description of Artificial Sequence: Synthetic oligonucleotide
ggggagccuuggagggcgc

SEQ ID NO: 2783100 - RNA, 19 nt, Artificial Sequence
  Description of Artificial Sequence: Synthetic oligonucleotide
cgggucugcauggggugac

SEQ ID NO: 2783101 - RNA, 19 nt, Artificial Sequence
  Description of Artificial Sequence: Synthetic oligonucleotide
ccucgccagccuggaugcg

SEQ ID NO: 2783102 - RNA, 19 nt, Artificial Sequence
  Description of Artificial Sequence: Synthetic oligonucleotide
ggggugccggcgguuucca

SEQ ID NO: 2783103 - RNA, 19 nt, Artificial Sequence
  Description of Artificial Sequence: Synthetic oligonucleotide
cguagccuccggggugccg

SEQ ID NO: 2783104 - RNA, 19 nt, Artificial Sequence
  Description of Artificial Sequence: Synthetic oligonucleotide
gggcucagcccuggaggaa

SEQ ID NO: 2783105 - RNA, 19 nt, Artificial Sequence
  Description of Artificial Sequence: Synthetic oligonucleotide
cguauccuucuuugacccu

SEQ ID NO: 2783106 - RNA, 19 nt, Artificial Sequence
  Description of Artificial Sequence: Synthetic oligonucleotide
ccggggugccggcgguuuc

SEQ ID NO: 2783107 - RNA, 19 nt, Artificial Sequence
  Description of Artificial Sequence: Synthetic oligonucleotide
gcucagcccuggaggaagu

SEQ ID NO: 2783108 - RNA, 19 nt, Artificial Sequence
  Description of Artificial Sequence: Synthetic oligonucleotide
cugccgcagcuucuuccuu

SEQ ID NO: 2783109 - RNA, 19 nt, Artificial Sequence
  Description of Artificial Sequence: Synthetic oligonucleotide
gccuuggagggcgcugggu

SEQ ID NO: 2783110 - RNA, 19 nt, Artificial Sequence
  Description of Artificial Sequence: Synthetic oligonucleotide
cccgucgggucucuguguu

SEQ ID NO: 2783111 - RNA, 19 nt, Artificial Sequence
  Description of Artificial Sequence: Synthetic oligonucleotide
gggagccuuggagggcgcu

SEQ ID NO: 2783112 - RNA, 19 nt, Artificial Sequence
  Description of Artificial Sequence: Synthetic oligonucleotide
ccguagccuccggggugcc

SEQ ID NO: 2783113 - RNA, 19 nt, Artificial Sequence
  Description of Artificial Sequence: Synthetic oligonucleotide
cgccagccuggaugcgcug

SEQ ID NO: 2783114 - RNA, 19 nt, Artificial Sequence
  Description of Artificial Sequence: Synthetic oligonucleotide
cgcauccggggcagcuaga

SEQ ID NO: 2783115 - RNA, 19 nt, Artificial Sequence
  Description of Artificial Sequence: Synthetic oligonucleotide
gggcggcgucucccagaga

SEQ ID NO: 2783116 - RNA, 19 nt, Artificial Sequence
  Description of Artificial Sequence: Synthetic oligonucleotide
gcucucugcugggcuggcu

SEQ ID NO: 2783117 - RNA, 19 nt, Artificial Sequence
  Description of Artificial Sequence: Synthetic oligonucleotide
gcgccaggucccgucgggu

SEQ ID NO: 2783118 - RNA, 19 nt, Artificial Sequence
  Description of Artificial Sequence: Synthetic oligonucleotide
caggucccgucgggucucu

SEQ ID NO: 2783119 - RNA, 19 nt, Artificial Sequence
  Description of Artificial Sequence: Synthetic oligonucleotide
gggugccggcgguuuccau

SEQ ID NO: 2783120 - RNA, 19 nt, Artificial Sequence
  Description of Artificial Sequence: Synthetic oligonucleotide
cggacgcauccggggcagc

SEQ ID NO: 2783121 - RNA, 19 nt, Artificial Sequence
  Description of Artificial Sequence: Synthetic oligonucleotide
gggaggccuggggagccuu

SEQ ID NO: 2783122 - RNA, 19 nt, Artificial Sequence
  Description of Artificial Sequence: Synthetic oligonucleotide
ggggaggccuggggagccu

SEQ ID NO: 2783123 - RNA, 19 nt, Artificial Sequence
  Description of Artificial Sequence: Synthetic oligonucleotide
ccaccugccgcagcuucuu

SEQ ID NO: 2783124 - RNA, 19 nt, Artificial Sequence
  Description of Artificial Sequence: Synthetic oligonucleotide
ccuccggggugccggcggu

SEQ ID NO: 2783125 - RNA, 19 nt, Artificial Sequence
  Description of Artificial Sequence: Synthetic oligonucleotide
ccuccucuuggggcacgua

SEQ ID NO: 2783126 - RNA, 19 nt, Artificial Sequence
  Description of Artificial Sequence: Synthetic oligonucleotide
cuccggggugccggcgguu

SEQ ID NO: 2783127 - RNA, 19 nt, Artificial Sequence
  Description of Artificial Sequence: Synthetic oligonucleotide
uaaaguaaggcaaagagga

SEQ ID NO: 2783128 - RNA, 19 nt, Artificial Sequence
  Description of Artificial Sequence: Synthetic oligonucleotide
uuauguaugaguuugaggu

SEQ ID NO: 2783129 - RNA, 19 nt, Artificial Sequence
  Description of Artificial Sequence: Synthetic oligonucleotide
auuaaaguaaggcaaagag

SEQ ID NO: 2783130 - RNA, 19 nt, Artificial Sequence
  Description of Artificial Sequence: Synthetic oligonucleotide
aauaugaucaugccagggg

SEQ ID NO: 2783131 - RNA, 19 nt, Artificial Sequence
  Description of Artificial Sequence: Synthetic oligonucleotide
uuaaaguaaggcaaagagg

SEQ ID NO: 2783132 - RNA, 19 nt, Artificial Sequence
  Description of Artificial Sequence: Synthetic oligonucleotide
  modified_base (15)..(15): a, c, u, g, unknown or other
gaagcagccacacanaagg

SEQ ID NO: 2783133 - RNA, 19 nt, Artificial Sequence
  Description of Artificial Sequence: Synthetic oligonucleotide
uaauuugcauuccugaggg

SEQ ID NO: 2783134 - RNA, 19 nt, Artificial Sequence
  Description of Artificial Sequence: Synthetic oligonucleotide
uaauccagcacucaggaag

SEQ ID NO: 2783135 - RNA, 19 nt, Artificial Sequence
  Description of Artificial Sequence: Synthetic oligonucleotide
aauggaucaauccuugcag

SEQ ID NO: 2783136 - RNA, 19 nt, Artificial Sequence
  Description of Artificial Sequence: Synthetic oligonucleotide
aaacugguaauuugcauuc

SEQ ID NO: 2783137 - RNA, 19 nt, Artificial Sequence
  Description of Artificial Sequence: Synthetic oligonucleotide
aaaacuggucuuuacgggg

SEQ ID NO: 2783138 - RNA, 19 nt, Artificial Sequence
  Description of Artificial Sequence: Synthetic oligonucleotide
uuagagacccuuauuaaag

SEQ ID NO: 2783139 - RNA, 19 nt, Artificial Sequence
  Description of Artificial Sequence: Synthetic oligonucleotide
agaaauaaccacuugggug

SEQ ID NO: 2783140 - RNA, 19 nt, Artificial Sequence
  Description of Artificial Sequence: Synthetic oligonucleotide
auaugaucaugccaggggc

SEQ ID NO: 2783141 - RNA, 19 nt, Artificial Sequence
  Description of Artificial Sequence: Synthetic oligonucleotide
aauguggacacagguaugc

SEQ ID NO: 2783142 - RNA, 19 nt, Artificial Sequence
  Description of Artificial Sequence: Synthetic oligonucleotide
acugguaauaugaucaugc

SEQ ID NO: 2783143 - RNA, 19 nt, Artificial Sequence
  Description of Artificial Sequence: Synthetic oligonucleotide
aaguaaggcaaagaggacg

SEQ ID NO: 2783144 - RNA, 19 nt, Artificial Sequence
  Description of Artificial Sequence: Synthetic oligonucleotide
agugauccgagaaauaacc

SEQ ID NO: 2783145 - RNA, 19 nt, Artificial Sequence
  Description of Artificial Sequence: Synthetic oligonucleotide
uucuaaauaggaaacuggu

SEQ ID NO: 2783146 - RNA, 19 nt, Artificial Sequence
  Description of Artificial Sequence: Synthetic oligonucleotide
gguaauaugaucaugccag

SEQ ID NO: 2783147 - RNA, 19 nt, Artificial Sequence
  Description of Artificial Sequence: Synthetic oligonucleotide
aauccuugcaggcacggag

SEQ ID NO: 2783148 - RNA, 19 nt, Artificial Sequence
  Description of Artificial Sequence: Synthetic oligonucleotide
acccuuauuaaaguaaggc

SEQ ID NO: 2783149 - RNA, 19 nt, Artificial Sequence
  Description of Artificial Sequence: Synthetic oligonucleotide
guaauuugcauuccugagg

SEQ ID NO: 2783150 - RNA, 19 nt, Artificial Sequence
  Description of Artificial Sequence: Synthetic oligonucleotide
ucugguucuaaauaggaaa

SEQ ID NO: 2783151 - RNA, 19 nt, Artificial Sequence
  Description of Artificial Sequence: Synthetic oligonucleotide
guugcaaagaggaaugugg

SEQ ID NO: 2783152 - RNA, 19 nt, Artificial Sequence
  Description of Artificial Sequence: Synthetic oligonucleotide
uaggaaacugguaauuugc

SEQ ID NO: 2783153 - RNA, 19 nt, Artificial Sequence
  Description of Artificial Sequence: Synthetic oligonucleotide
ugguguacacccuuaaucc

SEQ ID NO: 2783154 - RNA, 19 nt, Artificial Sequence
  Description of Artificial Sequence: Synthetic oligonucleotide
auaaccacuugggugaugc

SEQ ID NO: 2783155 - RNA, 19 nt, Artificial Sequence
  Description of Artificial Sequence: Synthetic oligonucleotide
  modified_base (3)..(3): a, c, u, g, unknown or other
canaaggaccugcagaggg

SEQ ID NO: 2783156 - RNA, 19 nt, Artificial Sequence
  Description of Artificial Sequence: Synthetic oligonucleotide
  modified_base (5)..(5): a, c, u, g, unknown or other
cacanaaggaccugcagag

SEQ ID NO: 2783157 - RNA, 19 nt, Artificial Sequence
  Description of Artificial Sequence: Synthetic oligonucleotide
acagguaugcauaacugcc

SEQ ID NO: 2783158 - RNA, 19 nt, Artificial Sequence
  Description of Artificial Sequence: Synthetic oligonucleotide
gagggaagagcccacaugc

SEQ ID NO: 2783159 - RNA, 19 nt, Artificial Sequence
  Description of Artificial Sequence: Synthetic oligonucleotide
cugacuuucuucaucagac

SEQ ID NO: 2783160 - RNA, 19 nt, Artificial Sequence
  Description of Artificial Sequence: Synthetic oligonucleotide
cuaaauaggaaacugguaa

SEQ ID NO: 2783161 - RNA, 19 nt, Artificial Sequence
  Description of Artificial Sequence: Synthetic oligonucleotide
guaugcauaacugccagcg

SEQ ID NO: 2783162 - RNA, 19 nt, Artificial Sequence
  Description of Artificial Sequence: Synthetic oligonucleotide
guuauguaugaguuugagg

SEQ ID NO: 2783163 - RNA, 19 nt, Artificial Sequence
  Description of Artificial Sequence: Synthetic oligonucleotide
aaccacuugggugaugccc

SEQ ID NO: 2783164 - RNA, 19 nt, Artificial Sequence
  Description of Artificial Sequence: Synthetic oligonucleotide
aaagaggacgucuucucca

SEQ ID NO: 2783165 - RNA, 19 nt, Artificial Sequence
  Description of Artificial Sequence: Synthetic oligonucleotide
augaagaggaggaagcagc

SEQ ID NO: 2783166 - RNA, 19 nt, Artificial Sequence
  Description of Artificial Sequence: Synthetic oligonucleotide
agagaguuccaggacagcc

SEQ ID NO: 2783167 - RNA, 19 nt, Artificial Sequence
  Description of Artificial Sequence: Synthetic oligonucleotide
gacuuucuucaucagacgc

SEQ ID NO: 2783168 - RNA, 19 nt, Artificial Sequence
  Description of Artificial Sequence: Synthetic oligonucleotide
aauccagcacucaggaagc

SEQ ID NO: 2783169 - RNA, 19 nt, Artificial Sequence
  Description of Artificial Sequence: Synthetic oligonucleotide
cuuguugcaaagaggaaug

SEQ ID NO: 2783170 - RNA, 19 nt, Artificial Sequence
  Description of Artificial Sequence: Synthetic oligonucleotide
ugguaauaugaucaugcca

SEQ ID NO: 2783171 - RNA, 19 nt, Artificial Sequence
  Description of Artificial Sequence: Synthetic oligonucleotide
guucuaaauaggaaacugg

SEQ ID NO: 2783172 - RNA, 19 nt, Artificial Sequence
  Description of Artificial Sequence: Synthetic oligonucleotide
auaggaaacugguaauuug

SEQ ID NO: 2783173 - RNA, 19 nt, Artificial Sequence
  Description of Artificial Sequence: Synthetic oligonucleotide
augacugguaauaugauca

SEQ ID NO: 2783174 - RNA, 19 nt, Artificial Sequence
  Description of Artificial Sequence: Synthetic oligonucleotide
aagaggaauguggacacag

SEQ ID NO: 2783175 - RNA, 19 nt, Artificial Sequence
  Description of Artificial Sequence: Synthetic oligonucleotide
acggggaauggaucaaucc

SEQ ID NO: 2783176 - RNA, 19 nt, Artificial Sequence
  Description of Artificial Sequence: Synthetic oligonucleotide
ugauccgagaaauaaccac

SEQ ID NO: 2783177 - RNA, 19 nt, Artificial Sequence
  Description of Artificial Sequence: Synthetic oligonucleotide
uaauaugaucaugccaggg

SEQ ID NO: 2783178 - RNA, 19 nt, Artificial Sequence
  Description of Artificial Sequence: Synthetic oligonucleotide
ucugacuuucuucaucaga

SEQ ID NO: 2783179 - RNA, 19 nt, Artificial Sequence
  Description of Artificial Sequence: Synthetic oligonucleotide
ugguaauuugcauuccuga

SEQ ID NO: 2783180 - RNA, 19 nt, Artificial Sequence
  Description of Artificial Sequence: Synthetic oligonucleotide
acacccuuaauccagcacu

SEQ ID NO: 2783181 - RNA, 19 nt, Artificial Sequence
  Description of Artificial Sequence: Synthetic oligonucleotide
uugggugaugcccacagcu

SEQ ID NO: 2783182 - RNA, 19 nt, Artificial Sequence
  Description of Artificial Sequence: Synthetic oligonucleotide
uucuucaucagacgcaguc

SEQ ID NO: 2783183 - RNA, 19 nt, Artificial Sequence
  Description of Artificial Sequence: Synthetic oligonucleotide
agcacucugacuuucuuca

SEQ ID NO: 2783184 - RNA, 19 nt, Artificial Sequence
  Description of Artificial Sequence: Synthetic oligonucleotide
accaugaagaggaggaagc

SEQ ID NO: 2783185 - RNA, 19 nt, Artificial Sequence
  Description of Artificial Sequence: Synthetic oligonucleotide
  modified_base (6)..(6): a, c, u, g, unknown or other
acacanaaggaccugcaga

SEQ ID NO: 2783186 - RNA, 19 nt, Artificial Sequence
  Description of Artificial Sequence: Synthetic oligonucleotide
uaaauaggaaacugguaau

SEQ ID NO: 2783187 - RNA, 19 nt, Artificial Sequence
  Description of Artificial Sequence: Synthetic oligonucleotide
uauuaaaguaaggcaaaga

SEQ ID NO: 2783188 - RNA, 19 nt, Artificial Sequence
  Description of Artificial Sequence: Synthetic oligonucleotide
auggaucaauccuugcagg

SEQ ID NO: 2783189 - RNA, 19 nt, Artificial Sequence
  Description of Artificial Sequence: Synthetic oligonucleotide
cugguucuaaauaggaaac

SEQ ID NO: 2783190 - RNA, 19 nt, Artificial Sequence
  Description of Artificial Sequence: Synthetic oligonucleotide
aaaguaaggcaaagaggac

SEQ ID NO: 2783191 - RNA, 19 nt, Artificial Sequence
  Description of Artificial Sequence: Synthetic oligonucleotide
ucuaaauaggaaacuggua

SEQ ID NO: 2783192 - RNA, 19 nt, Artificial Sequence
  Description of Artificial Sequence: Synthetic oligonucleotide
uugcaaagaggaaugugga

SEQ ID NO: 2783193 - RNA, 19 nt, Artificial Sequence
  Description of Artificial Sequence: Synthetic oligonucleotide
ugaagaggaggaagcagcc

SEQ ID NO: 2783194 - RNA, 19 nt, Artificial Sequence
  Description of Artificial Sequence: Synthetic oligonucleotide
gaauggaucaauccuugca

SEQ ID NO: 2783195 - RNA, 19 nt, Artificial Sequence
  Description of Artificial Sequence: Synthetic oligonucleotide
acgucuucuccauacuugg

SEQ ID NO: 2783196 - RNA, 19 nt, Artificial Sequence
  Description of Artificial Sequence: Synthetic oligonucleotide
caaagaggaauguggacac

SEQ ID NO: 2783197 - RNA, 19 nt, Artificial Sequence
  Description of Artificial Sequence: Synthetic oligonucleotide
ugacuuucuucaucagacg

SEQ ID NO: 2783198 - RNA, 19 nt, Artificial Sequence
  Description of Artificial Sequence: Synthetic oligonucleotide
acucugacuuucuucauca

SEQ ID NO: 2783199 - RNA, 19 nt, Artificial Sequence
  Description of Artificial Sequence: Synthetic oligonucleotide
  modified_base (2)..(2): a, c, u, g, unknown or other
anaaggaccugcagagggg

SEQ ID NO: 2783200 - RNA, 19 nt, Artificial Sequence
  Description of Artificial Sequence: Synthetic oligonucleotide
gaucaauccuugcaggcac

SEQ ID NO: 2783201 - RNA, 19 nt, Artificial Sequence
  Description of Artificial Sequence: Synthetic oligonucleotide
gaugacugguaauaugauc

SEQ ID NO: 2783202 - RNA, 19 nt, Artificial Sequence
  Description of Artificial Sequence: Synthetic oligonucleotide
cacagguaugcauaacugc

SEQ ID NO: 2783203 - RNA, 19 nt, Artificial Sequence
  Description of Artificial Sequence: Synthetic oligonucleotide
gugguuauguaugaguuug

SEQ ID NO: 2783204 - RNA, 19 nt, Artificial Sequence
  Description of Artificial Sequence: Synthetic oligonucleotide
guaauaugaucaugccagg

SEQ ID NO: 2783205 - RNA, 19 nt, Artificial Sequence
  Description of Artificial Sequence: Synthetic oligonucleotide
augaugacugguaauauga

SEQ ID NO: 2783206 - RNA, 19 nt, Artificial Sequence
  Description of Artificial Sequence: Synthetic oligonucleotide
uggcuuucagaccuuguug

SEQ ID NO: 2783207 - RNA, 19 nt, Artificial Sequence
  Description of Artificial Sequence: Synthetic oligonucleotide
aauaggaaacugguaauuu

SEQ ID NO: 2783208 - RNA, 19 nt, Artificial Sequence
  Description of Artificial Sequence: Synthetic oligonucleotide
aacugguaauuugcauucc

SEQ ID NO: 2783209 - RNA, 19 nt, Artificial Sequence
  Description of Artificial Sequence: Synthetic oligonucleotide
uggaucaauccuugcaggc

SEQ ID NO: 2783210 - RNA, 19 nt, Artificial Sequence
  Description of Artificial Sequence: Synthetic oligonucleotide
gguaauuugcauuccugag

SEQ ID NO: 2783211 - RNA, 19 nt, Artificial Sequence
  Description of Artificial Sequence: Synthetic oligonucleotide
gucuucuccauacuuggcc

SEQ ID NO: 2783212 - RNA, 19 nt, Artificial Sequence
  Description of Artificial Sequence: Synthetic oligonucleotide
gaccuuguugcaaagagga

SEQ ID NO: 2783213 - RNA, 19 nt, Artificial Sequence
  Description of Artificial Sequence: Synthetic oligonucleotide
cagaccuuguugcaaagag

SEQ ID NO: 2783214 - RNA, 19 nt, Artificial Sequence
  Description of Artificial Sequence: Synthetic oligonucleotide
uguacacccuuaauccagc

SEQ ID NO: 2783215 - RNA, 19 nt, Artificial Sequence
  Description of Artificial Sequence: Synthetic oligonucleotide
auagugauccgagaaauaa

SEQ ID NO: 2783216 - RNA, 19 nt, Artificial Sequence
  Description of Artificial Sequence: Synthetic oligonucleotide
ucuucuccauacuuggccu

SEQ ID NO: 2783217 - RNA, 19 nt, Artificial Sequence
  Description of Artificial Sequence: Synthetic oligonucleotide
agguaugcauaacugccag

SEQ ID NO: 2783218 - RNA, 19 nt, Artificial Sequence
  Description of Artificial Sequence: Synthetic oligonucleotide
caugaugacugguaauaug

SEQ ID NO: 2783219 - RNA, 19 nt, Artificial Sequence
  Description of Artificial Sequence: Synthetic oligonucleotide
cuuaauccagcacucagga

SEQ ID NO: 2783220 - RNA, 19 nt, Artificial Sequence
  Description of Artificial Sequence: Synthetic oligonucleotide
cugguaauaugaucaugcc

SEQ ID NO: 2783221 - RNA, 19 nt, Artificial Sequence
  Description of Artificial Sequence: Synthetic oligonucleotide
aaauaggaaacugguaauu

SEQ ID NO: 2783222 - RNA, 19 nt, Artificial Sequence
  Description of Artificial Sequence: Synthetic oligonucleotide
uguaugaguuugaggucag

SEQ ID NO: 2783223 - RNA, 19 nt, Artificial Sequence
  Description of Artificial Sequence: Synthetic oligonucleotide
gugguguacacccuuaauc

SEQ ID NO: 2783224 - RNA, 19 nt, Artificial Sequence
  Description of Artificial Sequence: Synthetic oligonucleotide
ugagggaagagcccacaug

SEQ ID NO: 2783225 - RNA, 19 nt, Artificial Sequence
  Description of Artificial Sequence: Synthetic oligonucleotide
uaugaucaugccaggggcu

SEQ ID NO: 2783226 - RNA, 19 nt, Artificial Sequence
  Description of Artificial Sequence: Synthetic oligonucleotide
ugccauagugauccgagaa

SEQ ID NO: 2783227 - RNA, 19 nt, Artificial Sequence
  Description of Artificial Sequence: Synthetic oligonucleotide
uagugauccgagaaauaac

SEQ ID NO: 2783228 - RNA, 19 nt, Artificial Sequence
  Description of Artificial Sequence: Synthetic oligonucleotide
gcacggagcacuuagagac

SEQ ID NO: 2783229 - RNA, 19 nt, Artificial Sequence
  Description of Artificial Sequence: Synthetic oligonucleotide
uuucagaccuuguugcaaa

SEQ ID NO: 2783230 - RNA, 19 nt, Artificial Sequence
  Description of Artificial Sequence: Synthetic oligonucleotide
auguaugaguuugagguca

SEQ ID NO: 2783231 - RNA, 19 nt, Artificial Sequence
  Description of Artificial Sequence: Synthetic oligonucleotide
uaugaguuugaggucaguc

SEQ ID NO: 2783232 - RNA, 19 nt, Artificial Sequence
  Description of Artificial Sequence: Synthetic oligonucleotide
uccagccuggcuuucagac

SEQ ID NO: 2783233 - RNA, 19 nt, Artificial Sequence
  Description of Artificial Sequence: Synthetic oligonucleotide
acuuagagacccuuauuaa

SEQ ID NO: 2783234 - RNA, 19 nt, Artificial Sequence
  Description of Artificial Sequence: Synthetic oligonucleotide
uaaggcaaagaggacgucu

SEQ ID NO: 2783235 - RNA, 19 nt, Artificial Sequence
  Description of Artificial Sequence: Synthetic oligonucleotide
gaggacgucuucuccauac

SEQ ID NO: 2783236 - RNA, 19 nt, Artificial Sequence
  Description of Artificial Sequence: Synthetic oligonucleotide
cagcucugguucuaaauag

SEQ ID NO: 2783237 - RNA, 19 nt, Artificial Sequence
  Description of Artificial Sequence: Synthetic oligonucleotide
caaagaggacgucuucucc

SEQ ID NO: 2783238 - RNA, 19 nt, Artificial Sequence
  Description of Artificial Sequence: Synthetic oligonucleotide
acugguaauuugcauuccu

SEQ ID NO: 2783239 - RNA, 19 nt, Artificial Sequence
  Description of Artificial Sequence: Synthetic oligonucleotide
uagagacccuuauuaaagu

SEQ ID NO: 2783240 - RNA, 19 nt, Artificial Sequence
  Description of Artificial Sequence: Synthetic oligonucleotide
  modified_base (7)..(7): a, c, u, g, unknown or other
cacacanaaggaccugcag

SEQ ID NO: 2783241 - RNA, 19 nt, Artificial Sequence
  Description of Artificial Sequence: Synthetic oligonucleotide
ccgagaaauaaccacuugg

SEQ ID NO: 2783242 - RNA, 19 nt, Artificial Sequence
  Description of Artificial Sequence: Synthetic oligonucleotide
cugguaauuugcauuccug

SEQ ID NO: 2783243 - RNA, 19 nt, Artificial Sequence
  Description of Artificial Sequence: Synthetic oligonucleotide
gaaacugguaauuugcauu

SEQ ID NO: 2783244 - RNA, 19 nt, Artificial Sequence
  Description of Artificial Sequence: Synthetic oligonucleotide
  modified_base (13)..(13): a, c, u, g, unknown or other
agcagccacacanaaggac

SEQ ID NO: 2783245 - RNA, 19 nt, Artificial Sequence
  Description of Artificial Sequence: Synthetic oligonucleotide
uccaugaugacugguaaua

SEQ ID NO: 2783246 - RNA, 19 nt, Artificial Sequence
  Description of Artificial Sequence: Synthetic oligonucleotide
augcauaacugccagcgaa

SEQ ID NO: 2783247 - RNA, 19 nt, Artificial Sequence
  Description of Artificial Sequence: Synthetic oligonucleotide
ugcaaagaggaauguggac

SEQ ID NO: 2783248 - RNA, 19 nt, Artificial Sequence
  Description of Artificial Sequence: Synthetic oligonucleotide
cgagaaauaaccacuuggg

SEQ ID NO: 2783249 - RNA, 19 nt, Artificial Sequence
  Description of Artificial Sequence: Synthetic oligonucleotide
acggagcacuuagagaccc

SEQ ID NO: 2783250 - RNA, 19 nt, Artificial Sequence
  Description of Artificial Sequence: Synthetic oligonucleotide
cuuuacggggaauggauca

SEQ ID NO: 2783251 - RNA, 19 nt, Artificial Sequence
  Description of Artificial Sequence: Synthetic oligonucleotide
ucuuuacggggaauggauc

SEQ ID NO: 2783252 - RNA, 19 nt, Artificial Sequence
  Description of Artificial Sequence: Synthetic oligonucleotide
auuugcauuccugagggaa

SEQ ID NO: 2783253 - RNA, 19 nt, Artificial Sequence
  Description of Artificial Sequence: Synthetic oligonucleotide
ucagacgcagucucuccag

SEQ ID NO: 2783254 - RNA, 19 nt, Artificial Sequence
  Description of Artificial Sequence: Synthetic oligonucleotide
cuuagagacccuuauuaaa

SEQ ID NO: 2783255 - RNA, 19 nt, Artificial Sequence
  Description of Artificial Sequence: Synthetic oligonucleotide
ggcuuucagaccuuguugc

SEQ ID NO: 2783256 - RNA, 19 nt, Artificial Sequence
  Description of Artificial Sequence: Synthetic oligonucleotide
ugcauaacugccagcgaaa

SEQ ID NO: 2783257 - RNA, 19 nt, Artificial Sequence
  Description of Artificial Sequence: Synthetic oligonucleotide
uccgagaaauaaccacuug

SEQ ID NO: 2783258 - RNA, 19 nt, Artificial Sequence
  Description of Artificial Sequence: Synthetic oligonucleotide
aguaaggcaaagaggacgu

SEQ ID NO: 2783259 - RNA, 19 nt, Artificial Sequence
  Description of Artificial Sequence: Synthetic oligonucleotide
gguucuaaauaggaaacug

SEQ ID NO: 2783260 - RNA, 19 nt, Artificial Sequence
  Description of Artificial Sequence: Synthetic oligonucleotide
ccuuauuaaaguaaggcaa

SEQ ID NO: 2783261 - RNA, 19 nt, Artificial Sequence
  Description of Artificial Sequence: Synthetic oligonucleotide
uaugcauaacugccagcga

SEQ ID NO: 2783262 - RNA, 19 nt, Artificial Sequence
  Description of Artificial Sequence: Synthetic oligonucleotide
uacuuggccuugauggugu

SEQ ID NO: 2783263 - RNA, 19 nt, Artificial Sequence
  Description of Artificial Sequence: Synthetic oligonucleotide
gacacagguaugcauaacu

SEQ ID NO: 2783264 - RNA, 19 nt, Artificial Sequence
  Description of Artificial Sequence: Synthetic oligonucleotide
cuucaucagacgcagucuc

SEQ ID NO: 2783265 - RNA, 19 nt, Artificial Sequence
  Description of Artificial Sequence: Synthetic oligonucleotide
gacgucuucuccauacuug

SEQ ID NO: 2783266 - RNA, 19 nt, Artificial Sequence
  Description of Artificial Sequence: Synthetic oligonucleotide
gacccuuauuaaaguaagg

SEQ ID NO: 2783267 - RNA, 19 nt, Artificial Sequence
  Description of Artificial Sequence: Synthetic oligonucleotide
ugaugacugguaauaugau

SEQ ID NO: 2783268 - RNA, 19 nt, Artificial Sequence
  Description of Artificial Sequence: Synthetic oligonucleotide
ucaauccuugcaggcacgg

SEQ ID NO: 2783269 - RNA, 19 nt, Artificial Sequence
  Description of Artificial Sequence: Synthetic oligonucleotide
caugaagaggaggaagcag

SEQ ID NO: 2783270 - RNA, 19 nt, Artificial Sequence
  Description of Artificial Sequence: Synthetic oligonucleotide
uggucuuuacggggaaugg

SEQ ID NO: 2783271 - RNA, 19 nt, Artificial Sequence
  Description of Artificial Sequence: Synthetic oligonucleotide
  modified_base (4)..(4): a, c, u, g, unknown or other
acanaaggaccugcagagg

SEQ ID NO: 2783272 - RNA, 19 nt, Artificial Sequence
  Description of Artificial Sequence: Synthetic oligonucleotide
aagaggacgucuucuccau

SEQ ID NO: 2783273 - RNA, 19 nt, Artificial Sequence
  Description of Artificial Sequence: Synthetic oligonucleotide
aggcacggagcacuuagag

SEQ ID NO: 2783274 - RNA, 19 nt, Artificial Sequence
  Description of Artificial Sequence: Synthetic oligonucleotide
agcacuuagagacccuuau

SEQ ID NO: 2783275 - RNA, 19 nt, Artificial Sequence
  Description of Artificial Sequence: Synthetic oligonucleotide
uguggacacagguaugcau

SEQ ID NO: 2783276 - RNA, 19 nt, Artificial Sequence
  Description of Artificial Sequence: Synthetic oligonucleotide
  modified_base (19)..(19): a, c, u, g, unknown or other
ggaggaagcagccacacan

SEQ ID NO: 2783277 - RNA, 19 nt, Artificial Sequence
  Description of Artificial Sequence: Synthetic oligonucleotide
ugccacuggcaccaugaag

SEQ ID NO: 2783278 - RNA, 19 nt, Artificial Sequence
  Description of Artificial Sequence: Synthetic oligonucleotide
ugcagaggggcaugcagca

SEQ ID NO: 2783279 - RNA, 19 nt, Artificial Sequence
  Description of Artificial Sequence: Synthetic oligonucleotide
ucuucaucagacgcagucu

SEQ ID NO: 2783280 - RNA, 19 nt, Artificial Sequence
  Description of Artificial Sequence: Synthetic oligonucleotide
auuccugagggaagagccc

SEQ ID NO: 2783281 - RNA, 19 nt, Artificial Sequence
  Description of Artificial Sequence: Synthetic oligonucleotide
uacacccuuaauccagcac

SEQ ID NO: 2783282 - RNA, 19 nt, Artificial Sequence
  Description of Artificial Sequence: Synthetic oligonucleotide
cacuuagagacccuuauua

SEQ ID NO: 2783283 - RNA, 19 nt, Artificial Sequence
  Description of Artificial Sequence: Synthetic oligonucleotide
ugggugaugcccacagcug

SEQ ID NO: 2783284 - RNA, 19 nt, Artificial Sequence
  Description of Artificial Sequence: Synthetic oligonucleotide
uucagaccuuguugcaaag

SEQ ID NO: 2783285 - RNA, 19 nt, Artificial Sequence
  Description of Artificial Sequence: Synthetic oligonucleotide
aauuugcauuccugaggga

SEQ ID NO: 2783286 - RNA, 19 nt, Artificial Sequence
  Description of Artificial Sequence: Synthetic oligonucleotide
guguacacccuuaauccag

SEQ ID NO: 2783287 - RNA, 19 nt, Artificial Sequence
  Description of Artificial Sequence: Synthetic oligonucleotide
cugcagaggggcaugcagc

SEQ ID NO: 2783288 - RNA, 19 nt, Artificial Sequence
  Description of Artificial Sequence: Synthetic oligonucleotide
agaccuuguugcaaagagg

SEQ ID NO: 2783289 - RNA, 19 nt, Artificial Sequence
  Description of Artificial Sequence: Synthetic oligonucleotide
aaacuggucuuuacgggga

SEQ ID NO: 2783290 - RNA, 19 nt, Artificial Sequence
  Description of Artificial Sequence: Synthetic oligonucleotide
gaugguguccugcagcucu

SEQ ID NO: 2783291 - RNA, 19 nt, Artificial Sequence
  Description of Artificial Sequence: Synthetic oligonucleotide
ccuuaauccagcacucagg

SEQ ID NO: 2783292 - RNA, 19 nt, Artificial Sequence
  Description of Artificial Sequence: Synthetic oligonucleotide
uucaucagacgcagucucu

SEQ ID NO: 2783293 - RNA, 19 nt, Artificial Sequence
  Description of Artificial Sequence: Synthetic oligonucleotide
ugguucuaaauaggaaacu

SEQ ID NO: 2783294 - RNA, 19 nt, Artificial Sequence
  Description of Artificial Sequence: Synthetic oligonucleotide
gagaaauaaccacuugggu

SEQ ID NO: 2783295 - RNA, 19 nt, Artificial Sequence
  Description of Artificial Sequence: Synthetic oligonucleotide
ugcuccaugaugacuggua

SEQ ID NO: 2783296 - RNA, 19 nt, Artificial Sequence
  Description of Artificial Sequence: Synthetic oligonucleotide
ugguuauguaugaguuuga

SEQ ID NO: 2783297 - RNA, 19 nt, Artificial Sequence
  Description of Artificial Sequence: Synthetic oligonucleotide
auccuugcaggcacggagc

SEQ ID NO: 2783298 - RNA, 19 nt, Artificial Sequence
  Description of Artificial Sequence: Synthetic oligonucleotide
cauccucccucuauuuccc

SEQ ID NO: 2783299 - RNA, 19 nt, Artificial Sequence
  Description of Artificial Sequence: Synthetic oligonucleotide
acagagaguuccaggacag

SEQ ID NO: 2783300 - RNA, 19 nt, Artificial Sequence
  Description of Artificial Sequence: Synthetic oligonucleotide
agagacccuuauuaaagua

SEQ ID NO: 2783301 - RNA, 19 nt, Artificial Sequence
  Description of Artificial Sequence: Synthetic oligonucleotide
gagacccuuauuaaaguaa

SEQ ID NO: 2783302 - RNA, 19 nt, Artificial Sequence
  Description of Artificial Sequence: Synthetic oligonucleotide
agcucugguucuaaauagg

SEQ ID NO: 2783303 - RNA, 19 nt, Artificial Sequence
  Description of Artificial Sequence: Synthetic oligonucleotide
acacagguaugcauaacug

SEQ ID NO: 2783304 - RNA, 19 nt, Artificial Sequence
  Description of Artificial Sequence: Synthetic oligonucleotide
uccucccucuauuucccag

SEQ ID NO: 2783305 - RNA, 19 nt, Artificial Sequence
  Description of Artificial Sequence: Synthetic oligonucleotide
aucagacgcagucucucca

SEQ ID NO: 2783306 - RNA, 19 nt, Artificial Sequence
  Description of Artificial Sequence: Synthetic oligonucleotide
gaggaauguggacacaggu

SEQ ID NO: 2783307 - RNA, 19 nt, Artificial Sequence
  Description of Artificial Sequence: Synthetic oligonucleotide
ugcagcucugguucuaaau

SEQ ID NO: 2783308 - RNA, 19 nt, Artificial Sequence
  Description of Artificial Sequence: Synthetic oligonucleotide
gauccgagaaauaaccacu

SEQ ID NO: 2783309 - RNA, 19 nt, Artificial Sequence
  Description of Artificial Sequence: Synthetic oligonucleotide
acuuucuucaucagacgca

SEQ ID NO: 2783310 - RNA, 19 nt, Artificial Sequence
  Description of Artificial Sequence: Synthetic oligonucleotide
agagcccacaugccacugg

SEQ ID NO: 2783311 - RNA, 19 nt, Artificial Sequence
  Description of Artificial Sequence: Synthetic oligonucleotide
caucagacgcagucucucc

SEQ ID NO: 2783312 - RNA, 19 nt, Artificial Sequence
  Description of Artificial Sequence: Synthetic oligonucleotide
ugacugguaauaugaucau

SEQ ID NO: 2783313 - RNA, 19 nt, Artificial Sequence
  Description of Artificial Sequence: Synthetic oligonucleotide
gguuauguaugaguuugag

SEQ ID NO: 2783314 - RNA, 19 nt, Artificial Sequence
  Description of Artificial Sequence: Synthetic oligonucleotide
gacugguaauaugaucaug

SEQ ID NO: 2783315 - RNA, 19 nt, Artificial Sequence
  Description of Artificial Sequence: Synthetic oligonucleotide
gcaaagaggaauguggaca

SEQ ID NO: 2783316 - RNA, 19 nt, Artificial Sequence
  Description of Artificial Sequence: Synthetic oligonucleotide
auacuuggccuugauggug

SEQ ID NO: 2783317 - RNA, 19 nt, Artificial Sequence
  Description of Artificial Sequence: Synthetic oligonucleotide
uuccugagggaagagccca

SEQ ID NO: 2783318 - RNA, 19 nt, Artificial Sequence
  Description of Artificial Sequence: Synthetic oligonucleotide
aggcaaagaggacgucuuc

SEQ ID NO: 2783319 - RNA, 19 nt, Artificial Sequence
  Description of Artificial Sequence: Synthetic oligonucleotide
  modified_base (17)..(17): a, c, u, g, unknown or other
aggaagcagccacacanaa

SEQ ID NO: 2783320 - RNA, 19 nt, Artificial Sequence
  Description of Artificial Sequence: Synthetic oligonucleotide
caccaugaagaggaggaag

SEQ ID NO: 2783321 - RNA, 19 nt, Artificial Sequence
  Description of Artificial Sequence: Synthetic oligonucleotide
agccagggcauccucccuc

SEQ ID NO: 2783322 - RNA, 19 nt, Artificial Sequence
  Description of Artificial Sequence: Synthetic oligonucleotide
uccuugcaggcacggagca

SEQ ID NO: 2783323 - RNA, 19 nt, Artificial Sequence
  Description of Artificial Sequence: Synthetic oligonucleotide
uacggggaauggaucaauc

SEQ ID NO: 2783324 - RNA, 19 nt, Artificial Sequence
  Description of Artificial Sequence: Synthetic oligonucleotide
  modified_base (12)..(12): a, c, u, g, unknown or other
gcagccacacanaaggacc

SEQ ID NO: 2783325 - RNA, 19 nt, Artificial Sequence
  Description of Artificial Sequence: Synthetic oligonucleotide
agaggaauguggacacagg

SEQ ID NO: 2783326 - RNA, 19 nt, Artificial Sequence
  Description of Artificial Sequence: Synthetic oligonucleotide
uuaauccagcacucaggaa

SEQ ID NO: 2783327 - RNA, 19 nt, Artificial Sequence
  Description of Artificial Sequence: Synthetic oligonucleotide
uugcauuccugagggaaga

SEQ ID NO: 2783328 - RNA, 19 nt, Artificial Sequence
  Description of Artificial Sequence: Synthetic oligonucleotide
gaauguggacacagguaug

SEQ ID NO: 2783329 - RNA, 19 nt, Artificial Sequence
  Description of Artificial Sequence: Synthetic oligonucleotide
  modified_base (14)..(14): a, c, u, g, unknown or other
aagcagccacacanaagga

SEQ ID NO: 2783330 - RNA, 19 nt, Artificial Sequence
  Description of Artificial Sequence: Synthetic oligonucleotide
ucagaccuuguugcaaaga

SEQ ID NO: 2783331 - RNA, 19 nt, Artificial Sequence
  Description of Artificial Sequence: Synthetic oligonucleotide
ggaauguggacacagguau

SEQ ID NO: 2783332 - RNA, 19 nt, Artificial Sequence
  Description of Artificial Sequence: Synthetic oligonucleotide
cuggucuuuacggggaaug

SEQ ID NO: 2783333 - RNA, 19 nt, Artificial Sequence
  Description of Artificial Sequence: Synthetic oligonucleotide
augaucaugccaggggcug

SEQ ID NO: 2783334 - RNA, 19 nt, Artificial Sequence
  Description of Artificial Sequence: Synthetic oligonucleotide
uucuccauacuuggccuug

SEQ ID NO: 2783335 - RNA, 19 nt, Artificial Sequence
  Description of Artificial Sequence: Synthetic oligonucleotide
agggaagagcccacaugcc

SEQ ID NO: 2783336 - RNA, 19 nt, Artificial Sequence
  Description of Artificial Sequence: Synthetic oligonucleotide
uggcaccaugaagaggagg

SEQ ID NO: 2783337 - RNA, 19 nt, Artificial Sequence
  Description of Artificial Sequence: Synthetic oligonucleotide
aaggcaaagaggacgucuu

SEQ ID NO: 2783338 - RNA, 19 nt, Artificial Sequence
  Description of Artificial Sequence: Synthetic oligonucleotide
aggggcaugcagcacucug

SEQ ID NO: 2783339 - RNA, 19 nt, Artificial Sequence
  Description of Artificial Sequence: Synthetic oligonucleotide
cacucugacuuucuucauc

SEQ ID NO: 2783340 - RNA, 19 nt, Artificial Sequence
  Description of Artificial Sequence: Synthetic oligonucleotide
  modified_base (16)..(16): a, c, u, g, unknown or other
ggaagcagccacacanaag

SEQ ID NO: 2783341 - RNA, 19 nt, Artificial Sequence
  Description of Artificial Sequence: Synthetic oligonucleotide
gccacuggcaccaugaaga

SEQ ID NO: 2783342 - RNA, 19 nt, Artificial Sequence
  Description of Artificial Sequence: Synthetic oligonucleotide
uuuacggggaauggaucaa

SEQ ID NO: 2783343 - RNA, 19 nt, Artificial Sequence
  Description of Artificial Sequence: Synthetic oligonucleotide
aaagaggaauguggacaca

SEQ ID NO: 2783344 - RNA, 19 nt, Artificial Sequence
  Description of Artificial Sequence: Synthetic oligonucleotide
cccuuauuaaaguaaggca

SEQ ID NO: 2783345 - RNA, 19 nt, Artificial Sequence
  Description of Artificial Sequence: Synthetic oligonucleotide
ugaugcccacagcugcagc

SEQ ID NO: 2783346 - RNA, 19 nt, Artificial Sequence
  Description of Artificial Sequence: Synthetic oligonucleotide
aacuggucuuuacggggaa

SEQ ID NO: 2783347 - RNA, 19 nt, Artificial Sequence
  Description of Artificial Sequence: Synthetic oligonucleotide
aggaaacugguaauuugca

SEQ ID NO: 2783348 - RNA, 19 nt, Artificial Sequence
  Description of Artificial Sequence: Synthetic oligonucleotide
agcacaggcaggugguuau

SEQ ID NO: 2783349 - RNA, 19 nt, Artificial Sequence
  Description of Artificial Sequence: Synthetic oligonucleotide
agacgcagucucuccagcu

SEQ ID NO: 2783350 - RNA, 19 nt, Artificial Sequence
  Description of Artificial Sequence: Synthetic oligonucleotide
cagguaugcauaacugcca

SEQ ID NO: 2783351 - RNA, 19 nt, Artificial Sequence
  Description of Artificial Sequence: Synthetic oligonucleotide
cacccuuaauccagcacuc

SEQ ID NO: 2783352 - RNA, 19 nt, Artificial Sequence
  Description of Artificial Sequence: Synthetic oligonucleotide
ugcagcacucugacuuucu

SEQ ID NO: 2783353 - RNA, 19 nt, Artificial Sequence
  Description of Artificial Sequence: Synthetic oligonucleotide
gaucaugccaggggcugcc

SEQ ID NO: 2783354 - RNA, 19 nt, Artificial Sequence
  Description of Artificial Sequence: Synthetic oligonucleotide
aggugguuauguaugaguu

SEQ ID NO: 2783355 - RNA, 19 nt, Artificial Sequence
  Description of Artificial Sequence: Synthetic oligonucleotide
aggcaggugguuauguaug

SEQ ID NO: 2783356 - RNA, 19 nt, Artificial Sequence
  Description of Artificial Sequence: Synthetic oligonucleotide
uuguugcaaagaggaaugu

SEQ ID NO: 2783357 - RNA, 19 nt, Artificial Sequence
  Description of Artificial Sequence: Synthetic oligonucleotide
gcaggcacggagcacuuag

SEQ ID NO: 2783358 - RNA, 19 nt, Artificial Sequence
  Description of Artificial Sequence: Synthetic oligonucleotide
cacggagcacuuagagacc

SEQ ID NO: 2783359 - RNA, 19 nt, Artificial Sequence
  Description of Artificial Sequence: Synthetic oligonucleotide
aaauaaccacuugggugau

SEQ ID NO: 2783360 - RNA, 19 nt, Artificial Sequence
  Description of Artificial Sequence: Synthetic oligonucleotide
ggcaccaugaagaggagga

SEQ ID NO: 2783361 - RNA, 19 nt, Artificial Sequence
  Description of Artificial Sequence: Synthetic oligonucleotide
ggaauggaucaauccuugc

SEQ ID NO: 2783362 - RNA, 19 nt, Artificial Sequence
  Description of Artificial Sequence: Synthetic oligonucleotide
accacuugggugaugccca

SEQ ID NO: 2783363 - RNA, 19 nt, Artificial Sequence
  Description of Artificial Sequence: Synthetic oligonucleotide
aucaauccuugcaggcacg

SEQ ID NO: 2783364 - RNA, 19 nt, Artificial Sequence
  Description of Artificial Sequence: Synthetic oligonucleotide
cucugguucuaaauaggaa

SEQ ID NO: 2783365 - RNA, 19 nt, Artificial Sequence
  Description of Artificial Sequence: Synthetic oligonucleotide
uaaccacuugggugaugcc

SEQ ID NO: 2783366 - RNA, 19 nt, Artificial Sequence
  Description of Artificial Sequence: Synthetic oligonucleotide
gaggaggaagcagccacac

SEQ ID NO: 2783367 - RNA, 19 nt, Artificial Sequence
  Description of Artificial Sequence: Synthetic oligonucleotide
ugcauuccugagggaagag

SEQ ID NO: 2783368 - RNA, 19 nt, Artificial Sequence
  Description of Artificial Sequence: Synthetic oligonucleotide
gcugccauagugauccgag

SEQ ID NO: 2783369 - RNA, 19 nt, Artificial Sequence
  Description of Artificial Sequence: Synthetic oligonucleotide
gguguacacccuuaaucca

SEQ ID NO: 2783370 - RNA, 19 nt, Artificial Sequence
  Description of Artificial Sequence: Synthetic oligonucleotide
augccaggggcugccauag

SEQ ID NO: 2783371 - RNA, 19 nt, Artificial Sequence
  Description of Artificial Sequence: Synthetic oligonucleotide
aagagcccacaugccacug

SEQ ID NO: 2783372 - RNA, 19 nt, Artificial Sequence
  Description of Artificial Sequence: Synthetic oligonucleotide
aggacgucuucuccauacu

SEQ ID NO: 2783373 - RNA, 19 nt, Artificial Sequence
  Description of Artificial Sequence: Synthetic oligonucleotide
uucccaguccagccuggcu

SEQ ID NO: 2783374 - RNA, 19 nt, Artificial Sequence
  Description of Artificial Sequence: Synthetic oligonucleotide
gaagaggaggaagcagcca

SEQ ID NO: 2783375 - RNA, 19 nt, Artificial Sequence
  Description of Artificial Sequence: Synthetic oligonucleotide
ugcccacagcugcagcucu

SEQ ID NO: 2783376 - RNA, 19 nt, Artificial Sequence
  Description of Artificial Sequence: Synthetic oligonucleotide
gcaaagaggacgucuucuc

SEQ ID NO: 2783377 - RNA, 19 nt, Artificial Sequence
  Description of Artificial Sequence: Synthetic oligonucleotide
cagacgcagucucuccagc

SEQ ID NO: 2783378 - RNA, 19 nt, Artificial Sequence
  Description of Artificial Sequence: Synthetic oligonucleotide
gggaauggaucaauccuug

SEQ ID NO: 2783379 - RNA, 19 nt, Artificial Sequence
  Description of Artificial Sequence: Synthetic oligonucleotide
gggaagagcccacaugcca

SEQ ID NO: 2783380 - RNA, 19 nt, Artificial Sequence
  Description of Artificial Sequence: Synthetic oligonucleotide
gugauccgagaaauaacca

SEQ ID NO: 2783381 - RNA, 19 nt, Artificial Sequence
  Description of Artificial Sequence: Synthetic oligonucleotide
augcccacagcugcagcuc

SEQ ID NO: 2783382 - RNA, 19 nt, Artificial Sequence
  Description of Artificial Sequence: Synthetic oligonucleotide
aggaauguggacacaggua

SEQ ID NO: 2783383 - RNA, 19 nt, Artificial Sequence
  Description of Artificial Sequence: Synthetic oligonucleotide
augcagcacucugacuuuc

SEQ ID NO: 2783384 - RNA, 19 nt, Artificial Sequence
  Description of Artificial Sequence: Synthetic oligonucleotide
cccuuaauccagcacucag

SEQ ID NO: 2783385 - RNA, 19 nt, Artificial Sequence
  Description of Artificial Sequence: Synthetic oligonucleotide
ggaagagcccacaugccac

SEQ ID NO: 2783386 - RNA, 19 nt, Artificial Sequence
  Description of Artificial Sequence: Synthetic oligonucleotide
uccugagggaagagcccac

SEQ ID NO: 2783387 - RNA, 19 nt, Artificial Sequence
  Description of Artificial Sequence: Synthetic oligonucleotide
agggcauccucccucuauu

SEQ ID NO: 2783388 - RNA, 19 nt, Artificial Sequence
  Description of Artificial Sequence: Synthetic oligonucleotide
uuacggggaauggaucaau

SEQ ID NO: 2783389 - RNA, 19 nt, Artificial Sequence
  Description of Artificial Sequence: Synthetic oligonucleotide
auuucccaguccagccugg

SEQ ID NO: 2783390 - RNA, 19 nt, Artificial Sequence
  Description of Artificial Sequence: Synthetic oligonucleotide
guggacacagguaugcaua

SEQ ID NO: 2783391 - RNA, 19 nt, Artificial Sequence
  Description of Artificial Sequence: Synthetic oligonucleotide
aagcacaggcaggugguua

SEQ ID NO: 2783392 - RNA, 19 nt, Artificial Sequence
  Description of Artificial Sequence: Synthetic oligonucleotide
cauagugauccgagaaaua

SEQ ID NO: 2783393 - RNA, 19 nt, Artificial Sequence
  Description of Artificial Sequence: Synthetic oligonucleotide
caggugguuauguaugagu

SEQ ID NO: 2783394 - RNA, 19 nt, Artificial Sequence
  Description of Artificial Sequence: Synthetic oligonucleotide
ucaugccaggggcugccau

SEQ ID NO: 2783395 - RNA, 19 nt, Artificial Sequence
  Description of Artificial Sequence: Synthetic oligonucleotide
cuuucagaccuuguugcaa

SEQ ID NO: 2783396 - RNA, 19 nt, Artificial Sequence
  Description of Artificial Sequence: Synthetic oligonucleotide
gcaugcagcacucugacuu

SEQ ID NO: 2783397 - RNA, 19 nt, Artificial Sequence
  Description of Artificial Sequence: Synthetic oligonucleotide
acaugccacuggcaccaug

SEQ ID NO: 2783398 - RNA, 19 nt, Artificial Sequence
  Description of Artificial Sequence: Synthetic oligonucleotide
cacuggcaccaugaagagg

SEQ ID NO: 2783399 - RNA, 19 nt, Artificial Sequence
  Description of Artificial Sequence: Synthetic oligonucleotide
uuucccaguccagccuggc

SEQ ID NO: 2783400 - RNA, 19 nt, Artificial Sequence
  Description of Artificial Sequence: Synthetic oligonucleotide
aggaggaagcagccacaca

SEQ ID NO: 2783401 - RNA, 19 nt, Artificial Sequence
  Description of Artificial Sequence: Synthetic oligonucleotide
acaggcaggugguuaugua

SEQ ID NO: 2783402 - RNA, 19 nt, Artificial Sequence
  Description of Artificial Sequence: Synthetic oligonucleotide
ugguguccugcagcucugg

SEQ ID NO: 2783403 - RNA, 19 nt, Artificial Sequence
  Description of Artificial Sequence: Synthetic oligonucleotide
gaagagcccacaugccacu

SEQ ID NO: 2783404 - RNA, 19 nt, Artificial Sequence
  Description of Artificial Sequence: Synthetic oligonucleotide
gcagcucugguucuaaaua

SEQ ID NO: 2783405 - RNA, 19 nt, Artificial Sequence
  Description of Artificial Sequence: Synthetic oligonucleotide
ggaucaauccuugcaggca

SEQ ID NO: 2783406 - RNA, 19 nt, Artificial Sequence
  Description of Artificial Sequence: Synthetic oligonucleotide
cauacuuggccuugauggu

SEQ ID NO: 2783407 - RNA, 19 nt, Artificial Sequence
  Description of Artificial Sequence: Synthetic oligonucleotide
auccgagaaauaaccacuu

SEQ ID NO: 2783408 - RNA, 19 nt, Artificial Sequence
  Description of Artificial Sequence: Synthetic oligonucleotide
gugaugcccacagcugcag

SEQ ID NO: 2783409 - RNA, 19 nt, Artificial Sequence
  Description of Artificial Sequence: Synthetic oligonucleotide
  modified_base (18)..(18): a, c, u, g, unknown or other
gaggaagcagccacacana

SEQ ID NO: 2783410 - RNA, 19 nt, Artificial Sequence
  Description of Artificial Sequence: Synthetic oligonucleotide
guacacccuuaauccagca

SEQ ID NO: 2783411 - RNA, 19 nt, Artificial Sequence
  Description of Artificial Sequence: Synthetic oligonucleotide
gcccacaugccacuggcac

SEQ ID NO: 2783412 - RNA, 19 nt, Artificial Sequence
  Description of Artificial Sequence: Synthetic oligonucleotide
agaggaggaagcagccaca

SEQ ID NO: 2783413 - RNA, 19 nt, Artificial Sequence
  Description of Artificial Sequence: Synthetic oligonucleotide
gccaggggcugccauagug

SEQ ID NO: 2783414 - RNA, 19 nt, Artificial Sequence
  Description of Artificial Sequence: Synthetic oligonucleotide
gucuggucuacagagaguu

SEQ ID NO: 2783415 - RNA, 19 nt, Artificial Sequence
  Description of Artificial Sequence: Synthetic oligonucleotide
cuugcaggcacggagcacu

SEQ ID NO: 2783416 - RNA, 19 nt, Artificial Sequence
  Description of Artificial Sequence: Synthetic oligonucleotide
gcugcuccaugaugacugg

SEQ ID NO: 2783417 - RNA, 19 nt, Artificial Sequence
  Description of Artificial Sequence: Synthetic oligonucleotide
cagccuggcuuucagaccu

SEQ ID NO: 2783418 - RNA, 19 nt, Artificial Sequence
  Description of Artificial Sequence: Synthetic oligonucleotide
  modified_base (9)..(9): a, c, u, g, unknown or other
gccacacanaaggaccugc

SEQ ID NO: 2783419 - RNA, 19 nt, Artificial Sequence
  Description of Artificial Sequence: Synthetic oligonucleotide
cuggcaccaugaagaggag

SEQ ID NO: 2783420 - RNA, 19 nt, Artificial Sequence
  Description of Artificial Sequence: Synthetic oligonucleotide
auguggacacagguaugca

SEQ ID NO: 2783421 - RNA, 19 nt, Artificial Sequence
  Description of Artificial Sequence: Synthetic oligonucleotide
gggcaugcagcacucugac

SEQ ID NO: 2783422 - RNA, 19 nt, Artificial Sequence
  Description of Artificial Sequence: Synthetic oligonucleotide
ggcacggagcacuuagaga

SEQ ID NO: 2783423 - RNA, 19 nt, Artificial Sequence
  Description of Artificial Sequence: Synthetic oligonucleotide
gucuuuacggggaauggau

SEQ ID NO: 2783424 - RNA, 19 nt, Artificial Sequence
  Description of Artificial Sequence: Synthetic oligonucleotide
cuauuucccaguccagccu

SEQ ID NO: 2783425 - RNA, 19 nt, Artificial Sequence
  Description of Artificial Sequence: Synthetic oligonucleotide
gcucugguucuaaauagga

SEQ ID NO: 2783426 - RNA, 19 nt, Artificial Sequence
  Description of Artificial Sequence: Synthetic oligonucleotide
gcauuccugagggaagagc

SEQ ID NO: 2783427 - RNA, 19 nt, Artificial Sequence
  Description of Artificial Sequence: Synthetic oligonucleotide
gccauagugauccgagaaa

SEQ ID NO: 2783428 - RNA, 19 nt, Artificial Sequence
  Description of Artificial Sequence: Synthetic oligonucleotide
ggcaggugguuauguauga

SEQ ID NO: 2783429 - RNA, 19 nt, Artificial Sequence
  Description of Artificial Sequence: Synthetic oligonucleotide
aaggaccugcagaggggca

SEQ ID NO: 2783430 - RNA, 19 nt, Artificial Sequence
  Description of Artificial Sequence: Synthetic oligonucleotide
agucuggucuacagagagu

SEQ ID NO: 2783431 - RNA, 19 nt, Artificial Sequence
  Description of Artificial Sequence: Synthetic oligonucleotide
ggaaacugguaauuugcau

SEQ ID NO: 2783432 - RNA, 19 nt, Artificial Sequence
  Description of Artificial Sequence: Synthetic oligonucleotide
gcuuucagaccuuguugca

SEQ ID NO: 2783433 - RNA, 19 nt, Artificial Sequence
  Description of Artificial Sequence: Synthetic oligonucleotide
ggcauccucccucuauuuc

SEQ ID NO: 2783434 - RNA, 19 nt, Artificial Sequence
  Description of Artificial Sequence: Synthetic oligonucleotide
cccacaugccacuggcacc

SEQ ID NO: 2783435 - RNA, 19 nt, Artificial Sequence
  Description of Artificial Sequence: Synthetic oligonucleotide
aggacagccagggcauccu

SEQ ID NO: 2783436 - RNA, 19 nt, Artificial Sequence
  Description of Artificial Sequence: Synthetic oligonucleotide
acccuuaauccagcacuca

SEQ ID NO: 2783437 - RNA, 19 nt, Artificial Sequence
  Description of Artificial Sequence: Synthetic oligonucleotide
uggccuugaugguguccug

SEQ ID NO: 2783438 - RNA, 19 nt, Artificial Sequence
  Description of Artificial Sequence: Synthetic oligonucleotide
gcuccaugaugacugguaa

SEQ ID NO: 2783439 - RNA, 19 nt, Artificial Sequence
  Description of Artificial Sequence: Synthetic oligonucleotide
ggucuuuacggggaaugga

SEQ ID NO: 2783440 - RNA, 19 nt, Artificial Sequence
  Description of Artificial Sequence: Synthetic oligonucleotide
gaccugcagaggggcaugc

SEQ ID NO: 2783441 - RNA, 19 nt, Artificial Sequence
  Description of Artificial Sequence: Synthetic oligonucleotide
aggaccugcagaggggcau

SEQ ID NO: 2783442 - RNA, 19 nt, Artificial Sequence
  Description of Artificial Sequence: Synthetic oligonucleotide
auccucccucuauuuccca

SEQ ID NO: 2783443 - RNA, 19 nt, Artificial Sequence
  Description of Artificial Sequence: Synthetic oligonucleotide
ccucuauuucccaguccag

SEQ ID NO: 2783444 - RNA, 19 nt, Artificial Sequence
  Description of Artificial Sequence: Synthetic oligonucleotide
cugccauagugauccgaga

SEQ ID NO: 2783445 - RNA, 19 nt, Artificial Sequence
  Description of Artificial Sequence: Synthetic oligonucleotide
cagaggggcaugcagcacu

SEQ ID NO: 2783446 - RNA, 19 nt, Artificial Sequence
  Description of Artificial Sequence: Synthetic oligonucleotide
ccacuggcaccaugaagag

SEQ ID NO: 2783447 - RNA, 19 nt, Artificial Sequence
  Description of Artificial Sequence: Synthetic oligonucleotide
augccacuggcaccaugaa

SEQ ID NO: 2783448 - RNA, 19 nt, Artificial Sequence
  Description of Artificial Sequence: Synthetic oligonucleotide
caggcaggugguuauguau

SEQ ID NO: 2783449 - RNA, 19 nt, Artificial Sequence
  Description of Artificial Sequence: Synthetic oligonucleotide
agaggacgucuucuccaua

SEQ ID NO: 2783450 - RNA, 19 nt, Artificial Sequence
  Description of Artificial Sequence: Synthetic oligonucleotide
guaaggcaaagaggacguc

SEQ ID NO: 2783451 - RNA, 19 nt, Artificial Sequence
  Description of Artificial Sequence: Synthetic oligonucleotide
acuggucuuuacggggaau

SEQ ID NO: 2783452 - RNA, 19 nt, Artificial Sequence
  Description of Artificial Sequence: Synthetic oligonucleotide
caugccaggggcugccaua

SEQ ID NO: 2783453 - RNA, 19 nt, Artificial Sequence
  Description of Artificial Sequence: Synthetic oligonucleotide
accuuguugcaaagaggaa

SEQ ID NO: 2783454 - RNA, 19 nt, Artificial Sequence
  Description of Artificial Sequence: Synthetic oligonucleotide
  modified_base (8)..(8): a, c, u, g, unknown or other
ccacacanaaggaccugca

SEQ ID NO: 2783455 - RNA, 19 nt, Artificial Sequence
  Description of Artificial Sequence: Synthetic oligonucleotide
cuggcuuucagaccuuguu

SEQ ID NO: 2783456 - RNA, 19 nt, Artificial Sequence
  Description of Artificial Sequence: Synthetic oligonucleotide
augguguccugcagcucug

SEQ ID NO: 2783457 - RNA, 19 nt, Artificial Sequence
  Description of Artificial Sequence: Synthetic oligonucleotide
gagcacuuagagacccuua

SEQ ID NO: 2783458 - RNA, 19 nt, Artificial Sequence
  Description of Artificial Sequence: Synthetic oligonucleotide
ggcaaagaggacgucuucu

SEQ ID NO: 2783459 - RNA, 19 nt, Artificial Sequence
  Description of Artificial Sequence: Synthetic oligonucleotide
caggcacggagcacuuaga

SEQ ID NO: 2783460 - RNA, 19 nt, Artificial Sequence
  Description of Artificial Sequence: Synthetic oligonucleotide
guccagccuggcuuucaga

SEQ ID NO: 2783461 - RNA, 19 nt, Artificial Sequence
  Description of Artificial Sequence: Synthetic oligonucleotide
caggaagcacaggcaggug

SEQ ID NO: 2783462 - RNA, 19 nt, Artificial Sequence
  Description of Artificial Sequence: Synthetic oligonucleotide
ggugaugcccacagcugca

SEQ ID NO: 2783463 - RNA, 19 nt, Artificial Sequence
  Description of Artificial Sequence: Synthetic oligonucleotide
ggugguuauguaugaguuu

SEQ ID NO: 2783464 - RNA, 19 nt, Artificial Sequence
  Description of Artificial Sequence: Synthetic oligonucleotide
ccaggggcugccauaguga

SEQ ID NO: 2783465 - RNA, 19 nt, Artificial Sequence
  Description of Artificial Sequence: Synthetic oligonucleotide
gcauaacugccagcgaaaa

SEQ ID NO: 2783466 - RNA, 19 nt, Artificial Sequence
  Description of Artificial Sequence: Synthetic oligonucleotide
ggggcaugcagcacucuga

SEQ ID NO: 2783467 - RNA, 19 nt, Artificial Sequence
  Description of Artificial Sequence: Synthetic oligonucleotide
cuccaugaugacugguaau

SEQ ID NO: 2783468 - RNA, 19 nt, Artificial Sequence
  Description of Artificial Sequence: Synthetic oligonucleotide
cgucuucuccauacuuggc

SEQ ID NO: 2783469 - RNA, 19 nt, Artificial Sequence
  Description of Artificial Sequence: Synthetic oligonucleotide
ccuuguugcaaagaggaau

SEQ ID NO: 2783470 - RNA, 19 nt, Artificial Sequence
  Description of Artificial Sequence: Synthetic oligonucleotide
ccacaugccacuggcacca

SEQ ID NO: 2783471 - RNA, 19 nt, Artificial Sequence
  Description of Artificial Sequence: Synthetic oligonucleotide
ugccaggggcugccauagu

SEQ ID NO: 2783472 - RNA, 19 nt, Artificial Sequence
  Description of Artificial Sequence: Synthetic oligonucleotide
guguccugcagcucugguu

SEQ ID NO: 2783473 - RNA, 19 nt, Artificial Sequence
  Description of Artificial Sequence: Synthetic oligonucleotide
ggacacagguaugcauaac

SEQ ID NO: 2783474 - RNA, 19 nt, Artificial Sequence
  Description of Artificial Sequence: Synthetic oligonucleotide
caauccuugcaggcacgga

SEQ ID NO: 2783475 - RNA, 19 nt, Artificial Sequence
  Description of Artificial Sequence: Synthetic oligonucleotide
ggaagcacaggcagguggu

SEQ ID NO: 2783476 - RNA, 19 nt, Artificial Sequence
  Description of Artificial Sequence: Synthetic oligonucleotide
uccugcagcucugguucua

SEQ ID NO: 2783477 - RNA, 19 nt, Artificial Sequence
  Description of Artificial Sequence: Synthetic oligonucleotide
aucaugccaggggcugcca

SEQ ID NO: 2783478 - RNA, 19 nt, Artificial Sequence
  Description of Artificial Sequence: Synthetic oligonucleotide
ccaugaagaggaggaagca

SEQ ID NO: 2783479 - RNA, 19 nt, Artificial Sequence
  Description of Artificial Sequence: Synthetic oligonucleotide
accugcagaggggcaugca

SEQ ID NO: 2783480 - RNA, 19 nt, Artificial Sequence
  Description of Artificial Sequence: Synthetic oligonucleotide
ggggaauggaucaauccuu

SEQ ID NO: 2783481 - RNA, 19 nt, Artificial Sequence
  Description of Artificial Sequence: Synthetic oligonucleotide
caugcagcacucugacuuu

SEQ ID NO: 2783482 - RNA, 19 nt, Artificial Sequence
  Description of Artificial Sequence: Synthetic oligonucleotide
ggaccugcagaggggcaug

SEQ ID NO: 2783483 - RNA, 19 nt, Artificial Sequence
  Description of Artificial Sequence: Synthetic oligonucleotide
ugcaggcacggagcacuua

SEQ ID NO: 2783484 - RNA, 19 nt, Artificial Sequence
  Description of Artificial Sequence: Synthetic oligonucleotide
ccauagugauccgagaaau

SEQ ID NO: 2783485 - RNA, 19 nt, Artificial Sequence
  Description of Artificial Sequence: Synthetic oligonucleotide
caggggcugccauagugau

SEQ ID NO: 2783486 - RNA, 19 nt, Artificial Sequence
  Description of Artificial Sequence: Synthetic oligonucleotide
cuucuccauacuuggccuu

SEQ ID NO: 2783487 - RNA, 19 nt, Artificial Sequence
  Description of Artificial Sequence: Synthetic oligonucleotide
ggacagccagggcauccuc

SEQ ID NO: 2783488 - RNA, 19 nt, Artificial Sequence
  Description of Artificial Sequence: Synthetic oligonucleotide
cugcagcucugguucuaaa

SEQ ID NO: 2783489 - RNA, 19 nt, Artificial Sequence
  Description of Artificial Sequence: Synthetic oligonucleotide
cugagggaagagcccacau

SEQ ID NO: 2783490 - RNA, 19 nt, Artificial Sequence
  Description of Artificial Sequence: Synthetic oligonucleotide
ggacgucuucuccauacuu

SEQ ID NO: 2783491 - RNA, 19 nt, Artificial Sequence
  Description of Artificial Sequence: Synthetic oligonucleotide
cacaggcaggugguuaugu

SEQ ID NO: 2783492 - RNA, 19 nt, Artificial Sequence
  Description of Artificial Sequence: Synthetic oligonucleotide
ggcugccauagugauccga

SEQ ID NO: 2783493 - RNA, 19 nt, Artificial Sequence
  Description of Artificial Sequence: Synthetic oligonucleotide
ccacuugggugaugcccac

SEQ ID NO: 2783494 - RNA, 19 nt, Artificial Sequence
  Description of Artificial Sequence: Synthetic oligonucleotide
cagggcauccucccucuau

SEQ ID NO: 2783495 - RNA, 19 nt, Artificial Sequence
  Description of Artificial Sequence: Synthetic oligonucleotide
cacuugggugaugcccaca

SEQ ID NO: 2783496 - RNA, 19 nt, Artificial Sequence
  Description of Artificial Sequence: Synthetic oligonucleotide
gccuggcuuucagaccuug

SEQ ID NO: 2783497 - RNA, 19 nt, Artificial Sequence
  Description of Artificial Sequence: Synthetic oligonucleotide
caguccagccuggcuuuca

SEQ ID NO: 2783498 - RNA, 19 nt, Artificial Sequence
  Description of Artificial Sequence: Synthetic oligonucleotide
gggcugccauagugauccg

SEQ ID NO: 2783499 - RNA, 19 nt, Artificial Sequence
  Description of Artificial Sequence: Synthetic oligonucleotide
gaagcacaggcaggugguu

SEQ ID NO: 2783500 - RNA, 19 nt, Artificial Sequence
  Description of Artificial Sequence: Synthetic oligonucleotide
gcacaggcaggugguuaug

SEQ ID NO: 2783501 - RNA, 19 nt, Artificial Sequence
  Description of Artificial Sequence: Synthetic oligonucleotide
gcacuuagagacccuuauu

SEQ ID NO: 2783502 - RNA, 19 nt, Artificial Sequence
  Description of Artificial Sequence: Synthetic oligonucleotide
gcaccaugaagaggaggaa

SEQ ID NO: 2783503 - RNA, 19 nt, Artificial Sequence
  Description of Artificial Sequence: Synthetic oligonucleotide
gcagaggggcaugcagcac

SEQ ID NO: 2783504 - RNA, 19 nt, Artificial Sequence
  Description of Artificial Sequence: Synthetic oligonucleotide
gguguccugcagcucuggu

SEQ ID NO: 2783505 - RNA, 19 nt, Artificial Sequence
  Description of Artificial Sequence: Synthetic oligonucleotide
ccacagcugcagcucucug

SEQ ID NO: 2783506 - RNA, 19 nt, Artificial Sequence
  Description of Artificial Sequence: Synthetic oligonucleotide
ggagcacuuagagacccuu

SEQ ID NO: 2783507 - RNA, 19 nt, Artificial Sequence
  Description of Artificial Sequence: Synthetic oligonucleotide
ggcaugcagcacucugacu

SEQ ID NO: 2783508 - RNA, 19 nt, Artificial Sequence
  Description of Artificial Sequence: Synthetic oligonucleotide
ccuugcaggcacggagcac

SEQ ID NO: 2783509 - RNA, 19 nt, Artificial Sequence
  Description of Artificial Sequence: Synthetic oligonucleotide
ccucccucuauuucccagu

SEQ ID NO: 2783510 - RNA, 19 nt, Artificial Sequence
  Description of Artificial Sequence: Synthetic oligonucleotide
ccugagggaagagcccaca

SEQ ID NO: 2783511 - RNA, 19 nt, Artificial Sequence
  Description of Artificial Sequence: Synthetic oligonucleotide
gcagcacucugacuuucuu

SEQ ID NO: 2783512 - RNA, 19 nt, Artificial Sequence
  Description of Artificial Sequence: Synthetic oligonucleotide
gaggggcaugcagcacucu

SEQ ID NO: 2783513 - RNA, 19 nt, Artificial Sequence
  Description of Artificial Sequence: Synthetic oligonucleotide
ccaugaugacugguaauau

SEQ ID NO: 2783514 - RNA, 19 nt, Artificial Sequence
  Description of Artificial Sequence: Synthetic oligonucleotide
cugcuccaugaugacuggu

SEQ ID NO: 2783515 - RNA, 19 nt, Artificial Sequence
  Description of Artificial Sequence: Synthetic oligonucleotide
gggcauccucccucuauuu

SEQ ID NO: 2783516 - RNA, 19 nt, Artificial Sequence
  Description of Artificial Sequence: Synthetic oligonucleotide
ccuggcuuucagaccuugu

SEQ ID NO: 2783517 - RNA, 19 nt, Artificial Sequence
  Description of Artificial Sequence: Synthetic oligonucleotide
cagccagggcauccucccu

SEQ ID NO: 2783518 - RNA, 19 nt, Artificial Sequence
  Description of Artificial Sequence: Synthetic oligonucleotide
agccuggcuuucagaccuu

SEQ ID NO: 2783519 - RNA, 19 nt, Artificial Sequence
  Description of Artificial Sequence: Synthetic oligonucleotide
gcccacagcugcagcucuc

SEQ ID NO: 2783520 - RNA, 19 nt, Artificial Sequence
  Description of Artificial Sequence: Synthetic oligonucleotide
ccaguccagccuggcuuuc

SEQ ID NO: 2783521 - RNA, 19 nt, Artificial Sequence
  Description of Artificial Sequence: Synthetic oligonucleotide
cccaguccagccuggcuuu

SEQ ID NO: 2783522 - RNA, 19 nt, Artificial Sequence
  Description of Artificial Sequence: Synthetic oligonucleotide
cacaugccacuggcaccau

SEQ ID NO: 2783523 - RNA, 19 nt, Artificial Sequence
  Description of Artificial Sequence: Synthetic oligonucleotide
cggagcacuuagagacccu

SEQ ID NO: 2783524 - RNA, 19 nt, Artificial Sequence
  Description of Artificial Sequence: Synthetic oligonucleotide
ccagggcauccucccucua

SEQ ID NO: 2783525 - RNA, 19 nt, Artificial Sequence
  Description of Artificial Sequence: Synthetic oligonucleotide
  modified_base (1)..(1): a, c, u, g, unknown or other
naaggaccugcagaggggc

SEQ ID NO: 2783526 - RNA, 19 nt, Artificial Sequence
  Description of Artificial Sequence: Synthetic oligonucleotide
aaaccacuuuucuauaggc

SEQ ID NO: 2783527 - RNA, 19 nt, Artificial Sequence
  Description of Artificial Sequence: Synthetic oligonucleotide
uuuagaggcaacauggcag

SEQ ID NO: 2783528 - RNA, 19 nt, Artificial Sequence
  Description of Artificial Sequence: Synthetic oligonucleotide
uuucuauaggcuccgauag

SEQ ID NO: 2783529 - RNA, 19 nt, Artificial Sequence
  Description of Artificial Sequence: Synthetic oligonucleotide
aaagaguugaguguugggg

SEQ ID NO: 2783530 - RNA, 19 nt, Artificial Sequence
  Description of Artificial Sequence: Synthetic oligonucleotide
auagcuagcccguagcgcc

SEQ ID NO: 2783531 - RNA, 19 nt, Artificial Sequence
  Description of Artificial Sequence: Synthetic oligonucleotide
aguguuaucaaagaguuga

SEQ ID NO: 2783532 - RNA, 19 nt, Artificial Sequence
  Description of Artificial Sequence: Synthetic oligonucleotide
aaugcugcaacagccaggg

SEQ ID NO: 2783533 - RNA, 19 nt, Artificial Sequence
  Description of Artificial Sequence: Synthetic oligonucleotide
gaaguguccagcuuugucc

SEQ ID NO: 2783534 - RNA, 19 nt, Artificial Sequence
  Description of Artificial Sequence: Synthetic oligonucleotide
aacugugaaacgugucccc

SEQ ID NO: 2783535 - RNA, 19 nt, Artificial Sequence
  Description of Artificial Sequence: Synthetic oligonucleotide
ugaaacguguccccgagcc

SEQ ID NO: 2783536 - RNA, 19 nt, Artificial Sequence
  Description of Artificial Sequence: Synthetic oligonucleotide
uuaucaaagaguugagugu

SEQ ID NO: 2783537 - RNA, 19 nt, Artificial Sequence
  Description of Artificial Sequence: Synthetic oligonucleotide
aauagcuagcccguagcgc

SEQ ID NO: 2783538 - RNA, 19 nt, Artificial Sequence
  Description of Artificial Sequence: Synthetic oligonucleotide
uuagaggcaacauggcagg

SEQ ID NO: 2783539 - RNA, 19 nt, Artificial Sequence
  Description of Artificial Sequence: Synthetic oligonucleotide
aaggauggcaaagaagcgg

SEQ ID NO: 2783540 - RNA, 19 nt, Artificial Sequence
  Description of Artificial Sequence: Synthetic oligonucleotide
caaaacaguccaaggaugg

SEQ ID NO: 2783541 - RNA, 19 nt, Artificial Sequence
  Description of Artificial Sequence: Synthetic oligonucleotide
aagaguugaguguugggga

SEQ ID NO: 2783542 - RNA, 19 nt, Artificial Sequence
  Description of Artificial Sequence: Synthetic oligonucleotide
guaagcaucaccugcuucc

SEQ ID NO: 2783543 - RNA, 19 nt, Artificial Sequence
  Description of Artificial Sequence: Synthetic oligonucleotide
aggaccaaggcucccaucg

SEQ ID NO: 2783544 - RNA, 19 nt, Artificial Sequence
  Description of Artificial Sequence: Synthetic oligonucleotide
gcaaccaauagcuagcccg

SEQ ID NO: 2783545 - RNA, 19 nt, Artificial Sequence
  Description of Artificial Sequence: Synthetic oligonucleotide
acuucugugggccaugcag

SEQ ID NO: 2783546 - RNA, 19 nt, Artificial Sequence
  Description of Artificial Sequence: Synthetic oligonucleotide
aaagaagcggccccguuca

SEQ ID NO: 2783547 - RNA, 19 nt, Artificial Sequence
  Description of Artificial Sequence: Synthetic oligonucleotide
aaaacaguccaaggauggc

SEQ ID NO: 2783548 - RNA, 19 nt, Artificial Sequence
  Description of Artificial Sequence: Synthetic oligonucleotide
aaaggaaguagaagcgucg

SEQ ID NO: 2783549 - RNA, 19 nt, Artificial Sequence
  Description of Artificial Sequence: Synthetic oligonucleotide
agcgccagagugcagagcg

SEQ ID NO: 2783550 - RNA, 19 nt, Artificial Sequence
  Description of Artificial Sequence: Synthetic oligonucleotide
uucaagggaacugugaaac

SEQ ID NO: 2783551 - RNA, 19 nt, Artificial Sequence
  Description of Artificial Sequence: Synthetic oligonucleotide
gaucuuuagaggcaacaug

SEQ ID NO: 2783552 - RNA, 19 nt, Artificial Sequence
  Description of Artificial Sequence: Synthetic oligonucleotide
ucuauaggcuccgauaggc

SEQ ID NO: 2783553 - RNA, 19 nt, Artificial Sequence
  Description of Artificial Sequence: Synthetic oligonucleotide
caaggagcaugacugaacg

SEQ ID NO: 2783554 - RNA, 19 nt, Artificial Sequence
  Description of Artificial Sequence: Synthetic oligonucleotide
auggcaaagaagcggcccc

SEQ ID NO: 2783555 - RNA, 19 nt, Artificial Sequence
  Description of Artificial Sequence: Synthetic oligonucleotide
aaggagcaugacugaacgc

SEQ ID NO: 2783556 - RNA, 19 nt, Artificial Sequence
  Description of Artificial Sequence: Synthetic oligonucleotide
ucaaagaguugaguguugg

SEQ ID NO: 2783557 - RNA, 19 nt, Artificial Sequence
  Description of Artificial Sequence: Synthetic oligonucleotide
uccaaggauggcaaagaag

SEQ ID NO: 2783558 - RNA, 19 nt, Artificial Sequence
  Description of Artificial Sequence: Synthetic oligonucleotide
agagaaaaccagcaccaag

SEQ ID NO: 2783559 - RNA, 19 nt, Artificial Sequence
  Description of Artificial Sequence: Synthetic oligonucleotide
uuuucuauaggcuccgaua

SEQ ID NO: 2783560 - RNA, 19 nt, Artificial Sequence
  Description of Artificial Sequence: Synthetic oligonucleotide
caggaaaccugguucaagg

SEQ ID NO: 2783561 - RNA, 19 nt, Artificial Sequence
  Description of Artificial Sequence: Synthetic oligonucleotide
aagagcagcacaucccgug

SEQ ID NO: 2783562 - RNA, 19 nt, Artificial Sequence
  Description of Artificial Sequence: Synthetic oligonucleotide
agggagguccagaagaugc

SEQ ID NO: 2783563 - RNA, 19 nt, Artificial Sequence
  Description of Artificial Sequence: Synthetic oligonucleotide
ucagaggucgggacaaugc

SEQ ID NO: 2783564 - RNA, 19 nt, Artificial Sequence
  Description of Artificial Sequence: Synthetic oligonucleotide
gagaguagagaaaaccagc

SEQ ID NO: 2783565 - RNA, 19 nt, Artificial Sequence
  Description of Artificial Sequence: Synthetic oligonucleotide
aaguguccagcuuugucca

SEQ ID NO: 2783566 - RNA, 19 nt, Artificial Sequence
  Description of Artificial Sequence: Synthetic oligonucleotide
ucuuuagaggcaacauggc

SEQ ID NO: 2783567 - RNA, 19 nt, Artificial Sequence
  Description of Artificial Sequence: Synthetic oligonucleotide
aggauggcaaagaagcggc

SEQ ID NO: 2783568 - RNA, 19 nt, Artificial Sequence
  Description of Artificial Sequence: Synthetic oligonucleotide
ugugaaacguguccccgag

SEQ ID NO: 2783569 - RNA, 19 nt, Artificial Sequence
  Description of Artificial Sequence: Synthetic oligonucleotide
uucuauaggcuccgauagg

SEQ ID NO: 2783570 - RNA, 19 nt, Artificial Sequence
  Description of Artificial Sequence: Synthetic oligonucleotide
agcgcaaaacaguccaagg

SEQ ID NO: 2783571 - RNA, 19 nt, Artificial Sequence
  Description of Artificial Sequence: Synthetic oligonucleotide
uuuguccaaaaggaaguag

SEQ ID NO: 2783572 - RNA, 19 nt, Artificial Sequence
  Description of Artificial Sequence: Synthetic oligonucleotide
cuucugugggccaugcagg

SEQ ID NO: 2783573 - RNA, 19 nt, Artificial Sequence
  Description of Artificial Sequence: Synthetic oligonucleotide
aaacaguccaaggauggca

SEQ ID NO: 2783574 - RNA, 19 nt, Artificial Sequence
  Description of Artificial Sequence: Synthetic oligonucleotide
uauaggcuccgauaggcac

SEQ ID NO: 2783575 - RNA, 19 nt, Artificial Sequence
  Description of Artificial Sequence: Synthetic oligonucleotide
gaagcggccccguucaugc

SEQ ID NO: 2783576 - RNA, 19 nt, Artificial Sequence
  Description of Artificial Sequence: Synthetic oligonucleotide
gaucggagagaguagagaa

SEQ ID NO: 2783577 - RNA, 19 nt, Artificial Sequence
  Description of Artificial Sequence: Synthetic oligonucleotide
ugccgcaaccaauagcuag

SEQ ID NO: 2783578 - RNA, 19 nt, Artificial Sequence
  Description of Artificial Sequence: Synthetic oligonucleotide
aagcgucggccuuugaucu

SEQ ID NO: 2783579 - RNA, 19 nt, Artificial Sequence
  Description of Artificial Sequence: Synthetic oligonucleotide
gaagaugcccugaccagcg

SEQ ID NO: 2783580 - RNA, 19 nt, Artificial Sequence
  Description of Artificial Sequence: Synthetic oligonucleotide
aggaaaccugguucaaggg

SEQ ID NO: 2783581 - RNA, 19 nt, Artificial Sequence
  Description of Artificial Sequence: Synthetic oligonucleotide
gagagaguagagaaaacca

SEQ ID NO: 2783582 - RNA, 19 nt, Artificial Sequence
  Description of Artificial Sequence: Synthetic oligonucleotide
ggaacugugaaacgugucc

SEQ ID NO: 2783583 - RNA, 19 nt, Artificial Sequence
  Description of Artificial Sequence: Synthetic oligonucleotide
acaaugcugcaacagccag

SEQ ID NO: 2783584 - RNA, 19 nt, Artificial Sequence
  Description of Artificial Sequence: Synthetic oligonucleotide
agcuuuguccaaaaggaag

SEQ ID NO: 2783585 - RNA, 19 nt, Artificial Sequence
  Description of Artificial Sequence: Synthetic oligonucleotide
aggaacccggaucagaggu

SEQ ID NO: 2783586 - RNA, 19 nt, Artificial Sequence
  Description of Artificial Sequence: Synthetic oligonucleotide
caaggauggcaaagaagcg

SEQ ID NO: 2783587 - RNA, 19 nt, Artificial Sequence
  Description of Artificial Sequence: Synthetic oligonucleotide
accagcgcaaaacagucca

SEQ ID NO: 2783588 - RNA, 19 nt, Artificial Sequence
  Description of Artificial Sequence: Synthetic oligonucleotide
gaagcgucggccuuugauc

SEQ ID NO: 2783589 - RNA, 19 nt, Artificial Sequence
  Description of Artificial Sequence: Synthetic oligonucleotide
gaacugugaaacguguccc

SEQ ID NO: 2783590 - RNA, 19 nt, Artificial Sequence
  Description of Artificial Sequence: Synthetic oligonucleotide
caauagcuagcccguagcg

SEQ ID NO: 2783591 - RNA, 19 nt, Artificial Sequence
  Description of Artificial Sequence: Synthetic oligonucleotide
agcaugacugaacgcacag

SEQ ID NO: 2783592 - RNA, 19 nt, Artificial Sequence
  Description of Artificial Sequence: Synthetic oligonucleotide
uguuaucaaagaguugagu

SEQ ID NO: 2783593 - RNA, 19 nt, Artificial Sequence
  Description of Artificial Sequence: Synthetic oligonucleotide
uugaucuuuagaggcaaca

SEQ ID NO: 2783594 - RNA, 19 nt, Artificial Sequence
  Description of Artificial Sequence: Synthetic oligonucleotide
caaagaguugaguguuggg

SEQ ID NO: 2783595 - RNA, 19 nt, Artificial Sequence
  Description of Artificial Sequence: Synthetic oligonucleotide
guguccccgagccaaaggg

SEQ ID NO: 2783596 - RNA, 19 nt, Artificial Sequence
  Description of Artificial Sequence: Synthetic oligonucleotide
gaggcaacauggcaggaac

SEQ ID NO: 2783597 - RNA, 19 nt, Artificial Sequence
  Description of Artificial Sequence: Synthetic oligonucleotide
uguccccgagccaaagggg

SEQ ID NO: 2783598 - RNA, 19 nt, Artificial Sequence
  Description of Artificial Sequence: Synthetic oligonucleotide
ucggagagaguagagaaaa

SEQ ID NO: 2783599 - RNA, 19 nt, Artificial Sequence
  Description of Artificial Sequence: Synthetic oligonucleotide
gaacccggaucagaggucg

SEQ ID NO: 2783600 - RNA, 19 nt, Artificial Sequence
  Description of Artificial Sequence: Synthetic oligonucleotide
aagaugcccugaccagcgc

SEQ ID NO: 2783601 - RNA, 19 nt, Artificial Sequence
  Description of Artificial Sequence: Synthetic oligonucleotide
gccuuugaucuuuagaggc

SEQ ID NO: 2783602 - RNA, 19 nt, Artificial Sequence
  Description of Artificial Sequence: Synthetic oligonucleotide
auaggcuccgauaggcacc

SEQ ID NO: 2783603 - RNA, 19 nt, Artificial Sequence
  Description of Artificial Sequence: Synthetic oligonucleotide
gaguagagaaaaccagcac

SEQ ID NO: 2783604 - RNA, 19 nt, Artificial Sequence
  Description of Artificial Sequence: Synthetic oligonucleotide
ggagagaguagagaaaacc

SEQ ID NO: 2783605 - RNA, 19 nt, Artificial Sequence
  Description of Artificial Sequence: Synthetic oligonucleotide
gauggcaaagaagcggccc

SEQ ID NO: 2783606 - RNA, 19 nt, Artificial Sequence
  Description of Artificial Sequence: Synthetic oligonucleotide
uccugcaaggagcaugacu

SEQ ID NO: 2783607 - RNA, 19 nt, Artificial Sequence
  Description of Artificial Sequence: Synthetic oligonucleotide
accaauagcuagcccguag

SEQ ID NO: 2783608 - RNA, 19 nt, Artificial Sequence
  Description of Artificial Sequence: Synthetic oligonucleotide
ugguucaagggaacuguga

SEQ ID NO: 2783609 - RNA, 19 nt, Artificial Sequence
  Description of Artificial Sequence: Synthetic oligonucleotide
ucggccuuugaucuuuaga

SEQ ID NO: 2783610 - RNA, 19 nt, Artificial Sequence
  Description of Artificial Sequence: Synthetic oligonucleotide
aacauggcaggaacuucac

SEQ ID NO: 2783611 - RNA, 19 nt, Artificial Sequence
  Description of Artificial Sequence: Synthetic oligonucleotide
uccagaagaugcccugacc

SEQ ID NO: 2783612 - RNA, 19 nt, Artificial Sequence
  Description of Artificial Sequence: Synthetic oligonucleotide
aaaccugguucaagggaac

SEQ ID NO: 2783613 - RNA, 19 nt, Artificial Sequence
  Description of Artificial Sequence: Synthetic oligonucleotide
gaggucgggacaaugcugc

SEQ ID NO: 2783614 - RNA, 19 nt, Artificial Sequence
  Description of Artificial Sequence: Synthetic oligonucleotide
agcacaucccgugguaccc

SEQ ID NO: 2783615 - RNA, 19 nt, Artificial Sequence
  Description of Artificial Sequence: Synthetic oligonucleotide
ucaccugcuucccuccugc

SEQ ID NO: 2783616 - RNA, 19 nt, Artificial Sequence
  Description of Artificial Sequence: Synthetic oligonucleotide
uccguguagccccgguugg

SEQ ID NO: 2783617 - RNA, 19 nt, Artificial Sequence
  Description of Artificial Sequence: Synthetic oligonucleotide
acugugaaacguguccccg

SEQ ID NO: 2783618 - RNA, 19 nt, Artificial Sequence
  Description of Artificial Sequence: Synthetic oligonucleotide
agaugggcaaaccacuuuu

SEQ ID NO: 2783619 - RNA, 19 nt, Artificial Sequence
  Description of Artificial Sequence: Synthetic oligonucleotide
gaaaccugguucaagggaa

SEQ ID NO: 2783620 - RNA, 19 nt, Artificial Sequence
  Description of Artificial Sequence: Synthetic oligonucleotide
cuuuagaggcaacauggca

SEQ ID NO: 2783621 - RNA, 19 nt, Artificial Sequence
  Description of Artificial Sequence: Synthetic oligonucleotide
aaacguguccccgagccaa

SEQ ID NO: 2783622 - RNA, 19 nt, Artificial Sequence
  Description of Artificial Sequence: Synthetic oligonucleotide
uuugaucuuuagaggcaac

SEQ ID NO: 2783623 - RNA, 19 nt, Artificial Sequence
  Description of Artificial Sequence: Synthetic oligonucleotide
augcaggaaaccugguuca

SEQ ID NO: 2783624 - RNA, 19 nt, Artificial Sequence
  Description of Artificial Sequence: Synthetic oligonucleotide
ugaucuuuagaggcaacau

SEQ ID NO: 2783625 - RNA, 19 nt, Artificial Sequence
  Description of Artificial Sequence: Synthetic oligonucleotide
agcccguagcgccagagug

SEQ ID NO: 2783626 - RNA, 19 nt, Artificial Sequence
  Description of Artificial Sequence: Synthetic oligonucleotide
uggggaaguguccagcuuu

SEQ ID NO: 2783627 - RNA, 19 nt, Artificial Sequence
  Description of Artificial Sequence: Synthetic oligonucleotide
augggcaaaccacuuuucu

SEQ ID NO: 2783628 - RNA, 19 nt, Artificial Sequence
  Description of Artificial Sequence: Synthetic oligonucleotide
guccaaaaggaaguagaag

SEQ ID NO: 2783629 - RNA, 19 nt, Artificial Sequence
  Description of Artificial Sequence: Synthetic oligonucleotide
cagaagaugcccugaccag

SEQ ID NO: 2783630 - RNA, 19 nt, Artificial Sequence
  Description of Artificial Sequence: Synthetic oligonucleotide
accaaggcucccaucgugc

SEQ ID NO: 2783631 - RNA, 19 nt, Artificial Sequence
  Description of Artificial Sequence: Synthetic oligonucleotide
agaagcgucggccuuugau

SEQ ID NO: 2783632 - RNA, 19 nt, Artificial Sequence
  Description of Artificial Sequence: Synthetic oligonucleotide
caacauggcaggaacuuca

SEQ ID NO: 2783633 - RNA, 19 nt, Artificial Sequence
  Description of Artificial Sequence: Synthetic oligonucleotide
cacaguguuaucaaagagu

SEQ ID NO: 2783634 - RNA, 19 nt, Artificial Sequence
  Description of Artificial Sequence: Synthetic oligonucleotide
gucgggacaaugcugcaac

SEQ ID NO: 2783635 - RNA, 19 nt, Artificial Sequence
  Description of Artificial Sequence: Synthetic oligonucleotide
caaagaagcggccccguuc

SEQ ID NO: 2783636 - RNA, 19 nt, Artificial Sequence
  Description of Artificial Sequence: Synthetic oligonucleotide
agcgcagguccguguagcc

SEQ ID NO: 2783637 - RNA, 19 nt, Artificial Sequence
  Description of Artificial Sequence: Synthetic oligonucleotide
ggccuuugaucuuuagagg

SEQ ID NO: 2783638 - RNA, 19 nt, Artificial Sequence
  Description of Artificial Sequence: Synthetic oligonucleotide
uguagccccgguugggagc

SEQ ID NO: 2783639 - RNA, 19 nt, Artificial Sequence
  Description of Artificial Sequence: Synthetic oligonucleotide
agaguugaguguuggggaa

SEQ ID NO: 2783640 - RNA, 19 nt, Artificial Sequence
  Description of Artificial Sequence: Synthetic oligonucleotide
aacaguccaaggauggcaa

SEQ ID NO: 2783641 - RNA, 19 nt, Artificial Sequence
  Description of Artificial Sequence: Synthetic oligonucleotide
uaagcaucaccugcuuccc

SEQ ID NO: 2783642 - RNA, 19 nt, Artificial Sequence
  Description of Artificial Sequence: Synthetic oligonucleotide
ugggcaaaccacuuuucua

SEQ ID NO: 2783643 - RNA, 19 nt, Artificial Sequence
  Description of Artificial Sequence: Synthetic oligonucleotide
cacagaucggagagaguag

SEQ ID NO: 2783644 - RNA, 19 nt, Artificial Sequence
  Description of Artificial Sequence: Synthetic oligonucleotide
ucgugccgcaaccaauagc

SEQ ID NO: 2783645 - RNA, 19 nt, Artificial Sequence
  Description of Artificial Sequence: Synthetic oligonucleotide
acccacaguguuaucaaag

SEQ ID NO: 2783646 - RNA, 19 nt, Artificial Sequence
  Description of Artificial Sequence: Synthetic oligonucleotide
aguguuggggaagugucca

SEQ ID NO: 2783647 - RNA, 19 nt, Artificial Sequence
  Description of Artificial Sequence: Synthetic oligonucleotide
gaccaaggcucccaucgug

SEQ ID NO: 2783648 - RNA, 19 nt, Artificial Sequence
  Description of Artificial Sequence: Synthetic oligonucleotide
ugggccaugcaggaaaccu

SEQ ID NO: 2783649 - RNA, 19 nt, Artificial Sequence
  Description of Artificial Sequence: Synthetic oligonucleotide
gguugggagccucugcagg

SEQ ID NO: 2783650 - RNA, 19 nt, Artificial Sequence
  Description of Artificial Sequence: Synthetic oligonucleotide
acagaucggagagaguaga

SEQ ID NO: 2783651 - RNA, 19 nt, Artificial Sequence
  Description of Artificial Sequence: Synthetic oligonucleotide
gacugaacgcacagaucgg

SEQ ID NO: 2783652 - RNA, 19 nt, Artificial Sequence
  Description of Artificial Sequence: Synthetic oligonucleotide
cggccuuugaucuuuagag

SEQ ID NO: 2783653 - RNA, 19 nt, Artificial Sequence
  Description of Artificial Sequence: Synthetic oligonucleotide
ccgauaggcacccacagug

SEQ ID NO: 2783654 - RNA, 19 nt, Artificial Sequence
  Description of Artificial Sequence: Synthetic oligonucleotide
guccguguagccccgguug

SEQ ID NO: 2783655 - RNA, 19 nt, Artificial Sequence
  Description of Artificial Sequence: Synthetic oligonucleotide
agaucggagagaguagaga

SEQ ID NO: 2783656 - RNA, 19 nt, Artificial Sequence
  Description of Artificial Sequence: Synthetic oligonucleotide
cagaucggagagaguagag

SEQ ID NO: 2783657 - RNA, 19 nt, Artificial Sequence
  Description of Artificial Sequence: Synthetic oligonucleotide
cuccgauaggcacccacag

SEQ ID NO: 2783658 - RNA, 19 nt, Artificial Sequence
  Description of Artificial Sequence: Synthetic oligonucleotide
gaaguagaagcgucggccu

SEQ ID NO: 2783659 - RNA, 19 nt, Artificial Sequence
  Description of Artificial Sequence: Synthetic oligonucleotide
aaguagaagcgucggccuu

SEQ ID NO: 2783660 - RNA, 19 nt, Artificial Sequence
  Description of Artificial Sequence: Synthetic oligonucleotide
uccgauaggcacccacagu

SEQ ID NO: 2783661 - RNA, 19 nt, Artificial Sequence
  Description of Artificial Sequence: Synthetic oligonucleotide
aguccaaggauggcaaaga

SEQ ID NO: 2783662 - RNA, 19 nt, Artificial Sequence
  Description of Artificial Sequence: Synthetic oligonucleotide
uggcaaagaagcggccccg

SEQ ID NO: 2783663 - RNA, 19 nt, Artificial Sequence
  Description of Artificial Sequence: Synthetic oligonucleotide
cucugcaggaacccggauc

SEQ ID NO: 2783664 - RNA, 19 nt, Artificial Sequence
  Description of Artificial Sequence: Synthetic oligonucleotide
guguuaucaaagaguugag

SEQ ID NO: 2783665 - RNA, 19 nt, Artificial Sequence
  Description of Artificial Sequence: Synthetic oligonucleotide
agaugcccugaccagcgca

SEQ ID NO: 2783666 - RNA, 19 nt, Artificial Sequence
  Description of Artificial Sequence: Synthetic oligonucleotide
ggaaaccugguucaaggga

SEQ ID NO: 2783667 - RNA, 19 nt, Artificial Sequence
  Description of Artificial Sequence: Synthetic oligonucleotide
gaguugaguguuggggaag

SEQ ID NO: 2783668 - RNA, 19 nt, Artificial Sequence
  Description of Artificial Sequence: Synthetic oligonucleotide
gguucaagggaacugugaa

SEQ ID NO: 2783669 - RNA, 19 nt, Artificial Sequence
  Description of Artificial Sequence: Synthetic oligonucleotide
gcaaaacaguccaaggaug

SEQ ID NO: 2783670 - RNA, 19 nt, Artificial Sequence
  Description of Artificial Sequence: Synthetic oligonucleotide
gaguguuggggaagugucc

SEQ ID NO: 2783671 - RNA, 19 nt, Artificial Sequence
  Description of Artificial Sequence: Synthetic oligonucleotide
ccacuuucgcaaaugccgg

SEQ ID NO: 2783672 - RNA, 19 nt, Artificial Sequence
  Description of Artificial Sequence: Synthetic oligonucleotide
caguccaaggauggcaaag

SEQ ID NO: 2783673 - RNA, 19 nt, Artificial Sequence
  Description of Artificial Sequence: Synthetic oligonucleotide
cugguucaagggaacugug

SEQ ID NO: 2783674 - RNA, 19 nt, Artificial Sequence
  Description of Artificial Sequence: Synthetic oligonucleotide
caugacugaacgcacagau

SEQ ID NO: 2783675 - RNA, 19 nt, Artificial Sequence
  Description of Artificial Sequence: Synthetic oligonucleotide
aucgugccgcaaccaauag

SEQ ID NO: 2783676 - RNA, 19 nt, Artificial Sequence
  Description of Artificial Sequence: Synthetic oligonucleotide
caguguuaucaaagaguug

SEQ ID NO: 2783677 - RNA, 19 nt, Artificial Sequence
  Description of Artificial Sequence: Synthetic oligonucleotide
uaggcuccgauaggcaccc

SEQ ID NO: 2783678 - RNA, 19 nt, Artificial Sequence
  Description of Artificial Sequence: Synthetic oligonucleotide
caggaacccggaucagagg

SEQ ID NO: 2783679 - RNA, 19 nt, Artificial Sequence
  Description of Artificial Sequence: Synthetic oligonucleotide
aguugaguguuggggaagu

SEQ ID NO: 2783680 - RNA, 19 nt, Artificial Sequence
  Description of Artificial Sequence: Synthetic oligonucleotide
cauggcaggaacuucacuu

SEQ ID NO: 2783681 - RNA, 19 nt, Artificial Sequence
  Description of Artificial Sequence: Synthetic oligonucleotide
guucaagggaacugugaaa

SEQ ID NO: 2783682 - RNA, 19 nt, Artificial Sequence
  Description of Artificial Sequence: Synthetic oligonucleotide
ccaauagcuagcccguagc

SEQ ID NO: 2783683 - RNA, 19 nt, Artificial Sequence
  Description of Artificial Sequence: Synthetic oligonucleotide
ggcauaagugguaagcauc

SEQ ID NO: 2783684 - RNA, 19 nt, Artificial Sequence
  Description of Artificial Sequence: Synthetic oligonucleotide
ugcaaggagcaugacugaa

SEQ ID NO: 2783685 - RNA, 19 nt, Artificial Sequence
  Description of Artificial Sequence: Synthetic oligonucleotide
cagcgcaaaacaguccaag

SEQ ID NO: 2783686 - RNA, 19 nt, Artificial Sequence
  Description of Artificial Sequence: Synthetic oligonucleotide
guagcgccagagugcagag

SEQ ID NO: 2783687 - RNA, 19 nt, Artificial Sequence
  Description of Artificial Sequence: Synthetic oligonucleotide
caugcuggaagagcagcac

SEQ ID NO: 2783688 - RNA, 19 nt, Artificial Sequence
  Description of Artificial Sequence: Synthetic oligonucleotide
agagcgcagguccguguag

SEQ ID NO: 2783689 - RNA, 19 nt, Artificial Sequence
  Description of Artificial Sequence: Synthetic oligonucleotide
caccaaggaccaaggcucc

SEQ ID NO: 2783690 - RNA, 19 nt, Artificial Sequence
  Description of Artificial Sequence: Synthetic oligonucleotide
ggccaugcaggaaaccugg

SEQ ID NO: 2783691 - RNA, 19 nt, Artificial Sequence
  Description of Artificial Sequence: Synthetic oligonucleotide
gaugggcaaaccacuuuuc

SEQ ID NO: 2783692 - RNA, 19 nt, Artificial Sequence
  Description of Artificial Sequence: Synthetic oligonucleotide
agaggucgggacaaugcug

SEQ ID NO: 2783693 - RNA, 19 nt, Artificial Sequence
  Description of Artificial Sequence: Synthetic oligonucleotide
cuuugaucuuuagaggcaa

SEQ ID NO: 2783694 - RNA, 19 nt, Artificial Sequence
  Description of Artificial Sequence: Synthetic oligonucleotide
cucccaucgugccgcaacc

SEQ ID NO: 2783695 - RNA, 19 nt, Artificial Sequence
  Description of Artificial Sequence: Synthetic oligonucleotide
guucaugcuggaagagcag

SEQ ID NO: 2783696 - RNA, 19 nt, Artificial Sequence
  Description of Artificial Sequence: Synthetic oligonucleotide
cuauaggcuccgauaggca

SEQ ID NO: 2783697 - RNA, 19 nt, Artificial Sequence
  Description of Artificial Sequence: Synthetic oligonucleotide
ccagaagaugcccugacca

SEQ ID NO: 2783698 - RNA, 19 nt, Artificial Sequence
  Description of Artificial Sequence: Synthetic oligonucleotide
ccacaguguuaucaaagag

SEQ ID NO: 2783699 - RNA, 19 nt, Artificial Sequence
  Description of Artificial Sequence: Synthetic oligonucleotide
ccugcuucccuccugcaag

SEQ ID NO: 2783700 - RNA, 19 nt, Artificial Sequence
  Description of Artificial Sequence: Synthetic oligonucleotide
aucagaggucgggacaaug

SEQ ID NO: 2783701 - RNA, 19 nt, Artificial Sequence
  Description of Artificial Sequence: Synthetic oligonucleotide
aacgcacagaucggagaga

SEQ ID NO: 2783702 - RNA, 19 nt, Artificial Sequence
  Description of Artificial Sequence: Synthetic oligonucleotide
gaaacguguccccgagcca

SEQ ID NO: 2783703 - RNA, 19 nt, Artificial Sequence
  Description of Artificial Sequence: Synthetic oligonucleotide
gccccguucaugcuggaag

SEQ ID NO: 2783704 - RNA, 19 nt, Artificial Sequence
  Description of Artificial Sequence: Synthetic oligonucleotide
accugguucaagggaacug

SEQ ID NO: 2783705 - RNA, 19 nt, Artificial Sequence
  Description of Artificial Sequence: Synthetic oligonucleotide
gcgcaaaacaguccaagga

SEQ ID NO: 2783706 - RNA, 19 nt, Artificial Sequence
  Description of Artificial Sequence: Synthetic oligonucleotide
ggaaguguccagcuuuguc

SEQ ID NO: 2783707 - RNA, 19 nt, Artificial Sequence
  Description of Artificial Sequence: Synthetic oligonucleotide
gcaggaacccggaucagag

SEQ ID NO: 2783708 - RNA, 19 nt, Artificial Sequence
  Description of Artificial Sequence: Synthetic oligonucleotide
ucgggacaaugcugcaaca

SEQ ID NO: 2783709 - RNA, 19 nt, Artificial Sequence
  Description of Artificial Sequence: Synthetic oligonucleotide
ucacuucugugggccaugc

SEQ ID NO: 2783710 - RNA, 19 nt, Artificial Sequence
  Description of Artificial Sequence: Synthetic oligonucleotide
agcggccccguucaugcug

SEQ ID NO: 2783711 - RNA, 19 nt, Artificial Sequence
  Description of Artificial Sequence: Synthetic oligonucleotide
cugaccagcgcaaaacagu

SEQ ID NO: 2783712 - RNA, 19 nt, Artificial Sequence
  Description of Artificial Sequence: Synthetic oligonucleotide
guccagaagaugcccugac

SEQ ID NO: 2783713 - RNA, 19 nt, Artificial Sequence
  Description of Artificial Sequence: Synthetic oligonucleotide
ccugaccagcgcaaaacag

SEQ ID NO: 2783714 - RNA, 19 nt, Artificial Sequence
  Description of Artificial Sequence: Synthetic oligonucleotide
guguagccccgguugggag

SEQ ID NO: 2783715 - RNA, 19 nt, Artificial Sequence
  Description of Artificial Sequence: Synthetic oligonucleotide
ugguaagcaucaccugcuu

SEQ ID NO: 2783716 - RNA, 19 nt, Artificial Sequence
  Description of Artificial Sequence: Synthetic oligonucleotide
agggaacugugaaacgugu

SEQ ID NO: 2783717 - RNA, 19 nt, Artificial Sequence
  Description of Artificial Sequence: Synthetic oligonucleotide
guguuggggaaguguccag

SEQ ID NO: 2783718 - RNA, 19 nt, Artificial Sequence
  Description of Artificial Sequence: Synthetic oligonucleotide
uagcuagcccguagcgcca

SEQ ID NO: 2783719 - RNA, 19 nt, Artificial Sequence
  Description of Artificial Sequence: Synthetic oligonucleotide
gaccagcgcaaaacagucc

SEQ ID NO: 2783720 - RNA, 19 nt, Artificial Sequence
  Description of Artificial Sequence: Synthetic oligonucleotide
gagcgcagguccguguagc

SEQ ID NO: 2783721 - RNA, 19 nt, Artificial Sequence
  Description of Artificial Sequence: Synthetic oligonucleotide
acccggaucagaggucggg

SEQ ID NO: 2783722 - RNA, 19 nt, Artificial Sequence
  Description of Artificial Sequence: Synthetic oligonucleotide
guccagcuuuguccaaaag

SEQ ID NO: 2783723 - RNA, 19 nt, Artificial Sequence
  Description of Artificial Sequence: Synthetic oligonucleotide
gugaaacguguccccgagc

SEQ ID NO: 2783724 - RNA, 19 nt, Artificial Sequence
  Description of Artificial Sequence: Synthetic oligonucleotide
guagccccgguugggagcc

SEQ ID NO: 2783725 - RNA, 19 nt, Artificial Sequence
  Description of Artificial Sequence: Synthetic oligonucleotide
cugugggccaugcaggaaa

SEQ ID NO: 2783726 - RNA, 19 nt, Artificial Sequence
  Description of Artificial Sequence: Synthetic oligonucleotide
uuggggaaguguccagcuu

SEQ ID NO: 2783727 - RNA, 19 nt, Artificial Sequence
  Description of Artificial Sequence: Synthetic oligonucleotide
gguaagcaucaccugcuuc

SEQ ID NO: 2783728 - RNA, 19 nt, Artificial Sequence
  Description of Artificial Sequence: Synthetic oligonucleotide
caaaaggaaguagaagcgu

SEQ ID NO: 2783729 - RNA, 19 nt, Artificial Sequence
  Description of Artificial Sequence: Synthetic oligonucleotide
caucgugccgcaaccaaua

SEQ ID NO: 2783730 - RNA, 19 nt, Artificial Sequence
  Description of Artificial Sequence: Synthetic oligonucleotide
gcacagaucggagagagua

SEQ ID NO: 2783731 - RNA, 19 nt, Artificial Sequence
  Description of Artificial Sequence: Synthetic oligonucleotide
gggcaaaccacuuuucuau

SEQ ID NO: 2783732 - RNA, 19 nt, Artificial Sequence
  Description of Artificial Sequence: Synthetic oligonucleotide
caagggaacugugaaacgu

SEQ ID NO: 2783733 - RNA, 19 nt, Artificial Sequence
  Description of Artificial Sequence: Synthetic oligonucleotide
aguagaagcgucggccuuu

SEQ ID NO: 2783734 - RNA, 19 nt, Artificial Sequence
  Description of Artificial Sequence: Synthetic oligonucleotide
cugugaaacguguccccga

SEQ ID NO: 2783735 - RNA, 19 nt, Artificial Sequence
  Description of Artificial Sequence: Synthetic oligonucleotide
ugcccugaccagcgcaaaa

SEQ ID NO: 2783736 - RNA, 19 nt, Artificial Sequence
  Description of Artificial Sequence: Synthetic oligonucleotide
cagcaccaaggaccaaggc

SEQ ID NO: 2783737 - RNA, 19 nt, Artificial Sequence
  Description of Artificial Sequence: Synthetic oligonucleotide
ggagguccagaagaugccc

SEQ ID NO: 2783738 - RNA, 19 nt, Artificial Sequence
  Description of Artificial Sequence: Synthetic oligonucleotide
caaccaauagcuagcccgu

SEQ ID NO: 2783739 - RNA, 19 nt, Artificial Sequence
  Description of Artificial Sequence: Synthetic oligonucleotide
acaguccaaggauggcaaa

SEQ ID NO: 2783740 - RNA, 19 nt, Artificial Sequence
  Description of Artificial Sequence: Synthetic oligonucleotide
ggcacccacaguguuauca

SEQ ID NO: 2783741 - RNA, 19 nt, Artificial Sequence
  Description of Artificial Sequence: Synthetic oligonucleotide
cuagcccguagcgccagag

SEQ ID NO: 2783742 - RNA, 19 nt, Artificial Sequence
  Description of Artificial Sequence: Synthetic oligonucleotide
accugcuucccuccugcaa

SEQ ID NO: 2783743 - RNA, 19 nt, Artificial Sequence
  Description of Artificial Sequence: Synthetic oligonucleotide
guagaagcgucggccuuug

SEQ ID NO: 2783744 - RNA, 19 nt, Artificial Sequence
  Description of Artificial Sequence: Synthetic oligonucleotide
gaugcccugaccagcgcaa

SEQ ID NO: 2783745 - RNA, 19 nt, Artificial Sequence
  Description of Artificial Sequence: Synthetic oligonucleotide
cguucaugcuggaagagca

SEQ ID NO: 2783746 - RNA, 19 nt, Artificial Sequence
  Description of Artificial Sequence: Synthetic oligonucleotide
aucggagagaguagagaaa

SEQ ID NO: 2783747 - RNA, 19 nt, Artificial Sequence
  Description of Artificial Sequence: Synthetic oligonucleotide
gccgcaaccaauagcuagc

SEQ ID NO: 2783748 - RNA, 19 nt, Artificial Sequence
  Description of Artificial Sequence: Synthetic oligonucleotide
aacccggaucagaggucgg

SEQ ID NO: 2783749 - RNA, 19 nt, Artificial Sequence
  Description of Artificial Sequence: Synthetic oligonucleotide
ugcaggaaaccugguucaa

SEQ ID NO: 2783750 - RNA, 19 nt, Artificial Sequence
  Description of Artificial Sequence: Synthetic oligonucleotide
gcuucccuccugcaaggag

SEQ ID NO: 2783751 - RNA, 19 nt, Artificial Sequence
  Description of Artificial Sequence: Synthetic oligonucleotide
guugaguguuggggaagug

SEQ ID NO: 2783752 - RNA, 19 nt, Artificial Sequence
  Description of Artificial Sequence: Synthetic oligonucleotide
ggagcaugacugaacgcac

SEQ ID NO: 2783753 - RNA, 19 nt, Artificial Sequence
  Description of Artificial Sequence: Synthetic oligonucleotide
ccccacuuucgcaaaugcc

SEQ ID NO: 2783754 - RNA, 19 nt, Artificial Sequence
  Description of Artificial Sequence: Synthetic oligonucleotide
ggggcauaagugguaagca

SEQ ID NO: 2783755 - RNA, 19 nt, Artificial Sequence
  Description of Artificial Sequence: Synthetic oligonucleotide
gcaggaaaccugguucaag

SEQ ID NO: 2783756 - RNA, 19 nt, Artificial Sequence
  Description of Artificial Sequence: Synthetic oligonucleotide
gcaaggagcaugacugaac

SEQ ID NO: 2783757 - RNA, 19 nt, Artificial Sequence
  Description of Artificial Sequence: Synthetic oligonucleotide
gugguaagcaucaccugcu

SEQ ID NO: 2783758 - RNA, 19 nt, Artificial Sequence
  Description of Artificial Sequence: Synthetic oligonucleotide
cgcagguccguguagcccc

SEQ ID NO: 2783759 - RNA, 19 nt, Artificial Sequence
  Description of Artificial Sequence: Synthetic oligonucleotide
uugggagccucugcaggaa

SEQ ID NO: 2783760 - RNA, 19 nt, Artificial Sequence
  Description of Artificial Sequence: Synthetic oligonucleotide
auaggcacccacaguguua

SEQ ID NO: 2783761 - RNA, 19 nt, Artificial Sequence
  Description of Artificial Sequence: Synthetic oligonucleotide
cugcaaggagcaugacuga

SEQ ID NO: 2783762 - RNA, 19 nt, Artificial Sequence
  Description of Artificial Sequence: Synthetic oligonucleotide
aaccaauagcuagcccgua

SEQ ID NO: 2783763 - RNA, 19 nt, Artificial Sequence
  Description of Artificial Sequence: Synthetic oligonucleotide
ucugugggccaugcaggaa

SEQ ID NO: 2783764 - RNA, 19 nt, Artificial Sequence
  Description of Artificial Sequence: Synthetic oligonucleotide
ucccaucgugccgcaacca

SEQ ID NO: 2783765 - RNA, 19 nt, Artificial Sequence
  Description of Artificial Sequence: Synthetic oligonucleotide
acuuuucuauaggcuccga

SEQ ID NO: 2783766 - RNA, 19 nt, Artificial Sequence
  Description of Artificial Sequence: Synthetic oligonucleotide
gggagguccagaagaugcc

SEQ ID NO: 2783767 - RNA, 19 nt, Artificial Sequence
  Description of Artificial Sequence: Synthetic oligonucleotide
gcucccaucgugccgcaac

SEQ ID NO: 2783768 - RNA, 19 nt, Artificial Sequence
  Description of Artificial Sequence: Synthetic oligonucleotide
uagaagcgucggccuuuga

SEQ ID NO: 2783769 - RNA, 19 nt, Artificial Sequence
  Description of Artificial Sequence: Synthetic oligonucleotide
ggcuccgauaggcacccac

SEQ ID NO: 2783770 - RNA, 19 nt, Artificial Sequence
  Description of Artificial Sequence: Synthetic oligonucleotide
aggucgggacaaugcugca

SEQ ID NO: 2783771 - RNA, 19 nt, Artificial Sequence
  Description of Artificial Sequence: Synthetic oligonucleotide
cgugccgcaaccaauagcu

SEQ ID NO: 2783772 - RNA, 19 nt, Artificial Sequence
  Description of Artificial Sequence: Synthetic oligonucleotide
aggcaacauggcaggaacu

SEQ ID NO: 2783773 - RNA, 19 nt, Artificial Sequence
  Description of Artificial Sequence: Synthetic oligonucleotide
ggaucagaggucgggacaa

SEQ ID NO: 2783774 - RNA, 19 nt, Artificial Sequence
  Description of Artificial Sequence: Synthetic oligonucleotide
ggcaggaacuucacuucug

SEQ ID NO: 2783775 - RNA, 19 nt, Artificial Sequence
  Description of Artificial Sequence: Synthetic oligonucleotide
cagaggucgggacaaugcu

SEQ ID NO: 2783776 - RNA, 19 nt, Artificial Sequence
  Description of Artificial Sequence: Synthetic oligonucleotide
ugcaacagccagggagguc

SEQ ID NO: 2783777 - RNA, 19 nt, Artificial Sequence
  Description of Artificial Sequence: Synthetic oligonucleotide
agcuagcccguagcgccag

SEQ ID NO: 2783778 - RNA, 19 nt, Artificial Sequence
  Description of Artificial Sequence: Synthetic oligonucleotide
ggggaaguguccagcuuug

SEQ ID NO: 2783779 - RNA, 19 nt, Artificial Sequence
  Description of Artificial Sequence: Synthetic oligonucleotide
ccguucaugcuggaagagc

SEQ ID NO: 2783780 - RNA, 19 nt, Artificial Sequence
  Description of Artificial Sequence: Synthetic oligonucleotide
ccuccugcaaggagcauga

SEQ ID NO: 2783781 - RNA, 19 nt, Artificial Sequence
  Description of Artificial Sequence: Synthetic oligonucleotide
gcaggaacuucacuucugu

SEQ ID NO: 2783782 - RNA, 19 nt, Artificial Sequence
  Description of Artificial Sequence: Synthetic oligonucleotide
acguguccccgagccaaag

SEQ ID NO: 2783783 - RNA, 19 nt, Artificial Sequence
  Description of Artificial Sequence: Synthetic oligonucleotide
ggcaaaccacuuuucuaua

SEQ ID NO: 2783784 - RNA, 19 nt, Artificial Sequence
  Description of Artificial Sequence: Synthetic oligonucleotide
ccggaucagaggucgggac

SEQ ID NO: 2783785 - RNA, 19 nt, Artificial Sequence
  Description of Artificial Sequence: Synthetic oligonucleotide
aacguguccccgagccaaa

SEQ ID NO: 2783786 - RNA, 19 nt, Artificial Sequence
  Description of Artificial Sequence: Synthetic oligonucleotide
gggaacugugaaacguguc

SEQ ID NO: 2783787 - RNA, 19 nt, Artificial Sequence
  Description of Artificial Sequence: Synthetic oligonucleotide
gcccugaccagcgcaaaac

SEQ ID NO: 2783788 - RNA, 19 nt, Artificial Sequence
  Description of Artificial Sequence: Synthetic oligonucleotide
gugggccaugcaggaaacc

SEQ ID NO: 2783789 - RNA, 19 nt, Artificial Sequence
  Description of Artificial Sequence: Synthetic oligonucleotide
cagagugcagagcgcaggu

SEQ ID NO: 2783790 - RNA, 19 nt, Artificial Sequence
  Description of Artificial Sequence: Synthetic oligonucleotide
cccuccugcaaggagcaug

SEQ ID NO: 2783791 - RNA, 19 nt, Artificial Sequence
  Description of Artificial Sequence: Synthetic oligonucleotide
gggcauaagugguaagcau

SEQ ID NO: 2783792 - RNA, 19 nt, Artificial Sequence
  Description of Artificial Sequence: Synthetic oligonucleotide
agcgucggccuuugaucuu

SEQ ID NO: 2783793 - RNA, 19 nt, Artificial Sequence
  Description of Artificial Sequence: Synthetic oligonucleotide
agccccgguugggagccuc

SEQ ID NO: 2783794 - RNA, 19 nt, Artificial Sequence
  Description of Artificial Sequence: Synthetic oligonucleotide
gguccagaagaugcccuga

SEQ ID NO: 2783795 - RNA, 19 nt, Artificial Sequence
  Description of Artificial Sequence: Synthetic oligonucleotide
ccgcaaccaauagcuagcc

SEQ ID NO: 2783796 - RNA, 19 nt, Artificial Sequence
  Description of Artificial Sequence: Synthetic oligonucleotide
cagagcgcagguccgugua

SEQ ID NO: 2783797 - RNA, 19 nt, Artificial Sequence
  Description of Artificial Sequence: Synthetic oligonucleotide
gcccguagcgccagagugc

SEQ ID NO: 2783798 - RNA, 19 nt, Artificial Sequence
  Description of Artificial Sequence: Synthetic oligonucleotide
gcggccccguucaugcugg

SEQ ID NO: 2783799 - RNA, 19 nt, Artificial Sequence
  Description of Artificial Sequence: Synthetic oligonucleotide
gcuccgauaggcacccaca

SEQ ID NO: 2783800 - RNA, 19 nt, Artificial Sequence
  Description of Artificial Sequence: Synthetic oligonucleotide
ggaacccggaucagagguc

SEQ ID NO: 2783801 - RNA, 19 nt, Artificial Sequence
  Description of Artificial Sequence: Synthetic oligonucleotide
cguguccccgagccaaagg

SEQ ID NO: 2783802 - RNA, 19 nt, Artificial Sequence
  Description of Artificial Sequence: Synthetic oligonucleotide
cgcaaaacaguccaaggau

SEQ ID NO: 2783803 - RNA, 19 nt, Artificial Sequence
  Description of Artificial Sequence: Synthetic oligonucleotide
ccccguucaugcuggaaga

SEQ ID NO: 2783804 - RNA, 19 nt, Artificial Sequence
  Description of Artificial Sequence: Synthetic oligonucleotide
cccugaccagcgcaaaaca

SEQ ID NO: 2783805 - RNA, 19 nt, Artificial Sequence
  Description of Artificial Sequence: Synthetic oligonucleotide
cacuucugugggccaugca

SEQ ID NO: 2783806 - RNA, 19 nt, Artificial Sequence
  Description of Artificial Sequence: Synthetic oligonucleotide
gcaugacugaacgcacaga

SEQ ID NO: 2783807 - RNA, 19 nt, Artificial Sequence
  Description of Artificial Sequence: Synthetic oligonucleotide
ggcaacauggcaggaacuu

SEQ ID NO: 2783808 - RNA, 19 nt, Artificial Sequence
  Description of Artificial Sequence: Synthetic oligonucleotide
gcacaucccgugguacccc

SEQ ID NO: 2783809 - RNA, 19 nt, Artificial Sequence
  Description of Artificial Sequence: Synthetic oligonucleotide
cccguucaugcuggaagag

SEQ ID NO: 2783810 - RNA, 19 nt, Artificial Sequence
  Description of Artificial Sequence: Synthetic oligonucleotide
cccgguugggagccucugc

SEQ ID NO: 2783811 - RNA, 19 nt, Artificial Sequence
  Description of Artificial Sequence: Synthetic oligonucleotide
cgcaaccaauagcuagccc

SEQ ID NO: 2783812 - RNA, 19 nt, Artificial Sequence
  Description of Artificial Sequence: Synthetic oligonucleotide
gcgcagguccguguagccc

SEQ ID NO: 2783813 - RNA, 19 nt, Artificial Sequence
  Description of Artificial Sequence: Synthetic oligonucleotide
gcagguccguguagccccg

SEQ ID NO: 2783814 - RNA, 19 nt, Artificial Sequence
  Description of Artificial Sequence: Synthetic oligonucleotide
caaggaccaaggcucccau

SEQ ID NO: 2783815 - RNA, 19 nt, Artificial Sequence
  Description of Artificial Sequence: Synthetic oligonucleotide
ggucgggacaaugcugcaa

SEQ ID NO: 2783816 - RNA, 19 nt, Artificial Sequence
  Description of Artificial Sequence: Synthetic oligonucleotide
ccugguucaagggaacugu

SEQ ID NO: 2783817 - RNA, 19 nt, Artificial Sequence
  Description of Artificial Sequence: Synthetic oligonucleotide
aaccagcaccaaggaccaa

SEQ ID NO: 2783818 - RNA, 19 nt, Artificial Sequence
  Description of Artificial Sequence: Synthetic oligonucleotide
augcccugaccagcgcaaa

SEQ ID NO: 2783819 - RNA, 19 nt, Artificial Sequence
  Description of Artificial Sequence: Synthetic oligonucleotide
cgguugggagccucugcag

SEQ ID NO: 2783820 - RNA, 19 nt, Artificial Sequence
  Description of Artificial Sequence: Synthetic oligonucleotide
cuccugcaaggagcaugac

SEQ ID NO: 2783821 - RNA, 19 nt, Artificial Sequence
  Description of Artificial Sequence: Synthetic oligonucleotide
caccugcuucccuccugca

SEQ ID NO: 2783822 - RNA, 19 nt, Artificial Sequence
  Description of Artificial Sequence: Synthetic oligonucleotide
ccguguagccccgguuggg

SEQ ID NO: 2783823 - RNA, 19 nt, Artificial Sequence
  Description of Artificial Sequence: Synthetic oligonucleotide
cuucacuucugugggccau

SEQ ID NO: 2783824 - RNA, 19 nt, Artificial Sequence
  Description of Artificial Sequence: Synthetic oligonucleotide
aggcucccaucgugccgca

SEQ ID NO: 2783825 - RNA, 19 nt, Artificial Sequence
  Description of Artificial Sequence: Synthetic oligonucleotide
cggaucagaggucgggaca

SEQ ID NO: 2783826 - RNA, 19 nt, Artificial Sequence
  Description of Artificial Sequence: Synthetic oligonucleotide
cccguagcgccagagugca

SEQ ID NO: 2783827 - RNA, 19 nt, Artificial Sequence
  Description of Artificial Sequence: Synthetic oligonucleotide
ggaccaaggcucccaucgu

SEQ ID NO: 2783828 - RNA, 19 nt, Artificial Sequence
  Description of Artificial Sequence: Synthetic oligonucleotide
caucaccugcuucccuccu

SEQ ID NO: 2783829 - RNA, 19 nt, Artificial Sequence
  Description of Artificial Sequence: Synthetic oligonucleotide
gaucagaggucgggacaau

SEQ ID NO: 2783830 - RNA, 19 nt, Artificial Sequence
  Description of Artificial Sequence: Synthetic oligonucleotide
cccaucgugccgcaaccaa

SEQ ID NO: 2783831 - RNA, 19 nt, Artificial Sequence
  Description of Artificial Sequence: Synthetic oligonucleotide
ccagcgcaaaacaguccaa

SEQ ID NO: 2783832 - RNA, 19 nt, Artificial Sequence
  Description of Artificial Sequence: Synthetic oligonucleotide
gugccgcaaccaauagcua

SEQ ID NO: 2783833 - RNA, 19 nt, Artificial Sequence
  Description of Artificial Sequence: Synthetic oligonucleotide
cugcaacagccagggaggu

SEQ ID NO: 2783834 - RNA, 19 nt, Artificial Sequence
  Description of Artificial Sequence: Synthetic oligonucleotide
gcgccagagugcagagcgc

SEQ ID NO: 2783835 - RNA, 19 nt, Artificial Sequence
  Description of Artificial Sequence: Synthetic oligonucleotide
ccagggagguccagaagau

SEQ ID NO: 2783836 - RNA, 19 nt, Artificial Sequence
  Description of Artificial Sequence: Synthetic oligonucleotide
ggcaaagaagcggccccgu

SEQ ID NO: 2783837 - RNA, 19 nt, Artificial Sequence
  Description of Artificial Sequence: Synthetic oligonucleotide
cccggaucagaggucggga

SEQ ID NO: 2783838 - RNA, 19 nt, Artificial Sequence
  Description of Artificial Sequence: Synthetic oligonucleotide
gcaaagaagcggccccguu

SEQ ID NO: 2783839 - RNA, 19 nt, Artificial Sequence
  Description of Artificial Sequence: Synthetic oligonucleotide
ccaucgugccgcaaccaau

SEQ ID NO: 2783840 - RNA, 19 nt, Artificial Sequence
  Description of Artificial Sequence: Synthetic oligonucleotide
ccaugcaggaaaccugguu

SEQ ID NO: 2783841 - RNA, 19 nt, Artificial Sequence
  Description of Artificial Sequence: Synthetic oligonucleotide
cgccagagugcagagcgca

SEQ ID NO: 2783842 - RNA, 19 nt, Artificial Sequence
  Description of Artificial Sequence: Synthetic oligonucleotide
cgauaggcacccacagugu

SEQ ID NO: 2783843 - RNA, 19 nt, Artificial Sequence
  Description of Artificial Sequence: Synthetic oligonucleotide
gcuagcccguagcgccaga

SEQ ID NO: 2783844 - RNA, 19 nt, Artificial Sequence
  Description of Artificial Sequence: Synthetic oligonucleotide
ccguagcgccagagugcag

SEQ ID NO: 2783845 - RNA, 19 nt, Artificial Sequence
  Description of Artificial Sequence: Synthetic oligonucleotide
aggcuccgauaggcaccca

SEQ ID NO: 2783846 - RNA, 19 nt, Artificial Sequence
  Description of Artificial Sequence: Synthetic oligonucleotide
ggccccguucaugcuggaa

SEQ ID NO: 2783847 - RNA, 19 nt, Artificial Sequence
  Description of Artificial Sequence: Synthetic oligonucleotide
gccaugcaggaaaccuggu

SEQ ID NO: 2783848 - RNA, 19 nt, Artificial Sequence
  Description of Artificial Sequence: Synthetic oligonucleotide
gcgucggccuuugaucuuu

SEQ ID NO: 2783849 - RNA, 19 nt, Artificial Sequence
  Description of Artificial Sequence: Synthetic oligonucleotide
ggcucccaucgugccgcaa

SEQ ID NO: 2783850 - RNA, 19 nt, Artificial Sequence
  Description of Artificial Sequence: Synthetic oligonucleotide
cgcacagaucggagagagu

SEQ ID NO: 2783851 - RNA, 19 nt, Artificial Sequence
  Description of Artificial Sequence: Synthetic oligonucleotide
cgucggccuuugaucuuua

SEQ ID NO: 2783852 - RNA, 19 nt, Artificial Sequence
  Description of Artificial Sequence: Synthetic oligonucleotide
gccccgguugggagccucu

SEQ ID NO: 2783853 - RNA, 19 nt, Artificial Sequence
  Description of Artificial Sequence: Synthetic oligonucleotide
cggccccguucaugcugga

SEQ ID NO: 2783854 - RNA, 19 nt, Artificial Sequence
  Description of Artificial Sequence: Synthetic oligonucleotide
uuuaacaccauuaaaaggg

SEQ ID NO: 2783855 - RNA, 19 nt, Artificial Sequence
  Description of Artificial Sequence: Synthetic oligonucleotide
uuauucaaaauucagaaga

SEQ ID NO: 2783856 - RNA, 19 nt, Artificial Sequence
  Description of Artificial Sequence: Synthetic oligonucleotide
uuuaauauggcuaaaugga

SEQ ID NO: 2783857 - RNA, 19 nt, Artificial Sequence
  Description of Artificial Sequence: Synthetic oligonucleotide
aauauggcuaaauggaaac

SEQ ID NO: 2783858 - RNA, 19 nt, Artificial Sequence
  Description of Artificial Sequence: Synthetic oligonucleotide
aauggcucagagcagaugg

SEQ ID NO: 2783859 - RNA, 19 nt, Artificial Sequence
  Description of Artificial Sequence: Synthetic oligonucleotide
gauaauguuuucuagauga

SEQ ID NO: 2783860 - RNA, 19 nt, Artificial Sequence
  Description of Artificial Sequence: Synthetic oligonucleotide
aauaaaauguacugcuuag

SEQ ID NO: 2783861 - RNA, 19 nt, Artificial Sequence
  Description of Artificial Sequence: Synthetic oligonucleotide
aaaaugucuuaauaaaaug

SEQ ID NO: 2783862 - RNA, 19 nt, Artificial Sequence
  Description of Artificial Sequence: Synthetic oligonucleotide
aaagacaucaagcauuucu

SEQ ID NO: 2783863 - RNA, 19 nt, Artificial Sequence
  Description of Artificial Sequence: Synthetic oligonucleotide
agacuaauuaaaugaaagc

SEQ ID NO: 2783864 - RNA, 19 nt, Artificial Sequence
  Description of Artificial Sequence: Synthetic oligonucleotide
guacuuuuaacauaaaaug

SEQ ID NO: 2783865 - RNA, 19 nt, Artificial Sequence
  Description of Artificial Sequence: Synthetic oligonucleotide
aaauucagaagaaugacag

SEQ ID NO: 2783866 - RNA, 19 nt, Artificial Sequence
  Description of Artificial Sequence: Synthetic oligonucleotide
aaaggggccgccuuaaugg

SEQ ID NO: 2783867 - RNA, 19 nt, Artificial Sequence
  Description of Artificial Sequence: Synthetic oligonucleotide
aacacaguaagaaacaaag

SEQ ID NO: 2783868 - RNA, 19 nt, Artificial Sequence
  Description of Artificial Sequence: Synthetic oligonucleotide
ucuuuaacaccauuaaaag

SEQ ID NO: 2783869 - RNA, 19 nt, Artificial Sequence
  Description of Artificial Sequence: Synthetic oligonucleotide
uuuuccaagcccuaaaacc

SEQ ID NO: 2783870 - RNA, 19 nt, Artificial Sequence
  Description of Artificial Sequence: Synthetic oligonucleotide
uauuacuaaagacaucaag

SEQ ID NO: 2783871 - RNA, 19 nt, Artificial Sequence
  Description of Artificial Sequence: Synthetic oligonucleotide
ugaacaauaacuuuuccaa

SEQ ID NO: 2783872 - RNA, 19 nt, Artificial Sequence
  Description of Artificial Sequence: Synthetic oligonucleotide
aacacuucccauuauuaag

SEQ ID NO: 2783873 - RNA, 19 nt, Artificial Sequence
  Description of Artificial Sequence: Synthetic oligonucleotide
cauuauuaagggcacaugg

SEQ ID NO: 2783874 - RNA, 19 nt, Artificial Sequence
  Description of Artificial Sequence: Synthetic oligonucleotide
ugacagacaacacaguaag

SEQ ID NO: 2783875 - RNA, 19 nt, Artificial Sequence
  Description of Artificial Sequence: Synthetic oligonucleotide
aacaccauuaaaaggggcc

SEQ ID NO: 2783876 - RNA, 19 nt, Artificial Sequence
  Description of Artificial Sequence: Synthetic oligonucleotide
aaauguacugcuuaggaua

SEQ ID NO: 2783877 - RNA, 19 nt, Artificial Sequence
  Description of Artificial Sequence: Synthetic oligonucleotide
aaauggaaacaacccagac

SEQ ID NO: 2783878 - RNA, 19 nt, Artificial Sequence
  Description of Artificial Sequence: Synthetic oligonucleotide
aagaaugacagacaacaca

SEQ ID NO: 2783879 - RNA, 19 nt, Artificial Sequence
  Description of Artificial Sequence: Synthetic oligonucleotide
uaaauaaccuaauuauuca

SEQ ID NO: 2783880 - RNA, 19 nt, Artificial Sequence
  Description of Artificial Sequence: Synthetic oligonucleotide
uaaaauguacugcuuagga

SEQ ID NO: 2783881 - RNA, 19 nt, Artificial Sequence
  Description of Artificial Sequence: Synthetic oligonucleotide
guaagaaacaaagaggugc

SEQ ID NO: 2783882 - RNA, 19 nt, Artificial Sequence
  Description of Artificial Sequence: Synthetic oligonucleotide
uacuuuuaacauaaaaugu

SEQ ID NO: 2783883 - RNA, 19 nt, Artificial Sequence
  Description of Artificial Sequence: Synthetic oligonucleotide
uuacuaaagacaucaagca

SEQ ID NO: 2783884 - RNA, 19 nt, Artificial Sequence
  Description of Artificial Sequence: Synthetic oligonucleotide
aaccuaauuauucaaaauu

SEQ ID NO: 2783885 - RNA, 19 nt, Artificial Sequence
  Description of Artificial Sequence: Synthetic oligonucleotide
ucuuuaauauggcuaaaug

SEQ ID NO: 2783886 - RNA, 19 nt, Artificial Sequence
  Description of Artificial Sequence: Synthetic oligonucleotide
acauggauauaccaaaguc

SEQ ID NO: 2783887 - RNA, 19 nt, Artificial Sequence
  Description of Artificial Sequence: Synthetic oligonucleotide
ugucuuaauaaaauguacu

SEQ ID NO: 2783888 - RNA, 19 nt, Artificial Sequence
  Description of Artificial Sequence: Synthetic oligonucleotide
uaugagagaaggaauuaag

SEQ ID NO: 2783889 - RNA, 19 nt, Artificial Sequence
  Description of Artificial Sequence: Synthetic oligonucleotide
aacagaugggaacugcuuc

SEQ ID NO: 2783890 - RNA, 19 nt, Artificial Sequence
  Description of Artificial Sequence: Synthetic oligonucleotide
agaagaaugacagacaaca

SEQ ID NO: 2783891 - RNA, 19 nt, Artificial Sequence
  Description of Artificial Sequence: Synthetic oligonucleotide
cuuaggauaugagagaagg

SEQ ID NO: 2783892 - RNA, 19 nt, Artificial Sequence
  Description of Artificial Sequence: Synthetic oligonucleotide
aaaugucuuaauaaaaugu

SEQ ID NO: 2783893 - RNA, 19 nt, Artificial Sequence
  Description of Artificial Sequence: Synthetic oligonucleotide
aauggaaacaacccagacu

SEQ ID NO: 2783894 - RNA, 19 nt, Artificial Sequence
  Description of Artificial Sequence: Synthetic oligonucleotide
agcuaauucacuuauggga

SEQ ID NO: 2783895 - RNA, 19 nt, Artificial Sequence
  Description of Artificial Sequence: Synthetic oligonucleotide
uaugggacaauaaucucag

SEQ ID NO: 2783896 - RNA, 19 nt, Artificial Sequence
  Description of Artificial Sequence: Synthetic oligonucleotide
acuuuuaacauaaaauguc

SEQ ID NO: 2783897 - RNA, 19 nt, Artificial Sequence
  Description of Artificial Sequence: Synthetic oligonucleotide
aaugaaagcuaauucacuu

SEQ ID NO: 2783898 - RNA, 19 nt, Artificial Sequence
  Description of Artificial Sequence: Synthetic oligonucleotide
uuaugggacaauaaucuca

SEQ ID NO: 2783899 - RNA, 19 nt, Artificial Sequence
  Description of Artificial Sequence: Synthetic oligonucleotide
aauaaucucagaaccggac

SEQ ID NO: 2783900 - RNA, 19 nt, Artificial Sequence
  Description of Artificial Sequence: Synthetic oligonucleotide
uuaacaccauuaaaagggg

SEQ ID NO: 2783901 - RNA, 19 nt, Artificial Sequence
  Description of Artificial Sequence: Synthetic oligonucleotide
uaagauaauguuuucuaga

SEQ ID NO: 2783902 - RNA, 19 nt, Artificial Sequence
  Description of Artificial Sequence: Synthetic oligonucleotide
cagacuaauuaaaugaaag

SEQ ID NO: 2783903 - RNA, 19 nt, Artificial Sequence
  Description of Artificial Sequence: Synthetic oligonucleotide
uuuccaagcccuaaaacca

SEQ ID NO: 2783904 - RNA, 19 nt, Artificial Sequence
  Description of Artificial Sequence: Synthetic oligonucleotide
aagcuaauucacuuauggg

SEQ ID NO: 2783905 - RNA, 19 nt, Artificial Sequence
  Description of Artificial Sequence: Synthetic oligonucleotide
uaagaaugaacaauaacuu

SEQ ID NO: 2783906 - RNA, 19 nt, Artificial Sequence
  Description of Artificial Sequence: Synthetic oligonucleotide
uauaccaaagucaugcauc

SEQ ID NO: 2783907 - RNA, 19 nt, Artificial Sequence
  Description of Artificial Sequence: Synthetic oligonucleotide
aacauaaaaugucuuaaua

SEQ ID NO: 2783908 - RNA, 19 nt, Artificial Sequence
  Description of Artificial Sequence: Synthetic oligonucleotide
ucuuaauaaaauguacugc

SEQ ID NO: 2783909 - RNA, 19 nt, Artificial Sequence
  Description of Artificial Sequence: Synthetic oligonucleotide
acauaaaaugucuuaauaa

SEQ ID NO: 2783910 - RNA, 19 nt, Artificial Sequence
  Description of Artificial Sequence: Synthetic oligonucleotide
gaugggaacugcuucaaag

SEQ ID NO: 2783911 - RNA, 19 nt, Artificial Sequence
  Description of Artificial Sequence: Synthetic oligonucleotide
auggaaacaacccagacua

SEQ ID NO: 2783912 - RNA, 19 nt, Artificial Sequence
  Description of Artificial Sequence: Synthetic oligonucleotide
ugcuucaaaggcaaaacug

SEQ ID NO: 2783913 - RNA, 19 nt, Artificial Sequence
  Description of Artificial Sequence: Synthetic oligonucleotide
aauuaagauaauguuuucu

SEQ ID NO: 2783914 - RNA, 19 nt, Artificial Sequence
  Description of Artificial Sequence: Synthetic oligonucleotide
aauaacuuuuccaagcccu

SEQ ID NO: 2783915 - RNA, 19 nt, Artificial Sequence
  Description of Artificial Sequence: Synthetic oligonucleotide
agauggaaaacuucauggg

SEQ ID NO: 2783916 - RNA, 19 nt, Artificial Sequence
  Description of Artificial Sequence: Synthetic oligonucleotide
aagaggugcagaugacugc

SEQ ID NO: 2783917 - RNA, 19 nt, Artificial Sequence
  Description of Artificial Sequence: Synthetic oligonucleotide
agaaugacagacaacacag

SEQ ID NO: 2783918 - RNA, 19 nt, Artificial Sequence
  Description of Artificial Sequence: Synthetic oligonucleotide
acugcuuaggauaugagag

SEQ ID NO: 2783919 - RNA, 19 nt, Artificial Sequence
  Description of Artificial Sequence: Synthetic oligonucleotide
aaauaaccuaauuauucaa

SEQ ID NO: 2783920 - RNA, 19 nt, Artificial Sequence
  Description of Artificial Sequence: Synthetic oligonucleotide
ucagaagaaugacagacaa

SEQ ID NO: 2783921 - RNA, 19 nt, Artificial Sequence
  Description of Artificial Sequence: Synthetic oligonucleotide
aaugacagacaacacagua

SEQ ID NO: 2783922 - RNA, 19 nt, Artificial Sequence
  Description of Artificial Sequence: Synthetic oligonucleotide
uucuagaugaguccuggcc

SEQ ID NO: 2783923 - RNA, 19 nt, Artificial Sequence
  Description of Artificial Sequence: Synthetic oligonucleotide
auuaagauaauguuuucua

SEQ ID NO: 2783924 - RNA, 19 nt, Artificial Sequence
  Description of Artificial Sequence: Synthetic oligonucleotide
uggcuaaauggaaacaacc

SEQ ID NO: 2783925 - RNA, 19 nt, Artificial Sequence
  Description of Artificial Sequence: Synthetic oligonucleotide
uuauuaagggcacauggau

SEQ ID NO: 2783926 - RNA, 19 nt, Artificial Sequence
  Description of Artificial Sequence: Synthetic oligonucleotide
ugagagaaggaauuaagau

SEQ ID NO: 2783927 - RNA, 19 nt, Artificial Sequence
  Description of Artificial Sequence: Synthetic oligonucleotide
aaaauguacugcuuaggau

SEQ ID NO: 2783928 - RNA, 19 nt, Artificial Sequence
  Description of Artificial Sequence: Synthetic oligonucleotide
accuaauuauucaaaauuc

SEQ ID NO: 2783929 - RNA, 19 nt, Artificial Sequence
  Description of Artificial Sequence: Synthetic oligonucleotide
auuaagggcacauggauau

SEQ ID NO: 2783930 - RNA, 19 nt, Artificial Sequence
  Description of Artificial Sequence: Synthetic oligonucleotide
ucuagaugaguccuggccu

SEQ ID NO: 2783931 - RNA, 19 nt, Artificial Sequence
  Description of Artificial Sequence: Synthetic oligonucleotide
uuaauauggcuaaauggaa

SEQ ID NO: 2783932 - RNA, 19 nt, Artificial Sequence
  Description of Artificial Sequence: Synthetic oligonucleotide
augaacaauaacuuuucca

SEQ ID NO: 2783933 - RNA, 19 nt, Artificial Sequence
  Description of Artificial Sequence: Synthetic oligonucleotide
uaaagcaauaaauaaccua

SEQ ID NO: 2783934 - RNA, 19 nt, Artificial Sequence
  Description of Artificial Sequence: Synthetic oligonucleotide
acccagacuaauuaaauga

SEQ ID NO: 2783935 - RNA, 19 nt, Artificial Sequence
  Description of Artificial Sequence: Synthetic oligonucleotide
ugggacaauaaucucagaa

SEQ ID NO: 2783936 - RNA, 19 nt, Artificial Sequence
  Description of Artificial Sequence: Synthetic oligonucleotide
aacccagacuaauuaaaug

SEQ ID NO: 2783937 - RNA, 19 nt, Artificial Sequence
  Description of Artificial Sequence: Synthetic oligonucleotide
ugaaagcuaauucacuuau

SEQ ID NO: 2783938 - RNA, 19 nt, Artificial Sequence
  Description of Artificial Sequence: Synthetic oligonucleotide
aaaauucagaagaaugaca

SEQ ID NO: 2783939 - RNA, 19 nt, Artificial Sequence
  Description of Artificial Sequence: Synthetic oligonucleotide
agagaaggaauuaagauaa

SEQ ID NO: 2783940 - RNA, 19 nt, Artificial Sequence
  Description of Artificial Sequence: Synthetic oligonucleotide
cuucccauuauuaagggca

SEQ ID NO: 2783941 - RNA, 19 nt, Artificial Sequence
  Description of Artificial Sequence: Synthetic oligonucleotide
cuaauuaaaugaaagcuaa

SEQ ID NO: 2783942 - RNA, 19 nt, Artificial Sequence
  Description of Artificial Sequence: Synthetic oligonucleotide
ggauauaccaaagucaugc

SEQ ID NO: 2783943 - RNA, 19 nt, Artificial Sequence
  Description of Artificial Sequence: Synthetic oligonucleotide
uuuucuagaugaguccugg

SEQ ID NO: 2783944 - RNA, 19 nt, Artificial Sequence
  Description of Artificial Sequence: Synthetic oligonucleotide
uggccugaaccuaagaaug

SEQ ID NO: 2783945 - RNA, 19 nt, Artificial Sequence
  Description of Artificial Sequence: Synthetic oligonucleotide
aaaaggggccgccuuaaug

SEQ ID NO: 2783946 - RNA, 19 nt, Artificial Sequence
  Description of Artificial Sequence: Synthetic oligonucleotide
uaauauggcuaaauggaaa

SEQ ID NO: 2783947 - RNA, 19 nt, Artificial Sequence
  Description of Artificial Sequence: Synthetic oligonucleotide
auaaccuaauuauucaaaa

SEQ ID NO: 2783948 - RNA, 19 nt, Artificial Sequence
  Description of Artificial Sequence: Synthetic oligonucleotide
uuccguguguuucaaaaca

SEQ ID NO: 2783949 - RNA, 19 nt, Artificial Sequence
  Description of Artificial Sequence: Synthetic oligonucleotide
ggacaauaaucucagaacc

SEQ ID NO: 2783950 - RNA, 19 nt, Artificial Sequence
  Description of Artificial Sequence: Synthetic oligonucleotide
uaaucucagaaccggacac

SEQ ID NO: 2783951 - RNA, 19 nt, Artificial Sequence
  Description of Artificial Sequence: Synthetic oligonucleotide
aaugucuuaauaaaaugua

SEQ ID NO: 2783952 - RNA, 19 nt, Artificial Sequence
  Description of Artificial Sequence: Synthetic oligonucleotide
uaaauggaaacaacccaga

SEQ ID NO: 2783953 - RNA, 19 nt, Artificial Sequence
  Description of Artificial Sequence: Synthetic oligonucleotide
aaacacuucccauuauuaa

SEQ ID NO: 2783954 - RNA, 19 nt, Artificial Sequence
  Description of Artificial Sequence: Synthetic oligonucleotide
aucuuuaacaccauuaaaa

SEQ ID NO: 2783955 - RNA, 19 nt, Artificial Sequence
  Description of Artificial Sequence: Synthetic oligonucleotide
cauggauauaccaaaguca

SEQ ID NO: 2783956 - RNA, 19 nt, Artificial Sequence
  Description of Artificial Sequence: Synthetic oligonucleotide
aaacaacccagacuaauua

SEQ ID NO: 2783957 - RNA, 19 nt, Artificial Sequence
  Description of Artificial Sequence: Synthetic oligonucleotide
uucaaaacacuucccauua

SEQ ID NO: 2783958 - RNA, 19 nt, Artificial Sequence
  Description of Artificial Sequence: Synthetic oligonucleotide
auaaaauguacugcuuagg

SEQ ID NO: 2783959 - RNA, 19 nt, Artificial Sequence
  Description of Artificial Sequence: Synthetic oligonucleotide
acuucccauuauuaagggc

SEQ ID NO: 2783960 - RNA, 19 nt, Artificial Sequence
  Description of Artificial Sequence: Synthetic oligonucleotide
aacuucaugggaaacagau

SEQ ID NO: 2783961 - RNA, 19 nt, Artificial Sequence
  Description of Artificial Sequence: Synthetic oligonucleotide
gacuaauuaaaugaaagcu

SEQ ID NO: 2783962 - RNA, 19 nt, Artificial Sequence
  Description of Artificial Sequence: Synthetic oligonucleotide
ucacuuaugggacaauaau

SEQ ID NO: 2783963 - RNA, 19 nt, Artificial Sequence
  Description of Artificial Sequence: Synthetic oligonucleotide
caauaaauaaccuaauuau

SEQ ID NO: 2783964 - RNA, 19 nt, Artificial Sequence
  Description of Artificial Sequence: Synthetic oligonucleotide
uucaugggaaacagauggg

SEQ ID NO: 2783965 - RNA, 19 nt, Artificial Sequence
  Description of Artificial Sequence: Synthetic oligonucleotide
uucagaagaaugacagaca

SEQ ID NO: 2783966 - RNA, 19 nt, Artificial Sequence
  Description of Artificial Sequence: Synthetic oligonucleotide
ccuaaaaccaucuuuaaca

SEQ ID NO: 2783967 - RNA, 19 nt, Artificial Sequence
  Description of Artificial Sequence: Synthetic oligonucleotide
aauaaccuaauuauucaaa

SEQ ID NO: 2783968 - RNA, 19 nt, Artificial Sequence
  Description of Artificial Sequence: Synthetic oligonucleotide
ugggaacugcuucaaaggc

SEQ ID NO: 2783969 - RNA, 19 nt, Artificial Sequence
  Description of Artificial Sequence: Synthetic oligonucleotide
gagagaaggaauuaagaua

SEQ ID NO: 2783970 - RNA, 19 nt, Artificial Sequence
  Description of Artificial Sequence: Synthetic oligonucleotide
uaaaaccaucuuuaacacc

SEQ ID NO: 2783971 - RNA, 19 nt, Artificial Sequence
  Description of Artificial Sequence: Synthetic oligonucleotide
uacugcuuaggauaugaga

SEQ ID NO: 2783972 - RNA, 19 nt, Artificial Sequence
  Description of Artificial Sequence: Synthetic oligonucleotide
caaaauucagaagaaugac

SEQ ID NO: 2783973 - RNA, 19 nt, Artificial Sequence
  Description of Artificial Sequence: Synthetic oligonucleotide
uuaauaaaauguacugcuu

SEQ ID NO: 2783974 - RNA, 19 nt, Artificial Sequence
  Description of Artificial Sequence: Synthetic oligonucleotide
aagauguacuuuuaacaua

SEQ ID NO: 2783975 - RNA, 19 nt, Artificial Sequence
  Description of Artificial Sequence: Synthetic oligonucleotide
auaaucucagaaccggaca

SEQ ID NO: 2783976 - RNA, 19 nt, Artificial Sequence
  Description of Artificial Sequence: Synthetic oligonucleotide
ugcagaugacugcagaggu

SEQ ID NO: 2783977 - RNA, 19 nt, Artificial Sequence
  Description of Artificial Sequence: Synthetic oligonucleotide
uuucaaaacacuucccauu

SEQ ID NO: 2783978 - RNA, 19 nt, Artificial Sequence
  Description of Artificial Sequence: Synthetic oligonucleotide
cacuuaugggacaauaauc

SEQ ID NO: 2783979 - RNA, 19 nt, Artificial Sequence
  Description of Artificial Sequence: Synthetic oligonucleotide
auaccaaagucaugcauca

SEQ ID NO: 2783980 - RNA, 19 nt, Artificial Sequence
  Description of Artificial Sequence: Synthetic oligonucleotide
ucuuccguguguuucaaaa

SEQ ID NO: 2783981 - RNA, 19 nt, Artificial Sequence
  Description of Artificial Sequence: Synthetic oligonucleotide
aacaacccagacuaauuaa

SEQ ID NO: 2783982 - RNA, 19 nt, Artificial Sequence
  Description of Artificial Sequence: Synthetic oligonucleotide
uguacugcuuaggauauga

SEQ ID NO: 2783983 - RNA, 19 nt, Artificial Sequence
  Description of Artificial Sequence: Synthetic oligonucleotide
aaggggccgccuuaauggc

SEQ ID NO: 2783984 - RNA, 19 nt, Artificial Sequence
  Description of Artificial Sequence: Synthetic oligonucleotide
aaaugaaagcuaauucacu

SEQ ID NO: 2783985 - RNA, 19 nt, Artificial Sequence
  Description of Artificial Sequence: Synthetic oligonucleotide
gaaggaauuaagauaaugu

SEQ ID NO: 2783986 - RNA, 19 nt, Artificial Sequence
  Description of Artificial Sequence: Synthetic oligonucleotide
uacuaaagacaucaagcau

SEQ ID NO: 2783987 - RNA, 19 nt, Artificial Sequence
  Description of Artificial Sequence: Synthetic oligonucleotide
acacuucccauuauuaagg

SEQ ID NO: 2783988 - RNA, 19 nt, Artificial Sequence
  Description of Artificial Sequence: Synthetic oligonucleotide
cugaaccuaagaaugaaca

SEQ ID NO: 2783989 - RNA, 19 nt, Artificial Sequence
  Description of Artificial Sequence: Synthetic oligonucleotide
ucaagcauuucuuccgugu

SEQ ID NO: 2783990 - RNA, 19 nt, Artificial Sequence
  Description of Artificial Sequence: Synthetic oligonucleotide
ugaaccuaagaaugaacaa

SEQ ID NO: 2783991 - RNA, 19 nt, Artificial Sequence
  Description of Artificial Sequence: Synthetic oligonucleotide
agaaggaauuaagauaaug

SEQ ID NO: 2783992 - RNA, 19 nt, Artificial Sequence
  Description of Artificial Sequence: Synthetic oligonucleotide
agaaugaacaauaacuuuu

SEQ ID NO: 2783993 - RNA, 19 nt, Artificial Sequence
  Description of Artificial Sequence: Synthetic oligonucleotide
agauaauguuuucuagaug

SEQ ID NO: 2783994 - RNA, 19 nt, Artificial Sequence
  Description of Artificial Sequence: Synthetic oligonucleotide
uuaggauaugagagaagga

SEQ ID NO: 2783995 - RNA, 19 nt, Artificial Sequence
  Description of Artificial Sequence: Synthetic oligonucleotide
uauuaagggcacauggaua

SEQ ID NO: 2783996 - RNA, 19 nt, Artificial Sequence
  Description of Artificial Sequence: Synthetic oligonucleotide
uguuuucuagaugaguccu

SEQ ID NO: 2783997 - RNA, 19 nt, Artificial Sequence
  Description of Artificial Sequence: Synthetic oligonucleotide
uauggcuaaauggaaacaa

SEQ ID NO: 2783998 - RNA, 19 nt, Artificial Sequence
  Description of Artificial Sequence: Synthetic oligonucleotide
uucacuuaugggacaauaa

SEQ ID NO: 2783999 - RNA, 19 nt, Artificial Sequence
  Description of Artificial Sequence: Synthetic oligonucleotide
uaacauaaaaugucuuaau

SEQ ID NO: 2784000 - RNA, 19 nt, Artificial Sequence
  Description of Artificial Sequence: Synthetic oligonucleotide
acuaaagacaucaagcauu

SEQ ID NO: 2784001 - RNA, 19 nt, Artificial Sequence
  Description of Artificial Sequence: Synthetic oligonucleotide
ggcuuguucuuuaauaugg

SEQ ID NO: 2784002 - RNA, 19 nt, Artificial Sequence
  Description of Artificial Sequence: Synthetic oligonucleotide
aaccggacacaagauguac

SEQ ID NO: 2784003 - RNA, 19 nt, Artificial Sequence
  Description of Artificial Sequence: Synthetic oligonucleotide
caguaagaaacaaagaggu

SEQ ID NO: 2784004 - RNA, 19 nt, Artificial Sequence
  Description of Artificial Sequence: Synthetic oligonucleotide
uaacaccauuaaaaggggc

SEQ ID NO: 2784005 - RNA, 19 nt, Artificial Sequence
  Description of Artificial Sequence: Synthetic oligonucleotide
gccuuaauggcucagagca

SEQ ID NO: 2784006 - RNA, 19 nt, Artificial Sequence
  Description of Artificial Sequence: Synthetic oligonucleotide
gaaaacuucaugggaaaca

SEQ ID NO: 2784007 - RNA, 19 nt, Artificial Sequence
  Description of Artificial Sequence: Synthetic oligonucleotide
cagaugacugcagaggucc

SEQ ID NO: 2784008 - RNA, 19 nt, Artificial Sequence
  Description of Artificial Sequence: Synthetic oligonucleotide
acuaauuaaaugaaagcua

SEQ ID NO: 2784009 - RNA, 19 nt, Artificial Sequence
  Description of Artificial Sequence: Synthetic oligonucleotide
gaaugaacaauaacuuuuc

SEQ ID NO: 2784010 - RNA, 19 nt, Artificial Sequence
  Description of Artificial Sequence: Synthetic oligonucleotide
caauaacuuuuccaagccc

SEQ ID NO: 2784011 - RNA, 19 nt, Artificial Sequence
  Description of Artificial Sequence: Synthetic oligonucleotide
acaccauuaaaaggggccg

SEQ ID NO: 2784012 - RNA, 19 nt, Artificial Sequence
  Description of Artificial Sequence: Synthetic oligonucleotide
aagcccuaaaaccaucuuu

SEQ ID NO: 2784013 - RNA, 19 nt, Artificial Sequence
  Description of Artificial Sequence: Synthetic oligonucleotide
aagcauuucuuccgugugu

SEQ ID NO: 2784014 - RNA, 19 nt, Artificial Sequence
  Description of Artificial Sequence: Synthetic oligonucleotide
aaaacacuucccauuauua

SEQ ID NO: 2784015 - RNA, 19 nt, Artificial Sequence
  Description of Artificial Sequence: Synthetic oligonucleotide
aaccuaagaaugaacaaua

SEQ ID NO: 2784016 - RNA, 19 nt, Artificial Sequence
  Description of Artificial Sequence: Synthetic oligonucleotide
auauaccaaagucaugcau

SEQ ID NO: 2784017 - RNA, 19 nt, Artificial Sequence
  Description of Artificial Sequence: Synthetic oligonucleotide
cuuuuccaagcccuaaaac

SEQ ID NO: 2784018 - RNA, 19 nt, Artificial Sequence
  Description of Artificial Sequence: Synthetic oligonucleotide
aagggcacauggauauacc

SEQ ID NO: 2784019 - RNA, 19 nt, Artificial Sequence
  Description of Artificial Sequence: Synthetic oligonucleotide
ucaugggaaacagauggga

SEQ ID NO: 2784020 - RNA, 19 nt, Artificial Sequence
  Description of Artificial Sequence: Synthetic oligonucleotide
cucagaaccggacacaaga

SEQ ID NO: 2784021 - RNA, 19 nt, Artificial Sequence
  Description of Artificial Sequence: Synthetic oligonucleotide
agaaccggacacaagaugu

SEQ ID NO: 2784022 - RNA, 19 nt, Artificial Sequence
  Description of Artificial Sequence: Synthetic oligonucleotide
aacuuuuccaagcccuaaa

SEQ ID NO: 2784023 - RNA, 19 nt, Artificial Sequence
  Description of Artificial Sequence: Synthetic oligonucleotide
uccguguguuucaaaacac

SEQ ID NO: 2784024 - RNA, 19 nt, Artificial Sequence
  Description of Artificial Sequence: Synthetic oligonucleotide
auuauuaagggcacaugga

SEQ ID NO: 2784025 - RNA, 19 nt, Artificial Sequence
  Description of Artificial Sequence: Synthetic oligonucleotide
uuauuacuaaagacaucaa

SEQ ID NO: 2784026 - RNA, 19 nt, Artificial Sequence
  Description of Artificial Sequence: Synthetic oligonucleotide
uggcuuguucuuuaauaug

SEQ ID NO: 2784027 - RNA, 19 nt, Artificial Sequence
  Description of Artificial Sequence: Synthetic oligonucleotide
aauguacugcuuaggauau

SEQ ID NO: 2784028 - RNA, 19 nt, Artificial Sequence
  Description of Artificial Sequence: Synthetic oligonucleotide
agaaacaaagaggugcaga

SEQ ID NO: 2784029 - RNA, 19 nt, Artificial Sequence
  Description of Artificial Sequence: Synthetic oligonucleotide
cuuaugggacaauaaucuc

SEQ ID NO: 2784030 - RNA, 19 nt, Artificial Sequence
  Description of Artificial Sequence: Synthetic oligonucleotide
auggauauaccaaagucau

SEQ ID NO: 2784031 - RNA, 19 nt, Artificial Sequence
  Description of Artificial Sequence: Synthetic oligonucleotide
auggcuaaauggaaacaac

SEQ ID NO: 2784032 - RNA, 19 nt, Artificial Sequence
  Description of Artificial Sequence: Synthetic oligonucleotide
gauauaccaaagucaugca

SEQ ID NO: 2784033 - RNA, 19 nt, Artificial Sequence
  Description of Artificial Sequence: Synthetic oligonucleotide
aggaauuaagauaauguuu

SEQ ID NO: 2784034 - RNA, 19 nt, Artificial Sequence
  Description of Artificial Sequence: Synthetic oligonucleotide
aagacaucaagcauuucuu

SEQ ID NO: 2784035 - RNA, 19 nt, Artificial Sequence
  Description of Artificial Sequence: Synthetic oligonucleotide
cacuucccauuauuaaggg

SEQ ID NO: 2784036 - RNA, 19 nt, Artificial Sequence
  Description of Artificial Sequence: Synthetic oligonucleotide
ugcuuaggauaugagagaa

SEQ ID NO: 2784037 - RNA, 19 nt, Artificial Sequence
  Description of Artificial Sequence: Synthetic oligonucleotide
uggauauaccaaagucaug

SEQ ID NO: 2784038 - RNA, 19 nt, Artificial Sequence
  Description of Artificial Sequence: Synthetic oligonucleotide
cuagaugaguccuggccug

SEQ ID NO: 2784039 - RNA, 19 nt, Artificial Sequence
  Description of Artificial Sequence: Synthetic oligonucleotide
auaaagcaauaaauaaccu

SEQ ID NO: 2784040 - RNA, 19 nt, Artificial Sequence
  Description of Artificial Sequence: Synthetic oligonucleotide
gcuaaauggaaacaaccca

SEQ ID NO: 2784041 - RNA, 19 nt, Artificial Sequence
  Description of Artificial Sequence: Synthetic oligonucleotide
augaaagcuaauucacuua

SEQ ID NO: 2784042 - RNA, 19 nt, Artificial Sequence
  Description of Artificial Sequence: Synthetic oligonucleotide
acuuuuccaagcccuaaaa

SEQ ID NO: 2784043 - RNA, 19 nt, Artificial Sequence
  Description of Artificial Sequence: Synthetic oligonucleotide
agucaugcaucaugggacu

SEQ ID NO: 2784044 - RNA, 19 nt, Artificial Sequence
  Description of Artificial Sequence: Synthetic oligonucleotide
uaauucacuuaugggacaa

SEQ ID NO: 2784045 - RNA, 19 nt, Artificial Sequence
  Description of Artificial Sequence: Synthetic oligonucleotide
ggcuaaauggaaacaaccc

SEQ ID NO: 2784046 - RNA, 19 nt, Artificial Sequence
  Description of Artificial Sequence: Synthetic oligonucleotide
gcuaauucacuuaugggac

SEQ ID NO: 2784047 - RNA, 19 nt, Artificial Sequence
  Description of Artificial Sequence: Synthetic oligonucleotide
auuaaaaggggccgccuua

SEQ ID NO: 2784048 - RNA, 19 nt, Artificial Sequence
  Description of Artificial Sequence: Synthetic oligonucleotide
ucagaaccggacacaagau

SEQ ID NO: 2784049 - RNA, 19 nt, Artificial Sequence
  Description of Artificial Sequence: Synthetic oligonucleotide
uuucuagaugaguccuggc

SEQ ID NO: 2784050 - RNA, 19 nt, Artificial Sequence
  Description of Artificial Sequence: Synthetic oligonucleotide
ucaugcaucaugggacugc

SEQ ID NO: 2784051 - RNA, 19 nt, Artificial Sequence
  Description of Artificial Sequence: Synthetic oligonucleotide
aaucucagaaccggacaca

SEQ ID NO: 2784052 - RNA, 19 nt, Artificial Sequence
  Description of Artificial Sequence: Synthetic oligonucleotide
gugcagaugacugcagagg

SEQ ID NO: 2784053 - RNA, 19 nt, Artificial Sequence
  Description of Artificial Sequence: Synthetic oligonucleotide
caagcauuucuuccgugug

SEQ ID NO: 2784054 - RNA, 19 nt, Artificial Sequence
  Description of Artificial Sequence: Synthetic oligonucleotide
uuuccagacuggcuuguuc

SEQ ID NO: 2784055 - RNA, 19 nt, Artificial Sequence
  Description of Artificial Sequence: Synthetic oligonucleotide
auucaaaauucagaagaau

SEQ ID NO: 2784056 - RNA, 19 nt, Artificial Sequence
  Description of Artificial Sequence: Synthetic oligonucleotide
agggcacauggauauacca

SEQ ID NO: 2784057 - RNA, 19 nt, Artificial Sequence
  Description of Artificial Sequence: Synthetic oligonucleotide
aguaagaaacaaagaggug

SEQ ID NO: 2784058 - RNA, 19 nt, Artificial Sequence
  Description of Artificial Sequence: Synthetic oligonucleotide
cauuucuuccguguguuuc

SEQ ID NO: 2784059 - RNA, 19 nt, Artificial Sequence
  Description of Artificial Sequence: Synthetic oligonucleotide
auaugagagaaggaauuaa

SEQ ID NO: 2784060 - RNA, 19 nt, Artificial Sequence
  Description of Artificial Sequence: Synthetic oligonucleotide
caagauguacuuuuaacau

SEQ ID NO: 2784061 - RNA, 19 nt, Artificial Sequence
  Description of Artificial Sequence: Synthetic oligonucleotide
cuuaauggcucagagcaga

SEQ ID NO: 2784062 - RNA, 19 nt, Artificial Sequence
  Description of Artificial Sequence: Synthetic oligonucleotide
ucucagaaccggacacaag

SEQ ID NO: 2784063 - RNA, 19 nt, Artificial Sequence
  Description of Artificial Sequence: Synthetic oligonucleotide
gcagauggaaaacuucaug

SEQ ID NO: 2784064 - RNA, 19 nt, Artificial Sequence
  Description of Artificial Sequence: Synthetic oligonucleotide
ucaaaacacuucccauuau

SEQ ID NO: 2784065 - RNA, 19 nt, Artificial Sequence
  Description of Artificial Sequence: Synthetic oligonucleotide
gauaugagagaaggaauua

SEQ ID NO: 2784066 - RNA, 19 nt, Artificial Sequence
  Description of Artificial Sequence: Synthetic oligonucleotide
ccuaauuauucaaaauuca

SEQ ID NO: 2784067 - RNA, 19 nt, Artificial Sequence
  Description of Artificial Sequence: Synthetic oligonucleotide
cagaaccggacacaagaug

SEQ ID NO: 2784068 - RNA, 19 nt, Artificial Sequence
  Description of Artificial Sequence: Synthetic oligonucleotide
uuaauggcucagagcagau

SEQ ID NO: 2784069 - RNA, 19 nt, Artificial Sequence
  Description of Artificial Sequence: Synthetic oligonucleotide
uuaaaaggggccgccuuaa

SEQ ID NO: 2784070 - RNA, 19 nt, Artificial Sequence
  Description of Artificial Sequence: Synthetic oligonucleotide
cuaauucacuuaugggaca

SEQ ID NO: 2784071 - RNA, 19 nt, Artificial Sequence
  Description of Artificial Sequence: Synthetic oligonucleotide
acaaagaggugcagaugac

SEQ ID NO: 2784072 - RNA, 19 nt, Artificial Sequence
  Description of Artificial Sequence: Synthetic oligonucleotide
aagcaauaaauaaccuaau

SEQ ID NO: 2784073 - RNA, 19 nt, Artificial Sequence
  Description of Artificial Sequence: Synthetic oligonucleotide
auauggcuaaauggaaaca

SEQ ID NO: 2784074 - RNA, 19 nt, Artificial Sequence
  Description of Artificial Sequence: Synthetic oligonucleotide
uuccaagcccuaaaaccau

SEQ ID NO: 2784075 - RNA, 19 nt, Artificial Sequence
  Description of Artificial Sequence: Synthetic oligonucleotide
aucaagcauuucuuccgug

SEQ ID NO: 2784076 - RNA, 19 nt, Artificial Sequence
  Description of Artificial Sequence: Synthetic oligonucleotide
gacugcagagguccaugcc

SEQ ID NO: 2784077 - RNA, 19 nt, Artificial Sequence
  Description of Artificial Sequence: Synthetic oligonucleotide
caauaaucucagaaccgga

SEQ ID NO: 2784078 - RNA, 19 nt, Artificial Sequence
  Description of Artificial Sequence: Synthetic oligonucleotide
ggaauuaagauaauguuuu

SEQ ID NO: 2784079 - RNA, 19 nt, Artificial Sequence
  Description of Artificial Sequence: Synthetic oligonucleotide
accaucuuuaacaccauua

SEQ ID NO: 2784080 - RNA, 19 nt, Artificial Sequence
  Description of Artificial Sequence: Synthetic oligonucleotide
aaccaucuuuaacaccauu

SEQ ID NO: 2784081 - RNA, 19 nt, Artificial Sequence
  Description of Artificial Sequence: Synthetic oligonucleotide
aaacagaugggaacugcuu

SEQ ID NO: 2784082 - RNA, 19 nt, Artificial Sequence
  Description of Artificial Sequence: Synthetic oligonucleotide
acaacacaguaagaaacaa

SEQ ID NO: 2784083 - RNA, 19 nt, Artificial Sequence
  Description of Artificial Sequence: Synthetic oligonucleotide
acaacccagacuaauuaaa

SEQ ID NO: 2784084 - RNA, 19 nt, Artificial Sequence
  Description of Artificial Sequence: Synthetic oligonucleotide
uccaagcccuaaaaccauc

SEQ ID NO: 2784085 - RNA, 19 nt, Artificial Sequence
  Description of Artificial Sequence: Synthetic oligonucleotide
gaugaguccuggccugaac

SEQ ID NO: 2784086 - RNA, 19 nt, Artificial Sequence
  Description of Artificial Sequence: Synthetic oligonucleotide
agcccuaaaaccaucuuua

SEQ ID NO: 2784087 - RNA, 19 nt, Artificial Sequence
  Description of Artificial Sequence: Synthetic oligonucleotide
caucuuuaacaccauuaaa

SEQ ID NO: 2784088 - RNA, 19 nt, Artificial Sequence
  Description of Artificial Sequence: Synthetic oligonucleotide
guuucaaaacacuucccau

SEQ ID NO: 2784089 - RNA, 19 nt, Artificial Sequence
  Description of Artificial Sequence: Synthetic oligonucleotide
aaacuucaugggaaacaga

SEQ ID NO: 2784090 - RNA, 19 nt, Artificial Sequence
  Description of Artificial Sequence: Synthetic oligonucleotide
uaauggcucagagcagaug

SEQ ID NO: 2784091 - RNA, 19 nt, Artificial Sequence
  Description of Artificial Sequence: Synthetic oligonucleotide
cucagagcagauggaaaac

SEQ ID NO: 2784092 - RNA, 19 nt, Artificial Sequence
  Description of Artificial Sequence: Synthetic oligonucleotide
guuuucuagaugaguccug

SEQ ID NO: 2784093 - RNA, 19 nt, Artificial Sequence
  Description of Artificial Sequence: Synthetic oligonucleotide
auucacuuaugggacaaua

SEQ ID NO: 2784094 - RNA, 19 nt, Artificial Sequence
  Description of Artificial Sequence: Synthetic oligonucleotide
ggcacauggauauaccaaa

SEQ ID NO: 2784095 - RNA, 19 nt, Artificial Sequence
  Description of Artificial Sequence: Synthetic oligonucleotide
uaacuuuuccaagcccuaa

SEQ ID NO: 2784096 - RNA, 19 nt, Artificial Sequence
  Description of Artificial Sequence: Synthetic oligonucleotide
aggugcagaugacugcaga

SEQ ID NO: 2784097 - RNA, 19 nt, Artificial Sequence
  Description of Artificial Sequence: Synthetic oligonucleotide
cugcuuaggauaugagaga

SEQ ID NO: 2784098 - RNA, 19 nt, Artificial Sequence
  Description of Artificial Sequence: Synthetic oligonucleotide
ggaaacagaugggaacugc

SEQ ID NO: 2784099 - RNA, 19 nt, Artificial Sequence
  Description of Artificial Sequence: Synthetic oligonucleotide
uggaaacaacccagacuaa

SEQ ID NO: 2784100 - RNA, 19 nt, Artificial Sequence
  Description of Artificial Sequence: Synthetic oligonucleotide
caccauuaaaaggggccgc

SEQ ID NO: 2784101 - RNA, 19 nt, Artificial Sequence
  Description of Artificial Sequence: Synthetic oligonucleotide
aauucacuuaugggacaau

SEQ ID NO: 2784102 - RNA, 19 nt, Artificial Sequence
  Description of Artificial Sequence: Synthetic oligonucleotide
uaaaaggggccgccuuaau

SEQ ID NO: 2784103 - RNA, 19 nt, Artificial Sequence
  Description of Artificial Sequence: Synthetic oligonucleotide
aucucagaaccggacacaa

SEQ ID NO: 2784104 - RNA, 19 nt, Artificial Sequence
  Description of Artificial Sequence: Synthetic oligonucleotide
guacugcuuaggauaugag

SEQ ID NO: 2784105 - RNA, 19 nt, Artificial Sequence
  Description of Artificial Sequence: Synthetic oligonucleotide
uggcucagagcagauggaa

SEQ ID NO: 2784106 - RNA, 19 nt, Artificial Sequence
  Description of Artificial Sequence: Synthetic oligonucleotide
gcucagagcagauggaaaa

SEQ ID NO: 2784107 - RNA, 19 nt, Artificial Sequence
  Description of Artificial Sequence: Synthetic oligonucleotide
cccuaaaaccaucuuuaac

SEQ ID NO: 2784108 - RNA, 19 nt, Artificial Sequence
  Description of Artificial Sequence: Synthetic oligonucleotide
cuggcuuguucuuuaauau

SEQ ID NO: 2784109 - RNA, 19 nt, Artificial Sequence
  Description of Artificial Sequence: Synthetic oligonucleotide
accuaagaaugaacaauaa

SEQ ID NO: 2784110 - RNA, 19 nt, Artificial Sequence
  Description of Artificial Sequence: Synthetic oligonucleotide
uccuggccugaaccuaaga

SEQ ID NO: 2784111 - RNA, 19 nt, Artificial Sequence
  Description of Artificial Sequence: Synthetic oligonucleotide
gaaacaacccagacuaauu

SEQ ID NO: 2784112 - RNA, 19 nt, Artificial Sequence
  Description of Artificial Sequence: Synthetic oligonucleotide
ggaaaacuucaugggaaac

SEQ ID NO: 2784113 - RNA, 19 nt, Artificial Sequence
  Description of Artificial Sequence: Synthetic oligonucleotide
aaaccaucuuuaacaccau

SEQ ID NO: 2784114 - RNA, 19 nt, Artificial Sequence
  Description of Artificial Sequence: Synthetic oligonucleotide
auaacuuuuccaagcccua

SEQ ID NO: 2784115 - RNA, 19 nt, Artificial Sequence
  Description of Artificial Sequence: Synthetic oligonucleotide
gacagacaacacaguaaga

SEQ ID NO: 2784116 - RNA, 19 nt, Artificial Sequence
  Description of Artificial Sequence: Synthetic oligonucleotide
ucccauuauuaagggcaca

SEQ ID NO: 2784117 - RNA, 19 nt, Artificial Sequence
  Description of Artificial Sequence: Synthetic oligonucleotide
gcacauggauauaccaaag

SEQ ID NO: 2784118 - RNA, 19 nt, Artificial Sequence
  Description of Artificial Sequence: Synthetic oligonucleotide
uuucuuccguguguuucaa

SEQ ID NO: 2784119 - RNA, 19 nt, Artificial Sequence
  Description of Artificial Sequence: Synthetic oligonucleotide
caaaacacuucccauuauu

SEQ ID NO: 2784120 - RNA, 19 nt, Artificial Sequence
  Description of Artificial Sequence: Synthetic oligonucleotide
agcagauggaaaacuucau

SEQ ID NO: 2784121 - RNA, 19 nt, Artificial Sequence
  Description of Artificial Sequence: Synthetic oligonucleotide
cacauggauauaccaaagu

SEQ ID NO: 2784122 - RNA, 19 nt, Artificial Sequence
  Description of Artificial Sequence: Synthetic oligonucleotide
accggacacaagauguacu

SEQ ID NO: 2784123 - RNA, 19 nt, Artificial Sequence
  Description of Artificial Sequence: Synthetic oligonucleotide
ccaucuuuaacaccauuaa

SEQ ID NO: 2784124 - RNA, 19 nt, Artificial Sequence
  Description of Artificial Sequence: Synthetic oligonucleotide
augggacaauaaucucaga

SEQ ID NO: 2784125 - RNA, 19 nt, Artificial Sequence
  Description of Artificial Sequence: Synthetic oligonucleotide
ccuuaauggcucagagcag

SEQ ID NO: 2784126 - RNA, 19 nt, Artificial Sequence
  Description of Artificial Sequence: Synthetic oligonucleotide
caacccagacuaauuaaau

SEQ ID NO: 2784127 - RNA, 19 nt, Artificial Sequence
  Description of Artificial Sequence: Synthetic oligonucleotide
uucuuccguguguuucaaa

SEQ ID NO: 2784128 - RNA, 19 nt, Artificial Sequence
  Description of Artificial Sequence: Synthetic oligonucleotide
agacuggcuuguucuuuaa

SEQ ID NO: 2784129 - RNA, 19 nt, Artificial Sequence
  Description of Artificial Sequence: Synthetic oligonucleotide
cugcuucaaaggcaaaacu

SEQ ID NO: 2784130 - RNA, 19 nt, Artificial Sequence
  Description of Artificial Sequence: Synthetic oligonucleotide
ggacacaagauguacuuuu

SEQ ID NO: 2784131 - RNA, 19 nt, Artificial Sequence
  Description of Artificial Sequence: Synthetic oligonucleotide
gggaacugcuucaaaggca

SEQ ID NO: 2784132 - RNA, 19 nt, Artificial Sequence
  Description of Artificial Sequence: Synthetic oligonucleotide
gcuuaggauaugagagaag

SEQ ID NO: 2784133 - RNA, 19 nt, Artificial Sequence
  Description of Artificial Sequence: Synthetic oligonucleotide
ccagacuaauuaaaugaaa

SEQ ID NO: 2784134 - RNA, 19 nt, Artificial Sequence
  Description of Artificial Sequence: Synthetic oligonucleotide
uuaagggcacauggauaua

SEQ ID NO: 2784135 - RNA, 19 nt, Artificial Sequence
  Description of Artificial Sequence: Synthetic oligonucleotide
gaaugacagacaacacagu

SEQ ID NO: 2784136 - RNA, 19 nt, Artificial Sequence
  Description of Artificial Sequence: Synthetic oligonucleotide
gucaugcaucaugggacug

SEQ ID NO: 2784137 - RNA, 19 nt, Artificial Sequence
  Description of Artificial Sequence: Synthetic oligonucleotide
cccagacuaauuaaaugaa

SEQ ID NO: 2784138 - RNA, 19 nt, Artificial Sequence
  Description of Artificial Sequence: Synthetic oligonucleotide
ggauaugagagaaggaauu

SEQ ID NO: 2784139 - RNA, 19 nt, Artificial Sequence
  Description of Artificial Sequence: Synthetic oligonucleotide
cagacuggcuuguucuuua

SEQ ID NO: 2784140 - RNA, 19 nt, Artificial Sequence
  Description of Artificial Sequence: Synthetic oligonucleotide
caaagaggugcagaugacu

SEQ ID NO: 2784141 - RNA, 19 nt, Artificial Sequence
  Description of Artificial Sequence: Synthetic oligonucleotide
gaaccggacacaagaugua

SEQ ID NO: 2784142 - RNA, 19 nt, Artificial Sequence
  Description of Artificial Sequence: Synthetic oligonucleotide
ccauuauuaagggcacaug

SEQ ID NO: 2784143 - RNA, 19 nt, Artificial Sequence
  Description of Artificial Sequence: Synthetic oligonucleotide
uuuuccagacuggcuuguu

SEQ ID NO: 2784144 - RNA, 19 nt, Artificial Sequence
  Description of Artificial Sequence: Synthetic oligonucleotide
guucuuuaauauggcuaaa

SEQ ID NO: 2784145 - RNA, 19 nt, Artificial Sequence
  Description of Artificial Sequence: Synthetic oligonucleotide
gggaaacagaugggaacug

SEQ ID NO: 2784146 - RNA, 19 nt, Artificial Sequence
  Description of Artificial Sequence: Synthetic oligonucleotide
ccgccuuaauggcucagag

SEQ ID NO: 2784147 - RNA, 19 nt, Artificial Sequence
  Description of Artificial Sequence: Synthetic oligonucleotide
auggcucagagcagaugga

SEQ ID NO: 2784148 - RNA, 19 nt, Artificial Sequence
  Description of Artificial Sequence: Synthetic oligonucleotide
cagagcagauggaaaacuu

SEQ ID NO: 2784149 - RNA, 19 nt, Artificial Sequence
  Description of Artificial Sequence: Synthetic oligonucleotide
cauuaaaaggggccgccuu

SEQ ID NO: 2784150 - RNA, 19 nt, Artificial Sequence
  Description of Artificial Sequence: Synthetic oligonucleotide
ccuggccugaaccuaagaa

SEQ ID NO: 2784151 - RNA, 19 nt, Artificial Sequence
  Description of Artificial Sequence: Synthetic oligonucleotide
ggaaacaacccagacuaau

SEQ ID NO: 2784152 - RNA, 19 nt, Artificial Sequence
  Description of Artificial Sequence: Synthetic oligonucleotide
cgccuuaauggcucagagc

SEQ ID NO: 2784153 - RNA, 19 nt, Artificial Sequence
  Description of Artificial Sequence: Synthetic oligonucleotide
agaugacugcagaggucca

SEQ ID NO: 2784154 - RNA, 19 nt, Artificial Sequence
  Description of Artificial Sequence: Synthetic oligonucleotide
gggcacauggauauaccaa

SEQ ID NO: 2784155 - RNA, 19 nt, Artificial Sequence
  Description of Artificial Sequence: Synthetic oligonucleotide
ggccugaaccuaagaauga

SEQ ID NO: 2784156 - RNA, 19 nt, Artificial Sequence
  Description of Artificial Sequence: Synthetic oligonucleotide
gcccuaaaaccaucuuuaa

SEQ ID NO: 2784157 - RNA, 19 nt, Artificial Sequence
  Description of Artificial Sequence: Synthetic oligonucleotide
cagaugggaacugcuucaa

SEQ ID NO: 2784158 - RNA, 19 nt, Artificial Sequence
  Description of Artificial Sequence: Synthetic oligonucleotide
guccuggccugaaccuaag

SEQ ID NO: 2784159 - RNA, 19 nt, Artificial Sequence
  Description of Artificial Sequence: Synthetic oligonucleotide
gcagaugacugcagagguc

SEQ ID NO: 2784160 - RNA, 19 nt, Artificial Sequence
  Description of Artificial Sequence: Synthetic oligonucleotide
gagaaggaauuaagauaau

SEQ ID NO: 2784161 - RNA, 19 nt, Artificial Sequence
  Description of Artificial Sequence: Synthetic oligonucleotide
gaacugcuucaaaggcaaa

SEQ ID NO: 2784162 - RNA, 19 nt, Artificial Sequence
  Description of Artificial Sequence: Synthetic oligonucleotide
aggggccgccuuaauggcu

SEQ ID NO: 2784163 - RNA, 19 nt, Artificial Sequence
  Description of Artificial Sequence: Synthetic oligonucleotide
gccugaaccuaagaaugaa

SEQ ID NO: 2784164 - RNA, 19 nt, Artificial Sequence
  Description of Artificial Sequence: Synthetic oligonucleotide
ggggccgccuuaauggcuc

SEQ ID NO: 2784165 - RNA, 19 nt, Artificial Sequence
  Description of Artificial Sequence: Synthetic oligonucleotide
ccaagcccuaaaaccaucu

SEQ ID NO: 2784166 - RNA, 19 nt, Artificial Sequence
  Description of Artificial Sequence: Synthetic oligonucleotide
ccguguguuucaaaacacu

SEQ ID NO: 2784167 - RNA, 19 nt, Artificial Sequence
  Description of Artificial Sequence: Synthetic oligonucleotide
cccauuauuaagggcacau

SEQ ID NO: 2784168 - RNA, 19 nt, Artificial Sequence
  Description of Artificial Sequence: Synthetic oligonucleotide
gccgccuuaauggcucaga

SEQ ID NO: 2784169 - RNA, 19 nt, Artificial Sequence
  Description of Artificial Sequence: Synthetic oligonucleotide
ccggacacaagauguacuu

SEQ ID NO: 2784170 - RNA, 19 nt, Artificial Sequence
  Description of Artificial Sequence: Synthetic oligonucleotide
ggccgccuuaauggcucag

SEQ ID NO: 2784171 - RNA, 19 nt, Artificial Sequence
  Description of Artificial Sequence: Synthetic oligonucleotide
ccauuaaaaggggccgccu

SEQ ID NO: 2784172 - RNA, 19 nt, Artificial Sequence
  Description of Artificial Sequence: Synthetic oligonucleotide
gggccgccuuaauggcuca

SEQ ID NO: 2784173 - RNA, 19 nt, Artificial Sequence
  Description of Artificial Sequence: Synthetic oligonucleotide
cggacacaagauguacuuu

SEQ ID NO: 2784174 - RNA, 19 nt, Artificial Sequence
  Description of Artificial Sequence: Synthetic oligonucleotide
gaaguaaggguucagaugg

SEQ ID NO: 2784175 - RNA, 19 nt, Artificial Sequence
  Description of Artificial Sequence: Synthetic oligonucleotide
auuaaaauguugaauuacc

SEQ ID NO: 2784176 - RNA, 19 nt, Artificial Sequence
  Description of Artificial Sequence: Synthetic oligonucleotide
ucucucaggauucuggugg

SEQ ID NO: 2784177 - RNA, 19 nt, Artificial Sequence
  Description of Artificial Sequence: Synthetic oligonucleotide
aggagcagcagucauauac

SEQ ID NO: 2784178 - RNA, 19 nt, Artificial Sequence
  Description of Artificial Sequence: Synthetic oligonucleotide
ugaaguaccauaauucugu

SEQ ID NO: 2784179 - RNA, 19 nt, Artificial Sequence
  Description of Artificial Sequence: Synthetic oligonucleotide
gauaucacauguccaaagg

SEQ ID NO: 2784180 - RNA, 19 nt, Artificial Sequence
  Description of Artificial Sequence: Synthetic oligonucleotide
aauagaaacagcugucgga

SEQ ID NO: 2784181 - RNA, 19 nt, Artificial Sequence
  Description of Artificial Sequence: Synthetic oligonucleotide
agaaacagcugucggaggc

SEQ ID NO: 2784182 - RNA, 19 nt, Artificial Sequence
  Description of Artificial Sequence: Synthetic oligonucleotide
uaaggguucagauggacag

SEQ ID NO: 2784183 - RNA, 19 nt, Artificial Sequence
  Description of Artificial Sequence: Synthetic oligonucleotide
uauacugacacaacagcug

SEQ ID NO: 2784184 - RNA, 19 nt, Artificial Sequence
  Description of Artificial Sequence: Synthetic oligonucleotide
uaucacauguccaaagggc

SEQ ID NO: 2784185 - RNA, 19 nt, Artificial Sequence
  Description of Artificial Sequence: Synthetic oligonucleotide
agcagucauauacugacac

SEQ ID NO: 2784186 - RNA, 19 nt, Artificial Sequence
  Description of Artificial Sequence: Synthetic oligonucleotide
agagguaucagcaacaaca

SEQ ID NO: 2784187 - RNA, 19 nt, Artificial Sequence
  Description of Artificial Sequence: Synthetic oligonucleotide
uuuucuguagacuccauuc

SEQ ID NO: 2784188 - RNA, 19 nt, Artificial Sequence
  Description of Artificial Sequence: Synthetic oligonucleotide
ucugucuugggauugaauc

SEQ ID NO: 2784189 - RNA, 19 nt, Artificial Sequence
  Description of Artificial Sequence: Synthetic oligonucleotide
cugucuaugguuuggauug

SEQ ID NO: 2784190 - RNA, 19 nt, Artificial Sequence
  Description of Artificial Sequence: Synthetic oligonucleotide
uuuagcauguucuccagcu

SEQ ID NO: 2784191 - RNA, 19 nt, Artificial Sequence
  Description of Artificial Sequence: Synthetic oligonucleotide
auacugacacaacagcugg

SEQ ID NO: 2784192 - RNA, 19 nt, Artificial Sequence
  Description of Artificial Sequence: Synthetic oligonucleotide
aguaccauaauucugucuu

SEQ ID NO: 2784193 - RNA, 19 nt, Artificial Sequence
  Description of Artificial Sequence: Synthetic oligonucleotide
cuaugguuuggauuguugg

SEQ ID NO: 2784194 - RNA, 19 nt, Artificial Sequence
  Description of Artificial Sequence: Synthetic oligonucleotide
uguuggaaagaguaugcag

SEQ ID NO: 2784195 - RNA, 19 nt, Artificial Sequence
  Description of Artificial Sequence: Synthetic oligonucleotide
uggauuguuggaaagagua

SEQ ID NO: 2784196 - RNA, 19 nt, Artificial Sequence
  Description of Artificial Sequence: Synthetic oligonucleotide
cauauacugacacaacagc

SEQ ID NO: 2784197 - RNA, 19 nt, Artificial Sequence
  Description of Artificial Sequence: Synthetic oligonucleotide
ugaaguaaggguucagaug

SEQ ID NO: 2784198 - RNA, 19 nt, Artificial Sequence
  Description of Artificial Sequence: Synthetic oligonucleotide
agauggacagccucacucc

SEQ ID NO: 2784199 - RNA, 19 nt, Artificial Sequence
  Description of Artificial Sequence: Synthetic oligonucleotide
agcaacaacaccuucaaua

SEQ ID NO: 2784200 - RNA, 19 nt, Artificial Sequence
  Description of Artificial Sequence: Synthetic oligonucleotide
uuuggauuguuggaaagag

SEQ ID NO: 2784201 - RNA, 19 nt, Artificial Sequence
  Description of Artificial Sequence: Synthetic oligonucleotide
uguugaauuaccacuucac

SEQ ID NO: 2784202 - RNA, 19 nt, Artificial Sequence
  Description of Artificial Sequence: Synthetic oligonucleotide
auuguuggaaagaguaugc

SEQ ID NO: 2784203 - RNA, 19 nt, Artificial Sequence
  Description of Artificial Sequence: Synthetic oligonucleotide
uggugaaguaccauaauuc

SEQ ID NO: 2784204 - RNA, 19 nt, Artificial Sequence
  Description of Artificial Sequence: Synthetic oligonucleotide
ucugguggauaucacaugu

SEQ ID NO: 2784205 - RNA, 19 nt, Artificial Sequence
  Description of Artificial Sequence: Synthetic oligonucleotide
uugaauuaccacuucacau

SEQ ID NO: 2784206 - RNA, 19 nt, Artificial Sequence
  Description of Artificial Sequence: Synthetic oligonucleotide
aaucguuccugcugucccc

SEQ ID NO: 2784207 - RNA, 19 nt, Artificial Sequence
  Description of Artificial Sequence: Synthetic oligonucleotide
gauuguuggaaagaguaug

SEQ ID NO: 2784208 - RNA, 19 nt, Artificial Sequence
  Description of Artificial Sequence: Synthetic oligonucleotide
gauugaaucguuccugcug

SEQ ID NO: 2784209 - RNA, 19 nt, Artificial Sequence
  Description of Artificial Sequence: Synthetic oligonucleotide
ugguggauaucacaugucc

SEQ ID NO: 2784210 - RNA, 19 nt, Artificial Sequence
  Description of Artificial Sequence: Synthetic oligonucleotide
uccguuagcaucucucagg

SEQ ID NO: 2784211 - RNA, 19 nt, Artificial Sequence
  Description of Artificial Sequence: Synthetic oligonucleotide
auucuggcaaagccaacgc

SEQ ID NO: 2784212 - RNA, 19 nt, Artificial Sequence
  Description of Artificial Sequence: Synthetic oligonucleotide
ugaauuaccacuucacauu

SEQ ID NO: 2784213 - RNA, 19 nt, Artificial Sequence
  Description of Artificial Sequence: Synthetic oligonucleotide
cuugggauugaaucguucc

SEQ ID NO: 2784214 - RNA, 19 nt, Artificial Sequence
  Description of Artificial Sequence: Synthetic oligonucleotide
agaugguucaucugcugcg

SEQ ID NO: 2784215 - RNA, 19 nt, Artificial Sequence
  Description of Artificial Sequence: Synthetic oligonucleotide
ucaucugcugcguuagggg

SEQ ID NO: 2784216 - RNA, 19 nt, Artificial Sequence
  Description of Artificial Sequence: Synthetic oligonucleotide
aacaacaccuucaauagaa

SEQ ID NO: 2784217 - RNA, 19 nt, Artificial Sequence
  Description of Artificial Sequence: Synthetic oligonucleotide
auugaaucguuccugcugu

SEQ ID NO: 2784218 - RNA, 19 nt, Artificial Sequence
  Description of Artificial Sequence: Synthetic oligonucleotide
uucaauagaaacagcuguc

SEQ ID NO: 2784219 - RNA, 19 nt, Artificial Sequence
  Description of Artificial Sequence: Synthetic oligonucleotide
aaagccaacgccccugcug

SEQ ID NO: 2784220 - RNA, 19 nt, Artificial Sequence
  Description of Artificial Sequence: Synthetic oligonucleotide
cugucuugggauugaaucg

SEQ ID NO: 2784221 - RNA, 19 nt, Artificial Sequence
  Description of Artificial Sequence: Synthetic oligonucleotide
uacuggggaauguaggucc

SEQ ID NO: 2784222 - RNA, 19 nt, Artificial Sequence
  Description of Artificial Sequence: Synthetic oligonucleotide
uaacuguugcugcugacca

SEQ ID NO: 2784223 - RNA, 19 nt, Artificial Sequence
  Description of Artificial Sequence: Synthetic oligonucleotide
ggaaagaguaugcaggugc

SEQ ID NO: 2784224 - RNA, 19 nt, Artificial Sequence
  Description of Artificial Sequence: Synthetic oligonucleotide
aggucccuugcauaggagc

SEQ ID NO: 2784225 - RNA, 19 nt, Artificial Sequence
  Description of Artificial Sequence: Synthetic oligonucleotide
uaugguuuggauuguugga

SEQ ID NO: 2784226 - RNA, 19 nt, Artificial Sequence
  Description of Artificial Sequence: Synthetic oligonucleotide
aaagaugguucaucugcug

SEQ ID NO: 2784227 - RNA, 19 nt, Artificial Sequence
  Description of Artificial Sequence: Synthetic oligonucleotide
ucuaugguuuggauuguug

SEQ ID NO: 2784228 - RNA, 19 nt, Artificial Sequence
  Description of Artificial Sequence: Synthetic oligonucleotide
aaagggcuuuagcauguuc

SEQ ID NO: 2784229 - RNA, 19 nt, Artificial Sequence
  Description of Artificial Sequence: Synthetic oligonucleotide
caauagaaacagcugucgg

SEQ ID NO: 2784230 - RNA, 19 nt, Artificial Sequence
  Description of Artificial Sequence: Synthetic oligonucleotide
acaacagcuggugaaguac

SEQ ID NO: 2784231 - RNA, 19 nt, Artificial Sequence
  Description of Artificial Sequence: Synthetic oligonucleotide
uguucauugggugugucca

SEQ ID NO: 2784232 - RNA, 19 nt, Artificial Sequence
  Description of Artificial Sequence: Synthetic oligonucleotide
uuagcaucucucaggauuc

SEQ ID NO: 2784233 - RNA, 19 nt, Artificial Sequence
  Description of Artificial Sequence: Synthetic oligonucleotide
gaaagaguaugcaggugcg

SEQ ID NO: 2784234 - RNA, 19 nt, Artificial Sequence
  Description of Artificial Sequence: Synthetic oligonucleotide
uguccugggagugaagggg

SEQ ID NO: 2784235 - RNA, 19 nt, Artificial Sequence
  Description of Artificial Sequence: Synthetic oligonucleotide
uaccauaauucugucuugg

SEQ ID NO: 2784236 - RNA, 19 nt, Artificial Sequence
  Description of Artificial Sequence: Synthetic oligonucleotide
aagaguaugcaggugcgug

SEQ ID NO: 2784237 - RNA, 19 nt, Artificial Sequence
  Description of Artificial Sequence: Synthetic oligonucleotide
agcugucggaggcacaggc

SEQ ID NO: 2784238 - RNA, 19 nt, Artificial Sequence
  Description of Artificial Sequence: Synthetic oligonucleotide
gcaacaacaccuucaauag

SEQ ID NO: 2784239 - RNA, 19 nt, Artificial Sequence
  Description of Artificial Sequence: Synthetic oligonucleotide
uugaaguaaggguucagau

SEQ ID NO: 2784240 - RNA, 19 nt, Artificial Sequence
  Description of Artificial Sequence: Synthetic oligonucleotide
ugugaucacagcaccauua

SEQ ID NO: 2784241 - RNA, 19 nt, Artificial Sequence
  Description of Artificial Sequence: Synthetic oligonucleotide
uuggaaagaguaugcaggu

SEQ ID NO: 2784242 - RNA, 19 nt, Artificial Sequence
  Description of Artificial Sequence: Synthetic oligonucleotide
gaaucguuccugcuguccc

SEQ ID NO: 2784243 - RNA, 19 nt, Artificial Sequence
  Description of Artificial Sequence: Synthetic oligonucleotide
agguaucagcaacaacacc

SEQ ID NO: 2784244 - RNA, 19 nt, Artificial Sequence
  Description of Artificial Sequence: Synthetic oligonucleotide
aggguucagauggacagcc

SEQ ID NO: 2784245 - RNA, 19 nt, Artificial Sequence
  Description of Artificial Sequence: Synthetic oligonucleotide
agcaccauuaaaauguuga

SEQ ID NO: 2784246 - RNA, 19 nt, Artificial Sequence
  Description of Artificial Sequence: Synthetic oligonucleotide
auguaggucccuugcauag

SEQ ID NO: 2784247 - RNA, 19 nt, Artificial Sequence
  Description of Artificial Sequence: Synthetic oligonucleotide
aaauguugaauuaccacuu

SEQ ID NO: 2784248 - RNA, 19 nt, Artificial Sequence
  Description of Artificial Sequence: Synthetic oligonucleotide
cauucuggcaaagccaacg

SEQ ID NO: 2784249 - RNA, 19 nt, Artificial Sequence
  Description of Artificial Sequence: Synthetic oligonucleotide
gaucacagcaccauuaaaa

SEQ ID NO: 2784250 - RNA, 19 nt, Artificial Sequence
  Description of Artificial Sequence: Synthetic oligonucleotide
agcgaaagaugguucaucu

SEQ ID NO: 2784251 - RNA, 19 nt, Artificial Sequence
  Description of Artificial Sequence: Synthetic oligonucleotide
aaguaccauaauucugucu

SEQ ID NO: 2784252 - RNA, 19 nt, Artificial Sequence
  Description of Artificial Sequence: Synthetic oligonucleotide
aagccaacgccccugcuga

SEQ ID NO: 2784253 - RNA, 19 nt, Artificial Sequence
  Description of Artificial Sequence: Synthetic oligonucleotide
accauaauucugucuuggg

SEQ ID NO: 2784254 - RNA, 19 nt, Artificial Sequence
  Description of Artificial Sequence: Synthetic oligonucleotide
aauguaggucccuugcaua

SEQ ID NO: 2784255 - RNA, 19 nt, Artificial Sequence
  Description of Artificial Sequence: Synthetic oligonucleotide
uugcauaggagcagcaguc

SEQ ID NO: 2784256 - RNA, 19 nt, Artificial Sequence
  Description of Artificial Sequence: Synthetic oligonucleotide
guugaauuaccacuucaca

SEQ ID NO: 2784257 - RNA, 19 nt, Artificial Sequence
  Description of Artificial Sequence: Synthetic oligonucleotide
caacaccuucaauagaaac

SEQ ID NO: 2784258 - RNA, 19 nt, Artificial Sequence
  Description of Artificial Sequence: Synthetic oligonucleotide
uugggauugaaucguuccu

SEQ ID NO: 2784259 - RNA, 19 nt, Artificial Sequence
  Description of Artificial Sequence: Synthetic oligonucleotide
uuguuggcugcauugacau

SEQ ID NO: 2784260 - RNA, 19 nt, Artificial Sequence
  Description of Artificial Sequence: Synthetic oligonucleotide
accuucaauagaaacagcu

SEQ ID NO: 2784261 - RNA, 19 nt, Artificial Sequence
  Description of Artificial Sequence: Synthetic oligonucleotide
auauacugacacaacagcu

SEQ ID NO: 2784262 - RNA, 19 nt, Artificial Sequence
  Description of Artificial Sequence: Synthetic oligonucleotide
aaacagcugucggaggcac

SEQ ID NO: 2784263 - RNA, 19 nt, Artificial Sequence
  Description of Artificial Sequence: Synthetic oligonucleotide
auugacaugggguggucca

SEQ ID NO: 2784264 - RNA, 19 nt, Artificial Sequence
  Description of Artificial Sequence: Synthetic oligonucleotide
agggcuuuagcauguucuc

SEQ ID NO: 2784265 - RNA, 19 nt, Artificial Sequence
  Description of Artificial Sequence: Synthetic oligonucleotide
aguaaggguucagauggac

SEQ ID NO: 2784266 - RNA, 19 nt, Artificial Sequence
  Description of Artificial Sequence: Synthetic oligonucleotide
auguugaauuaccacuuca

SEQ ID NO: 2784267 - RNA, 19 nt, Artificial Sequence
  Description of Artificial Sequence: Synthetic oligonucleotide
ugacacaacagcuggugaa

SEQ ID NO: 2784268 - RNA, 19 nt, Artificial Sequence
  Description of Artificial Sequence: Synthetic oligonucleotide
cuaacuguugcugcugacc

SEQ ID NO: 2784269 - RNA, 19 nt, Artificial Sequence
  Description of Artificial Sequence: Synthetic oligonucleotide
uucuggcaaagccaacgcc

SEQ ID NO: 2784270 - RNA, 19 nt, Artificial Sequence
  Description of Artificial Sequence: Synthetic oligonucleotide
ucaggauucugguggauau

SEQ ID NO: 2784271 - RNA, 19 nt, Artificial Sequence
  Description of Artificial Sequence: Synthetic oligonucleotide
uagaaacagcugucggagg

SEQ ID NO: 2784272 - RNA, 19 nt, Artificial Sequence
  Description of Artificial Sequence: Synthetic oligonucleotide
uguagacuccauucuggca

SEQ ID NO: 2784273 - RNA, 19 nt, Artificial Sequence
  Description of Artificial Sequence: Synthetic oligonucleotide
gacacaacagcuggugaag

SEQ ID NO: 2784274 - RNA, 19 nt, Artificial Sequence
  Description of Artificial Sequence: Synthetic oligonucleotide
gacauggggugguccaugg

SEQ ID NO: 2784275 - RNA, 19 nt, Artificial Sequence
  Description of Artificial Sequence: Synthetic oligonucleotide
auugaaguaaggguucaga

SEQ ID NO: 2784276 - RNA, 19 nt, Artificial Sequence
  Description of Artificial Sequence: Synthetic oligonucleotide
uuggauuguuggaaagagu

SEQ ID NO: 2784277 - RNA, 19 nt, Artificial Sequence
  Description of Artificial Sequence: Synthetic oligonucleotide
cuguagacuccauucuggc

SEQ ID NO: 2784278 - RNA, 19 nt, Artificial Sequence
  Description of Artificial Sequence: Synthetic oligonucleotide
gcagcagucauauacugac

SEQ ID NO: 2784279 - RNA, 19 nt, Artificial Sequence
  Description of Artificial Sequence: Synthetic oligonucleotide
ugggauugaaucguuccug

SEQ ID NO: 2784280 - RNA, 19 nt, Artificial Sequence
  Description of Artificial Sequence: Synthetic oligonucleotide
caacagcuggugaaguacc

SEQ ID NO: 2784281 - RNA, 19 nt, Artificial Sequence
  Description of Artificial Sequence: Synthetic oligonucleotide
ugucuugggauugaaucgu

SEQ ID NO: 2784282 - RNA, 19 nt, Artificial Sequence
  Description of Artificial Sequence: Synthetic oligonucleotide
cacgauguuuguuggcugc

SEQ ID NO: 2784283 - RNA, 19 nt, Artificial Sequence
  Description of Artificial Sequence: Synthetic oligonucleotide
cgaaagaugguucaucugc

SEQ ID NO: 2784284 - RNA, 19 nt, Artificial Sequence
  Description of Artificial Sequence: Synthetic oligonucleotide
auaauucugucuugggauu

SEQ ID NO: 2784285 - RNA, 19 nt, Artificial Sequence
  Description of Artificial Sequence: Synthetic oligonucleotide
agucauauacugacacaac

SEQ ID NO: 2784286 - RNA, 19 nt, Artificial Sequence
  Description of Artificial Sequence: Synthetic oligonucleotide
acugacacaacagcuggug

SEQ ID NO: 2784287 - RNA, 19 nt, Artificial Sequence
  Description of Artificial Sequence: Synthetic oligonucleotide
auuggguguguccacugcu

SEQ ID NO: 2784288 - RNA, 19 nt, Artificial Sequence
  Description of Artificial Sequence: Synthetic oligonucleotide
uggacagccucacuccugu

SEQ ID NO: 2784289 - RNA, 19 nt, Artificial Sequence
  Description of Artificial Sequence: Synthetic oligonucleotide
gagguaucagcaacaacac

SEQ ID NO: 2784290 - RNA, 19 nt, Artificial Sequence
  Description of Artificial Sequence: Synthetic oligonucleotide
agaguaugcaggugcgugu

SEQ ID NO: 2784291 - RNA, 19 nt, Artificial Sequence
  Description of Artificial Sequence: Synthetic oligonucleotide
cugaccacugcuguccugg

SEQ ID NO: 2784292 - RNA, 19 nt, Artificial Sequence
  Description of Artificial Sequence: Synthetic oligonucleotide
uucugguggauaucacaug

SEQ ID NO: 2784293 - RNA, 19 nt, Artificial Sequence
  Description of Artificial Sequence: Synthetic oligonucleotide
aggauucugguggauauca

SEQ ID NO: 2784294 - RNA, 19 nt, Artificial Sequence
  Description of Artificial Sequence: Synthetic oligonucleotide
auaggagcagcagucauau

SEQ ID NO: 2784295 - RNA, 19 nt, Artificial Sequence
  Description of Artificial Sequence: Synthetic oligonucleotide
cacugcuaacuguugcugc

SEQ ID NO: 2784296 - RNA, 19 nt, Artificial Sequence
  Description of Artificial Sequence: Synthetic oligonucleotide
gugaaguaccauaauucug

SEQ ID NO: 2784297 - RNA, 19 nt, Artificial Sequence
  Description of Artificial Sequence: Synthetic oligonucleotide
uuguuggaaagaguaugca

SEQ ID NO: 2784298 - RNA, 19 nt, Artificial Sequence
  Description of Artificial Sequence: Synthetic oligonucleotide
acuccguuagcaucucuca

SEQ ID NO: 2784299 - RNA, 19 nt, Artificial Sequence
  Description of Artificial Sequence: Synthetic oligonucleotide
gaaguaccauaauucuguc

SEQ ID NO: 2784300 - RNA, 19 nt, Artificial Sequence
  Description of Artificial Sequence: Synthetic oligonucleotide
uguaggucccuugcauagg

SEQ ID NO: 2784301 - RNA, 19 nt, Artificial Sequence
  Description of Artificial Sequence: Synthetic oligonucleotide
ucuugggauugaaucguuc

SEQ ID NO: 2784302 - RNA, 19 nt, Artificial Sequence
  Description of Artificial Sequence: Synthetic oligonucleotide
ugcguguucauugggugug

SEQ ID NO: 2784303 - RNA, 19 nt, Artificial Sequence
  Description of Artificial Sequence: Synthetic oligonucleotide
uuagcauguucuccagcuc

SEQ ID NO: 2784304 - RNA, 19 nt, Artificial Sequence
  Description of Artificial Sequence: Synthetic oligonucleotide
gguaucagcaacaacaccu

SEQ ID NO: 2784305 - RNA, 19 nt, Artificial Sequence
  Description of Artificial Sequence: Synthetic oligonucleotide
ugguuuggauuguuggaaa

SEQ ID NO: 2784306 - RNA, 19 nt, Artificial Sequence
  Description of Artificial Sequence: Synthetic oligonucleotide
auucugguggauaucacau

SEQ ID NO: 2784307 - RNA, 19 nt, Artificial Sequence
  Description of Artificial Sequence: Synthetic oligonucleotide
ucauuggguguguccacug

SEQ ID NO: 2784308 - RNA, 19 nt, Artificial Sequence
  Description of Artificial Sequence: Synthetic oligonucleotide
aaagaguaugcaggugcgu

SEQ ID NO: 2784309 - RNA, 19 nt, Artificial Sequence
  Description of Artificial Sequence: Synthetic oligonucleotide
guaccauaauucugucuug

SEQ ID NO: 2784310 - RNA, 19 nt, Artificial Sequence
  Description of Artificial Sequence: Synthetic oligonucleotide
guguucauugggugugucc

SEQ ID NO: 2784311 - RNA, 19 nt, Artificial Sequence
  Description of Artificial Sequence: Synthetic oligonucleotide
gagugaaggggccaccguc

SEQ ID NO: 2784312 - RNA, 19 nt, Artificial Sequence
  Description of Artificial Sequence: Synthetic oligonucleotide
uguccacugcuaacuguug

SEQ ID NO: 2784313 - RNA, 19 nt, Artificial Sequence
  Description of Artificial Sequence: Synthetic oligonucleotide
aguaugcaggugcguguuc

SEQ ID NO: 2784314 - RNA, 19 nt, Artificial Sequence
  Description of Artificial Sequence: Synthetic oligonucleotide
cuguccugggagugaaggg

SEQ ID NO: 2784315 - RNA, 19 nt, Artificial Sequence
  Description of Artificial Sequence: Synthetic oligonucleotide
uaucagcaacaacaccuuc

SEQ ID NO: 2784316 - RNA, 19 nt, Artificial Sequence
  Description of Artificial Sequence: Synthetic oligonucleotide
ucacuccugucuaugguuu

SEQ ID NO: 2784317 - RNA, 19 nt, Artificial Sequence
  Description of Artificial Sequence: Synthetic oligonucleotide
augguuuggauuguuggaa

SEQ ID NO: 2784318 - RNA, 19 nt, Artificial Sequence
  Description of Artificial Sequence: Synthetic oligonucleotide
ucacauguccaaagggcuu

SEQ ID NO: 2784319 - RNA, 19 nt, Artificial Sequence
  Description of Artificial Sequence: Synthetic oligonucleotide
ugcugacuccguuagcauc

SEQ ID NO: 2784320 - RNA, 19 nt, Artificial Sequence
  Description of Artificial Sequence: Synthetic oligonucleotide
aacgccccugcugacuccg

SEQ ID NO: 2784321 - RNA, 19 nt, Artificial Sequence
  Description of Artificial Sequence: Synthetic oligonucleotide
cagucauauacugacacaa

SEQ ID NO: 2784322 - RNA, 19 nt, Artificial Sequence
  Description of Artificial Sequence: Synthetic oligonucleotide
ggcacaggcguguacuggg

SEQ ID NO: 2784323 - RNA, 19 nt, Artificial Sequence
  Description of Artificial Sequence: Synthetic oligonucleotide
gggaauguaggucccuugc

SEQ ID NO: 2784324 - RNA, 19 nt, Artificial Sequence
  Description of Artificial Sequence: Synthetic oligonucleotide
acuccugucuaugguuugg

SEQ ID NO: 2784325 - RNA, 19 nt, Artificial Sequence
  Description of Artificial Sequence: Synthetic oligonucleotide
gggauugaaucguuccugc

SEQ ID NO: 2784326 - RNA, 19 nt, Artificial Sequence
  Description of Artificial Sequence: Synthetic oligonucleotide
uggaaagaguaugcaggug

SEQ ID NO: 2784327 - RNA, 19 nt, Artificial Sequence
  Description of Artificial Sequence: Synthetic oligonucleotide
acuggggaauguagguccc

SEQ ID NO: 2784328 - RNA, 19 nt, Artificial Sequence
  Description of Artificial Sequence: Synthetic oligonucleotide
ugcauugacaugggguggu

SEQ ID NO: 2784329 - RNA, 19 nt, Artificial Sequence
  Description of Artificial Sequence: Synthetic oligonucleotide
gagagguaucagcaacaac

SEQ ID NO: 2784330 - RNA, 19 nt, Artificial Sequence
  Description of Artificial Sequence: Synthetic oligonucleotide
cugcugaccacugcugucc

SEQ ID NO: 2784331 - RNA, 19 nt, Artificial Sequence
  Description of Artificial Sequence: Synthetic oligonucleotide
uucagauggacagccucac

SEQ ID NO: 2784332 - RNA, 19 nt, Artificial Sequence
  Description of Artificial Sequence: Synthetic oligonucleotide
ggugaaguaccauaauucu

SEQ ID NO: 2784333 - RNA, 19 nt, Artificial Sequence
  Description of Artificial Sequence: Synthetic oligonucleotide
uucauuggguguguccacu

SEQ ID NO: 2784334 - RNA, 19 nt, Artificial Sequence
  Description of Artificial Sequence: Synthetic oligonucleotide
uaggucccuugcauaggag

SEQ ID NO: 2784335 - RNA, 19 nt, Artificial Sequence
  Description of Artificial Sequence: Synthetic oligonucleotide
ggugcguguucauugggug

SEQ ID NO: 2784336 - RNA, 19 nt, Artificial Sequence
  Description of Artificial Sequence: Synthetic oligonucleotide
cuccguuagcaucucucag

SEQ ID NO: 2784337 - RNA, 19 nt, Artificial Sequence
  Description of Artificial Sequence: Synthetic oligonucleotide
gaauguaggucccuugcau

SEQ ID NO: 2784338 - RNA, 19 nt, Artificial Sequence
  Description of Artificial Sequence: Synthetic oligonucleotide
ggcuuuagcauguucucca

SEQ ID NO: 2784339 - RNA, 19 nt, Artificial Sequence
  Description of Artificial Sequence: Synthetic oligonucleotide
guaggucccuugcauagga

SEQ ID NO: 2784340 - RNA, 19 nt, Artificial Sequence
  Description of Artificial Sequence: Synthetic oligonucleotide
ggugggugugaucacagca

SEQ ID NO: 2784341 - RNA, 19 nt, Artificial Sequence
  Description of Artificial Sequence: Synthetic oligonucleotide
gcaucucucaggauucugg

SEQ ID NO: 2784342 - RNA, 19 nt, Artificial Sequence
  Description of Artificial Sequence: Synthetic oligonucleotide
gacuccguuagcaucucuc

SEQ ID NO: 2784343 - RNA, 19 nt, Artificial Sequence
  Description of Artificial Sequence: Synthetic oligonucleotide
ucagauggacagccucacu

SEQ ID NO: 2784344 - RNA, 19 nt, Artificial Sequence
  Description of Artificial Sequence: Synthetic oligonucleotide
uggguguguccacugcuaa

SEQ ID NO: 2784345 - RNA, 19 nt, Artificial Sequence
  Description of Artificial Sequence: Synthetic oligonucleotide
ugucggaggcacaggcgug

SEQ ID NO: 2784346 - RNA, 19 nt, Artificial Sequence
  Description of Artificial Sequence: Synthetic oligonucleotide
uuggguguguccacugcua

SEQ ID NO: 2784347 - RNA, 19 nt, Artificial Sequence
  Description of Artificial Sequence: Synthetic oligonucleotide
ugguucaucugcugcguua

SEQ ID NO: 2784348 - RNA, 19 nt, Artificial Sequence
  Description of Artificial Sequence: Synthetic oligonucleotide
cauugacaugggguggucc

SEQ ID NO: 2784349 - RNA, 19 nt, Artificial Sequence
  Description of Artificial Sequence: Synthetic oligonucleotide
uccugggagugaaggggcc

SEQ ID NO: 2784350 - RNA, 19 nt, Artificial Sequence
  Description of Artificial Sequence: Synthetic oligonucleotide
ugaccacugcuguccuggg

SEQ ID NO: 2784351 - RNA, 19 nt, Artificial Sequence
  Description of Artificial Sequence: Synthetic oligonucleotide
guaaggguucagauggaca

SEQ ID NO: 2784352 - RNA, 19 nt, Artificial Sequence
  Description of Artificial Sequence: Synthetic oligonucleotide
uccugcuguccccagcgaa

SEQ ID NO: 2784353 - RNA, 19 nt, Artificial Sequence
  Description of Artificial Sequence: Synthetic oligonucleotide
gaggcacaggcguguacug

SEQ ID NO: 2784354 - RNA, 19 nt, Artificial Sequence
  Description of Artificial Sequence: Synthetic oligonucleotide
cauugaaguaaggguucag

SEQ ID NO: 2784355 - RNA, 19 nt, Artificial Sequence
  Description of Artificial Sequence: Synthetic oligonucleotide
cugcauugacauggggugg

SEQ ID NO: 2784356 - RNA, 19 nt, Artificial Sequence
  Description of Artificial Sequence: Synthetic oligonucleotide
gaaagaugguucaucugcu

SEQ ID NO: 2784357 - RNA, 19 nt, Artificial Sequence
  Description of Artificial Sequence: Synthetic oligonucleotide
guugcugcugaccacugcu

SEQ ID NO: 2784358 - RNA, 19 nt, Artificial Sequence
  Description of Artificial Sequence: Synthetic oligonucleotide
ucccuugcauaggagcagc

SEQ ID NO: 2784359 - RNA, 19 nt, Artificial Sequence
  Description of Artificial Sequence: Synthetic oligonucleotide
acagccucacuccugucua

SEQ ID NO: 2784360 - RNA, 19 nt, Artificial Sequence
  Description of Artificial Sequence: Synthetic oligonucleotide
uagacuccauucuggcaaa

SEQ ID NO: 2784361 - RNA, 19 nt, Artificial Sequence
  Description of Artificial Sequence: Synthetic oligonucleotide
aaggggccaccgucugggg

SEQ ID NO: 2784362 - RNA, 19 nt, Artificial Sequence
  Description of Artificial Sequence: Synthetic oligonucleotide
cugguggauaucacauguc

SEQ ID NO: 2784363 - RNA, 19 nt, Artificial Sequence
  Description of Artificial Sequence: Synthetic oligonucleotide
guucagauggacagccuca

SEQ ID NO: 2784364 - RNA, 19 nt, Artificial Sequence
  Description of Artificial Sequence: Synthetic oligonucleotide
gggcccacgauguuuguug

SEQ ID NO: 2784365 - RNA, 19 nt, Artificial Sequence
  Description of Artificial Sequence: Synthetic oligonucleotide
acaggcguguacuggggaa

SEQ ID NO: 2784366 - RNA, 19 nt, Artificial Sequence
  Description of Artificial Sequence: Synthetic oligonucleotide
ggggagagguaucagcaac

SEQ ID NO: 2784367 - RNA, 19 nt, Artificial Sequence
  Description of Artificial Sequence: Synthetic oligonucleotide
guucauuggguguguccac

SEQ ID NO: 2784368 - RNA, 19 nt, Artificial Sequence
  Description of Artificial Sequence: Synthetic oligonucleotide
gcaggugcguguucauugg

SEQ ID NO: 2784369 - RNA, 19 nt, Artificial Sequence
  Description of Artificial Sequence: Synthetic oligonucleotide
ugacauggggugguccaug

SEQ ID NO: 2784370 - RNA, 19 nt, Artificial Sequence
  Description of Artificial Sequence: Synthetic oligonucleotide
caggugcguguucauuggg

SEQ ID NO: 2784371 - RNA, 19 nt, Artificial Sequence
  Description of Artificial Sequence: Synthetic oligonucleotide
guaugcaggugcguguuca

SEQ ID NO: 2784372 - RNA, 19 nt, Artificial Sequence
  Description of Artificial Sequence: Synthetic oligonucleotide
cuguccccagcgaaagaug

SEQ ID NO: 2784373 - RNA, 19 nt, Artificial Sequence
  Description of Artificial Sequence: Synthetic oligonucleotide
cagcaccauuaaaauguug

SEQ ID NO: 2784374 - RNA, 19 nt, Artificial Sequence
  Description of Artificial Sequence: Synthetic oligonucleotide
uccugucuaugguuuggau

SEQ ID NO: 2784375 - RNA, 19 nt, Artificial Sequence
  Description of Artificial Sequence: Synthetic oligonucleotide
aggcacaggcguguacugg

SEQ ID NO: 2784376 - RNA, 19 nt, Artificial Sequence
  Description of Artificial Sequence: Synthetic oligonucleotide
aaguaaggguucagaugga

SEQ ID NO: 2784377 - RNA, 19 nt, Artificial Sequence
  Description of Artificial Sequence: Synthetic oligonucleotide
cauaggagcagcagucaua

SEQ ID NO: 2784378 - RNA, 19 nt, Artificial Sequence
  Description of Artificial Sequence: Synthetic oligonucleotide
uaugcaggugcguguucau

SEQ ID NO: 2784379 - RNA, 19 nt, Artificial Sequence
  Description of Artificial Sequence: Synthetic oligonucleotide
guacuggggaauguagguc

SEQ ID NO: 2784380 - RNA, 19 nt, Artificial Sequence
  Description of Artificial Sequence: Synthetic oligonucleotide
agcagcagucauauacuga

SEQ ID NO: 2784381 - RNA, 19 nt, Artificial Sequence
  Description of Artificial Sequence: Synthetic oligonucleotide
ggaauguaggucccuugca

SEQ ID NO: 2784382 - RNA, 19 nt, Artificial Sequence
  Description of Artificial Sequence: Synthetic oligonucleotide
ggggccaccgucuggggag

SEQ ID NO: 2784383 - RNA, 19 nt, Artificial Sequence
  Description of Artificial Sequence: Synthetic oligonucleotide
ugguccaugguggguguga

SEQ ID NO: 2784384 - RNA, 19 nt, Artificial Sequence
  Description of Artificial Sequence: Synthetic oligonucleotide
aauuaccacuucacauuuu

SEQ ID NO: 2784385 - RNA, 19 nt, Artificial Sequence
  Description of Artificial Sequence: Synthetic oligonucleotide
ccauaauucugucuuggga

SEQ ID NO: 2784386 - RNA, 19 nt, Artificial Sequence
  Description of Artificial Sequence: Synthetic oligonucleotide
uccccagcgaaagaugguu

SEQ ID NO: 2784387 - RNA, 19 nt, Artificial Sequence
  Description of Artificial Sequence: Synthetic oligonucleotide
acacaacagcuggugaagu

SEQ ID NO: 2784388 - RNA, 19 nt, Artificial Sequence
  Description of Artificial Sequence: Synthetic oligonucleotide
caacaacaccuucaauaga

SEQ ID NO: 2784389 - RNA, 19 nt, Artificial Sequence
  Description of Artificial Sequence: Synthetic oligonucleotide
ugucuaugguuuggauugu

SEQ ID NO: 2784390 - RNA, 19 nt, Artificial Sequence
  Description of Artificial Sequence: Synthetic oligonucleotide
cugacacaacagcugguga

SEQ ID NO: 2784391 - RNA, 19 nt, Artificial Sequence
  Description of Artificial Sequence: Synthetic oligonucleotide
uugaaucguuccugcuguc

SEQ ID NO: 2784392 - RNA, 19 nt, Artificial Sequence
  Description of Artificial Sequence: Synthetic oligonucleotide
ggcccacgauguuuguugg

SEQ ID NO: 2784393 - RNA, 19 nt, Artificial Sequence
  Description of Artificial Sequence: Synthetic oligonucleotide
gccucacuccugucuaugg

SEQ ID NO: 2784394 - RNA, 19 nt, Artificial Sequence
  Description of Artificial Sequence: Synthetic oligonucleotide
uggcaaagccaacgccccu

SEQ ID NO: 2784395 - RNA, 19 nt, Artificial Sequence
  Description of Artificial Sequence: Synthetic oligonucleotide
ugacuccguuagcaucucu

SEQ ID NO: 2784396 - RNA, 19 nt, Artificial Sequence
  Description of Artificial Sequence: Synthetic oligonucleotide
gugaaggggccaccgucug

SEQ ID NO: 2784397 - RNA, 19 nt, Artificial Sequence
  Description of Artificial Sequence: Synthetic oligonucleotide
gucccuugcauaggagcag

SEQ ID NO: 2784398 - RNA, 19 nt, Artificial Sequence
  Description of Artificial Sequence: Synthetic oligonucleotide
agcaucucucaggauucug

SEQ ID NO: 2784399 - RNA, 19 nt, Artificial Sequence
  Description of Artificial Sequence: Synthetic oligonucleotide
accgucuggggagagguau

SEQ ID NO: 2784400 - RNA, 19 nt, Artificial Sequence
  Description of Artificial Sequence: Synthetic oligonucleotide
ugcuguccccagcgaaaga

SEQ ID NO: 2784401 - RNA, 19 nt, Artificial Sequence
  Description of Artificial Sequence: Synthetic oligonucleotide
gguggauaucacaugucca

SEQ ID NO: 2784402 - RNA, 19 nt, Artificial Sequence
  Description of Artificial Sequence: Synthetic oligonucleotide
cagcgaaagaugguucauc

SEQ ID NO: 2784403 - RNA, 19 nt, Artificial Sequence
  Description of Artificial Sequence: Synthetic oligonucleotide
gcagucauauacugacaca

SEQ ID NO: 2784404 - RNA, 19 nt, Artificial Sequence
  Description of Artificial Sequence: Synthetic oligonucleotide
gcgaaagaugguucaucug

SEQ ID NO: 2784405 - RNA, 19 nt, Artificial Sequence
  Description of Artificial Sequence: Synthetic oligonucleotide
acaacaccuucaauagaaa

SEQ ID NO: 2784406 - RNA, 19 nt, Artificial Sequence
  Description of Artificial Sequence: Synthetic oligonucleotide
gcaccauuaaaauguugaa

SEQ ID NO: 2784407 - RNA, 19 nt, Artificial Sequence
  Description of Artificial Sequence: Synthetic oligonucleotide
gauguuuguuggcugcauu

SEQ ID NO: 2784408 - RNA, 19 nt, Artificial Sequence
  Description of Artificial Sequence: Synthetic oligonucleotide
agcauguucuccagcuccu

SEQ ID NO: 2784409 - RNA, 19 nt, Artificial Sequence
  Description of Artificial Sequence: Synthetic oligonucleotide
cuggugaaguaccauaauu

SEQ ID NO: 2784410 - RNA, 19 nt, Artificial Sequence
  Description of Artificial Sequence: Synthetic oligonucleotide
acgauguuuguuggcugca

SEQ ID NO: 2784411 - RNA, 19 nt, Artificial Sequence
  Description of Artificial Sequence: Synthetic oligonucleotide
aggugcguguucauugggu

SEQ ID NO: 2784412 - RNA, 19 nt, Artificial Sequence
  Description of Artificial Sequence: Synthetic oligonucleotide
gggagugaaggggccaccg

SEQ ID NO: 2784413 - RNA, 19 nt, Artificial Sequence
  Description of Artificial Sequence: Synthetic oligonucleotide
ggggaauguaggucccuug

SEQ ID NO: 2784414 - RNA, 19 nt, Artificial Sequence
  Description of Artificial Sequence: Synthetic oligonucleotide
gaugguucaucugcugcgu

SEQ ID NO: 2784415 - RNA, 19 nt, Artificial Sequence
  Description of Artificial Sequence: Synthetic oligonucleotide
cucucaggauucuggugga

SEQ ID NO: 2784416 - RNA, 19 nt, Artificial Sequence
  Description of Artificial Sequence: Synthetic oligonucleotide
agccaacgccccugcugac

SEQ ID NO: 2784417 - RNA, 19 nt, Artificial Sequence
  Description of Artificial Sequence: Synthetic oligonucleotide
acauggggugguccauggu

SEQ ID NO: 2784418 - RNA, 19 nt, Artificial Sequence
  Description of Artificial Sequence: Synthetic oligonucleotide
ggucccuugcauaggagca

SEQ ID NO: 2784419 - RNA, 19 nt, Artificial Sequence
  Description of Artificial Sequence: Synthetic oligonucleotide
cugggagugaaggggccac

SEQ ID NO: 2784420 - RNA, 19 nt, Artificial Sequence
  Description of Artificial Sequence: Synthetic oligonucleotide
gggcuuuagcauguucucc

SEQ ID NO: 2784421 - RNA, 19 nt, Artificial Sequence
  Description of Artificial Sequence: Synthetic oligonucleotide
ucguuccugcuguccccag

SEQ ID NO: 2784422 - RNA, 19 nt, Artificial Sequence
  Description of Artificial Sequence: Synthetic oligonucleotide
aggggccaccgucugggga

SEQ ID NO: 2784423 - RNA, 19 nt, Artificial Sequence
  Description of Artificial Sequence: Synthetic oligonucleotide
ugggagugaaggggccacc

SEQ ID NO: 2784424 - RNA, 19 nt, Artificial Sequence
  Description of Artificial Sequence: Synthetic oligonucleotide
aggcguguacuggggaaug

SEQ ID NO: 2784425 - RNA, 19 nt, Artificial Sequence
  Description of Artificial Sequence: Synthetic oligonucleotide
auggacagccucacuccug

SEQ ID NO: 2784426 - RNA, 19 nt, Artificial Sequence
  Description of Artificial Sequence: Synthetic oligonucleotide
uggggaauguaggucccuu

SEQ ID NO: 2784427 - RNA, 19 nt, Artificial Sequence
  Description of Artificial Sequence: Synthetic oligonucleotide
cugucggaggcacaggcgu

SEQ ID NO: 2784428 - RNA, 19 nt, Artificial Sequence
  Description of Artificial Sequence: Synthetic oligonucleotide
uagcaucucucaggauucu

SEQ ID NO: 2784429 - RNA, 19 nt, Artificial Sequence
  Description of Artificial Sequence: Synthetic oligonucleotide
augguucaucugcugcguu

SEQ ID NO: 2784430 - RNA, 19 nt, Artificial Sequence
  Description of Artificial Sequence: Synthetic oligonucleotide
aacagcugucggaggcaca

SEQ ID NO: 2784431 - RNA, 19 nt, Artificial Sequence
  Description of Artificial Sequence: Synthetic oligonucleotide
cacugcuguccugggagug

SEQ ID NO: 2784432 - RNA, 19 nt, Artificial Sequence
  Description of Artificial Sequence: Synthetic oligonucleotide
acagcaccauuaaaauguu

SEQ ID NO: 2784433 - RNA, 19 nt, Artificial Sequence
  Description of Artificial Sequence: Synthetic oligonucleotide
gcugucggaggcacaggcg

SEQ ID NO: 2784434 - RNA, 19 nt, Artificial Sequence
  Description of Artificial Sequence: Synthetic oligonucleotide
gggagagguaucagcaaca

SEQ ID NO: 2784435 - RNA, 19 nt, Artificial Sequence
  Description of Artificial Sequence: Synthetic oligonucleotide
gcuaacuguugcugcugac

SEQ ID NO: 2784436 - RNA, 19 nt, Artificial Sequence
  Description of Artificial Sequence: Synthetic oligonucleotide
caggauucugguggauauc

SEQ ID NO: 2784437 - RNA, 19 nt, Artificial Sequence
  Description of Artificial Sequence: Synthetic oligonucleotide
caacgccccugcugacucc

SEQ ID NO: 2784438 - RNA, 19 nt, Artificial Sequence
  Description of Artificial Sequence: Synthetic oligonucleotide
ggguguguccacugcuaac

SEQ ID NO: 2784439 - RNA, 19 nt, Artificial Sequence
  Description of Artificial Sequence: Synthetic oligonucleotide
ccguuagcaucucucagga

SEQ ID NO: 2784440 - RNA, 19 nt, Artificial Sequence
  Description of Artificial Sequence: Synthetic oligonucleotide
cucacuccugucuaugguu

SEQ ID NO: 2784441 - RNA, 19 nt, Artificial Sequence
  Description of Artificial Sequence: Synthetic oligonucleotide
ucucaggauucugguggau

SEQ ID NO: 2784442 - RNA, 19 nt, Artificial Sequence
  Description of Artificial Sequence: Synthetic oligonucleotide
cacaggcguguacugggga

SEQ ID NO: 2784443 - RNA, 19 nt, Artificial Sequence
  Description of Artificial Sequence: Synthetic oligonucleotide
gugcguguucauugggugu

SEQ ID NO: 2784444 - RNA, 19 nt, Artificial Sequence
  Description of Artificial Sequence: Synthetic oligonucleotide
ggcugcauugacauggggu

SEQ ID NO: 2784445 - RNA, 19 nt, Artificial Sequence
  Description of Artificial Sequence: Synthetic oligonucleotide
ggagagguaucagcaacaa

SEQ ID NO: 2784446 - RNA, 19 nt, Artificial Sequence
  Description of Artificial Sequence: Synthetic oligonucleotide
gcugcugaccacugcuguc

SEQ ID NO: 2784447 - RNA, 19 nt, Artificial Sequence
  Description of Artificial Sequence: Synthetic oligonucleotide
cccagcgaaagaugguuca

SEQ ID NO: 2784448 - RNA, 19 nt, Artificial Sequence
  Description of Artificial Sequence: Synthetic oligonucleotide
gcugacuccguuagcaucu

SEQ ID NO: 2784449 - RNA, 19 nt, Artificial Sequence
  Description of Artificial Sequence: Synthetic oligonucleotide
ggauugaaucguuccugcu

SEQ ID NO: 2784450 - RNA, 19 nt, Artificial Sequence
  Description of Artificial Sequence: Synthetic oligonucleotide
cuccugucuaugguuugga

SEQ ID NO: 2784451 - RNA, 19 nt, Artificial Sequence
  Description of Artificial Sequence: Synthetic oligonucleotide
ccaacgccccugcugacuc

SEQ ID NO: 2784452 - RNA, 19 nt, Artificial Sequence
  Description of Artificial Sequence: Synthetic oligonucleotide
gcacaggcguguacugggg

SEQ ID NO: 2784453 - RNA, 19 nt, Artificial Sequence
  Description of Artificial Sequence: Synthetic oligonucleotide
ccccugcugacuccguuag

SEQ ID NO: 2784454 - RNA, 19 nt, Artificial Sequence
  Description of Artificial Sequence: Synthetic oligonucleotide
cagcugucggaggcacagg

SEQ ID NO: 2784455 - RNA, 19 nt, Artificial Sequence
  Description of Artificial Sequence: Synthetic oligonucleotide
gaguaugcaggugcguguu

SEQ ID NO: 2784456 - RNA, 19 nt, Artificial Sequence
  Description of Artificial Sequence: Synthetic oligonucleotide
acauguccaaagggcuuua

SEQ ID NO: 2784457 - RNA, 19 nt, Artificial Sequence
  Description of Artificial Sequence: Synthetic oligonucleotide
gcccacgauguuuguuggc

SEQ ID NO: 2784458 - RNA, 19 nt, Artificial Sequence
  Description of Artificial Sequence: Synthetic oligonucleotide
augcaggugcguguucauu

SEQ ID NO: 2784459 - RNA, 19 nt, Artificial Sequence
  Description of Artificial Sequence: Synthetic oligonucleotide
cugacuccguuagcaucuc

SEQ ID NO: 2784460 - RNA, 19 nt, Artificial Sequence
  Description of Artificial Sequence: Synthetic oligonucleotide
ccccagcgaaagaugguuc

SEQ ID NO: 2784461 - RNA, 19 nt, Artificial Sequence
  Description of Artificial Sequence: Synthetic oligonucleotide
ggauuguuggaaagaguau

SEQ ID NO: 2784462 - RNA, 19 nt, Artificial Sequence
  Description of Artificial Sequence: Synthetic oligonucleotide
ccaaagggcuuuagcaugu

SEQ ID NO: 2784463 - RNA, 19 nt, Artificial Sequence
  Description of Artificial Sequence: Synthetic oligonucleotide
gggugugaucacagcacca

SEQ ID NO: 2784464 - RNA, 19 nt, Artificial Sequence
  Description of Artificial Sequence: Synthetic oligonucleotide
ccugucuaugguuuggauu

SEQ ID NO: 2784465 - RNA, 19 nt, Artificial Sequence
  Description of Artificial Sequence: Synthetic oligonucleotide
cacauguccaaagggcuuu

SEQ ID NO: 2784466 - RNA, 19 nt, Artificial Sequence
  Description of Artificial Sequence: Synthetic oligonucleotide
gcauaggagcagcagucau

SEQ ID NO: 2784467 - RNA, 19 nt, Artificial Sequence
  Description of Artificial Sequence: Synthetic oligonucleotide
ucggaggcacaggcgugua

SEQ ID NO: 2784468 - RNA, 19 nt, Artificial Sequence
  Description of Artificial Sequence: Synthetic oligonucleotide
gcuguccccagcgaaagau

SEQ ID NO: 2784469 - RNA, 19 nt, Artificial Sequence
  Description of Artificial Sequence: Synthetic oligonucleotide
cugcuguccugggagugaa

SEQ ID NO: 2784470 - RNA, 19 nt, Artificial Sequence
  Description of Artificial Sequence: Synthetic oligonucleotide
cugcugacuccguuagcau

SEQ ID NO: 2784471 - RNA, 19 nt, Artificial Sequence
  Description of Artificial Sequence: Synthetic oligonucleotide
gccaccgucuggggagagg

SEQ ID NO: 2784472 - RNA, 19 nt, Artificial Sequence
  Description of Artificial Sequence: Synthetic oligonucleotide
ggagugaaggggccaccgu

SEQ ID NO: 2784473 - RNA, 19 nt, Artificial Sequence
  Description of Artificial Sequence: Synthetic oligonucleotide
gcauugacauggggugguc

SEQ ID NO: 2784474 - RNA, 19 nt, Artificial Sequence
  Description of Artificial Sequence: Synthetic oligonucleotide
gucuaugguuuggauuguu

SEQ ID NO: 2784475 - RNA, 19 nt, Artificial Sequence
  Description of Artificial Sequence: Synthetic oligonucleotide
caaagccaacgccccugcu

SEQ ID NO: 2784476 - RNA, 19 nt, Artificial Sequence
  Description of Artificial Sequence: Synthetic oligonucleotide
cccugcugacuccguuagc

SEQ ID NO: 2784477 - RNA, 19 nt, Artificial Sequence
  Description of Artificial Sequence: Synthetic oligonucleotide
ggacagccucacuccuguc

SEQ ID NO: 2784478 - RNA, 19 nt, Artificial Sequence
  Description of Artificial Sequence: Synthetic oligonucleotide
gcguguacuggggaaugua

SEQ ID NO: 2784479 - RNA, 19 nt, Artificial Sequence
  Description of Artificial Sequence: Synthetic oligonucleotide
guccccagcgaaagauggu

SEQ ID NO: 2784480 - RNA, 19 nt, Artificial Sequence
  Description of Artificial Sequence: Synthetic oligonucleotide
gccccugcugacuccguua

SEQ ID NO: 2784481 - RNA, 19 nt, Artificial Sequence
  Description of Artificial Sequence: Synthetic oligonucleotide
gucuugggauugaaucguu

SEQ ID NO: 2784482 - RNA, 19 nt, Artificial Sequence
  Description of Artificial Sequence: Synthetic oligonucleotide
cccuugcauaggagcagca

SEQ ID NO: 2784483 - RNA, 19 nt, Artificial Sequence
  Description of Artificial Sequence: Synthetic oligonucleotide
caggcguguacuggggaau

SEQ ID NO: 2784484 - RNA, 19 nt, Artificial Sequence
  Description of Artificial Sequence: Synthetic oligonucleotide
ccucacuccugucuauggu

SEQ ID NO: 2784485 - RNA, 19 nt, Artificial Sequence
  Description of Artificial Sequence: Synthetic oligonucleotide
caccgucuggggagaggua

SEQ ID NO: 2784486 - RNA, 19 nt, Artificial Sequence
  Description of Artificial Sequence: Synthetic oligonucleotide
ccugggagugaaggggcca

SEQ ID NO: 2784487 - RNA, 19 nt, Artificial Sequence
  Description of Artificial Sequence: Synthetic oligonucleotide
cuggggaauguaggucccu

SEQ ID NO: 2784488 - RNA, 19 nt, Artificial Sequence
  Description of Artificial Sequence: Synthetic oligonucleotide
cguguucauuggguguguc

SEQ ID NO: 2784489 - RNA, 19 nt, Artificial Sequence
  Description of Artificial Sequence: Synthetic oligonucleotide
cagccucacuccugucuau

SEQ ID NO: 2784490 - RNA, 19 nt, Artificial Sequence
  Description of Artificial Sequence: Synthetic oligonucleotide
ccaccgucuggggagaggu

SEQ ID NO: 2784491 - RNA, 19 nt, Artificial Sequence
  Description of Artificial Sequence: Synthetic oligonucleotide
ggcguguacuggggaaugu

SEQ ID NO: 2784492 - RNA, 19 nt, Artificial Sequence
  Description of Artificial Sequence: Synthetic oligonucleotide
ggccaccgucuggggagag

SEQ ID NO: 2784493 - RNA, 19 nt, Artificial Sequence
  Description of Artificial Sequence: Synthetic oligonucleotide
caaagggcuuuagcauguu

SEQ ID NO: 2784494 - RNA, 19 nt, Artificial Sequence
  Description of Artificial Sequence: Synthetic oligonucleotide
gccaacgccccugcugacu

SEQ ID NO: 2784495 - RNA, 19 nt, Artificial Sequence
  Description of Artificial Sequence: Synthetic oligonucleotide
acgccccugcugacuccgu

SEQ ID NO: 2784496 - RNA, 19 nt, Artificial Sequence
  Description of Artificial Sequence: Synthetic oligonucleotide
gggccaccgucuggggaga

SEQ ID NO: 2784497 - RNA, 19 nt, Artificial Sequence
  Description of Artificial Sequence: Synthetic oligonucleotide
gcguguucauugggugugu

SEQ ID NO: 2784498 - RNA, 19 nt, Artificial Sequence
  Description of Artificial Sequence: Synthetic oligonucleotide
ccagcgaaagaugguucau

SEQ ID NO: 2784499 - RNA, 19 nt, Artificial Sequence
  Description of Artificial Sequence: Synthetic oligonucleotide
ggggcccacgauguuuguu

SEQ ID NO: 2784500 - RNA, 19 nt, Artificial Sequence
  Description of Artificial Sequence: Synthetic oligonucleotide
cgauguuuguuggcugcau

SEQ ID NO: 2784501 - RNA, 19 nt, Artificial Sequence
  Description of Artificial Sequence: Synthetic oligonucleotide
agaagaaccacucucacgc

SEQ ID NO: 2784502 - RNA, 19 nt, Artificial Sequence
  Description of Artificial Sequence: Synthetic oligonucleotide
uuuguugucaggaacaagg

SEQ ID NO: 2784503 - RNA, 19 nt, Artificial Sequence
  Description of Artificial Sequence: Synthetic oligonucleotide
uuggggaaaagucacaggg

SEQ ID NO: 2784504 - RNA, 19 nt, Artificial Sequence
  Description of Artificial Sequence: Synthetic oligonucleotide
agugguucgagacagcacc

SEQ ID NO: 2784505 - RNA, 19 nt, Artificial Sequence
  Description of Artificial Sequence: Synthetic oligonucleotide
aacgagaagaaccacucuc

SEQ ID NO: 2784506 - RNA, 19 nt, Artificial Sequence
  Description of Artificial Sequence: Synthetic oligonucleotide
auuauguaggcugagucgg

SEQ ID NO: 2784507 - RNA, 19 nt, Artificial Sequence
  Description of Artificial Sequence: Synthetic oligonucleotide
cauuauguaggcugagucg

SEQ ID NO: 2784508 - RNA, 19 nt, Artificial Sequence
  Description of Artificial Sequence: Synthetic oligonucleotide
aagaaccacucucacgcac

SEQ ID NO: 2784509 - RNA, 19 nt, Artificial Sequence
  Description of Artificial Sequence: Synthetic oligonucleotide
ucauuauguaggcugaguc

SEQ ID NO: 2784510 - RNA, 19 nt, Artificial Sequence
  Description of Artificial Sequence: Synthetic oligonucleotide
uguugaacggccgacagug

SEQ ID NO: 2784511 - RNA, 19 nt, Artificial Sequence
  Description of Artificial Sequence: Synthetic oligonucleotide
agcacuuagagcuccauga

SEQ ID NO: 2784512 - RNA, 19 nt, Artificial Sequence
  Description of Artificial Sequence: Synthetic oligonucleotide
agacagaaacugcuugugc

SEQ ID NO: 2784513 - RNA, 19 nt, Artificial Sequence
  Description of Artificial Sequence: Synthetic oligonucleotide
uccuggacgcuacuuagcg

SEQ ID NO: 2784514 - RNA, 19 nt, Artificial Sequence
  Description of Artificial Sequence: Synthetic oligonucleotide
caugauauccccagcuggg

SEQ ID NO: 2784515 - RNA, 19 nt, Artificial Sequence
  Description of Artificial Sequence: Synthetic oligonucleotide
guggucauuauguaggcug

SEQ ID NO: 2784516 - RNA, 19 nt, Artificial Sequence
  Description of Artificial Sequence: Synthetic oligonucleotide
ugcaaggguucccuggucg

SEQ ID NO: 2784517 - RNA, 19 nt, Artificial Sequence
  Description of Artificial Sequence: Synthetic oligonucleotide
uucgagacagcaccgaccu

SEQ ID NO: 2784518 - RNA, 19 nt, Artificial Sequence
  Description of Artificial Sequence: Synthetic oligonucleotide
uuagagcuccaugauaucc

SEQ ID NO: 2784519 - RNA, 19 nt, Artificial Sequence
  Description of Artificial Sequence: Synthetic oligonucleotide
uggccaucagcacuuagag

SEQ ID NO: 2784520 - RNA, 19 nt, Artificial Sequence
  Description of Artificial Sequence: Synthetic oligonucleotide
gagaagaaccacucucacg

SEQ ID NO: 2784521 - RNA, 19 nt, Artificial Sequence
  Description of Artificial Sequence: Synthetic oligonucleotide
agagcuccaugauaucccc

SEQ ID NO: 2784522 - RNA, 19 nt, Artificial Sequence
  Description of Artificial Sequence: Synthetic oligonucleotide
uuucagugguucgagacag

SEQ ID NO: 2784523 - RNA, 19 nt, Artificial Sequence
  Description of Artificial Sequence: Synthetic oligonucleotide
gaccucauccuuuucuggg

SEQ ID NO: 2784524 - RNA, 19 nt, Artificial Sequence
  Description of Artificial Sequence: Synthetic oligonucleotide
uggggaaaagucacagggg

SEQ ID NO: 2784525 - RNA, 19 nt, Artificial Sequence
  Description of Artificial Sequence: Synthetic oligonucleotide
aaggaccucauccuuuucu

SEQ ID NO: 2784526 - RNA, 19 nt, Artificial Sequence
  Description of Artificial Sequence: Synthetic oligonucleotide
accacucucacgcacguag

SEQ ID NO: 2784527 - RNA, 19 nt, Artificial Sequence
  Description of Artificial Sequence: Synthetic oligonucleotide
gacagaaacugcuugugca

SEQ ID NO: 2784528 - RNA, 19 nt, Artificial Sequence
  Description of Artificial Sequence: Synthetic oligonucleotide
cuuaguuguugaacggccg

SEQ ID NO: 2784529 - RNA, 19 nt, Artificial Sequence
  Description of Artificial Sequence: Synthetic oligonucleotide
cuacuuagcguaagggugc

SEQ ID NO: 2784530 - RNA, 19 nt, Artificial Sequence
  Description of Artificial Sequence: Synthetic oligonucleotide
uguugucaggaacaaggug

SEQ ID NO: 2784531 - RNA, 19 nt, Artificial Sequence
  Description of Artificial Sequence: Synthetic oligonucleotide
guugucaggaacaagguga

SEQ ID NO: 2784532 - RNA, 19 nt, Artificial Sequence
  Description of Artificial Sequence: Synthetic oligonucleotide
uagagcuccaugauauccc

SEQ ID NO: 2784533 - RNA, 19 nt, Artificial Sequence
  Description of Artificial Sequence: Synthetic oligonucleotide
uccucagacagaaacugcu

SEQ ID NO: 2784534 - RNA, 19 nt, Artificial Sequence
  Description of Artificial Sequence: Synthetic oligonucleotide
agaaacugcuugugcaagg

SEQ ID NO: 2784535 - RNA, 19 nt, Artificial Sequence
  Description of Artificial Sequence: Synthetic oligonucleotide
ucaggaacaaggugaggag

SEQ ID NO: 2784536 - RNA, 19 nt, Artificial Sequence
  Description of Artificial Sequence: Synthetic oligonucleotide
uugucaggaacaaggugag

SEQ ID NO: 2784537 - RNA, 19 nt, Artificial Sequence
  Description of Artificial Sequence: Synthetic oligonucleotide
gauagcgccagagaagcag

SEQ ID NO: 2784538 - RNA, 19 nt, Artificial Sequence
  Description of Artificial Sequence: Synthetic oligonucleotide
uuaguuguugaacggccga

SEQ ID NO: 2784539 - RNA, 19 nt, Artificial Sequence
  Description of Artificial Sequence: Synthetic oligonucleotide
gaaacugcuugugcaaggg

SEQ ID NO: 2784540 - RNA, 19 nt, Artificial Sequence
  Description of Artificial Sequence: Synthetic oligonucleotide
gacagcaccgaccugccgc

SEQ ID NO: 2784541 - RNA, 19 nt, Artificial Sequence
  Description of Artificial Sequence: Synthetic oligonucleotide
aaggugaggagggacacug

SEQ ID NO: 2784542 - RNA, 19 nt, Artificial Sequence
  Description of Artificial Sequence: Synthetic oligonucleotide
ucagacagaaacugcuugu

SEQ ID NO: 2784543 - RNA, 19 nt, Artificial Sequence
  Description of Artificial Sequence: Synthetic oligonucleotide
gaugcaggguaguagggac

SEQ ID NO: 2784544 - RNA, 19 nt, Artificial Sequence
  Description of Artificial Sequence: Synthetic oligonucleotide
uugugcaaggguucccugg

SEQ ID NO: 2784545 - RNA, 19 nt, Artificial Sequence
  Description of Artificial Sequence: Synthetic oligonucleotide
agggacugggaguaucccc

SEQ ID NO: 2784546 - RNA, 19 nt, Artificial Sequence
  Description of Artificial Sequence: Synthetic oligonucleotide
uugaacggccgacagugcc

SEQ ID NO: 2784547 - RNA, 19 nt, Artificial Sequence
  Description of Artificial Sequence: Synthetic oligonucleotide
uuagcguaagggugcuucg

SEQ ID NO: 2784548 - RNA, 19 nt, Artificial Sequence
  Description of Artificial Sequence: Synthetic oligonucleotide
uuauguaggcugagucggg

SEQ ID NO: 2784549 - RNA, 19 nt, Artificial Sequence
  Description of Artificial Sequence: Synthetic oligonucleotide
agcuccaugauauccccag

SEQ ID NO: 2784550 - RNA, 19 nt, Artificial Sequence
  Description of Artificial Sequence: Synthetic oligonucleotide
uccaugauauccccagcug

SEQ ID NO: 2784551 - RNA, 19 nt, Artificial Sequence
  Description of Artificial Sequence: Synthetic oligonucleotide
agugccagguccuggggcg

SEQ ID NO: 2784552 - RNA, 19 nt, Artificial Sequence
  Description of Artificial Sequence: Synthetic oligonucleotide
gacgcuacuuagcguaagg

SEQ ID NO: 2784553 - RNA, 19 nt, Artificial Sequence
  Description of Artificial Sequence: Synthetic oligonucleotide
uuccccuagguuucagugg

SEQ ID NO: 2784554 - RNA, 19 nt, Artificial Sequence
  Description of Artificial Sequence: Synthetic oligonucleotide
uguagcugggcaguccugg

SEQ ID NO: 2784555 - RNA, 19 nt, Artificial Sequence
  Description of Artificial Sequence: Synthetic oligonucleotide
ggggauucgguguagcugg

SEQ ID NO: 2784556 - RNA, 19 nt, Artificial Sequence
  Description of Artificial Sequence: Synthetic oligonucleotide
acuuagagcuccaugauau

SEQ ID NO: 2784557 - RNA, 19 nt, Artificial Sequence
  Description of Artificial Sequence: Synthetic oligonucleotide
agcugggcaguccuggacg

SEQ ID NO: 2784558 - RNA, 19 nt, Artificial Sequence
  Description of Artificial Sequence: Synthetic oligonucleotide
uguaggcugagucgggaga

SEQ ID NO: 2784559 - RNA, 19 nt, Artificial Sequence
  Description of Artificial Sequence: Synthetic oligonucleotide
aagggcuccugaguggugg

SEQ ID NO: 2784560 - RNA, 19 nt, Artificial Sequence
  Description of Artificial Sequence: Synthetic oligonucleotide
aguccuggacgcuacuuag

SEQ ID NO: 2784561 - RNA, 19 nt, Artificial Sequence
  Description of Artificial Sequence: Synthetic oligonucleotide
guuguugaacggccgacag

SEQ ID NO: 2784562 - RNA, 19 nt, Artificial Sequence
  Description of Artificial Sequence: Synthetic oligonucleotide
aggaacaaggugaggaggg

SEQ ID NO: 2784563 - RNA, 19 nt, Artificial Sequence
  Description of Artificial Sequence: Synthetic oligonucleotide
uggucauuauguaggcuga

SEQ ID NO: 2784564 - RNA, 19 nt, Artificial Sequence
  Description of Artificial Sequence: Synthetic oligonucleotide
acagcaccgaccugccgcc

SEQ ID NO: 2784565 - RNA, 19 nt, Artificial Sequence
  Description of Artificial Sequence: Synthetic oligonucleotide
agucgggagaagugggugg

SEQ ID NO: 2784566 - RNA, 19 nt, Artificial Sequence
  Description of Artificial Sequence: Synthetic oligonucleotide
aagggugcuucgcagaguu

SEQ ID NO: 2784567 - RNA, 19 nt, Artificial Sequence
  Description of Artificial Sequence: Synthetic oligonucleotide
uccccuagguuucaguggu

SEQ ID NO: 2784568 - RNA, 19 nt, Artificial Sequence
  Description of Artificial Sequence: Synthetic oligonucleotide
cucucacgcacguagggag

SEQ ID NO: 2784569 - RNA, 19 nt, Artificial Sequence
  Description of Artificial Sequence: Synthetic oligonucleotide
cuuggggaaaagucacagg

SEQ ID NO: 2784570 - RNA, 19 nt, Artificial Sequence
  Description of Artificial Sequence: Synthetic oligonucleotide
aaguggguggccauguucu

SEQ ID NO: 2784571 - RNA, 19 nt, Artificial Sequence
  Description of Artificial Sequence: Synthetic oligonucleotide
agggguggucauuauguag

SEQ ID NO: 2784572 - RNA, 19 nt, Artificial Sequence
  Description of Artificial Sequence: Synthetic oligonucleotide
guaagggugcuucgcagag

SEQ ID NO: 2784573 - RNA, 19 nt, Artificial Sequence
  Description of Artificial Sequence: Synthetic oligonucleotide
ugugcaaggguucccuggu

SEQ ID NO: 2784574 - RNA, 19 nt, Artificial Sequence
  Description of Artificial Sequence: Synthetic oligonucleotide
ugauauccccagcugggga

SEQ ID NO: 2784575 - RNA, 19 nt, Artificial Sequence
  Description of Artificial Sequence: Synthetic oligonucleotide
guuccccuagguuucagug

SEQ ID NO: 2784576 - RNA, 19 nt, Artificial Sequence
  Description of Artificial Sequence: Synthetic oligonucleotide
ucaggcucccgggauagcg

SEQ ID NO: 2784577 - RNA, 19 nt, Artificial Sequence
  Description of Artificial Sequence: Synthetic oligonucleotide
gauucgguguagcugggca

SEQ ID NO: 2784578 - RNA, 19 nt, Artificial Sequence
  Description of Artificial Sequence: Synthetic oligonucleotide
aguagggguggucauuaug

SEQ ID NO: 2784579 - RNA, 19 nt, Artificial Sequence
  Description of Artificial Sequence: Synthetic oligonucleotide
uucgcagaguuccccuagg

SEQ ID NO: 2784580 - RNA, 19 nt, Artificial Sequence
  Description of Artificial Sequence: Synthetic oligonucleotide
aacaaggugaggagggaca

SEQ ID NO: 2784581 - RNA, 19 nt, Artificial Sequence
  Description of Artificial Sequence: Synthetic oligonucleotide
aaacugcuugugcaagggu

SEQ ID NO: 2784582 - RNA, 19 nt, Artificial Sequence
  Description of Artificial Sequence: Synthetic oligonucleotide
cugagucgggagaaguggg

SEQ ID NO: 2784583 - RNA, 19 nt, Artificial Sequence
  Description of Artificial Sequence: Synthetic oligonucleotide
ucagugguucgagacagca

SEQ ID NO: 2784584 - RNA, 19 nt, Artificial Sequence
  Description of Artificial Sequence: Synthetic oligonucleotide
aggaccucauccuuuucug

SEQ ID NO: 2784585 - RNA, 19 nt, Artificial Sequence
  Description of Artificial Sequence: Synthetic oligonucleotide
acaaggugaggagggacac

SEQ ID NO: 2784586 - RNA, 19 nt, Artificial Sequence
  Description of Artificial Sequence: Synthetic oligonucleotide
acagaaacugcuugugcaa

SEQ ID NO: 2784587 - RNA, 19 nt, Artificial Sequence
  Description of Artificial Sequence: Synthetic oligonucleotide
aaggguucccuggucggcg

SEQ ID NO: 2784588 - RNA, 19 nt, Artificial Sequence
  Description of Artificial Sequence: Synthetic oligonucleotide
auucgguguagcugggcag

SEQ ID NO: 2784589 - RNA, 19 nt, Artificial Sequence
  Description of Artificial Sequence: Synthetic oligonucleotide
cuuagcguaagggugcuuc

SEQ ID NO: 2784590 - RNA, 19 nt, Artificial Sequence
  Description of Artificial Sequence: Synthetic oligonucleotide
ugaacggccgacagugcca

SEQ ID NO: 2784591 - RNA, 19 nt, Artificial Sequence
  Description of Artificial Sequence: Synthetic oligonucleotide
auagcgccagagaagcagc

SEQ ID NO: 2784592 - RNA, 19 nt, Artificial Sequence
  Description of Artificial Sequence: Synthetic oligonucleotide
ggggaugcaggguaguagg

SEQ ID NO: 2784593 - RNA, 19 nt, Artificial Sequence
  Description of Artificial Sequence: Synthetic oligonucleotide
gggguggucauuauguagg

SEQ ID NO: 2784594 - RNA, 19 nt, Artificial Sequence
  Description of Artificial Sequence: Synthetic oligonucleotide
gcuacuuagcguaagggug

SEQ ID NO: 2784595 - RNA, 19 nt, Artificial Sequence
  Description of Artificial Sequence: Synthetic oligonucleotide
agaaccacucucacgcacg

SEQ ID NO: 2784596 - RNA, 19 nt, Artificial Sequence
  Description of Artificial Sequence: Synthetic oligonucleotide
gguuucagugguucgagac

SEQ ID NO: 2784597 - RNA, 19 nt, Artificial Sequence
  Description of Artificial Sequence: Synthetic oligonucleotide
gaaguggguggccauguuc

SEQ ID NO: 2784598 - RNA, 19 nt, Artificial Sequence
  Description of Artificial Sequence: Synthetic oligonucleotide
uagguuucagugguucgag

SEQ ID NO: 2784599 - RNA, 19 nt, Artificial Sequence
  Description of Artificial Sequence: Synthetic oligonucleotide
acugcuugugcaaggguuc

SEQ ID NO: 2784600 - RNA, 19 nt, Artificial Sequence
  Description of Artificial Sequence: Synthetic oligonucleotide
aggcucccgggauagcgcc

SEQ ID NO: 2784601 - RNA, 19 nt, Artificial Sequence
  Description of Artificial Sequence: Synthetic oligonucleotide
cagggcuuggggaaaaguc

SEQ ID NO: 2784602 - RNA, 19 nt, Artificial Sequence
  Description of Artificial Sequence: Synthetic oligonucleotide
acugcaguaggggugguca

SEQ ID NO: 2784603 - RNA, 19 nt, Artificial Sequence
  Description of Artificial Sequence: Synthetic oligonucleotide
aguagggacugggaguauc

SEQ ID NO: 2784604 - RNA, 19 nt, Artificial Sequence
  Description of Artificial Sequence: Synthetic oligonucleotide
guuucagugguucgagaca

SEQ ID NO: 2784605 - RNA, 19 nt, Artificial Sequence
  Description of Artificial Sequence: Synthetic oligonucleotide
acgcuacuuagcguaaggg

SEQ ID NO: 2784606 - RNA, 19 nt, Artificial Sequence
  Description of Artificial Sequence: Synthetic oligonucleotide
uagggagucgagagguugu

SEQ ID NO: 2784607 - RNA, 19 nt, Artificial Sequence
  Description of Artificial Sequence: Synthetic oligonucleotide
augauauccccagcugggg

SEQ ID NO: 2784608 - RNA, 19 nt, Artificial Sequence
  Description of Artificial Sequence: Synthetic oligonucleotide
ugagucgggagaagugggu

SEQ ID NO: 2784609 - RNA, 19 nt, Artificial Sequence
  Description of Artificial Sequence: Synthetic oligonucleotide
uggggaugcaggguaguag

SEQ ID NO: 2784610 - RNA, 19 nt, Artificial Sequence
  Description of Artificial Sequence: Synthetic oligonucleotide
ugggcaagggcuccugagu

SEQ ID NO: 2784611 - RNA, 19 nt, Artificial Sequence
  Description of Artificial Sequence: Synthetic oligonucleotide
auguaggcugagucgggag

SEQ ID NO: 2784612 - RNA, 19 nt, Artificial Sequence
  Description of Artificial Sequence: Synthetic oligonucleotide
ccuuaguuguugaacggcc

SEQ ID NO: 2784613 - RNA, 19 nt, Artificial Sequence
  Description of Artificial Sequence: Synthetic oligonucleotide
cuccucagacagaaacugc

SEQ ID NO: 2784614 - RNA, 19 nt, Artificial Sequence
  Description of Artificial Sequence: Synthetic oligonucleotide
cacucucacgcacguaggg

SEQ ID NO: 2784615 - RNA, 19 nt, Artificial Sequence
  Description of Artificial Sequence: Synthetic oligonucleotide
uuguugaacggccgacagu

SEQ ID NO: 2784616 - RNA, 19 nt, Artificial Sequence
  Description of Artificial Sequence: Synthetic oligonucleotide
uauguaggcugagucggga

SEQ ID NO: 2784617 - RNA, 19 nt, Artificial Sequence
  Description of Artificial Sequence: Synthetic oligonucleotide
cagaguuccccuagguuuc

SEQ ID NO: 2784618 - RNA, 19 nt, Artificial Sequence
  Description of Artificial Sequence: Synthetic oligonucleotide
cacguagggagucgagagg

SEQ ID NO: 2784619 - RNA, 19 nt, Artificial Sequence
  Description of Artificial Sequence: Synthetic oligonucleotide
gaucaggcucccgggauag

SEQ ID NO: 2784620 - RNA, 19 nt, Artificial Sequence
  Description of Artificial Sequence: Synthetic oligonucleotide
agcguaagggugcuucgca

SEQ ID NO: 2784621 - RNA, 19 nt, Artificial Sequence
  Description of Artificial Sequence: Synthetic oligonucleotide
gaacaaggugaggagggac

SEQ ID NO: 2784622 - RNA, 19 nt, Artificial Sequence
  Description of Artificial Sequence: Synthetic oligonucleotide
acguagggagucgagaggu

SEQ ID NO: 2784623 - RNA, 19 nt, Artificial Sequence
  Description of Artificial Sequence: Synthetic oligonucleotide
ggguaguagggacugggag

SEQ ID NO: 2784624 - RNA, 19 nt, Artificial Sequence
  Description of Artificial Sequence: Synthetic oligonucleotide
caggguaguagggacuggg

SEQ ID NO: 2784625 - RNA, 19 nt, Artificial Sequence
  Description of Artificial Sequence: Synthetic oligonucleotide
gacacuggccaucagcacu

SEQ ID NO: 2784626 - RNA, 19 nt, Artificial Sequence
  Description of Artificial Sequence: Synthetic oligonucleotide
uggggaggggauucggugu

SEQ ID NO: 2784627 - RNA, 19 nt, Artificial Sequence
  Description of Artificial Sequence: Synthetic oligonucleotide
gggauagcgccagagaagc

SEQ ID NO: 2784628 - RNA, 19 nt, Artificial Sequence
  Description of Artificial Sequence: Synthetic oligonucleotide
acgagaagaaccacucuca

SEQ ID NO: 2784629 - RNA, 19 nt, Artificial Sequence
  Description of Artificial Sequence: Synthetic oligonucleotide
cuucgcagaguuccccuag

SEQ ID NO: 2784630 - RNA, 19 nt, Artificial Sequence
  Description of Artificial Sequence: Synthetic oligonucleotide
ggucuuuguugucaggaac

SEQ ID NO: 2784631 - RNA, 19 nt, Artificial Sequence
  Description of Artificial Sequence: Synthetic oligonucleotide
uccuggggcgcaacgagaa

SEQ ID NO: 2784632 - RNA, 19 nt, Artificial Sequence
  Description of Artificial Sequence: Synthetic oligonucleotide
cagaaacugcuugugcaag

SEQ ID NO: 2784633 - RNA, 19 nt, Artificial Sequence
  Description of Artificial Sequence: Synthetic oligonucleotide
guagggagucgagagguug

SEQ ID NO: 2784634 - RNA, 19 nt, Artificial Sequence
  Description of Artificial Sequence: Synthetic oligonucleotide
ccgccuuaguuguugaacg

SEQ ID NO: 2784635 - RNA, 19 nt, Artificial Sequence
  Description of Artificial Sequence: Synthetic oligonucleotide
gcacguagggagucgagag

SEQ ID NO: 2784636 - RNA, 19 nt, Artificial Sequence
  Description of Artificial Sequence: Synthetic oligonucleotide
cagggaucaggcucccggg

SEQ ID NO: 2784637 - RNA, 19 nt, Artificial Sequence
  Description of Artificial Sequence: Synthetic oligonucleotide
guucgagacagcaccgacc

SEQ ID NO: 2784638 - RNA, 19 nt, Artificial Sequence
  Description of Artificial Sequence: Synthetic oligonucleotide
ggugaggagggacacuggc

SEQ ID NO: 2784639 - RNA, 19 nt, Artificial Sequence
  Description of Artificial Sequence: Synthetic oligonucleotide
ucucacgcacguagggagu

SEQ ID NO: 2784640 - RNA, 19 nt, Artificial Sequence
  Description of Artificial Sequence: Synthetic oligonucleotide
cuggacgcuacuuagcgua

SEQ ID NO: 2784641 - RNA, 19 nt, Artificial Sequence
  Description of Artificial Sequence: Synthetic oligonucleotide
cagacagaaacugcuugug

SEQ ID NO: 2784642 - RNA, 19 nt, Artificial Sequence
  Description of Artificial Sequence: Synthetic oligonucleotide
aggggauucgguguagcug

SEQ ID NO: 2784643 - RNA, 19 nt, Artificial Sequence
  Description of Artificial Sequence: Synthetic oligonucleotide
agaagcagcucugggcaag

SEQ ID NO: 2784644 - RNA, 19 nt, Artificial Sequence
  Description of Artificial Sequence: Synthetic oligonucleotide
guagggacugggaguaucc

SEQ ID NO: 2784645 - RNA, 19 nt, Artificial Sequence
  Description of Artificial Sequence: Synthetic oligonucleotide
gaagcagcucugggcaagg

SEQ ID NO: 2784646 - RNA, 19 nt, Artificial Sequence
  Description of Artificial Sequence: Synthetic oligonucleotide
agggcuuggggaaaaguca

SEQ ID NO: 2784647 - RNA, 19 nt, Artificial Sequence
  Description of Artificial Sequence: Synthetic oligonucleotide
cuggccaucagcacuuaga

SEQ ID NO: 2784648 - RNA, 19 nt, Artificial Sequence
  Description of Artificial Sequence: Synthetic oligonucleotide
auguucuccucagacagaa

SEQ ID NO: 2784649 - RNA, 19 nt, Artificial Sequence
  Description of Artificial Sequence: Synthetic oligonucleotide
guggggaggggauucggug

SEQ ID NO: 2784650 - RNA, 19 nt, Artificial Sequence
  Description of Artificial Sequence: Synthetic oligonucleotide
cuuagagcuccaugauauc

SEQ ID NO: 2784651 - RNA, 19 nt, Artificial Sequence
  Description of Artificial Sequence: Synthetic oligonucleotide
aguggguggccauguucuc

SEQ ID NO: 2784652 - RNA, 19 nt, Artificial Sequence
  Description of Artificial Sequence: Synthetic oligonucleotide
agggcuccugagugguggc

SEQ ID NO: 2784653 - RNA, 19 nt, Artificial Sequence
  Description of Artificial Sequence: Synthetic oligonucleotide
ugcuucgcagaguuccccu

SEQ ID NO: 2784654 - RNA, 19 nt, Artificial Sequence
  Description of Artificial Sequence: Synthetic oligonucleotide
ucugagggccucagggauc

SEQ ID NO: 2784655 - RNA, 19 nt, Artificial Sequence
  Description of Artificial Sequence: Synthetic oligonucleotide
uucgguguagcugggcagu

SEQ ID NO: 2784656 - RNA, 19 nt, Artificial Sequence
  Description of Artificial Sequence: Synthetic oligonucleotide
uaguuguugaacggccgac

SEQ ID NO: 2784657 - RNA, 19 nt, Artificial Sequence
  Description of Artificial Sequence: Synthetic oligonucleotide
uucagugguucgagacagc

SEQ ID NO: 2784658 - RNA, 19 nt, Artificial Sequence
  Description of Artificial Sequence: Synthetic oligonucleotide
ggaccucauccuuuucugg

SEQ ID NO: 2784659 - RNA, 19 nt, Artificial Sequence
  Description of Artificial Sequence: Synthetic oligonucleotide
aguuccccuagguuucagu

SEQ ID NO: 2784660 - RNA, 19 nt, Artificial Sequence
  Description of Artificial Sequence: Synthetic oligonucleotide
aguuguugaacggccgaca

SEQ ID NO: 2784661 - RNA, 19 nt, Artificial Sequence
  Description of Artificial Sequence: Synthetic oligonucleotide
gagucgggagaagugggug

SEQ ID NO: 2784662 - RNA, 19 nt, Artificial Sequence
  Description of Artificial Sequence: Synthetic oligonucleotide
ugucaggaacaaggugagg

SEQ ID NO: 2784663 - RNA, 19 nt, Artificial Sequence
  Description of Artificial Sequence: Synthetic oligonucleotide
uggggcgcaacgagaagaa

SEQ ID NO: 2784664 - RNA, 19 nt, Artificial Sequence
  Description of Artificial Sequence: Synthetic oligonucleotide
ucgcagaguuccccuaggu

SEQ ID NO: 2784665 - RNA, 19 nt, Artificial Sequence
  Description of Artificial Sequence: Synthetic oligonucleotide
gaagaaccacucucacgca

SEQ ID NO: 2784666 - RNA, 19 nt, Artificial Sequence
  Description of Artificial Sequence: Synthetic oligonucleotide
ggagucgagagguuguguc

SEQ ID NO: 2784667 - RNA, 19 nt, Artificial Sequence
  Description of Artificial Sequence: Synthetic oligonucleotide
guagggguggucauuaugu

SEQ ID NO: 2784668 - RNA, 19 nt, Artificial Sequence
  Description of Artificial Sequence: Synthetic oligonucleotide
gaacggccgacagugccag

SEQ ID NO: 2784669 - RNA, 19 nt, Artificial Sequence
  Description of Artificial Sequence: Synthetic oligonucleotide
agcucugggcaagggcucc

SEQ ID NO: 2784670 - RNA, 19 nt, Artificial Sequence
  Description of Artificial Sequence: Synthetic oligonucleotide
gggugcuucgcagaguucc

SEQ ID NO: 2784671 - RNA, 19 nt, Artificial Sequence
  Description of Artificial Sequence: Synthetic oligonucleotide
gggcgcaacgagaagaacc

SEQ ID NO: 2784672 - RNA, 19 nt, Artificial Sequence
  Description of Artificial Sequence: Synthetic oligonucleotide
cuugugcaaggguucccug

SEQ ID NO: 2784673 - RNA, 19 nt, Artificial Sequence
  Description of Artificial Sequence: Synthetic oligonucleotide
gcuuggggaaaagucacag

SEQ ID NO: 2784674 - RNA, 19 nt, Artificial Sequence
  Description of Artificial Sequence: Synthetic oligonucleotide
gugguucgagacagcaccg

SEQ ID NO: 2784675 - RNA, 19 nt, Artificial Sequence
  Description of Artificial Sequence: Synthetic oligonucleotide
acuggccaucagcacuuag

SEQ ID NO: 2784676 - RNA, 19 nt, Artificial Sequence
  Description of Artificial Sequence: Synthetic oligonucleotide
guaguagggacugggagua

SEQ ID NO: 2784677 - RNA, 19 nt, Artificial Sequence
  Description of Artificial Sequence: Synthetic oligonucleotide
cuagguuucagugguucga

SEQ ID NO: 2784678 - RNA, 19 nt, Artificial Sequence
  Description of Artificial Sequence: Synthetic oligonucleotide
ccuagguuucagugguucg

SEQ ID NO: 2784679 - RNA, 19 nt, Artificial Sequence
  Description of Artificial Sequence: Synthetic oligonucleotide
uagcguaagggugcuucgc

SEQ ID NO: 2784680 - RNA, 19 nt, Artificial Sequence
  Description of Artificial Sequence: Synthetic oligonucleotide
cagcacuuagagcuccaug

SEQ ID NO: 2784681 - RNA, 19 nt, Artificial Sequence
  Description of Artificial Sequence: Synthetic oligonucleotide
ucccuggucggcggggugg

SEQ ID NO: 2784682 - RNA, 19 nt, Artificial Sequence
  Description of Artificial Sequence: Synthetic oligonucleotide
aggguucccuggucggcgg

SEQ ID NO: 2784683 - RNA, 19 nt, Artificial Sequence
  Description of Artificial Sequence: Synthetic oligonucleotide
cagugccagguccuggggc

SEQ ID NO: 2784684 - RNA, 19 nt, Artificial Sequence
  Description of Artificial Sequence: Synthetic oligonucleotide
ucacgcacguagggagucg

SEQ ID NO: 2784685 - RNA, 19 nt, Artificial Sequence
  Description of Artificial Sequence: Synthetic oligonucleotide
cagugguucgagacagcac

SEQ ID NO: 2784686 - RNA, 19 nt, Artificial Sequence
  Description of Artificial Sequence: Synthetic oligonucleotide
aagcagcucugggcaaggg

SEQ ID NO: 2784687 - RNA, 19 nt, Artificial Sequence
  Description of Artificial Sequence: Synthetic oligonucleotide
uagggacugggaguauccc

SEQ ID NO: 2784688 - RNA, 19 nt, Artificial Sequence
  Description of Artificial Sequence: Synthetic oligonucleotide
gcaaggguucccuggucgg

SEQ ID NO: 2784689 - RNA, 19 nt, Artificial Sequence
  Description of Artificial Sequence: Synthetic oligonucleotide
ggcaagggcuccugagugg

SEQ ID NO: 2784690 - RNA, 19 nt, Artificial Sequence
  Description of Artificial Sequence: Synthetic oligonucleotide
aggagggacacuggccauc

SEQ ID NO: 2784691 - RNA, 19 nt, Artificial Sequence
  Description of Artificial Sequence: Synthetic oligonucleotide
uagcgccagagaagcagcu

SEQ ID NO: 2784692 - RNA, 19 nt, Artificial Sequence
  Description of Artificial Sequence: Synthetic oligonucleotide
ggguugcuggucuuuguug

SEQ ID NO: 2784693 - RNA, 19 nt, Artificial Sequence
  Description of Artificial Sequence: Synthetic oligonucleotide
gggacugcaguaggggugg

SEQ ID NO: 2784694 - RNA, 19 nt, Artificial Sequence
  Description of Artificial Sequence: Synthetic oligonucleotide
agguuucagugguucgaga

SEQ ID NO: 2784695 - RNA, 19 nt, Artificial Sequence
  Description of Artificial Sequence: Synthetic oligonucleotide
uggacgcuacuuagcguaa

SEQ ID NO: 2784696 - RNA, 19 nt, Artificial Sequence
  Description of Artificial Sequence: Synthetic oligonucleotide
uagggguggucauuaugua

SEQ ID NO: 2784697 - RNA, 19 nt, Artificial Sequence
  Description of Artificial Sequence: Synthetic oligonucleotide
gcaacgagaagaaccacuc

SEQ ID NO: 2784698 - RNA, 19 nt, Artificial Sequence
  Description of Artificial Sequence: Synthetic oligonucleotide
caggcucccgggauagcgc

SEQ ID NO: 2784699 - RNA, 19 nt, Artificial Sequence
  Description of Artificial Sequence: Synthetic oligonucleotide
gguaguagggacugggagu

SEQ ID NO: 2784700 - RNA, 19 nt, Artificial Sequence
  Description of Artificial Sequence: Synthetic oligonucleotide
agacagcaccgaccugccg

SEQ ID NO: 2784701 - RNA, 19 nt, Artificial Sequence
  Description of Artificial Sequence: Synthetic oligonucleotide
acucucacgcacguaggga

SEQ ID NO: 2784702 - RNA, 19 nt, Artificial Sequence
  Description of Artificial Sequence: Synthetic oligonucleotide
uacuuagcguaagggugcu

SEQ ID NO: 2784703 - RNA, 19 nt, Artificial Sequence
  Description of Artificial Sequence: Synthetic oligonucleotide
gagacagcaccgaccugcc

SEQ ID NO: 2784704 - RNA, 19 nt, Artificial Sequence
  Description of Artificial Sequence: Synthetic oligonucleotide
guugcuggucuuuguuguc

SEQ ID NO: 2784705 - RNA, 19 nt, Artificial Sequence
  Description of Artificial Sequence: Synthetic oligonucleotide
cugcuugugcaaggguucc

SEQ ID NO: 2784706 - RNA, 19 nt, Artificial Sequence
  Description of Artificial Sequence: Synthetic oligonucleotide
uguucuccucagacagaaa

SEQ ID NO: 2784707 - RNA, 19 nt, Artificial Sequence
  Description of Artificial Sequence: Synthetic oligonucleotide
ccagagaagcagcucuggg

SEQ ID NO: 2784708 - RNA, 19 nt, Artificial Sequence
  Description of Artificial Sequence: Synthetic oligonucleotide
ucccgggauagcgccagag

SEQ ID NO: 2784709 - RNA, 19 nt, Artificial Sequence
  Description of Artificial Sequence: Synthetic oligonucleotide
agcgccagagaagcagcuc

SEQ ID NO: 2784710 - RNA, 19 nt, Artificial Sequence
  Description of Artificial Sequence: Synthetic oligonucleotide
ugguucgagacagcaccga

SEQ ID NO: 2784711 - RNA, 19 nt, Artificial Sequence
  Description of Artificial Sequence: Synthetic oligonucleotide
gguucgagacagcaccgac

SEQ ID NO: 2784712 - RNA, 19 nt, Artificial Sequence
  Description of Artificial Sequence: Synthetic oligonucleotide
ggguggucauuauguaggc

SEQ ID NO: 2784713 - RNA, 19 nt, Artificial Sequence
  Description of Artificial Sequence: Synthetic oligonucleotide
auauccccagcuggggaug

SEQ ID NO: 2784714 - RNA, 19 nt, Artificial Sequence
  Description of Artificial Sequence: Synthetic oligonucleotide
gaaggaccucauccuuuuc

SEQ ID NO: 2784715 - RNA, 19 nt, Artificial Sequence
  Description of Artificial Sequence: Synthetic oligonucleotide
cgagacagcaccgaccugc

SEQ ID NO: 2784716 - RNA, 19 nt, Artificial Sequence
  Description of Artificial Sequence: Synthetic oligonucleotide
ugcuugugcaaggguuccc

SEQ ID NO: 2784717 - RNA, 19 nt, Artificial Sequence
  Description of Artificial Sequence: Synthetic oligonucleotide
uaggcugagucgggagaag

SEQ ID NO: 2784718 - RNA, 19 nt, Artificial Sequence
  Description of Artificial Sequence: Synthetic oligonucleotide
gccuuaguuguugaacggc

SEQ ID NO: 2784719 - RNA, 19 nt, Artificial Sequence
  Description of Artificial Sequence: Synthetic oligonucleotide
ggccucagggaucaggcuc

SEQ ID NO: 2784720 - RNA, 19 nt, Artificial Sequence
  Description of Artificial Sequence: Synthetic oligonucleotide
aacggccgacagugccagg

SEQ ID NO: 2784721 - RNA, 19 nt, Artificial Sequence
  Description of Artificial Sequence: Synthetic oligonucleotide
caaggguucccuggucggc

SEQ ID NO: 2784722 - RNA, 19 nt, Artificial Sequence
  Description of Artificial Sequence: Synthetic oligonucleotide
uaagggugcuucgcagagu

SEQ ID NO: 2784723 - RNA, 19 nt, Artificial Sequence
  Description of Artificial Sequence: Synthetic oligonucleotide
ggcgcaacgagaagaacca

SEQ ID NO: 2784724 - RNA, 19 nt, Artificial Sequence
  Description of Artificial Sequence: Synthetic oligonucleotide
uccccagcuggggaugcag

SEQ ID NO: 2784725 - RNA, 19 nt, Artificial Sequence
  Description of Artificial Sequence: Synthetic oligonucleotide
cagguccuggggcgcaacg

SEQ ID NO: 2784726 - RNA, 19 nt, Artificial Sequence
  Description of Artificial Sequence: Synthetic oligonucleotide
uauccccagcuggggaugc

SEQ ID NO: 2784727 - RNA, 19 nt, Artificial Sequence
  Description of Artificial Sequence: Synthetic oligonucleotide
cuccaugauauccccagcu

SEQ ID NO: 2784728 - RNA, 19 nt, Artificial Sequence
  Description of Artificial Sequence: Synthetic oligonucleotide
gcguaagggugcuucgcag

SEQ ID NO: 2784729 - RNA, 19 nt, Artificial Sequence
  Description of Artificial Sequence: Synthetic oligonucleotide
acggccgacagugccaggu

SEQ ID NO: 2784730 - RNA, 19 nt, Artificial Sequence
  Description of Artificial Sequence: Synthetic oligonucleotide
cacuuagagcuccaugaua

SEQ ID NO: 2784731 - RNA, 19 nt, Artificial Sequence
  Description of Artificial Sequence: Synthetic oligonucleotide
gcagaguuccccuagguuu

SEQ ID NO: 2784732 - RNA, 19 nt, Artificial Sequence
  Description of Artificial Sequence: Synthetic oligonucleotide
ucgagacagcaccgaccug

SEQ ID NO: 2784733 - RNA, 19 nt, Artificial Sequence
  Description of Artificial Sequence: Synthetic oligonucleotide
gguugcuggucuuuguugu

SEQ ID NO: 2784734 - RNA, 19 nt, Artificial Sequence
  Description of Artificial Sequence: Synthetic oligonucleotide
cuggggcgcaacgagaaga

SEQ ID NO: 2784735 - RNA, 19 nt, Artificial Sequence
  Description of Artificial Sequence: Synthetic oligonucleotide
ggccaucagcacuuagagc

SEQ ID NO: 2784736 - RNA, 19 nt, Artificial Sequence
  Description of Artificial Sequence: Synthetic oligonucleotide
agcagucugagggccucag

SEQ ID NO: 2784737 - RNA, 19 nt, Artificial Sequence
  Description of Artificial Sequence: Synthetic oligonucleotide
gagaagcagcucugggcaa

SEQ ID NO: 2784738 - RNA, 19 nt, Artificial Sequence
  Description of Artificial Sequence: Synthetic oligonucleotide
aggcugagucgggagaagu

SEQ ID NO: 2784739 - RNA, 19 nt, Artificial Sequence
  Description of Artificial Sequence: Synthetic oligonucleotide
gccauguucuccucagaca

SEQ ID NO: 2784740 - RNA, 19 nt, Artificial Sequence
  Description of Artificial Sequence: Synthetic oligonucleotide
ucagcacuuagagcuccau

SEQ ID NO: 2784741 - RNA, 19 nt, Artificial Sequence
  Description of Artificial Sequence: Synthetic oligonucleotide
agggagucgagagguugug

SEQ ID NO: 2784742 - RNA, 19 nt, Artificial Sequence
  Description of Artificial Sequence: Synthetic oligonucleotide
ggucauuauguaggcugag

SEQ ID NO: 2784743 - RNA, 19 nt, Artificial Sequence
  Description of Artificial Sequence: Synthetic oligonucleotide
gggaugcaggguaguaggg

SEQ ID NO: 2784744 - RNA, 19 nt, Artificial Sequence
  Description of Artificial Sequence: Synthetic oligonucleotide
guaggcugagucgggagaa

SEQ ID NO: 2784745 - RNA, 19 nt, Artificial Sequence
  Description of Artificial Sequence: Synthetic oligonucleotide
cgaccugccgccuuaguug

SEQ ID NO: 2784746 - RNA, 19 nt, Artificial Sequence
  Description of Artificial Sequence: Synthetic oligonucleotide
guugaacggccgacagugc

SEQ ID NO: 2784747 - RNA, 19 nt, Artificial Sequence
  Description of Artificial Sequence: Synthetic oligonucleotide
cucacgcacguagggaguc

SEQ ID NO: 2784748 - RNA, 19 nt, Artificial Sequence
  Description of Artificial Sequence: Synthetic oligonucleotide
gaggggauucgguguagcu

SEQ ID NO: 2784749 - RNA, 19 nt, Artificial Sequence
  Description of Artificial Sequence: Synthetic oligonucleotide
uucccuggucggcggggug

SEQ ID NO: 2784750 - RNA, 19 nt, Artificial Sequence
  Description of Artificial Sequence: Synthetic oligonucleotide
gaaccacucucacgcacgu

SEQ ID NO: 2784751 - RNA, 19 nt, Artificial Sequence
  Description of Artificial Sequence: Synthetic oligonucleotide
gaccugccgccuuaguugu

SEQ ID NO: 2784752 - RNA, 19 nt, Artificial Sequence
  Description of Artificial Sequence: Synthetic oligonucleotide
guccuggacgcuacuuagc

SEQ ID NO: 2784753 - RNA, 19 nt, Artificial Sequence
  Description of Artificial Sequence: Synthetic oligonucleotide
guagcugggcaguccugga

SEQ ID NO: 2784754 - RNA, 19 nt, Artificial Sequence
  Description of Artificial Sequence: Synthetic oligonucleotide
ucgggagaaguggguggcc

SEQ ID NO: 2784755 - RNA, 19 nt, Artificial Sequence
  Description of Artificial Sequence: Synthetic oligonucleotide
aggugaggagggacacugg

SEQ ID NO: 2784756 - RNA, 19 nt, Artificial Sequence
  Description of Artificial Sequence: Synthetic oligonucleotide
aucaggcucccgggauagc

SEQ ID NO: 2784757 - RNA, 19 nt, Artificial Sequence
  Description of Artificial Sequence: Synthetic oligonucleotide
ggccgacagugccaggucc

SEQ ID NO: 2784758 - RNA, 19 nt, Artificial Sequence
  Description of Artificial Sequence: Synthetic oligonucleotide
ggggacugcaguaggggug

SEQ ID NO: 2784759 - RNA, 19 nt, Artificial Sequence
  Description of Artificial Sequence: Synthetic oligonucleotide
cagcucugggcaagggcuc

SEQ ID NO: 2784760 - RNA, 19 nt, Artificial Sequence
  Description of Artificial Sequence: Synthetic oligonucleotide
aggguaguagggacuggga

SEQ ID NO: 2784761 - RNA, 19 nt, Artificial Sequence
  Description of Artificial Sequence: Synthetic oligonucleotide
gccucagcagucugagggc

SEQ ID NO: 2784762 - RNA, 19 nt, Artificial Sequence
  Description of Artificial Sequence: Synthetic oligonucleotide
gugcuucgcagaguucccc

SEQ ID NO: 2784763 - RNA, 19 nt, Artificial Sequence
  Description of Artificial Sequence: Synthetic oligonucleotide
augcaggguaguagggacu

SEQ ID NO: 2784764 - RNA, 19 nt, Artificial Sequence
  Description of Artificial Sequence: Synthetic oligonucleotide
agaaguggguggccauguu

SEQ ID NO: 2784765 - RNA, 19 nt, Artificial Sequence
  Description of Artificial Sequence: Synthetic oligonucleotide
ccacucucacgcacguagg

SEQ ID NO: 2784766 - RNA, 19 nt, Artificial Sequence
  Description of Artificial Sequence: Synthetic oligonucleotide
gucauuauguaggcugagu

SEQ ID NO: 2784767 - RNA, 19 nt, Artificial Sequence
  Description of Artificial Sequence: Synthetic oligonucleotide
acacuggccaucagcacuu

SEQ ID NO: 2784768 - RNA, 19 nt, Artificial Sequence
  Description of Artificial Sequence: Synthetic oligonucleotide
gcugggcaguccuggacgc

SEQ ID NO: 2784769 - RNA, 19 nt, Artificial Sequence
  Description of Artificial Sequence: Synthetic oligonucleotide
gggcuuggggaaaagucac

SEQ ID NO: 2784770 - RNA, 19 nt, Artificial Sequence
  Description of Artificial Sequence: Synthetic oligonucleotide
ggagaaguggguggccaug

SEQ ID NO: 2784771 - RNA, 19 nt, Artificial Sequence
  Description of Artificial Sequence: Synthetic oligonucleotide
gaguuccccuagguuucag

SEQ ID NO: 2784772 - RNA, 19 nt, Artificial Sequence
  Description of Artificial Sequence: Synthetic oligonucleotide
gucggcgggguggggaggg

SEQ ID NO: 2784773 - RNA, 19 nt, Artificial Sequence
  Description of Artificial Sequence: Synthetic oligonucleotide
gagaaguggguggccaugu

SEQ ID NO: 2784774 - RNA, 19 nt, Artificial Sequence
  Description of Artificial Sequence: Synthetic oligonucleotide
ggaugcaggguaguaggga

SEQ ID NO: 2784775 - RNA, 19 nt, Artificial Sequence
  Description of Artificial Sequence: Synthetic oligonucleotide
gccucagggaucaggcucc

SEQ ID NO: 2784776 - RNA, 19 nt, Artificial Sequence
  Description of Artificial Sequence: Synthetic oligonucleotide
agcuggggaugcaggguag

SEQ ID NO: 2784777 - RNA, 19 nt, Artificial Sequence
  Description of Artificial Sequence: Synthetic oligonucleotide
gccgccuuaguuguugaac

SEQ ID NO: 2784778 - RNA, 19 nt, Artificial Sequence
  Description of Artificial Sequence: Synthetic oligonucleotide
ugccgccuuaguuguugaa

SEQ ID NO: 2784779 - RNA, 19 nt, Artificial Sequence
  Description of Artificial Sequence: Synthetic oligonucleotide
gcuccaugauauccccagc

SEQ ID NO: 2784780 - RNA, 19 nt, Artificial Sequence
  Description of Artificial Sequence: Synthetic oligonucleotide
gguguagcugggcaguccu

SEQ ID NO: 2784781 - RNA, 19 nt, Artificial Sequence
  Description of Artificial Sequence: Synthetic oligonucleotide
agaguuccccuagguuuca

SEQ ID NO: 2784782 - RNA, 19 nt, Artificial Sequence
  Description of Artificial Sequence: Synthetic oligonucleotide
cgccuuaguuguugaacgg

SEQ ID NO: 2784783 - RNA, 19 nt, Artificial Sequence
  Description of Artificial Sequence: Synthetic oligonucleotide
ggcuccugagugguggcag

SEQ ID NO: 2784784 - RNA, 19 nt, Artificial Sequence
  Description of Artificial Sequence: Synthetic oligonucleotide
agguccuggggcgcaacga

SEQ ID NO: 2784785 - RNA, 19 nt, Artificial Sequence
  Description of Artificial Sequence: Synthetic oligonucleotide
caguccuggacgcuacuua

SEQ ID NO: 2784786 - RNA, 19 nt, Artificial Sequence
  Description of Artificial Sequence: Synthetic oligonucleotide
cgagaagaaccacucucac

SEQ ID NO: 2784787 - RNA, 19 nt, Artificial Sequence
  Description of Artificial Sequence: Synthetic oligonucleotide
gagugguggcagggcuugg

SEQ ID NO: 2784788 - RNA, 19 nt, Artificial Sequence
  Description of Artificial Sequence: Synthetic oligonucleotide
ggugcuucgcagaguuccc

SEQ ID NO: 2784789 - RNA, 19 nt, Artificial Sequence
  Description of Artificial Sequence: Synthetic oligonucleotide
ccagccucagcagucugag

SEQ ID NO: 2784790 - RNA, 19 nt, Artificial Sequence
  Description of Artificial Sequence: Synthetic oligonucleotide
gacugcaguaggggugguc

SEQ ID NO: 2784791 - RNA, 19 nt, Artificial Sequence
  Description of Artificial Sequence: Synthetic oligonucleotide
aucagcacuuagagcucca

SEQ ID NO: 2784792 - RNA, 19 nt, Artificial Sequence
  Description of Artificial Sequence: Synthetic oligonucleotide
gagcuccaugauaucccca

SEQ ID NO: 2784793 - RNA, 19 nt, Artificial Sequence
  Description of Artificial Sequence: Synthetic oligonucleotide
ccucagcagucugagggcc

SEQ ID NO: 2784794 - RNA, 19 nt, Artificial Sequence
  Description of Artificial Sequence: Synthetic oligonucleotide
gugcaaggguucccugguc

SEQ ID NO: 2784795 - RNA, 19 nt, Artificial Sequence
  Description of Artificial Sequence: Synthetic oligonucleotide
ggacgcuacuuagcguaag

SEQ ID NO: 2784796 - RNA, 19 nt, Artificial Sequence
  Description of Artificial Sequence: Synthetic oligonucleotide
cagcuggggaugcagggua

SEQ ID NO: 2784797 - RNA, 19 nt, Artificial Sequence
  Description of Artificial Sequence: Synthetic oligonucleotide
cucagggaucaggcucccg

SEQ ID NO: 2784798 - RNA, 19 nt, Artificial Sequence
  Description of Artificial Sequence: Synthetic oligonucleotide
ucgguguagcugggcaguc

SEQ ID NO: 2784799 - RNA, 19 nt, Artificial Sequence
  Description of Artificial Sequence: Synthetic oligonucleotide
ggaggggauucgguguagc

SEQ ID NO: 2784800 - RNA, 19 nt, Artificial Sequence
  Description of Artificial Sequence: Synthetic oligonucleotide
gguucccuggucggcgggg

SEQ ID NO: 2784801 - RNA, 19 nt, Artificial Sequence
  Description of Artificial Sequence: Synthetic oligonucleotide
ggaacaaggugaggaggga

SEQ ID NO: 2784802 - RNA, 19 nt, Artificial Sequence
  Description of Artificial Sequence: Synthetic oligonucleotide
caacgagaagaaccacucu

SEQ ID NO: 2784803 - RNA, 19 nt, Artificial Sequence
  Description of Artificial Sequence: Synthetic oligonucleotide
agcaccgaccugccgccuu

SEQ ID NO: 2784804 - RNA, 19 nt, Artificial Sequence
  Description of Artificial Sequence: Synthetic oligonucleotide
ccgggauagcgccagagaa

SEQ ID NO: 2784805 - RNA, 19 nt, Artificial Sequence
  Description of Artificial Sequence: Synthetic oligonucleotide
gcagcucugggcaagggcu

SEQ ID NO: 2784806 - RNA, 19 nt, Artificial Sequence
  Description of Artificial Sequence: Synthetic oligonucleotide
agggugcuucgcagaguuc

SEQ ID NO: 2784807 - RNA, 19 nt, Artificial Sequence
  Description of Artificial Sequence: Synthetic oligonucleotide
guguagcugggcaguccug

SEQ ID NO: 2784808 - RNA, 19 nt, Artificial Sequence
  Description of Artificial Sequence: Synthetic oligonucleotide
ggauucgguguagcugggc

SEQ ID NO: 2784809 - RNA, 19 nt, Artificial Sequence
  Description of Artificial Sequence: Synthetic oligonucleotide
ggagggacacuggccauca

SEQ ID NO: 2784810 - RNA, 19 nt, Artificial Sequence
  Description of Artificial Sequence: Synthetic oligonucleotide
cccuagguuucagugguuc

SEQ ID NO: 2784811 - RNA, 19 nt, Artificial Sequence
  Description of Artificial Sequence: Synthetic oligonucleotide
aaccacucucacgcacgua

SEQ ID NO: 2784812 - RNA, 19 nt, Artificial Sequence
  Description of Artificial Sequence: Synthetic oligonucleotide
gcgccagagaagcagcucu

SEQ ID NO: 2784813 - RNA, 19 nt, Artificial Sequence
  Description of Artificial Sequence: Synthetic oligonucleotide
ugccagguccuggggcgca

SEQ ID NO: 2784814 - RNA, 19 nt, Artificial Sequence
  Description of Artificial Sequence: Synthetic oligonucleotide
ccugccgccuuaguuguug

SEQ ID NO: 2784815 - RNA, 19 nt, Artificial Sequence
  Description of Artificial Sequence: Synthetic oligonucleotide
accgaccugccgccuuagu

SEQ ID NO: 2784816 - RNA, 19 nt, Artificial Sequence
  Description of Artificial Sequence: Synthetic oligonucleotide
gggauucgguguagcuggg

SEQ ID NO: 2784817 - RNA, 19 nt, Artificial Sequence
  Description of Artificial Sequence: Synthetic oligonucleotide
acgcacguagggagucgag

SEQ ID NO: 2784818 - RNA, 19 nt, Artificial Sequence
  Description of Artificial Sequence: Synthetic oligonucleotide
ggguucccuggucggcggg

SEQ ID NO: 2784819 - RNA, 19 nt, Artificial Sequence
  Description of Artificial Sequence: Synthetic oligonucleotide
uggcagggcuuggggaaaa

SEQ ID NO: 2784820 - RNA, 19 nt, Artificial Sequence
  Description of Artificial Sequence: Synthetic oligonucleotide
ggaucaggcucccgggaua

SEQ ID NO: 2784821 - RNA, 19 nt, Artificial Sequence
  Description of Artificial Sequence: Synthetic oligonucleotide
uaguagggacugggaguau

SEQ ID NO: 2784822 - RNA, 19 nt, Artificial Sequence
  Description of Artificial Sequence: Synthetic oligonucleotide
gcaguagggguggucauua

SEQ ID NO: 2784823 - RNA, 19 nt, Artificial Sequence
  Description of Artificial Sequence: Synthetic oligonucleotide
cugccgccuuaguuguuga

SEQ ID NO: 2784824 - RNA, 19 nt, Artificial Sequence
  Description of Artificial Sequence: Synthetic oligonucleotide
ggguggggaggggauucgg

SEQ ID NO: 2784825 - RNA, 19 nt, Artificial Sequence
  Description of Artificial Sequence: Synthetic oligonucleotide
cacgcacguagggagucga

SEQ ID NO: 2784826 - RNA, 19 nt, Artificial Sequence
  Description of Artificial Sequence: Synthetic oligonucleotide
cguaagggugcuucgcaga

SEQ ID NO: 2784827 - RNA, 19 nt, Artificial Sequence
  Description of Artificial Sequence: Synthetic oligonucleotide
guccuggggcgcaacgaga

SEQ ID NO: 2784828 - RNA, 19 nt, Artificial Sequence
  Description of Artificial Sequence: Synthetic oligonucleotide
gcucccgggauagcgccag

SEQ ID NO: 2784829 - RNA, 19 nt, Artificial Sequence
  Description of Artificial Sequence: Synthetic oligonucleotide
gcaggguaguagggacugg

SEQ ID NO: 2784830 - RNA, 19 nt, Artificial Sequence
  Description of Artificial Sequence: Synthetic oligonucleotide
ucggcgggguggggagggg

SEQ ID NO: 2784831 - RNA, 19 nt, Artificial Sequence
  Description of Artificial Sequence: Synthetic oligonucleotide
cucagcagucugagggccu

SEQ ID NO: 2784832 - RNA, 19 nt, Artificial Sequence
  Description of Artificial Sequence: Synthetic oligonucleotide
cuggucggcggggugggga

SEQ ID NO: 2784833 - RNA, 19 nt, Artificial Sequence
  Description of Artificial Sequence: Synthetic oligonucleotide
gggguggggaggggauucg

SEQ ID NO: 2784834 - RNA, 19 nt, Artificial Sequence
  Description of Artificial Sequence: Synthetic oligonucleotide
gcacuuagagcuccaugau

SEQ ID NO: 2784835 - RNA, 19 nt, Artificial Sequence
  Description of Artificial Sequence: Synthetic oligonucleotide
gggaggggauucgguguag

SEQ ID NO: 2784836 - RNA, 19 nt, Artificial Sequence
  Description of Artificial Sequence: Synthetic oligonucleotide
ggggaggggauucggugua

SEQ ID NO: 2784837 - RNA, 19 nt, Artificial Sequence
  Description of Artificial Sequence: Synthetic oligonucleotide
ggcuuggggaaaagucaca

SEQ ID NO: 2784838 - RNA, 19 nt, Artificial Sequence
  Description of Artificial Sequence: Synthetic oligonucleotide
gcuugugcaaggguucccu

SEQ ID NO: 2784839 - RNA, 19 nt, Artificial Sequence
  Description of Artificial Sequence: Synthetic oligonucleotide
ccuggggcgcaacgagaag

SEQ ID NO: 2784840 - RNA, 19 nt, Artificial Sequence
  Description of Artificial Sequence: Synthetic oligonucleotide
cgcuacuuagcguaagggu

SEQ ID NO: 2784841 - RNA, 19 nt, Artificial Sequence
  Description of Artificial Sequence: Synthetic oligonucleotide
caccgaccugccgccuuag

SEQ ID NO: 2784842 - RNA, 19 nt, Artificial Sequence
  Description of Artificial Sequence: Synthetic oligonucleotide
acuuagcguaagggugcuu

SEQ ID NO: 2784843 - RNA, 19 nt, Artificial Sequence
  Description of Artificial Sequence: Synthetic oligonucleotide
ggcagggcuuggggaaaag

SEQ ID NO: 2784844 - RNA, 19 nt, Artificial Sequence
  Description of Artificial Sequence: Synthetic oligonucleotide
gcuucgcagaguuccccua

SEQ ID NO: 2784845 - RNA, 19 nt, Artificial Sequence
  Description of Artificial Sequence: Synthetic oligonucleotide
cuggggaugcaggguagua

SEQ ID NO: 2784846 - RNA, 19 nt, Artificial Sequence
  Description of Artificial Sequence: Synthetic oligonucleotide
guggcagggcuuggggaaa

SEQ ID NO: 2784847 - RNA, 19 nt, Artificial Sequence
  Description of Artificial Sequence: Synthetic oligonucleotide
gguggucauuauguaggcu

SEQ ID NO: 2784848 - RNA, 19 nt, Artificial Sequence
  Description of Artificial Sequence: Synthetic oligonucleotide
cgcaacgagaagaaccacu

SEQ ID NO: 2784849 - RNA, 19 nt, Artificial Sequence
  Description of Artificial Sequence: Synthetic oligonucleotide
gggaucaggcucccgggau

SEQ ID NO: 2784850 - RNA, 19 nt, Artificial Sequence
  Description of Artificial Sequence: Synthetic oligonucleotide
ggauagcgccagagaagca

SEQ ID NO: 2784851 - RNA, 19 nt, Artificial Sequence
  Description of Artificial Sequence: Synthetic oligonucleotide
auccccagcuggggaugca

SEQ ID NO: 2784852 - RNA, 19 nt, Artificial Sequence
  Description of Artificial Sequence: Synthetic oligonucleotide
gggguugcuggucuuuguu

SEQ ID NO: 2784853 - RNA, 19 nt, Artificial Sequence
  Description of Artificial Sequence: Synthetic oligonucleotide
ggucggcgggguggggagg

SEQ ID NO: 2784854 - RNA, 19 nt, Artificial Sequence
  Description of Artificial Sequence: Synthetic oligonucleotide
ggggcgcaacgagaagaac

SEQ ID NO: 2784855 - RNA, 19 nt, Artificial Sequence
  Description of Artificial Sequence: Synthetic oligonucleotide
gggcaguccuggacgcuac

SEQ ID NO: 2784856 - RNA, 19 nt, Artificial Sequence
  Description of Artificial Sequence: Synthetic oligonucleotide
cccgggauagcgccagaga

SEQ ID NO: 2784857 - RNA, 19 nt, Artificial Sequence
  Description of Artificial Sequence: Synthetic oligonucleotide
caaggugaggagggacacu

SEQ ID NO: 2784858 - RNA, 19 nt, Artificial Sequence
  Description of Artificial Sequence: Synthetic oligonucleotide
cugcaguagggguggucau

SEQ ID NO: 2784859 - RNA, 19 nt, Artificial Sequence
  Description of Artificial Sequence: Synthetic oligonucleotide
gcgcaacgagaagaaccac

SEQ ID NO: 2784860 - RNA, 19 nt, Artificial Sequence
  Description of Artificial Sequence: Synthetic oligonucleotide
gggagaaguggguggccau

SEQ ID NO: 2784861 - RNA, 19 nt, Artificial Sequence
  Description of Artificial Sequence: Synthetic oligonucleotide
ccgacagugccagguccug

SEQ ID NO: 2784862 - RNA, 19 nt, Artificial Sequence
  Description of Artificial Sequence: Synthetic oligonucleotide
gguggggaggggauucggu

SEQ ID NO: 2784863 - RNA, 19 nt, Artificial Sequence
  Description of Artificial Sequence: Synthetic oligonucleotide
guucccuggucggcggggu

SEQ ID NO: 2784864 - RNA, 19 nt, Artificial Sequence
  Description of Artificial Sequence: Synthetic oligonucleotide
cccuggucggcgggguggg

SEQ ID NO: 2784865 - RNA, 19 nt, Artificial Sequence
  Description of Artificial Sequence: Synthetic oligonucleotide
cagcagucugagggccuca

SEQ ID NO: 2784866 - RNA, 19 nt, Artificial Sequence
  Description of Artificial Sequence: Synthetic oligonucleotide
gcagggcuuggggaaaagu

SEQ ID NO: 2784867 - RNA, 19 nt, Artificial Sequence
  Description of Artificial Sequence: Synthetic oligonucleotide
cgguguagcugggcagucc

SEQ ID NO: 2784868 - RNA, 19 nt, Artificial Sequence
  Description of Artificial Sequence: Synthetic oligonucleotide
ccucagggaucaggcuccc

SEQ ID NO: 2784869 - RNA, 19 nt, Artificial Sequence
  Description of Artificial Sequence: Synthetic oligonucleotide
caguagggguggucauuau

SEQ ID NO: 2784870 - RNA, 19 nt, Artificial Sequence
  Description of Artificial Sequence: Synthetic oligonucleotide
ccuggacgcuacuuagcgu

SEQ ID NO: 2784871 - RNA, 19 nt, Artificial Sequence
  Description of Artificial Sequence: Synthetic oligonucleotide
gggagucgagagguugugu

SEQ ID NO: 2784872 - RNA, 19 nt, Artificial Sequence
  Description of Artificial Sequence: Synthetic oligonucleotide
gcaccgaccugccgccuua

SEQ ID NO: 2784873 - RNA, 19 nt, Artificial Sequence
  Description of Artificial Sequence: Synthetic oligonucleotide
gggcuccugagugguggca

SEQ ID NO: 2784874 - RNA, 19 nt, Artificial Sequence
  Description of Artificial Sequence: Synthetic oligonucleotide
cgcacguagggagucgaga

SEQ ID NO: 2784875 - RNA, 19 nt, Artificial Sequence
  Description of Artificial Sequence: Synthetic oligonucleotide
gccgacagugccagguccu

SEQ ID NO: 2784876 - RNA, 19 nt, Artificial Sequence
  Description of Artificial Sequence: Synthetic oligonucleotide
gggccucagggaucaggcu

SEQ ID NO: 2784877 - RNA, 19 nt, Artificial Sequence
  Description of Artificial Sequence: Synthetic oligonucleotide
ccccagccucagcagucug

SEQ ID NO: 2784878 - RNA, 19 nt, Artificial Sequence
  Description of Artificial Sequence: Synthetic oligonucleotide
cucccgggauagcgccaga

SEQ ID NO: 2784879 - RNA, 19 nt, Artificial Sequence
  Description of Artificial Sequence: Synthetic oligonucleotide
ggcaguccuggacgcuacu

SEQ ID NO: 2784880 - RNA, 19 nt, Artificial Sequence
  Description of Artificial Sequence: Synthetic oligonucleotide
cgggagaaguggguggcca

SEQ ID NO: 2784881 - RNA, 19 nt, Artificial Sequence
  Description of Artificial Sequence: Synthetic oligonucleotide
cgggguggggaggggauuc

SEQ ID NO: 2784882 - RNA, 19 nt, Artificial Sequence
  Description of Artificial Sequence: Synthetic oligonucleotide
ccagguccuggggcgcaac

SEQ ID NO: 2784883 - RNA, 19 nt, Artificial Sequence
  Description of Artificial Sequence: Synthetic oligonucleotide
gcuggggaugcaggguagu

SEQ ID NO: 2784884 - RNA, 19 nt, Artificial Sequence
  Description of Artificial Sequence: Synthetic oligonucleotide
ccgaccugccgccuuaguu

SEQ ID NO: 2784885 - RNA, 19 nt, Artificial Sequence
  Description of Artificial Sequence: Synthetic oligonucleotide
gcaguccuggacgcuacuu

SEQ ID NO: 2784886 - RNA, 19 nt, Artificial Sequence
  Description of Artificial Sequence: Synthetic oligonucleotide
cugggcaguccuggacgcu

SEQ ID NO: 2784887 - RNA, 19 nt, Artificial Sequence
  Description of Artificial Sequence: Synthetic oligonucleotide
cggccgacagugccagguc

SEQ ID NO: 2784888 - RNA, 19 nt, Artificial Sequence
  Description of Artificial Sequence: Synthetic oligonucleotide
accugccgccuuaguuguu

SEQ ID NO: 2784889 - RNA, 19 nt, Artificial Sequence
  Description of Artificial Sequence: Synthetic oligonucleotide
ccuggucggcggggugggg

SEQ ID NO: 2784890 - RNA, 19 nt, Artificial Sequence
  Description of Artificial Sequence: Synthetic oligonucleotide
cacuggccaucagcacuua

SEQ ID NO: 2784891 - RNA, 19 nt, Artificial Sequence
  Description of Artificial Sequence: Synthetic oligonucleotide
cgcagaguuccccuagguu

SEQ ID NO: 2784892 - RNA, 19 nt, Artificial Sequence
  Description of Artificial Sequence: Synthetic oligonucleotide
ggcgggguggggaggggau

SEQ ID NO: 2784893 - RNA, 19 nt, Artificial Sequence
  Description of Artificial Sequence: Synthetic oligonucleotide
gcucugggcaagggcuccu

SEQ ID NO: 2784894 - RNA, 19 nt, Artificial Sequence
  Description of Artificial Sequence: Synthetic oligonucleotide
gccagguccuggggcgcaa

SEQ ID NO: 2784895 - RNA, 19 nt, Artificial Sequence
  Description of Artificial Sequence: Synthetic oligonucleotide
ggacugcaguagggguggu

SEQ ID NO: 2784896 - RNA, 19 nt, Artificial Sequence
  Description of Artificial Sequence: Synthetic oligonucleotide
cagcaccgaccugccgccu

SEQ ID NO: 2784897 - RNA, 19 nt, Artificial Sequence
  Description of Artificial Sequence: Synthetic oligonucleotide
cguagggagucgagagguu

SEQ ID NO: 2784898 - RNA, 19 nt, Artificial Sequence
  Description of Artificial Sequence: Synthetic oligonucleotide
ccccuagguuucagugguu

SEQ ID NO: 2784899 - RNA, 19 nt, Artificial Sequence
  Description of Artificial Sequence: Synthetic oligonucleotide
gcgggguggggaggggauu

SEQ ID NO: 2784900 - RNA, 19 nt, Artificial Sequence
  Description of Artificial Sequence: Synthetic oligonucleotide
uuaaauucaacuaagggaa

SEQ ID NO: 2784901 - RNA, 19 nt, Artificial Sequence
  Description of Artificial Sequence: Synthetic oligonucleotide
aauaucuucacuuccaaga

SEQ ID NO: 2784902 - RNA, 19 nt, Artificial Sequence
  Description of Artificial Sequence: Synthetic oligonucleotide
uauaacuuuaguuaaauuc

SEQ ID NO: 2784903 - RNA, 19 nt, Artificial Sequence
  Description of Artificial Sequence: Synthetic oligonucleotide
aaugguguugcugaguugc

SEQ ID NO: 2784904 - RNA, 19 nt, Artificial Sequence
  Description of Artificial Sequence: Synthetic oligonucleotide
gaaaauauaacuuuaguua

SEQ ID NO: 2784905 - RNA, 19 nt, Artificial Sequence
  Description of Artificial Sequence: Synthetic oligonucleotide
aguuaaauucaacuaaggg

SEQ ID NO: 2784906 - RNA, 19 nt, Artificial Sequence
  Description of Artificial Sequence: Synthetic oligonucleotide
acaagaaucuuccuuuucc

SEQ ID NO: 2784907 - RNA, 19 nt, Artificial Sequence
  Description of Artificial Sequence: Synthetic oligonucleotide
uuuaguuaaauucaacuaa

SEQ ID NO: 2784908 - RNA, 19 nt, Artificial Sequence
  Description of Artificial Sequence: Synthetic oligonucleotide
uuaguuaaauucaacuaag

SEQ ID NO: 2784909 - RNA, 19 nt, Artificial Sequence
  Description of Artificial Sequence: Synthetic oligonucleotide
guuaaauucaacuaaggga

SEQ ID NO: 2784910 - RNA, 19 nt, Artificial Sequence
  Description of Artificial Sequence: Synthetic oligonucleotide
agaacaaagcaccagcggg

SEQ ID NO: 2784911 - RNA, 19 nt, Artificial Sequence
  Description of Artificial Sequence: Synthetic oligonucleotide
ucaacuaagggaaggagug

SEQ ID NO: 2784912 - RNA, 19 nt, Artificial Sequence
  Description of Artificial Sequence: Synthetic oligonucleotide
cucaugaccacaucgaggg

SEQ ID NO: 2784913 - RNA, 19 nt, Artificial Sequence
  Description of Artificial Sequence: Synthetic oligonucleotide
aaaucucgcacgucuaugg

SEQ ID NO: 2784914 - RNA, 19 nt, Artificial Sequence
  Description of Artificial Sequence: Synthetic oligonucleotide
ucuuaugcugagaacaaag

SEQ ID NO: 2784915 - RNA, 19 nt, Artificial Sequence
  Description of Artificial Sequence: Synthetic oligonucleotide
ugggcagaaauccaagucg

SEQ ID NO: 2784916 - RNA, 19 nt, Artificial Sequence
  Description of Artificial Sequence: Synthetic oligonucleotide
uaugcugagaacaaagcac

SEQ ID NO: 2784917 - RNA, 19 nt, Artificial Sequence
  Description of Artificial Sequence: Synthetic oligonucleotide
cuauggagaagccacagcg

SEQ ID NO: 2784918 - RNA, 19 nt, Artificial Sequence
  Description of Artificial Sequence: Synthetic oligonucleotide
aaaagguacaagaaucuuc

SEQ ID NO: 2784919 - RNA, 19 nt, Artificial Sequence
  Description of Artificial Sequence: Synthetic oligonucleotide
ugagaacaaagcaccagcg

SEQ ID NO: 2784920 - RNA, 19 nt, Artificial Sequence
  Description of Artificial Sequence: Synthetic oligonucleotide
uaguuaaauucaacuaagg

SEQ ID NO: 2784921 - RNA, 19 nt, Artificial Sequence
  Description of Artificial Sequence: Synthetic oligonucleotide
aaauucaacuaagggaagg

SEQ ID NO: 2784922 - RNA, 19 nt, Artificial Sequence
  Description of Artificial Sequence: Synthetic oligonucleotide
ugaucuuaugcugagaaca

SEQ ID NO: 2784923 - RNA, 19 nt, Artificial Sequence
  Description of Artificial Sequence: Synthetic oligonucleotide
acagguauagaagacaguc

SEQ ID NO: 2784924 - RNA, 19 nt, Artificial Sequence
  Description of Artificial Sequence: Synthetic oligonucleotide
ugaaacuugcaguugacac

SEQ ID NO: 2784925 - RNA, 19 nt, Artificial Sequence
  Description of Artificial Sequence: Synthetic oligonucleotide
uuaugcugagaacaaagca

SEQ ID NO: 2784926 - RNA, 19 nt, Artificial Sequence
  Description of Artificial Sequence: Synthetic oligonucleotide
aaacuugcaguugacacag

SEQ ID NO: 2784927 - RNA, 19 nt, Artificial Sequence
  Description of Artificial Sequence: Synthetic oligonucleotide
uucacuuccaagaggagga

SEQ ID NO: 2784928 - RNA, 19 nt, Artificial Sequence
  Description of Artificial Sequence: Synthetic oligonucleotide
uuuuccugaaacuugcagu

SEQ ID NO: 2784929 - RNA, 19 nt, Artificial Sequence
  Description of Artificial Sequence: Synthetic oligonucleotide
uugacacagguauagaaga

SEQ ID NO: 2784930 - RNA, 19 nt, Artificial Sequence
  Description of Artificial Sequence: Synthetic oligonucleotide
agguauagaagacagucug

SEQ ID NO: 2784931 - RNA, 19 nt, Artificial Sequence
  Description of Artificial Sequence: Synthetic oligonucleotide
aaaggaccaauaucuucac

SEQ ID NO: 2784932 - RNA, 19 nt, Artificial Sequence
  Description of Artificial Sequence: Synthetic oligonucleotide
uguggaacacgacugaggu

SEQ ID NO: 2784933 - RNA, 19 nt, Artificial Sequence
  Description of Artificial Sequence: Synthetic oligonucleotide
auagaagacagucugcccu

SEQ ID NO: 2784934 - RNA, 19 nt, Artificial Sequence
  Description of Artificial Sequence: Synthetic oligonucleotide
acaaaggaccaauaucuuc

SEQ ID NO: 2784935 - RNA, 19 nt, Artificial Sequence
  Description of Artificial Sequence: Synthetic oligonucleotide
uucgaaaucucgcacgucu

SEQ ID NO: 2784936 - RNA, 19 nt, Artificial Sequence
  Description of Artificial Sequence: Synthetic oligonucleotide
acgacugaggucuuuacag

SEQ ID NO: 2784937 - RNA, 19 nt, Artificial Sequence
  Description of Artificial Sequence: Synthetic oligonucleotide
uggaacacgacugaggucu

SEQ ID NO: 2784938 - RNA, 19 nt, Artificial Sequence
  Description of Artificial Sequence: Synthetic oligonucleotide
auccaagucggacugaaag

SEQ ID NO: 2784939 - RNA, 19 nt, Artificial Sequence
  Description of Artificial Sequence: Synthetic oligonucleotide
gaaggagaaggcaacaaag

SEQ ID NO: 2784940 - RNA, 19 nt, Artificial Sequence
  Description of Artificial Sequence: Synthetic oligonucleotide
auaucuucacuuccaagag

SEQ ID NO: 2784941 - RNA, 19 nt, Artificial Sequence
  Description of Artificial Sequence: Synthetic oligonucleotide
uucaacuaagggaaggagu

SEQ ID NO: 2784942 - RNA, 19 nt, Artificial Sequence
  Description of Artificial Sequence: Synthetic oligonucleotide
uugcaguugacacagguau

SEQ ID NO: 2784943 - RNA, 19 nt, Artificial Sequence
  Description of Artificial Sequence: Synthetic oligonucleotide
agaaauccaagucggacug

SEQ ID NO: 2784944 - RNA, 19 nt, Artificial Sequence
  Description of Artificial Sequence: Synthetic oligonucleotide
cuuaugcugagaacaaagc

SEQ ID NO: 2784945 - RNA, 19 nt, Artificial Sequence
  Description of Artificial Sequence: Synthetic oligonucleotide
uccaagaggaggaauggug

SEQ ID NO: 2784946 - RNA, 19 nt, Artificial Sequence
  Description of Artificial Sequence: Synthetic oligonucleotide
agguccuuccuccacagac

SEQ ID NO: 2784947 - RNA, 19 nt, Artificial Sequence
  Description of Artificial Sequence: Synthetic oligonucleotide
gagaacaaagcaccagcgg

SEQ ID NO: 2784948 - RNA, 19 nt, Artificial Sequence
  Description of Artificial Sequence: Synthetic oligonucleotide
aagaaucuuccuuuuccug

SEQ ID NO: 2784949 - RNA, 19 nt, Artificial Sequence
  Description of Artificial Sequence: Synthetic oligonucleotide
augcugagaacaaagcacc

SEQ ID NO: 2784950 - RNA, 19 nt, Artificial Sequence
  Description of Artificial Sequence: Synthetic oligonucleotide
aacuuuaguuaaauucaac

SEQ ID NO: 2784951 - RNA, 19 nt, Artificial Sequence
  Description of Artificial Sequence: Synthetic oligonucleotide
acgccauucccucaugacc

SEQ ID NO: 2784952 - RNA, 19 nt, Artificial Sequence
  Description of Artificial Sequence: Synthetic oligonucleotide
gaugaucuuaugcugagaa

SEQ ID NO: 2784953 - RNA, 19 nt, Artificial Sequence
  Description of Artificial Sequence: Synthetic oligonucleotide
uuguggaacacgacugagg

SEQ ID NO: 2784954 - RNA, 19 nt, Artificial Sequence
  Description of Artificial Sequence: Synthetic oligonucleotide
agaaucuuccuuuuccuga

SEQ ID NO: 2784955 - RNA, 19 nt, Artificial Sequence
  Description of Artificial Sequence: Synthetic oligonucleotide
uccuuuuccugaaacuugc

SEQ ID NO: 2784956 - RNA, 19 nt, Artificial Sequence
  Description of Artificial Sequence: Synthetic oligonucleotide
gacugaaagcuggagacgg

SEQ ID NO: 2784957 - RNA, 19 nt, Artificial Sequence
  Description of Artificial Sequence: Synthetic oligonucleotide
cugagaacaaagcaccagc

SEQ ID NO: 2784958 - RNA, 19 nt, Artificial Sequence
  Description of Artificial Sequence: Synthetic oligonucleotide
caaaggaccaauaucuuca

SEQ ID NO: 2784959 - RNA, 19 nt, Artificial Sequence
  Description of Artificial Sequence: Synthetic oligonucleotide
aucuuccuuuuccugaaac

SEQ ID NO: 2784960 - RNA, 19 nt, Artificial Sequence
  Description of Artificial Sequence: Synthetic oligonucleotide
aauucaacuaagggaagga

SEQ ID NO: 2784961 - RNA, 19 nt, Artificial Sequence
  Description of Artificial Sequence: Synthetic oligonucleotide
ucaaccacuggucccuggg

SEQ ID NO: 2784962 - RNA, 19 nt, Artificial Sequence
  Description of Artificial Sequence: Synthetic oligonucleotide
gaacaaagcaccagcgggg

SEQ ID NO: 2784963 - RNA, 19 nt, Artificial Sequence
  Description of Artificial Sequence: Synthetic oligonucleotide
gacugaggucuuuacagcc

SEQ ID NO: 2784964 - RNA, 19 nt, Artificial Sequence
  Description of Artificial Sequence: Synthetic oligonucleotide
cagacguagguauagccgc

SEQ ID NO: 2784965 - RNA, 19 nt, Artificial Sequence
  Description of Artificial Sequence: Synthetic oligonucleotide
uuccuuuuccugaaacuug

SEQ ID NO: 2784966 - RNA, 19 nt, Artificial Sequence
  Description of Artificial Sequence: Synthetic oligonucleotide
agaggaggaaugguguugc

SEQ ID NO: 2784967 - RNA, 19 nt, Artificial Sequence
  Description of Artificial Sequence: Synthetic oligonucleotide
caacaaaggaccaauaucu

SEQ ID NO: 2784968 - RNA, 19 nt, Artificial Sequence
  Description of Artificial Sequence: Synthetic oligonucleotide
gaaacuugcaguugacaca

SEQ ID NO: 2784969 - RNA, 19 nt, Artificial Sequence
  Description of Artificial Sequence: Synthetic oligonucleotide
guauagaagacagucugcc

SEQ ID NO: 2784970 - RNA, 19 nt, Artificial Sequence
  Description of Artificial Sequence: Synthetic oligonucleotide
guugacacagguauagaag

SEQ ID NO: 2784971 - RNA, 19 nt, Artificial Sequence
  Description of Artificial Sequence: Synthetic oligonucleotide
augaucuuaugcugagaac

SEQ ID NO: 2784972 - RNA, 19 nt, Artificial Sequence
  Description of Artificial Sequence: Synthetic oligonucleotide
uauagaagacagucugccc

SEQ ID NO: 2784973 - RNA, 19 nt, Artificial Sequence
  Description of Artificial Sequence: Synthetic oligonucleotide
aggaccaauaucuucacuu

SEQ ID NO: 2784974 - RNA, 19 nt, Artificial Sequence
  Description of Artificial Sequence: Synthetic oligonucleotide
acgucuauggagaagccac

SEQ ID NO: 2784975 - RNA, 19 nt, Artificial Sequence
  Description of Artificial Sequence: Synthetic oligonucleotide
aagucggacugaaagcugg

SEQ ID NO: 2784976 - RNA, 19 nt, Artificial Sequence
  Description of Artificial Sequence: Synthetic oligonucleotide
cuuuaguuaaauucaacua

SEQ ID NO: 2784977 - RNA, 19 nt, Artificial Sequence
  Description of Artificial Sequence: Synthetic oligonucleotide
uccaagucggacugaaagc

SEQ ID NO: 2784978 - RNA, 19 nt, Artificial Sequence
  Description of Artificial Sequence: Synthetic oligonucleotide
ucucgcacgucuauggaga

SEQ ID NO: 2784979 - RNA, 19 nt, Artificial Sequence
  Description of Artificial Sequence: Synthetic oligonucleotide
gucccugggauucaggucc

SEQ ID NO: 2784980 - RNA, 19 nt, Artificial Sequence
  Description of Artificial Sequence: Synthetic oligonucleotide
agcauccugaguuccuggc

SEQ ID NO: 2784981 - RNA, 19 nt, Artificial Sequence
  Description of Artificial Sequence: Synthetic oligonucleotide
cuucacuuccaagaggagg

SEQ ID NO: 2784982 - RNA, 19 nt, Artificial Sequence
  Description of Artificial Sequence: Synthetic oligonucleotide
aacgcaucugucuggugug

SEQ ID NO: 2784983 - RNA, 19 nt, Artificial Sequence
  Description of Artificial Sequence: Synthetic oligonucleotide
aacuaagggaaggagugcu

SEQ ID NO: 2784984 - RNA, 19 nt, Artificial Sequence
  Description of Artificial Sequence: Synthetic oligonucleotide
gaccaauaucuucacuucc

SEQ ID NO: 2784985 - RNA, 19 nt, Artificial Sequence
  Description of Artificial Sequence: Synthetic oligonucleotide
aguugacacagguauagaa

SEQ ID NO: 2784986 - RNA, 19 nt, Artificial Sequence
  Description of Artificial Sequence: Synthetic oligonucleotide
aagggaaggagugcucugg

SEQ ID NO: 2784987 - RNA, 19 nt, Artificial Sequence
  Description of Artificial Sequence: Synthetic oligonucleotide
ucuauggagaagccacagc

SEQ ID NO: 2784988 - RNA, 19 nt, Artificial Sequence
  Description of Artificial Sequence: Synthetic oligonucleotide
ucuuccuuuuccugaaacu

SEQ ID NO: 2784989 - RNA, 19 nt, Artificial Sequence
  Description of Artificial Sequence: Synthetic oligonucleotide
uauggagaagccacagcga

SEQ ID NO: 2784990 - RNA, 19 nt, Artificial Sequence
  Description of Artificial Sequence: Synthetic oligonucleotide
acaucgagggcaucgccgg

SEQ ID NO: 2784991 - RNA, 19 nt, Artificial Sequence
  Description of Artificial Sequence: Synthetic oligonucleotide
acagacguagguauagccg

SEQ ID NO: 2784992 - RNA, 19 nt, Artificial Sequence
  Description of Artificial Sequence: Synthetic oligonucleotide
cuuuacagccuucccuucg

SEQ ID NO: 2784993 - RNA, 19 nt, Artificial Sequence
  Description of Artificial Sequence: Synthetic oligonucleotide
ucggacugaaagcuggaga

SEQ ID NO: 2784994 - RNA, 19 nt, Artificial Sequence
  Description of Artificial Sequence: Synthetic oligonucleotide
uggaugaucuuaugcugag

SEQ ID NO: 2784995 - RNA, 19 nt, Artificial Sequence
  Description of Artificial Sequence: Synthetic oligonucleotide
cacagacguagguauagcc

SEQ ID NO: 2784996 - RNA, 19 nt, Artificial Sequence
  Description of Artificial Sequence: Synthetic oligonucleotide
uuuacagccuucccuucga

SEQ ID NO: 2784997 - RNA, 19 nt, Artificial Sequence
  Description of Artificial Sequence: Synthetic oligonucleotide
aguuuguggaacacgacug

SEQ ID NO: 2784998 - RNA, 19 nt, Artificial Sequence
  Description of Artificial Sequence: Synthetic oligonucleotide
ugaaagcuggagacggggc

SEQ ID NO: 2784999 - RNA, 19 nt, Artificial Sequence
  Description of Artificial Sequence: Synthetic oligonucleotide
agcggcaggaccgagccgc

SEQ ID NO: 2785000 - RNA, 19 nt, Artificial Sequence
  Description of Artificial Sequence: Synthetic oligonucleotide
uguugcugaguugccaggg

SEQ ID NO: 2785001 - RNA, 19 nt, Artificial Sequence
  Description of Artificial Sequence: Synthetic oligonucleotide
cacaucgagggcaucgccg

SEQ ID NO: 2785002 - RNA, 19 nt, Artificial Sequence
  Description of Artificial Sequence: Synthetic oligonucleotide
uggagaagccacagcgagg

SEQ ID NO: 2785003 - RNA, 19 nt, Artificial Sequence
  Description of Artificial Sequence: Synthetic oligonucleotide
aaagcaccagcggggaagg

SEQ ID NO: 2785004 - RNA, 19 nt, Artificial Sequence
  Description of Artificial Sequence: Synthetic oligonucleotide
aucuucacuuccaagagga

SEQ ID NO: 2785005 - RNA, 19 nt, Artificial Sequence
  Description of Artificial Sequence: Synthetic oligonucleotide
caauaucuucacuuccaag

SEQ ID NO: 2785006 - RNA, 19 nt, Artificial Sequence
  Description of Artificial Sequence: Synthetic oligonucleotide
acagccuucccuucgaaau

SEQ ID NO: 2785007 - RNA, 19 nt, Artificial Sequence
  Description of Artificial Sequence: Synthetic oligonucleotide
uuuguggaacacgacugag

SEQ ID NO: 2785008 - RNA, 19 nt, Artificial Sequence
  Description of Artificial Sequence: Synthetic oligonucleotide
cuggccagcuccauggcgg

SEQ ID NO: 2785009 - RNA, 19 nt, Artificial Sequence
  Description of Artificial Sequence: Synthetic oligonucleotide
acacagguauagaagacag

SEQ ID NO: 2785010 - RNA, 19 nt, Artificial Sequence
  Description of Artificial Sequence: Synthetic oligonucleotide
ucugcccuucaucagcuga

SEQ ID NO: 2785011 - RNA, 19 nt, Artificial Sequence
  Description of Artificial Sequence: Synthetic oligonucleotide
agcugaacgcaucugucug

SEQ ID NO: 2785012 - RNA, 19 nt, Artificial Sequence
  Description of Artificial Sequence: Synthetic oligonucleotide
agacagucugcccuucauc

SEQ ID NO: 2785013 - RNA, 19 nt, Artificial Sequence
  Description of Artificial Sequence: Synthetic oligonucleotide
auucaacuaagggaaggag

SEQ ID NO: 2785014 - RNA, 19 nt, Artificial Sequence
  Description of Artificial Sequence: Synthetic oligonucleotide
uccacagacguagguauag

SEQ ID NO: 2785015 - RNA, 19 nt, Artificial Sequence
  Description of Artificial Sequence: Synthetic oligonucleotide
aaucucgcacgucuaugga

SEQ ID NO: 2785016 - RNA, 19 nt, Artificial Sequence
  Description of Artificial Sequence: Synthetic oligonucleotide
cugggauucagguccuucc

SEQ ID NO: 2785017 - RNA, 19 nt, Artificial Sequence
  Description of Artificial Sequence: Synthetic oligonucleotide
uucccuucgaaaucucgca

SEQ ID NO: 2785018 - RNA, 19 nt, Artificial Sequence
  Description of Artificial Sequence: Synthetic oligonucleotide
aaggcaacaaaggaccaau

SEQ ID NO: 2785019 - RNA, 19 nt, Artificial Sequence
  Description of Artificial Sequence: Synthetic oligonucleotide
cauccugaguuccuggcag

SEQ ID NO: 2785020 - RNA, 19 nt, Artificial Sequence
  Description of Artificial Sequence: Synthetic oligonucleotide
auucagguccuuccuccac

SEQ ID NO: 2785021 - RNA, 19 nt, Artificial Sequence
  Description of Artificial Sequence: Synthetic oligonucleotide
aucucgcacgucuauggag

SEQ ID NO: 2785022 - RNA, 19 nt, Artificial Sequence
  Description of Artificial Sequence: Synthetic oligonucleotide
ucccucaugaccacaucga

SEQ ID NO: 2785023 - RNA, 19 nt, Artificial Sequence
  Description of Artificial Sequence: Synthetic oligonucleotide
agggcagacgacagcaucc

SEQ ID NO: 2785024 - RNA, 19 nt, Artificial Sequence
  Description of Artificial Sequence: Synthetic oligonucleotide
acuuccaagaggaggaaug

SEQ ID NO: 2785025 - RNA, 19 nt, Artificial Sequence
  Description of Artificial Sequence: Synthetic oligonucleotide
uucagguccuuccuccaca

SEQ ID NO: 2785026 - RNA, 19 nt, Artificial Sequence
  Description of Artificial Sequence: Synthetic oligonucleotide
cuuccaagaggaggaaugg

SEQ ID NO: 2785027 - RNA, 19 nt, Artificial Sequence
  Description of Artificial Sequence: Synthetic oligonucleotide
uacaagaaucuuccuuuuc

SEQ ID NO: 2785028 - RNA, 19 nt, Artificial Sequence
  Description of Artificial Sequence: Synthetic oligonucleotide
gaccacaucgagggcaucg

SEQ ID NO: 2785029 - RNA, 19 nt, Artificial Sequence
  Description of Artificial Sequence: Synthetic oligonucleotide
cugaguuccuggcagcggc

SEQ ID NO: 2785030 - RNA, 19 nt, Artificial Sequence
  Description of Artificial Sequence: Synthetic oligonucleotide
ucagcugaacgcaucuguc

SEQ ID NO: 2785031 - RNA, 19 nt, Artificial Sequence
  Description of Artificial Sequence: Synthetic oligonucleotide
acgacagcauccugaguuc

SEQ ID NO: 2785032 - RNA, 19 nt, Artificial Sequence
  Description of Artificial Sequence: Synthetic oligonucleotide
agguacaagaaucuuccuu

SEQ ID NO: 2785033 - RNA, 19 nt, Artificial Sequence
  Description of Artificial Sequence: Synthetic oligonucleotide
ucugggcagaaauccaagu

SEQ ID NO: 2785034 - RNA, 19 nt, Artificial Sequence
  Description of Artificial Sequence: Synthetic oligonucleotide
aaagcuggagacggggcug

SEQ ID NO: 2785035 - RNA, 19 nt, Artificial Sequence
  Description of Artificial Sequence: Synthetic oligonucleotide
cugaaagcuggagacgggg

SEQ ID NO: 2785036 - RNA, 19 nt, Artificial Sequence
  Description of Artificial Sequence: Synthetic oligonucleotide
ucuucacuuccaagaggag

SEQ ID NO: 2785037 - RNA, 19 nt, Artificial Sequence
  Description of Artificial Sequence: Synthetic oligonucleotide
caaagcaccagcggggaag

SEQ ID NO: 2785038 - RNA, 19 nt, Artificial Sequence
  Description of Artificial Sequence: Synthetic oligonucleotide
acguagguauagccgcccc

SEQ ID NO: 2785039 - RNA, 19 nt, Artificial Sequence
  Description of Artificial Sequence: Synthetic oligonucleotide
gaaaucucgcacgucuaug

SEQ ID NO: 2785040 - RNA, 19 nt, Artificial Sequence
  Description of Artificial Sequence: Synthetic oligonucleotide
gacgacagcauccugaguu

SEQ ID NO: 2785041 - RNA, 19 nt, Artificial Sequence
  Description of Artificial Sequence: Synthetic oligonucleotide
aagguacaagaaucuuccu

SEQ ID NO: 2785042 - RNA, 19 nt, Artificial Sequence
  Description of Artificial Sequence: Synthetic oligonucleotide
aaauccaagucggacugaa

SEQ ID NO: 2785043 - RNA, 19 nt, Artificial Sequence
  Description of Artificial Sequence: Synthetic oligonucleotide
aaggaccaauaucuucacu

SEQ ID NO: 2785044 - RNA, 19 nt, Artificial Sequence
  Description of Artificial Sequence: Synthetic oligonucleotide
gcaacaaaggaccaauauc

SEQ ID NO: 2785045 - RNA, 19 nt, Artificial Sequence
  Description of Artificial Sequence: Synthetic oligonucleotide
cagacgacagcauccugag

SEQ ID NO: 2785046 - RNA, 19 nt, Artificial Sequence
  Description of Artificial Sequence: Synthetic oligonucleotide
agggcaucgccggucaacc

SEQ ID NO: 2785047 - RNA, 19 nt, Artificial Sequence
  Description of Artificial Sequence: Synthetic oligonucleotide
ucgccggucaaccacuggu

SEQ ID NO: 2785048 - RNA, 19 nt, Artificial Sequence
  Description of Artificial Sequence: Synthetic oligonucleotide
aacaaagcaccagcgggga

SEQ ID NO: 2785049 - RNA, 19 nt, Artificial Sequence
  Description of Artificial Sequence: Synthetic oligonucleotide
aucugucuggugugguacg

SEQ ID NO: 2785050 - RNA, 19 nt, Artificial Sequence
  Description of Artificial Sequence: Synthetic oligonucleotide
ucagguccuuccuccacag

SEQ ID NO: 2785051 - RNA, 19 nt, Artificial Sequence
  Description of Artificial Sequence: Synthetic oligonucleotide
acacgacugaggucuuuac

SEQ ID NO: 2785052 - RNA, 19 nt, Artificial Sequence
  Description of Artificial Sequence: Synthetic oligonucleotide
aaccacuggucccugggau

SEQ ID NO: 2785053 - RNA, 19 nt, Artificial Sequence
  Description of Artificial Sequence: Synthetic oligonucleotide
ugucuggugugguacgcca

SEQ ID NO: 2785054 - RNA, 19 nt, Artificial Sequence
  Description of Artificial Sequence: Synthetic oligonucleotide
gaagccacagcgagggcag

SEQ ID NO: 2785055 - RNA, 19 nt, Artificial Sequence
  Description of Artificial Sequence: Synthetic oligonucleotide
agggaaggagugcucuggg

SEQ ID NO: 2785056 - RNA, 19 nt, Artificial Sequence
  Description of Artificial Sequence: Synthetic oligonucleotide
gaaucuuccuuuuccugaa

SEQ ID NO: 2785057 - RNA, 19 nt, Artificial Sequence
  Description of Artificial Sequence: Synthetic oligonucleotide
ugggauucagguccuuccu

SEQ ID NO: 2785058 - RNA, 19 nt, Artificial Sequence
  Description of Artificial Sequence: Synthetic oligonucleotide
aagacagucugcccuucau

SEQ ID NO: 2785059 - RNA, 19 nt, Artificial Sequence
  Description of Artificial Sequence: Synthetic oligonucleotide
ggauucagguccuuccucc

SEQ ID NO: 2785060 - RNA, 19 nt, Artificial Sequence
  Description of Artificial Sequence: Synthetic oligonucleotide
gguguugcugaguugccag

SEQ ID NO: 2785061 - RNA, 19 nt, Artificial Sequence
  Description of Artificial Sequence: Synthetic oligonucleotide
gacggggcuggccagcucc

SEQ ID NO: 2785062 - RNA, 19 nt, Artificial Sequence
  Description of Artificial Sequence: Synthetic oligonucleotide
cugggcagaaauccaaguc

SEQ ID NO: 2785063 - RNA, 19 nt, Artificial Sequence
  Description of Artificial Sequence: Synthetic oligonucleotide
cuccauggcggacaagagc

SEQ ID NO: 2785064 - RNA, 19 nt, Artificial Sequence
  Description of Artificial Sequence: Synthetic oligonucleotide
cagucugcccuucaucagc

SEQ ID NO: 2785065 - RNA, 19 nt, Artificial Sequence
  Description of Artificial Sequence: Synthetic oligonucleotide
gaacgcaucugucuggugu

SEQ ID NO: 2785066 - RNA, 19 nt, Artificial Sequence
  Description of Artificial Sequence: Synthetic oligonucleotide
gaggucuuuacagccuucc

SEQ ID NO: 2785067 - RNA, 19 nt, Artificial Sequence
  Description of Artificial Sequence: Synthetic oligonucleotide
aaucugggcagaaauccaa

SEQ ID NO: 2785068 - RNA, 19 nt, Artificial Sequence
  Description of Artificial Sequence: Synthetic oligonucleotide
agcuccauggcggacaaga

SEQ ID NO: 2785069 - RNA, 19 nt, Artificial Sequence
  Description of Artificial Sequence: Synthetic oligonucleotide
agcgagggcagacgacagc

SEQ ID NO: 2785070 - RNA, 19 nt, Artificial Sequence
  Description of Artificial Sequence: Synthetic oligonucleotide
ggagaaggcaacaaaggac

SEQ ID NO: 2785071 - RNA, 19 nt, Artificial Sequence
  Description of Artificial Sequence: Synthetic oligonucleotide
uggucccugggauucaggu

SEQ ID NO: 2785072 - RNA, 19 nt, Artificial Sequence
  Description of Artificial Sequence: Synthetic oligonucleotide
uccugaguuccuggcagcg

SEQ ID NO: 2785073 - RNA, 19 nt, Artificial Sequence
  Description of Artificial Sequence: Synthetic oligonucleotide
ucccuucgaaaucucgcac

SEQ ID NO: 2785074 - RNA, 19 nt, Artificial Sequence
  Description of Artificial Sequence: Synthetic oligonucleotide
accaauaucuucacuucca

SEQ ID NO: 2785075 - RNA, 19 nt, Artificial Sequence
  Description of Artificial Sequence: Synthetic oligonucleotide
acagucugcccuucaucag

SEQ ID NO: 2785076 - RNA, 19 nt, Artificial Sequence
  Description of Artificial Sequence: Synthetic oligonucleotide
ugcugaguugccagggaaa

SEQ ID NO: 2785077 - RNA, 19 nt, Artificial Sequence
  Description of Artificial Sequence: Synthetic oligonucleotide
uggugugguacgccauucc

SEQ ID NO: 2785078 - RNA, 19 nt, Artificial Sequence
  Description of Artificial Sequence: Synthetic oligonucleotide
cccuucaucagcugaacgc

SEQ ID NO: 2785079 - RNA, 19 nt, Artificial Sequence
  Description of Artificial Sequence: Synthetic oligonucleotide
accacaucgagggcaucgc

SEQ ID NO: 2785080 - RNA, 19 nt, Artificial Sequence
  Description of Artificial Sequence: Synthetic oligonucleotide
uacgccauucccucaugac

SEQ ID NO: 2785081 - RNA, 19 nt, Artificial Sequence
  Description of Artificial Sequence: Synthetic oligonucleotide
gcaguugacacagguauag

SEQ ID NO: 2785082 - RNA, 19 nt, Artificial Sequence
  Description of Artificial Sequence: Synthetic oligonucleotide
guuuguggaacacgacuga

SEQ ID NO: 2785083 - RNA, 19 nt, Artificial Sequence
  Description of Artificial Sequence: Synthetic oligonucleotide
gaccgagccgcaaucuggg

SEQ ID NO: 2785084 - RNA, 19 nt, Artificial Sequence
  Description of Artificial Sequence: Synthetic oligonucleotide
agacguagguauagccgcc

SEQ ID NO: 2785085 - RNA, 19 nt, Artificial Sequence
  Description of Artificial Sequence: Synthetic oligonucleotide
gggguggaugaucuuaugc

SEQ ID NO: 2785086 - RNA, 19 nt, Artificial Sequence
  Description of Artificial Sequence: Synthetic oligonucleotide
auucccucaugaccacauc

SEQ ID NO: 2785087 - RNA, 19 nt, Artificial Sequence
  Description of Artificial Sequence: Synthetic oligonucleotide
guguugcugaguugccagg

SEQ ID NO: 2785088 - RNA, 19 nt, Artificial Sequence
  Description of Artificial Sequence: Synthetic oligonucleotide
caagucggacugaaagcug

SEQ ID NO: 2785089 - RNA, 19 nt, Artificial Sequence
  Description of Artificial Sequence: Synthetic oligonucleotide
gucuauggagaagccacag

SEQ ID NO: 2785090 - RNA, 19 nt, Artificial Sequence
  Description of Artificial Sequence: Synthetic oligonucleotide
gaucuuaugcugagaacaa

SEQ ID NO: 2785091 - RNA, 19 nt, Artificial Sequence
  Description of Artificial Sequence: Synthetic oligonucleotide
aaucuuccuuuuccugaaa

SEQ ID NO: 2785092 - RNA, 19 nt, Artificial Sequence
  Description of Artificial Sequence: Synthetic oligonucleotide
aacaaaggaccaauaucuu

SEQ ID NO: 2785093 - RNA, 19 nt, Artificial Sequence
  Description of Artificial Sequence: Synthetic oligonucleotide
gggcagaaauccaagucgg

SEQ ID NO: 2785094 - RNA, 19 nt, Artificial Sequence
  Description of Artificial Sequence: Synthetic oligonucleotide
caugaccacaucgagggca

SEQ ID NO: 2785095 - RNA, 19 nt, Artificial Sequence
  Description of Artificial Sequence: Synthetic oligonucleotide
uagaagacagucugcccuu

SEQ ID NO: 2785096 - RNA, 19 nt, Artificial Sequence
  Description of Artificial Sequence: Synthetic oligonucleotide
acuaagggaaggagugcuc

SEQ ID NO: 2785097 - RNA, 19 nt, Artificial Sequence
  Description of Artificial Sequence: Synthetic oligonucleotide
ucaugaccacaucgagggc

SEQ ID NO: 2785098 - RNA, 19 nt, Artificial Sequence
  Description of Artificial Sequence: Synthetic oligonucleotide
ccucaugaccacaucgagg

SEQ ID NO: 2785099 - RNA, 19 nt, Artificial Sequence
  Description of Artificial Sequence: Synthetic oligonucleotide
gguauagaagacagucugc

SEQ ID NO: 2785100 - RNA, 19 nt, Artificial Sequence
  Description of Artificial Sequence: Synthetic oligonucleotide
ucuuuacagccuucccuuc

SEQ ID NO: 2785101 - RNA, 19 nt, Artificial Sequence
  Description of Artificial Sequence: Synthetic oligonucleotide
aguuccuggcagcggcagg

SEQ ID NO: 2785102 - RNA, 19 nt, Artificial Sequence
  Description of Artificial Sequence: Synthetic oligonucleotide
ucgaaaucucgcacgucua

SEQ ID NO: 2785103 - RNA, 19 nt, Artificial Sequence
  Description of Artificial Sequence: Synthetic oligonucleotide
gguacaagaaucuuccuuu

SEQ ID NO: 2785104 - RNA, 19 nt, Artificial Sequence
  Description of Artificial Sequence: Synthetic oligonucleotide
ugaguuccuggcagcggca

SEQ ID NO: 2785105 - RNA, 19 nt, Artificial Sequence
  Description of Artificial Sequence: Synthetic oligonucleotide
ucugucuggugugguacgc

SEQ ID NO: 2785106 - RNA, 19 nt, Artificial Sequence
  Description of Artificial Sequence: Synthetic oligonucleotide
gaaagcuggagacggggcu

SEQ ID NO: 2785107 - RNA, 19 nt, Artificial Sequence
  Description of Artificial Sequence: Synthetic oligonucleotide
ugcaguugacacagguaua

SEQ ID NO: 2785108 - RNA, 19 nt, Artificial Sequence
  Description of Artificial Sequence: Synthetic oligonucleotide
caacuaagggaaggagugc

SEQ ID NO: 2785109 - RNA, 19 nt, Artificial Sequence
  Description of Artificial Sequence: Synthetic oligonucleotide
aacacgacugaggucuuua

SEQ ID NO: 2785110 - RNA, 19 nt, Artificial Sequence
  Description of Artificial Sequence: Synthetic oligonucleotide
cagaaauccaagucggacu

SEQ ID NO: 2785111 - RNA, 19 nt, Artificial Sequence
  Description of Artificial Sequence: Synthetic oligonucleotide
uuccuccacagacguaggu

SEQ ID NO: 2785112 - RNA, 19 nt, Artificial Sequence
  Description of Artificial Sequence: Synthetic oligonucleotide
ugguacgccauucccucau

SEQ ID NO: 2785113 - RNA, 19 nt, Artificial Sequence
  Description of Artificial Sequence: Synthetic oligonucleotide
ggaccaauaucuucacuuc

SEQ ID NO: 2785114 - RNA, 19 nt, Artificial Sequence
  Description of Artificial Sequence: Synthetic oligonucleotide
uuccugaaacuugcaguug

SEQ ID NO: 2785115 - RNA, 19 nt, Artificial Sequence
  Description of Artificial Sequence: Synthetic oligonucleotide
cuuccuccacagacguagg

SEQ ID NO: 2785116 - RNA, 19 nt, Artificial Sequence
  Description of Artificial Sequence: Synthetic oligonucleotide
ucuggugugguacgccauu

SEQ ID NO: 2785117 - RNA, 19 nt, Artificial Sequence
  Description of Artificial Sequence: Synthetic oligonucleotide
ccuuccuccacagacguag

SEQ ID NO: 2785118 - RNA, 19 nt, Artificial Sequence
  Description of Artificial Sequence: Synthetic oligonucleotide
guggaugaucuuaugcuga

SEQ ID NO: 2785119 - RNA, 19 nt, Artificial Sequence
  Description of Artificial Sequence: Synthetic oligonucleotide
uacagccuucccuucgaaa

SEQ ID NO: 2785120 - RNA, 19 nt, Artificial Sequence
  Description of Artificial Sequence: Synthetic oligonucleotide
ucgagggcaucgccgguca

SEQ ID NO: 2785121 - RNA, 19 nt, Artificial Sequence
  Description of Artificial Sequence: Synthetic oligonucleotide
cagcauccugaguuccugg

SEQ ID NO: 2785122 - RNA, 19 nt, Artificial Sequence
  Description of Artificial Sequence: Synthetic oligonucleotide
accgagccgcaaucugggc

SEQ ID NO: 2785123 - RNA, 19 nt, Artificial Sequence
  Description of Artificial Sequence: Synthetic oligonucleotide
aggaccgagccgcaaucug

SEQ ID NO: 2785124 - RNA, 19 nt, Artificial Sequence
  Description of Artificial Sequence: Synthetic oligonucleotide
acugaaagcuggagacggg

SEQ ID NO: 2785125 - RNA, 19 nt, Artificial Sequence
  Description of Artificial Sequence: Synthetic oligonucleotide
caaucugggcagaaaucca

SEQ ID NO: 2785126 - RNA, 19 nt, Artificial Sequence
  Description of Artificial Sequence: Synthetic oligonucleotide
uuccaagaggaggaauggu

SEQ ID NO: 2785127 - RNA, 19 nt, Artificial Sequence
  Description of Artificial Sequence: Synthetic oligonucleotide
cccuucgaaaucucgcacg

SEQ ID NO: 2785128 - RNA, 19 nt, Artificial Sequence
  Description of Artificial Sequence: Synthetic oligonucleotide
gacguagguauagccgccc

SEQ ID NO: 2785129 - RNA, 19 nt, Artificial Sequence
  Description of Artificial Sequence: Synthetic oligonucleotide
augguguugcugaguugcc

SEQ ID NO: 2785130 - RNA, 19 nt, Artificial Sequence
  Description of Artificial Sequence: Synthetic oligonucleotide
acagcauccugaguuccug

SEQ ID NO: 2785131 - RNA, 19 nt, Artificial Sequence
  Description of Artificial Sequence: Synthetic oligonucleotide
aucugggcagaaauccaag

SEQ ID NO: 2785132 - RNA, 19 nt, Artificial Sequence
  Description of Artificial Sequence: Synthetic oligonucleotide
gcagaaauccaagucggac

SEQ ID NO: 2785133 - RNA, 19 nt, Artificial Sequence
  Description of Artificial Sequence: Synthetic oligonucleotide
agaagacagucugcccuuc

SEQ ID NO: 2785134 - RNA, 19 nt, Artificial Sequence
  Description of Artificial Sequence: Synthetic oligonucleotide
ccagcggggaaggagaagg

SEQ ID NO: 2785135 - RNA, 19 nt, Artificial Sequence
  Description of Artificial Sequence: Synthetic oligonucleotide
ugaggucuuuacagccuuc

SEQ ID NO: 2785136 - RNA, 19 nt, Artificial Sequence
  Description of Artificial Sequence: Synthetic oligonucleotide
gaagacagucugcccuuca

SEQ ID NO: 2785137 - RNA, 19 nt, Artificial Sequence
  Description of Artificial Sequence: Synthetic oligonucleotide
aucgagggcaucgccgguc

SEQ ID NO: 2785138 - RNA, 19 nt, Artificial Sequence
  Description of Artificial Sequence: Synthetic oligonucleotide
acugaggucuuuacagccu

SEQ ID NO: 2785139 - RNA, 19 nt, Artificial Sequence
  Description of Artificial Sequence: Synthetic oligonucleotide
uccuccacagacguaggua

SEQ ID NO: 2785140 - RNA, 19 nt, Artificial Sequence
  Description of Artificial Sequence: Synthetic oligonucleotide
ugguguugcugaguugcca

SEQ ID NO: 2785141 - RNA, 19 nt, Artificial Sequence
  Description of Artificial Sequence: Synthetic oligonucleotide
uccuggcagcggcaggacc

SEQ ID NO: 2785142 - RNA, 19 nt, Artificial Sequence
  Description of Artificial Sequence: Synthetic oligonucleotide
caguuuguggaacacgacu

SEQ ID NO: 2785143 - RNA, 19 nt, Artificial Sequence
  Description of Artificial Sequence: Synthetic oligonucleotide
cuugcaguugacacaggua

SEQ ID NO: 2785144 - RNA, 19 nt, Artificial Sequence
  Description of Artificial Sequence: Synthetic oligonucleotide
gggaaggagugcucugggg

SEQ ID NO: 2785145 - RNA, 19 nt, Artificial Sequence
  Description of Artificial Sequence: Synthetic oligonucleotide
uuacagccuucccuucgaa

SEQ ID NO: 2785146 - RNA, 19 nt, Artificial Sequence
  Description of Artificial Sequence: Synthetic oligonucleotide
ugaacgcaucugucuggug

SEQ ID NO: 2785147 - RNA, 19 nt, Artificial Sequence
  Description of Artificial Sequence: Synthetic oligonucleotide
agccuucccuucgaaaucu

SEQ ID NO: 2785148 - RNA, 19 nt, Artificial Sequence
  Description of Artificial Sequence: Synthetic oligonucleotide
ggacugaaagcuggagacg

SEQ ID NO: 2785149 - RNA, 19 nt, Artificial Sequence
  Description of Artificial Sequence: Synthetic oligonucleotide
gucaaccacuggucccugg

SEQ ID NO: 2785150 - RNA, 19 nt, Artificial Sequence
  Description of Artificial Sequence: Synthetic oligonucleotide
aucgccggucaaccacugg

SEQ ID NO: 2785151 - RNA, 19 nt, Artificial Sequence
  Description of Artificial Sequence: Synthetic oligonucleotide
gucuuuacagccuucccuu

SEQ ID NO: 2785152 - RNA, 19 nt, Artificial Sequence
  Description of Artificial Sequence: Synthetic oligonucleotide
uggagacggggcuggccag

SEQ ID NO: 2785153 - RNA, 19 nt, Artificial Sequence
  Description of Artificial Sequence: Synthetic oligonucleotide
ggaccgagccgcaaucugg

SEQ ID NO: 2785154 - RNA, 19 nt, Artificial Sequence
  Description of Artificial Sequence: Synthetic oligonucleotide
gaguuccuggcagcggcag

SEQ ID NO: 2785155 - RNA, 19 nt, Artificial Sequence
  Description of Artificial Sequence: Synthetic oligonucleotide
ccuucccuucgaaaucucg

SEQ ID NO: 2785156 - RNA, 19 nt, Artificial Sequence
  Description of Artificial Sequence: Synthetic oligonucleotide
ggguggaugaucuuaugcu

SEQ ID NO: 2785157 - RNA, 19 nt, Artificial Sequence
  Description of Artificial Sequence: Synthetic oligonucleotide
gcagcggcaggaccgagcc

SEQ ID NO: 2785158 - RNA, 19 nt, Artificial Sequence
  Description of Artificial Sequence: Synthetic oligonucleotide
agccacagcgagggcagac

SEQ ID NO: 2785159 - RNA, 19 nt, Artificial Sequence
  Description of Artificial Sequence: Synthetic oligonucleotide
cacgacugaggucuuuaca

SEQ ID NO: 2785160 - RNA, 19 nt, Artificial Sequence
  Description of Artificial Sequence: Synthetic oligonucleotide
cugaaacuugcaguugaca

SEQ ID NO: 2785161 - RNA, 19 nt, Artificial Sequence
  Description of Artificial Sequence: Synthetic oligonucleotide
aucuuaugcugagaacaaa

SEQ ID NO: 2785162 - RNA, 19 nt, Artificial Sequence
  Description of Artificial Sequence: Synthetic oligonucleotide
gucggacugaaagcuggag

SEQ ID NO: 2785163 - RNA, 19 nt, Artificial Sequence
  Description of Artificial Sequence: Synthetic oligonucleotide
ggucuuuacagccuucccu

SEQ ID NO: 2785164 - RNA, 19 nt, Artificial Sequence
  Description of Artificial Sequence: Synthetic oligonucleotide
aacuugcaguugacacagg

SEQ ID NO: 2785165 - RNA, 19 nt, Artificial Sequence
  Description of Artificial Sequence: Synthetic oligonucleotide
cagccuucccuucgaaauc

SEQ ID NO: 2785166 - RNA, 19 nt, Artificial Sequence
  Description of Artificial Sequence: Synthetic oligonucleotide
guacgccauucccucauga

SEQ ID NO: 2785167 - RNA, 19 nt, Artificial Sequence
  Description of Artificial Sequence: Synthetic oligonucleotide
ggcaucgccggucaaccac

SEQ ID NO: 2785168 - RNA, 19 nt, Artificial Sequence
  Description of Artificial Sequence: Synthetic oligonucleotide
cuggucccugggauucagg

SEQ ID NO: 2785169 - RNA, 19 nt, Artificial Sequence
  Description of Artificial Sequence: Synthetic oligonucleotide
cagguauagaagacagucu

SEQ ID NO: 2785170 - RNA, 19 nt, Artificial Sequence
  Description of Artificial Sequence: Synthetic oligonucleotide
cccaguuuguggaacacga

SEQ ID NO: 2785171 - RNA, 19 nt, Artificial Sequence
  Description of Artificial Sequence: Synthetic oligonucleotide
cagcggggaaggagaaggc

SEQ ID NO: 2785172 - RNA, 19 nt, Artificial Sequence
  Description of Artificial Sequence: Synthetic oligonucleotide
gaaauccaagucggacuga

SEQ ID NO: 2785173 - RNA, 19 nt, Artificial Sequence
  Description of Artificial Sequence: Synthetic oligonucleotide
cgcacgucuauggagaagc

SEQ ID NO: 2785174 - RNA, 19 nt, Artificial Sequence
  Description of Artificial Sequence: Synthetic oligonucleotide
ucgcacgucuauggagaag

SEQ ID NO: 2785175 - RNA, 19 nt, Artificial Sequence
  Description of Artificial Sequence: Synthetic oligonucleotide
cugucuggugugguacgcc

SEQ ID NO: 2785176 - RNA, 19 nt, Artificial Sequence
  Description of Artificial Sequence: Synthetic oligonucleotide
gagggcaucgccggucaac

SEQ ID NO: 2785177 - RNA, 19 nt, Artificial Sequence
  Description of Artificial Sequence: Synthetic oligonucleotide
cacagcgagggcagacgac

SEQ ID NO: 2785178 - RNA, 19 nt, Artificial Sequence
  Description of Artificial Sequence: Synthetic oligonucleotide
guuccuggcagcggcagga

SEQ ID NO: 2785179 - RNA, 19 nt, Artificial Sequence
  Description of Artificial Sequence: Synthetic oligonucleotide
agcggggaaggagaaggca

SEQ ID NO: 2785180 - RNA, 19 nt, Artificial Sequence
  Description of Artificial Sequence: Synthetic oligonucleotide
guggaacacgacugagguc

SEQ ID NO: 2785181 - RNA, 19 nt, Artificial Sequence
  Description of Artificial Sequence: Synthetic oligonucleotide
acgcaucugucuggugugg

SEQ ID NO: 2785182 - RNA, 19 nt, Artificial Sequence
  Description of Artificial Sequence: Synthetic oligonucleotide
acuggucccugggauucag

SEQ ID NO: 2785183 - RNA, 19 nt, Artificial Sequence
  Description of Artificial Sequence: Synthetic oligonucleotide
gcagacgacagcauccuga

SEQ ID NO: 2785184 - RNA, 19 nt, Artificial Sequence
  Description of Artificial Sequence: Synthetic oligonucleotide
gccggucaaccacuggucc

SEQ ID NO: 2785185 - RNA, 19 nt, Artificial Sequence
  Description of Artificial Sequence: Synthetic oligonucleotide
ugcccuucaucagcugaac

SEQ ID NO: 2785186 - RNA, 19 nt, Artificial Sequence
  Description of Artificial Sequence: Synthetic oligonucleotide
ggcaacaaaggaccaauau

SEQ ID NO: 2785187 - RNA, 19 nt, Artificial Sequence
  Description of Artificial Sequence: Synthetic oligonucleotide
cuaagggaaggagugcucu

SEQ ID NO: 2785188 - RNA, 19 nt, Artificial Sequence
  Description of Artificial Sequence: Synthetic oligonucleotide
ucacuuccaagaggaggaa

SEQ ID NO: 2785189 - RNA, 19 nt, Artificial Sequence
  Description of Artificial Sequence: Synthetic oligonucleotide
acaaagcaccagcggggaa

SEQ ID NO: 2785190 - RNA, 19 nt, Artificial Sequence
  Description of Artificial Sequence: Synthetic oligonucleotide
ucccugggauucagguccu

SEQ ID NO: 2785191 - RNA, 19 nt, Artificial Sequence
  Description of Artificial Sequence: Synthetic oligonucleotide
agacgacagcauccugagu

SEQ ID NO: 2785192 - RNA, 19 nt, Artificial Sequence
  Description of Artificial Sequence: Synthetic oligonucleotide
cacgucuauggagaagcca

SEQ ID NO: 2785193 - RNA, 19 nt, Artificial Sequence
  Description of Artificial Sequence: Synthetic oligonucleotide
cccucaugaccacaucgag

SEQ ID NO: 2785194 - RNA, 19 nt, Artificial Sequence
  Description of Artificial Sequence: Synthetic oligonucleotide
gggauucagguccuuccuc

SEQ ID NO: 2785195 - RNA, 19 nt, Artificial Sequence
  Description of Artificial Sequence: Synthetic oligonucleotide
cuggugugguacgccauuc

SEQ ID NO: 2785196 - RNA, 19 nt, Artificial Sequence
  Description of Artificial Sequence: Synthetic oligonucleotide
cuucgaaaucucgcacguc

SEQ ID NO: 2785197 - RNA, 19 nt, Artificial Sequence
  Description of Artificial Sequence: Synthetic oligonucleotide
cugcccuucaucagcugaa

SEQ ID NO: 2785198 - RNA, 19 nt, Artificial Sequence
  Description of Artificial Sequence: Synthetic oligonucleotide
cgacugaggucuuuacagc

SEQ ID NO: 2785199 - RNA, 19 nt, Artificial Sequence
  Description of Artificial Sequence: Synthetic oligonucleotide
guccuuccuccacagacgu

SEQ ID NO: 2785200 - RNA, 19 nt, Artificial Sequence
  Description of Artificial Sequence: Synthetic oligonucleotide
caucgccggucaaccacug

SEQ ID NO: 2785201 - RNA, 19 nt, Artificial Sequence
  Description of Artificial Sequence: Synthetic oligonucleotide
ccaguuuguggaacacgac

SEQ ID NO: 2785202 - RNA, 19 nt, Artificial Sequence
  Description of Artificial Sequence: Synthetic oligonucleotide
ccuucaucagcugaacgca

SEQ ID NO: 2785203 - RNA, 19 nt, Artificial Sequence
  Description of Artificial Sequence: Synthetic oligonucleotide
guacaagaaucuuccuuuu

SEQ ID NO: 2785204 - RNA, 19 nt, Artificial Sequence
  Description of Artificial Sequence: Synthetic oligonucleotide
cauucccucaugaccacau

SEQ ID NO: 2785205 - RNA, 19 nt, Artificial Sequence
  Description of Artificial Sequence: Synthetic oligonucleotide
ccggucaaccacugguccc

SEQ ID NO: 2785206 - RNA, 19 nt, Artificial Sequence
  Description of Artificial Sequence: Synthetic oligonucleotide
ggucccugggauucagguc

SEQ ID NO: 2785207 - RNA, 19 nt, Artificial Sequence
  Description of Artificial Sequence: Synthetic oligonucleotide
agacggggcuggccagcuc

SEQ ID NO: 2785208 - RNA, 19 nt, Artificial Sequence
  Description of Artificial Sequence: Synthetic oligonucleotide
caaccacuggucccuggga

SEQ ID NO: 2785209 - RNA, 19 nt, Artificial Sequence
  Description of Artificial Sequence: Synthetic oligonucleotide
agucggacugaaagcugga

SEQ ID NO: 2785210 - RNA, 19 nt, Artificial Sequence
  Description of Artificial Sequence: Synthetic oligonucleotide
gcauccugaguuccuggca

SEQ ID NO: 2785211 - RNA, 19 nt, Artificial Sequence
  Description of Artificial Sequence: Synthetic oligonucleotide
gccacagcgagggcagacg

SEQ ID NO: 2785212 - RNA, 19 nt, Artificial Sequence
  Description of Artificial Sequence: Synthetic oligonucleotide
accagcggggaaggagaag

SEQ ID NO: 2785213 - RNA, 19 nt, Artificial Sequence
  Description of Artificial Sequence: Synthetic oligonucleotide
ccaagaggaggaauggugu

SEQ ID NO: 2785214 - RNA, 19 nt, Artificial Sequence
  Description of Artificial Sequence: Synthetic oligonucleotide
uccuuccuccacagacgua

SEQ ID NO: 2785215 - RNA, 19 nt, Artificial Sequence
  Description of Artificial Sequence: Synthetic oligonucleotide
cgccauucccucaugacca

SEQ ID NO: 2785216 - RNA, 19 nt, Artificial Sequence
  Description of Artificial Sequence: Synthetic oligonucleotide
gguacgccauucccucaug

SEQ ID NO: 2785217 - RNA, 19 nt, Artificial Sequence
  Description of Artificial Sequence: Synthetic oligonucleotide
gugguacgccauucccuca

SEQ ID NO: 2785218 - RNA, 19 nt, Artificial Sequence
  Description of Artificial Sequence: Synthetic oligonucleotide
gcgagggcagacgacagca

SEQ ID NO: 2785219 - RNA, 19 nt, Artificial Sequence
  Description of Artificial Sequence: Synthetic oligonucleotide
cacagguauagaagacagu

SEQ ID NO: 2785220 - RNA, 19 nt, Artificial Sequence
  Description of Artificial Sequence: Synthetic oligonucleotide
gucugcccuucaucagcug

SEQ ID NO: 2785221 - RNA, 19 nt, Artificial Sequence
  Description of Artificial Sequence: Synthetic oligonucleotide
gcugaguugccagggaaaa

SEQ ID NO: 2785222 - RNA, 19 nt, Artificial Sequence
  Description of Artificial Sequence: Synthetic oligonucleotide
ccaauaucuucacuuccaa

SEQ ID NO: 2785223 - RNA, 19 nt, Artificial Sequence
  Description of Artificial Sequence: Synthetic oligonucleotide
caguugacacagguauaga

SEQ ID NO: 2785224 - RNA, 19 nt, Artificial Sequence
  Description of Artificial Sequence: Synthetic oligonucleotide
gacagcauccugaguuccu

SEQ ID NO: 2785225 - RNA, 19 nt, Artificial Sequence
  Description of Artificial Sequence: Synthetic oligonucleotide
uuccuggcagcggcaggac

SEQ ID NO: 2785226 - RNA, 19 nt, Artificial Sequence
  Description of Artificial Sequence: Synthetic oligonucleotide
cucgcacgucuauggagaa

SEQ ID NO: 2785227 - RNA, 19 nt, Artificial Sequence
  Description of Artificial Sequence: Synthetic oligonucleotide
gcaggaccgagccgcaauc

SEQ ID NO: 2785228 - RNA, 19 nt, Artificial Sequence
  Description of Artificial Sequence: Synthetic oligonucleotide
caagaggaggaaugguguu

SEQ ID NO: 2785229 - RNA, 19 nt, Artificial Sequence
  Description of Artificial Sequence: Synthetic oligonucleotide
cuucaucagcugaacgcau

SEQ ID NO: 2785230 - RNA, 19 nt, Artificial Sequence
  Description of Artificial Sequence: Synthetic oligonucleotide
ccacaucgagggcaucgcc

SEQ ID NO: 2785231 - RNA, 19 nt, Artificial Sequence
  Description of Artificial Sequence: Synthetic oligonucleotide
ccccaguuuguggaacacg

SEQ ID NO: 2785232 - RNA, 19 nt, Artificial Sequence
  Description of Artificial Sequence: Synthetic oligonucleotide
gcuccauggcggacaagag

SEQ ID NO: 2785233 - RNA, 19 nt, Artificial Sequence
  Description of Artificial Sequence: Synthetic oligonucleotide
ggaugaucuuaugcugaga

SEQ ID NO: 2785234 - RNA, 19 nt, Artificial Sequence
  Description of Artificial Sequence: Synthetic oligonucleotide
ccugaguuccuggcagcgg

SEQ ID NO: 2785235 - RNA, 19 nt, Artificial Sequence
  Description of Artificial Sequence: Synthetic oligonucleotide
ggcagacgacagcauccug

SEQ ID NO: 2785236 - RNA, 19 nt, Artificial Sequence
  Description of Artificial Sequence: Synthetic oligonucleotide
ccaagucggacugaaagcu

SEQ ID NO: 2785237 - RNA, 19 nt, Artificial Sequence
  Description of Artificial Sequence: Synthetic oligonucleotide
cuccacagacguagguaua

SEQ ID NO: 2785238 - RNA, 19 nt, Artificial Sequence
  Description of Artificial Sequence: Synthetic oligonucleotide
gaggaggaaugguguugcu

SEQ ID NO: 2785239 - RNA, 19 nt, Artificial Sequence
  Description of Artificial Sequence: Synthetic oligonucleotide
aggcaacaaaggaccaaua

SEQ ID NO: 2785240 - RNA, 19 nt, Artificial Sequence
  Description of Artificial Sequence: Synthetic oligonucleotide
ccacagacguagguauagc

SEQ ID NO: 2785241 - RNA, 19 nt, Artificial Sequence
  Description of Artificial Sequence: Synthetic oligonucleotide
cagcggcaggaccgagccg

SEQ ID NO: 2785242 - RNA, 19 nt, Artificial Sequence
  Description of Artificial Sequence: Synthetic oligonucleotide
cggggaaggagaaggcaac

SEQ ID NO: 2785243 - RNA, 19 nt, Artificial Sequence
  Description of Artificial Sequence: Synthetic oligonucleotide
ggggcuggccagcuccaug

SEQ ID NO: 2785244 - RNA, 19 nt, Artificial Sequence
  Description of Artificial Sequence: Synthetic oligonucleotide
cugaggucuuuacagccuu

SEQ ID NO: 2785245 - RNA, 19 nt, Artificial Sequence
  Description of Artificial Sequence: Synthetic oligonucleotide
ggcagaaauccaagucgga

SEQ ID NO: 2785246 - RNA, 19 nt, Artificial Sequence
  Description of Artificial Sequence: Synthetic oligonucleotide
cugaacgcaucugucuggu

SEQ ID NO: 2785247 - RNA, 19 nt, Artificial Sequence
  Description of Artificial Sequence: Synthetic oligonucleotide
ggggaaggagaaggcaaca

SEQ ID NO: 2785248 - RNA, 19 nt, Artificial Sequence
  Description of Artificial Sequence: Synthetic oligonucleotide
ccacuggucccugggauuc

SEQ ID NO: 2785249 - RNA, 19 nt, Artificial Sequence
  Description of Artificial Sequence: Synthetic oligonucleotide
gccauucccucaugaccac

SEQ ID NO: 2785250 - RNA, 19 nt, Artificial Sequence
  Description of Artificial Sequence: Synthetic oligonucleotide
gcggggaaggagaaggcaa

SEQ ID NO: 2785251 - RNA, 19 nt, Artificial Sequence
  Description of Artificial Sequence: Synthetic oligonucleotide
ccuuuuccugaaacuugca

SEQ ID NO: 2785252 - RNA, 19 nt, Artificial Sequence
  Description of Artificial Sequence: Synthetic oligonucleotide
gcacgucuauggagaagcc

SEQ ID NO: 2785253 - RNA, 19 nt, Artificial Sequence
  Description of Artificial Sequence: Synthetic oligonucleotide
ggcagcggcaggaccgagc

SEQ ID NO: 2785254 - RNA, 19 nt, Artificial Sequence
  Description of Artificial Sequence: Synthetic oligonucleotide
gcaucugucugguguggua

SEQ ID NO: 2785255 - RNA, 19 nt, Artificial Sequence
  Description of Artificial Sequence: Synthetic oligonucleotide
ccgagccgcaaucugggca

SEQ ID NO: 2785256 - RNA, 19 nt, Artificial Sequence
  Description of Artificial Sequence: Synthetic oligonucleotide
uggcagcggcaggaccgag

SEQ ID NO: 2785257 - RNA, 19 nt, Artificial Sequence
  Description of Artificial Sequence: Synthetic oligonucleotide
ccuccacagacguagguau

SEQ ID NO: 2785258 - RNA, 19 nt, Artificial Sequence
  Description of Artificial Sequence: Synthetic oligonucleotide
caccagcggggaaggagaa

SEQ ID NO: 2785259 - RNA, 19 nt, Artificial Sequence
  Description of Artificial Sequence: Synthetic oligonucleotide
ccuucgaaaucucgcacgu

SEQ ID NO: 2785260 - RNA, 19 nt, Artificial Sequence
  Description of Artificial Sequence: Synthetic oligonucleotide
ccugggauucagguccuuc

SEQ ID NO: 2785261 - RNA, 19 nt, Artificial Sequence
  Description of Artificial Sequence: Synthetic oligonucleotide
ugaccacaucgagggcauc

SEQ ID NO: 2785262 - RNA, 19 nt, Artificial Sequence
  Description of Artificial Sequence: Synthetic oligonucleotide
cgacagcauccugaguucc

SEQ ID NO: 2785263 - RNA, 19 nt, Artificial Sequence
  Description of Artificial Sequence: Synthetic oligonucleotide
ccacagcgagggcagacga

SEQ ID NO: 2785264 - RNA, 19 nt, Artificial Sequence
  Description of Artificial Sequence: Synthetic oligonucleotide
cagguccuuccuccacaga

SEQ ID NO: 2785265 - RNA, 19 nt, Artificial Sequence
  Description of Artificial Sequence: Synthetic oligonucleotide
ggucaaccacuggucccug

SEQ ID NO: 2785266 - RNA, 19 nt, Artificial Sequence
  Description of Artificial Sequence: Synthetic oligonucleotide
cgucuauggagaagccaca

SEQ ID NO: 2785267 - RNA, 19 nt, Artificial Sequence
  Description of Artificial Sequence: Synthetic oligonucleotide
agccgcaaucugggcagaa

SEQ ID NO: 2785268 - RNA, 19 nt, Artificial Sequence
  Description of Artificial Sequence: Synthetic oligonucleotide
gagacggggcuggccagcu

SEQ ID NO: 2785269 - RNA, 19 nt, Artificial Sequence
  Description of Artificial Sequence: Synthetic oligonucleotide
gagccgcaaucugggcaga

SEQ ID NO: 2785270 - RNA, 19 nt, Artificial Sequence
  Description of Artificial Sequence: Synthetic oligonucleotide
cgccggucaaccacugguc

SEQ ID NO: 2785271 - RNA, 19 nt, Artificial Sequence
  Description of Artificial Sequence: Synthetic oligonucleotide
acggggcuggccagcucca

SEQ ID NO: 2785272 - RNA, 19 nt, Artificial Sequence
  Description of Artificial Sequence: Synthetic oligonucleotide
gggcaucgccggucaacca

SEQ ID NO: 2785273 - RNA, 19 nt, Artificial Sequence
  Description of Artificial Sequence: Synthetic oligonucleotide
ccgcaaucugggcagaaau

SEQ ID NO: 2785274 - RNA, 19 nt, Artificial Sequence
  Description of Artificial Sequence: Synthetic oligonucleotide
gaacacgacugaggucuuu

SEQ ID NO: 2785275 - RNA, 19 nt, Artificial Sequence
  Description of Artificial Sequence: Synthetic oligonucleotide
caggaccgagccgcaaucu

SEQ ID NO: 2785276 - RNA, 19 nt, Artificial Sequence
  Description of Artificial Sequence: Synthetic oligonucleotide
cacuggucccugggauuca

SEQ ID NO: 2785277 - RNA, 19 nt, Artificial Sequence
  Description of Artificial Sequence: Synthetic oligonucleotide
gucuggugugguacgccau

SEQ ID NO: 2785278 - RNA, 19 nt, Artificial Sequence
  Description of Artificial Sequence: Synthetic oligonucleotide
gggcagacgacagcauccu

SEQ ID NO: 2785279 - RNA, 19 nt, Artificial Sequence
  Description of Artificial Sequence: Synthetic oligonucleotide
gcaucgccggucaaccacu

SEQ ID NO: 2785280 - RNA, 19 nt, Artificial Sequence
  Description of Artificial Sequence: Synthetic oligonucleotide
gccgcaaucugggcagaaa

SEQ ID NO: 2785281 - RNA, 19 nt, Artificial Sequence
  Description of Artificial Sequence: Synthetic oligonucleotide
caucgagggcaucgccggu

SEQ ID NO: 2785282 - RNA, 19 nt, Artificial Sequence
  Description of Artificial Sequence: Synthetic oligonucleotide
ccauucccucaugaccaca

SEQ ID NO: 2785283 - RNA, 19 nt, Artificial Sequence
  Description of Artificial Sequence: Synthetic oligonucleotide
gccuucccuucgaaaucuc

SEQ ID NO: 2785284 - RNA, 19 nt, Artificial Sequence
  Description of Artificial Sequence: Synthetic oligonucleotide
cgaaaucucgcacgucuau

SEQ ID NO: 2785285 - RNA, 19 nt, Artificial Sequence
  Description of Artificial Sequence: Synthetic oligonucleotide
cggucaaccacuggucccu

SEQ ID NO: 2785286 - RNA, 19 nt, Artificial Sequence
  Description of Artificial Sequence: Synthetic oligonucleotide
ggaacacgacugaggucuu

SEQ ID NO: 2785287 - RNA, 19 nt, Artificial Sequence
  Description of Artificial Sequence: Synthetic oligonucleotide
gcggcaggaccgagccgca

SEQ ID NO: 2785288 - RNA, 19 nt, Artificial Sequence
  Description of Artificial Sequence: Synthetic oligonucleotide
cgcaucugucugguguggu

SEQ ID NO: 2785289 - RNA, 19 nt, Artificial Sequence
  Description of Artificial Sequence: Synthetic oligonucleotide
cgagggcaucgccggucaa

SEQ ID NO: 2785290 - RNA, 19 nt, Artificial Sequence
  Description of Artificial Sequence: Synthetic oligonucleotide
cccugggauucagguccuu

SEQ ID NO: 2785291 - RNA, 19 nt, Artificial Sequence
  Description of Artificial Sequence: Synthetic oligonucleotide
cggggcuggccagcuccau

SEQ ID NO: 2785292 - RNA, 19 nt, Artificial Sequence
  Description of Artificial Sequence: Synthetic oligonucleotide
ugaccuauuacaaagagcc

SEQ ID NO: 2785293 - RNA, 19 nt, Artificial Sequence
  Description of Artificial Sequence: Synthetic oligonucleotide
aauggguccccauugaccc

SEQ ID NO: 2785294 - RNA, 19 nt, Artificial Sequence
  Description of Artificial Sequence: Synthetic oligonucleotide
agauauaacugcuaagccg

SEQ ID NO: 2785295 - RNA, 19 nt, Artificial Sequence
  Description of Artificial Sequence: Synthetic oligonucleotide
auuacaaagagccugcgug

SEQ ID NO: 2785296 - RNA, 19 nt, Artificial Sequence
  Description of Artificial Sequence: Synthetic oligonucleotide
ugagauauaacugcuaagc

SEQ ID NO: 2785297 - RNA, 19 nt, Artificial Sequence
  Description of Artificial Sequence: Synthetic oligonucleotide
guagacaccagccuggugg

SEQ ID NO: 2785298 - RNA, 19 nt, Artificial Sequence
  Description of Artificial Sequence: Synthetic oligonucleotide
gauauaacugcuaagccgc

SEQ ID NO: 2785299 - RNA, 19 nt, Artificial Sequence
  Description of Artificial Sequence: Synthetic oligonucleotide
gcuacuuccauucagagag

SEQ ID NO: 2785300 - RNA, 19 nt, Artificial Sequence
  Description of Artificial Sequence: Synthetic oligonucleotide
acugcuaagccgcagggcc

SEQ ID NO: 2785301 - RNA, 19 nt, Artificial Sequence
  Description of Artificial Sequence: Synthetic oligonucleotide
agguagaacagacacugcc

SEQ ID NO: 2785302 - RNA, 19 nt, Artificial Sequence
  Description of Artificial Sequence: Synthetic oligonucleotide
uagcacaugagauauaacu

SEQ ID NO: 2785303 - RNA, 19 nt, Artificial Sequence
  Description of Artificial Sequence: Synthetic oligonucleotide
uacacuacuuagcacauga

SEQ ID NO: 2785304 - RNA, 19 nt, Artificial Sequence
  Description of Artificial Sequence: Synthetic oligonucleotide
uccacaaagacgcacuccc

SEQ ID NO: 2785305 - RNA, 19 nt, Artificial Sequence
  Description of Artificial Sequence: Synthetic oligonucleotide
augugucugggucaaaugg

SEQ ID NO: 2785306 - RNA, 19 nt, Artificial Sequence
  Description of Artificial Sequence: Synthetic oligonucleotide
ugguagguagaacagacac

SEQ ID NO: 2785307 - RNA, 19 nt, Artificial Sequence
  Description of Artificial Sequence: Synthetic oligonucleotide
aaauggguccccauugacc

SEQ ID NO: 2785308 - RNA, 19 nt, Artificial Sequence
  Description of Artificial Sequence: Synthetic oligonucleotide
ugugcuuguguguaugggg

SEQ ID NO: 2785309 - RNA, 19 nt, Artificial Sequence
  Description of Artificial Sequence: Synthetic oligonucleotide
ucuugcugcacacccaggg

SEQ ID NO: 2785310 - RNA, 19 nt, Artificial Sequence
  Description of Artificial Sequence: Synthetic oligonucleotide
gagauauaacugcuaagcc

SEQ ID NO: 2785311 - RNA, 19 nt, Artificial Sequence
  Description of Artificial Sequence: Synthetic oligonucleotide
acagacacugcccuuggac

SEQ ID NO: 2785312 - RNA, 19 nt, Artificial Sequence
  Description of Artificial Sequence: Synthetic oligonucleotide
agccaagucacguguaggc

SEQ ID NO: 2785313 - RNA, 19 nt, Artificial Sequence
  Description of Artificial Sequence: Synthetic oligonucleotide
auaacugcuaagccgcagg

SEQ ID NO: 2785314 - RNA, 19 nt, Artificial Sequence
  Description of Artificial Sequence: Synthetic oligonucleotide
guagguagaacagacacug

SEQ ID NO: 2785315 - RNA, 19 nt, Artificial Sequence
  Description of Artificial Sequence: Synthetic oligonucleotide
guggguuccacaaagacgc

SEQ ID NO: 2785316 - RNA, 19 nt, Artificial Sequence
  Description of Artificial Sequence: Synthetic oligonucleotide
aaugugucugggucaaaug

SEQ ID NO: 2785317 - RNA, 19 nt, Artificial Sequence
  Description of Artificial Sequence: Synthetic oligonucleotide
agacacugcccuuggaccc

SEQ ID NO: 2785318 - RNA, 19 nt, Artificial Sequence
  Description of Artificial Sequence: Synthetic oligonucleotide
agugaggaagcuccugggc

SEQ ID NO: 2785319 - RNA, 19 nt, Artificial Sequence
  Description of Artificial Sequence: Synthetic oligonucleotide
augucuacacuacuuagca

SEQ ID NO: 2785320 - RNA, 19 nt, Artificial Sequence
  Description of Artificial Sequence: Synthetic oligonucleotide
uuccauucagagagggugg

SEQ ID NO: 2785321 - RNA, 19 nt, Artificial Sequence
  Description of Artificial Sequence: Synthetic oligonucleotide
gucuacacuacuuagcaca

SEQ ID NO: 2785322 - RNA, 19 nt, Artificial Sequence
  Description of Artificial Sequence: Synthetic oligonucleotide
uggacccuggggcagaggg

SEQ ID NO: 2785323 - RNA, 19 nt, Artificial Sequence
  Description of Artificial Sequence: Synthetic oligonucleotide
ucacguguaggccaucuug

SEQ ID NO: 2785324 - RNA, 19 nt, Artificial Sequence
  Description of Artificial Sequence: Synthetic oligonucleotide
uccccauugacccaaugga

SEQ ID NO: 2785325 - RNA, 19 nt, Artificial Sequence
  Description of Artificial Sequence: Synthetic oligonucleotide
agaugucuacacuacuuag

SEQ ID NO: 2785326 - RNA, 19 nt, Artificial Sequence
  Description of Artificial Sequence: Synthetic oligonucleotide
acacucuguagacaccagc

SEQ ID NO: 2785327 - RNA, 19 nt, Artificial Sequence
  Description of Artificial Sequence: Synthetic oligonucleotide
uaacugcuaagccgcaggg

SEQ ID NO: 2785328 - RNA, 19 nt, Artificial Sequence
  Description of Artificial Sequence: Synthetic oligonucleotide
cuuccauucagagagggug

SEQ ID NO: 2785329 - RNA, 19 nt, Artificial Sequence
  Description of Artificial Sequence: Synthetic oligonucleotide
cacucuguagacaccagcc

SEQ ID NO: 2785330 - RNA, 19 nt, Artificial Sequence
  Description of Artificial Sequence: Synthetic oligonucleotide
aagaugucuacacuacuua

SEQ ID NO: 2785331 - RNA, 19 nt, Artificial Sequence
  Description of Artificial Sequence: Synthetic oligonucleotide
uacacguguguacacacgu

SEQ ID NO: 2785332 - RNA, 19 nt, Artificial Sequence
  Description of Artificial Sequence: Synthetic oligonucleotide
gaagcuccugggcagagcc

SEQ ID NO: 2785333 - RNA, 19 nt, Artificial Sequence
  Description of Artificial Sequence: Synthetic oligonucleotide
agcucuggagcccaagagg

SEQ ID NO: 2785334 - RNA, 19 nt, Artificial Sequence
  Description of Artificial Sequence: Synthetic oligonucleotide
guguaggccaucuugcugc

SEQ ID NO: 2785335 - RNA, 19 nt, Artificial Sequence
  Description of Artificial Sequence: Synthetic oligonucleotide
cauucagagaggguggugg

SEQ ID NO: 2785336 - RNA, 19 nt, Artificial Sequence
  Description of Artificial Sequence: Synthetic oligonucleotide
gaugucuacacuacuuagc

SEQ ID NO: 2785337 - RNA, 19 nt, Artificial Sequence
  Description of Artificial Sequence: Synthetic oligonucleotide
accuauuacaaagagccug

SEQ ID NO: 2785338 - RNA, 19 nt, Artificial Sequence
  Description of Artificial Sequence: Synthetic oligonucleotide
augagauauaacugcuaag

SEQ ID NO: 2785339 - RNA, 19 nt, Artificial Sequence
  Description of Artificial Sequence: Synthetic oligonucleotide
gagauggugaaugugucug

SEQ ID NO: 2785340 - RNA, 19 nt, Artificial Sequence
  Description of Artificial Sequence: Synthetic oligonucleotide
acuacuuagcacaugagau

SEQ ID NO: 2785341 - RNA, 19 nt, Artificial Sequence
  Description of Artificial Sequence: Synthetic oligonucleotide
uauuacaaagagccugcgu

SEQ ID NO: 2785342 - RNA, 19 nt, Artificial Sequence
  Description of Artificial Sequence: Synthetic oligonucleotide
uggugaaugugucuggguc

SEQ ID NO: 2785343 - RNA, 19 nt, Artificial Sequence
  Description of Artificial Sequence: Synthetic oligonucleotide
uuacaaagagccugcgugu

SEQ ID NO: 2785344 - RNA, 19 nt, Artificial Sequence
  Description of Artificial Sequence: Synthetic oligonucleotide
cugggcagagccaaggaag

SEQ ID NO: 2785345 - RNA, 19 nt, Artificial Sequence
  Description of Artificial Sequence: Synthetic oligonucleotide
ugaggaagcuccugggcag

SEQ ID NO: 2785346 - RNA, 19 nt, Artificial Sequence
  Description of Artificial Sequence: Synthetic oligonucleotide
auugacccaauggaagucg

SEQ ID NO: 2785347 - RNA, 19 nt, Artificial Sequence
  Description of Artificial Sequence: Synthetic oligonucleotide
gacaggagaagccagggaa

SEQ ID NO: 2785348 - RNA, 19 nt, Artificial Sequence
  Description of Artificial Sequence: Synthetic oligonucleotide
ucgccagacacucuguaga

SEQ ID NO: 2785349 - RNA, 19 nt, Artificial Sequence
  Description of Artificial Sequence: Synthetic oligonucleotide
aacugcuaagccgcagggc

SEQ ID NO: 2785350 - RNA, 19 nt, Artificial Sequence
  Description of Artificial Sequence: Synthetic oligonucleotide
uguguguacacguguguac

SEQ ID NO: 2785351 - RNA, 19 nt, Artificial Sequence
  Description of Artificial Sequence: Synthetic oligonucleotide
aggaagggugaccuauuac

SEQ ID NO: 2785352 - RNA, 19 nt, Artificial Sequence
  Description of Artificial Sequence: Synthetic oligonucleotide
ucaaauggguccccauuga

SEQ ID NO: 2785353 - RNA, 19 nt, Artificial Sequence
  Description of Artificial Sequence: Synthetic oligonucleotide
uacuuccauucagagaggg

SEQ ID NO: 2785354 - RNA, 19 nt, Artificial Sequence
  Description of Artificial Sequence: Synthetic oligonucleotide
gcacaugagauauaacugc

SEQ ID NO: 2785355 - RNA, 19 nt, Artificial Sequence
  Description of Artificial Sequence: Synthetic oligonucleotide
guccccauugacccaaugg

SEQ ID NO: 2785356 - RNA, 19 nt, Artificial Sequence
  Description of Artificial Sequence: Synthetic oligonucleotide
agauggugaaugugucugg

SEQ ID NO: 2785357 - RNA, 19 nt, Artificial Sequence
  Description of Artificial Sequence: Synthetic oligonucleotide
gucugggucaaaugggucc

SEQ ID NO: 2785358 - RNA, 19 nt, Artificial Sequence
  Description of Artificial Sequence: Synthetic oligonucleotide
uaggccaucuugcugcaca

SEQ ID NO: 2785359 - RNA, 19 nt, Artificial Sequence
  Description of Artificial Sequence: Synthetic oligonucleotide
cagacacugcccuuggacc

SEQ ID NO: 2785360 - RNA, 19 nt, Artificial Sequence
  Description of Artificial Sequence: Synthetic oligonucleotide
cuuccugcccagaagcacc

SEQ ID NO: 2785361 - RNA, 19 nt, Artificial Sequence
  Description of Artificial Sequence: Synthetic oligonucleotide
gcagagaccaccuggcugg

SEQ ID NO: 2785362 - RNA, 19 nt, Artificial Sequence
  Description of Artificial Sequence: Synthetic oligonucleotide
uagacaccagccugguggg

SEQ ID NO: 2785363 - RNA, 19 nt, Artificial Sequence
  Description of Artificial Sequence: Synthetic oligonucleotide
cacguguaggccaucuugc

SEQ ID NO: 2785364 - RNA, 19 nt, Artificial Sequence
  Description of Artificial Sequence: Synthetic oligonucleotide
ugcugcacacccagggccg

SEQ ID NO: 2785365 - RNA, 19 nt, Artificial Sequence
  Description of Artificial Sequence: Synthetic oligonucleotide
ugguggguuccacaaagac

SEQ ID NO: 2785366 - RNA, 19 nt, Artificial Sequence
  Description of Artificial Sequence: Synthetic oligonucleotide
cugcccagaagcaccaggg

SEQ ID NO: 2785367 - RNA, 19 nt, Artificial Sequence
  Description of Artificial Sequence: Synthetic oligonucleotide
ggaagggugaccuauuaca

SEQ ID NO: 2785368 - RNA, 19 nt, Artificial Sequence
  Description of Artificial Sequence: Synthetic oligonucleotide
caugagauauaacugcuaa

SEQ ID NO: 2785369 - RNA, 19 nt, Artificial Sequence
  Description of Artificial Sequence: Synthetic oligonucleotide
ggugaccuauuacaaagag

SEQ ID NO: 2785370 - RNA, 19 nt, Artificial Sequence
  Description of Artificial Sequence: Synthetic oligonucleotide
agagccaagucacguguag

SEQ ID NO: 2785371 - RNA, 19 nt, Artificial Sequence
  Description of Artificial Sequence: Synthetic oligonucleotide
gacaguggcagagaccacc

SEQ ID NO: 2785372 - RNA, 19 nt, Artificial Sequence
  Description of Artificial Sequence: Synthetic oligonucleotide
ucuacacuacuuagcacau

SEQ ID NO: 2785373 - RNA, 19 nt, Artificial Sequence
  Description of Artificial Sequence: Synthetic oligonucleotide
agaacagacacugcccuug

SEQ ID NO: 2785374 - RNA, 19 nt, Artificial Sequence
  Description of Artificial Sequence: Synthetic oligonucleotide
aggggacaguggcagagac

SEQ ID NO: 2785375 - RNA, 19 nt, Artificial Sequence
  Description of Artificial Sequence: Synthetic oligonucleotide
gaagccagggaaccagggc

SEQ ID NO: 2785376 - RNA, 19 nt, Artificial Sequence
  Description of Artificial Sequence: Synthetic oligonucleotide
ugugugugugguguguuug

SEQ ID NO: 2785377 - RNA, 19 nt, Artificial Sequence
  Description of Artificial Sequence: Synthetic oligonucleotide
ccuauuacaaagagccugc

SEQ ID NO: 2785378 - RNA, 19 nt, Artificial Sequence
  Description of Artificial Sequence: Synthetic oligonucleotide
ugagcucuggagcccaaga

SEQ ID NO: 2785379 - RNA, 19 nt, Artificial Sequence
  Description of Artificial Sequence: Synthetic oligonucleotide
uauaacugcuaagccgcag

SEQ ID NO: 2785380 - RNA, 19 nt, Artificial Sequence
  Description of Artificial Sequence: Synthetic oligonucleotide
uccugccagagccaaguca

SEQ ID NO: 2785381 - RNA, 19 nt, Artificial Sequence
  Description of Artificial Sequence: Synthetic oligonucleotide
uuagcacaugagauauaac

SEQ ID NO: 2785382 - RNA, 19 nt, Artificial Sequence
  Description of Artificial Sequence: Synthetic oligonucleotide
gagcucuggagcccaagag

SEQ ID NO: 2785383 - RNA, 19 nt, Artificial Sequence
  Description of Artificial Sequence: Synthetic oligonucleotide
ucugggucaaauggguccc

SEQ ID NO: 2785384 - RNA, 19 nt, Artificial Sequence
  Description of Artificial Sequence: Synthetic oligonucleotide
agagccaaggaagggugac

SEQ ID NO: 2785385 - RNA, 19 nt, Artificial Sequence
  Description of Artificial Sequence: Synthetic oligonucleotide
ucuggagcccaagagggga

SEQ ID NO: 2785386 - RNA, 19 nt, Artificial Sequence
  Description of Artificial Sequence: Synthetic oligonucleotide
cacuacuuagcacaugaga

SEQ ID NO: 2785387 - RNA, 19 nt, Artificial Sequence
  Description of Artificial Sequence: Synthetic oligonucleotide
acaggagaagccagggaac

SEQ ID NO: 2785388 - RNA, 19 nt, Artificial Sequence
  Description of Artificial Sequence: Synthetic oligonucleotide
caggugguagguagaacag

SEQ ID NO: 2785389 - RNA, 19 nt, Artificial Sequence
  Description of Artificial Sequence: Synthetic oligonucleotide
gguggguuccacaaagacg

SEQ ID NO: 2785390 - RNA, 19 nt, Artificial Sequence
  Description of Artificial Sequence: Synthetic oligonucleotide
guguuuguguguguacacg

SEQ ID NO: 2785391 - RNA, 19 nt, Artificial Sequence
  Description of Artificial Sequence: Synthetic oligonucleotide
ugucuacacuacuuagcac

SEQ ID NO: 2785392 - RNA, 19 nt, Artificial Sequence
  Description of Artificial Sequence: Synthetic oligonucleotide
uggggacaggagaagccag

SEQ ID NO: 2785393 - RNA, 19 nt, Artificial Sequence
  Description of Artificial Sequence: Synthetic oligonucleotide
gcugcagugaggaagcucc

SEQ ID NO: 2785394 - RNA, 19 nt, Artificial Sequence
  Description of Artificial Sequence: Synthetic oligonucleotide
ucagagaggguggugggcu

SEQ ID NO: 2785395 - RNA, 19 nt, Artificial Sequence
  Description of Artificial Sequence: Synthetic oligonucleotide
uacaaagagccugcgugug

SEQ ID NO: 2785396 - RNA, 19 nt, Artificial Sequence
  Description of Artificial Sequence: Synthetic oligonucleotide
gugaccuauuacaaagagc

SEQ ID NO: 2785397 - RNA, 19 nt, Artificial Sequence
  Description of Artificial Sequence: Synthetic oligonucleotide
aaggaagggugaccuauua

SEQ ID NO: 2785398 - RNA, 19 nt, Artificial Sequence
  Description of Artificial Sequence: Synthetic oligonucleotide
cuugcugcacacccagggc

SEQ ID NO: 2785399 - RNA, 19 nt, Artificial Sequence
  Description of Artificial Sequence: Synthetic oligonucleotide
agacacucuguagacacca

SEQ ID NO: 2785400 - RNA, 19 nt, Artificial Sequence
  Description of Artificial Sequence: Synthetic oligonucleotide
cuauuacaaagagccugcg

SEQ ID NO: 2785401 - RNA, 19 nt, Artificial Sequence
  Description of Artificial Sequence: Synthetic oligonucleotide
cagugaggaagcuccuggg

SEQ ID NO: 2785402 - RNA, 19 nt, Artificial Sequence
  Description of Artificial Sequence: Synthetic oligonucleotide
uagguagaacagacacugc

SEQ ID NO: 2785403 - RNA, 19 nt, Artificial Sequence
  Description of Artificial Sequence: Synthetic oligonucleotide
ugcuggaagcaggugguag

SEQ ID NO: 2785404 - RNA, 19 nt, Artificial Sequence
  Description of Artificial Sequence: Synthetic oligonucleotide
caaauggguccccauugac

SEQ ID NO: 2785405 - RNA, 19 nt, Artificial Sequence
  Description of Artificial Sequence: Synthetic oligonucleotide
gguagaacagacacugccc

SEQ ID NO: 2785406 - RNA, 19 nt, Artificial Sequence
  Description of Artificial Sequence: Synthetic oligonucleotide
gugaggaagcuccugggca

SEQ ID NO: 2785407 - RNA, 19 nt, Artificial Sequence
  Description of Artificial Sequence: Synthetic oligonucleotide
gcaggugguagguagaaca

SEQ ID NO: 2785408 - RNA, 19 nt, Artificial Sequence
  Description of Artificial Sequence: Synthetic oligonucleotide
aggccaucuugcugcacac

SEQ ID NO: 2785409 - RNA, 19 nt, Artificial Sequence
  Description of Artificial Sequence: Synthetic oligonucleotide
gguggugggcuccugcugg

SEQ ID NO: 2785410 - RNA, 19 nt, Artificial Sequence
  Description of Artificial Sequence: Synthetic oligonucleotide
ccagacacucuguagacac

SEQ ID NO: 2785411 - RNA, 19 nt, Artificial Sequence
  Description of Artificial Sequence: Synthetic oligonucleotide
gagccaagucacguguagg

SEQ ID NO: 2785412 - RNA, 19 nt, Artificial Sequence
  Description of Artificial Sequence: Synthetic oligonucleotide
gccaccuccugccagagcc

SEQ ID NO: 2785413 - RNA, 19 nt, Artificial Sequence
  Description of Artificial Sequence: Synthetic oligonucleotide
uuccacaaagacgcacucc

SEQ ID NO: 2785414 - RNA, 19 nt, Artificial Sequence
  Description of Artificial Sequence: Synthetic oligonucleotide
aaccagggccucugagcuc

SEQ ID NO: 2785415 - RNA, 19 nt, Artificial Sequence
  Description of Artificial Sequence: Synthetic oligonucleotide
agaagcaccagggcugcag

SEQ ID NO: 2785416 - RNA, 19 nt, Artificial Sequence
  Description of Artificial Sequence: Synthetic oligonucleotide
aagcaccagggcugcagug

SEQ ID NO: 2785417 - RNA, 19 nt, Artificial Sequence
  Description of Artificial Sequence: Synthetic oligonucleotide
ggaaccagggccucugagc

SEQ ID NO: 2785418 - RNA, 19 nt, Artificial Sequence
  Description of Artificial Sequence: Synthetic oligonucleotide
gaaccagggccucugagcu

SEQ ID NO: 2785419 - RNA, 19 nt, Artificial Sequence
  Description of Artificial Sequence: Synthetic oligonucleotide
auccccgagauggugaaug

SEQ ID NO: 2785420 - RNA, 19 nt, Artificial Sequence
  Description of Artificial Sequence: Synthetic oligonucleotide
gcucuggagcccaagaggg

SEQ ID NO: 2785421 - RNA, 19 nt, Artificial Sequence
  Description of Artificial Sequence: Synthetic oligonucleotide
gucgccagacacucuguag

SEQ ID NO: 2785422 - RNA, 19 nt, Artificial Sequence
  Description of Artificial Sequence: Synthetic oligonucleotide
uguacacacgugugcuugu

SEQ ID NO: 2785423 - RNA, 19 nt, Artificial Sequence
  Description of Artificial Sequence: Synthetic oligonucleotide
cuacuuccauucagagagg

SEQ ID NO: 2785424 - RNA, 19 nt, Artificial Sequence
  Description of Artificial Sequence: Synthetic oligonucleotide
ugucugggucaaauggguc

SEQ ID NO: 2785425 - RNA, 19 nt, Artificial Sequence
  Description of Artificial Sequence: Synthetic oligonucleotide
gaagggugaccuauuacaa

SEQ ID NO: 2785426 - RNA, 19 nt, Artificial Sequence
  Description of Artificial Sequence: Synthetic oligonucleotide
cccauugacccaauggaag

SEQ ID NO: 2785427 - RNA, 19 nt, Artificial Sequence
  Description of Artificial Sequence: Synthetic oligonucleotide
agaccaccuggcuggcuac

SEQ ID NO: 2785428 - RNA, 19 nt, Artificial Sequence
  Description of Artificial Sequence: Synthetic oligonucleotide
caaagagccugcgugugug

SEQ ID NO: 2785429 - RNA, 19 nt, Artificial Sequence
  Description of Artificial Sequence: Synthetic oligonucleotide
guguacacacgugugcuug

SEQ ID NO: 2785430 - RNA, 19 nt, Artificial Sequence
  Description of Artificial Sequence: Synthetic oligonucleotide
caggagaagccagggaacc

SEQ ID NO: 2785431 - RNA, 19 nt, Artificial Sequence
  Description of Artificial Sequence: Synthetic oligonucleotide
ggugguagguagaacagac

SEQ ID NO: 2785432 - RNA, 19 nt, Artificial Sequence
  Description of Artificial Sequence: Synthetic oligonucleotide
uguagacaccagccuggug

SEQ ID NO: 2785433 - RNA, 19 nt, Artificial Sequence
  Description of Artificial Sequence: Synthetic oligonucleotide
acaaagagccugcgugugu

SEQ ID NO: 2785434 - RNA, 19 nt, Artificial Sequence
  Description of Artificial Sequence: Synthetic oligonucleotide
gccaucuugcugcacaccc

SEQ ID NO: 2785435 - RNA, 19 nt, Artificial Sequence
  Description of Artificial Sequence: Synthetic oligonucleotide
ccugccagagccaagucac

SEQ ID NO: 2785436 - RNA, 19 nt, Artificial Sequence
  Description of Artificial Sequence: Synthetic oligonucleotide
cuacuuagcacaugagaua

SEQ ID NO: 2785437 - RNA, 19 nt, Artificial Sequence
  Description of Artificial Sequence: Synthetic oligonucleotide
agaagccagggaaccaggg

SEQ ID NO: 2785438 - RNA, 19 nt, Artificial Sequence
  Description of Artificial Sequence: Synthetic oligonucleotide
aacagacacugcccuugga

SEQ ID NO: 2785439 - RNA, 19 nt, Artificial Sequence
  Description of Artificial Sequence: Synthetic oligonucleotide
guuuguguguguacacgug

SEQ ID NO: 2785440 - RNA, 19 nt, Artificial Sequence
  Description of Artificial Sequence: Synthetic oligonucleotide
gugggcuccugcuggaagc

SEQ ID NO: 2785441 - RNA, 19 nt, Artificial Sequence
  Description of Artificial Sequence: Synthetic oligonucleotide
gugugcuuguguguauggg

SEQ ID NO: 2785442 - RNA, 19 nt, Artificial Sequence
  Description of Artificial Sequence: Synthetic oligonucleotide
agccaaggaagggugaccu

SEQ ID NO: 2785443 - RNA, 19 nt, Artificial Sequence
  Description of Artificial Sequence: Synthetic oligonucleotide
uuccugcccagaagcacca

SEQ ID NO: 2785444 - RNA, 19 nt, Artificial Sequence
  Description of Artificial Sequence: Synthetic oligonucleotide
ggugaaugugucuggguca

SEQ ID NO: 2785445 - RNA, 19 nt, Artificial Sequence
  Description of Artificial Sequence: Synthetic oligonucleotide
cucuggagcccaagagggg

SEQ ID NO: 2785446 - RNA, 19 nt, Artificial Sequence
  Description of Artificial Sequence: Synthetic oligonucleotide
uccugggcagagccaagga

SEQ ID NO: 2785447 - RNA, 19 nt, Artificial Sequence
  Description of Artificial Sequence: Synthetic oligonucleotide
aagccgcagggccugccug

SEQ ID NO: 2785448 - RNA, 19 nt, Artificial Sequence
  Description of Artificial Sequence: Synthetic oligonucleotide
uguaggccaucuugcugca

SEQ ID NO: 2785449 - RNA, 19 nt, Artificial Sequence
  Description of Artificial Sequence: Synthetic oligonucleotide
agcccaagaggggacagug

SEQ ID NO: 2785450 - RNA, 19 nt, Artificial Sequence
  Description of Artificial Sequence: Synthetic oligonucleotide
cugcccuuggacccugggg

SEQ ID NO: 2785451 - RNA, 19 nt, Artificial Sequence
  Description of Artificial Sequence: Synthetic oligonucleotide
cagacacucuguagacacc

SEQ ID NO: 2785452 - RNA, 19 nt, Artificial Sequence
  Description of Artificial Sequence: Synthetic oligonucleotide
cccaagaggggacaguggc

SEQ ID NO: 2785453 - RNA, 19 nt, Artificial Sequence
  Description of Artificial Sequence: Synthetic oligonucleotide
ggagaagccagggaaccag

SEQ ID NO: 2785454 - RNA, 19 nt, Artificial Sequence
  Description of Artificial Sequence: Synthetic oligonucleotide
cauugacccaauggaaguc

SEQ ID NO: 2785455 - RNA, 19 nt, Artificial Sequence
  Description of Artificial Sequence: Synthetic oligonucleotide
uaagccgcagggccugccu

SEQ ID NO: 2785456 - RNA, 19 nt, Artificial Sequence
  Description of Artificial Sequence: Synthetic oligonucleotide
acugcccuuggacccuggg

SEQ ID NO: 2785457 - RNA, 19 nt, Artificial Sequence
  Description of Artificial Sequence: Synthetic oligonucleotide
acguguaggccaucuugcu

SEQ ID NO: 2785458 - RNA, 19 nt, Artificial Sequence
  Description of Artificial Sequence: Synthetic oligonucleotide
ggcagagaccaccuggcug

SEQ ID NO: 2785459 - RNA, 19 nt, Artificial Sequence
  Description of Artificial Sequence: Synthetic oligonucleotide
ggggcgaagaugucuacac

SEQ ID NO: 2785460 - RNA, 19 nt, Artificial Sequence
  Description of Artificial Sequence: Synthetic oligonucleotide
acacccagggccgggucgc

SEQ ID NO: 2785461 - RNA, 19 nt, Artificial Sequence
  Description of Artificial Sequence: Synthetic oligonucleotide
uguguacacacgugugcuu

SEQ ID NO: 2785462 - RNA, 19 nt, Artificial Sequence
  Description of Artificial Sequence: Synthetic oligonucleotide
guuccacaaagacgcacuc

SEQ ID NO: 2785463 - RNA, 19 nt, Artificial Sequence
  Description of Artificial Sequence: Synthetic oligonucleotide
cacaugagauauaacugcu

SEQ ID NO: 2785464 - RNA, 19 nt, Artificial Sequence
  Description of Artificial Sequence: Synthetic oligonucleotide
agcaggugguagguagaac

SEQ ID NO: 2785465 - RNA, 19 nt, Artificial Sequence
  Description of Artificial Sequence: Synthetic oligonucleotide
guguguacacguguguaca

SEQ ID NO: 2785466 - RNA, 19 nt, Artificial Sequence
  Description of Artificial Sequence: Synthetic oligonucleotide
gaagaugucuacacuacuu

SEQ ID NO: 2785467 - RNA, 19 nt, Artificial Sequence
  Description of Artificial Sequence: Synthetic oligonucleotide
ugcagugaggaagcuccug

SEQ ID NO: 2785468 - RNA, 19 nt, Artificial Sequence
  Description of Artificial Sequence: Synthetic oligonucleotide
agccgcagggccugccugg

SEQ ID NO: 2785469 - RNA, 19 nt, Artificial Sequence
  Description of Artificial Sequence: Synthetic oligonucleotide
cacacccagggccgggucg

SEQ ID NO: 2785470 - RNA, 19 nt, Artificial Sequence
  Description of Artificial Sequence: Synthetic oligonucleotide
ugccagagccaagucacgu

SEQ ID NO: 2785471 - RNA, 19 nt, Artificial Sequence
  Description of Artificial Sequence: Synthetic oligonucleotide
gagaccaccuggcuggcua

SEQ ID NO: 2785472 - RNA, 19 nt, Artificial Sequence
  Description of Artificial Sequence: Synthetic oligonucleotide
aagcaggugguagguagaa

SEQ ID NO: 2785473 - RNA, 19 nt, Artificial Sequence
  Description of Artificial Sequence: Synthetic oligonucleotide
ggcgaagaugucuacacua

SEQ ID NO: 2785474 - RNA, 19 nt, Artificial Sequence
  Description of Artificial Sequence: Synthetic oligonucleotide
ugcuaagccgcagggccug

SEQ ID NO: 2785475 - RNA, 19 nt, Artificial Sequence
  Description of Artificial Sequence: Synthetic oligonucleotide
agccugguggguuccacaa

SEQ ID NO: 2785476 - RNA, 19 nt, Artificial Sequence
  Description of Artificial Sequence: Synthetic oligonucleotide
gacacucuguagacaccag

SEQ ID NO: 2785477 - RNA, 19 nt, Artificial Sequence
  Description of Artificial Sequence: Synthetic oligonucleotide
ugcguguguguguggugug

SEQ ID NO: 2785478 - RNA, 19 nt, Artificial Sequence
  Description of Artificial Sequence: Synthetic oligonucleotide
acacuacuuagcacaugag

SEQ ID NO: 2785479 - RNA, 19 nt, Artificial Sequence
  Description of Artificial Sequence: Synthetic oligonucleotide
gagccugcgugugugugug

SEQ ID NO: 2785480 - RNA, 19 nt, Artificial Sequence
  Description of Artificial Sequence: Synthetic oligonucleotide
uagaacagacacugcccuu

SEQ ID NO: 2785481 - RNA, 19 nt, Artificial Sequence
  Description of Artificial Sequence: Synthetic oligonucleotide
uggcagagaccaccuggcu

SEQ ID NO: 2785482 - RNA, 19 nt, Artificial Sequence
  Description of Artificial Sequence: Synthetic oligonucleotide
cugccagagccaagucacg

SEQ ID NO: 2785483 - RNA, 19 nt, Artificial Sequence
  Description of Artificial Sequence: Synthetic oligonucleotide
ggccucugagcucuggagc

SEQ ID NO: 2785484 - RNA, 19 nt, Artificial Sequence
  Description of Artificial Sequence: Synthetic oligonucleotide
gagccaaggaagggugacc

SEQ ID NO: 2785485 - RNA, 19 nt, Artificial Sequence
  Description of Artificial Sequence: Synthetic oligonucleotide
uccccgagauggugaaugu

SEQ ID NO: 2785486 - RNA, 19 nt, Artificial Sequence
  Description of Artificial Sequence: Synthetic oligonucleotide
agcaccagggcugcaguga

SEQ ID NO: 2785487 - RNA, 19 nt, Artificial Sequence
  Description of Artificial Sequence: Synthetic oligonucleotide
agucacguguaggccaucu

SEQ ID NO: 2785488 - RNA, 19 nt, Artificial Sequence
  Description of Artificial Sequence: Synthetic oligonucleotide
gggacaggagaagccaggg

SEQ ID NO: 2785489 - RNA, 19 nt, Artificial Sequence
  Description of Artificial Sequence: Synthetic oligonucleotide
acguguguacacacgugug

SEQ ID NO: 2785490 - RNA, 19 nt, Artificial Sequence
  Description of Artificial Sequence: Synthetic oligonucleotide
aggugguagguagaacaga

SEQ ID NO: 2785491 - RNA, 19 nt, Artificial Sequence
  Description of Artificial Sequence: Synthetic oligonucleotide
cuggagcccaagaggggac

SEQ ID NO: 2785492 - RNA, 19 nt, Artificial Sequence
  Description of Artificial Sequence: Synthetic oligonucleotide
gaaugugucugggucaaau

SEQ ID NO: 2785493 - RNA, 19 nt, Artificial Sequence
  Description of Artificial Sequence: Synthetic oligonucleotide
uggguuccacaaagacgca

SEQ ID NO: 2785494 - RNA, 19 nt, Artificial Sequence
  Description of Artificial Sequence: Synthetic oligonucleotide
acgugugcuuguguguaug

SEQ ID NO: 2785495 - RNA, 19 nt, Artificial Sequence
  Description of Artificial Sequence: Synthetic oligonucleotide
ccuggggacaggagaagcc

SEQ ID NO: 2785496 - RNA, 19 nt, Artificial Sequence
  Description of Artificial Sequence: Synthetic oligonucleotide
acaguggcagagaccaccu

SEQ ID NO: 2785497 - RNA, 19 nt, Artificial Sequence
  Description of Artificial Sequence: Synthetic oligonucleotide
cguguguacacacgugugc

SEQ ID NO: 2785498 - RNA, 19 nt, Artificial Sequence
  Description of Artificial Sequence: Synthetic oligonucleotide
agggccucugagcucugga

SEQ ID NO: 2785499 - RNA, 19 nt, Artificial Sequence
  Description of Artificial Sequence: Synthetic oligonucleotide
acaugagauauaacugcua

SEQ ID NO: 2785500 - RNA, 19 nt, Artificial Sequence
  Description of Artificial Sequence: Synthetic oligonucleotide
auauaacugcuaagccgca

SEQ ID NO: 2785501 - RNA, 19 nt, Artificial Sequence
  Description of Artificial Sequence: Synthetic oligonucleotide
cacguguguacacacgugu

SEQ ID NO: 2785502 - RNA, 19 nt, Artificial Sequence
  Description of Artificial Sequence: Synthetic oligonucleotide
ggcuacuuccauucagaga

SEQ ID NO: 2785503 - RNA, 19 nt, Artificial Sequence
  Description of Artificial Sequence: Synthetic oligonucleotide
guacacacgugugcuugug

SEQ ID NO: 2785504 - RNA, 19 nt, Artificial Sequence
  Description of Artificial Sequence: Synthetic oligonucleotide
ggugggcuccugcuggaag

SEQ ID NO: 2785505 - RNA, 19 nt, Artificial Sequence
  Description of Artificial Sequence: Synthetic oligonucleotide
gcagagccaaggaagggug

SEQ ID NO: 2785506 - RNA, 19 nt, Artificial Sequence
  Description of Artificial Sequence: Synthetic oligonucleotide
ccccuuccugcccagaagc

SEQ ID NO: 2785507 - RNA, 19 nt, Artificial Sequence
  Description of Artificial Sequence: Synthetic oligonucleotide
acacgugugcuugugugua

SEQ ID NO: 2785508 - RNA, 19 nt, Artificial Sequence
  Description of Artificial Sequence: Synthetic oligonucleotide
uggguccccauugacccaa

SEQ ID NO: 2785509 - RNA, 19 nt, Artificial Sequence
  Description of Artificial Sequence: Synthetic oligonucleotide
ccaagucacguguaggcca

SEQ ID NO: 2785510 - RNA, 19 nt, Artificial Sequence
  Description of Artificial Sequence: Synthetic oligonucleotide
acacguguguacacacgug

SEQ ID NO: 2785511 - RNA, 19 nt, Artificial Sequence
  Description of Artificial Sequence: Synthetic oligonucleotide
aagucacguguaggccauc

SEQ ID NO: 2785512 - RNA, 19 nt, Artificial Sequence
  Description of Artificial Sequence: Synthetic oligonucleotide
gugaaugugucugggucaa

SEQ ID NO: 2785513 - RNA, 19 nt, Artificial Sequence
  Description of Artificial Sequence: Synthetic oligonucleotide
acuuccauucagagagggu

SEQ ID NO: 2785514 - RNA, 19 nt, Artificial Sequence
  Description of Artificial Sequence: Synthetic oligonucleotide
gaagcaccagggcugcagu

SEQ ID NO: 2785515 - RNA, 19 nt, Artificial Sequence
  Description of Artificial Sequence: Synthetic oligonucleotide
cuacacuacuuagcacaug

SEQ ID NO: 2785516 - RNA, 19 nt, Artificial Sequence
  Description of Artificial Sequence: Synthetic oligonucleotide
ugggcuccugcuggaagca

SEQ ID NO: 2785517 - RNA, 19 nt, Artificial Sequence
  Description of Artificial Sequence: Synthetic oligonucleotide
uggagcccaagaggggaca

SEQ ID NO: 2785518 - RNA, 19 nt, Artificial Sequence
  Description of Artificial Sequence: Synthetic oligonucleotide
aggagaagccagggaacca

SEQ ID NO: 2785519 - RNA, 19 nt, Artificial Sequence
  Description of Artificial Sequence: Synthetic oligonucleotide
gcgaagaugucuacacuac

SEQ ID NO: 2785520 - RNA, 19 nt, Artificial Sequence
  Description of Artificial Sequence: Synthetic oligonucleotide
agcuccugggcagagccaa

SEQ ID NO: 2785521 - RNA, 19 nt, Artificial Sequence
  Description of Artificial Sequence: Synthetic oligonucleotide
gggaaccagggccucugag

SEQ ID NO: 2785522 - RNA, 19 nt, Artificial Sequence
  Description of Artificial Sequence: Synthetic oligonucleotide
ccugcccagaagcaccagg

SEQ ID NO: 2785523 - RNA, 19 nt, Artificial Sequence
  Description of Artificial Sequence: Synthetic oligonucleotide
cuggggacaggagaagcca

SEQ ID NO: 2785524 - RNA, 19 nt, Artificial Sequence
  Description of Artificial Sequence: Synthetic oligonucleotide
ggggacaggagaagccagg

SEQ ID NO: 2785525 - RNA, 19 nt, Artificial Sequence
  Description of Artificial Sequence: Synthetic oligonucleotide
cugccuggggacaggagaa

SEQ ID NO: 2785526 - RNA, 19 nt, Artificial Sequence
  Description of Artificial Sequence: Synthetic oligonucleotide
gccagagccaagucacgug

SEQ ID NO: 2785527 - RNA, 19 nt, Artificial Sequence
  Description of Artificial Sequence: Synthetic oligonucleotide
aucuugcugcacacccagg

SEQ ID NO: 2785528 - RNA, 19 nt, Artificial Sequence
  Description of Artificial Sequence: Synthetic oligonucleotide
guguguacacacgugugcu

SEQ ID NO: 2785529 - RNA, 19 nt, Artificial Sequence
  Description of Artificial Sequence: Synthetic oligonucleotide
gugguagguagaacagaca

SEQ ID NO: 2785530 - RNA, 19 nt, Artificial Sequence
  Description of Artificial Sequence: Synthetic oligonucleotide
cugguggguuccacaaaga

SEQ ID NO: 2785531 - RNA, 19 nt, Artificial Sequence
  Description of Artificial Sequence: Synthetic oligonucleotide
gcaccagggcugcagugag

SEQ ID NO: 2785532 - RNA, 19 nt, Artificial Sequence
  Description of Artificial Sequence: Synthetic oligonucleotide
gccaagucacguguaggcc

SEQ ID NO: 2785533 - RNA, 19 nt, Artificial Sequence
  Description of Artificial Sequence: Synthetic oligonucleotide
ccacaaagacgcacucccc

SEQ ID NO: 2785534 - RNA, 19 nt, Artificial Sequence
  Description of Artificial Sequence: Synthetic oligonucleotide
auggguccccauugaccca

SEQ ID NO: 2785535 - RNA, 19 nt, Artificial Sequence
  Description of Artificial Sequence: Synthetic oligonucleotide
aggaagcuccugggcagag

SEQ ID NO: 2785536 - RNA, 19 nt, Artificial Sequence
  Description of Artificial Sequence: Synthetic oligonucleotide
ccgagauggugaauguguc

SEQ ID NO: 2785537 - RNA, 19 nt, Artificial Sequence
  Description of Artificial Sequence: Synthetic oligonucleotide
agccagggaaccagggccu

SEQ ID NO: 2785538 - RNA, 19 nt, Artificial Sequence
  Description of Artificial Sequence: Synthetic oligonucleotide
cagggaaccagggccucug

SEQ ID NO: 2785539 - RNA, 19 nt, Artificial Sequence
  Description of Artificial Sequence: Synthetic oligonucleotide
cgugugcuuguguguaugg

SEQ ID NO: 2785540 - RNA, 19 nt, Artificial Sequence
  Description of Artificial Sequence: Synthetic oligonucleotide
cagagccaaggaaggguga

SEQ ID NO: 2785541 - RNA, 19 nt, Artificial Sequence
  Description of Artificial Sequence: Synthetic oligonucleotide
cuaagccgcagggccugcc

SEQ ID NO: 2785542 - RNA, 19 nt, Artificial Sequence
  Description of Artificial Sequence: Synthetic oligonucleotide
cugagcucuggagcccaag

SEQ ID NO: 2785543 - RNA, 19 nt, Artificial Sequence
  Description of Artificial Sequence: Synthetic oligonucleotide
agccugcgugugugugugg

SEQ ID NO: 2785544 - RNA, 19 nt, Artificial Sequence
  Description of Artificial Sequence: Synthetic oligonucleotide
uuggacccuggggcagagg

SEQ ID NO: 2785545 - RNA, 19 nt, Artificial Sequence
  Description of Artificial Sequence: Synthetic oligonucleotide
agggaaccagggccucuga

SEQ ID NO: 2785546 - RNA, 19 nt, Artificial Sequence
  Description of Artificial Sequence: Synthetic oligonucleotide
gugucugggucaaaugggu

SEQ ID NO: 2785547 - RNA, 19 nt, Artificial Sequence
  Description of Artificial Sequence: Synthetic oligonucleotide
gaggaagcuccugggcaga

SEQ ID NO: 2785548 - RNA, 19 nt, Artificial Sequence
  Description of Artificial Sequence: Synthetic oligonucleotide
uggaagcaggugguaggua

SEQ ID NO: 2785549 - RNA, 19 nt, Artificial Sequence
  Description of Artificial Sequence: Synthetic oligonucleotide
gaccuauuacaaagagccu

SEQ ID NO: 2785550 - RNA, 19 nt, Artificial Sequence
  Description of Artificial Sequence: Synthetic oligonucleotide
gugugugugguguguuugu

SEQ ID NO: 2785551 - RNA, 19 nt, Artificial Sequence
  Description of Artificial Sequence: Synthetic oligonucleotide
cuuggacccuggggcagag

SEQ ID NO: 2785552 - RNA, 19 nt, Artificial Sequence
  Description of Artificial Sequence: Synthetic oligonucleotide
agggccugccuggggacag

SEQ ID NO: 2785553 - RNA, 19 nt, Artificial Sequence
  Description of Artificial Sequence: Synthetic oligonucleotide
gguuccacaaagacgcacu

SEQ ID NO: 2785554 - RNA, 19 nt, Artificial Sequence
  Description of Artificial Sequence: Synthetic oligonucleotide
ggguuccacaaagacgcac

SEQ ID NO: 2785555 - RNA, 19 nt, Artificial Sequence
  Description of Artificial Sequence: Synthetic oligonucleotide
aagcuccugggcagagcca

SEQ ID NO: 2785556 - RNA, 19 nt, Artificial Sequence
  Description of Artificial Sequence: Synthetic oligonucleotide
ccugccuggggacaggaga

SEQ ID NO: 2785557 - RNA, 19 nt, Artificial Sequence
  Description of Artificial Sequence: Synthetic oligonucleotide
ugaaugugucugggucaaa

SEQ ID NO: 2785558 - RNA, 19 nt, Artificial Sequence
  Description of Artificial Sequence: Synthetic oligonucleotide
caguggcagagaccaccug

SEQ ID NO: 2785559 - RNA, 19 nt, Artificial Sequence
  Description of Artificial Sequence: Synthetic oligonucleotide
cguguaggccaucuugcug

SEQ ID NO: 2785560 - RNA, 19 nt, Artificial Sequence
  Description of Artificial Sequence: Synthetic oligonucleotide
gguagguagaacagacacu

SEQ ID NO: 2785561 - RNA, 19 nt, Artificial Sequence
  Description of Artificial Sequence: Synthetic oligonucleotide
caagucacguguaggccau

SEQ ID NO: 2785562 - RNA, 19 nt, Artificial Sequence
  Description of Artificial Sequence: Synthetic oligonucleotide
uccugcccagaagcaccag

SEQ ID NO: 2785563 - RNA, 19 nt, Artificial Sequence
  Description of Artificial Sequence: Synthetic oligonucleotide
ggagcccaagaggggacag

SEQ ID NO: 2785564 - RNA, 19 nt, Artificial Sequence
  Description of Artificial Sequence: Synthetic oligonucleotide
gggugaccuauuacaaaga

SEQ ID NO: 2785565 - RNA, 19 nt, Artificial Sequence
  Description of Artificial Sequence: Synthetic oligonucleotide
cccgagauggugaaugugu

SEQ ID NO: 2785566 - RNA, 19 nt, Artificial Sequence
  Description of Artificial Sequence: Synthetic oligonucleotide
ccauugacccaauggaagu

SEQ ID NO: 2785567 - RNA, 19 nt, Artificial Sequence
  Description of Artificial Sequence: Synthetic oligonucleotide
ccagaagcaccagggcugc

SEQ ID NO: 2785568 - RNA, 19 nt, Artificial Sequence
  Description of Artificial Sequence: Synthetic oligonucleotide
ggacccuggggcagagggg

SEQ ID NO: 2785569 - RNA, 19 nt, Artificial Sequence
  Description of Artificial Sequence: Synthetic oligonucleotide
ggguggugggcuccugcug

SEQ ID NO: 2785570 - RNA, 19 nt, Artificial Sequence
  Description of Artificial Sequence: Synthetic oligonucleotide
cuccugccagagccaaguc

SEQ ID NO: 2785571 - RNA, 19 nt, Artificial Sequence
  Description of Artificial Sequence: Synthetic oligonucleotide
gggccgggucgccagacac

SEQ ID NO: 2785572 - RNA, 19 nt, Artificial Sequence
  Description of Artificial Sequence: Synthetic oligonucleotide
ccuuccugcccagaagcac

SEQ ID NO: 2785573 - RNA, 19 nt, Artificial Sequence
  Description of Artificial Sequence: Synthetic oligonucleotide
cucugagcucuggagccca

SEQ ID NO: 2785574 - RNA, 19 nt, Artificial Sequence
  Description of Artificial Sequence: Synthetic oligonucleotide
cagccugguggguuccaca

SEQ ID NO: 2785575 - RNA, 19 nt, Artificial Sequence
  Description of Artificial Sequence: Synthetic oligonucleotide
ggggacaguggcagagacc

SEQ ID NO: 2785576 - RNA, 19 nt, Artificial Sequence
  Description of Artificial Sequence: Synthetic oligonucleotide
cacugcccuuggacccugg

SEQ ID NO: 2785577 - RNA, 19 nt, Artificial Sequence
  Description of Artificial Sequence: Synthetic oligonucleotide
acuuagcacaugagauaua

SEQ ID NO: 2785578 - RNA, 19 nt, Artificial Sequence
  Description of Artificial Sequence: Synthetic oligonucleotide
gcccaagaggggacagugg

SEQ ID NO: 2785579 - RNA, 19 nt, Artificial Sequence
  Description of Artificial Sequence: Synthetic oligonucleotide
cagagaccaccuggcuggc

SEQ ID NO: 2785580 - RNA, 19 nt, Artificial Sequence
  Description of Artificial Sequence: Synthetic oligonucleotide
guggugggcuccugcugga

SEQ ID NO: 2785581 - RNA, 19 nt, Artificial Sequence
  Description of Artificial Sequence: Synthetic oligonucleotide
ccaagaggggacaguggca

SEQ ID NO: 2785582 - RNA, 19 nt, Artificial Sequence
  Description of Artificial Sequence: Synthetic oligonucleotide
agggccgggucgccagaca

SEQ ID NO: 2785583 - RNA, 19 nt, Artificial Sequence
  Description of Artificial Sequence: Synthetic oligonucleotide
cagagccaagucacgugua

SEQ ID NO: 2785584 - RNA, 19 nt, Artificial Sequence
  Description of Artificial Sequence: Synthetic oligonucleotide
cugcguguguguguggugu

SEQ ID NO: 2785585 - RNA, 19 nt, Artificial Sequence
  Description of Artificial Sequence: Synthetic oligonucleotide
gguccccauugacccaaug

SEQ ID NO: 2785586 - RNA, 19 nt, Artificial Sequence
  Description of Artificial Sequence: Synthetic oligonucleotide
ggucaaauggguccccauu

SEQ ID NO: 2785587 - RNA, 19 nt, Artificial Sequence
  Description of Artificial Sequence: Synthetic oligonucleotide
ggaagcuccugggcagagc

SEQ ID NO: 2785588 - RNA, 19 nt, Artificial Sequence
  Description of Artificial Sequence: Synthetic oligonucleotide
ccccauugacccaauggaa

SEQ ID NO: 2785589 - RNA, 19 nt, Artificial Sequence
  Description of Artificial Sequence: Synthetic oligonucleotide
acacugcccuuggacccug

SEQ ID NO: 2785590 - RNA, 19 nt, Artificial Sequence
  Description of Artificial Sequence: Synthetic oligonucleotide
cgccagacacucuguagac

SEQ ID NO: 2785591 - RNA, 19 nt, Artificial Sequence
  Description of Artificial Sequence: Synthetic oligonucleotide
agagaccaccuggcuggcu

SEQ ID NO: 2785592 - RNA, 19 nt, Artificial Sequence
  Description of Artificial Sequence: Synthetic oligonucleotide
cugcuaagccgcagggccu

SEQ ID NO: 2785593 - RNA, 19 nt, Artificial Sequence
  Description of Artificial Sequence: Synthetic oligonucleotide
cuccugcuggaagcaggug

SEQ ID NO: 2785594 - RNA, 19 nt, Artificial Sequence
  Description of Artificial Sequence: Synthetic oligonucleotide
caccagccugguggguucc

SEQ ID NO: 2785595 - RNA, 19 nt, Artificial Sequence
  Description of Artificial Sequence: Synthetic oligonucleotide
cccauccccgagaugguga

SEQ ID NO: 2785596 - RNA, 19 nt, Artificial Sequence
  Description of Artificial Sequence: Synthetic oligonucleotide
cgggucgccagacacucug

SEQ ID NO: 2785597 - RNA, 19 nt, Artificial Sequence
  Description of Artificial Sequence: Synthetic oligonucleotide
ccaucuugcugcacaccca

SEQ ID NO: 2785598 - RNA, 19 nt, Artificial Sequence
  Description of Artificial Sequence: Synthetic oligonucleotide
ccugcguguguguguggug

SEQ ID NO: 2785599 - RNA, 19 nt, Artificial Sequence
  Description of Artificial Sequence: Synthetic oligonucleotide
uggugggcuccugcuggaa

SEQ ID NO: 2785600 - RNA, 19 nt, Artificial Sequence
  Description of Artificial Sequence: Synthetic oligonucleotide
caaggaagggugaccuauu

SEQ ID NO: 2785601 - RNA, 19 nt, Artificial Sequence
  Description of Artificial Sequence: Synthetic oligonucleotide
ggccaucuugcugcacacc

SEQ ID NO: 2785602 - RNA, 19 nt, Artificial Sequence
  Description of Artificial Sequence: Synthetic oligonucleotide
cuggcuggcuacuuccauu

SEQ ID NO: 2785603 - RNA, 19 nt, Artificial Sequence
  Description of Artificial Sequence: Synthetic oligonucleotide
agaggguggugggcuccug

SEQ ID NO: 2785604 - RNA, 19 nt, Artificial Sequence
  Description of Artificial Sequence: Synthetic oligonucleotide
ccagagccaagucacgugu

SEQ ID NO: 2785605 - RNA, 19 nt, Artificial Sequence
  Description of Artificial Sequence: Synthetic oligonucleotide
ggucgccagacacucugua

SEQ ID NO: 2785606 - RNA, 19 nt, Artificial Sequence
  Description of Artificial Sequence: Synthetic oligonucleotide
agacaccagccuggugggu

SEQ ID NO: 2785607 - RNA, 19 nt, Artificial Sequence
  Description of Artificial Sequence: Synthetic oligonucleotide
guaggccaucuugcugcac

SEQ ID NO: 2785608 - RNA, 19 nt, Artificial Sequence
  Description of Artificial Sequence: Synthetic oligonucleotide
ggcugcagugaggaagcuc

SEQ ID NO: 2785609 - RNA, 19 nt, Artificial Sequence
  Description of Artificial Sequence: Synthetic oligonucleotide
gccgggucgccagacacuc

SEQ ID NO: 2785610 - RNA, 19 nt, Artificial Sequence
  Description of Artificial Sequence: Synthetic oligonucleotide
gccagacacucuguagaca

SEQ ID NO: 2785611 - RNA, 19 nt, Artificial Sequence
  Description of Artificial Sequence: Synthetic oligonucleotide
gcagggccugccuggggac

SEQ ID NO: 2785612 - RNA, 19 nt, Artificial Sequence
  Description of Artificial Sequence: Synthetic oligonucleotide
ccucugagcucuggagccc

SEQ ID NO: 2785613 - RNA, 19 nt, Artificial Sequence
  Description of Artificial Sequence: Synthetic oligonucleotide
ccugggcagagccaaggaa

SEQ ID NO: 2785614 - RNA, 19 nt, Artificial Sequence
  Description of Artificial Sequence: Synthetic oligonucleotide
gugugugugugguguguuu

SEQ ID NO: 2785615 - RNA, 19 nt, Artificial Sequence
  Description of Artificial Sequence: Synthetic oligonucleotide
gcccuuggacccuggggca

SEQ ID NO: 2785616 - RNA, 19 nt, Artificial Sequence
  Description of Artificial Sequence: Synthetic oligonucleotide
cccagggccgggucgccag

SEQ ID NO: 2785617 - RNA, 19 nt, Artificial Sequence
  Description of Artificial Sequence: Synthetic oligonucleotide
gggcgaagaugucuacacu

SEQ ID NO: 2785618 - RNA, 19 nt, Artificial Sequence
  Description of Artificial Sequence: Synthetic oligonucleotide
cagggccgggucgccagac

SEQ ID NO: 2785619 - RNA, 19 nt, Artificial Sequence
  Description of Artificial Sequence: Synthetic oligonucleotide
accagccugguggguucca

SEQ ID NO: 2785620 - RNA, 19 nt, Artificial Sequence
  Description of Artificial Sequence: Synthetic oligonucleotide
gagcccaagaggggacagu

SEQ ID NO: 2785621 - RNA, 19 nt, Artificial Sequence
  Description of Artificial Sequence: Synthetic oligonucleotide
ccccgagauggugaaugug

SEQ ID NO: 2785622 - RNA, 19 nt, Artificial Sequence
  Description of Artificial Sequence: Synthetic oligonucleotide
gucacguguaggccaucuu

SEQ ID NO: 2785623 - RNA, 19 nt, Artificial Sequence
  Description of Artificial Sequence: Synthetic oligonucleotide
cuguagacaccagccuggu

SEQ ID NO: 2785624 - RNA, 19 nt, Artificial Sequence
  Description of Artificial Sequence: Synthetic oligonucleotide
ccaaggaagggugaccuau

SEQ ID NO: 2785625 - RNA, 19 nt, Artificial Sequence
  Description of Artificial Sequence: Synthetic oligonucleotide
cugcagugaggaagcuccu

SEQ ID NO: 2785626 - RNA, 19 nt, Artificial Sequence
  Description of Artificial Sequence: Synthetic oligonucleotide
gggcuccugcuggaagcag

SEQ ID NO: 2785627 - RNA, 19 nt, Artificial Sequence
  Description of Artificial Sequence: Synthetic oligonucleotide
cccuuggacccuggggcag

SEQ ID NO: 2785628 - RNA, 19 nt, Artificial Sequence
  Description of Artificial Sequence: Synthetic oligonucleotide
ccauccccgagauggugaa

SEQ ID NO: 2785629 - RNA, 19 nt, Artificial Sequence
  Description of Artificial Sequence: Synthetic oligonucleotide
acccagggccgggucgcca

SEQ ID NO: 2785630 - RNA, 19 nt, Artificial Sequence
  Description of Artificial Sequence: Synthetic oligonucleotide
cacgugugcuuguguguau

SEQ ID NO: 2785631 - RNA, 19 nt, Artificial Sequence
  Description of Artificial Sequence: Synthetic oligonucleotide
cgaagaugucuacacuacu

SEQ ID NO: 2785632 - RNA, 19 nt, Artificial Sequence
  Description of Artificial Sequence: Synthetic oligonucleotide
gggucaaauggguccccau

SEQ ID NO: 2785633 - RNA, 19 nt, Artificial Sequence
  Description of Artificial Sequence: Synthetic oligonucleotide
gaccaccuggcuggcuacu

SEQ ID NO: 2785634 - RNA, 19 nt, Artificial Sequence
  Description of Artificial Sequence: Synthetic oligonucleotide
cacccagggccgggucgcc

SEQ ID NO: 2785635 - RNA, 19 nt, Artificial Sequence
  Description of Artificial Sequence: Synthetic oligonucleotide
gccaaggaagggugaccua

SEQ ID NO: 2785636 - RNA, 19 nt, Artificial Sequence
  Description of Artificial Sequence: Synthetic oligonucleotide
cagggccugccuggggaca

SEQ ID NO: 2785637 - RNA, 19 nt, Artificial Sequence
  Description of Artificial Sequence: Synthetic oligonucleotide
gcuccugcuggaagcaggu

SEQ ID NO: 2785638 - RNA, 19 nt, Artificial Sequence
  Description of Artificial Sequence: Synthetic oligonucleotide
ggacaguggcagagaccac

SEQ ID NO: 2785639 - RNA, 19 nt, Artificial Sequence
  Description of Artificial Sequence: Synthetic oligonucleotide
gcuaagccgcagggccugc

SEQ ID NO: 2785640 - RNA, 19 nt, Artificial Sequence
  Description of Artificial Sequence: Synthetic oligonucleotide
gcacacccagggccggguc

SEQ ID NO: 2785641 - RNA, 19 nt, Artificial Sequence
  Description of Artificial Sequence: Synthetic oligonucleotide
ccccauccccgagauggug

SEQ ID NO: 2785642 - RNA, 19 nt, Artificial Sequence
  Description of Artificial Sequence: Synthetic oligonucleotide
ccuccugccagagccaagu

SEQ ID NO: 2785643 - RNA, 19 nt, Artificial Sequence
  Description of Artificial Sequence: Synthetic oligonucleotide
gccugccuggggacaggag

SEQ ID NO: 2785644 - RNA, 19 nt, Artificial Sequence
  Description of Artificial Sequence: Synthetic oligonucleotide
cugcuggaagcagguggua

SEQ ID NO: 2785645 - RNA, 19 nt, Artificial Sequence
  Description of Artificial Sequence: Synthetic oligonucleotide
cgcagggccugccugggga

SEQ ID NO: 2785646 - RNA, 19 nt, Artificial Sequence
  Description of Artificial Sequence: Synthetic oligonucleotide
gggccugccuggggacagg

SEQ ID NO: 2785647 - RNA, 19 nt, Artificial Sequence
  Description of Artificial Sequence: Synthetic oligonucleotide
ccaccuccugccagagcca

SEQ ID NO: 2785648 - RNA, 19 nt, Artificial Sequence
  Description of Artificial Sequence: Synthetic oligonucleotide
gccugcguguguguguggu

SEQ ID NO: 2785649 - RNA, 19 nt, Artificial Sequence
  Description of Artificial Sequence: Synthetic oligonucleotide
cagaagcaccagggcugca

SEQ ID NO: 2785650 - RNA, 19 nt, Artificial Sequence
  Description of Artificial Sequence: Synthetic oligonucleotide
ggccugccuggggacagga

SEQ ID NO: 2785651 - RNA, 19 nt, Artificial Sequence
  Description of Artificial Sequence: Synthetic oligonucleotide
gccagggaaccagggccuc

SEQ ID NO: 2785652 - RNA, 19 nt, Artificial Sequence
  Description of Artificial Sequence: Synthetic oligonucleotide
ccgcagggccugccugggg

SEQ ID NO: 2785653 - RNA, 19 nt, Artificial Sequence
  Description of Artificial Sequence: Synthetic oligonucleotide
gcguguguguguggugugu

SEQ ID NO: 2785654 - RNA, 19 nt, Artificial Sequence
  Description of Artificial Sequence: Synthetic oligonucleotide
ccuuggacccuggggcaga

SEQ ID NO: 2785655 - RNA, 19 nt, Artificial Sequence
  Description of Artificial Sequence: Synthetic oligonucleotide
gggucgccagacacucugu

SEQ ID NO: 2785656 - RNA, 19 nt, Artificial Sequence
  Description of Artificial Sequence: Synthetic oligonucleotide
ggccgggucgccagacacu

SEQ ID NO: 2785657 - RNA, 19 nt, Artificial Sequence
  Description of Artificial Sequence: Synthetic oligonucleotide
cauccccgagauggugaau

SEQ ID NO: 2785658 - RNA, 19 nt, Artificial Sequence
  Description of Artificial Sequence: Synthetic oligonucleotide
ccagggccgggucgccaga

SEQ ID NO: 2785659 - RNA, 19 nt, Artificial Sequence
  Description of Artificial Sequence: Synthetic oligonucleotide
gggcugcagugaggaagcu

SEQ ID NO: 2785660 - RNA, 19 nt, Artificial Sequence
  Description of Artificial Sequence: Synthetic oligonucleotide
ccagggaaccagggccucu

SEQ ID NO: 2785661 - RNA, 19 nt, Artificial Sequence
  Description of Artificial Sequence: Synthetic oligonucleotide
cgugugugugugguguguu

SEQ ID NO: 2785662 - RNA, 19 nt, Artificial Sequence
  Description of Artificial Sequence: Synthetic oligonucleotide
ccgggucgccagacacucu

SEQ ID NO: 2785663 - RNA, 19 nt, Artificial Sequence
  Description of Artificial Sequence: Synthetic oligonucleotide
ggguccccauugacccaau

SEQ ID NO: 2785664 - RNA, 19 nt, Artificial Sequence
  Description of Artificial Sequence: Synthetic oligonucleotide
ugaauaaugaacaugagag

SEQ ID NO: 2785665 - RNA, 19 nt, Artificial Sequence
  Description of Artificial Sequence: Synthetic oligonucleotide
aauaaugaacaugagaggg

SEQ ID NO: 2785666 - RNA, 19 nt, Artificial Sequence
  Description of Artificial Sequence: Synthetic oligonucleotide
uucugaauaaugaacauga

SEQ ID NO: 2785667 - RNA, 19 nt, Artificial Sequence
  Description of Artificial Sequence: Synthetic oligonucleotide
  modified_base (4)..(4): a, c, u, g, unknown or other
agangcucagaguaggccc

SEQ ID NO: 2785668 - RNA, 19 nt, Artificial Sequence
  Description of Artificial Sequence: Synthetic oligonucleotide
uugucuagcacuauggugu

SEQ ID NO: 2785669 - RNA, 19 nt, Artificial Sequence
  Description of Artificial Sequence: Synthetic oligonucleotide
augaacaugagagggaucc

SEQ ID NO: 2785670 - RNA, 19 nt, Artificial Sequence
  Description of Artificial Sequence: Synthetic oligonucleotide
gaauaaugaacaugagagg

SEQ ID NO: 2785671 - RNA, 19 nt, Artificial Sequence
  Description of Artificial Sequence: Synthetic oligonucleotide
gaugcuuucuuucucgugc

SEQ ID NO: 2785672 - RNA, 19 nt, Artificial Sequence
  Description of Artificial Sequence: Synthetic oligonucleotide
ucuucaagcagcugagugg

SEQ ID NO: 2785673 - RNA, 19 nt, Artificial Sequence
  Description of Artificial Sequence: Synthetic oligonucleotide
gaaggugccguccaggagg

SEQ ID NO: 2785674 - RNA, 19 nt, Artificial Sequence
  Description of Artificial Sequence: Synthetic oligonucleotide
aggaggaucugguaggggc

SEQ ID NO: 2785675 - RNA, 19 nt, Artificial Sequence
  Description of Artificial Sequence: Synthetic oligonucleotide
uaugguguucugaauaaug

SEQ ID NO: 2785676 - RNA, 19 nt, Artificial Sequence
  Description of Artificial Sequence: Synthetic oligonucleotide
uucacaaaggccacugucc

SEQ ID NO: 2785677 - RNA, 19 nt, Artificial Sequence
  Description of Artificial Sequence: Synthetic oligonucleotide
aagugguugcggaagaagc

SEQ ID NO: 2785678 - RNA, 19 nt, Artificial Sequence
  Description of Artificial Sequence: Synthetic oligonucleotide
gagagagagagagagagag

SEQ ID NO: 2785679 - RNA, 19 nt, Artificial Sequence
  Description of Artificial Sequence: Synthetic oligonucleotide
  modified_base (11)..(11): a, c, u, g, unknown or other
gagagagagangcucagag

SEQ ID NO: 2785680 - RNA, 19 nt, Artificial Sequence
  Description of Artificial Sequence: Synthetic oligonucleotide
  modified_base (17)..(17): a, c, u, g, unknown or other
gagagagagagagagangc

SEQ ID NO: 2785681 - RNA, 19 nt, Artificial Sequence
  Description of Artificial Sequence: Synthetic oligonucleotide
uccucuucuuuucugaggc

SEQ ID NO: 2785682 - RNA, 19 nt, Artificial Sequence
  Description of Artificial Sequence: Synthetic oligonucleotide
ucuuuucugaggcagggga

SEQ ID NO: 2785683 - RNA, 19 nt, Artificial Sequence
  Description of Artificial Sequence: Synthetic oligonucleotide
acaucaugcuuccacuccc

SEQ ID NO: 2785684 - RNA, 19 nt, Artificial Sequence
  Description of Artificial Sequence: Synthetic oligonucleotide
aaggccacuguccugggag

SEQ ID NO: 2785685 - RNA, 19 nt, Artificial Sequence
  Description of Artificial Sequence: Synthetic oligonucleotide
uucuucaagcagcugagug

SEQ ID NO: 2785686 - RNA, 19 nt, Artificial Sequence
  Description of Artificial Sequence: Synthetic oligonucleotide
agcugaguggauuggggcc

SEQ ID NO: 2785687 - RNA, 19 nt, Artificial Sequence
  Description of Artificial Sequence: Synthetic oligonucleotide
uucucgugcacugagacca

SEQ ID NO: 2785688 - RNA, 19 nt, Artificial Sequence
  Description of Artificial Sequence: Synthetic oligonucleotide
  modified_base (7)..(7): a, c, u, g, unknown or other
gagagangcucagaguagg

SEQ ID NO: 2785689 - RNA, 19 nt, Artificial Sequence
  Description of Artificial Sequence: Synthetic oligonucleotide
ucaggguuccucacgaggc

SEQ ID NO: 2785690 - RNA, 19 nt, Artificial Sequence
  Description of Artificial Sequence: Synthetic oligonucleotide
ucugaauaaugaacaugag

SEQ ID NO: 2785691 - RNA, 19 nt, Artificial Sequence
  Description of Artificial Sequence: Synthetic oligonucleotide
ugaggcaggggacuuuacg

SEQ ID NO: 2785692 - RNA, 19 nt, Artificial Sequence
  Description of Artificial Sequence: Synthetic oligonucleotide
cucccugcugcucagaagg

SEQ ID NO: 2785693 - RNA, 19 nt, Artificial Sequence
  Description of Artificial Sequence: Synthetic oligonucleotide
ugagagggaucccaggagc

SEQ ID NO: 2785694 - RNA, 19 nt, Artificial Sequence
  Description of Artificial Sequence: Synthetic oligonucleotide
  modified_base (9)..(9): a, c, u, g, unknown or other
gagagagangcucagagua

SEQ ID NO: 2785695 - RNA, 19 nt, Artificial Sequence
  Description of Artificial Sequence: Synthetic oligonucleotide
acaaaggccacuguccugg

SEQ ID NO: 2785696 - RNA, 19 nt, Artificial Sequence
  Description of Artificial Sequence: Synthetic oligonucleotide
agaccagcuggccugacuc

SEQ ID NO: 2785697 - RNA, 19 nt, Artificial Sequence
  Description of Artificial Sequence: Synthetic oligonucleotide
cuugucuagcacuauggug

SEQ ID NO: 2785698 - RNA, 19 nt, Artificial Sequence
  Description of Artificial Sequence: Synthetic oligonucleotide
aagccgaggugcuucuugg

SEQ ID NO: 2785699 - RNA, 19 nt, Artificial Sequence
  Description of Artificial Sequence: Synthetic oligonucleotide
ucagaaggcacuucggguc

SEQ ID NO: 2785700 - RNA, 19 nt, Artificial Sequence
  Description of Artificial Sequence: Synthetic oligonucleotide
uucuuucucgugcacugag

SEQ ID NO: 2785701 - RNA, 19 nt, Artificial Sequence
  Description of Artificial Sequence: Synthetic oligonucleotide
auuggggccgcccaccuuc

SEQ ID NO: 2785702 - RNA, 19 nt, Artificial Sequence
  Description of Artificial Sequence: Synthetic oligonucleotide
cuuucuuucucgugcacug

SEQ ID NO: 2785703 - RNA, 19 nt, Artificial Sequence
  Description of Artificial Sequence: Synthetic oligonucleotide
cuucgggucgaucuguucc

SEQ ID NO: 2785704 - RNA, 19 nt, Artificial Sequence
  Description of Artificial Sequence: Synthetic oligonucleotide
ucuagcacuaugguguucu

SEQ ID NO: 2785705 - RNA, 19 nt, Artificial Sequence
  Description of Artificial Sequence: Synthetic oligonucleotide
aucuguuccggguucuuuc

SEQ ID NO: 2785706 - RNA, 19 nt, Artificial Sequence
  Description of Artificial Sequence: Synthetic oligonucleotide
cugaauaaugaacaugaga

SEQ ID NO: 2785707 - RNA, 19 nt, Artificial Sequence
  Description of Artificial Sequence: Synthetic oligonucleotide
acugagaccagcuggccug

SEQ ID NO: 2785708 - RNA, 19 nt, Artificial Sequence
  Description of Artificial Sequence: Synthetic oligonucleotide
  modified_base (10)..(10): a, c, u, g, unknown or other
agagagagangcucagagu

SEQ ID NO: 2785709 - RNA, 19 nt, Artificial Sequence
  Description of Artificial Sequence: Synthetic oligonucleotide
ugcacugagaccagcuggc

SEQ ID NO: 2785710 - RNA, 19 nt, Artificial Sequence
  Description of Artificial Sequence: Synthetic oligonucleotide
agugguugcggaagaagcc

SEQ ID NO: 2785711 - RNA, 19 nt, Artificial Sequence
  Description of Artificial Sequence: Synthetic oligonucleotide
  modified_base (19)..(19): a, c, u, g, unknown or other
gagagagagagagagagan

SEQ ID NO: 2785712 - RNA, 19 nt, Artificial Sequence
  Description of Artificial Sequence: Synthetic oligonucleotide
  modified_base (3)..(3): a, c, u, g, unknown or other
gangcucagaguaggcccg

SEQ ID NO: 2785713 - RNA, 19 nt, Artificial Sequence
  Description of Artificial Sequence: Synthetic oligonucleotide
agcacuaugguguucugaa

SEQ ID NO: 2785714 - RNA, 19 nt, Artificial Sequence
  Description of Artificial Sequence: Synthetic oligonucleotide
agaaggcuugucuagcacu

SEQ ID NO: 2785715 - RNA, 19 nt, Artificial Sequence
  Description of Artificial Sequence: Synthetic oligonucleotide
uaaugaacaugagagggau

SEQ ID NO: 2785716 - RNA, 19 nt, Artificial Sequence
  Description of Artificial Sequence: Synthetic oligonucleotide
uucgggucgaucuguuccg

SEQ ID NO: 2785717 - RNA, 19 nt, Artificial Sequence
  Description of Artificial Sequence: Synthetic oligonucleotide
acuaugguguucugaauaa

SEQ ID NO: 2785718 - RNA, 19 nt, Artificial Sequence
  Description of Artificial Sequence: Synthetic oligonucleotide
acacaucaugcuuccacuc

SEQ ID NO: 2785719 - RNA, 19 nt, Artificial Sequence
  Description of Artificial Sequence: Synthetic oligonucleotide
gugcacugagaccagcugg

SEQ ID NO: 2785720 - RNA, 19 nt, Artificial Sequence
  Description of Artificial Sequence: Synthetic oligonucleotide
uguucugaauaaugaacau

SEQ ID NO: 2785721 - RNA, 19 nt, Artificial Sequence
  Description of Artificial Sequence: Synthetic oligonucleotide
uguccugggagaaggcuug

SEQ ID NO: 2785722 - RNA, 19 nt, Artificial Sequence
  Description of Artificial Sequence: Synthetic oligonucleotide
guucugaauaaugaacaug

SEQ ID NO: 2785723 - RNA, 19 nt, Artificial Sequence
  Description of Artificial Sequence: Synthetic oligonucleotide
ugcucagaaggcacuucgg

SEQ ID NO: 2785724 - RNA, 19 nt, Artificial Sequence
  Description of Artificial Sequence: Synthetic oligonucleotide
ucugguaggggcucgcgga

SEQ ID NO: 2785725 - RNA, 19 nt, Artificial Sequence
  Description of Artificial Sequence: Synthetic oligonucleotide
gacuccacggccuucacaa

SEQ ID NO: 2785726 - RNA, 19 nt, Artificial Sequence
  Description of Artificial Sequence: Synthetic oligonucleotide
uugcggaagaagccgaggu

SEQ ID NO: 2785727 - RNA, 19 nt, Artificial Sequence
  Description of Artificial Sequence: Synthetic oligonucleotide
cucaggguuccucacgagg

SEQ ID NO: 2785728 - RNA, 19 nt, Artificial Sequence
  Description of Artificial Sequence: Synthetic oligonucleotide
ucagaguaggcccggcaca

SEQ ID NO: 2785729 - RNA, 19 nt, Artificial Sequence
  Description of Artificial Sequence: Synthetic oligonucleotide
agcgccgccuggcagaagg

SEQ ID NO: 2785730 - RNA, 19 nt, Artificial Sequence
  Description of Artificial Sequence: Synthetic oligonucleotide
augagagggaucccaggag

SEQ ID NO: 2785731 - RNA, 19 nt, Artificial Sequence
  Description of Artificial Sequence: Synthetic oligonucleotide
aacaugagagggaucccag

SEQ ID NO: 2785732 - RNA, 19 nt, Artificial Sequence
  Description of Artificial Sequence: Synthetic oligonucleotide
  modified_base (14)..(14): a, c, u, g, unknown or other
agagagagagagangcuca

SEQ ID NO: 2785733 - RNA, 19 nt, Artificial Sequence
  Description of Artificial Sequence: Synthetic oligonucleotide
cuucacaaaggccacuguc

SEQ ID NO: 2785734 - RNA, 19 nt, Artificial Sequence
  Description of Artificial Sequence: Synthetic oligonucleotide
cugcucagaaggcacuucg

SEQ ID NO: 2785735 - RNA, 19 nt, Artificial Sequence
  Description of Artificial Sequence: Synthetic oligonucleotide
gaagugguugcggaagaag

SEQ ID NO: 2785736 - RNA, 19 nt, Artificial Sequence
  Description of Artificial Sequence: Synthetic oligonucleotide
caagcagcugaguggauug

SEQ ID NO: 2785737 - RNA, 19 nt, Artificial Sequence
  Description of Artificial Sequence: Synthetic oligonucleotide
  modified_base (5)..(5): a, c, u, g, unknown or other
gagangcucagaguaggcc

SEQ ID NO: 2785738 - RNA, 19 nt, Artificial Sequence
  Description of Artificial Sequence: Synthetic oligonucleotide
acaugagagggaucccagg

SEQ ID NO: 2785739 - RNA, 19 nt, Artificial Sequence
  Description of Artificial Sequence: Synthetic oligonucleotide
cacaucaugcuuccacucc

SEQ ID NO: 2785740 - RNA, 19 nt, Artificial Sequence
  Description of Artificial Sequence: Synthetic oligonucleotide
ugguguucugaauaaugaa

SEQ ID NO: 2785741 - RNA, 19 nt, Artificial Sequence
  Description of Artificial Sequence: Synthetic oligonucleotide
ucuguuccggguucuuucc

SEQ ID NO: 2785742 - RNA, 19 nt, Artificial Sequence
  Description of Artificial Sequence: Synthetic oligonucleotide
aaugaacaugagagggauc

SEQ ID NO: 2785743 - RNA, 19 nt, Artificial Sequence
  Description of Artificial Sequence: Synthetic oligonucleotide
ugcuugaugcuuucuuucu

SEQ ID NO: 2785744 - RNA, 19 nt, Artificial Sequence
  Description of Artificial Sequence: Synthetic oligonucleotide
aggcaggggacuuuacguc

SEQ ID NO: 2785745 - RNA, 19 nt, Artificial Sequence
  Description of Artificial Sequence: Synthetic oligonucleotide
uugcuugaugcuuucuuuc

SEQ ID NO: 2785746 - RNA, 19 nt, Artificial Sequence
  Description of Artificial Sequence: Synthetic oligonucleotide
acggccuucacaaaggcca

SEQ ID NO: 2785747 - RNA, 19 nt, Artificial Sequence
  Description of Artificial Sequence: Synthetic oligonucleotide
ugcggaagaagccgaggug

SEQ ID NO: 2785748 - RNA, 19 nt, Artificial Sequence
  Description of Artificial Sequence: Synthetic oligonucleotide
uucaguugcuugaugcuuu

SEQ ID NO: 2785749 - RNA, 19 nt, Artificial Sequence
  Description of Artificial Sequence: Synthetic oligonucleotide
uuuucugaggcaggggacu

SEQ ID NO: 2785750 - RNA, 19 nt, Artificial Sequence
  Description of Artificial Sequence: Synthetic oligonucleotide
uuucucgugcacugagacc

SEQ ID NO: 2785751 - RNA, 19 nt, Artificial Sequence
  Description of Artificial Sequence: Synthetic oligonucleotide
gaagccgaggugcuucuug

SEQ ID NO: 2785752 - RNA, 19 nt, Artificial Sequence
  Description of Artificial Sequence: Synthetic oligonucleotide
auaaugaacaugagaggga

SEQ ID NO: 2785753 - RNA, 19 nt, Artificial Sequence
  Description of Artificial Sequence: Synthetic oligonucleotide
cuuuucugaggcaggggac

SEQ ID NO: 2785754 - RNA, 19 nt, Artificial Sequence
  Description of Artificial Sequence: Synthetic oligonucleotide
  modified_base (6)..(6): a, c, u, g, unknown or other
agagangcucagaguaggc

SEQ ID NO: 2785755 - RNA, 19 nt, Artificial Sequence
  Description of Artificial Sequence: Synthetic oligonucleotide
  modified_base (15)..(15): a, c, u, g, unknown or other
gagagagagagagangcuc

SEQ ID NO: 2785756 - RNA, 19 nt, Artificial Sequence
  Description of Artificial Sequence: Synthetic oligonucleotide
gguguucugaauaaugaac

SEQ ID NO: 2785757 - RNA, 19 nt, Artificial Sequence
  Description of Artificial Sequence: Synthetic oligonucleotide
uccuccuccgcucaggguu

SEQ ID NO: 2785758 - RNA, 19 nt, Artificial Sequence
  Description of Artificial Sequence: Synthetic oligonucleotide
ugaugcuuucuuucucgug

SEQ ID NO: 2785759 - RNA, 19 nt, Artificial Sequence
  Description of Artificial Sequence: Synthetic oligonucleotide
gugguugcggaagaagccg

SEQ ID NO: 2785760 - RNA, 19 nt, Artificial Sequence
  Description of Artificial Sequence: Synthetic oligonucleotide
uucuuggcgugcuucugcc

SEQ ID NO: 2785761 - RNA, 19 nt, Artificial Sequence
  Description of Artificial Sequence: Synthetic oligonucleotide
gagagggaucccaggagcg

SEQ ID NO: 2785762 - RNA, 19 nt, Artificial Sequence
  Description of Artificial Sequence: Synthetic oligonucleotide
ucugcccuggugaucuuca

SEQ ID NO: 2785763 - RNA, 19 nt, Artificial Sequence
  Description of Artificial Sequence: Synthetic oligonucleotide
aggcacuucgggucgaucu

SEQ ID NO: 2785764 - RNA, 19 nt, Artificial Sequence
  Description of Artificial Sequence: Synthetic oligonucleotide
augguguucugaauaauga

SEQ ID NO: 2785765 - RNA, 19 nt, Artificial Sequence
  Description of Artificial Sequence: Synthetic oligonucleotide
cuucuuggcgugcuucugc

SEQ ID NO: 2785766 - RNA, 19 nt, Artificial Sequence
  Description of Artificial Sequence: Synthetic oligonucleotide
cagaaggcacuucgggucg

SEQ ID NO: 2785767 - RNA, 19 nt, Artificial Sequence
  Description of Artificial Sequence: Synthetic oligonucleotide
aucugguaggggcucgcgg

SEQ ID NO: 2785768 - RNA, 19 nt, Artificial Sequence
  Description of Artificial Sequence: Synthetic oligonucleotide
aguugcuugaugcuuucuu

SEQ ID NO: 2785769 - RNA, 19 nt, Artificial Sequence
  Description of Artificial Sequence: Synthetic oligonucleotide
uuuacgucgggugcuuucu

SEQ ID NO: 2785770 - RNA, 19 nt, Artificial Sequence
  Description of Artificial Sequence: Synthetic oligonucleotide
ugcuuccacucccugcugc

SEQ ID NO: 2785771 - RNA, 19 nt, Artificial Sequence
  Description of Artificial Sequence: Synthetic oligonucleotide
cagcugaguggauuggggc

SEQ ID NO: 2785772 - RNA, 19 nt, Artificial Sequence
  Description of Artificial Sequence: Synthetic oligonucleotide
  modified_base (13)..(13): a, c, u, g, unknown or other
gagagagagagangcucag

SEQ ID NO: 2785773 - RNA, 19 nt, Artificial Sequence
  Description of Artificial Sequence: Synthetic oligonucleotide
gaagaagccgaggugcuuc

SEQ ID NO: 2785774 - RNA, 19 nt, Artificial Sequence
  Description of Artificial Sequence: Synthetic oligonucleotide
cucagaguaggcccggcac

SEQ ID NO: 2785775 - RNA, 19 nt, Artificial Sequence
  Description of Artificial Sequence: Synthetic oligonucleotide
uccuccuccuccuccuccg

SEQ ID NO: 2785776 - RNA, 19 nt, Artificial Sequence
  Description of Artificial Sequence: Synthetic oligonucleotide
aagaagccgaggugcuucu

SEQ ID NO: 2785777 - RNA, 19 nt, Artificial Sequence
  Description of Artificial Sequence: Synthetic oligonucleotide
  modified_base (8)..(8): a, c, u, g, unknown or other
agagagangcucagaguag

SEQ ID NO: 2785778 - RNA, 19 nt, Artificial Sequence
  Description of Artificial Sequence: Synthetic oligonucleotide
ggcaggggacuuuacgucg

SEQ ID NO: 2785779 - RNA, 19 nt, Artificial Sequence
  Description of Artificial Sequence: Synthetic oligonucleotide
gcucagaaggcacuucggg

SEQ ID NO: 2785780 - RNA, 19 nt, Artificial Sequence
  Description of Artificial Sequence: Synthetic oligonucleotide
gaacaugagagggauccca

SEQ ID NO: 2785781 - RNA, 19 nt, Artificial Sequence
  Description of Artificial Sequence: Synthetic oligonucleotide
caugagagggaucccagga

SEQ ID NO: 2785782 - RNA, 19 nt, Artificial Sequence
  Description of Artificial Sequence: Synthetic oligonucleotide
gagggaucccaggagcggg

SEQ ID NO: 2785783 - RNA, 19 nt, Artificial Sequence
  Description of Artificial Sequence: Synthetic oligonucleotide
agaaggugccguccaggag

SEQ ID NO: 2785784 - RNA, 19 nt, Artificial Sequence
  Description of Artificial Sequence: Synthetic oligonucleotide
ugguugcggaagaagccga

SEQ ID NO: 2785785 - RNA, 19 nt, Artificial Sequence
  Description of Artificial Sequence: Synthetic oligonucleotide
aguggauuggggccgccca

SEQ ID NO: 2785786 - RNA, 19 nt, Artificial Sequence
  Description of Artificial Sequence: Synthetic oligonucleotide
guaggcccggcacacauca

SEQ ID NO: 2785787 - RNA, 19 nt, Artificial Sequence
  Description of Artificial Sequence: Synthetic oligonucleotide
ugcccuggugaucuucaug

SEQ ID NO: 2785788 - RNA, 19 nt, Artificial Sequence
  Description of Artificial Sequence: Synthetic oligonucleotide
ucgugcacugagaccagcu

SEQ ID NO: 2785789 - RNA, 19 nt, Artificial Sequence
  Description of Artificial Sequence: Synthetic oligonucleotide
agccgaggugcuucuuggc

SEQ ID NO: 2785790 - RNA, 19 nt, Artificial Sequence
  Description of Artificial Sequence: Synthetic oligonucleotide
gaucccaggagcggggcag

SEQ ID NO: 2785791 - RNA, 19 nt, Artificial Sequence
  Description of Artificial Sequence: Synthetic oligonucleotide
aagcagcugaguggauugg

SEQ ID NO: 2785792 - RNA, 19 nt, Artificial Sequence
  Description of Artificial Sequence: Synthetic oligonucleotide
ggcuugucuagcacuaugg

SEQ ID NO: 2785793 - RNA, 19 nt, Artificial Sequence
  Description of Artificial Sequence: Synthetic oligonucleotide
aggcuugucuagcacuaug

SEQ ID NO: 2785794 - RNA, 19 nt, Artificial Sequence
  Description of Artificial Sequence: Synthetic oligonucleotide
gggacuuuacgucgggugc

SEQ ID NO: 2785795 - RNA, 19 nt, Artificial Sequence
  Description of Artificial Sequence: Synthetic oligonucleotide
cuucaagcagcugagugga

SEQ ID NO: 2785796 - RNA, 19 nt, Artificial Sequence
  Description of Artificial Sequence: Synthetic oligonucleotide
cuggaugcggccccgcagc

SEQ ID NO: 2785797 - RNA, 19 nt, Artificial Sequence
  Description of Artificial Sequence: Synthetic oligonucleotide
acuucgggucgaucuguuc

SEQ ID NO: 2785798 - RNA, 19 nt, Artificial Sequence
  Description of Artificial Sequence: Synthetic oligonucleotide
cuuuacgucgggugcuuuc

SEQ ID NO: 2785799 - RNA, 19 nt, Artificial Sequence
  Description of Artificial Sequence: Synthetic oligonucleotide
augcuuucuuucucgugca

SEQ ID NO: 2785800 - RNA, 19 nt, Artificial Sequence
  Description of Artificial Sequence: Synthetic oligonucleotide
cuugcuccuccuucaguug

SEQ ID NO: 2785801 - RNA, 19 nt, Artificial Sequence
  Description of Artificial Sequence: Synthetic oligonucleotide
uguuccggguucuuuccuc

SEQ ID NO: 2785802 - RNA, 19 nt, Artificial Sequence
  Description of Artificial Sequence: Synthetic oligonucleotide
ugaacaugagagggauccc

SEQ ID NO: 2785803 - RNA, 19 nt, Artificial Sequence
  Description of Artificial Sequence: Synthetic oligonucleotide
  modified_base (16)..(16): a, c, u, g, unknown or other
agagagagagagagangcu

SEQ ID NO: 2785804 - RNA, 19 nt, Artificial Sequence
  Description of Artificial Sequence: Synthetic oligonucleotide
cacuaugguguucugaaua

SEQ ID NO: 2785805 - RNA, 19 nt, Artificial Sequence
  Description of Artificial Sequence: Synthetic oligonucleotide
agcagcugaguggauuggg

SEQ ID NO: 2785806 - RNA, 19 nt, Artificial Sequence
  Description of Artificial Sequence: Synthetic oligonucleotide
cuggccugacuccacggcc

SEQ ID NO: 2785807 - RNA, 19 nt, Artificial Sequence
  Description of Artificial Sequence: Synthetic oligonucleotide
uuccuccuccuccuccucc

SEQ ID NO: 2785808 - RNA, 19 nt, Artificial Sequence
  Description of Artificial Sequence: Synthetic oligonucleotide
gaggcaggggacuuuacgu

SEQ ID NO: 2785809 - RNA, 19 nt, Artificial Sequence
  Description of Artificial Sequence: Synthetic oligonucleotide
uuccucacgaggccuugcu

SEQ ID NO: 2785810 - RNA, 19 nt, Artificial Sequence
  Description of Artificial Sequence: Synthetic oligonucleotide
aaaggccacuguccuggga

SEQ ID NO: 2785811 - RNA, 19 nt, Artificial Sequence
  Description of Artificial Sequence: Synthetic oligonucleotide
agagggaucccaggagcgg

SEQ ID NO: 2785812 - RNA, 19 nt, Artificial Sequence
  Description of Artificial Sequence: Synthetic oligonucleotide
guugcggaagaagccgagg

SEQ ID NO: 2785813 - RNA, 19 nt, Artificial Sequence
  Description of Artificial Sequence: Synthetic oligonucleotide
  modified_base (2)..(2): a, c, u, g, unknown or other
angcucagaguaggcccgg

SEQ ID NO: 2785814 - RNA, 19 nt, Artificial Sequence
  Description of Artificial Sequence: Synthetic oligonucleotide
ccucacgaggccuugcucc

SEQ ID NO: 2785815 - RNA, 19 nt, Artificial Sequence
  Description of Artificial Sequence: Synthetic oligonucleotide
  modified_base (18)..(18): a, c, u, g, unknown or other
agagagagagagagagang

SEQ ID NO: 2785816 - RNA, 19 nt, Artificial Sequence
  Description of Artificial Sequence: Synthetic oligonucleotide
aggcccggcacacaucaug

SEQ ID NO: 2785817 - RNA, 19 nt, Artificial Sequence
  Description of Artificial Sequence: Synthetic oligonucleotide
ugacuccacggccuucaca

SEQ ID NO: 2785818 - RNA, 19 nt, Artificial Sequence
  Description of Artificial Sequence: Synthetic oligonucleotide
uggcagaaggugccgucca

SEQ ID NO: 2785819 - RNA, 19 nt, Artificial Sequence
  Description of Artificial Sequence: Synthetic oligonucleotide
cucgcggaccccgaagugg

SEQ ID NO: 2785820 - RNA, 19 nt, Artificial Sequence
  Description of Artificial Sequence: Synthetic oligonucleotide
uggccugacuccacggccu

SEQ ID NO: 2785821 - RNA, 19 nt, Artificial Sequence
  Description of Artificial Sequence: Synthetic oligonucleotide
aucaugcuuccacucccug

SEQ ID NO: 2785822 - RNA, 19 nt, Artificial Sequence
  Description of Artificial Sequence: Synthetic oligonucleotide
agcuggccugacuccacgg

SEQ ID NO: 2785823 - RNA, 19 nt, Artificial Sequence
  Description of Artificial Sequence: Synthetic oligonucleotide
ggggacuuuacgucgggug

SEQ ID NO: 2785824 - RNA, 19 nt, Artificial Sequence
  Description of Artificial Sequence: Synthetic oligonucleotide
ucgcggaccccgaaguggu

SEQ ID NO: 2785825 - RNA, 19 nt, Artificial Sequence
  Description of Artificial Sequence: Synthetic oligonucleotide
uuucuuucucgugcacuga

SEQ ID NO: 2785826 - RNA, 19 nt, Artificial Sequence
  Description of Artificial Sequence: Synthetic oligonucleotide
gcacacaucaugcuuccac

SEQ ID NO: 2785827 - RNA, 19 nt, Artificial Sequence
  Description of Artificial Sequence: Synthetic oligonucleotide
acucccugcugcucagaag

SEQ ID NO: 2785828 - RNA, 19 nt, Artificial Sequence
  Description of Artificial Sequence: Synthetic oligonucleotide
gguucuuuccucuuccucu

SEQ ID NO: 2785829 - RNA, 19 nt, Artificial Sequence
  Description of Artificial Sequence: Synthetic oligonucleotide
ucuuggcgugcuucugccc

SEQ ID NO: 2785830 - RNA, 19 nt, Artificial Sequence
  Description of Artificial Sequence: Synthetic oligonucleotide
ugcuuucuuucucgugcac

SEQ ID NO: 2785831 - RNA, 19 nt, Artificial Sequence
  Description of Artificial Sequence: Synthetic oligonucleotide
gaucugguaggggcucgcg

SEQ ID NO: 2785832 - RNA, 19 nt, Artificial Sequence
  Description of Artificial Sequence: Synthetic oligonucleotide
uagcacuaugguguucuga

SEQ ID NO: 2785833 - RNA, 19 nt, Artificial Sequence
  Description of Artificial Sequence: Synthetic oligonucleotide
ucucgugcacugagaccag

SEQ ID NO: 2785834 - RNA, 19 nt, Artificial Sequence
  Description of Artificial Sequence: Synthetic oligonucleotide
uccggguucuuuccucuuc

SEQ ID NO: 2785835 - RNA, 19 nt, Artificial Sequence
  Description of Artificial Sequence: Synthetic oligonucleotide
uacgucgggugcuuucuuc

SEQ ID NO: 2785836 - RNA, 19 nt, Artificial Sequence
  Description of Artificial Sequence: Synthetic oligonucleotide
gccgaggugcuucuuggcg

SEQ ID NO: 2785837 - RNA, 19 nt, Artificial Sequence
  Description of Artificial Sequence: Synthetic oligonucleotide
gcggaagaagccgaggugc

SEQ ID NO: 2785838 - RNA, 19 nt, Artificial Sequence
  Description of Artificial Sequence: Synthetic oligonucleotide
gaccagcuggccugacucc

SEQ ID NO: 2785839 - RNA, 19 nt, Artificial Sequence
  Description of Artificial Sequence: Synthetic oligonucleotide
aaggcacuucgggucgauc

SEQ ID NO: 2785840 - RNA, 19 nt, Artificial Sequence
  Description of Artificial Sequence: Synthetic oligonucleotide
gcugaguggauuggggccg

SEQ ID NO: 2785841 - RNA, 19 nt, Artificial Sequence
  Description of Artificial Sequence: Synthetic oligonucleotide
  modified_base (12)..(12): a, c, u, g, unknown or other
agagagagagangcucaga

SEQ ID NO: 2785842 - RNA, 19 nt, Artificial Sequence
  Description of Artificial Sequence: Synthetic oligonucleotide
cacaaaggccacuguccug

SEQ ID NO: 2785843 - RNA, 19 nt, Artificial Sequence
  Description of Artificial Sequence: Synthetic oligonucleotide
cacgaggccuugcuccucc

SEQ ID NO: 2785844 - RNA, 19 nt, Artificial Sequence
  Description of Artificial Sequence: Synthetic oligonucleotide
ugucuagcacuaugguguu

SEQ ID NO: 2785845 - RNA, 19 nt, Artificial Sequence
  Description of Artificial Sequence: Synthetic oligonucleotide
caugcuuccacucccugcu

SEQ ID NO: 2785846 - RNA, 19 nt, Artificial Sequence
  Description of Artificial Sequence: Synthetic oligonucleotide
uggauuggggccgcccacc

SEQ ID NO: 2785847 - RNA, 19 nt, Artificial Sequence
  Description of Artificial Sequence: Synthetic oligonucleotide
gaccccgaagugguugcgg

SEQ ID NO: 2785848 - RNA, 19 nt, Artificial Sequence
  Description of Artificial Sequence: Synthetic oligonucleotide
cuggcagaaggugccgucc

SEQ ID NO: 2785849 - RNA, 19 nt, Artificial Sequence
  Description of Artificial Sequence: Synthetic oligonucleotide
ucugaggcaggggacuuua

SEQ ID NO: 2785850 - RNA, 19 nt, Artificial Sequence
  Description of Artificial Sequence: Synthetic oligonucleotide
ucgggugcuuucuucuuuu

SEQ ID NO: 2785851 - RNA, 19 nt, Artificial Sequence
  Description of Artificial Sequence: Synthetic oligonucleotide
accccgaagugguugcgga

SEQ ID NO: 2785852 - RNA, 19 nt, Artificial Sequence
  Description of Artificial Sequence: Synthetic oligonucleotide
uccucacgaggccuugcuc

SEQ ID NO: 2785853 - RNA, 19 nt, Artificial Sequence
  Description of Artificial Sequence: Synthetic oligonucleotide
gucgaucuguuccggguuc

SEQ ID NO: 2785854 - RNA, 19 nt, Artificial Sequence
  Description of Artificial Sequence: Synthetic oligonucleotide
uaggggcucgcggaccccg

SEQ ID NO: 2785855 - RNA, 19 nt, Artificial Sequence
  Description of Artificial Sequence: Synthetic oligonucleotide
caaaggccacuguccuggg

SEQ ID NO: 2785856 - RNA, 19 nt, Artificial Sequence
  Description of Artificial Sequence: Synthetic oligonucleotide
ucgggucgaucuguuccgg

SEQ ID NO: 2785857 - RNA, 19 nt, Artificial Sequence
  Description of Artificial Sequence: Synthetic oligonucleotide
uuggcgugcuucugcccug

SEQ ID NO: 2785858 - RNA, 19 nt, Artificial Sequence
  Description of Artificial Sequence: Synthetic oligonucleotide
cagaguaggcccggcacac

SEQ ID NO: 2785859 - RNA, 19 nt, Artificial Sequence
  Description of Artificial Sequence: Synthetic oligonucleotide
cucagaaggcacuucgggu

SEQ ID NO: 2785860 - RNA, 19 nt, Artificial Sequence
  Description of Artificial Sequence: Synthetic oligonucleotide
aaggugccguccaggagga

SEQ ID NO: 2785861 - RNA, 19 nt, Artificial Sequence
  Description of Artificial Sequence: Synthetic oligonucleotide
cuagcacuaugguguucug

SEQ ID NO: 2785862 - RNA, 19 nt, Artificial Sequence
  Description of Artificial Sequence: Synthetic oligonucleotide
guugcuugaugcuuucuuu

SEQ ID NO: 2785863 - RNA, 19 nt, Artificial Sequence
  Description of Artificial Sequence: Synthetic oligonucleotide
ggagaaggcuugucuagca

SEQ ID NO: 2785864 - RNA, 19 nt, Artificial Sequence
  Description of Artificial Sequence: Synthetic oligonucleotide
ccugcugcucagaaggcac

SEQ ID NO: 2785865 - RNA, 19 nt, Artificial Sequence
  Description of Artificial Sequence: Synthetic oligonucleotide
gcagcugaguggauugggg

SEQ ID NO: 2785866 - RNA, 19 nt, Artificial Sequence
  Description of Artificial Sequence: Synthetic oligonucleotide
cacuguccugggagaaggc

SEQ ID NO: 2785867 - RNA, 19 nt, Artificial Sequence
  Description of Artificial Sequence: Synthetic oligonucleotide
agagagagagagagagaga

SEQ ID NO: 2785868 - RNA, 19 nt, Artificial Sequence
  Description of Artificial Sequence: Synthetic oligonucleotide
uccgcucaggguuccucac

SEQ ID NO: 2785869 - RNA, 19 nt, Artificial Sequence
  Description of Artificial Sequence: Synthetic oligonucleotide
cagcuggccugacuccacg

SEQ ID NO: 2785870 - RNA, 19 nt, Artificial Sequence
  Description of Artificial Sequence: Synthetic oligonucleotide
cacacaucaugcuuccacu

SEQ ID NO: 2785871 - RNA, 19 nt, Artificial Sequence
  Description of Artificial Sequence: Synthetic oligonucleotide
gguaggggcucgcggaccc

SEQ ID NO: 2785872 - RNA, 19 nt, Artificial Sequence
  Description of Artificial Sequence: Synthetic oligonucleotide
cugguaggggcucgcggac

SEQ ID NO: 2785873 - RNA, 19 nt, Artificial Sequence
  Description of Artificial Sequence: Synthetic oligonucleotide
caggggacuuuacgucggg

SEQ ID NO: 2785874 - RNA, 19 nt, Artificial Sequence
  Description of Artificial Sequence: Synthetic oligonucleotide
ggcacuucgggucgaucug

SEQ ID NO: 2785875 - RNA, 19 nt, Artificial Sequence
  Description of Artificial Sequence: Synthetic oligonucleotide
uuuccuccuccuccuccuc

SEQ ID NO: 2785876 - RNA, 19 nt, Artificial Sequence
  Description of Artificial Sequence: Synthetic oligonucleotide
ucgaucuguuccggguucu

SEQ ID NO: 2785877 - RNA, 19 nt, Artificial Sequence
  Description of Artificial Sequence: Synthetic oligonucleotide
gcuugaugcuuucuuucuc

SEQ ID NO: 2785878 - RNA, 19 nt, Artificial Sequence
  Description of Artificial Sequence: Synthetic oligonucleotide
gaguggauuggggccgccc

SEQ ID NO: 2785879 - RNA, 19 nt, Artificial Sequence
  Description of Artificial Sequence: Synthetic oligonucleotide
aucccaggagcggggcagc

SEQ ID NO: 2785880 - RNA, 19 nt, Artificial Sequence
  Description of Artificial Sequence: Synthetic oligonucleotide
ccaggagcggggcagcugc

SEQ ID NO: 2785881 - RNA, 19 nt, Artificial Sequence
  Description of Artificial Sequence: Synthetic oligonucleotide
gagcggggcagcugcuccc

SEQ ID NO: 2785882 - RNA, 19 nt, Artificial Sequence
  Description of Artificial Sequence: Synthetic oligonucleotide
aaggcuugucuagcacuau

SEQ ID NO: 2785883 - RNA, 19 nt, Artificial Sequence
  Description of Artificial Sequence: Synthetic oligonucleotide
gaggaucugguaggggcuc

SEQ ID NO: 2785884 - RNA, 19 nt, Artificial Sequence
  Description of Artificial Sequence: Synthetic oligonucleotide
aguaggcccggcacacauc

SEQ ID NO: 2785885 - RNA, 19 nt, Artificial Sequence
  Description of Artificial Sequence: Synthetic oligonucleotide
uggcgugcuucugcccugg

SEQ ID NO: 2785886 - RNA, 19 nt, Artificial Sequence
  Description of Artificial Sequence: Synthetic oligonucleotide
uuucugaggcaggggacuu

SEQ ID NO: 2785887 - RNA, 19 nt, Artificial Sequence
  Description of Artificial Sequence: Synthetic oligonucleotide
uuacgucgggugcuuucuu

SEQ ID NO: 2785888 - RNA, 19 nt, Artificial Sequence
  Description of Artificial Sequence: Synthetic oligonucleotide
ugguaggggcucgcggacc

SEQ ID NO: 2785889 - RNA, 19 nt, Artificial Sequence
  Description of Artificial Sequence: Synthetic oligonucleotide
cuuggcgugcuucugcccu

SEQ ID NO: 2785890 - RNA, 19 nt, Artificial Sequence
  Description of Artificial Sequence: Synthetic oligonucleotide
gggagaaggcuugucuagc

SEQ ID NO: 2785891 - RNA, 19 nt, Artificial Sequence
  Description of Artificial Sequence: Synthetic oligonucleotide
uucaagcagcugaguggau

SEQ ID NO: 2785892 - RNA, 19 nt, Artificial Sequence
  Description of Artificial Sequence: Synthetic oligonucleotide
aggguuccucacgaggccu

SEQ ID NO: 2785893 - RNA, 19 nt, Artificial Sequence
  Description of Artificial Sequence: Synthetic oligonucleotide
guggauuggggccgcccac

SEQ ID NO: 2785894 - RNA, 19 nt, Artificial Sequence
  Description of Artificial Sequence: Synthetic oligonucleotide
ccggcacacaucaugcuuc

SEQ ID NO: 2785895 - RNA, 19 nt, Artificial Sequence
  Description of Artificial Sequence: Synthetic oligonucleotide
ggagcggggcagcugcucc

SEQ ID NO: 2785896 - RNA, 19 nt, Artificial Sequence
  Description of Artificial Sequence: Synthetic oligonucleotide
augcuuccacucccugcug

SEQ ID NO: 2785897 - RNA, 19 nt, Artificial Sequence
  Description of Artificial Sequence: Synthetic oligonucleotide
gcuggaugcggccccgcag

SEQ ID NO: 2785898 - RNA, 19 nt, Artificial Sequence
  Description of Artificial Sequence: Synthetic oligonucleotide
ggguucuuuccucuuccuc

SEQ ID NO: 2785899 - RNA, 19 nt, Artificial Sequence
  Description of Artificial Sequence: Synthetic oligonucleotide
gccuucacaaaggccacug

SEQ ID NO: 2785900 - RNA, 19 nt, Artificial Sequence
  Description of Artificial Sequence: Synthetic oligonucleotide
uucugcccuggugaucuuc

SEQ ID NO: 2785901 - RNA, 19 nt, Artificial Sequence
  Description of Artificial Sequence: Synthetic oligonucleotide
agcggggcagcugcucccg

SEQ ID NO: 2785902 - RNA, 19 nt, Artificial Sequence
  Description of Artificial Sequence: Synthetic oligonucleotide
gcaggggacuuuacgucgg

SEQ ID NO: 2785903 - RNA, 19 nt, Artificial Sequence
  Description of Artificial Sequence: Synthetic oligonucleotide
agcuggaugcggccccgca

SEQ ID NO: 2785904 - RNA, 19 nt, Artificial Sequence
  Description of Artificial Sequence: Synthetic oligonucleotide
gaguaggcccggcacacau

SEQ ID NO: 2785905 - RNA, 19 nt, Artificial Sequence
  Description of Artificial Sequence: Synthetic oligonucleotide
ccggguucuuuccucuucc

SEQ ID NO: 2785906 - RNA, 19 nt, Artificial Sequence
  Description of Artificial Sequence: Synthetic oligonucleotide
gcuggccugacuccacggc

SEQ ID NO: 2785907 - RNA, 19 nt, Artificial Sequence
  Description of Artificial Sequence: Synthetic oligonucleotide
ggcagaaggugccguccag

SEQ ID NO: 2785908 - RNA, 19 nt, Artificial Sequence
  Description of Artificial Sequence: Synthetic oligonucleotide
cgugcuucugcccugguga

SEQ ID NO: 2785909 - RNA, 19 nt, Artificial Sequence
  Description of Artificial Sequence: Synthetic oligonucleotide
cugaggcaggggacuuuac

SEQ ID NO: 2785910 - RNA, 19 nt, Artificial Sequence
  Description of Artificial Sequence: Synthetic oligonucleotide
cucgugcacugagaccagc

SEQ ID NO: 2785911 - RNA, 19 nt, Artificial Sequence
  Description of Artificial Sequence: Synthetic oligonucleotide
aggagcggggcagcugcuc

SEQ ID NO: 2785912 - RNA, 19 nt, Artificial Sequence
  Description of Artificial Sequence: Synthetic oligonucleotide
cuccgcucaggguuccuca

SEQ ID NO: 2785913 - RNA, 19 nt, Artificial Sequence
  Description of Artificial Sequence: Synthetic oligonucleotide
guuccggguucuuuccucu

SEQ ID NO: 2785914 - RNA, 19 nt, Artificial Sequence
  Description of Artificial Sequence: Synthetic oligonucleotide
uuggggccgcccaccuucu

SEQ ID NO: 2785915 - RNA, 19 nt, Artificial Sequence
  Description of Artificial Sequence: Synthetic oligonucleotide
ggcccggcacacaucaugc

SEQ ID NO: 2785916 - RNA, 19 nt, Artificial Sequence
  Description of Artificial Sequence: Synthetic oligonucleotide
ugcugcucagaaggcacuu

SEQ ID NO: 2785917 - RNA, 19 nt, Artificial Sequence
  Description of Artificial Sequence: Synthetic oligonucleotide
gguugcggaagaagccgag

SEQ ID NO: 2785918 - RNA, 19 nt, Artificial Sequence
  Description of Artificial Sequence: Synthetic oligonucleotide
ggugccguccaggaggauc

SEQ ID NO: 2785919 - RNA, 19 nt, Artificial Sequence
  Description of Artificial Sequence: Synthetic oligonucleotide
cugaguggauuggggccgc

SEQ ID NO: 2785920 - RNA, 19 nt, Artificial Sequence
  Description of Artificial Sequence: Synthetic oligonucleotide
cccgaagugguugcggaag

SEQ ID NO: 2785921 - RNA, 19 nt, Artificial Sequence
  Description of Artificial Sequence: Synthetic oligonucleotide
guuccucacgaggccuugc

SEQ ID NO: 2785922 - RNA, 19 nt, Artificial Sequence
  Description of Artificial Sequence: Synthetic oligonucleotide
ugaguggauuggggccgcc

SEQ ID NO: 2785923 - RNA, 19 nt, Artificial Sequence
  Description of Artificial Sequence: Synthetic oligonucleotide
uccugggagaaggcuuguc

SEQ ID NO: 2785924 - RNA, 19 nt, Artificial Sequence
  Description of Artificial Sequence: Synthetic oligonucleotide
aggggacuuuacgucgggu

SEQ ID NO: 2785925 - RNA, 19 nt, Artificial Sequence
  Description of Artificial Sequence: Synthetic oligonucleotide
cuuccacucccugcugcuc

SEQ ID NO: 2785926 - RNA, 19 nt, Artificial Sequence
  Description of Artificial Sequence: Synthetic oligonucleotide
uuccggguucuuuccucuu

SEQ ID NO: 2785927 - RNA, 19 nt, Artificial Sequence
  Description of Artificial Sequence: Synthetic oligonucleotide
ccuccuccuccgcucaggg

SEQ ID NO: 2785928 - RNA, 19 nt, Artificial Sequence
  Description of Artificial Sequence: Synthetic oligonucleotide
gcuugucuagcacuauggu

SEQ ID NO: 2785929 - RNA, 19 nt, Artificial Sequence
  Description of Artificial Sequence: Synthetic oligonucleotide
agaaggcacuucgggucga

SEQ ID NO: 2785930 - RNA, 19 nt, Artificial Sequence
  Description of Artificial Sequence: Synthetic oligonucleotide
acuccacggccuucacaaa

SEQ ID NO: 2785931 - RNA, 19 nt, Artificial Sequence
  Description of Artificial Sequence: Synthetic oligonucleotide
caucaugcuuccacucccu

SEQ ID NO: 2785932 - RNA, 19 nt, Artificial Sequence
  Description of Artificial Sequence: Synthetic oligonucleotide
cugacuccacggccuucac

SEQ ID NO: 2785933 - RNA, 19 nt, Artificial Sequence
  Description of Artificial Sequence: Synthetic oligonucleotide
ccgccuggcagaaggugcc

SEQ ID NO: 2785934 - RNA, 19 nt, Artificial Sequence
  Description of Artificial Sequence: Synthetic oligonucleotide
gccgccuggcagaaggugc

SEQ ID NO: 2785935 - RNA, 19 nt, Artificial Sequence
  Description of Artificial Sequence: Synthetic oligonucleotide
agaguaggcccggcacaca

SEQ ID NO: 2785936 - RNA, 19 nt, Artificial Sequence
  Description of Artificial Sequence: Synthetic oligonucleotide
gcucaggguuccucacgag

SEQ ID NO: 2785937 - RNA, 19 nt, Artificial Sequence
  Description of Artificial Sequence: Synthetic oligonucleotide
cugcucccgcagcuggaug

SEQ ID NO: 2785938 - RNA, 19 nt, Artificial Sequence
  Description of Artificial Sequence: Synthetic oligonucleotide
gugccguccaggaggaucu

SEQ ID NO: 2785939 - RNA, 19 nt, Artificial Sequence
  Description of Artificial Sequence: Synthetic oligonucleotide
cacugagaccagcuggccu

SEQ ID NO: 2785940 - RNA, 19 nt, Artificial Sequence
  Description of Artificial Sequence: Synthetic oligonucleotide
cuucaguugcuugaugcuu

SEQ ID NO: 2785941 - RNA, 19 nt, Artificial Sequence
  Description of Artificial Sequence: Synthetic oligonucleotide
cacucccugcugcucagaa

SEQ ID NO: 2785942 - RNA, 19 nt, Artificial Sequence
  Description of Artificial Sequence: Synthetic oligonucleotide
cuguccugggagaaggcuu

SEQ ID NO: 2785943 - RNA, 19 nt, Artificial Sequence
  Description of Artificial Sequence: Synthetic oligonucleotide
cucacgaggccuugcuccu

SEQ ID NO: 2785944 - RNA, 19 nt, Artificial Sequence
  Description of Artificial Sequence: Synthetic oligonucleotide
gcgugcuucugcccuggug

SEQ ID NO: 2785945 - RNA, 19 nt, Artificial Sequence
  Description of Artificial Sequence: Synthetic oligonucleotide
gcucagaguaggcccggca

SEQ ID NO: 2785946 - RNA, 19 nt, Artificial Sequence
  Description of Artificial Sequence: Synthetic oligonucleotide
ccuggcagaaggugccguc

SEQ ID NO: 2785947 - RNA, 19 nt, Artificial Sequence
  Description of Artificial Sequence: Synthetic oligonucleotide
ucacgaggccuugcuccuc

SEQ ID NO: 2785948 - RNA, 19 nt, Artificial Sequence
  Description of Artificial Sequence: Synthetic oligonucleotide
acgaggccuugcuccuccu

SEQ ID NO: 2785949 - RNA, 19 nt, Artificial Sequence
  Description of Artificial Sequence: Synthetic oligonucleotide
cgugcacugagaccagcug

SEQ ID NO: 2785950 - RNA, 19 nt, Artificial Sequence
  Description of Artificial Sequence: Synthetic oligonucleotide
ccgcucaggguuccucacg

SEQ ID NO: 2785951 - RNA, 19 nt, Artificial Sequence
  Description of Artificial Sequence: Synthetic oligonucleotide
gcuucuuggcgugcuucug

SEQ ID NO: 2785952 - RNA, 19 nt, Artificial Sequence
  Description of Artificial Sequence: Synthetic oligonucleotide
ggaucugguaggggcucgc

SEQ ID NO: 2785953 - RNA, 19 nt, Artificial Sequence
  Description of Artificial Sequence: Synthetic oligonucleotide
ugagaccagcuggccugac

SEQ ID NO: 2785954 - RNA, 19 nt, Artificial Sequence
  Description of Artificial Sequence: Synthetic oligonucleotide
uaggcccggcacacaucau

SEQ ID NO: 2785955 - RNA, 19 nt, Artificial Sequence
  Description of Artificial Sequence: Synthetic oligonucleotide
cgaggugcuucuuggcgug

SEQ ID NO: 2785956 - RNA, 19 nt, Artificial Sequence
  Description of Artificial Sequence: Synthetic oligonucleotide
gcuuucuuucucgugcacu

SEQ ID NO: 2785957 - RNA, 19 nt, Artificial Sequence
  Description of Artificial Sequence: Synthetic oligonucleotide
acuuuacgucgggugcuuu

SEQ ID NO: 2785958 - RNA, 19 nt, Artificial Sequence
  Description of Artificial Sequence: Synthetic oligonucleotide
gccguccaggaggaucugg

SEQ ID NO: 2785959 - RNA, 19 nt, Artificial Sequence
  Description of Artificial Sequence: Synthetic oligonucleotide
gcggaccccgaagugguug

SEQ ID NO: 2785960 - RNA, 19 nt, Artificial Sequence
  Description of Artificial Sequence: Synthetic oligonucleotide
gccacuguccugggagaag

SEQ ID NO: 2785961 - RNA, 19 nt, Artificial Sequence
  Description of Artificial Sequence: Synthetic oligonucleotide
gucuagcacuaugguguuc

SEQ ID NO: 2785962 - RNA, 19 nt, Artificial Sequence
  Description of Artificial Sequence: Synthetic oligonucleotide
gguuccucacgaggccuug

SEQ ID NO: 2785963 - RNA, 19 nt, Artificial Sequence
  Description of Artificial Sequence: Synthetic oligonucleotide
gaucuguuccggguucuuu

SEQ ID NO: 2785964 - RNA, 19 nt, Artificial Sequence
  Description of Artificial Sequence: Synthetic oligonucleotide
cccgcagcuggaugcggcc

SEQ ID NO: 2785965 - RNA, 19 nt, Artificial Sequence
  Description of Artificial Sequence: Synthetic oligonucleotide
gcucgcggaccccgaagug

SEQ ID NO: 2785966 - RNA, 19 nt, Artificial Sequence
  Description of Artificial Sequence: Synthetic oligonucleotide
cuaugguguucugaauaau

SEQ ID NO: 2785967 - RNA, 19 nt, Artificial Sequence
  Description of Artificial Sequence: Synthetic oligonucleotide
ucccaggagcggggcagcu

SEQ ID NO: 2785968 - RNA, 19 nt, Artificial Sequence
  Description of Artificial Sequence: Synthetic oligonucleotide
ggaccccgaagugguugcg

SEQ ID NO: 2785969 - RNA, 19 nt, Artificial Sequence
  Description of Artificial Sequence: Synthetic oligonucleotide
ggaggaucugguaggggcu

SEQ ID NO: 2785970 - RNA, 19 nt, Artificial Sequence
  Description of Artificial Sequence: Synthetic oligonucleotide
gucgggugcuuucuucuuu

SEQ ID NO: 2785971 - RNA, 19 nt, Artificial Sequence
  Description of Artificial Sequence: Synthetic oligonucleotide
gcagcuggaugcggccccg

SEQ ID NO: 2785972 - RNA, 19 nt, Artificial Sequence
  Description of Artificial Sequence: Synthetic oligonucleotide
ccuucaguugcuugaugcu

SEQ ID NO: 2785973 - RNA, 19 nt, Artificial Sequence
  Description of Artificial Sequence: Synthetic oligonucleotide
cugcugcucagaaggcacu

SEQ ID NO: 2785974 - RNA, 19 nt, Artificial Sequence
  Description of Artificial Sequence: Synthetic oligonucleotide
cugagaccagcuggccuga

SEQ ID NO: 2785975 - RNA, 19 nt, Artificial Sequence
  Description of Artificial Sequence: Synthetic oligonucleotide
ugccguccaggaggaucug

SEQ ID NO: 2785976 - RNA, 19 nt, Artificial Sequence
  Description of Artificial Sequence: Synthetic oligonucleotide
ggaucccaggagcggggca

SEQ ID NO: 2785977 - RNA, 19 nt, Artificial Sequence
  Description of Artificial Sequence: Synthetic oligonucleotide
cuccuccgcucaggguucc

SEQ ID NO: 2785978 - RNA, 19 nt, Artificial Sequence
  Description of Artificial Sequence: Synthetic oligonucleotide
ggacuuuacgucgggugcu

SEQ ID NO: 2785979 - RNA, 19 nt, Artificial Sequence
  Description of Artificial Sequence: Synthetic oligonucleotide
guaggggcucgcggacccc

SEQ ID NO: 2785980 - RNA, 19 nt, Artificial Sequence
  Description of Artificial Sequence: Synthetic oligonucleotide
gggaucccaggagcggggc

SEQ ID NO: 2785981 - RNA, 19 nt, Artificial Sequence
  Description of Artificial Sequence: Synthetic oligonucleotide
cggaccccgaagugguugc

SEQ ID NO: 2785982 - RNA, 19 nt, Artificial Sequence
  Description of Artificial Sequence: Synthetic oligonucleotide
ccuugcuccuccuucaguu

SEQ ID NO: 2785983 - RNA, 19 nt, Artificial Sequence
  Description of Artificial Sequence: Synthetic oligonucleotide
gcugcucagaaggcacuuc

SEQ ID NO: 2785984 - RNA, 19 nt, Artificial Sequence
  Description of Artificial Sequence: Synthetic oligonucleotide
ccuccuccgcucaggguuc

SEQ ID NO: 2785985 - RNA, 19 nt, Artificial Sequence
  Description of Artificial Sequence: Synthetic oligonucleotide
gacuuuacgucgggugcuu

SEQ ID NO: 2785986 - RNA, 19 nt, Artificial Sequence
  Description of Artificial Sequence: Synthetic oligonucleotide
cuguuccggguucuuuccu

SEQ ID NO: 2785987 - RNA, 19 nt, Artificial Sequence
  Description of Artificial Sequence: Synthetic oligonucleotide
agaagccgaggugcuucuu

SEQ ID NO: 2785988 - RNA, 19 nt, Artificial Sequence
  Description of Artificial Sequence: Synthetic oligonucleotide
ccugacuccacggccuuca

SEQ ID NO: 2785989 - RNA, 19 nt, Artificial Sequence
  Description of Artificial Sequence: Synthetic oligonucleotide
ccgaagugguugcggaaga

SEQ ID NO: 2785990 - RNA, 19 nt, Artificial Sequence
  Description of Artificial Sequence: Synthetic oligonucleotide
gggcagcugcucccgcagc

SEQ ID NO: 2785991 - RNA, 19 nt, Artificial Sequence
  Description of Artificial Sequence: Synthetic oligonucleotide
cgggucgaucuguuccggg

SEQ ID NO: 2785992 - RNA, 19 nt, Artificial Sequence
  Description of Artificial Sequence: Synthetic oligonucleotide
ccucuucuuuucugaggca

SEQ ID NO: 2785993 - RNA, 19 nt, Artificial Sequence
  Description of Artificial Sequence: Synthetic oligonucleotide
gcuuccacucccugcugcu

SEQ ID NO: 2785994 - RNA, 19 nt, Artificial Sequence
  Description of Artificial Sequence: Synthetic oligonucleotide
cgcagcuggaugcggcccc

SEQ ID NO: 2785995 - RNA, 19 nt, Artificial Sequence
  Description of Artificial Sequence: Synthetic oligonucleotide
cagcuggaugcggccccgc

SEQ ID NO: 2785996 - RNA, 19 nt, Artificial Sequence
  Description of Artificial Sequence: Synthetic oligonucleotide
gauuggggccgcccaccuu

SEQ ID NO: 2785997 - RNA, 19 nt, Artificial Sequence
  Description of Artificial Sequence: Synthetic oligonucleotide
cgcucaggguuccucacga

SEQ ID NO: 2785998 - RNA, 19 nt, Artificial Sequence
  Description of Artificial Sequence: Synthetic oligonucleotide
ggauuggggccgcccaccu

SEQ ID NO: 2785999 - RNA, 19 nt, Artificial Sequence
  Description of Artificial Sequence: Synthetic oligonucleotide
ccgaggugcuucuuggcgu

SEQ ID NO: 2786000 - RNA, 19 nt, Artificial Sequence
  Description of Artificial Sequence: Synthetic oligonucleotide
ggccccgcagcgccgccug

SEQ ID NO: 2786001 - RNA, 19 nt, Artificial Sequence
  Description of Artificial Sequence: Synthetic oligonucleotide
gcacuaugguguucugaau

SEQ ID NO: 2786002 - RNA, 19 nt, Artificial Sequence
  Description of Artificial Sequence: Synthetic oligonucleotide
ccuccuccuccuccuccgc

SEQ ID NO: 2786003 - RNA, 19 nt, Artificial Sequence
  Description of Artificial Sequence: Synthetic oligonucleotide
cggccuucacaaaggccac

SEQ ID NO: 2786004 - RNA, 19 nt, Artificial Sequence
  Description of Artificial Sequence: Synthetic oligonucleotide
gaaggcacuucgggucgau

SEQ ID NO: 2786005 - RNA, 19 nt, Artificial Sequence
  Description of Artificial Sequence: Synthetic oligonucleotide
augcggccccgcagcgccg

SEQ ID NO: 2786006 - RNA, 19 nt, Artificial Sequence
  Description of Artificial Sequence: Synthetic oligonucleotide
uggggccgcccaccuucuu

SEQ ID NO: 2786007 - RNA, 19 nt, Artificial Sequence
  Description of Artificial Sequence: Synthetic oligonucleotide
cacuucgggucgaucuguu

SEQ ID NO: 2786008 - RNA, 19 nt, Artificial Sequence
  Description of Artificial Sequence: Synthetic oligonucleotide
ggcacacaucaugcuucca

SEQ ID NO: 2786009 - RNA, 19 nt, Artificial Sequence
  Description of Artificial Sequence: Synthetic oligonucleotide
ccgcagcuggaugcggccc

SEQ ID NO: 2786010 - RNA, 19 nt, Artificial Sequence
  Description of Artificial Sequence: Synthetic oligonucleotide
ccguccaggaggaucuggu

SEQ ID NO: 2786011 - RNA, 19 nt, Artificial Sequence
  Description of Artificial Sequence: Synthetic oligonucleotide
caguugcuugaugcuuucu

SEQ ID NO: 2786012 - RNA, 19 nt, Artificial Sequence
  Description of Artificial Sequence: Synthetic oligonucleotide
ggccacuguccugggagaa

SEQ ID NO: 2786013 - RNA, 19 nt, Artificial Sequence
  Description of Artificial Sequence: Synthetic oligonucleotide
cccugcugcucagaaggca

SEQ ID NO: 2786014 - RNA, 19 nt, Artificial Sequence
  Description of Artificial Sequence: Synthetic oligonucleotide
gcacuucgggucgaucugu

SEQ ID NO: 2786015 - RNA, 19 nt, Artificial Sequence
  Description of Artificial Sequence: Synthetic oligonucleotide
aggggcucgcggaccccga

SEQ ID NO: 2786016 - RNA, 19 nt, Artificial Sequence
  Description of Artificial Sequence: Synthetic oligonucleotide
cgggugcuuucuucuuuuc

SEQ ID NO: 2786017 - RNA, 19 nt, Artificial Sequence
  Description of Artificial Sequence: Synthetic oligonucleotide
gccuugcuccuccuucagu

SEQ ID NO: 2786018 - RNA, 19 nt, Artificial Sequence
  Description of Artificial Sequence: Synthetic oligonucleotide
ccgcagcgccgccuggcag

SEQ ID NO: 2786019 - RNA, 19 nt, Artificial Sequence
  Description of Artificial Sequence: Synthetic oligonucleotide
ccuucacaaaggccacugu

SEQ ID NO: 2786020 - RNA, 19 nt, Artificial Sequence
  Description of Artificial Sequence: Synthetic oligonucleotide
gggccgcccaccuucuuuu

SEQ ID NO: 2786021 - RNA, 19 nt, Artificial Sequence
  Description of Artificial Sequence: Synthetic oligonucleotide
ggaagaagccgaggugcuu

SEQ ID NO: 2786022 - RNA, 19 nt, Artificial Sequence
  Description of Artificial Sequence: Synthetic oligonucleotide
ccccgaagugguugcggaa

SEQ ID NO: 2786023 - RNA, 19 nt, Artificial Sequence
  Description of Artificial Sequence: Synthetic oligonucleotide
cugcccuggugaucuucau

SEQ ID NO: 2786024 - RNA, 19 nt, Artificial Sequence
  Description of Artificial Sequence: Synthetic oligonucleotide
guccugggagaaggcuugu

SEQ ID NO: 2786025 - RNA, 19 nt, Artificial Sequence
  Description of Artificial Sequence: Synthetic oligonucleotide
ggggccgcccaccuucuuu

SEQ ID NO: 2786026 - RNA, 19 nt, Artificial Sequence
  Description of Artificial Sequence: Synthetic oligonucleotide
caggagcggggcagcugcu

SEQ ID NO: 2786027 - RNA, 19 nt, Artificial Sequence
  Description of Artificial Sequence: Synthetic oligonucleotide
gccccgcagcgccgccugg

SEQ ID NO: 2786028 - RNA, 19 nt, Artificial Sequence
  Description of Artificial Sequence: Synthetic oligonucleotide
cccggcacacaucaugcuu

SEQ ID NO: 2786029 - RNA, 19 nt, Artificial Sequence
  Description of Artificial Sequence: Synthetic oligonucleotide
ccccgcagcgccgccuggc

SEQ ID NO: 2786030 - RNA, 19 nt, Artificial Sequence
  Description of Artificial Sequence: Synthetic oligonucleotide
ggggcucgcggaccccgaa

SEQ ID NO: 2786031 - RNA, 19 nt, Artificial Sequence
  Description of Artificial Sequence: Synthetic oligonucleotide
cgccuggcagaaggugccg

SEQ ID NO: 2786032 - RNA, 19 nt, Artificial Sequence
  Description of Artificial Sequence: Synthetic oligonucleotide
cggaagaagccgaggugcu

SEQ ID NO: 2786033 - RNA, 19 nt, Artificial Sequence
  Description of Artificial Sequence: Synthetic oligonucleotide
gcccggcacacaucaugcu

SEQ ID NO: 2786034 - RNA, 19 nt, Artificial Sequence
  Description of Artificial Sequence: Synthetic oligonucleotide
cguccaggaggaucuggua

SEQ ID NO: 2786035 - RNA, 19 nt, Artificial Sequence
  Description of Artificial Sequence: Synthetic oligonucleotide
cgaagugguugcggaagaa

SEQ ID NO: 2786036 - RNA, 19 nt, Artificial Sequence
  Description of Artificial Sequence: Synthetic oligonucleotide
ggccuucacaaaggccacu

SEQ ID NO: 2786037 - RNA, 19 nt, Artificial Sequence
  Description of Artificial Sequence: Synthetic oligonucleotide
cgccgccuggcagaaggug

SEQ ID NO: 2786038 - RNA, 19 nt, Artificial Sequence
  Description of Artificial Sequence: Synthetic oligonucleotide
aggugccguccaggaggau

SEQ ID NO: 2786039 - RNA, 19 nt, Artificial Sequence
  Description of Artificial Sequence: Synthetic oligonucleotide
gcugcucccgcagcuggau

SEQ ID NO: 2786040 - RNA, 19 nt, Artificial Sequence
  Description of Artificial Sequence: Synthetic oligonucleotide
cccgcagcgccgccuggca

SEQ ID NO: 2786041 - RNA, 19 nt, Artificial Sequence
  Description of Artificial Sequence: Synthetic oligonucleotide
gccuggcagaaggugccgu

SEQ ID NO: 2786042 - RNA, 19 nt, Artificial Sequence
  Description of Artificial Sequence: Synthetic oligonucleotide
cuucugcccuggugaucuu

SEQ ID NO: 2786043 - RNA, 19 nt, Artificial Sequence
  Description of Artificial Sequence: Synthetic oligonucleotide
ggguuccucacgaggccuu

SEQ ID NO: 2786044 - RNA, 19 nt, Artificial Sequence
  Description of Artificial Sequence: Synthetic oligonucleotide
ggccugacuccacggccuu

SEQ ID NO: 2786045 - RNA, 19 nt, Artificial Sequence
  Description of Artificial Sequence: Synthetic oligonucleotide
gcggccccgcagcgccgcc

SEQ ID NO: 2786046 - RNA, 19 nt, Artificial Sequence
  Description of Artificial Sequence: Synthetic oligonucleotide
cggguucuuuccucuuccu

SEQ ID NO: 2786047 - RNA, 19 nt, Artificial Sequence
  Description of Artificial Sequence: Synthetic oligonucleotide
ggcgugcuucugcccuggu

SEQ ID NO: 2786048 - RNA, 19 nt, Artificial Sequence
  Description of Artificial Sequence: Synthetic oligonucleotide
ccacucccugcugcucaga

SEQ ID NO: 2786049 - RNA, 19 nt, Artificial Sequence
  Description of Artificial Sequence: Synthetic oligonucleotide
cgucgggugcuuucuucuu

SEQ ID NO: 2786050 - RNA, 19 nt, Artificial Sequence
  Description of Artificial Sequence: Synthetic oligonucleotide
gcgccgccuggcagaaggu

SEQ ID NO: 2786051 - RNA, 19 nt, Artificial Sequence
  Description of Artificial Sequence: Synthetic oligonucleotide
cgcggaccccgaagugguu

SEQ ID NO: 2786052 - RNA, 19 nt, Artificial Sequence
  Description of Artificial Sequence: Synthetic oligonucleotide
  modified_base (1)..(1): a, c, u, g, unknown or other
ngcucagaguaggcccggc

SEQ ID NO: 2786053 - RNA, 19 nt, Artificial Sequence
  Description of Artificial Sequence: Synthetic oligonucleotide
uauauauauauauauaugc

SEQ ID NO: 2786054 - RNA, 19 nt, Artificial Sequence
  Description of Artificial Sequence: Synthetic oligonucleotide
uauauauauauauauauau

SEQ ID NO: 2786055 - RNA, 19 nt, Artificial Sequence
  Description of Artificial Sequence: Synthetic oligonucleotide
agaaguagacauuggaucc

SEQ ID NO: 2786056 - RNA, 19 nt, Artificial Sequence
  Description of Artificial Sequence: Synthetic oligonucleotide
aaacuauauauauauauau

SEQ ID NO: 2786057 - RNA, 19 nt, Artificial Sequence
  Description of Artificial Sequence: Synthetic oligonucleotide
aauaguuaguuccaggaca

SEQ ID NO: 2786058 - RNA, 19 nt, Artificial Sequence
  Description of Artificial Sequence: Synthetic oligonucleotide
gaaauggaauuacacaugg

SEQ ID NO: 2786059 - RNA, 19 nt, Artificial Sequence
  Description of Artificial Sequence: Synthetic oligonucleotide
acuauauauauauauauau

SEQ ID NO: 2786060 - RNA, 19 nt, Artificial Sequence
  Description of Artificial Sequence: Synthetic oligonucleotide
uaagcuuuccacaaggccc

SEQ ID NO: 2786061 - RNA, 19 nt, Artificial Sequence
  Description of Artificial Sequence: Synthetic oligonucleotide
uuacacaugguucugagcu

SEQ ID NO: 2786062 - RNA, 19 nt, Artificial Sequence
  Description of Artificial Sequence: Synthetic oligonucleotide
uauauaugcauguauguga

SEQ ID NO: 2786063 - RNA, 19 nt, Artificial Sequence
  Description of Artificial Sequence: Synthetic oligonucleotide
gguaauagaacucuggucc

SEQ ID NO: 2786064 - RNA, 19 nt, Artificial Sequence
  Description of Artificial Sequence: Synthetic oligonucleotide
aaggcagaaaugccaaacc

SEQ ID NO: 2786065 - RNA, 19 nt, Artificial Sequence
  Description of Artificial Sequence: Synthetic oligonucleotide
aauggaauuacacaugguu

SEQ ID NO: 2786066 - RNA, 19 nt, Artificial Sequence
  Description of Artificial Sequence: Synthetic oligonucleotide
ugauaagcuuuccacaagg

SEQ ID NO: 2786067 - RNA, 19 nt, Artificial Sequence
  Description of Artificial Sequence: Synthetic oligonucleotide
agaaaugccaaaccagggc

SEQ ID NO: 2786068 - RNA, 19 nt, Artificial Sequence
  Description of Artificial Sequence: Synthetic oligonucleotide
ugagacucccaucagagag

SEQ ID NO: 2786069 - RNA, 19 nt, Artificial Sequence
  Description of Artificial Sequence: Synthetic oligonucleotide
gaaaugccaaaccagggcg

SEQ ID NO: 2786070 - RNA, 19 nt, Artificial Sequence
  Description of Artificial Sequence: Synthetic oligonucleotide
uauauauauauaugcaugu

SEQ ID NO: 2786071 - RNA, 19 nt, Artificial Sequence
  Description of Artificial Sequence: Synthetic oligonucleotide
auaagcuuuccacaaggcc

SEQ ID NO: 2786072 - RNA, 19 nt, Artificial Sequence
  Description of Artificial Sequence: Synthetic oligonucleotide
uauauauauauauaugcau

SEQ ID NO: 2786073 - RNA, 19 nt, Artificial Sequence
  Description of Artificial Sequence: Synthetic oligonucleotide
acaaacuauauauauauau

SEQ ID NO: 2786074 - RNA, 19 nt, Artificial Sequence
  Description of Artificial Sequence: Synthetic oligonucleotide
aucagagagcuucugacgc

SEQ ID NO: 2786075 - RNA, 19 nt, Artificial Sequence
  Description of Artificial Sequence: Synthetic oligonucleotide
gucuacaauaguuaguucc

SEQ ID NO: 2786076 - RNA, 19 nt, Artificial Sequence
  Description of Artificial Sequence: Synthetic oligonucleotide
aauuacacaugguucugag

SEQ ID NO: 2786077 - RNA, 19 nt, Artificial Sequence
  Description of Artificial Sequence: Synthetic oligonucleotide
aauagaacucugguccucc

SEQ ID NO: 2786078 - RNA, 19 nt, Artificial Sequence
  Description of Artificial Sequence: Synthetic oligonucleotide
ucuacaauaguuaguucca

SEQ ID NO: 2786079 - RNA, 19 nt, Artificial Sequence
  Description of Artificial Sequence: Synthetic oligonucleotide
auauauauauauaugcaug

SEQ ID NO: 2786080 - RNA, 19 nt, Artificial Sequence
  Description of Artificial Sequence: Synthetic oligonucleotide
acaauaguuaguuccagga

SEQ ID NO: 2786081 - RNA, 19 nt, Artificial Sequence
  Description of Artificial Sequence: Synthetic oligonucleotide
uagacauuggauccccugg

SEQ ID NO: 2786082 - RNA, 19 nt, Artificial Sequence
  Description of Artificial Sequence: Synthetic oligonucleotide
uggaauuacacaugguucu

SEQ ID NO: 2786083 - RNA, 19 nt, Artificial Sequence
  Description of Artificial Sequence: Synthetic oligonucleotide
aaccaguguucuuaacuac

SEQ ID NO: 2786084 - RNA, 19 nt, Artificial Sequence
  Description of Artificial Sequence: Synthetic oligonucleotide
uuccacaaggcccaaagga

SEQ ID NO: 2786085 - RNA, 19 nt, Artificial Sequence
  Description of Artificial Sequence: Synthetic oligonucleotide
uguucuuaacuacuggagu

SEQ ID NO: 2786086 - RNA, 19 nt, Artificial Sequence
  Description of Artificial Sequence: Synthetic oligonucleotide
uacaauaguuaguuccagg

SEQ ID NO: 2786087 - RNA, 19 nt, Artificial Sequence
  Description of Artificial Sequence: Synthetic oligonucleotide
uggaguuguuucuagucgg

SEQ ID NO: 2786088 - RNA, 19 nt, Artificial Sequence
  Description of Artificial Sequence: Synthetic oligonucleotide
auauauauauauauauaug

SEQ ID NO: 2786089 - RNA, 19 nt, Artificial Sequence
  Description of Artificial Sequence: Synthetic oligonucleotide
acuggaguuguuucuaguc

SEQ ID NO: 2786090 - RNA, 19 nt, Artificial Sequence
  Description of Artificial Sequence: Synthetic oligonucleotide
auuacacaugguucugagc

SEQ ID NO: 2786091 - RNA, 19 nt, Artificial Sequence
  Description of Artificial Sequence: Synthetic oligonucleotide
auaugcauguaugugagug

SEQ ID NO: 2786092 - RNA, 19 nt, Artificial Sequence
  Description of Artificial Sequence: Synthetic oligonucleotide
cuuggucuacaauaguuag

SEQ ID NO: 2786093 - RNA, 19 nt, Artificial Sequence
  Description of Artificial Sequence: Synthetic oligonucleotide
auauauauauauauaugca

SEQ ID NO: 2786094 - RNA, 19 nt, Artificial Sequence
  Description of Artificial Sequence: Synthetic oligonucleotide
uguacccuaacgucguggg

SEQ ID NO: 2786095 - RNA, 19 nt, Artificial Sequence
  Description of Artificial Sequence: Synthetic oligonucleotide
cagaaguagacauuggauc

SEQ ID NO: 2786096 - RNA, 19 nt, Artificial Sequence
  Description of Artificial Sequence: Synthetic oligonucleotide
ucagaaguagacauuggau

SEQ ID NO: 2786097 - RNA, 19 nt, Artificial Sequence
  Description of Artificial Sequence: Synthetic oligonucleotide
aaguagacauuggaucccc

SEQ ID NO: 2786098 - RNA, 19 nt, Artificial Sequence
  Description of Artificial Sequence: Synthetic oligonucleotide
cucacgaaggcagaaaugc

SEQ ID NO: 2786099 - RNA, 19 nt, Artificial Sequence
  Description of Artificial Sequence: Synthetic oligonucleotide
aguguucuuaacuacugga

SEQ ID NO: 2786100 - RNA, 19 nt, Artificial Sequence
  Description of Artificial Sequence: Synthetic oligonucleotide
uuucuagucggugagacuc

SEQ ID NO: 2786101 - RNA, 19 nt, Artificial Sequence
  Description of Artificial Sequence: Synthetic oligonucleotide
aaugccaaaccagggcggc

SEQ ID NO: 2786102 - RNA, 19 nt, Artificial Sequence
  Description of Artificial Sequence: Synthetic oligonucleotide
acucccaucagagagcuuc

SEQ ID NO: 2786103 - RNA, 19 nt, Artificial Sequence
  Description of Artificial Sequence: Synthetic oligonucleotide
auggaauuacacaugguuc

SEQ ID NO: 2786104 - RNA, 19 nt, Artificial Sequence
  Description of Artificial Sequence: Synthetic oligonucleotide
augcauguaugugagugcc

SEQ ID NO: 2786105 - RNA, 19 nt, Artificial Sequence
  Description of Artificial Sequence: Synthetic oligonucleotide
guuguuucuagucggugag

SEQ ID NO: 2786106 - RNA, 19 nt, Artificial Sequence
  Description of Artificial Sequence: Synthetic oligonucleotide
cuggaguuguuucuagucg

SEQ ID NO: 2786107 - RNA, 19 nt, Artificial Sequence
  Description of Artificial Sequence: Synthetic oligonucleotide
uuuccacaaggcccaaagg

SEQ ID NO: 2786108 - RNA, 19 nt, Artificial Sequence
  Description of Artificial Sequence: Synthetic oligonucleotide
aacuacuggaguuguuucu

SEQ ID NO: 2786109 - RNA, 19 nt, Artificial Sequence
  Description of Artificial Sequence: Synthetic oligonucleotide
uguaugugagugccuacug

SEQ ID NO: 2786110 - RNA, 19 nt, Artificial Sequence
  Description of Artificial Sequence: Synthetic oligonucleotide
uaugcauguaugugagugc

SEQ ID NO: 2786111 - RNA, 19 nt, Artificial Sequence
  Description of Artificial Sequence: Synthetic oligonucleotide
cuuuccacaaggcccaaag

SEQ ID NO: 2786112 - RNA, 19 nt, Artificial Sequence
  Description of Artificial Sequence: Synthetic oligonucleotide
cagaaaugccaaaccaggg

SEQ ID NO: 2786113 - RNA, 19 nt, Artificial Sequence
  Description of Artificial Sequence: Synthetic oligonucleotide
caucagagagcuucugacg

SEQ ID NO: 2786114 - RNA, 19 nt, Artificial Sequence
  Description of Artificial Sequence: Synthetic oligonucleotide
aguuguuucuagucgguga

SEQ ID NO: 2786115 - RNA, 19 nt, Artificial Sequence
  Description of Artificial Sequence: Synthetic oligonucleotide
aacuauauauauauauaua

SEQ ID NO: 2786116 - RNA, 19 nt, Artificial Sequence
  Description of Artificial Sequence: Synthetic oligonucleotide
acacaugguucugagcugc

SEQ ID NO: 2786117 - RNA, 19 nt, Artificial Sequence
  Description of Artificial Sequence: Synthetic oligonucleotide
cuauauauauauauauaua

SEQ ID NO: 2786118 - RNA, 19 nt, Artificial Sequence
  Description of Artificial Sequence: Synthetic oligonucleotide
uaaccaguguucuuaacua

SEQ ID NO: 2786119 - RNA, 19 nt, Artificial Sequence
  Description of Artificial Sequence: Synthetic oligonucleotide
uccacaaggcccaaaggaa

SEQ ID NO: 2786120 - RNA, 19 nt, Artificial Sequence
  Description of Artificial Sequence: Synthetic oligonucleotide
agggugagaggucuaggcg

SEQ ID NO: 2786121 - RNA, 19 nt, Artificial Sequence
  Description of Artificial Sequence: Synthetic oligonucleotide
uugggcuguacccuaacgu

SEQ ID NO: 2786122 - RNA, 19 nt, Artificial Sequence
  Description of Artificial Sequence: Synthetic oligonucleotide
auaguuaguuccaggacag

SEQ ID NO: 2786123 - RNA, 19 nt, Artificial Sequence
  Description of Artificial Sequence: Synthetic oligonucleotide
uccggaagaguaaccagug

SEQ ID NO: 2786124 - RNA, 19 nt, Artificial Sequence
  Description of Artificial Sequence: Synthetic oligonucleotide
aaaugccaaaccagggcgg

SEQ ID NO: 2786125 - RNA, 19 nt, Artificial Sequence
  Description of Artificial Sequence: Synthetic oligonucleotide
caaacuauauauauauaua

SEQ ID NO: 2786126 - RNA, 19 nt, Artificial Sequence
  Description of Artificial Sequence: Synthetic oligonucleotide
ugguaauagaacucugguc

SEQ ID NO: 2786127 - RNA, 19 nt, Artificial Sequence
  Description of Artificial Sequence: Synthetic oligonucleotide
accagcuuggucuacaaua

SEQ ID NO: 2786128 - RNA, 19 nt, Artificial Sequence
  Description of Artificial Sequence: Synthetic oligonucleotide
uagaacucugguccuccgg

SEQ ID NO: 2786129 - RNA, 19 nt, Artificial Sequence
  Description of Artificial Sequence: Synthetic oligonucleotide
caaaacaaacuauauauau

SEQ ID NO: 2786130 - RNA, 19 nt, Artificial Sequence
  Description of Artificial Sequence: Synthetic oligonucleotide
cacaaggcccaaaggaagg

SEQ ID NO: 2786131 - RNA, 19 nt, Artificial Sequence
  Description of Artificial Sequence: Synthetic oligonucleotide
cuggaaauggaauuacaca

SEQ ID NO: 2786132 - RNA, 19 nt, Artificial Sequence
  Description of Artificial Sequence: Synthetic oligonucleotide
uuaacuacuggaguuguuu

SEQ ID NO: 2786133 - RNA, 19 nt, Artificial Sequence
  Description of Artificial Sequence: Synthetic oligonucleotide
aaaccagggcggcacagcu

SEQ ID NO: 2786134 - RNA, 19 nt, Artificial Sequence
  Description of Artificial Sequence: Synthetic oligonucleotide
auauauauauauauauaua

SEQ ID NO: 2786135 - RNA, 19 nt, Artificial Sequence
  Description of Artificial Sequence: Synthetic oligonucleotide
augauaagcuuuccacaag

SEQ ID NO: 2786136 - RNA, 19 nt, Artificial Sequence
  Description of Artificial Sequence: Synthetic oligonucleotide
uguuucuagucggugagac

SEQ ID NO: 2786137 - RNA, 19 nt, Artificial Sequence
  Description of Artificial Sequence: Synthetic oligonucleotide
caauaguuaguuccaggac

SEQ ID NO: 2786138 - RNA, 19 nt, Artificial Sequence
  Description of Artificial Sequence: Synthetic oligonucleotide
agugcugguaauagaacuc

SEQ ID NO: 2786139 - RNA, 19 nt, Artificial Sequence
  Description of Artificial Sequence: Synthetic oligonucleotide
ucacgaaggcagaaaugcc

SEQ ID NO: 2786140 - RNA, 19 nt, Artificial Sequence
  Description of Artificial Sequence: Synthetic oligonucleotide
gaaggcagaaaugccaaac

SEQ ID NO: 2786141 - RNA, 19 nt, Artificial Sequence
  Description of Artificial Sequence: Synthetic oligonucleotide
agccacacugcucacgaag

SEQ ID NO: 2786142 - RNA, 19 nt, Artificial Sequence
  Description of Artificial Sequence: Synthetic oligonucleotide
aguaaccaguguucuuaac

SEQ ID NO: 2786143 - RNA, 19 nt, Artificial Sequence
  Description of Artificial Sequence: Synthetic oligonucleotide
gauaagcuuuccacaaggc

SEQ ID NO: 2786144 - RNA, 19 nt, Artificial Sequence
  Description of Artificial Sequence: Synthetic oligonucleotide
uuggauccccuggaaaugg

SEQ ID NO: 2786145 - RNA, 19 nt, Artificial Sequence
  Description of Artificial Sequence: Synthetic oligonucleotide
guguaucucugugaguucg

SEQ ID NO: 2786146 - RNA, 19 nt, Artificial Sequence
  Description of Artificial Sequence: Synthetic oligonucleotide
ugagugcugguaauagaac

SEQ ID NO: 2786147 - RNA, 19 nt, Artificial Sequence
  Description of Artificial Sequence: Synthetic oligonucleotide
uacccuaacgucgugggca

SEQ ID NO: 2786148 - RNA, 19 nt, Artificial Sequence
  Description of Artificial Sequence: Synthetic oligonucleotide
ggcaugauaagcuuuccac

SEQ ID NO: 2786149 - RNA, 19 nt, Artificial Sequence
  Description of Artificial Sequence: Synthetic oligonucleotide
aggcagaaaugccaaacca

SEQ ID NO: 2786150 - RNA, 19 nt, Artificial Sequence
  Description of Artificial Sequence: Synthetic oligonucleotide
aggucagaaguagacauug

SEQ ID NO: 2786151 - RNA, 19 nt, Artificial Sequence
  Description of Artificial Sequence: Synthetic oligonucleotide
caaaggaagggucagccca

SEQ ID NO: 2786152 - RNA, 19 nt, Artificial Sequence
  Description of Artificial Sequence: Synthetic oligonucleotide
caugauaagcuuuccacaa

SEQ ID NO: 2786153 - RNA, 19 nt, Artificial Sequence
  Description of Artificial Sequence: Synthetic oligonucleotide
aaggcccaaaggaaggguc

SEQ ID NO: 2786154 - RNA, 19 nt, Artificial Sequence
  Description of Artificial Sequence: Synthetic oligonucleotide
gaaguagacauuggauccc

SEQ ID NO: 2786155 - RNA, 19 nt, Artificial Sequence
  Description of Artificial Sequence: Synthetic oligonucleotide
ugacgcuugggcuguaccc

SEQ ID NO: 2786156 - RNA, 19 nt, Artificial Sequence
  Description of Artificial Sequence: Synthetic oligonucleotide
guaugugagugccuacugc

SEQ ID NO: 2786157 - RNA, 19 nt, Artificial Sequence
  Description of Artificial Sequence: Synthetic oligonucleotide
gucagaaguagacauugga

SEQ ID NO: 2786158 - RNA, 19 nt, Artificial Sequence
  Description of Artificial Sequence: Synthetic oligonucleotide
gcagaaaugccaaaccagg

SEQ ID NO: 2786159 - RNA, 19 nt, Artificial Sequence
  Description of Artificial Sequence: Synthetic oligonucleotide
uaacuacuggaguuguuuc

SEQ ID NO: 2786160 - RNA, 19 nt, Artificial Sequence
  Description of Artificial Sequence: Synthetic oligonucleotide
agcagagccagagcugugc

SEQ ID NO: 2786161 - RNA, 19 nt, Artificial Sequence
  Description of Artificial Sequence: Synthetic oligonucleotide
gggugagaggucuaggcgg

SEQ ID NO: 2786162 - RNA, 19 nt, Artificial Sequence
  Description of Artificial Sequence: Synthetic oligonucleotide
ugcucacgaaggcagaaau

SEQ ID NO: 2786163 - RNA, 19 nt, Artificial Sequence
  Description of Artificial Sequence: Synthetic oligonucleotide
ccuguuucaaaacaaaaca

SEQ ID NO: 2786164 - RNA, 19 nt, Artificial Sequence
  Description of Artificial Sequence: Synthetic oligonucleotide
gucgugggcagccacacug

SEQ ID NO: 2786165 - RNA, 19 nt, Artificial Sequence
  Description of Artificial Sequence: Synthetic oligonucleotide
guagacauuggauccccug

SEQ ID NO: 2786166 - RNA, 19 nt, Artificial Sequence
  Description of Artificial Sequence: Synthetic oligonucleotide
guaaccaguguucuuaacu

SEQ ID NO: 2786167 - RNA, 19 nt, Artificial Sequence
  Description of Artificial Sequence: Synthetic oligonucleotide
cagggugagaggucuaggc

SEQ ID NO: 2786168 - RNA, 19 nt, Artificial Sequence
  Description of Artificial Sequence: Synthetic oligonucleotide
gagagcuucugacgcuugg

SEQ ID NO: 2786169 - RNA, 19 nt, Artificial Sequence
  Description of Artificial Sequence: Synthetic oligonucleotide
caguguucuuaacuacugg

SEQ ID NO: 2786170 - RNA, 19 nt, Artificial Sequence
  Description of Artificial Sequence: Synthetic oligonucleotide
aaaggaagggucagcccag

SEQ ID NO: 2786171 - RNA, 19 nt, Artificial Sequence
  Description of Artificial Sequence: Synthetic oligonucleotide
auagaacucugguccuccg

SEQ ID NO: 2786172 - RNA, 19 nt, Artificial Sequence
  Description of Artificial Sequence: Synthetic oligonucleotide
gucggugagacucccauca

SEQ ID NO: 2786173 - RNA, 19 nt, Artificial Sequence
  Description of Artificial Sequence: Synthetic oligonucleotide
agguguaucucugugaguu

SEQ ID NO: 2786174 - RNA, 19 nt, Artificial Sequence
  Description of Artificial Sequence: Synthetic oligonucleotide
gaagggucagcccaguucu

SEQ ID NO: 2786175 - RNA, 19 nt, Artificial Sequence
  Description of Artificial Sequence: Synthetic oligonucleotide
ugggcuguacccuaacguc

SEQ ID NO: 2786176 - RNA, 19 nt, Artificial Sequence
  Description of Artificial Sequence: Synthetic oligonucleotide
agaguaaccaguguucuua

SEQ ID NO: 2786177 - RNA, 19 nt, Artificial Sequence
  Description of Artificial Sequence: Synthetic oligonucleotide
gagcuucugacgcuugggc

SEQ ID NO: 2786178 - RNA, 19 nt, Artificial Sequence
  Description of Artificial Sequence: Synthetic oligonucleotide
ucuuaacuacuggaguugu

SEQ ID NO: 2786179 - RNA, 19 nt, Artificial Sequence
  Description of Artificial Sequence: Synthetic oligonucleotide
uacacaugguucugagcug

SEQ ID NO: 2786180 - RNA, 19 nt, Artificial Sequence
  Description of Artificial Sequence: Synthetic oligonucleotide
ucagcagagccagagcugu

SEQ ID NO: 2786181 - RNA, 19 nt, Artificial Sequence
  Description of Artificial Sequence: Synthetic oligonucleotide
uucuagucggugagacucc

SEQ ID NO: 2786182 - RNA, 19 nt, Artificial Sequence
  Description of Artificial Sequence: Synthetic oligonucleotide
ugcugguaauagaacucug

SEQ ID NO: 2786183 - RNA, 19 nt, Artificial Sequence
  Description of Artificial Sequence: Synthetic oligonucleotide
gcagguguaucucugugag

SEQ ID NO: 2786184 - RNA, 19 nt, Artificial Sequence
  Description of Artificial Sequence: Synthetic oligonucleotide
agacauuggauccccugga

SEQ ID NO: 2786185 - RNA, 19 nt, Artificial Sequence
  Description of Artificial Sequence: Synthetic oligonucleotide
cuugggcuguacccuaacg

SEQ ID NO: 2786186 - RNA, 19 nt, Artificial Sequence
  Description of Artificial Sequence: Synthetic oligonucleotide
aagcuuuccacaaggccca

SEQ ID NO: 2786187 - RNA, 19 nt, Artificial Sequence
  Description of Artificial Sequence: Synthetic oligonucleotide
uguaucucugugaguucga

SEQ ID NO: 2786188 - RNA, 19 nt, Artificial Sequence
  Description of Artificial Sequence: Synthetic oligonucleotide
ccuggaaauggaauuacac

SEQ ID NO: 2786189 - RNA, 19 nt, Artificial Sequence
  Description of Artificial Sequence: Synthetic oligonucleotide
augugagugcugguaauag

SEQ ID NO: 2786190 - RNA, 19 nt, Artificial Sequence
  Description of Artificial Sequence: Synthetic oligonucleotide
cacgaaggcagaaaugcca

SEQ ID NO: 2786191 - RNA, 19 nt, Artificial Sequence
  Description of Artificial Sequence: Synthetic oligonucleotide
ggugagacucccaucagag

SEQ ID NO: 2786192 - RNA, 19 nt, Artificial Sequence
  Description of Artificial Sequence: Synthetic oligonucleotide
ucuaggcggcaugauaagc

SEQ ID NO: 2786193 - RNA, 19 nt, Artificial Sequence
  Description of Artificial Sequence: Synthetic oligonucleotide
gagugcugguaauagaacu

SEQ ID NO: 2786194 - RNA, 19 nt, Artificial Sequence
  Description of Artificial Sequence: Synthetic oligonucleotide
uagucggugagacucccau

SEQ ID NO: 2786195 - RNA, 19 nt, Artificial Sequence
  Description of Artificial Sequence: Synthetic oligonucleotide
auauauauauaugcaugua

SEQ ID NO: 2786196 - RNA, 19 nt, Artificial Sequence
  Description of Artificial Sequence: Synthetic oligonucleotide
agcuucugacgcuugggcu

SEQ ID NO: 2786197 - RNA, 19 nt, Artificial Sequence
  Description of Artificial Sequence: Synthetic oligonucleotide
uauaugcauguaugugagu

SEQ ID NO: 2786198 - RNA, 19 nt, Artificial Sequence
  Description of Artificial Sequence: Synthetic oligonucleotide
aaauggaauuacacauggu

SEQ ID NO: 2786199 - RNA, 19 nt, Artificial Sequence
  Description of Artificial Sequence: Synthetic oligonucleotide
aacaaacuauauauauaua

SEQ ID NO: 2786200 - RNA, 19 nt, Artificial Sequence
  Description of Artificial Sequence: Synthetic oligonucleotide
cuacuggaguuguuucuag

SEQ ID NO: 2786201 - RNA, 19 nt, Artificial Sequence
  Description of Artificial Sequence: Synthetic oligonucleotide
uccuccggaagaguaacca

SEQ ID NO: 2786202 - RNA, 19 nt, Artificial Sequence
  Description of Artificial Sequence: Synthetic oligonucleotide
gcugguaauagaacucugg

SEQ ID NO: 2786203 - RNA, 19 nt, Artificial Sequence
  Description of Artificial Sequence: Synthetic oligonucleotide
auuggauccccuggaaaug

SEQ ID NO: 2786204 - RNA, 19 nt, Artificial Sequence
  Description of Artificial Sequence: Synthetic oligonucleotide
acaaggcccaaaggaaggg

SEQ ID NO: 2786205 - RNA, 19 nt, Artificial Sequence
  Description of Artificial Sequence: Synthetic oligonucleotide
ucagagagcuucugacgcu

SEQ ID NO: 2786206 - RNA, 19 nt, Artificial Sequence
  Description of Artificial Sequence: Synthetic oligonucleotide
agagcuucugacgcuuggg

SEQ ID NO: 2786207 - RNA, 19 nt, Artificial Sequence
  Description of Artificial Sequence: Synthetic oligonucleotide
cuacaauaguuaguuccag

SEQ ID NO: 2786208 - RNA, 19 nt, Artificial Sequence
  Description of Artificial Sequence: Synthetic oligonucleotide
uggcagaggucagaaguag

SEQ ID NO: 2786209 - RNA, 19 nt, Artificial Sequence
  Description of Artificial Sequence: Synthetic oligonucleotide
acacugcucacgaaggcag

SEQ ID NO: 2786210 - RNA, 19 nt, Artificial Sequence
  Description of Artificial Sequence: Synthetic oligonucleotide
ggcagaaaugccaaaccag

SEQ ID NO: 2786211 - RNA, 19 nt, Artificial Sequence
  Description of Artificial Sequence: Synthetic oligonucleotide
ggaaauggaauuacacaug

SEQ ID NO: 2786212 - RNA, 19 nt, Artificial Sequence
  Description of Artificial Sequence: Synthetic oligonucleotide
cacagcucagcagagccag

SEQ ID NO: 2786213 - RNA, 19 nt, Artificial Sequence
  Description of Artificial Sequence: Synthetic oligonucleotide
guucugagcugccauguga

SEQ ID NO: 2786214 - RNA, 19 nt, Artificial Sequence
  Description of Artificial Sequence: Synthetic oligonucleotide
augguucugagcugccaug

SEQ ID NO: 2786215 - RNA, 19 nt, Artificial Sequence
  Description of Artificial Sequence: Synthetic oligonucleotide
uacuggaguuguuucuagu

SEQ ID NO: 2786216 - RNA, 19 nt, Artificial Sequence
  Description of Artificial Sequence: Synthetic oligonucleotide
acauuggauccccuggaaa

SEQ ID NO: 2786217 - RNA, 19 nt, Artificial Sequence
  Description of Artificial Sequence: Synthetic oligonucleotide
acucugguccuccggaaga

SEQ ID NO: 2786218 - RNA, 19 nt, Artificial Sequence
  Description of Artificial Sequence: Synthetic oligonucleotide
gaauuacacaugguucuga

SEQ ID NO: 2786219 - RNA, 19 nt, Artificial Sequence
  Description of Artificial Sequence: Synthetic oligonucleotide
auguaugugagugccuacu

SEQ ID NO: 2786220 - RNA, 19 nt, Artificial Sequence
  Description of Artificial Sequence: Synthetic oligonucleotide
cagagcugugcccacuccc

SEQ ID NO: 2786221 - RNA, 19 nt, Artificial Sequence
  Description of Artificial Sequence: Synthetic oligonucleotide
gagacucccaucagagagc

SEQ ID NO: 2786222 - RNA, 19 nt, Artificial Sequence
  Description of Artificial Sequence: Synthetic oligonucleotide
gcugugcccacucccaugg

SEQ ID NO: 2786223 - RNA, 19 nt, Artificial Sequence
  Description of Artificial Sequence: Synthetic oligonucleotide
agucggugagacucccauc

SEQ ID NO: 2786224 - RNA, 19 nt, Artificial Sequence
  Description of Artificial Sequence: Synthetic oligonucleotide
ccagcuuggucuacaauag

SEQ ID NO: 2786225 - RNA, 19 nt, Artificial Sequence
  Description of Artificial Sequence: Synthetic oligonucleotide
agugccuacugcuggcaga

SEQ ID NO: 2786226 - RNA, 19 nt, Artificial Sequence
  Description of Artificial Sequence: Synthetic oligonucleotide
cauguaugugagugccuac

SEQ ID NO: 2786227 - RNA, 19 nt, Artificial Sequence
  Description of Artificial Sequence: Synthetic oligonucleotide
cucagcagagccagagcug

SEQ ID NO: 2786228 - RNA, 19 nt, Artificial Sequence
  Description of Artificial Sequence: Synthetic oligonucleotide
ugcauguaugugagugccu

SEQ ID NO: 2786229 - RNA, 19 nt, Artificial Sequence
  Description of Artificial Sequence: Synthetic oligonucleotide
gcuucugacgcuugggcug

SEQ ID NO: 2786230 - RNA, 19 nt, Artificial Sequence
  Description of Artificial Sequence: Synthetic oligonucleotide
ucggugagacucccaucag

SEQ ID NO: 2786231 - RNA, 19 nt, Artificial Sequence
  Description of Artificial Sequence: Synthetic oligonucleotide
gcaugauaagcuuuccaca

SEQ ID NO: 2786232 - RNA, 19 nt, Artificial Sequence
  Description of Artificial Sequence: Synthetic oligonucleotide
ggcugcguagaccagggug

SEQ ID NO: 2786233 - RNA, 19 nt, Artificial Sequence
  Description of Artificial Sequence: Synthetic oligonucleotide
gaguuguuucuagucggug

SEQ ID NO: 2786234 - RNA, 19 nt, Artificial Sequence
  Description of Artificial Sequence: Synthetic oligonucleotide
cuguacccuaacgucgugg

SEQ ID NO: 2786235 - RNA, 19 nt, Artificial Sequence
  Description of Artificial Sequence: Synthetic oligonucleotide
accaguguucuuaacuacu

SEQ ID NO: 2786236 - RNA, 19 nt, Artificial Sequence
  Description of Artificial Sequence: Synthetic oligonucleotide
ucuagucggugagacuccc

SEQ ID NO: 2786237 - RNA, 19 nt, Artificial Sequence
  Description of Artificial Sequence: Synthetic oligonucleotide
ccaucagagagcuucugac

SEQ ID NO: 2786238 - RNA, 19 nt, Artificial Sequence
  Description of Artificial Sequence: Synthetic oligonucleotide
acccuaacgucgugggcag

SEQ ID NO: 2786239 - RNA, 19 nt, Artificial Sequence
  Description of Artificial Sequence: Synthetic oligonucleotide
uaauagaacucugguccuc

SEQ ID NO: 2786240 - RNA, 19 nt, Artificial Sequence
  Description of Artificial Sequence: Synthetic oligonucleotide
gcguagaccagggugagag

SEQ ID NO: 2786241 - RNA, 19 nt, Artificial Sequence
  Description of Artificial Sequence: Synthetic oligonucleotide
gagaggucuaggcggcaug

SEQ ID NO: 2786242 - RNA, 19 nt, Artificial Sequence
  Description of Artificial Sequence: Synthetic oligonucleotide
ucgugggcagccacacugc

SEQ ID NO: 2786243 - RNA, 19 nt, Artificial Sequence
  Description of Artificial Sequence: Synthetic oligonucleotide
gagugccuacugcuggcag

SEQ ID NO: 2786244 - RNA, 19 nt, Artificial Sequence
  Description of Artificial Sequence: Synthetic oligonucleotide
gucuaggcggcaugauaag

SEQ ID NO: 2786245 - RNA, 19 nt, Artificial Sequence
  Description of Artificial Sequence: Synthetic oligonucleotide
guaucucugugaguucgag

SEQ ID NO: 2786246 - RNA, 19 nt, Artificial Sequence
  Description of Artificial Sequence: Synthetic oligonucleotide
agcuuggucuacaauaguu

SEQ ID NO: 2786247 - RNA, 19 nt, Artificial Sequence
  Description of Artificial Sequence: Synthetic oligonucleotide
guaauagaacucugguccu

SEQ ID NO: 2786248 - RNA, 19 nt, Artificial Sequence
  Description of Artificial Sequence: Synthetic oligonucleotide
cugacgcuugggcuguacc

SEQ ID NO: 2786249 - RNA, 19 nt, Artificial Sequence
  Description of Artificial Sequence: Synthetic oligonucleotide
agacucccaucagagagcu

SEQ ID NO: 2786250 - RNA, 19 nt, Artificial Sequence
  Description of Artificial Sequence: Synthetic oligonucleotide
auggcugcguagaccaggg

SEQ ID NO: 2786251 - RNA, 19 nt, Artificial Sequence
  Description of Artificial Sequence: Synthetic oligonucleotide
ucugagcugccaugugagu

SEQ ID NO: 2786252 - RNA, 19 nt, Artificial Sequence
  Description of Artificial Sequence: Synthetic oligonucleotide
uaacgucgugggcagccac

SEQ ID NO: 2786253 - RNA, 19 nt, Artificial Sequence
  Description of Artificial Sequence: Synthetic oligonucleotide
acuacuggaguuguuucua

SEQ ID NO: 2786254 - RNA, 19 nt, Artificial Sequence
  Description of Artificial Sequence: Synthetic oligonucleotide
cugguaauagaacucuggu

SEQ ID NO: 2786255 - RNA, 19 nt, Artificial Sequence
  Description of Artificial Sequence: Synthetic oligonucleotide
ccacaaggcccaaaggaag

SEQ ID NO: 2786256 - RNA, 19 nt, Artificial Sequence
  Description of Artificial Sequence: Synthetic oligonucleotide
gacauuggauccccuggaa

SEQ ID NO: 2786257 - RNA, 19 nt, Artificial Sequence
  Description of Artificial Sequence: Synthetic oligonucleotide
uggauccccuggaaaugga

SEQ ID NO: 2786258 - RNA, 19 nt, Artificial Sequence
  Description of Artificial Sequence: Synthetic oligonucleotide
ggaagggucagcccaguuc

SEQ ID NO: 2786259 - RNA, 19 nt, Artificial Sequence
  Description of Artificial Sequence: Synthetic oligonucleotide
gaguaaccaguguucuuaa

SEQ ID NO: 2786260 - RNA, 19 nt, Artificial Sequence
  Description of Artificial Sequence: Synthetic oligonucleotide
acucccauggcugcguaga

SEQ ID NO: 2786261 - RNA, 19 nt, Artificial Sequence
  Description of Artificial Sequence: Synthetic oligonucleotide
agaccagggugagaggucu

SEQ ID NO: 2786262 - RNA, 19 nt, Artificial Sequence
  Description of Artificial Sequence: Synthetic oligonucleotide
gugccuacugcuggcagag

SEQ ID NO: 2786263 - RNA, 19 nt, Artificial Sequence
  Description of Artificial Sequence: Synthetic oligonucleotide
ugccaaaccagggcggcac

SEQ ID NO: 2786264 - RNA, 19 nt, Artificial Sequence
  Description of Artificial Sequence: Synthetic oligonucleotide
ugguccuccggaagaguaa

SEQ ID NO: 2786265 - RNA, 19 nt, Artificial Sequence
  Description of Artificial Sequence: Synthetic oligonucleotide
cuaggcggcaugauaagcu

SEQ ID NO: 2786266 - RNA, 19 nt, Artificial Sequence
  Description of Artificial Sequence: Synthetic oligonucleotide
cauuggauccccuggaaau

SEQ ID NO: 2786267 - RNA, 19 nt, Artificial Sequence
  Description of Artificial Sequence: Synthetic oligonucleotide
ccaguguucuuaacuacug

SEQ ID NO: 2786268 - RNA, 19 nt, Artificial Sequence
  Description of Artificial Sequence: Synthetic oligonucleotide
uuguuucuagucggugaga

SEQ ID NO: 2786269 - RNA, 19 nt, Artificial Sequence
  Description of Artificial Sequence: Synthetic oligonucleotide
gggcuguacccuaacgucg

SEQ ID NO: 2786270 - RNA, 19 nt, Artificial Sequence
  Description of Artificial Sequence: Synthetic oligonucleotide
uaggcggcaugauaagcuu

SEQ ID NO: 2786271 - RNA, 19 nt, Artificial Sequence
  Description of Artificial Sequence: Synthetic oligonucleotide
ugcuggcagaggucagaag

SEQ ID NO: 2786272 - RNA, 19 nt, Artificial Sequence
  Description of Artificial Sequence: Synthetic oligonucleotide
acgucgugggcagccacac

SEQ ID NO: 2786273 - RNA, 19 nt, Artificial Sequence
  Description of Artificial Sequence: Synthetic oligonucleotide
ggaauuacacaugguucug

SEQ ID NO: 2786274 - RNA, 19 nt, Artificial Sequence
  Description of Artificial Sequence: Synthetic oligonucleotide
cagcucagcagagccagag

SEQ ID NO: 2786275 - RNA, 19 nt, Artificial Sequence
  Description of Artificial Sequence: Synthetic oligonucleotide
accagggugagaggucuag

SEQ ID NO: 2786276 - RNA, 19 nt, Artificial Sequence
  Description of Artificial Sequence: Synthetic oligonucleotide
agaggucuaggcggcauga

SEQ ID NO: 2786277 - RNA, 19 nt, Artificial Sequence
  Description of Artificial Sequence: Synthetic oligonucleotide
gcuggcagaggucagaagu

SEQ ID NO: 2786278 - RNA, 19 nt, Artificial Sequence
  Description of Artificial Sequence: Synthetic oligonucleotide
ugagugccuacugcuggca

SEQ ID NO: 2786279 - RNA, 19 nt, Artificial Sequence
  Description of Artificial Sequence: Synthetic oligonucleotide
gcagaggucagaaguagac

SEQ ID NO: 2786280 - RNA, 19 nt, Artificial Sequence
  Description of Artificial Sequence: Synthetic oligonucleotide
cacaugguucugagcugcc

SEQ ID NO: 2786281 - RNA, 19 nt, Artificial Sequence
  Description of Artificial Sequence: Synthetic oligonucleotide
aaccagggcggcacagcuc

SEQ ID NO: 2786282 - RNA, 19 nt, Artificial Sequence
  Description of Artificial Sequence: Synthetic oligonucleotide
aggucuaggcggcaugaua

SEQ ID NO: 2786283 - RNA, 19 nt, Artificial Sequence
  Description of Artificial Sequence: Synthetic oligonucleotide
guacccuaacgucgugggc

SEQ ID NO: 2786284 - RNA, 19 nt, Artificial Sequence
  Description of Artificial Sequence: Synthetic oligonucleotide
ggcggcacagcucagcaga

SEQ ID NO: 2786285 - RNA, 19 nt, Artificial Sequence
  Description of Artificial Sequence: Synthetic oligonucleotide
caaaccagggcggcacagc

SEQ ID NO: 2786286 - RNA, 19 nt, Artificial Sequence
  Description of Artificial Sequence: Synthetic oligonucleotide
cuacugcuggcagagguca

SEQ ID NO: 2786287 - RNA, 19 nt, Artificial Sequence
  Description of Artificial Sequence: Synthetic oligonucleotide
aacgucgugggcagccaca

SEQ ID NO: 2786288 - RNA, 19 nt, Artificial Sequence
  Description of Artificial Sequence: Synthetic oligonucleotide
ggucagaaguagacauugg

SEQ ID NO: 2786289 - RNA, 19 nt, Artificial Sequence
  Description of Artificial Sequence: Synthetic oligonucleotide
ggucuaggcggcaugauaa

SEQ ID NO: 2786290 - RNA, 19 nt, Artificial Sequence
  Description of Artificial Sequence: Synthetic oligonucleotide
gccacacugcucacgaagg

SEQ ID NO: 2786291 - RNA, 19 nt, Artificial Sequence
  Description of Artificial Sequence: Synthetic oligonucleotide
augugagugccuacugcug

SEQ ID NO: 2786292 - RNA, 19 nt, Artificial Sequence
  Description of Artificial Sequence: Synthetic oligonucleotide
guagaccagggugagaggu

SEQ ID NO: 2786293 - RNA, 19 nt, Artificial Sequence
  Description of Artificial Sequence: Synthetic oligonucleotide
agagcugugcccacuccca

SEQ ID NO: 2786294 - RNA, 19 nt, Artificial Sequence
  Description of Artificial Sequence: Synthetic oligonucleotide
aagggucagcccaguucuc

SEQ ID NO: 2786295 - RNA, 19 nt, Artificial Sequence
  Description of Artificial Sequence: Synthetic oligonucleotide
cuccggaagaguaaccagu

SEQ ID NO: 2786296 - RNA, 19 nt, Artificial Sequence
  Description of Artificial Sequence: Synthetic oligonucleotide
agaccagcuuggucuacaa

SEQ ID NO: 2786297 - RNA, 19 nt, Artificial Sequence
  Description of Artificial Sequence: Synthetic oligonucleotide
cucugguccuccggaagag

SEQ ID NO: 2786298 - RNA, 19 nt, Artificial Sequence
  Description of Artificial Sequence: Synthetic oligonucleotide
ggugagaggucuaggcggc

SEQ ID NO: 2786299 - RNA, 19 nt, Artificial Sequence
  Description of Artificial Sequence: Synthetic oligonucleotide
aaggaagggucagcccagu

SEQ ID NO: 2786300 - RNA, 19 nt, Artificial Sequence
  Description of Artificial Sequence: Synthetic oligonucleotide
ugagaggucuaggcggcau

SEQ ID NO: 2786301 - RNA, 19 nt, Artificial Sequence
  Description of Artificial Sequence: Synthetic oligonucleotide
gugagacucccaucagaga

SEQ ID NO: 2786302 - RNA, 19 nt, Artificial Sequence
  Description of Artificial Sequence: Synthetic oligonucleotide
cacacugcucacgaaggca

SEQ ID NO: 2786303 - RNA, 19 nt, Artificial Sequence
  Description of Artificial Sequence: Synthetic oligonucleotide
agggucagcccaguucuca

SEQ ID NO: 2786304 - RNA, 19 nt, Artificial Sequence
  Description of Artificial Sequence: Synthetic oligonucleotide
cagaggucagaaguagaca

SEQ ID NO: 2786305 - RNA, 19 nt, Artificial Sequence
  Description of Artificial Sequence: Synthetic oligonucleotide
ucugguccuccggaagagu

SEQ ID NO: 2786306 - RNA, 19 nt, Artificial Sequence
  Description of Artificial Sequence: Synthetic oligonucleotide
cuggcagaggucagaagua

SEQ ID NO: 2786307 - RNA, 19 nt, Artificial Sequence
  Description of Artificial Sequence: Synthetic oligonucleotide
gcagccacacugcucacga

SEQ ID NO: 2786308 - RNA, 19 nt, Artificial Sequence
  Description of Artificial Sequence: Synthetic oligonucleotide
gcugcguagaccaggguga

SEQ ID NO: 2786309 - RNA, 19 nt, Artificial Sequence
  Description of Artificial Sequence: Synthetic oligonucleotide
acugcucacgaaggcagaa

SEQ ID NO: 2786310 - RNA, 19 nt, Artificial Sequence
  Description of Artificial Sequence: Synthetic oligonucleotide
ccuaacgucgugggcagcc

SEQ ID NO: 2786311 - RNA, 19 nt, Artificial Sequence
  Description of Artificial Sequence: Synthetic oligonucleotide
ucccaucagagagcuucug

SEQ ID NO: 2786312 - RNA, 19 nt, Artificial Sequence
  Description of Artificial Sequence: Synthetic oligonucleotide
gcucagcagagccagagcu

SEQ ID NO: 2786313 - RNA, 19 nt, Artificial Sequence
  Description of Artificial Sequence: Synthetic oligonucleotide
cacucccauggcugcguag

SEQ ID NO: 2786314 - RNA, 19 nt, Artificial Sequence
  Description of Artificial Sequence: Synthetic oligonucleotide
ccuccggaagaguaaccag

SEQ ID NO: 2786315 - RNA, 19 nt, Artificial Sequence
  Description of Artificial Sequence: Synthetic oligonucleotide
gcagagccagagcugugcc

SEQ ID NO: 2786316 - RNA, 19 nt, Artificial Sequence
  Description of Artificial Sequence: Synthetic oligonucleotide
cugguccuccggaagagua

SEQ ID NO: 2786317 - RNA, 19 nt, Artificial Sequence
  Description of Artificial Sequence: Synthetic oligonucleotide
gugcugguaauagaacucu

SEQ ID NO: 2786318 - RNA, 19 nt, Artificial Sequence
  Description of Artificial Sequence: Synthetic oligonucleotide
gguguaucucugugaguuc

SEQ ID NO: 2786319 - RNA, 19 nt, Artificial Sequence
  Description of Artificial Sequence: Synthetic oligonucleotide
gacgcuugggcuguacccu

SEQ ID NO: 2786320 - RNA, 19 nt, Artificial Sequence
  Description of Artificial Sequence: Synthetic oligonucleotide
guuucuagucggugagacu

SEQ ID NO: 2786321 - RNA, 19 nt, Artificial Sequence
  Description of Artificial Sequence: Synthetic oligonucleotide
ucugacgcuugggcuguac

SEQ ID NO: 2786322 - RNA, 19 nt, Artificial Sequence
  Description of Artificial Sequence: Synthetic oligonucleotide
aguagacauuggauccccu

SEQ ID NO: 2786323 - RNA, 19 nt, Artificial Sequence
  Description of Artificial Sequence: Synthetic oligonucleotide
cucccauggcugcguagac

SEQ ID NO: 2786324 - RNA, 19 nt, Artificial Sequence
  Description of Artificial Sequence: Synthetic oligonucleotide
cugcguagaccagggugag

SEQ ID NO: 2786325 - RNA, 19 nt, Artificial Sequence
  Description of Artificial Sequence: Synthetic oligonucleotide
gauccccuggaaauggaau

SEQ ID NO: 2786326 - RNA, 19 nt, Artificial Sequence
  Description of Artificial Sequence: Synthetic oligonucleotide
gcuuggucuacaauaguua

SEQ ID NO: 2786327 - RNA, 19 nt, Artificial Sequence
  Description of Artificial Sequence: Synthetic oligonucleotide
agagagcuucugacgcuug

SEQ ID NO: 2786328 - RNA, 19 nt, Artificial Sequence
  Description of Artificial Sequence: Synthetic oligonucleotide
ccuacugcuggcagagguc

SEQ ID NO: 2786329 - RNA, 19 nt, Artificial Sequence
  Description of Artificial Sequence: Synthetic oligonucleotide
gguccuccggaagaguaac

SEQ ID NO: 2786330 - RNA, 19 nt, Artificial Sequence
  Description of Artificial Sequence: Synthetic oligonucleotide
gcucacgaaggcagaaaug

SEQ ID NO: 2786331 - RNA, 19 nt, Artificial Sequence
  Description of Artificial Sequence: Synthetic oligonucleotide
ggcggcaugauaagcuuuc

SEQ ID NO: 2786332 - RNA, 19 nt, Artificial Sequence
  Description of Artificial Sequence: Synthetic oligonucleotide
ugccuacugcuggcagagg

SEQ ID NO: 2786333 - RNA, 19 nt, Artificial Sequence
  Description of Artificial Sequence: Synthetic oligonucleotide
cuagucggugagacuccca

SEQ ID NO: 2786334 - RNA, 19 nt, Artificial Sequence
  Description of Artificial Sequence: Synthetic oligonucleotide
ugcguagaccagggugaga

SEQ ID NO: 2786335 - RNA, 19 nt, Artificial Sequence
  Description of Artificial Sequence: Synthetic oligonucleotide
aggaagggucagcccaguu

SEQ ID NO: 2786336 - RNA, 19 nt, Artificial Sequence
  Description of Artificial Sequence: Synthetic oligonucleotide
ggcccaaaggaagggucag

SEQ ID NO: 2786337 - RNA, 19 nt, Artificial Sequence
  Description of Artificial Sequence: Synthetic oligonucleotide
gcauguaugugagugccua

SEQ ID NO: 2786338 - RNA, 19 nt, Artificial Sequence
  Description of Artificial Sequence: Synthetic oligonucleotide
guccuccggaagaguaacc

SEQ ID NO: 2786339 - RNA, 19 nt, Artificial Sequence
  Description of Artificial Sequence: Synthetic oligonucleotide
cagggcggcacagcucagc

SEQ ID NO: 2786340 - RNA, 19 nt, Artificial Sequence
  Description of Artificial Sequence: Synthetic oligonucleotide
uggcugcguagaccagggu

SEQ ID NO: 2786341 - RNA, 19 nt, Artificial Sequence
  Description of Artificial Sequence: Synthetic oligonucleotide
gagccagagcugugcccac

SEQ ID NO: 2786342 - RNA, 19 nt, Artificial Sequence
  Description of Artificial Sequence: Synthetic oligonucleotide
cacugcucacgaaggcaga

SEQ ID NO: 2786343 - RNA, 19 nt, Artificial Sequence
  Description of Artificial Sequence: Synthetic oligonucleotide
acgcuugggcuguacccua

SEQ ID NO: 2786344 - RNA, 19 nt, Artificial Sequence
  Description of Artificial Sequence: Synthetic oligonucleotide
cagcagagccagagcugug

SEQ ID NO: 2786345 - RNA, 19 nt, Artificial Sequence
  Description of Artificial Sequence: Synthetic oligonucleotide
augccaaaccagggcggca

SEQ ID NO: 2786346 - RNA, 19 nt, Artificial Sequence
  Description of Artificial Sequence: Synthetic oligonucleotide
cuaacgucgugggcagcca

SEQ ID NO: 2786347 - RNA, 19 nt, Artificial Sequence
  Description of Artificial Sequence: Synthetic oligonucleotide
cuuaacuacuggaguuguu

SEQ ID NO: 2786348 - RNA, 19 nt, Artificial Sequence
  Description of Artificial Sequence: Synthetic oligonucleotide
gccuacugcuggcagaggu

SEQ ID NO: 2786349 - RNA, 19 nt, Artificial Sequence
  Description of Artificial Sequence: Synthetic oligonucleotide
cccaucagagagcuucuga

SEQ ID NO: 2786350 - RNA, 19 nt, Artificial Sequence
  Description of Artificial Sequence: Synthetic oligonucleotide
ggcagaggucagaaguaga

SEQ ID NO: 2786351 - RNA, 19 nt, Artificial Sequence
  Description of Artificial Sequence: Synthetic oligonucleotide
gaggucagaaguagacauu

SEQ ID NO: 2786352 - RNA, 19 nt, Artificial Sequence
  Description of Artificial Sequence: Synthetic oligonucleotide
ccagggugagaggucuagg

SEQ ID NO: 2786353 - RNA, 19 nt, Artificial Sequence
  Description of Artificial Sequence: Synthetic oligonucleotide
gcuguacccuaacgucgug

SEQ ID NO: 2786354 - RNA, 19 nt, Artificial Sequence
  Description of Artificial Sequence: Synthetic oligonucleotide
gcuugggcuguacccuaac

SEQ ID NO: 2786355 - RNA, 19 nt, Artificial Sequence
  Description of Artificial Sequence: Synthetic oligonucleotide
ccagagcugugcccacucc

SEQ ID NO: 2786356 - RNA, 19 nt, Artificial Sequence
  Description of Artificial Sequence: Synthetic oligonucleotide
gaccagcuuggucuacaau

SEQ ID NO: 2786357 - RNA, 19 nt, Artificial Sequence
  Description of Artificial Sequence: Synthetic oligonucleotide
gugggcagccacacugcuc

SEQ ID NO: 2786358 - RNA, 19 nt, Artificial Sequence
  Description of Artificial Sequence: Synthetic oligonucleotide
gggcggcacagcucagcag

SEQ ID NO: 2786359 - RNA, 19 nt, Artificial Sequence
  Description of Artificial Sequence: Synthetic oligonucleotide
cugcuggcagaggucagaa

SEQ ID NO: 2786360 - RNA, 19 nt, Artificial Sequence
  Description of Artificial Sequence: Synthetic oligonucleotide
aggcggcaugauaagcuuu

SEQ ID NO: 2786361 - RNA, 19 nt, Artificial Sequence
  Description of Artificial Sequence: Synthetic oligonucleotide
cucccaucagagagcuucu

SEQ ID NO: 2786362 - RNA, 19 nt, Artificial Sequence
  Description of Artificial Sequence: Synthetic oligonucleotide
gcggcaugauaagcuuucc

SEQ ID NO: 2786363 - RNA, 19 nt, Artificial Sequence
  Description of Artificial Sequence: Synthetic oligonucleotide
cugcucacgaaggcagaaa

SEQ ID NO: 2786364 - RNA, 19 nt, Artificial Sequence
  Description of Artificial Sequence: Synthetic oligonucleotide
ggauccccuggaaauggaa

SEQ ID NO: 2786365 - RNA, 19 nt, Artificial Sequence
  Description of Artificial Sequence: Synthetic oligonucleotide
cuucugacgcuugggcugu

SEQ ID NO: 2786366 - RNA, 19 nt, Artificial Sequence
  Description of Artificial Sequence: Synthetic oligonucleotide
caaggcccaaaggaagggu

SEQ ID NO: 2786367 - RNA, 19 nt, Artificial Sequence
  Description of Artificial Sequence: Synthetic oligonucleotide
ggaguuguuucuagucggu

SEQ ID NO: 2786368 - RNA, 19 nt, Artificial Sequence
  Description of Artificial Sequence: Synthetic oligonucleotide
gcccaaaggaagggucagc

SEQ ID NO: 2786369 - RNA, 19 nt, Artificial Sequence
  Description of Artificial Sequence: Synthetic oligonucleotide
cagcuuggucuacaauagu

SEQ ID NO: 2786370 - RNA, 19 nt, Artificial Sequence
  Description of Artificial Sequence: Synthetic oligonucleotide
gagcugugcccacucccau

SEQ ID NO: 2786371 - RNA, 19 nt, Artificial Sequence
  Description of Artificial Sequence: Synthetic oligonucleotide
cagguguaucucugugagu

SEQ ID NO: 2786372 - RNA, 19 nt, Artificial Sequence
  Description of Artificial Sequence: Synthetic oligonucleotide
gugagaggucuaggcggca

SEQ ID NO: 2786373 - RNA, 19 nt, Artificial Sequence
  Description of Artificial Sequence: Synthetic oligonucleotide
gcggcacagcucagcagag

SEQ ID NO: 2786374 - RNA, 19 nt, Artificial Sequence
  Description of Artificial Sequence: Synthetic oligonucleotide
ggcuguacccuaacgucgu

SEQ ID NO: 2786375 - RNA, 19 nt, Artificial Sequence
  Description of Artificial Sequence: Synthetic oligonucleotide
gcacagcucagcagagcca

SEQ ID NO: 2786376 - RNA, 19 nt, Artificial Sequence
  Description of Artificial Sequence: Synthetic oligonucleotide
gccaaaccagggcggcaca

SEQ ID NO: 2786377 - RNA, 19 nt, Artificial Sequence
  Description of Artificial Sequence: Synthetic oligonucleotide
cagagagcuucugacgcuu

SEQ ID NO: 2786378 - RNA, 19 nt, Artificial Sequence
  Description of Artificial Sequence: Synthetic oligonucleotide
agcuuuccacaaggcccaa

SEQ ID NO: 2786379 - RNA, 19 nt, Artificial Sequence
  Description of Artificial Sequence: Synthetic oligonucleotide
gaggucuaggcggcaugau

SEQ ID NO: 2786380 - RNA, 19 nt, Artificial Sequence
  Description of Artificial Sequence: Synthetic oligonucleotide
cggcaugauaagcuuucca

SEQ ID NO: 2786381 - RNA, 19 nt, Artificial Sequence
  Description of Artificial Sequence: Synthetic oligonucleotide
cagccacacugcucacgaa

SEQ ID NO: 2786382 - RNA, 19 nt, Artificial Sequence
  Description of Artificial Sequence: Synthetic oligonucleotide
cggugagacucccaucaga

SEQ ID NO: 2786383 - RNA, 19 nt, Artificial Sequence
  Description of Artificial Sequence: Synthetic oligonucleotide
gaccagggugagaggucua

SEQ ID NO: 2786384 - RNA, 19 nt, Artificial Sequence
  Description of Artificial Sequence: Synthetic oligonucleotide
uucugacgcuugggcugua

SEQ ID NO: 2786385 - RNA, 19 nt, Artificial Sequence
  Description of Artificial Sequence: Synthetic oligonucleotide
cgaaggcagaaaugccaaa

SEQ ID NO: 2786386 - RNA, 19 nt, Artificial Sequence
  Description of Artificial Sequence: Synthetic oligonucleotide
gggcagccacacugcucac

SEQ ID NO: 2786387 - RNA, 19 nt, Artificial Sequence
  Description of Artificial Sequence: Synthetic oligonucleotide
gcuuuccacaaggcccaaa

SEQ ID NO: 2786388 - RNA, 19 nt, Artificial Sequence
  Description of Artificial Sequence: Synthetic oligonucleotide
ccagggcggcacagcucag

SEQ ID NO: 2786389 - RNA, 19 nt, Artificial Sequence
  Description of Artificial Sequence: Synthetic oligonucleotide
ccggaagaguaaccagugu

SEQ ID NO: 2786390 - RNA, 19 nt, Artificial Sequence
  Description of Artificial Sequence: Synthetic oligonucleotide
cccuaacgucgugggcagc

SEQ ID NO: 2786391 - RNA, 19 nt, Artificial Sequence
  Description of Artificial Sequence: Synthetic oligonucleotide
cgcuugggcuguacccuaa

SEQ ID NO: 2786392 - RNA, 19 nt, Artificial Sequence
  Description of Artificial Sequence: Synthetic oligonucleotide
ccacucccauggcugcgua

SEQ ID NO: 2786393 - RNA, 19 nt, Artificial Sequence
  Description of Artificial Sequence: Synthetic oligonucleotide
cgugggcagccacacugcu

SEQ ID NO: 2786394 - RNA, 19 nt, Artificial Sequence
  Description of Artificial Sequence: Synthetic oligonucleotide
cccacucccauggcugcgu

SEQ ID NO: 2786395 - RNA, 19 nt, Artificial Sequence
  Description of Artificial Sequence: Synthetic oligonucleotide
cgucgugggcagccacacu

SEQ ID NO: 2786396 - RNA, 19 nt, Artificial Sequence
  Description of Artificial Sequence: Synthetic oligonucleotide
gaaauggcuacucagaugg

SEQ ID NO: 2786397 - RNA, 19 nt, Artificial Sequence
  Description of Artificial Sequence: Synthetic oligonucleotide
aaaagcaaaacaauaacag

SEQ ID NO: 2786398 - RNA, 19 nt, Artificial Sequence
  Description of Artificial Sequence: Synthetic oligonucleotide
aauaacagaucaaaagucg

SEQ ID NO: 2786399 - RNA, 19 nt, Artificial Sequence
  Description of Artificial Sequence: Synthetic oligonucleotide
ugucauuuccugcagauag

SEQ ID NO: 2786400 - RNA, 19 nt, Artificial Sequence
  Description of Artificial Sequence: Synthetic oligonucleotide
ucaaaagucgcacuucagg

SEQ ID NO: 2786401 - RNA, 19 nt, Artificial Sequence
  Description of Artificial Sequence: Synthetic oligonucleotide
aucucuguggguuugaguc

SEQ ID NO: 2786402 - RNA, 19 nt, Artificial Sequence
  Description of Artificial Sequence: Synthetic oligonucleotide
uaguuugcaugccugaugg

SEQ ID NO: 2786403 - RNA, 19 nt, Artificial Sequence
  Description of Artificial Sequence: Synthetic oligonucleotide
aguaugggcacuugaaucg

SEQ ID NO: 2786404 - RNA, 19 nt, Artificial Sequence
  Description of Artificial Sequence: Synthetic oligonucleotide
uguauggcagcgcaggugg

SEQ ID NO: 2786405 - RNA, 19 nt, Artificial Sequence
  Description of Artificial Sequence: Synthetic oligonucleotide
uucagcaucaaucuguacu

SEQ ID NO: 2786406 - RNA, 19 nt, Artificial Sequence
  Description of Artificial Sequence: Synthetic oligonucleotide
aaagcaaaacaauaacaga

SEQ ID NO: 2786407 - RNA, 19 nt, Artificial Sequence
  Description of Artificial Sequence: Synthetic oligonucleotide
ucuacuucagcaucaaucu

SEQ ID NO: 2786408 - RNA, 19 nt, Artificial Sequence
  Description of Artificial Sequence: Synthetic oligonucleotide
agagcuguuauacagagaa

SEQ ID NO: 2786409 - RNA, 19 nt, Artificial Sequence
  Description of Artificial Sequence: Synthetic oligonucleotide
auuuccugcagauaguuug

SEQ ID NO: 2786410 - RNA, 19 nt, Artificial Sequence
  Description of Artificial Sequence: Synthetic oligonucleotide
aacagaucaaaagucgcac

SEQ ID NO: 2786411 - RNA, 19 nt, Artificial Sequence
  Description of Artificial Sequence: Synthetic oligonucleotide
agcuguuauacagagaaac

SEQ ID NO: 2786412 - RNA, 19 nt, Artificial Sequence
  Description of Artificial Sequence: Synthetic oligonucleotide
aauguuggguuugauuucg

SEQ ID NO: 2786413 - RNA, 19 nt, Artificial Sequence
  Description of Artificial Sequence: Synthetic oligonucleotide
uuugauuucgugaggucag

SEQ ID NO: 2786414 - RNA, 19 nt, Artificial Sequence
  Description of Artificial Sequence: Synthetic oligonucleotide
auuucgugaggucagucac

SEQ ID NO: 2786415 - RNA, 19 nt, Artificial Sequence
  Description of Artificial Sequence: Synthetic oligonucleotide
uuggguuugauuucgugag

SEQ ID NO: 2786416 - RNA, 19 nt, Artificial Sequence
  Description of Artificial Sequence: Synthetic oligonucleotide
aagcaaaacaauaacagau

SEQ ID NO: 2786417 - RNA, 19 nt, Artificial Sequence
  Description of Artificial Sequence: Synthetic oligonucleotide
ucaucuggaaagcuccugg

SEQ ID NO: 2786418 - RNA, 19 nt, Artificial Sequence
  Description of Artificial Sequence: Synthetic oligonucleotide
uguggugucagacccuugg

SEQ ID NO: 2786419 - RNA, 19 nt, Artificial Sequence
  Description of Artificial Sequence: Synthetic oligonucleotide
caaaagucgcacuucaggc

SEQ ID NO: 2786420 - RNA, 19 nt, Artificial Sequence
  Description of Artificial Sequence: Synthetic oligonucleotide
acggguacggccuuucucc

SEQ ID NO: 2786421 - RNA, 19 nt, Artificial Sequence
  Description of Artificial Sequence: Synthetic oligonucleotide
auaacagaucaaaagucgc

SEQ ID NO: 2786422 - RNA, 19 nt, Artificial Sequence
  Description of Artificial Sequence: Synthetic oligonucleotide
caauaacagaucaaaaguc

SEQ ID NO: 2786423 - RNA, 19 nt, Artificial Sequence
  Description of Artificial Sequence: Synthetic oligonucleotide
agcaucaaucuguacuugc

SEQ ID NO: 2786424 - RNA, 19 nt, Artificial Sequence
  Description of Artificial Sequence: Synthetic oligonucleotide
ucuggaaagcuccuggaug

SEQ ID NO: 2786425 - RNA, 19 nt, Artificial Sequence
  Description of Artificial Sequence: Synthetic oligonucleotide
uacuucagcaucaaucugu

SEQ ID NO: 2786426 - RNA, 19 nt, Artificial Sequence
  Description of Artificial Sequence: Synthetic oligonucleotide
aucuacuucagcaucaauc

SEQ ID NO: 2786427 - RNA, 19 nt, Artificial Sequence
  Description of Artificial Sequence: Synthetic oligonucleotide
acucagauggucuagccug

SEQ ID NO: 2786428 - RNA, 19 nt, Artificial Sequence
  Description of Artificial Sequence: Synthetic oligonucleotide
uggauguggugucagaccc

SEQ ID NO: 2786429 - RNA, 19 nt, Artificial Sequence
  Description of Artificial Sequence: Synthetic oligonucleotide
aaaagucgcacuucaggcu

SEQ ID NO: 2786430 - RNA, 19 nt, Artificial Sequence
  Description of Artificial Sequence: Synthetic oligonucleotide
auuguucggaaauggcuac

SEQ ID NO: 2786431 - RNA, 19 nt, Artificial Sequence
  Description of Artificial Sequence: Synthetic oligonucleotide
uaacagaucaaaagucgca

SEQ ID NO: 2786432 - RNA, 19 nt, Artificial Sequence
  Description of Artificial Sequence: Synthetic oligonucleotide
uucggaaauggcuacucag

SEQ ID NO: 2786433 - RNA, 19 nt, Artificial Sequence
  Description of Artificial Sequence: Synthetic oligonucleotide
aauggcuacucagaugguc

SEQ ID NO: 2786434 - RNA, 19 nt, Artificial Sequence
  Description of Artificial Sequence: Synthetic oligonucleotide
uugaaucgcagccugggca

SEQ ID NO: 2786435 - RNA, 19 nt, Artificial Sequence
  Description of Artificial Sequence: Synthetic oligonucleotide
uaaaucguuucccgcaagc

SEQ ID NO: 2786436 - RNA, 19 nt, Artificial Sequence
  Description of Artificial Sequence: Synthetic oligonucleotide
ucaggcuuuuaccuaaugu

SEQ ID NO: 2786437 - RNA, 19 nt, Artificial Sequence
  Description of Artificial Sequence: Synthetic oligonucleotide
cuguacuugcucuucaggc

SEQ ID NO: 2786438 - RNA, 19 nt, Artificial Sequence
  Description of Artificial Sequence: Synthetic oligonucleotide
aggagcagaaucuacuuca

SEQ ID NO: 2786439 - RNA, 19 nt, Artificial Sequence
  Description of Artificial Sequence: Synthetic oligonucleotide
acgugugugcaguaugggc

SEQ ID NO: 2786440 - RNA, 19 nt, Artificial Sequence
  Description of Artificial Sequence: Synthetic oligonucleotide
augccugauggauuguucg

SEQ ID NO: 2786441 - RNA, 19 nt, Artificial Sequence
  Description of Artificial Sequence: Synthetic oligonucleotide
ugcuaaaucguuucccgca

SEQ ID NO: 2786442 - RNA, 19 nt, Artificial Sequence
  Description of Artificial Sequence: Synthetic oligonucleotide
ggucuagccugcuaaaucg

SEQ ID NO: 2786443 - RNA, 19 nt, Artificial Sequence
  Description of Artificial Sequence: Synthetic oligonucleotide
uggguuugaguccagccug

SEQ ID NO: 2786444 - RNA, 19 nt, Artificial Sequence
  Description of Artificial Sequence: Synthetic oligonucleotide
cugcagauaguuugcaugc

SEQ ID NO: 2786445 - RNA, 19 nt, Artificial Sequence
  Description of Artificial Sequence: Synthetic oligonucleotide
agcaaaacaauaacagauc

SEQ ID NO: 2786446 - RNA, 19 nt, Artificial Sequence
  Description of Artificial Sequence: Synthetic oligonucleotide
uuucccgcaagcuuggcac

SEQ ID NO: 2786447 - RNA, 19 nt, Artificial Sequence
  Description of Artificial Sequence: Synthetic oligonucleotide
ugauggauuguucggaaau

SEQ ID NO: 2786448 - RNA, 19 nt, Artificial Sequence
  Description of Artificial Sequence: Synthetic oligonucleotide
ugaaucgcagccugggcag

SEQ ID NO: 2786449 - RNA, 19 nt, Artificial Sequence
  Description of Artificial Sequence: Synthetic oligonucleotide
agucacgugacguuuguca

SEQ ID NO: 2786450 - RNA, 19 nt, Artificial Sequence
  Description of Artificial Sequence: Synthetic oligonucleotide
aggucaucuggaaagcucc

SEQ ID NO: 2786451 - RNA, 19 nt, Artificial Sequence
  Description of Artificial Sequence: Synthetic oligonucleotide
uguacuugcucuucaggcu

SEQ ID NO: 2786452 - RNA, 19 nt, Artificial Sequence
  Description of Artificial Sequence: Synthetic oligonucleotide
uuucgugaggucagucacg

SEQ ID NO: 2786453 - RNA, 19 nt, Artificial Sequence
  Description of Artificial Sequence: Synthetic oligonucleotide
uuuuaccuaauguuggguu

SEQ ID NO: 2786454 - RNA, 19 nt, Artificial Sequence
  Description of Artificial Sequence: Synthetic oligonucleotide
aaagucgcacuucaggcuu

SEQ ID NO: 2786455 - RNA, 19 nt, Artificial Sequence
  Description of Artificial Sequence: Synthetic oligonucleotide
uuuccugcagauaguuugc

SEQ ID NO: 2786456 - RNA, 19 nt, Artificial Sequence
  Description of Artificial Sequence: Synthetic oligonucleotide
ucggaaauggcuacucaga

SEQ ID NO: 2786457 - RNA, 19 nt, Artificial Sequence
  Description of Artificial Sequence: Synthetic oligonucleotide
gaucaaaagucgcacuuca

SEQ ID NO: 2786458 - RNA, 19 nt, Artificial Sequence
  Description of Artificial Sequence: Synthetic oligonucleotide
ugacguuugucauuuccug

SEQ ID NO: 2786459 - RNA, 19 nt, Artificial Sequence
  Description of Artificial Sequence: Synthetic oligonucleotide
cuccagagcuguuauacag

SEQ ID NO: 2786460 - RNA, 19 nt, Artificial Sequence
  Description of Artificial Sequence: Synthetic oligonucleotide
uguggguuugaguccagcc

SEQ ID NO: 2786461 - RNA, 19 nt, Artificial Sequence
  Description of Artificial Sequence: Synthetic oligonucleotide
uggauuguucggaaauggc

SEQ ID NO: 2786462 - RNA, 19 nt, Artificial Sequence
  Description of Artificial Sequence: Synthetic oligonucleotide
aaucuguacuugcucuuca

SEQ ID NO: 2786463 - RNA, 19 nt, Artificial Sequence
  Description of Artificial Sequence: Synthetic oligonucleotide
auaguuugcaugccugaug

SEQ ID NO: 2786464 - RNA, 19 nt, Artificial Sequence
  Description of Artificial Sequence: Synthetic oligonucleotide
auggauuguucggaaaugg

SEQ ID NO: 2786465 - RNA, 19 nt, Artificial Sequence
  Description of Artificial Sequence: Synthetic oligonucleotide
ucagcaucaaucuguacuu

SEQ ID NO: 2786466 - RNA, 19 nt, Artificial Sequence
  Description of Artificial Sequence: Synthetic oligonucleotide
aaucguuucccgcaagcuu

SEQ ID NO: 2786467 - RNA, 19 nt, Artificial Sequence
  Description of Artificial Sequence: Synthetic oligonucleotide
gauuucgugaggucaguca

SEQ ID NO: 2786468 - RNA, 19 nt, Artificial Sequence
  Description of Artificial Sequence: Synthetic oligonucleotide
uuccgcuucaccacgugug

SEQ ID NO: 2786469 - RNA, 19 nt, Artificial Sequence
  Description of Artificial Sequence: Synthetic oligonucleotide
uggugucagacccuuggcc

SEQ ID NO: 2786470 - RNA, 19 nt, Artificial Sequence
  Description of Artificial Sequence: Synthetic oligonucleotide
ugcuuuccgcuucaccacg

SEQ ID NO: 2786471 - RNA, 19 nt, Artificial Sequence
  Description of Artificial Sequence: Synthetic oligonucleotide
uugcaugccugauggauug

SEQ ID NO: 2786472 - RNA, 19 nt, Artificial Sequence
  Description of Artificial Sequence: Synthetic oligonucleotide
guuggguuugauuucguga

SEQ ID NO: 2786473 - RNA, 19 nt, Artificial Sequence
  Description of Artificial Sequence: Synthetic oligonucleotide
uuuaccuaauguuggguuu

SEQ ID NO: 2786474 - RNA, 19 nt, Artificial Sequence
  Description of Artificial Sequence: Synthetic oligonucleotide
cuaauguuggguuugauuu

SEQ ID NO: 2786475 - RNA, 19 nt, Artificial Sequence
  Description of Artificial Sequence: Synthetic oligonucleotide
acguuugucauuuccugca

SEQ ID NO: 2786476 - RNA, 19 nt, Artificial Sequence
  Description of Artificial Sequence: Synthetic oligonucleotide
uggguuugauuucgugagg

SEQ ID NO: 2786477 - RNA, 19 nt, Artificial Sequence
  Description of Artificial Sequence: Synthetic oligonucleotide
agaucaaaagucgcacuuc

SEQ ID NO: 2786478 - RNA, 19 nt, Artificial Sequence
  Description of Artificial Sequence: Synthetic oligonucleotide
ugccugauggauuguucgg

SEQ ID NO: 2786479 - RNA, 19 nt, Artificial Sequence
  Description of Artificial Sequence: Synthetic oligonucleotide
aaaucguuucccgcaagcu

SEQ ID NO: 2786480 - RNA, 19 nt, Artificial Sequence
  Description of Artificial Sequence: Synthetic oligonucleotide
acuugaaucgcagccuggg

SEQ ID NO: 2786481 - RNA, 19 nt, Artificial Sequence
  Description of Artificial Sequence: Synthetic oligonucleotide
uuaccuaauguuggguuug

SEQ ID NO: 2786482 - RNA, 19 nt, Artificial Sequence
  Description of Artificial Sequence: Synthetic oligonucleotide
uccagagcuguuauacaga

SEQ ID NO: 2786483 - RNA, 19 nt, Artificial Sequence
  Description of Artificial Sequence: Synthetic oligonucleotide
uacucagauggucuagccu

SEQ ID NO: 2786484 - RNA, 19 nt, Artificial Sequence
  Description of Artificial Sequence: Synthetic oligonucleotide
cagauaguuugcaugccug

SEQ ID NO: 2786485 - RNA, 19 nt, Artificial Sequence
  Description of Artificial Sequence: Synthetic oligonucleotide
gauggauuguucggaaaug

SEQ ID NO: 2786486 - RNA, 19 nt, Artificial Sequence
  Description of Artificial Sequence: Synthetic oligonucleotide
uaauguuggguuugauuuc

SEQ ID NO: 2786487 - RNA, 19 nt, Artificial Sequence
  Description of Artificial Sequence: Synthetic oligonucleotide
uguuggguuugauuucgug

SEQ ID NO: 2786488 - RNA, 19 nt, Artificial Sequence
  Description of Artificial Sequence: Synthetic oligonucleotide
uugaggucugcuuuccgcu

SEQ ID NO: 2786489 - RNA, 19 nt, Artificial Sequence
  Description of Artificial Sequence: Synthetic oligonucleotide
agauggucuagccugcuaa

SEQ ID NO: 2786490 - RNA, 19 nt, Artificial Sequence
  Description of Artificial Sequence: Synthetic oligonucleotide
uggucuagccugcuaaauc

SEQ ID NO: 2786491 - RNA, 19 nt, Artificial Sequence
  Description of Artificial Sequence: Synthetic oligonucleotide
uuugcaugccugauggauu

SEQ ID NO: 2786492 - RNA, 19 nt, Artificial Sequence
  Description of Artificial Sequence: Synthetic oligonucleotide
guuugauuucgugagguca

SEQ ID NO: 2786493 - RNA, 19 nt, Artificial Sequence
  Description of Artificial Sequence: Synthetic oligonucleotide
acuucaggcuuuuaccuaa

SEQ ID NO: 2786494 - RNA, 19 nt, Artificial Sequence
  Description of Artificial Sequence: Synthetic oligonucleotide
acagaucaaaagucgcacu

SEQ ID NO: 2786495 - RNA, 19 nt, Artificial Sequence
  Description of Artificial Sequence: Synthetic oligonucleotide
agccugcuaaaucguuucc

SEQ ID NO: 2786496 - RNA, 19 nt, Artificial Sequence
  Description of Artificial Sequence: Synthetic oligonucleotide
ucgcacuucaggcuuuuac

SEQ ID NO: 2786497 - RNA, 19 nt, Artificial Sequence
  Description of Artificial Sequence: Synthetic oligonucleotide
cuggauguggugucagacc

SEQ ID NO: 2786498 - RNA, 19 nt, Artificial Sequence
  Description of Artificial Sequence: Synthetic oligonucleotide
cagaaucuacuucagcauc

SEQ ID NO: 2786499 - RNA, 19 nt, Artificial Sequence
  Description of Artificial Sequence: Synthetic oligonucleotide
aagcuuggcacggguacgg

SEQ ID NO: 2786500 - RNA, 19 nt, Artificial Sequence
  Description of Artificial Sequence: Synthetic oligonucleotide
uggccauacugguagccag

SEQ ID NO: 2786501 - RNA, 19 nt, Artificial Sequence
  Description of Artificial Sequence: Synthetic oligonucleotide
gauuguucggaaauggcua

SEQ ID NO: 2786502 - RNA, 19 nt, Artificial Sequence
  Description of Artificial Sequence: Synthetic oligonucleotide
aggcuuuuaccuaauguug

SEQ ID NO: 2786503 - RNA, 19 nt, Artificial Sequence
  Description of Artificial Sequence: Synthetic oligonucleotide
cuacucagauggucuagcc

SEQ ID NO: 2786504 - RNA, 19 nt, Artificial Sequence
  Description of Artificial Sequence: Synthetic oligonucleotide
ugaggucagucacgugacg

SEQ ID NO: 2786505 - RNA, 19 nt, Artificial Sequence
  Description of Artificial Sequence: Synthetic oligonucleotide
ggcuuuuaccuaauguugg

SEQ ID NO: 2786506 - RNA, 19 nt, Artificial Sequence
  Description of Artificial Sequence: Synthetic oligonucleotide
aucguuucccgcaagcuug

SEQ ID NO: 2786507 - RNA, 19 nt, Artificial Sequence
  Description of Artificial Sequence: Synthetic oligonucleotide
gcuuuuaccuaauguuggg

SEQ ID NO: 2786508 - RNA, 19 nt, Artificial Sequence
  Description of Artificial Sequence: Synthetic oligonucleotide
uauggcagcgcagguggcg

SEQ ID NO: 2786509 - RNA, 19 nt, Artificial Sequence
  Description of Artificial Sequence: Synthetic oligonucleotide
ucaggcugggaaacguugu

SEQ ID NO: 2786510 - RNA, 19 nt, Artificial Sequence
  Description of Artificial Sequence: Synthetic oligonucleotide
ucguuucccgcaagcuugg

SEQ ID NO: 2786511 - RNA, 19 nt, Artificial Sequence
  Description of Artificial Sequence: Synthetic oligonucleotide
agaaucuacuucagcauca

SEQ ID NO: 2786512 - RNA, 19 nt, Artificial Sequence
  Description of Artificial Sequence: Synthetic oligonucleotide
cugcuaaaucguuucccgc

SEQ ID NO: 2786513 - RNA, 19 nt, Artificial Sequence
  Description of Artificial Sequence: Synthetic oligonucleotide
caucaaucuguacuugcuc

SEQ ID NO: 2786514 - RNA, 19 nt, Artificial Sequence
  Description of Artificial Sequence: Synthetic oligonucleotide
caaaacaauaacagaucaa

SEQ ID NO: 2786515 - RNA, 19 nt, Artificial Sequence
  Description of Artificial Sequence: Synthetic oligonucleotide
uucaggcuuuuaccuaaug

SEQ ID NO: 2786516 - RNA, 19 nt, Artificial Sequence
  Description of Artificial Sequence: Synthetic oligonucleotide
uacugguagccagugggag

SEQ ID NO: 2786517 - RNA, 19 nt, Artificial Sequence
  Description of Artificial Sequence: Synthetic oligonucleotide
uagccugcuaaaucguuuc

SEQ ID NO: 2786518 - RNA, 19 nt, Artificial Sequence
  Description of Artificial Sequence: Synthetic oligonucleotide
uuuccgcuucaccacgugu

SEQ ID NO: 2786519 - RNA, 19 nt, Artificial Sequence
  Description of Artificial Sequence: Synthetic oligonucleotide
uucaccacgugugugcagu

SEQ ID NO: 2786520 - RNA, 19 nt, Artificial Sequence
  Description of Artificial Sequence: Synthetic oligonucleotide
aaucuacuucagcaucaau

SEQ ID NO: 2786521 - RNA, 19 nt, Artificial Sequence
  Description of Artificial Sequence: Synthetic oligonucleotide
gggcaggucaucuggaaag

SEQ ID NO: 2786522 - RNA, 19 nt, Artificial Sequence
  Description of Artificial Sequence: Synthetic oligonucleotide
cuugaaucgcagccugggc

SEQ ID NO: 2786523 - RNA, 19 nt, Artificial Sequence
  Description of Artificial Sequence: Synthetic oligonucleotide
accacgugugugcaguaug

SEQ ID NO: 2786524 - RNA, 19 nt, Artificial Sequence
  Description of Artificial Sequence: Synthetic oligonucleotide
guuugaggucugcuuuccg

SEQ ID NO: 2786525 - RNA, 19 nt, Artificial Sequence
  Description of Artificial Sequence: Synthetic oligonucleotide
uaugggcacuugaaucgca

SEQ ID NO: 2786526 - RNA, 19 nt, Artificial Sequence
  Description of Artificial Sequence: Synthetic oligonucleotide
ucaaucuguacuugcucuu

SEQ ID NO: 2786527 - RNA, 19 nt, Artificial Sequence
  Description of Artificial Sequence: Synthetic oligonucleotide
uucgugaggucagucacgu

SEQ ID NO: 2786528 - RNA, 19 nt, Artificial Sequence
  Description of Artificial Sequence: Synthetic oligonucleotide
cucagauggucuagccugc

SEQ ID NO: 2786529 - RNA, 19 nt, Artificial Sequence
  Description of Artificial Sequence: Synthetic oligonucleotide
ucagucacgugacguuugu

SEQ ID NO: 2786530 - RNA, 19 nt, Artificial Sequence
  Description of Artificial Sequence: Synthetic oligonucleotide
ccugcagauaguuugcaug

SEQ ID NO: 2786531 - RNA, 19 nt, Artificial Sequence
  Description of Artificial Sequence: Synthetic oligonucleotide
caggucaucuggaaagcuc

SEQ ID NO: 2786532 - RNA, 19 nt, Artificial Sequence
  Description of Artificial Sequence: Synthetic oligonucleotide
cuaaaucguuucccgcaag

SEQ ID NO: 2786533 - RNA, 19 nt, Artificial Sequence
  Description of Artificial Sequence: Synthetic oligonucleotide
ucuucaggcugggaaacgu

SEQ ID NO: 2786534 - RNA, 19 nt, Artificial Sequence
  Description of Artificial Sequence: Synthetic oligonucleotide
ugggaggagcagaaucuac

SEQ ID NO: 2786535 - RNA, 19 nt, Artificial Sequence
  Description of Artificial Sequence: Synthetic oligonucleotide
ucauuuccugcagauaguu

SEQ ID NO: 2786536 - RNA, 19 nt, Artificial Sequence
  Description of Artificial Sequence: Synthetic oligonucleotide
cagugggaggagcagaauc

SEQ ID NO: 2786537 - RNA, 19 nt, Artificial Sequence
  Description of Artificial Sequence: Synthetic oligonucleotide
ucuagccugcuaaaucguu

SEQ ID NO: 2786538 - RNA, 19 nt, Artificial Sequence
  Description of Artificial Sequence: Synthetic oligonucleotide
uucccgcaagcuuggcacg

SEQ ID NO: 2786539 - RNA, 19 nt, Artificial Sequence
  Description of Artificial Sequence: Synthetic oligonucleotide
uguucggaaauggcuacuc

SEQ ID NO: 2786540 - RNA, 19 nt, Artificial Sequence
  Description of Artificial Sequence: Synthetic oligonucleotide
auggcuacucagauggucu

SEQ ID NO: 2786541 - RNA, 19 nt, Artificial Sequence
  Description of Artificial Sequence: Synthetic oligonucleotide
ugggcacuugaaucgcagc

SEQ ID NO: 2786542 - RNA, 19 nt, Artificial Sequence
  Description of Artificial Sequence: Synthetic oligonucleotide
ggugucagacccuuggcca

SEQ ID NO: 2786543 - RNA, 19 nt, Artificial Sequence
  Description of Artificial Sequence: Synthetic oligonucleotide
caugccugauggauuguuc

SEQ ID NO: 2786544 - RNA, 19 nt, Artificial Sequence
  Description of Artificial Sequence: Synthetic oligonucleotide
ccuuucuccuguauggcag

SEQ ID NO: 2786545 - RNA, 19 nt, Artificial Sequence
  Description of Artificial Sequence: Synthetic oligonucleotide
cacuugaaucgcagccugg

SEQ ID NO: 2786546 - RNA, 19 nt, Artificial Sequence
  Description of Artificial Sequence: Synthetic oligonucleotide
ugggcaggucaucuggaaa

SEQ ID NO: 2786547 - RNA, 19 nt, Artificial Sequence
  Description of Artificial Sequence: Synthetic oligonucleotide
gggcacuugaaucgcagcc

SEQ ID NO: 2786548 - RNA, 19 nt, Artificial Sequence
  Description of Artificial Sequence: Synthetic oligonucleotide
uuggccauacugguagcca

SEQ ID NO: 2786549 - RNA, 19 nt, Artificial Sequence
  Description of Artificial Sequence: Synthetic oligonucleotide
cugcuuuccgcuucaccac

SEQ ID NO: 2786550 - RNA, 19 nt, Artificial Sequence
  Description of Artificial Sequence: Synthetic oligonucleotide
cuuggccauacugguagcc

SEQ ID NO: 2786551 - RNA, 19 nt, Artificial Sequence
  Description of Artificial Sequence: Synthetic oligonucleotide
gugugugcaguaugggcac

SEQ ID NO: 2786552 - RNA, 19 nt, Artificial Sequence
  Description of Artificial Sequence: Synthetic oligonucleotide
aucaaaagucgcacuucag

SEQ ID NO: 2786553 - RNA, 19 nt, Artificial Sequence
  Description of Artificial Sequence: Synthetic oligonucleotide
guuugucauuuccugcaga

SEQ ID NO: 2786554 - RNA, 19 nt, Artificial Sequence
  Description of Artificial Sequence: Synthetic oligonucleotide
caagcuuggcacggguacg

SEQ ID NO: 2786555 - RNA, 19 nt, Artificial Sequence
  Description of Artificial Sequence: Synthetic oligonucleotide
gauggucuagccugcuaaa

SEQ ID NO: 2786556 - RNA, 19 nt, Artificial Sequence
  Description of Artificial Sequence: Synthetic oligonucleotide
cuggaaagcuccuggaugu

SEQ ID NO: 2786557 - RNA, 19 nt, Artificial Sequence
  Description of Artificial Sequence: Synthetic oligonucleotide
guaugggcacuugaaucgc

SEQ ID NO: 2786558 - RNA, 19 nt, Artificial Sequence
  Description of Artificial Sequence: Synthetic oligonucleotide
ggaaagcuccuggaugugg

SEQ ID NO: 2786559 - RNA, 19 nt, Artificial Sequence
  Description of Artificial Sequence: Synthetic oligonucleotide
cccuuggccauacugguag

SEQ ID NO: 2786560 - RNA, 19 nt, Artificial Sequence
  Description of Artificial Sequence: Synthetic oligonucleotide
gcaagcuuggcacggguac

SEQ ID NO: 2786561 - RNA, 19 nt, Artificial Sequence
  Description of Artificial Sequence: Synthetic oligonucleotide
ugugcaguaugggcacuug

SEQ ID NO: 2786562 - RNA, 19 nt, Artificial Sequence
  Description of Artificial Sequence: Synthetic oligonucleotide
ugauuucgugaggucaguc

SEQ ID NO: 2786563 - RNA, 19 nt, Artificial Sequence
  Description of Artificial Sequence: Synthetic oligonucleotide
uccugcagauaguuugcau

SEQ ID NO: 2786564 - RNA, 19 nt, Artificial Sequence
  Description of Artificial Sequence: Synthetic oligonucleotide
caaucuguacuugcucuuc

SEQ ID NO: 2786565 - RNA, 19 nt, Artificial Sequence
  Description of Artificial Sequence: Synthetic oligonucleotide
caggcuuuuaccuaauguu

SEQ ID NO: 2786566 - RNA, 19 nt, Artificial Sequence
  Description of Artificial Sequence: Synthetic oligonucleotide
guggugucagacccuuggc

SEQ ID NO: 2786567 - RNA, 19 nt, Artificial Sequence
  Description of Artificial Sequence: Synthetic oligonucleotide
guucggaaauggcuacuca

SEQ ID NO: 2786568 - RNA, 19 nt, Artificial Sequence
  Description of Artificial Sequence: Synthetic oligonucleotide
ccacgugugugcaguaugg

SEQ ID NO: 2786569 - RNA, 19 nt, Artificial Sequence
  Description of Artificial Sequence: Synthetic oligonucleotide
ucccgcaagcuuggcacgg

SEQ ID NO: 2786570 - RNA, 19 nt, Artificial Sequence
  Description of Artificial Sequence: Synthetic oligonucleotide
guuucccgcaagcuuggca

SEQ ID NO: 2786571 - RNA, 19 nt, Artificial Sequence
  Description of Artificial Sequence: Synthetic oligonucleotide
cgcacuucaggcuuuuacc

SEQ ID NO: 2786572 - RNA, 19 nt, Artificial Sequence
  Description of Artificial Sequence: Synthetic oligonucleotide
cacgugugugcaguauggg

SEQ ID NO: 2786573 - RNA, 19 nt, Artificial Sequence
  Description of Artificial Sequence: Synthetic oligonucleotide
caucuggaaagcuccugga

SEQ ID NO: 2786574 - RNA, 19 nt, Artificial Sequence
  Description of Artificial Sequence: Synthetic oligonucleotide
uugauuucgugaggucagu

SEQ ID NO: 2786575 - RNA, 19 nt, Artificial Sequence
  Description of Artificial Sequence: Synthetic oligonucleotide
augggcacuugaaucgcag

SEQ ID NO: 2786576 - RNA, 19 nt, Artificial Sequence
  Description of Artificial Sequence: Synthetic oligonucleotide
aguuugcaugccugaugga

SEQ ID NO: 2786577 - RNA, 19 nt, Artificial Sequence
  Description of Artificial Sequence: Synthetic oligonucleotide
cuguauggcagcgcaggug

SEQ ID NO: 2786578 - RNA, 19 nt, Artificial Sequence
  Description of Artificial Sequence: Synthetic oligonucleotide
uuccugcagauaguuugca

SEQ ID NO: 2786579 - RNA, 19 nt, Artificial Sequence
  Description of Artificial Sequence: Synthetic oligonucleotide
cucuucaggcugggaaacg

SEQ ID NO: 2786580 - RNA, 19 nt, Artificial Sequence
  Description of Artificial Sequence: Synthetic oligonucleotide
ucgcagccugggcagguca

SEQ ID NO: 2786581 - RNA, 19 nt, Artificial Sequence
  Description of Artificial Sequence: Synthetic oligonucleotide
aggcugggaaacguuguug

SEQ ID NO: 2786582 - RNA, 19 nt, Artificial Sequence
  Description of Artificial Sequence: Synthetic oligonucleotide
gaaucgcagccugggcagg

SEQ ID NO: 2786583 - RNA, 19 nt, Artificial Sequence
  Description of Artificial Sequence: Synthetic oligonucleotide
gaaucuacuucagcaucaa

SEQ ID NO: 2786584 - RNA, 19 nt, Artificial Sequence
  Description of Artificial Sequence: Synthetic oligonucleotide
ucacgugacguuugucauu

SEQ ID NO: 2786585 - RNA, 19 nt, Artificial Sequence
  Description of Artificial Sequence: Synthetic oligonucleotide
cuucagcaucaaucuguac

SEQ ID NO: 2786586 - RNA, 19 nt, Artificial Sequence
  Description of Artificial Sequence: Synthetic oligonucleotide
gcacuugaaucgcagccug

SEQ ID NO: 2786587 - RNA, 19 nt, Artificial Sequence
  Description of Artificial Sequence: Synthetic oligonucleotide
aguuccuggacagccucca

SEQ ID NO: 2786588 - RNA, 19 nt, Artificial Sequence
  Description of Artificial Sequence: Synthetic oligonucleotide
gccugggcaggucaucugg

SEQ ID NO: 2786589 - RNA, 19 nt, Artificial Sequence
  Description of Artificial Sequence: Synthetic oligonucleotide
cugguagccagugggagga

SEQ ID NO: 2786590 - RNA, 19 nt, Artificial Sequence
  Description of Artificial Sequence: Synthetic oligonucleotide
uccuggauguggugucaga

SEQ ID NO: 2786591 - RNA, 19 nt, Artificial Sequence
  Description of Artificial Sequence: Synthetic oligonucleotide
uuguucggaaauggcuacu

SEQ ID NO: 2786592 - RNA, 19 nt, Artificial Sequence
  Description of Artificial Sequence: Synthetic oligonucleotide
aggucagucacgugacguu

SEQ ID NO: 2786593 - RNA, 19 nt, Artificial Sequence
  Description of Artificial Sequence: Synthetic oligonucleotide
uaccuaauguuggguuuga

SEQ ID NO: 2786594 - RNA, 19 nt, Artificial Sequence
  Description of Artificial Sequence: Synthetic oligonucleotide
gucaucuggaaagcuccug

SEQ ID NO: 2786595 - RNA, 19 nt, Artificial Sequence
  Description of Artificial Sequence: Synthetic oligonucleotide
uggcguuugaggucugcuu

SEQ ID NO: 2786596 - RNA, 19 nt, Artificial Sequence
  Description of Artificial Sequence: Synthetic oligonucleotide
guggguuugaguccagccu

SEQ ID NO: 2786597 - RNA, 19 nt, Artificial Sequence
  Description of Artificial Sequence: Synthetic oligonucleotide
gugaggucagucacgugac

SEQ ID NO: 2786598 - RNA, 19 nt, Artificial Sequence
  Description of Artificial Sequence: Synthetic oligonucleotide
aaucgcagccugggcaggu

SEQ ID NO: 2786599 - RNA, 19 nt, Artificial Sequence
  Description of Artificial Sequence: Synthetic oligonucleotide
cgugacguuugucauuucc

SEQ ID NO: 2786600 - RNA, 19 nt, Artificial Sequence
  Description of Artificial Sequence: Synthetic oligonucleotide
ugaggucugcuuuccgcuu

SEQ ID NO: 2786601 - RNA, 19 nt, Artificial Sequence
  Description of Artificial Sequence: Synthetic oligonucleotide
cuuuccgcuucaccacgug

SEQ ID NO: 2786602 - RNA, 19 nt, Artificial Sequence
  Description of Artificial Sequence: Synthetic oligonucleotide
cuucaccacgugugugcag

SEQ ID NO: 2786603 - RNA, 19 nt, Artificial Sequence
  Description of Artificial Sequence: Synthetic oligonucleotide
uggaaagcuccuggaugug

SEQ ID NO: 2786604 - RNA, 19 nt, Artificial Sequence
  Description of Artificial Sequence: Synthetic oligonucleotide
uugucauuuccugcagaua

SEQ ID NO: 2786605 - RNA, 19 nt, Artificial Sequence
  Description of Artificial Sequence: Synthetic oligonucleotide
guagccagugggaggagca

SEQ ID NO: 2786606 - RNA, 19 nt, Artificial Sequence
  Description of Artificial Sequence: Synthetic oligonucleotide
uggcuacucagauggucua

SEQ ID NO: 2786607 - RNA, 19 nt, Artificial Sequence
  Description of Artificial Sequence: Synthetic oligonucleotide
gccuccagagcuguuauac

SEQ ID NO: 2786608 - RNA, 19 nt, Artificial Sequence
  Description of Artificial Sequence: Synthetic oligonucleotide
gguuugauuucgugagguc

SEQ ID NO: 2786609 - RNA, 19 nt, Artificial Sequence
  Description of Artificial Sequence: Synthetic oligonucleotide
cacggguacggccuuucuc

SEQ ID NO: 2786610 - RNA, 19 nt, Artificial Sequence
  Description of Artificial Sequence: Synthetic oligonucleotide
ggagcagaaucuacuucag

SEQ ID NO: 2786611 - RNA, 19 nt, Artificial Sequence
  Description of Artificial Sequence: Synthetic oligonucleotide
gucagucacgugacguuug

SEQ ID NO: 2786612 - RNA, 19 nt, Artificial Sequence
  Description of Artificial Sequence: Synthetic oligonucleotide
cuuggcacggguacggccu

SEQ ID NO: 2786613 - RNA, 19 nt, Artificial Sequence
  Description of Artificial Sequence: Synthetic oligonucleotide
gacccuuggccauacuggu

SEQ ID NO: 2786614 - RNA, 19 nt, Artificial Sequence
  Description of Artificial Sequence: Synthetic oligonucleotide
guuugcaugccugauggau

SEQ ID NO: 2786615 - RNA, 19 nt, Artificial Sequence
  Description of Artificial Sequence: Synthetic oligonucleotide
acuucagcaucaaucugua

SEQ ID NO: 2786616 - RNA, 19 nt, Artificial Sequence
  Description of Artificial Sequence: Synthetic oligonucleotide
gauaguuugcaugccugau

SEQ ID NO: 2786617 - RNA, 19 nt, Artificial Sequence
  Description of Artificial Sequence: Synthetic oligonucleotide
gcuacucagauggucuagc

SEQ ID NO: 2786618 - RNA, 19 nt, Artificial Sequence
  Description of Artificial Sequence: Synthetic oligonucleotide
ggauuguucggaaauggcu

SEQ ID NO: 2786619 - RNA, 19 nt, Artificial Sequence
  Description of Artificial Sequence: Synthetic oligonucleotide
cgugaggucagucacguga

SEQ ID NO: 2786620 - RNA, 19 nt, Artificial Sequence
  Description of Artificial Sequence: Synthetic oligonucleotide
ucagauggucuagccugcu

SEQ ID NO: 2786621 - RNA, 19 nt, Artificial Sequence
  Description of Artificial Sequence: Synthetic oligonucleotide
cugauggauuguucggaaa

SEQ ID NO: 2786622 - RNA, 19 nt, Artificial Sequence
  Description of Artificial Sequence: Synthetic oligonucleotide
gaggucagucacgugacgu

SEQ ID NO: 2786623 - RNA, 19 nt, Artificial Sequence
  Description of Artificial Sequence: Synthetic oligonucleotide
gugcaguaugggcacuuga

SEQ ID NO: 2786624 - RNA, 19 nt, Artificial Sequence
  Description of Artificial Sequence: Synthetic oligonucleotide
auggucuagccugcuaaau

SEQ ID NO: 2786625 - RNA, 19 nt, Artificial Sequence
  Description of Artificial Sequence: Synthetic oligonucleotide
cgugugugcaguaugggca

SEQ ID NO: 2786626 - RNA, 19 nt, Artificial Sequence
  Description of Artificial Sequence: Synthetic oligonucleotide
uacggccuuucuccuguau

SEQ ID NO: 2786627 - RNA, 19 nt, Artificial Sequence
  Description of Artificial Sequence: Synthetic oligonucleotide
gcuaaaucguuucccgcaa

SEQ ID NO: 2786628 - RNA, 19 nt, Artificial Sequence
  Description of Artificial Sequence: Synthetic oligonucleotide
cagaucaaaagucgcacuu

SEQ ID NO: 2786629 - RNA, 19 nt, Artificial Sequence
  Description of Artificial Sequence: Synthetic oligonucleotide
gugacguuugucauuuccu

SEQ ID NO: 2786630 - RNA, 19 nt, Artificial Sequence
  Description of Artificial Sequence: Synthetic oligonucleotide
cuuuuaccuaauguugggu

SEQ ID NO: 2786631 - RNA, 19 nt, Artificial Sequence
  Description of Artificial Sequence: Synthetic oligonucleotide
cagcaucaaucuguacuug

SEQ ID NO: 2786632 - RNA, 19 nt, Artificial Sequence
  Description of Artificial Sequence: Synthetic oligonucleotide
ggguuugaguccagccugg

SEQ ID NO: 2786633 - RNA, 19 nt, Artificial Sequence
  Description of Artificial Sequence: Synthetic oligonucleotide
ugugugcaguaugggcacu

SEQ ID NO: 2786634 - RNA, 19 nt, Artificial Sequence
  Description of Artificial Sequence: Synthetic oligonucleotide
gucacgugacguuugucau

SEQ ID NO: 2786635 - RNA, 19 nt, Artificial Sequence
  Description of Artificial Sequence: Synthetic oligonucleotide
agccugggcaggucaucug

SEQ ID NO: 2786636 - RNA, 19 nt, Artificial Sequence
  Description of Artificial Sequence: Synthetic oligonucleotide
gcacuucaggcuuuuaccu

SEQ ID NO: 2786637 - RNA, 19 nt, Artificial Sequence
  Description of Artificial Sequence: Synthetic oligonucleotide
ccuggauguggugucagac

SEQ ID NO: 2786638 - RNA, 19 nt, Artificial Sequence
  Description of Artificial Sequence: Synthetic oligonucleotide
ucgugaggucagucacgug

SEQ ID NO: 2786639 - RNA, 19 nt, Artificial Sequence
  Description of Artificial Sequence: Synthetic oligonucleotide
cagagcuguuauacagaga

SEQ ID NO: 2786640 - RNA, 19 nt, Artificial Sequence
  Description of Artificial Sequence: Synthetic oligonucleotide
acgugacguuugucauuuc

SEQ ID NO: 2786641 - RNA, 19 nt, Artificial Sequence
  Description of Artificial Sequence: Synthetic oligonucleotide
ggcaggucaucuggaaagc

SEQ ID NO: 2786642 - RNA, 19 nt, Artificial Sequence
  Description of Artificial Sequence: Synthetic oligonucleotide
gcagaaucuacuucagcau

SEQ ID NO: 2786643 - RNA, 19 nt, Artificial Sequence
  Description of Artificial Sequence: Synthetic oligonucleotide
ggcuacucagauggucuag

SEQ ID NO: 2786644 - RNA, 19 nt, Artificial Sequence
  Description of Artificial Sequence: Synthetic oligonucleotide
gcagauaguuugcaugccu

SEQ ID NO: 2786645 - RNA, 19 nt, Artificial Sequence
  Description of Artificial Sequence: Synthetic oligonucleotide
aucgcagccugggcagguc

SEQ ID NO: 2786646 - RNA, 19 nt, Artificial Sequence
  Description of Artificial Sequence: Synthetic oligonucleotide
cuagccugcuaaaucguuu

SEQ ID NO: 2786647 - RNA, 19 nt, Artificial Sequence
  Description of Artificial Sequence: Synthetic oligonucleotide
ugucagacccuuggccaua

SEQ ID NO: 2786648 - RNA, 19 nt, Artificial Sequence
  Description of Artificial Sequence: Synthetic oligonucleotide
gauguggugucagacccuu

SEQ ID NO: 2786649 - RNA, 19 nt, Artificial Sequence
  Description of Artificial Sequence: Synthetic oligonucleotide
ucaccacgugugugcagua

SEQ ID NO: 2786650 - RNA, 19 nt, Artificial Sequence
  Description of Artificial Sequence: Synthetic oligonucleotide
gguagccagugggaggagc

SEQ ID NO: 2786651 - RNA, 19 nt, Artificial Sequence
  Description of Artificial Sequence: Synthetic oligonucleotide
gagcuguuauacagagaaa

SEQ ID NO: 2786652 - RNA, 19 nt, Artificial Sequence
  Description of Artificial Sequence: Synthetic oligonucleotide
gcagguggcguuugagguc

SEQ ID NO: 2786653 - RNA, 19 nt, Artificial Sequence
  Description of Artificial Sequence: Synthetic oligonucleotide
ugcaugccugauggauugu

SEQ ID NO: 2786654 - RNA, 19 nt, Artificial Sequence
  Description of Artificial Sequence: Synthetic oligonucleotide
gcguuugaggucugcuuuc

SEQ ID NO: 2786655 - RNA, 19 nt, Artificial Sequence
  Description of Artificial Sequence: Synthetic oligonucleotide
gucagacccuuggccauac

SEQ ID NO: 2786656 - RNA, 19 nt, Artificial Sequence
  Description of Artificial Sequence: Synthetic oligonucleotide
uuggcacggguacggccuu

SEQ ID NO: 2786657 - RNA, 19 nt, Artificial Sequence
  Description of Artificial Sequence: Synthetic oligonucleotide
gcucuucaggcugggaaac

SEQ ID NO: 2786658 - RNA, 19 nt, Artificial Sequence
  Description of Artificial Sequence: Synthetic oligonucleotide
cugggcaggucaucuggaa

SEQ ID NO: 2786659 - RNA, 19 nt, Artificial Sequence
  Description of Artificial Sequence: Synthetic oligonucleotide
ggguuugauuucgugaggu

SEQ ID NO: 2786660 - RNA, 19 nt, Artificial Sequence
  Description of Artificial Sequence: Synthetic oligonucleotide
guauggcagcgcagguggc

SEQ ID NO: 2786661 - RNA, 19 nt, Artificial Sequence
  Description of Artificial Sequence: Synthetic oligonucleotide
ugguagccagugggaggag

SEQ ID NO: 2786662 - RNA, 19 nt, Artificial Sequence
  Description of Artificial Sequence: Synthetic oligonucleotide
aagucgcacuucaggcuuu

SEQ ID NO: 2786663 - RNA, 19 nt, Artificial Sequence
  Description of Artificial Sequence: Synthetic oligonucleotide
gucauuuccugcagauagu

SEQ ID NO: 2786664 - RNA, 19 nt, Artificial Sequence
  Description of Artificial Sequence: Synthetic oligonucleotide
accuaauguuggguuugau

SEQ ID NO: 2786665 - RNA, 19 nt, Artificial Sequence
  Description of Artificial Sequence: Synthetic oligonucleotide
auguuggguuugauuucgu

SEQ ID NO: 2786666 - RNA, 19 nt, Artificial Sequence
  Description of Artificial Sequence: Synthetic oligonucleotide
gccugauggauuguucgga

SEQ ID NO: 2786667 - RNA, 19 nt, Artificial Sequence
  Description of Artificial Sequence: Synthetic oligonucleotide
ggcguuugaggucugcuuu

SEQ ID NO: 2786668 - RNA, 19 nt, Artificial Sequence
  Description of Artificial Sequence: Synthetic oligonucleotide
ccugauggauuguucggaa

SEQ ID NO: 2786669 - RNA, 19 nt, Artificial Sequence
  Description of Artificial Sequence: Synthetic oligonucleotide
ggguacggccuuucuccug

SEQ ID NO: 2786670 - RNA, 19 nt, Artificial Sequence
  Description of Artificial Sequence: Synthetic oligonucleotide
cagguggcguuugaggucu

SEQ ID NO: 2786671 - RNA, 19 nt, Artificial Sequence
  Description of Artificial Sequence: Synthetic oligonucleotide
gggaggagcagaaucuacu

SEQ ID NO: 2786672 - RNA, 19 nt, Artificial Sequence
  Description of Artificial Sequence: Synthetic oligonucleotide
cacgugacguuugucauuu

SEQ ID NO: 2786673 - RNA, 19 nt, Artificial Sequence
  Description of Artificial Sequence: Synthetic oligonucleotide
gugucagacccuuggccau

SEQ ID NO: 2786674 - RNA, 19 nt, Artificial Sequence
  Description of Artificial Sequence: Synthetic oligonucleotide
gugggaggagcagaaucua

SEQ ID NO: 2786675 - RNA, 19 nt, Artificial Sequence
  Description of Artificial Sequence: Synthetic oligonucleotide
cagucacgugacguuuguc

SEQ ID NO: 2786676 - RNA, 19 nt, Artificial Sequence
  Description of Artificial Sequence: Synthetic oligonucleotide
ccuaauguuggguuugauu

SEQ ID NO: 2786677 - RNA, 19 nt, Artificial Sequence
  Description of Artificial Sequence: Synthetic oligonucleotide
agccuccagagcuguuaua

SEQ ID NO: 2786678 - RNA, 19 nt, Artificial Sequence
  Description of Artificial Sequence: Synthetic oligonucleotide
cguuugaggucugcuuucc

SEQ ID NO: 2786679 - RNA, 19 nt, Artificial Sequence
  Description of Artificial Sequence: Synthetic oligonucleotide
gucuagccugcuaaaucgu

SEQ ID NO: 2786680 - RNA, 19 nt, Artificial Sequence
  Description of Artificial Sequence: Synthetic oligonucleotide
ggcacuugaaucgcagccu

SEQ ID NO: 2786681 - RNA, 19 nt, Artificial Sequence
  Description of Artificial Sequence: Synthetic oligonucleotide
ccuggacagccuccagagc

SEQ ID NO: 2786682 - RNA, 19 nt, Artificial Sequence
  Description of Artificial Sequence: Synthetic oligonucleotide
cagauggucuagccugcua

SEQ ID NO: 2786683 - RNA, 19 nt, Artificial Sequence
  Description of Artificial Sequence: Synthetic oligonucleotide
gcuucaccacgugugugca

SEQ ID NO: 2786684 - RNA, 19 nt, Artificial Sequence
  Description of Artificial Sequence: Synthetic oligonucleotide
auguggugucagacccuug

SEQ ID NO: 2786685 - RNA, 19 nt, Artificial Sequence
  Description of Artificial Sequence: Synthetic oligonucleotide
gguggcguuugaggucugc

SEQ ID NO: 2786686 - RNA, 19 nt, Artificial Sequence
  Description of Artificial Sequence: Synthetic oligonucleotide
agucgcacuucaggcuuuu

SEQ ID NO: 2786687 - RNA, 19 nt, Artificial Sequence
  Description of Artificial Sequence: Synthetic oligonucleotide
cuucaggcuuuuaccuaau

SEQ ID NO: 2786688 - RNA, 19 nt, Artificial Sequence
  Description of Artificial Sequence: Synthetic oligonucleotide
gccagugggaggagcagaa

SEQ ID NO: 2786689 - RNA, 19 nt, Artificial Sequence
  Description of Artificial Sequence: Synthetic oligonucleotide
acccuuggccauacuggua

SEQ ID NO: 2786690 - RNA, 19 nt, Artificial Sequence
  Description of Artificial Sequence: Synthetic oligonucleotide
ccugggcaggucaucugga

SEQ ID NO: 2786691 - RNA, 19 nt, Artificial Sequence
  Description of Artificial Sequence: Synthetic oligonucleotide
cagccuccagagcuguuau

SEQ ID NO: 2786692 - RNA, 19 nt, Artificial Sequence
  Description of Artificial Sequence: Synthetic oligonucleotide
ggucagucacgugacguuu

SEQ ID NO: 2786693 - RNA, 19 nt, Artificial Sequence
  Description of Artificial Sequence: Synthetic oligonucleotide
cgcagguggcguuugaggu

SEQ ID NO: 2786694 - RNA, 19 nt, Artificial Sequence
  Description of Artificial Sequence: Synthetic oligonucleotide
caggcugggaaacguuguu

SEQ ID NO: 2786695 - RNA, 19 nt, Artificial Sequence
  Description of Artificial Sequence: Synthetic oligonucleotide
cccgcaagcuuggcacggg

SEQ ID NO: 2786696 - RNA, 19 nt, Artificial Sequence
  Description of Artificial Sequence: Synthetic oligonucleotide
cagccugggcaggucaucu

SEQ ID NO: 2786697 - RNA, 19 nt, Artificial Sequence
  Description of Artificial Sequence: Synthetic oligonucleotide
ggcacggguacggccuuuc

SEQ ID NO: 2786698 - RNA, 19 nt, Artificial Sequence
  Description of Artificial Sequence: Synthetic oligonucleotide
gcagcgcagguggcguuug

SEQ ID NO: 2786699 - RNA, 19 nt, Artificial Sequence
  Description of Artificial Sequence: Synthetic oligonucleotide
ggucaucuggaaagcuccu

SEQ ID NO: 2786700 - RNA, 19 nt, Artificial Sequence
  Description of Artificial Sequence: Synthetic oligonucleotide
gcaggucaucuggaaagcu

SEQ ID NO: 2786701 - RNA, 19 nt, Artificial Sequence
  Description of Artificial Sequence: Synthetic oligonucleotide
guacggccuuucuccugua

SEQ ID NO: 2786702 - RNA, 19 nt, Artificial Sequence
  Description of Artificial Sequence: Synthetic oligonucleotide
gugugcaguaugggcacuu

SEQ ID NO: 2786703 - RNA, 19 nt, Artificial Sequence
  Description of Artificial Sequence: Synthetic oligonucleotide
ccgcuucaccacgugugug

SEQ ID NO: 2786704 - RNA, 19 nt, Artificial Sequence
  Description of Artificial Sequence: Synthetic oligonucleotide
cggaaauggcuacucagau

SEQ ID NO: 2786705 - RNA, 19 nt, Artificial Sequence
  Description of Artificial Sequence: Synthetic oligonucleotide
ggauguggugucagacccu

SEQ ID NO: 2786706 - RNA, 19 nt, Artificial Sequence
  Description of Artificial Sequence: Synthetic oligonucleotide
cagcgcagguggcguuuga

SEQ ID NO: 2786707 - RNA, 19 nt, Artificial Sequence
  Description of Artificial Sequence: Synthetic oligonucleotide
ggccauacugguagccagu

SEQ ID NO: 2786708 - RNA, 19 nt, Artificial Sequence
  Description of Artificial Sequence: Synthetic oligonucleotide
uggcacggguacggccuuu

SEQ ID NO: 2786709 - RNA, 19 nt, Artificial Sequence
  Description of Artificial Sequence: Synthetic oligonucleotide
agguggcguuugaggucug

SEQ ID NO: 2786710 - RNA, 19 nt, Artificial Sequence
  Description of Artificial Sequence: Synthetic oligonucleotide
ggacagccuccagagcugu

SEQ ID NO: 2786711 - RNA, 19 nt, Artificial Sequence
  Description of Artificial Sequence: Synthetic oligonucleotide
gucgcacuucaggcuuuua

SEQ ID NO: 2786712 - RNA, 19 nt, Artificial Sequence
  Description of Artificial Sequence: Synthetic oligonucleotide
gcuuuccgcuucaccacgu

SEQ ID NO: 2786713 - RNA, 19 nt, Artificial Sequence
  Description of Artificial Sequence: Synthetic oligonucleotide
caccacgugugugcaguau

SEQ ID NO: 2786714 - RNA, 19 nt, Artificial Sequence
  Description of Artificial Sequence: Synthetic oligonucleotide
gcaugccugauggauuguu

SEQ ID NO: 2786715 - RNA, 19 nt, Artificial Sequence
  Description of Artificial Sequence: Synthetic oligonucleotide
cguuucccgcaagcuuggc

SEQ ID NO: 2786716 - RNA, 19 nt, Artificial Sequence
  Description of Artificial Sequence: Synthetic oligonucleotide
cgcaagcuuggcacgggua

SEQ ID NO: 2786717 - RNA, 19 nt, Artificial Sequence
  Description of Artificial Sequence: Synthetic oligonucleotide
gcacggguacggccuuucu

SEQ ID NO: 2786718 - RNA, 19 nt, Artificial Sequence
  Description of Artificial Sequence: Synthetic oligonucleotide
ccgcaagcuuggcacgggu

SEQ ID NO: 2786719 - RNA, 19 nt, Artificial Sequence
  Description of Artificial Sequence: Synthetic oligonucleotide
ggcagcgcagguggcguuu

SEQ ID NO: 2786720 - RNA, 19 nt, Artificial Sequence
  Description of Artificial Sequence: Synthetic oligonucleotide
cggguacggccuuucuccu

SEQ ID NO: 2786721 - RNA, 19 nt, Artificial Sequence
  Description of Artificial Sequence: Synthetic oligonucleotide
gaaaauuucaaauuugucc

SEQ ID NO: 2786722 - RNA, 19 nt, Artificial Sequence
  Description of Artificial Sequence: Synthetic oligonucleotide
uucaaauuuguccagaccc

SEQ ID NO: 2786723 - RNA, 19 nt, Artificial Sequence
  Description of Artificial Sequence: Synthetic oligonucleotide
uuagacagcagucuuuucg

SEQ ID NO: 2786724 - RNA, 19 nt, Artificial Sequence
  Description of Artificial Sequence: Synthetic oligonucleotide
acucgaaccagcuugaccg

SEQ ID NO: 2786725 - RNA, 19 nt, Artificial Sequence
  Description of Artificial Sequence: Synthetic oligonucleotide
aaccuuacuuaucuugccc

SEQ ID NO: 2786726 - RNA, 19 nt, Artificial Sequence
  Description of Artificial Sequence: Synthetic oligonucleotide
guaggugucagucuguucg

SEQ ID NO: 2786727 - RNA, 19 nt, Artificial Sequence
  Description of Artificial Sequence: Synthetic oligonucleotide
uggagaaacguccuugucg

SEQ ID NO: 2786728 - RNA, 19 nt, Artificial Sequence
  Description of Artificial Sequence: Synthetic oligonucleotide
uuucgagugauuaagccca

SEQ ID NO: 2786729 - RNA, 19 nt, Artificial Sequence
  Description of Artificial Sequence: Synthetic oligonucleotide
gaacaguugagguuugugg

SEQ ID NO: 2786730 - RNA, 19 nt, Artificial Sequence
  Description of Artificial Sequence: Synthetic oligonucleotide
uucucaaacgggcagaacu

SEQ ID NO: 2786731 - RNA, 19 nt, Artificial Sequence
  Description of Artificial Sequence: Synthetic oligonucleotide
aacucgaaccagcuugacc

SEQ ID NO: 2786732 - RNA, 19 nt, Artificial Sequence
  Description of Artificial Sequence: Synthetic oligonucleotide
acagcagucuuuucguucc

SEQ ID NO: 2786733 - RNA, 19 nt, Artificial Sequence
  Description of Artificial Sequence: Synthetic oligonucleotide
aacacguccacgcagggcu

SEQ ID NO: 2786734 - RNA, 19 nt, Artificial Sequence
  Description of Artificial Sequence: Synthetic oligonucleotide
accuuacuuaucuugcccc

SEQ ID NO: 2786735 - RNA, 19 nt, Artificial Sequence
  Description of Artificial Sequence: Synthetic oligonucleotide
aauaacacguccacgcagg

SEQ ID NO: 2786736 - RNA, 19 nt, Artificial Sequence
  Description of Artificial Sequence: Synthetic oligonucleotide
agaaagaaaauuucaaauu

SEQ ID NO: 2786737 - RNA, 19 nt, Artificial Sequence
  Description of Artificial Sequence: Synthetic oligonucleotide
agugaacauuuccugagcg

SEQ ID NO: 2786738 - RNA, 19 nt, Artificial Sequence
  Description of Artificial Sequence: Synthetic oligonucleotide
cuaaccuuacuuaucuugc

SEQ ID NO: 2786739 - RNA, 19 nt, Artificial Sequence
  Description of Artificial Sequence: Synthetic oligonucleotide
accggcuucaguccgacgc

SEQ ID NO: 2786740 - RNA, 19 nt, Artificial Sequence
  Description of Artificial Sequence: Synthetic oligonucleotide
cuuucgagugauuaagccc

SEQ ID NO: 2786741 - RNA, 19 nt, Artificial Sequence
  Description of Artificial Sequence: Synthetic oligonucleotide
aaacgggcagaacugaacu

SEQ ID NO: 2786742 - RNA, 19 nt, Artificial Sequence
  Description of Artificial Sequence: Synthetic oligonucleotide
aucuccgaauaacacgucc

SEQ ID NO: 2786743 - RNA, 19 nt, Artificial Sequence
  Description of Artificial Sequence: Synthetic oligonucleotide
gguaccauuaacugggccg

SEQ ID NO: 2786744 - RNA, 19 nt, Artificial Sequence
  Description of Artificial Sequence: Synthetic oligonucleotide
uguggcacgcacuuucucg

SEQ ID NO: 2786745 - RNA, 19 nt, Artificial Sequence
  Description of Artificial Sequence: Synthetic oligonucleotide
agcuugaccggcuucaguc

SEQ ID NO: 2786746 - RNA, 19 nt, Artificial Sequence
  Description of Artificial Sequence: Synthetic oligonucleotide
aaauuuguccagacccucc

SEQ ID NO: 2786747 - RNA, 19 nt, Artificial Sequence
  Description of Artificial Sequence: Synthetic oligonucleotide
uguuauguccucugcagug

SEQ ID NO: 2786748 - RNA, 19 nt, Artificial Sequence
  Description of Artificial Sequence: Synthetic oligonucleotide
uccgacgcgagccaaagcc

SEQ ID NO: 2786749 - RNA, 19 nt, Artificial Sequence
  Description of Artificial Sequence: Synthetic oligonucleotide
guuguuauguccucugcag

SEQ ID NO: 2786750 - RNA, 19 nt, Artificial Sequence
  Description of Artificial Sequence: Synthetic oligonucleotide
cugaacucgaaccagcuug

SEQ ID NO: 2786751 - RNA, 19 nt, Artificial Sequence
  Description of Artificial Sequence: Synthetic oligonucleotide
uuucguuccaagcuaacau

SEQ ID NO: 2786752 - RNA, 19 nt, Artificial Sequence
  Description of Artificial Sequence: Synthetic oligonucleotide
gaauaacacguccacgcag

SEQ ID NO: 2786753 - RNA, 19 nt, Artificial Sequence
  Description of Artificial Sequence: Synthetic oligonucleotide
ucagccgauagccaucucc

SEQ ID NO: 2786754 - RNA, 19 nt, Artificial Sequence
  Description of Artificial Sequence: Synthetic oligonucleotide
aaccuuucgagugauuaag

SEQ ID NO: 2786755 - RNA, 19 nt, Artificial Sequence
  Description of Artificial Sequence: Synthetic oligonucleotide
auagccaucuccgaauaac

SEQ ID NO: 2786756 - RNA, 19 nt, Artificial Sequence
  Description of Artificial Sequence: Synthetic oligonucleotide
agucuuuucguuccaagcu

SEQ ID NO: 2786757 - RNA, 19 nt, Artificial Sequence
  Description of Artificial Sequence: Synthetic oligonucleotide
ucaaauuuguccagacccu

SEQ ID NO: 2786758 - RNA, 19 nt, Artificial Sequence
  Description of Artificial Sequence: Synthetic oligonucleotide
ucucaaacgggcagaacug

SEQ ID NO: 2786759 - RNA, 19 nt, Artificial Sequence
  Description of Artificial Sequence: Synthetic oligonucleotide
agaaaauuucaaauuuguc

SEQ ID NO: 2786760 - RNA, 19 nt, Artificial Sequence
  Description of Artificial Sequence: Synthetic oligonucleotide
agugauuaagcccagccuu

SEQ ID NO: 2786761 - RNA, 19 nt, Artificial Sequence
  Description of Artificial Sequence: Synthetic oligonucleotide
acuuucucgcugcucaccg

SEQ ID NO: 2786762 - RNA, 19 nt, Artificial Sequence
  Description of Artificial Sequence: Synthetic oligonucleotide
ugaacauuuccugagcggu

SEQ ID NO: 2786763 - RNA, 19 nt, Artificial Sequence
  Description of Artificial Sequence: Synthetic oligonucleotide
cuucgcguaaccuuucgag

SEQ ID NO: 2786764 - RNA, 19 nt, Artificial Sequence
  Description of Artificial Sequence: Synthetic oligonucleotide
uuagcgcugcgcauaauca

SEQ ID NO: 2786765 - RNA, 19 nt, Artificial Sequence
  Description of Artificial Sequence: Synthetic oligonucleotide
aacgggcagaacugaacuc

SEQ ID NO: 2786766 - RNA, 19 nt, Artificial Sequence
  Description of Artificial Sequence: Synthetic oligonucleotide
auaaucagccgauagccau

SEQ ID NO: 2786767 - RNA, 19 nt, Artificial Sequence
  Description of Artificial Sequence: Synthetic oligonucleotide
ucuccgaauaacacgucca

SEQ ID NO: 2786768 - RNA, 19 nt, Artificial Sequence
  Description of Artificial Sequence: Synthetic oligonucleotide
ugagcggugagguuagcgc

SEQ ID NO: 2786769 - RNA, 19 nt, Artificial Sequence
  Description of Artificial Sequence: Synthetic oligonucleotide
ucuguucgugaccuucgcg

SEQ ID NO: 2786770 - RNA, 19 nt, Artificial Sequence
  Description of Artificial Sequence: Synthetic oligonucleotide
auuaagcccagccuucucu

SEQ ID NO: 2786771 - RNA, 19 nt, Artificial Sequence
  Description of Artificial Sequence: Synthetic oligonucleotide
cuaacauuugguuguuaug

SEQ ID NO: 2786772 - RNA, 19 nt, Artificial Sequence
  Description of Artificial Sequence: Synthetic oligonucleotide
aaggcagugaacauuuccu

SEQ ID NO: 2786773 - RNA, 19 nt, Artificial Sequence
  Description of Artificial Sequence: Synthetic oligonucleotide
gugaacauuuccugagcgg

SEQ ID NO: 2786774 - RNA, 19 nt, Artificial Sequence
  Description of Artificial Sequence: Synthetic oligonucleotide
ucgcguaaccuuucgagug

SEQ ID NO: 2786775 - RNA, 19 nt, Artificial Sequence
  Description of Artificial Sequence: Synthetic oligonucleotide
ugagguuuguggcacgcac

SEQ ID NO: 2786776 - RNA, 19 nt, Artificial Sequence
  Description of Artificial Sequence: Synthetic oligonucleotide
uuccaagcuaacauuuggu

SEQ ID NO: 2786777 - RNA, 19 nt, Artificial Sequence
  Description of Artificial Sequence: Synthetic oligonucleotide
uaaccuuacuuaucuugcc

SEQ ID NO: 2786778 - RNA, 19 nt, Artificial Sequence
  Description of Artificial Sequence: Synthetic oligonucleotide
uuucuggcccggauguggg

SEQ ID NO: 2786779 - RNA, 19 nt, Artificial Sequence
  Description of Artificial Sequence: Synthetic oligonucleotide
uagacagcagucuuuucgu

SEQ ID NO: 2786780 - RNA, 19 nt, Artificial Sequence
  Description of Artificial Sequence: Synthetic oligonucleotide
gaaacguccuugucgacuc

SEQ ID NO: 2786781 - RNA, 19 nt, Artificial Sequence
  Description of Artificial Sequence: Synthetic oligonucleotide
aagcccagccuucucuuag

SEQ ID NO: 2786782 - RNA, 19 nt, Artificial Sequence
  Description of Artificial Sequence: Synthetic oligonucleotide
cagucuuuucguuccaagc

SEQ ID NO: 2786783 - RNA, 19 nt, Artificial Sequence
  Description of Artificial Sequence: Synthetic oligonucleotide
aucaccuaaccuuacuuau

SEQ ID NO: 2786784 - RNA, 19 nt, Artificial Sequence
  Description of Artificial Sequence: Synthetic oligonucleotide
ugaacucgaaccagcuuga

SEQ ID NO: 2786785 - RNA, 19 nt, Artificial Sequence
  Description of Artificial Sequence: Synthetic oligonucleotide
accgccuggagaaacgucc

SEQ ID NO: 2786786 - RNA, 19 nt, Artificial Sequence
  Description of Artificial Sequence: Synthetic oligonucleotide
guaccauuaacugggccgg

SEQ ID NO: 2786787 - RNA, 19 nt, Artificial Sequence
  Description of Artificial Sequence: Synthetic oligonucleotide
cagccgauagccaucuccg

SEQ ID NO: 2786788 - RNA, 19 nt, Artificial Sequence
  Description of Artificial Sequence: Synthetic oligonucleotide
uuuucguuccaagcuaaca

SEQ ID NO: 2786789 - RNA, 19 nt, Artificial Sequence
  Description of Artificial Sequence: Synthetic oligonucleotide
aaacguccuugucgacucc

SEQ ID NO: 2786790 - RNA, 19 nt, Artificial Sequence
  Description of Artificial Sequence: Synthetic oligonucleotide
aacauuuccugagcgguga

SEQ ID NO: 2786791 - RNA, 19 nt, Artificial Sequence
  Description of Artificial Sequence: Synthetic oligonucleotide
acgggcagaacugaacucg

SEQ ID NO: 2786792 - RNA, 19 nt, Artificial Sequence
  Description of Artificial Sequence: Synthetic oligonucleotide
agaacugaacucgaaccag

SEQ ID NO: 2786793 - RNA, 19 nt, Artificial Sequence
  Description of Artificial Sequence: Synthetic oligonucleotide
uucucuuagacagcagucu

SEQ ID NO: 2786794 - RNA, 19 nt, Artificial Sequence
  Description of Artificial Sequence: Synthetic oligonucleotide
uccgaauaacacguccacg

SEQ ID NO: 2786795 - RNA, 19 nt, Artificial Sequence
  Description of Artificial Sequence: Synthetic oligonucleotide
gcauaaucagccgauagcc

SEQ ID NO: 2786796 - RNA, 19 nt, Artificial Sequence
  Description of Artificial Sequence: Synthetic oligonucleotide
ccgaauaacacguccacgc

SEQ ID NO: 2786797 - RNA, 19 nt, Artificial Sequence
  Description of Artificial Sequence: Synthetic oligonucleotide
agugucagcgccggguacc

SEQ ID NO: 2786798 - RNA, 19 nt, Artificial Sequence
  Description of Artificial Sequence: Synthetic oligonucleotide
guuuguggcacgcacuuuc

SEQ ID NO: 2786799 - RNA, 19 nt, Artificial Sequence
  Description of Artificial Sequence: Synthetic oligonucleotide
cucacgucggcgaccaccg

SEQ ID NO: 2786800 - RNA, 19 nt, Artificial Sequence
  Description of Artificial Sequence: Synthetic oligonucleotide
accaccgaacaguugaggu

SEQ ID NO: 2786801 - RNA, 19 nt, Artificial Sequence
  Description of Artificial Sequence: Synthetic oligonucleotide
uucgcguaaccuuucgagu

SEQ ID NO: 2786802 - RNA, 19 nt, Artificial Sequence
  Description of Artificial Sequence: Synthetic oligonucleotide
uccaagcuaacauuugguu

SEQ ID NO: 2786803 - RNA, 19 nt, Artificial Sequence
  Description of Artificial Sequence: Synthetic oligonucleotide
ccggguaccauuaacuggg

SEQ ID NO: 2786804 - RNA, 19 nt, Artificial Sequence
  Description of Artificial Sequence: Synthetic oligonucleotide
gaggccaaggcagugaaca

SEQ ID NO: 2786805 - RNA, 19 nt, Artificial Sequence
  Description of Artificial Sequence: Synthetic oligonucleotide
auaacacguccacgcaggg

SEQ ID NO: 2786806 - RNA, 19 nt, Artificial Sequence
  Description of Artificial Sequence: Synthetic oligonucleotide
ugcguuucuggcccggaug

SEQ ID NO: 2786807 - RNA, 19 nt, Artificial Sequence
  Description of Artificial Sequence: Synthetic oligonucleotide
caagcuaacauuugguugu

SEQ ID NO: 2786808 - RNA, 19 nt, Artificial Sequence
  Description of Artificial Sequence: Synthetic oligonucleotide
guuagcgcugcgcauaauc

SEQ ID NO: 2786809 - RNA, 19 nt, Artificial Sequence
  Description of Artificial Sequence: Synthetic oligonucleotide
cuugaccggcuucaguccg

SEQ ID NO: 2786810 - RNA, 19 nt, Artificial Sequence
  Description of Artificial Sequence: Synthetic oligonucleotide
gacagcagucuuuucguuc

SEQ ID NO: 2786811 - RNA, 19 nt, Artificial Sequence
  Description of Artificial Sequence: Synthetic oligonucleotide
gccaucuccgaauaacacg

SEQ ID NO: 2786812 - RNA, 19 nt, Artificial Sequence
  Description of Artificial Sequence: Synthetic oligonucleotide
ucguuccaagcuaacauuu

SEQ ID NO: 2786813 - RNA, 19 nt, Artificial Sequence
  Description of Artificial Sequence: Synthetic oligonucleotide
acggguaggugucagucug

SEQ ID NO: 2786814 - RNA, 19 nt, Artificial Sequence
  Description of Artificial Sequence: Synthetic oligonucleotide
cacguucuucucaaacggg

SEQ ID NO: 2786815 - RNA, 19 nt, Artificial Sequence
  Description of Artificial Sequence: Synthetic oligonucleotide
ugucagucuguucgugacc

SEQ ID NO: 2786816 - RNA, 19 nt, Artificial Sequence
  Description of Artificial Sequence: Synthetic oligonucleotide
agcgcugcgcauaaucagc

SEQ ID NO: 2786817 - RNA, 19 nt, Artificial Sequence
  Description of Artificial Sequence: Synthetic oligonucleotide
ugguuguuauguccucugc

SEQ ID NO: 2786818 - RNA, 19 nt, Artificial Sequence
  Description of Artificial Sequence: Synthetic oligonucleotide
ucugcguuggccgcugcgg

SEQ ID NO: 2786819 - RNA, 19 nt, Artificial Sequence
  Description of Artificial Sequence: Synthetic oligonucleotide
ccuaaccuuacuuaucuug

SEQ ID NO: 2786820 - RNA, 19 nt, Artificial Sequence
  Description of Artificial Sequence: Synthetic oligonucleotide
ucucuuagacagcagucuu

SEQ ID NO: 2786821 - RNA, 19 nt, Artificial Sequence
  Description of Artificial Sequence: Synthetic oligonucleotide
cuucaguccgacgcgagcc

SEQ ID NO: 2786822 - RNA, 19 nt, Artificial Sequence
  Description of Artificial Sequence: Synthetic oligonucleotide
uaaccuuucgagugauuaa

SEQ ID NO: 2786823 - RNA, 19 nt, Artificial Sequence
  Description of Artificial Sequence: Synthetic oligonucleotide
ucaccuaaccuuacuuauc

SEQ ID NO: 2786824 - RNA, 19 nt, Artificial Sequence
  Description of Artificial Sequence: Synthetic oligonucleotide
caaacgggcagaacugaac

SEQ ID NO: 2786825 - RNA, 19 nt, Artificial Sequence
  Description of Artificial Sequence: Synthetic oligonucleotide
guuucuggcccggaugugg

SEQ ID NO: 2786826 - RNA, 19 nt, Artificial Sequence
  Description of Artificial Sequence: Synthetic oligonucleotide
accuuucgagugauuaagc

SEQ ID NO: 2786827 - RNA, 19 nt, Artificial Sequence
  Description of Artificial Sequence: Synthetic oligonucleotide
aaucagccgauagccaucu

SEQ ID NO: 2786828 - RNA, 19 nt, Artificial Sequence
  Description of Artificial Sequence: Synthetic oligonucleotide
aggcagugaacauuuccug

SEQ ID NO: 2786829 - RNA, 19 nt, Artificial Sequence
  Description of Artificial Sequence: Synthetic oligonucleotide
gcagugaacauuuccugag

SEQ ID NO: 2786830 - RNA, 19 nt, Artificial Sequence
  Description of Artificial Sequence: Synthetic oligonucleotide
uaaucagccgauagccauc

SEQ ID NO: 2786831 - RNA, 19 nt, Artificial Sequence
  Description of Artificial Sequence: Synthetic oligonucleotide
ggagaaacguccuugucga

SEQ ID NO: 2786832 - RNA, 19 nt, Artificial Sequence
  Description of Artificial Sequence: Synthetic oligonucleotide
uucguuccaagcuaacauu

SEQ ID NO: 2786833 - RNA, 19 nt, Artificial Sequence
  Description of Artificial Sequence: Synthetic oligonucleotide
caaagcacggguagguguc

SEQ ID NO: 2786834 - RNA, 19 nt, Artificial Sequence
  Description of Artificial Sequence: Synthetic oligonucleotide
ucaaacgggcagaacugaa

SEQ ID NO: 2786835 - RNA, 19 nt, Artificial Sequence
  Description of Artificial Sequence: Synthetic oligonucleotide
uuuguggcacgcacuuucu

SEQ ID NO: 2786836 - RNA, 19 nt, Artificial Sequence
  Description of Artificial Sequence: Synthetic oligonucleotide
aacugggccgggcuugucu

SEQ ID NO: 2786837 - RNA, 19 nt, Artificial Sequence
  Description of Artificial Sequence: Synthetic oligonucleotide
agaaacguccuugucgacu

SEQ ID NO: 2786838 - RNA, 19 nt, Artificial Sequence
  Description of Artificial Sequence: Synthetic oligonucleotide
uccaucaccuaaccuuacu

SEQ ID NO: 2786839 - RNA, 19 nt, Artificial Sequence
  Description of Artificial Sequence: Synthetic oligonucleotide
accauuaacugggccgggc

SEQ ID NO: 2786840 - RNA, 19 nt, Artificial Sequence
  Description of Artificial Sequence: Synthetic oligonucleotide
ucuuagacagcagucuuuu

SEQ ID NO: 2786841 - RNA, 19 nt, Artificial Sequence
  Description of Artificial Sequence: Synthetic oligonucleotide
ugaccuucgcguaaccuuu

SEQ ID NO: 2786842 - RNA, 19 nt, Artificial Sequence
  Description of Artificial Sequence: Synthetic oligonucleotide
uauguccucugcaguguca

SEQ ID NO: 2786843 - RNA, 19 nt, Artificial Sequence
  Description of Artificial Sequence: Synthetic oligonucleotide
aguugagguuuguggcacg

SEQ ID NO: 2786844 - RNA, 19 nt, Artificial Sequence
  Description of Artificial Sequence: Synthetic oligonucleotide
aacugaacucgaaccagcu

SEQ ID NO: 2786845 - RNA, 19 nt, Artificial Sequence
  Description of Artificial Sequence: Synthetic oligonucleotide
auuaacugggccgggcuug

SEQ ID NO: 2786846 - RNA, 19 nt, Artificial Sequence
  Description of Artificial Sequence: Synthetic oligonucleotide
ccaagcuaacauuugguug

SEQ ID NO: 2786847 - RNA, 19 nt, Artificial Sequence
  Description of Artificial Sequence: Synthetic oligonucleotide
agcgccggguaccauuaac

SEQ ID NO: 2786848 - RNA, 19 nt, Artificial Sequence
  Description of Artificial Sequence: Synthetic oligonucleotide
uccugagcggugagguuag

SEQ ID NO: 2786849 - RNA, 19 nt, Artificial Sequence
  Description of Artificial Sequence: Synthetic oligonucleotide
cagugaacauuuccugagc

SEQ ID NO: 2786850 - RNA, 19 nt, Artificial Sequence
  Description of Artificial Sequence: Synthetic oligonucleotide
augugggaggccaaggcag

SEQ ID NO: 2786851 - RNA, 19 nt, Artificial Sequence
  Description of Artificial Sequence: Synthetic oligonucleotide
ccuuucgagugauuaagcc

SEQ ID NO: 2786852 - RNA, 19 nt, Artificial Sequence
  Description of Artificial Sequence: Synthetic oligonucleotide
cagaacugaacucgaacca

SEQ ID NO: 2786853 - RNA, 19 nt, Artificial Sequence
  Description of Artificial Sequence: Synthetic oligonucleotide
ucggcgaccaccgaacagu

SEQ ID NO: 2786854 - RNA, 19 nt, Artificial Sequence
  Description of Artificial Sequence: Synthetic oligonucleotide
uucgagugauuaagcccag

SEQ ID NO: 2786855 - RNA, 19 nt, Artificial Sequence
  Description of Artificial Sequence: Synthetic oligonucleotide
agccaucuccgaauaacac

SEQ ID NO: 2786856 - RNA, 19 nt, Artificial Sequence
  Description of Artificial Sequence: Synthetic oligonucleotide
uucuucucaaacgggcaga

SEQ ID NO: 2786857 - RNA, 19 nt, Artificial Sequence
  Description of Artificial Sequence: Synthetic oligonucleotide
cuccgaauaacacguccac

SEQ ID NO: 2786858 - RNA, 19 nt, Artificial Sequence
  Description of Artificial Sequence: Synthetic oligonucleotide
cuccacguucuucucaaac

SEQ ID NO: 2786859 - RNA, 19 nt, Artificial Sequence
  Description of Artificial Sequence: Synthetic oligonucleotide
gaugcugccgcugcguuuc

SEQ ID NO: 2786860 - RNA, 19 nt, Artificial Sequence
  Description of Artificial Sequence: Synthetic oligonucleotide
ggcuugucugcguuggccg

SEQ ID NO: 2786861 - RNA, 19 nt, Artificial Sequence
  Description of Artificial Sequence: Synthetic oligonucleotide
cucaccgccuggagaaacg

SEQ ID NO: 2786862 - RNA, 19 nt, Artificial Sequence
  Description of Artificial Sequence: Synthetic oligonucleotide
guaaccuuucgagugauua

SEQ ID NO: 2786863 - RNA, 19 nt, Artificial Sequence
  Description of Artificial Sequence: Synthetic oligonucleotide
guggcacgcacuuucucgc

SEQ ID NO: 2786864 - RNA, 19 nt, Artificial Sequence
  Description of Artificial Sequence: Synthetic oligonucleotide
agacccuccaucaccuaac

SEQ ID NO: 2786865 - RNA, 19 nt, Artificial Sequence
  Description of Artificial Sequence: Synthetic oligonucleotide
cauaaucagccgauagcca

SEQ ID NO: 2786866 - RNA, 19 nt, Artificial Sequence
  Description of Artificial Sequence: Synthetic oligonucleotide
gugagguuagcgcugcgca

SEQ ID NO: 2786867 - RNA, 19 nt, Artificial Sequence
  Description of Artificial Sequence: Synthetic oligonucleotide
gugucagucuguucgugac

SEQ ID NO: 2786868 - RNA, 19 nt, Artificial Sequence
  Description of Artificial Sequence: Synthetic oligonucleotide
agucuguucgugaccuucg

SEQ ID NO: 2786869 - RNA, 19 nt, Artificial Sequence
  Description of Artificial Sequence: Synthetic oligonucleotide
gaacauuuccugagcggug

SEQ ID NO: 2786870 - RNA, 19 nt, Artificial Sequence
  Description of Artificial Sequence: Synthetic oligonucleotide
ugauuaagcccagccuucu

SEQ ID NO: 2786871 - RNA, 19 nt, Artificial Sequence
  Description of Artificial Sequence: Synthetic oligonucleotide
ucuggcccggaugugggag

SEQ ID NO: 2786872 - RNA, 19 nt, Artificial Sequence
  Description of Artificial Sequence: Synthetic oligonucleotide
accuucgcguaaccuuucg

SEQ ID NO: 2786873 - RNA, 19 nt, Artificial Sequence
  Description of Artificial Sequence: Synthetic oligonucleotide
ugcagugucagcgccgggu

SEQ ID NO: 2786874 - RNA, 19 nt, Artificial Sequence
  Description of Artificial Sequence: Synthetic oligonucleotide
cauuugguuguuauguccu

SEQ ID NO: 2786875 - RNA, 19 nt, Artificial Sequence
  Description of Artificial Sequence: Synthetic oligonucleotide
cuuuucguuccaagcuaac

SEQ ID NO: 2786876 - RNA, 19 nt, Artificial Sequence
  Description of Artificial Sequence: Synthetic oligonucleotide
uuaagcccagccuucucuu

SEQ ID NO: 2786877 - RNA, 19 nt, Artificial Sequence
  Description of Artificial Sequence: Synthetic oligonucleotide
caaauuuguccagacccuc

SEQ ID NO: 2786878 - RNA, 19 nt, Artificial Sequence
  Description of Artificial Sequence: Synthetic oligonucleotide
cucgaaccagcuugaccgg

SEQ ID NO: 2786879 - RNA, 19 nt, Artificial Sequence
  Description of Artificial Sequence: Synthetic oligonucleotide
auguccucugcagugucag

SEQ ID NO: 2786880 - RNA, 19 nt, Artificial Sequence
  Description of Artificial Sequence: Synthetic oligonucleotide
uuccugagcggugagguua

SEQ ID NO: 2786881 - RNA, 19 nt, Artificial Sequence
  Description of Artificial Sequence: Synthetic oligonucleotide
gacuccacguucuucucaa

SEQ ID NO: 2786882 - RNA, 19 nt, Artificial Sequence
  Description of Artificial Sequence: Synthetic oligonucleotide
uguucgugaccuucgcgua

SEQ ID NO: 2786883 - RNA, 19 nt, Artificial Sequence
  Description of Artificial Sequence: Synthetic oligonucleotide
gaccaccgaacaguugagg

SEQ ID NO: 2786884 - RNA, 19 nt, Artificial Sequence
  Description of Artificial Sequence: Synthetic oligonucleotide
gccggguaccauuaacugg

SEQ ID NO: 2786885 - RNA, 19 nt, Artificial Sequence
  Description of Artificial Sequence: Synthetic oligonucleotide
agguuuguggcacgcacuu

SEQ ID NO: 2786886 - RNA, 19 nt, Artificial Sequence
  Description of Artificial Sequence: Synthetic oligonucleotide
ucuucucaaacgggcagaa

SEQ ID NO: 2786887 - RNA, 19 nt, Artificial Sequence
  Description of Artificial Sequence: Synthetic oligonucleotide
gguuguuauguccucugca

SEQ ID NO: 2786888 - RNA, 19 nt, Artificial Sequence
  Description of Artificial Sequence: Synthetic oligonucleotide
gccgucgugccucacgucg

SEQ ID NO: 2786889 - RNA, 19 nt, Artificial Sequence
  Description of Artificial Sequence: Synthetic oligonucleotide
acugggccgggcuugucug

SEQ ID NO: 2786890 - RNA, 19 nt, Artificial Sequence
  Description of Artificial Sequence: Synthetic oligonucleotide
uccacgcagggcucggagc

SEQ ID NO: 2786891 - RNA, 19 nt, Artificial Sequence
  Description of Artificial Sequence: Synthetic oligonucleotide
cugagcggugagguuagcg

SEQ ID NO: 2786892 - RNA, 19 nt, Artificial Sequence
  Description of Artificial Sequence: Synthetic oligonucleotide
uaggugucagucuguucgu

SEQ ID NO: 2786893 - RNA, 19 nt, Artificial Sequence
  Description of Artificial Sequence: Synthetic oligonucleotide
uccuugucgacuccacguu

SEQ ID NO: 2786894 - RNA, 19 nt, Artificial Sequence
  Description of Artificial Sequence: Synthetic oligonucleotide
aacguccuugucgacucca

SEQ ID NO: 2786895 - RNA, 19 nt, Artificial Sequence
  Description of Artificial Sequence: Synthetic oligonucleotide
gauuaagcccagccuucuc

SEQ ID NO: 2786896 - RNA, 19 nt, Artificial Sequence
  Description of Artificial Sequence: Synthetic oligonucleotide
ggaugugggaggccaaggc

SEQ ID NO: 2786897 - RNA, 19 nt, Artificial Sequence
  Description of Artificial Sequence: Synthetic oligonucleotide
gucuuuucguuccaagcua

SEQ ID NO: 2786898 - RNA, 19 nt, Artificial Sequence
  Description of Artificial Sequence: Synthetic oligonucleotide
caucaccuaaccuuacuua

SEQ ID NO: 2786899 - RNA, 19 nt, Artificial Sequence
  Description of Artificial Sequence: Synthetic oligonucleotide
guugagguuuguggcacgc

SEQ ID NO: 2786900 - RNA, 19 nt, Artificial Sequence
  Description of Artificial Sequence: Synthetic oligonucleotide
gcgaccaccgaacaguuga

SEQ ID NO: 2786901 - RNA, 19 nt, Artificial Sequence
  Description of Artificial Sequence: Synthetic oligonucleotide
uaacacguccacgcagggc

SEQ ID NO: 2786902 - RNA, 19 nt, Artificial Sequence
  Description of Artificial Sequence: Synthetic oligonucleotide
ugagguuagcgcugcgcau

SEQ ID NO: 2786903 - RNA, 19 nt, Artificial Sequence
  Description of Artificial Sequence: Synthetic oligonucleotide
cuuucucgcugcucaccgc

SEQ ID NO: 2786904 - RNA, 19 nt, Artificial Sequence
  Description of Artificial Sequence: Synthetic oligonucleotide
ucucgcugcucaccgccug

SEQ ID NO: 2786905 - RNA, 19 nt, Artificial Sequence
  Description of Artificial Sequence: Synthetic oligonucleotide
ucagcgccggguaccauua

SEQ ID NO: 2786906 - RNA, 19 nt, Artificial Sequence
  Description of Artificial Sequence: Synthetic oligonucleotide
gucgacuccacguucuucu

SEQ ID NO: 2786907 - RNA, 19 nt, Artificial Sequence
  Description of Artificial Sequence: Synthetic oligonucleotide
uucgugaccuucgcguaac

SEQ ID NO: 2786908 - RNA, 19 nt, Artificial Sequence
  Description of Artificial Sequence: Synthetic oligonucleotide
ucgugccucacgucggcga

SEQ ID NO: 2786909 - RNA, 19 nt, Artificial Sequence
  Description of Artificial Sequence: Synthetic oligonucleotide
gccaaagccgacgccaugg

SEQ ID NO: 2786910 - RNA, 19 nt, Artificial Sequence
  Description of Artificial Sequence: Synthetic oligonucleotide
cgagugauuaagcccagcc

SEQ ID NO: 2786911 - RNA, 19 nt, Artificial Sequence
  Description of Artificial Sequence: Synthetic oligonucleotide
ugccgcugcguuucuggcc

SEQ ID NO: 2786912 - RNA, 19 nt, Artificial Sequence
  Description of Artificial Sequence: Synthetic oligonucleotide
ggcagugaacauuuccuga

SEQ ID NO: 2786913 - RNA, 19 nt, Artificial Sequence
  Description of Artificial Sequence: Synthetic oligonucleotide
aaagcacggguagguguca

SEQ ID NO: 2786914 - RNA, 19 nt, Artificial Sequence
  Description of Artificial Sequence: Synthetic oligonucleotide
cuguucgugaccuucgcgu

SEQ ID NO: 2786915 - RNA, 19 nt, Artificial Sequence
  Description of Artificial Sequence: Synthetic oligonucleotide
gcgcauaaucagccgauag

SEQ ID NO: 2786916 - RNA, 19 nt, Artificial Sequence
  Description of Artificial Sequence: Synthetic oligonucleotide
acugaacucgaaccagcuu

SEQ ID NO: 2786917 - RNA, 19 nt, Artificial Sequence
  Description of Artificial Sequence: Synthetic oligonucleotide
acgucggcgaccaccgaac

SEQ ID NO: 2786918 - RNA, 19 nt, Artificial Sequence
  Description of Artificial Sequence: Synthetic oligonucleotide
caccuaaccuuacuuaucu

SEQ ID NO: 2786919 - RNA, 19 nt, Artificial Sequence
  Description of Artificial Sequence: Synthetic oligonucleotide
gugauuaagcccagccuuc

SEQ ID NO: 2786920 - RNA, 19 nt, Artificial Sequence
  Description of Artificial Sequence: Synthetic oligonucleotide
uugaccggcuucaguccga

SEQ ID NO: 2786921 - RNA, 19 nt, Artificial Sequence
  Description of Artificial Sequence: Synthetic oligonucleotide
gauagccaucuccgaauaa

SEQ ID NO: 2786922 - RNA, 19 nt, Artificial Sequence
  Description of Artificial Sequence: Synthetic oligonucleotide
aagcacggguaggugucag

SEQ ID NO: 2786923 - RNA, 19 nt, Artificial Sequence
  Description of Artificial Sequence: Synthetic oligonucleotide
uuguggcacgcacuuucuc

SEQ ID NO: 2786924 - RNA, 19 nt, Artificial Sequence
  Description of Artificial Sequence: Synthetic oligonucleotide
aguccgacgcgagccaaag

SEQ ID NO: 2786925 - RNA, 19 nt, Artificial Sequence
  Description of Artificial Sequence: Synthetic oligonucleotide
auuuguccagacccuccau

SEQ ID NO: 2786926 - RNA, 19 nt, Artificial Sequence
  Description of Artificial Sequence: Synthetic oligonucleotide
ucgaaccagcuugaccggc

SEQ ID NO: 2786927 - RNA, 19 nt, Artificial Sequence
  Description of Artificial Sequence: Synthetic oligonucleotide
gucuguucgugaccuucgc

SEQ ID NO: 2786928 - RNA, 19 nt, Artificial Sequence
  Description of Artificial Sequence: Synthetic oligonucleotide
uaccauuaacugggccggg

SEQ ID NO: 2786929 - RNA, 19 nt, Artificial Sequence
  Description of Artificial Sequence: Synthetic oligonucleotide
cgcauaaucagccgauagc

SEQ ID NO: 2786930 - RNA, 19 nt, Artificial Sequence
  Description of Artificial Sequence: Synthetic oligonucleotide
gucugcguuggccgcugcg

SEQ ID NO: 2786931 - RNA, 19 nt, Artificial Sequence
  Description of Artificial Sequence: Synthetic oligonucleotide
uguccucugcagugucagc

SEQ ID NO: 2786932 - RNA, 19 nt, Artificial Sequence
  Description of Artificial Sequence: Synthetic oligonucleotide
cuggagaaacguccuuguc

SEQ ID NO: 2786933 - RNA, 19 nt, Artificial Sequence
  Description of Artificial Sequence: Synthetic oligonucleotide
gucggcgaccaccgaacag

SEQ ID NO: 2786934 - RNA, 19 nt, Artificial Sequence
  Description of Artificial Sequence: Synthetic oligonucleotide
cacuuucucgcugcucacc

SEQ ID NO: 2786935 - RNA, 19 nt, Artificial Sequence
  Description of Artificial Sequence: Synthetic oligonucleotide
gagaaacguccuugucgac

SEQ ID NO: 2786936 - RNA, 19 nt, Artificial Sequence
  Description of Artificial Sequence: Synthetic oligonucleotide
cagucuguucgugaccuuc

SEQ ID NO: 2786937 - RNA, 19 nt, Artificial Sequence
  Description of Artificial Sequence: Synthetic oligonucleotide
cucgcugcucaccgccugg

SEQ ID NO: 2786938 - RNA, 19 nt, Artificial Sequence
  Description of Artificial Sequence: Synthetic oligonucleotide
gccgcugcguuucuggccc

SEQ ID NO: 2786939 - RNA, 19 nt, Artificial Sequence
  Description of Artificial Sequence: Synthetic oligonucleotide
uugagguuuguggcacgca

SEQ ID NO: 2786940 - RNA, 19 nt, Artificial Sequence
  Description of Artificial Sequence: Synthetic oligonucleotide
uuggccgcugcggaugcug

SEQ ID NO: 2786941 - RNA, 19 nt, Artificial Sequence
  Description of Artificial Sequence: Synthetic oligonucleotide
uuaacugggccgggcuugu

SEQ ID NO: 2786942 - RNA, 19 nt, Artificial Sequence
  Description of Artificial Sequence: Synthetic oligonucleotide
ucgugaccuucgcguaacc

SEQ ID NO: 2786943 - RNA, 19 nt, Artificial Sequence
  Description of Artificial Sequence: Synthetic oligonucleotide
gcuugaccggcuucagucc

SEQ ID NO: 2786944 - RNA, 19 nt, Artificial Sequence
  Description of Artificial Sequence: Synthetic oligonucleotide
gagcggugagguuagcgcu

SEQ ID NO: 2786945 - RNA, 19 nt, Artificial Sequence
  Description of Artificial Sequence: Synthetic oligonucleotide
guccacgcagggcucggag

SEQ ID NO: 2786946 - RNA, 19 nt, Artificial Sequence
  Description of Artificial Sequence: Synthetic oligonucleotide
ucgagugauuaagcccagc

SEQ ID NO: 2786947 - RNA, 19 nt, Artificial Sequence
  Description of Artificial Sequence: Synthetic oligonucleotide
ugccucacgucggcgacca

SEQ ID NO: 2786948 - RNA, 19 nt, Artificial Sequence
  Description of Artificial Sequence: Synthetic oligonucleotide
ggugucagucuguucguga

SEQ ID NO: 2786949 - RNA, 19 nt, Artificial Sequence
  Description of Artificial Sequence: Synthetic oligonucleotide
uaagcccagccuucucuua

SEQ ID NO: 2786950 - RNA, 19 nt, Artificial Sequence
  Description of Artificial Sequence: Synthetic oligonucleotide
gcuaacauuugguuguuau

SEQ ID NO: 2786951 - RNA, 19 nt, Artificial Sequence
  Description of Artificial Sequence: Synthetic oligonucleotide
cuugucgacuccacguucu

SEQ ID NO: 2786952 - RNA, 19 nt, Artificial Sequence
  Description of Artificial Sequence: Synthetic oligonucleotide
ucaccgccuggagaaacgu

SEQ ID NO: 2786953 - RNA, 19 nt, Artificial Sequence
  Description of Artificial Sequence: Synthetic oligonucleotide
cuccaucaccuaaccuuac

SEQ ID NO: 2786954 - RNA, 19 nt, Artificial Sequence
  Description of Artificial Sequence: Synthetic oligonucleotide
agacagcagucuuuucguu

SEQ ID NO: 2786955 - RNA, 19 nt, Artificial Sequence
  Description of Artificial Sequence: Synthetic oligonucleotide
caucuccgaauaacacguc

SEQ ID NO: 2786956 - RNA, 19 nt, Artificial Sequence
  Description of Artificial Sequence: Synthetic oligonucleotide
ggugagguuagcgcugcgc

SEQ ID NO: 2786957 - RNA, 19 nt, Artificial Sequence
  Description of Artificial Sequence: Synthetic oligonucleotide
agguuagcgcugcgcauaa

SEQ ID NO: 2786958 - RNA, 19 nt, Artificial Sequence
  Description of Artificial Sequence: Synthetic oligonucleotide
gcugcgcauaaucagccga

SEQ ID NO: 2786959 - RNA, 19 nt, Artificial Sequence
  Description of Artificial Sequence: Synthetic oligonucleotide
gucagucuguucgugaccu

SEQ ID NO: 2786960 - RNA, 19 nt, Artificial Sequence
  Description of Artificial Sequence: Synthetic oligonucleotide
gagguuagcgcugcgcaua

SEQ ID NO: 2786961 - RNA, 19 nt, Artificial Sequence
  Description of Artificial Sequence: Synthetic oligonucleotide
aagcuaacauuugguuguu

SEQ ID NO: 2786962 - RNA, 19 nt, Artificial Sequence
  Description of Artificial Sequence: Synthetic oligonucleotide
ucgacuccacguucuucuc

SEQ ID NO: 2786963 - RNA, 19 nt, Artificial Sequence
  Description of Artificial Sequence: Synthetic oligonucleotide
cugccgcugcguuucuggc

SEQ ID NO: 2786964 - RNA, 19 nt, Artificial Sequence
  Description of Artificial Sequence: Synthetic oligonucleotide
ugucgacuccacguucuuc

SEQ ID NO: 2786965 - RNA, 19 nt, Artificial Sequence
  Description of Artificial Sequence: Synthetic oligonucleotide
ggguaccauuaacugggcc

SEQ ID NO: 2786966 - RNA, 19 nt, Artificial Sequence
  Description of Artificial Sequence: Synthetic oligonucleotide
uggcacgcacuuucucgcu

SEQ ID NO: 2786967 - RNA, 19 nt, Artificial Sequence
  Description of Artificial Sequence: Synthetic oligonucleotide
cucaaacgggcagaacuga

SEQ ID NO: 2786968 - RNA, 19 nt, Artificial Sequence
  Description of Artificial Sequence: Synthetic oligonucleotide
acguccuugucgacuccac

SEQ ID NO: 2786969 - RNA, 19 nt, Artificial Sequence
  Description of Artificial Sequence: Synthetic oligonucleotide
agccgauagccaucuccga

SEQ ID NO: 2786970 - RNA, 19 nt, Artificial Sequence
  Description of Artificial Sequence: Synthetic oligonucleotide
agcccagccuucucuuaga

SEQ ID NO: 2786971 - RNA, 19 nt, Artificial Sequence
  Description of Artificial Sequence: Synthetic oligonucleotide
cucggagccgucgugccuc

SEQ ID NO: 2786972 - RNA, 19 nt, Artificial Sequence
  Description of Artificial Sequence: Synthetic oligonucleotide
ccacgcagggcucggagcc

SEQ ID NO: 2786973 - RNA, 19 nt, Artificial Sequence
  Description of Artificial Sequence: Synthetic oligonucleotide
accuaaccuuacuuaucuu

SEQ ID NO: 2786974 - RNA, 19 nt, Artificial Sequence
  Description of Artificial Sequence: Synthetic oligonucleotide
ccaucuccgaauaacacgu

SEQ ID NO: 2786975 - RNA, 19 nt, Artificial Sequence
  Description of Artificial Sequence: Synthetic oligonucleotide
uucuggcccggauguggga

SEQ ID NO: 2786976 - RNA, 19 nt, Artificial Sequence
  Description of Artificial Sequence: Synthetic oligonucleotide
gugaccuucgcguaaccuu

SEQ ID NO: 2786977 - RNA, 19 nt, Artificial Sequence
  Description of Artificial Sequence: Synthetic oligonucleotide
guuauguccucugcagugu

SEQ ID NO: 2786978 - RNA, 19 nt, Artificial Sequence
  Description of Artificial Sequence: Synthetic oligonucleotide
uugucgacuccacguucuu

SEQ ID NO: 2786979 - RNA, 19 nt, Artificial Sequence
  Description of Artificial Sequence: Synthetic oligonucleotide
guucgugaccuucgcguaa

SEQ ID NO: 2786980 - RNA, 19 nt, Artificial Sequence
  Description of Artificial Sequence: Synthetic oligonucleotide
gcacgcacuuucucgcugc

SEQ ID NO: 2786981 - RNA, 19 nt, Artificial Sequence
  Description of Artificial Sequence: Synthetic oligonucleotide
agcggugagguuagcgcug

SEQ ID NO: 2786982 - RNA, 19 nt, Artificial Sequence
  Description of Artificial Sequence: Synthetic oligonucleotide
ccgacgcgagccaaagccg

SEQ ID NO: 2786983 - RNA, 19 nt, Artificial Sequence
  Description of Artificial Sequence: Synthetic oligonucleotide
gaacucgaaccagcuugac

SEQ ID NO: 2786984 - RNA, 19 nt, Artificial Sequence
  Description of Artificial Sequence: Synthetic oligonucleotide
gaccggcuucaguccgacg

SEQ ID NO: 2786985 - RNA, 19 nt, Artificial Sequence
  Description of Artificial Sequence: Synthetic oligonucleotide
gcuucaguccgacgcgagc

SEQ ID NO: 2786986 - RNA, 19 nt, Artificial Sequence
  Description of Artificial Sequence: Synthetic oligonucleotide
cuucucaaacgggcagaac

SEQ ID NO: 2786987 - RNA, 19 nt, Artificial Sequence
  Description of Artificial Sequence: Synthetic oligonucleotide
aggugucagucuguucgug

SEQ ID NO: 2786988 - RNA, 19 nt, Artificial Sequence
  Description of Artificial Sequence: Synthetic oligonucleotide
aucagccgauagccaucuc

SEQ ID NO: 2786989 - RNA, 19 nt, Artificial Sequence
  Description of Artificial Sequence: Synthetic oligonucleotide
ugcgcauaaucagccgaua

SEQ ID NO: 2786990 - RNA, 19 nt, Artificial Sequence
  Description of Artificial Sequence: Synthetic oligonucleotide
gccuggagaaacguccuug

SEQ ID NO: 2786991 - RNA, 19 nt, Artificial Sequence
  Description of Artificial Sequence: Synthetic oligonucleotide
agccgucgugccucacguc

SEQ ID NO: 2786992 - RNA, 19 nt, Artificial Sequence
  Description of Artificial Sequence: Synthetic oligonucleotide
cagacccuccaucaccuaa

SEQ ID NO: 2786993 - RNA, 19 nt, Artificial Sequence
  Description of Artificial Sequence: Synthetic oligonucleotide
cacguccacgcagggcucg

SEQ ID NO: 2786994 - RNA, 19 nt, Artificial Sequence
  Description of Artificial Sequence: Synthetic oligonucleotide
ugaccggcuucaguccgac

SEQ ID NO: 2786995 - RNA, 19 nt, Artificial Sequence
  Description of Artificial Sequence: Synthetic oligonucleotide
ucaguccgacgcgagccaa

SEQ ID NO: 2786996 - RNA, 19 nt, Artificial Sequence
  Description of Artificial Sequence: Synthetic oligonucleotide
ugucugcguuggccgcugc

SEQ ID NO: 2786997 - RNA, 19 nt, Artificial Sequence
  Description of Artificial Sequence: Synthetic oligonucleotide
gagccgucgugccucacgu

SEQ ID NO: 2786998 - RNA, 19 nt, Artificial Sequence
  Description of Artificial Sequence: Synthetic oligonucleotide
acgcacuuucucgcugcuc

SEQ ID NO: 2786999 - RNA, 19 nt, Artificial Sequence
  Description of Artificial Sequence: Synthetic oligonucleotide
ggcacgcacuuucucgcug

SEQ ID NO: 2787000 - RNA, 19 nt, Artificial Sequence
  Description of Artificial Sequence: Synthetic oligonucleotide
cagugucagcgccggguac

SEQ ID NO: 2787001 - RNA, 19 nt, Artificial Sequence
  Description of Artificial Sequence: Synthetic oligonucleotide
uggcccggaugugggaggc

SEQ ID NO: 2787002 - RNA, 19 nt, Artificial Sequence
  Description of Artificial Sequence: Synthetic oligonucleotide
cugggccgggcuugucugc

SEQ ID NO: 2787003 - RNA, 19 nt, Artificial Sequence
  Description of Artificial Sequence: Synthetic oligonucleotide
gacgcgagccaaagccgac

SEQ ID NO: 2787004 - RNA, 19 nt, Artificial Sequence
  Description of Artificial Sequence: Synthetic oligonucleotide
gucgugccucacgucggcg

SEQ ID NO: 2787005 - RNA, 19 nt, Artificial Sequence
  Description of Artificial Sequence: Synthetic oligonucleotide
gggcuugucugcguuggcc

SEQ ID NO: 2787006 - RNA, 19 nt, Artificial Sequence
  Description of Artificial Sequence: Synthetic oligonucleotide
gagguuuguggcacgcacu

SEQ ID NO: 2787007 - RNA, 19 nt, Artificial Sequence
  Description of Artificial Sequence: Synthetic oligonucleotide
gguaggugucagucuguuc

SEQ ID NO: 2787008 - RNA, 19 nt, Artificial Sequence
  Description of Artificial Sequence: Synthetic oligonucleotide
cguuccaagcuaacauuug

SEQ ID NO: 2787009 - RNA, 19 nt, Artificial Sequence
  Description of Artificial Sequence: Synthetic oligonucleotide
agcagucuuuucguuccaa

SEQ ID NO: 2787010 - RNA, 19 nt, Artificial Sequence
  Description of Artificial Sequence: Synthetic oligonucleotide
caccgccuggagaaacguc

SEQ ID NO: 2787011 - RNA, 19 nt, Artificial Sequence
  Description of Artificial Sequence: Synthetic oligonucleotide
ccucacgucggcgaccacc

SEQ ID NO: 2787012 - RNA, 19 nt, Artificial Sequence
  Description of Artificial Sequence: Synthetic oligonucleotide
guccgacgcgagccaaagc

SEQ ID NO: 2787013 - RNA, 19 nt, Artificial Sequence
  Description of Artificial Sequence: Synthetic oligonucleotide
gccgauagccaucuccgaa

SEQ ID NO: 2787014 - RNA, 19 nt, Artificial Sequence
  Description of Artificial Sequence: Synthetic oligonucleotide
ccggcuucaguccgacgcg

SEQ ID NO: 2787015 - RNA, 19 nt, Artificial Sequence
  Description of Artificial Sequence: Synthetic oligonucleotide
cacgucggcgaccaccgaa

SEQ ID NO: 2787016 - RNA, 19 nt, Artificial Sequence
  Description of Artificial Sequence: Synthetic oligonucleotide
acuccacguucuucucaaa

SEQ ID NO: 2787017 - RNA, 19 nt, Artificial Sequence
  Description of Artificial Sequence: Synthetic oligonucleotide
cucuuagacagcagucuuu

SEQ ID NO: 2787018 - RNA, 19 nt, Artificial Sequence
  Description of Artificial Sequence: Synthetic oligonucleotide
ucacgucggcgaccaccga

SEQ ID NO: 2787019 - RNA, 19 nt, Artificial Sequence
  Description of Artificial Sequence: Synthetic oligonucleotide
ccuugucgacuccacguuc

SEQ ID NO: 2787020 - RNA, 19 nt, Artificial Sequence
  Description of Artificial Sequence: Synthetic oligonucleotide
cacgcagggcucggagccg

SEQ ID NO: 2787021 - RNA, 19 nt, Artificial Sequence
  Description of Artificial Sequence: Synthetic oligonucleotide
gcacggguaggugucaguc

SEQ ID NO: 2787022 - RNA, 19 nt, Artificial Sequence
  Description of Artificial Sequence: Synthetic oligonucleotide
gugggaggccaaggcagug

SEQ ID NO: 2787023 - RNA, 19 nt, Artificial Sequence
  Description of Artificial Sequence: Synthetic oligonucleotide
gaccuucgcguaaccuuuc

SEQ ID NO: 2787024 - RNA, 19 nt, Artificial Sequence
  Description of Artificial Sequence: Synthetic oligonucleotide
caccgaacaguugagguuu

SEQ ID NO: 2787025 - RNA, 19 nt, Artificial Sequence
  Description of Artificial Sequence: Synthetic oligonucleotide
accgaacaguugagguuug

SEQ ID NO: 2787026 - RNA, 19 nt, Artificial Sequence
  Description of Artificial Sequence: Synthetic oligonucleotide
gccgcugcggaugcugccg

SEQ ID NO: 2787027 - RNA, 19 nt, Artificial Sequence
  Description of Artificial Sequence: Synthetic oligonucleotide
gcgcugcgcauaaucagcc

SEQ ID NO: 2787028 - RNA, 19 nt, Artificial Sequence
  Description of Artificial Sequence: Synthetic oligonucleotide
ggcucggagccgucgugcc

SEQ ID NO: 2787029 - RNA, 19 nt, Artificial Sequence
  Description of Artificial Sequence: Synthetic oligonucleotide
ucggagccgucgugccuca

SEQ ID NO: 2787030 - RNA, 19 nt, Artificial Sequence
  Description of Artificial Sequence: Synthetic oligonucleotide
acguccacgcagggcucgg

SEQ ID NO: 2787031 - RNA, 19 nt, Artificial Sequence
  Description of Artificial Sequence: Synthetic oligonucleotide
ccuccaucaccuaaccuua

SEQ ID NO: 2787032 - RNA, 19 nt, Artificial Sequence
  Description of Artificial Sequence: Synthetic oligonucleotide
cugcguuggccgcugcgga

SEQ ID NO: 2787033 - RNA, 19 nt, Artificial Sequence
  Description of Artificial Sequence: Synthetic oligonucleotide
cgaacaguugagguuugug

SEQ ID NO: 2787034 - RNA, 19 nt, Artificial Sequence
  Description of Artificial Sequence: Synthetic oligonucleotide
cguucuucucaaacgggca

SEQ ID NO: 2787035 - RNA, 19 nt, Artificial Sequence
  Description of Artificial Sequence: Synthetic oligonucleotide
ccgucgugccucacgucgg

SEQ ID NO: 2787036 - RNA, 19 nt, Artificial Sequence
  Description of Artificial Sequence: Synthetic oligonucleotide
cugcgcauaaucagccgau

SEQ ID NO: 2787037 - RNA, 19 nt, Artificial Sequence
  Description of Artificial Sequence: Synthetic oligonucleotide
agcuaacauuugguuguua

SEQ ID NO: 2787038 - RNA, 19 nt, Artificial Sequence
  Description of Artificial Sequence: Synthetic oligonucleotide
ccaaagcacggguaggugu

SEQ ID NO: 2787039 - RNA, 19 nt, Artificial Sequence
  Description of Artificial Sequence: Synthetic oligonucleotide
cugcagugucagcgccggg

SEQ ID NO: 2787040 - RNA, 19 nt, Artificial Sequence
  Description of Artificial Sequence: Synthetic oligonucleotide
gcguuucuggcccggaugu

SEQ ID NO: 2787041 - RNA, 19 nt, Artificial Sequence
  Description of Artificial Sequence: Synthetic oligonucleotide
cgccggguaccauuaacug

SEQ ID NO: 2787042 - RNA, 19 nt, Artificial Sequence
  Description of Artificial Sequence: Synthetic oligonucleotide
gcacuuucucgcugcucac

SEQ ID NO: 2787043 - RNA, 19 nt, Artificial Sequence
  Description of Artificial Sequence: Synthetic oligonucleotide
cgaauaacacguccacgca

SEQ ID NO: 2787044 - RNA, 19 nt, Artificial Sequence
  Description of Artificial Sequence: Synthetic oligonucleotide
gaaccagcuugaccggcuu

SEQ ID NO: 2787045 - RNA, 19 nt, Artificial Sequence
  Description of Artificial Sequence: Synthetic oligonucleotide
ggcuucaguccgacgcgag

SEQ ID NO: 2787046 - RNA, 19 nt, Artificial Sequence
  Description of Artificial Sequence: Synthetic oligonucleotide
gcccagccuucucuuagac

SEQ ID NO: 2787047 - RNA, 19 nt, Artificial Sequence
  Description of Artificial Sequence: Synthetic oligonucleotide
cacggguaggugucagucu

SEQ ID NO: 2787048 - RNA, 19 nt, Artificial Sequence
  Description of Artificial Sequence: Synthetic oligonucleotide
cauuaacugggccgggcuu

SEQ ID NO: 2787049 - RNA, 19 nt, Artificial Sequence
  Description of Artificial Sequence: Synthetic oligonucleotide
gcagggcucggagccgucg

SEQ ID NO: 2787050 - RNA, 19 nt, Artificial Sequence
  Description of Artificial Sequence: Synthetic oligonucleotide
gugucagcgccggguacca

SEQ ID NO: 2787051 - RNA, 19 nt, Artificial Sequence
  Description of Artificial Sequence: Synthetic oligonucleotide
gugccucacgucggcgacc

SEQ ID NO: 2787052 - RNA, 19 nt, Artificial Sequence
  Description of Artificial Sequence: Synthetic oligonucleotide
gucagcgccggguaccauu

SEQ ID NO: 2787053 - RNA, 19 nt, Artificial Sequence
  Description of Artificial Sequence: Synthetic oligonucleotide
ugcucaccgccuggagaaa

SEQ ID NO: 2787054 - RNA, 19 nt, Artificial Sequence
  Description of Artificial Sequence: Synthetic oligonucleotide
acgcagggcucggagccgu

SEQ ID NO: 2787055 - RNA, 19 nt, Artificial Sequence
  Description of Artificial Sequence: Synthetic oligonucleotide
gggcucggagccgucgugc

SEQ ID NO: 2787056 - RNA, 19 nt, Artificial Sequence
  Description of Artificial Sequence: Synthetic oligonucleotide
cagcagucuuuucguucca

SEQ ID NO: 2787057 - RNA, 19 nt, Artificial Sequence
  Description of Artificial Sequence: Synthetic oligonucleotide
cgcugcgcauaaucagccg

SEQ ID NO: 2787058 - RNA, 19 nt, Artificial Sequence
  Description of Artificial Sequence: Synthetic oligonucleotide
gcagugucagcgccgggua

SEQ ID NO: 2787059 - RNA, 19 nt, Artificial Sequence
  Description of Artificial Sequence: Synthetic oligonucleotide
gcguuggccgcugcggaug

SEQ ID NO: 2787060 - RNA, 19 nt, Artificial Sequence
  Description of Artificial Sequence: Synthetic oligonucleotide
gcugcggaugcugccgcug

SEQ ID NO: 2787061 - RNA, 19 nt, Artificial Sequence
  Description of Artificial Sequence: Synthetic oligonucleotide
cgaccaccgaacaguugag

SEQ ID NO: 2787062 - RNA, 19 nt, Artificial Sequence
  Description of Artificial Sequence: Synthetic oligonucleotide
cccaaagcacggguaggug

SEQ ID NO: 2787063 - RNA, 19 nt, Artificial Sequence
  Description of Artificial Sequence: Synthetic oligonucleotide
ccuggagaaacguccuugu

SEQ ID NO: 2787064 - RNA, 19 nt, Artificial Sequence
  Description of Artificial Sequence: Synthetic oligonucleotide
ccaaggcagugaacauuuc

SEQ ID NO: 2787065 - RNA, 19 nt, Artificial Sequence
  Description of Artificial Sequence: Synthetic oligonucleotide
caguccgacgcgagccaaa

SEQ ID NO: 2787066 - RNA, 19 nt, Artificial Sequence
  Description of Artificial Sequence: Synthetic oligonucleotide
gccgggcuugucugcguug

SEQ ID NO: 2787067 - RNA, 19 nt, Artificial Sequence
  Description of Artificial Sequence: Synthetic oligonucleotide
uaacugggccgggcuuguc

SEQ ID NO: 2787068 - RNA, 19 nt, Artificial Sequence
  Description of Artificial Sequence: Synthetic oligonucleotide
cuugucugcguuggccgcu

SEQ ID NO: 2787069 - RNA, 19 nt, Artificial Sequence
  Description of Artificial Sequence: Synthetic oligonucleotide
ccuucgcguaaccuuucga

SEQ ID NO: 2787070 - RNA, 19 nt, Artificial Sequence
  Description of Artificial Sequence: Synthetic oligonucleotide
ccauuaacugggccgggcu

SEQ ID NO: 2787071 - RNA, 19 nt, Artificial Sequence
  Description of Artificial Sequence: Synthetic oligonucleotide
ccgauagccaucuccgaau

SEQ ID NO: 2787072 - RNA, 19 nt, Artificial Sequence
  Description of Artificial Sequence: Synthetic oligonucleotide
ccaucaccuaaccuuacuu

SEQ ID NO: 2787073 - RNA, 19 nt, Artificial Sequence
  Description of Artificial Sequence: Synthetic oligonucleotide
ggcgaccaccgaacaguug

SEQ ID NO: 2787074 - RNA, 19 nt, Artificial Sequence
  Description of Artificial Sequence: Synthetic oligonucleotide
ccagcuugaccggcuucag

SEQ ID NO: 2787075 - RNA, 19 nt, Artificial Sequence
  Description of Artificial Sequence: Synthetic oligonucleotide
cggguaccauuaacugggc

SEQ ID NO: 2787076 - RNA, 19 nt, Artificial Sequence
  Description of Artificial Sequence: Synthetic oligonucleotide
caaagccgacgccaugguu

SEQ ID NO: 2787077 - RNA, 19 nt, Artificial Sequence
  Description of Artificial Sequence: Synthetic oligonucleotide
ugucagcgccggguaccau

SEQ ID NO: 2787078 - RNA, 19 nt, Artificial Sequence
  Description of Artificial Sequence: Synthetic oligonucleotide
cgcguaaccuuucgaguga

SEQ ID NO: 2787079 - RNA, 19 nt, Artificial Sequence
  Description of Artificial Sequence: Synthetic oligonucleotide
cguuggccgcugcggaugc

SEQ ID NO: 2787080 - RNA, 19 nt, Artificial Sequence
  Description of Artificial Sequence: Synthetic oligonucleotide
cagcuugaccggcuucagu

SEQ ID NO: 2787081 - RNA, 19 nt, Artificial Sequence
  Description of Artificial Sequence: Synthetic oligonucleotide
gcgccggguaccauuaacu

SEQ ID NO: 2787082 - RNA, 19 nt, Artificial Sequence
  Description of Artificial Sequence: Synthetic oligonucleotide
cgacgcgagccaaagccga

SEQ ID NO: 2787083 - RNA, 19 nt, Artificial Sequence
  Description of Artificial Sequence: Synthetic oligonucleotide
cgucgugccucacgucggc

SEQ ID NO: 2787084 - RNA, 19 nt, Artificial Sequence
  Description of Artificial Sequence: Synthetic oligonucleotide
cacgcacuuucucgcugcu

SEQ ID NO: 2787085 - RNA, 19 nt, Artificial Sequence
  Description of Artificial Sequence: Synthetic oligonucleotide
gggcagaacugaacucgaa

SEQ ID NO: 2787086 - RNA, 19 nt, Artificial Sequence
  Description of Artificial Sequence: Synthetic oligonucleotide
cgggcagaacugaacucga

SEQ ID NO: 2787087 - RNA, 19 nt, Artificial Sequence
  Description of Artificial Sequence: Synthetic oligonucleotide
ccaccgaacaguugagguu

SEQ ID NO: 2787088 - RNA, 19 nt, Artificial Sequence
  Description of Artificial Sequence: Synthetic oligonucleotide
ggccaaggcagugaacauu

SEQ ID NO: 2787089 - RNA, 19 nt, Artificial Sequence
  Description of Artificial Sequence: Synthetic oligonucleotide
cgauagccaucuccgaaua

SEQ ID NO: 2787090 - RNA, 19 nt, Artificial Sequence
  Description of Artificial Sequence: Synthetic oligonucleotide
cugcguuucuggcccggau

SEQ ID NO: 2787091 - RNA, 19 nt, Artificial Sequence
  Description of Artificial Sequence: Synthetic oligonucleotide
ggaugcugccgcugcguuu

SEQ ID NO: 2787092 - RNA, 19 nt, Artificial Sequence
  Description of Artificial Sequence: Synthetic oligonucleotide
gcugcguuucuggcccgga

SEQ ID NO: 2787093 - RNA, 19 nt, Artificial Sequence
  Description of Artificial Sequence: Synthetic oligonucleotide
ccgcugcguuucuggcccg

SEQ ID NO: 2787094 - RNA, 19 nt, Artificial Sequence
  Description of Artificial Sequence: Synthetic oligonucleotide
cgcugcucaccgccuggag

SEQ ID NO: 2787095 - RNA, 19 nt, Artificial Sequence
  Description of Artificial Sequence: Synthetic oligonucleotide
cguuucuggcccggaugug

SEQ ID NO: 2787096 - RNA, 19 nt, Artificial Sequence
  Description of Artificial Sequence: Synthetic oligonucleotide
ggguaggugucagucuguu

SEQ ID NO: 2787097 - RNA, 19 nt, Artificial Sequence
  Description of Artificial Sequence: Synthetic oligonucleotide
ggcccggaugugggaggcc

SEQ ID NO: 2787098 - RNA, 19 nt, Artificial Sequence
  Description of Artificial Sequence: Synthetic oligonucleotide
gcucggagccgucgugccu

SEQ ID NO: 2787099 - RNA, 19 nt, Artificial Sequence
  Description of Artificial Sequence: Synthetic oligonucleotide
cggugagguuagcgcugcg

SEQ ID NO: 2787100 - RNA, 19 nt, Artificial Sequence
  Description of Artificial Sequence: Synthetic oligonucleotide
cagcgccggguaccauuaa

SEQ ID NO: 2787101 - RNA, 19 nt, Artificial Sequence
  Description of Artificial Sequence: Synthetic oligonucleotide
gcguaaccuuucgagugau

SEQ ID NO: 2787102 - RNA, 19 nt, Artificial Sequence
  Description of Artificial Sequence: Synthetic oligonucleotide
ccgccuggagaaacguccu

SEQ ID NO: 2787103 - RNA, 19 nt, Artificial Sequence
  Description of Artificial Sequence: Synthetic oligonucleotide
gguuuguggcacgcacuuu

SEQ ID NO: 2787104 - RNA, 19 nt, Artificial Sequence
  Description of Artificial Sequence: Synthetic oligonucleotide
cgcugcguuucuggcccgg

SEQ ID NO: 2787105 - RNA, 19 nt, Artificial Sequence
  Description of Artificial Sequence: Synthetic oligonucleotide
cgucggcgaccaccgaaca

SEQ ID NO: 2787106 - RNA, 19 nt, Artificial Sequence
  Description of Artificial Sequence: Synthetic oligonucleotide
cccggaugugggaggccaa

SEQ ID NO: 2787107 - RNA, 19 nt, Artificial Sequence
  Description of Artificial Sequence: Synthetic oligonucleotide
guuggccgcugcggaugcu

SEQ ID NO: 2787108 - RNA, 19 nt, Artificial Sequence
  Description of Artificial Sequence: Synthetic oligonucleotide
cggcuucaguccgacgcga

SEQ ID NO: 2787109 - RNA, 19 nt, Artificial Sequence
  Description of Artificial Sequence: Synthetic oligonucleotide
gguuagcgcugcgcauaau

SEQ ID NO: 2787110 - RNA, 19 nt, Artificial Sequence
  Description of Artificial Sequence: Synthetic oligonucleotide
ccgaacaguugagguuugu

SEQ ID NO: 2787111 - RNA, 19 nt, Artificial Sequence
  Description of Artificial Sequence: Synthetic oligonucleotide
cggguaggugucagucugu

SEQ ID NO: 2787112 - RNA, 19 nt, Artificial Sequence
  Description of Artificial Sequence: Synthetic oligonucleotide
cguaaccuuucgagugauu

SEQ ID NO: 2787113 - RNA, 19 nt, Artificial Sequence
  Description of Artificial Sequence: Synthetic oligonucleotide
cguccacgcagggcucgga

SEQ ID NO: 2787114 - RNA, 19 nt, Artificial Sequence
  Description of Artificial Sequence: Synthetic oligonucleotide
cggcgaccaccgaacaguu

SEQ ID NO: 2787115 - RNA, 19 nt, Artificial Sequence
  Description of Artificial Sequence: Synthetic oligonucleotide
cggaugcugccgcugcguu

SEQ ID NO: 2787116 - RNA, 19 nt, Artificial Sequence
  Description of Artificial Sequence: Synthetic oligonucleotide
cgcugcggaugcugccgcu

SEQ ID NO: 2787117 - RNA, 19 nt, Artificial Sequence
  Description of Artificial Sequence: Synthetic oligonucleotide
cggagccgucgugccucac

SEQ ID NO: 2787118 - RNA, 19 nt, Artificial Sequence
  Description of Artificial Sequence: Synthetic oligonucleotide
cgccuggagaaacguccuu

SEQ ID NO: 2787119 - RNA, 19 nt, Artificial Sequence
  Description of Artificial Sequence: Synthetic oligonucleotide
agugugaucacuuccaggc

SEQ ID NO: 2787120 - RNA, 19 nt, Artificial Sequence
  Description of Artificial Sequence: Synthetic oligonucleotide
aaccauagcacccugaggu

SEQ ID NO: 2787121 - RNA, 19 nt, Artificial Sequence
  Description of Artificial Sequence: Synthetic oligonucleotide
auaucagugagcuggcugc

SEQ ID NO: 2787122 - RNA, 19 nt, Artificial Sequence
  Description of Artificial Sequence: Synthetic oligonucleotide
ggaaauaucagugagcugg

SEQ ID NO: 2787123 - RNA, 19 nt, Artificial Sequence
  Description of Artificial Sequence: Synthetic oligonucleotide
cuuuagguagaacaguucg

SEQ ID NO: 2787124 - RNA, 19 nt, Artificial Sequence
  Description of Artificial Sequence: Synthetic oligonucleotide
uuugugagaaggaaggaga

SEQ ID NO: 2787125 - RNA, 19 nt, Artificial Sequence
  Description of Artificial Sequence: Synthetic oligonucleotide
ucucaguugagcuugguug

SEQ ID NO: 2787126 - RNA, 19 nt, Artificial Sequence
  Description of Artificial Sequence: Synthetic oligonucleotide
aaaggugcgggcuggugcc

SEQ ID NO: 2787127 - RNA, 19 nt, Artificial Sequence
  Description of Artificial Sequence: Synthetic oligonucleotide
aaggaaggagauuuggucu

SEQ ID NO: 2787128 - RNA, 19 nt, Artificial Sequence
  Description of Artificial Sequence: Synthetic oligonucleotide
auauggaaauaucagugag

SEQ ID NO: 2787129 - RNA, 19 nt, Artificial Sequence
  Description of Artificial Sequence: Synthetic oligonucleotide
acacuguugacacugagug

SEQ ID NO: 2787130 - RNA, 19 nt, Artificial Sequence
  Description of Artificial Sequence: Synthetic oligonucleotide
acugagugugaucacuucc

SEQ ID NO: 2787131 - RNA, 19 nt, Artificial Sequence
  Description of Artificial Sequence: Synthetic oligonucleotide
uauggaaauaucagugagc

SEQ ID NO: 2787132 - RNA, 19 nt, Artificial Sequence
  Description of Artificial Sequence: Synthetic oligonucleotide
ucuagcuucugcgaggugg

SEQ ID NO: 2787133 - RNA, 19 nt, Artificial Sequence
  Description of Artificial Sequence: Synthetic oligonucleotide
agucaugcgguaaaggugc

SEQ ID NO: 2787134 - RNA, 19 nt, Artificial Sequence
  Description of Artificial Sequence: Synthetic oligonucleotide
uucucggccaaccauagca

SEQ ID NO: 2787135 - RNA, 19 nt, Artificial Sequence
  Description of Artificial Sequence: Synthetic oligonucleotide
ugguagguccuuuagguag

SEQ ID NO: 2787136 - RNA, 19 nt, Artificial Sequence
  Description of Artificial Sequence: Synthetic oligonucleotide
ugugguagguccuuuaggu

SEQ ID NO: 2787137 - RNA, 19 nt, Artificial Sequence
  Description of Artificial Sequence: Synthetic oligonucleotide
aggagauuuggucuccagc

SEQ ID NO: 2787138 - RNA, 19 nt, Artificial Sequence
  Description of Artificial Sequence: Synthetic oligonucleotide
caagauggcagucaggaug

SEQ ID NO: 2787139 - RNA, 19 nt, Artificial Sequence
  Description of Artificial Sequence: Synthetic oligonucleotide
agguccuuuagguagaaca

SEQ ID NO: 2787140 - RNA, 19 nt, Artificial Sequence
  Description of Artificial Sequence: Synthetic oligonucleotide
acauauggaaauaucagug

SEQ ID NO: 2787141 - RNA, 19 nt, Artificial Sequence
  Description of Artificial Sequence: Synthetic oligonucleotide
agcuugguugucuagcuuc

SEQ ID NO: 2787142 - RNA, 19 nt, Artificial Sequence
  Description of Artificial Sequence: Synthetic oligonucleotide
ugugaucacuuccaggcug

SEQ ID NO: 2787143 - RNA, 19 nt, Artificial Sequence
  Description of Artificial Sequence: Synthetic oligonucleotide
acuguugacacugagugug

SEQ ID NO: 2787144 - RNA, 19 nt, Artificial Sequence
  Description of Artificial Sequence: Synthetic oligonucleotide
uccauauccguccuggggu

SEQ ID NO: 2787145 - RNA, 19 nt, Artificial Sequence
  Description of Artificial Sequence: Synthetic oligonucleotide
auggaaauaucagugagcu

SEQ ID NO: 2787146 - RNA, 19 nt, Artificial Sequence
  Description of Artificial Sequence: Synthetic oligonucleotide
ugguugucuagcuucugcg

SEQ ID NO: 2787147 - RNA, 19 nt, Artificial Sequence
  Description of Artificial Sequence: Synthetic oligonucleotide
acagucaugcgguaaaggu

SEQ ID NO: 2787148 - RNA, 19 nt, Artificial Sequence
  Description of Artificial Sequence: Synthetic oligonucleotide
uuuagguagaacaguucgu

SEQ ID NO: 2787149 - RNA, 19 nt, Artificial Sequence
  Description of Artificial Sequence: Synthetic oligonucleotide
cugaacagucucuagcccc

SEQ ID NO: 2787150 - RNA, 19 nt, Artificial Sequence
  Description of Artificial Sequence: Synthetic oligonucleotide
aggaaggagauuuggucuc

SEQ ID NO: 2787151 - RNA, 19 nt, Artificial Sequence
  Description of Artificial Sequence: Synthetic oligonucleotide
ugggguuccagccugugca

SEQ ID NO: 2787152 - RNA, 19 nt, Artificial Sequence
  Description of Artificial Sequence: Synthetic oligonucleotide
uguguagcucagcaggccc

SEQ ID NO: 2787153 - RNA, 19 nt, Artificial Sequence
  Description of Artificial Sequence: Synthetic oligonucleotide
gauguuccuauucuuguga

SEQ ID NO: 2787154 - RNA, 19 nt, Artificial Sequence
  Description of Artificial Sequence: Synthetic oligonucleotide
cuugugacuccucacaguc

SEQ ID NO: 2787155 - RNA, 19 nt, Artificial Sequence
  Description of Artificial Sequence: Synthetic oligonucleotide
auguuccuauucuugugac

SEQ ID NO: 2787156 - RNA, 19 nt, Artificial Sequence
  Description of Artificial Sequence: Synthetic oligonucleotide
aacaguucguccaggcugg

SEQ ID NO: 2787157 - RNA, 19 nt, Artificial Sequence
  Description of Artificial Sequence: Synthetic oligonucleotide
agucaggauguuccuauuc

SEQ ID NO: 2787158 - RNA, 19 nt, Artificial Sequence
  Description of Artificial Sequence: Synthetic oligonucleotide
uugucuagcuucugcgagg

SEQ ID NO: 2787159 - RNA, 19 nt, Artificial Sequence
  Description of Artificial Sequence: Synthetic oligonucleotide
uuuggucuccagcagucug

SEQ ID NO: 2787160 - RNA, 19 nt, Artificial Sequence
  Description of Artificial Sequence: Synthetic oligonucleotide
ugcgaggugggguagguug

SEQ ID NO: 2787161 - RNA, 19 nt, Artificial Sequence
  Description of Artificial Sequence: Synthetic oligonucleotide
gauacgguuccuccucagg

SEQ ID NO: 2787162 - RNA, 19 nt, Artificial Sequence
  Description of Artificial Sequence: Synthetic oligonucleotide
guugucuagcuucugcgag

SEQ ID NO: 2787163 - RNA, 19 nt, Artificial Sequence
  Description of Artificial Sequence: Synthetic oligonucleotide
uccucuguguagcucagca

SEQ ID NO: 2787164 - RNA, 19 nt, Artificial Sequence
  Description of Artificial Sequence: Synthetic oligonucleotide
gucuccagcagucuggccc

SEQ ID NO: 2787165 - RNA, 19 nt, Artificial Sequence
  Description of Artificial Sequence: Synthetic oligonucleotide
uuagguagaacaguucguc

SEQ ID NO: 2787166 - RNA, 19 nt, Artificial Sequence
  Description of Artificial Sequence: Synthetic oligonucleotide
cuuugugagaaggaaggag

SEQ ID NO: 2787167 - RNA, 19 nt, Artificial Sequence
  Description of Artificial Sequence: Synthetic oligonucleotide
ugagugugaucacuuccag

SEQ ID NO: 2787168 - RNA, 19 nt, Artificial Sequence
  Description of Artificial Sequence: Synthetic oligonucleotide
aguucguccaggcugggga

SEQ ID NO: 2787169 - RNA, 19 nt, Artificial Sequence
  Description of Artificial Sequence: Synthetic oligonucleotide
uagguagaacaguucgucc

SEQ ID NO: 2787170 - RNA, 19 nt, Artificial Sequence
  Description of Artificial Sequence: Synthetic oligonucleotide
uccuuuagguagaacaguu

SEQ ID NO: 2787171 - RNA, 19 nt, Artificial Sequence
  Description of Artificial Sequence: Synthetic oligonucleotide
acgguuccuccucagguac

SEQ ID NO: 2787172 - RNA, 19 nt, Artificial Sequence
  Description of Artificial Sequence: Synthetic oligonucleotide
cauauggaaauaucaguga

SEQ ID NO: 2787173 - RNA, 19 nt, Artificial Sequence
  Description of Artificial Sequence: Synthetic oligonucleotide
aaggagauuuggucuccag

SEQ ID NO: 2787174 - RNA, 19 nt, Artificial Sequence
  Description of Artificial Sequence: Synthetic oligonucleotide
ugaacagucucuagccccu

SEQ ID NO: 2787175 - RNA, 19 nt, Artificial Sequence
  Description of Artificial Sequence: Synthetic oligonucleotide
uugcgcagcacagucaugc

SEQ ID NO: 2787176 - RNA, 19 nt, Artificial Sequence
  Description of Artificial Sequence: Synthetic oligonucleotide
agcgccuguagcuggcugc

SEQ ID NO: 2787177 - RNA, 19 nt, Artificial Sequence
  Description of Artificial Sequence: Synthetic oligonucleotide
ugugacuccucacagucuu

SEQ ID NO: 2787178 - RNA, 19 nt, Artificial Sequence
  Description of Artificial Sequence: Synthetic oligonucleotide
ucacagucuuccuuuguga

SEQ ID NO: 2787179 - RNA, 19 nt, Artificial Sequence
  Description of Artificial Sequence: Synthetic oligonucleotide
acguacagguuccagggug

SEQ ID NO: 2787180 - RNA, 19 nt, Artificial Sequence
  Description of Artificial Sequence: Synthetic oligonucleotide
auacgguuccuccucaggu

SEQ ID NO: 2787181 - RNA, 19 nt, Artificial Sequence
  Description of Artificial Sequence: Synthetic oligonucleotide
uauucuugugacuccucac

SEQ ID NO: 2787182 - RNA, 19 nt, Artificial Sequence
  Description of Artificial Sequence: Synthetic oligonucleotide
acuucuguuuccucugugu

SEQ ID NO: 2787183 - RNA, 19 nt, Artificial Sequence
  Description of Artificial Sequence: Synthetic oligonucleotide
ucucccgacauauggaaau

SEQ ID NO: 2787184 - RNA, 19 nt, Artificial Sequence
  Description of Artificial Sequence: Synthetic oligonucleotide
ucagugagcuggcugcccc

SEQ ID NO: 2787185 - RNA, 19 nt, Artificial Sequence
  Description of Artificial Sequence: Synthetic oligonucleotide
guuuccucuguguagcuca

SEQ ID NO: 2787186 - RNA, 19 nt, Artificial Sequence
  Description of Artificial Sequence: Synthetic oligonucleotide
agauuuggucuccagcagu

SEQ ID NO: 2787187 - RNA, 19 nt, Artificial Sequence
  Description of Artificial Sequence: Synthetic oligonucleotide
cacagucuuccuuugugag

SEQ ID NO: 2787188 - RNA, 19 nt, Artificial Sequence
  Description of Artificial Sequence: Synthetic oligonucleotide
caggauguuccuauucuug

SEQ ID NO: 2787189 - RNA, 19 nt, Artificial Sequence
  Description of Artificial Sequence: Synthetic oligonucleotide
uugagcuugguugucuagc

SEQ ID NO: 2787190 - RNA, 19 nt, Artificial Sequence
  Description of Artificial Sequence: Synthetic oligonucleotide
cagucaugcgguaaaggug

SEQ ID NO: 2787191 - RNA, 19 nt, Artificial Sequence
  Description of Artificial Sequence: Synthetic oligonucleotide
ugagcuugguugucuagcu

SEQ ID NO: 2787192 - RNA, 19 nt, Artificial Sequence
  Description of Artificial Sequence: Synthetic oligonucleotide
ucggccaaccauagcaccc

SEQ ID NO: 2787193 - RNA, 19 nt, Artificial Sequence
  Description of Artificial Sequence: Synthetic oligonucleotide
cuccauauccguccugggg

SEQ ID NO: 2787194 - RNA, 19 nt, Artificial Sequence
  Description of Artificial Sequence: Synthetic oligonucleotide
gaaauaucagugagcuggc

SEQ ID NO: 2787195 - RNA, 19 nt, Artificial Sequence
  Description of Artificial Sequence: Synthetic oligonucleotide
uguagcuggcugcccacag

SEQ ID NO: 2787196 - RNA, 19 nt, Artificial Sequence
  Description of Artificial Sequence: Synthetic oligonucleotide
uagguugcgcagcacaguc

SEQ ID NO: 2787197 - RNA, 19 nt, Artificial Sequence
  Description of Artificial Sequence: Synthetic oligonucleotide
cucacagucuuccuuugug

SEQ ID NO: 2787198 - RNA, 19 nt, Artificial Sequence
  Description of Artificial Sequence: Synthetic oligonucleotide
ucaggcgucggcagccacg

SEQ ID NO: 2787199 - RNA, 19 nt, Artificial Sequence
  Description of Artificial Sequence: Synthetic oligonucleotide
ucucuagccccucuguguc

SEQ ID NO: 2787200 - RNA, 19 nt, Artificial Sequence
  Description of Artificial Sequence: Synthetic oligonucleotide
gugugguagguccuuuagg

SEQ ID NO: 2787201 - RNA, 19 nt, Artificial Sequence
  Description of Artificial Sequence: Synthetic oligonucleotide
uguuccuauucuugugacu

SEQ ID NO: 2787202 - RNA, 19 nt, Artificial Sequence
  Description of Artificial Sequence: Synthetic oligonucleotide
agaacaguucguccaggcu

SEQ ID NO: 2787203 - RNA, 19 nt, Artificial Sequence
  Description of Artificial Sequence: Synthetic oligonucleotide
cacuccauauccguccugg

SEQ ID NO: 2787204 - RNA, 19 nt, Artificial Sequence
  Description of Artificial Sequence: Synthetic oligonucleotide
ucuugugacuccucacagu

SEQ ID NO: 2787205 - RNA, 19 nt, Artificial Sequence
  Description of Artificial Sequence: Synthetic oligonucleotide
auauccguccugggguucc

SEQ ID NO: 2787206 - RNA, 19 nt, Artificial Sequence
  Description of Artificial Sequence: Synthetic oligonucleotide
cuggggauacgguuccucc

SEQ ID NO: 2787207 - RNA, 19 nt, Artificial Sequence
  Description of Artificial Sequence: Synthetic oligonucleotide
ggagacacuguugacacug

SEQ ID NO: 2787208 - RNA, 19 nt, Artificial Sequence
  Description of Artificial Sequence: Synthetic oligonucleotide
cacagucugcugaacaguc

SEQ ID NO: 2787209 - RNA, 19 nt, Artificial Sequence
  Description of Artificial Sequence: Synthetic oligonucleotide
gguacagcucacucaggcg

SEQ ID NO: 2787210 - RNA, 19 nt, Artificial Sequence
  Description of Artificial Sequence: Synthetic oligonucleotide
cugagugugaucacuucca

SEQ ID NO: 2787211 - RNA, 19 nt, Artificial Sequence
  Description of Artificial Sequence: Synthetic oligonucleotide
uggaaauaucagugagcug

SEQ ID NO: 2787212 - RNA, 19 nt, Artificial Sequence
  Description of Artificial Sequence: Synthetic oligonucleotide
gugaucacuuccaggcugg

SEQ ID NO: 2787213 - RNA, 19 nt, Artificial Sequence
  Description of Artificial Sequence: Synthetic oligonucleotide
agucucuagccccucugug

SEQ ID NO: 2787214 - RNA, 19 nt, Artificial Sequence
  Description of Artificial Sequence: Synthetic oligonucleotide
aacagucucuagccccucu

SEQ ID NO: 2787215 - RNA, 19 nt, Artificial Sequence
  Description of Artificial Sequence: Synthetic oligonucleotide
caaccauagcacccugagg

SEQ ID NO: 2787216 - RNA, 19 nt, Artificial Sequence
  Description of Artificial Sequence: Synthetic oligonucleotide
cuauucuugugacuccuca

SEQ ID NO: 2787217 - RNA, 19 nt, Artificial Sequence
  Description of Artificial Sequence: Synthetic oligonucleotide
agcucacucaggcgucggc

SEQ ID NO: 2787218 - RNA, 19 nt, Artificial Sequence
  Description of Artificial Sequence: Synthetic oligonucleotide
ucaggauguuccuauucuu

SEQ ID NO: 2787219 - RNA, 19 nt, Artificial Sequence
  Description of Artificial Sequence: Synthetic oligonucleotide
ccacguacagguuccaggg

SEQ ID NO: 2787220 - RNA, 19 nt, Artificial Sequence
  Description of Artificial Sequence: Synthetic oligonucleotide
agcacagucaugcgguaaa

SEQ ID NO: 2787221 - RNA, 19 nt, Artificial Sequence
  Description of Artificial Sequence: Synthetic oligonucleotide
guugagcuugguugucuag

SEQ ID NO: 2787222 - RNA, 19 nt, Artificial Sequence
  Description of Artificial Sequence: Synthetic oligonucleotide
gguccuuuagguagaacag

SEQ ID NO: 2787223 - RNA, 19 nt, Artificial Sequence
  Description of Artificial Sequence: Synthetic oligonucleotide
cauagcacccugaggugug

SEQ ID NO: 2787224 - RNA, 19 nt, Artificial Sequence
  Description of Artificial Sequence: Synthetic oligonucleotide
acagucucuagccccucug

SEQ ID NO: 2787225 - RNA, 19 nt, Artificial Sequence
  Description of Artificial Sequence: Synthetic oligonucleotide
ucuccagcagucuggcccu

SEQ ID NO: 2787226 - RNA, 19 nt, Artificial Sequence
  Description of Artificial Sequence: Synthetic oligonucleotide
uccuauucuugugacuccu

SEQ ID NO: 2787227 - RNA, 19 nt, Artificial Sequence
  Description of Artificial Sequence: Synthetic oligonucleotide
cucggccaaccauagcacc

SEQ ID NO: 2787228 - RNA, 19 nt, Artificial Sequence
  Description of Artificial Sequence: Synthetic oligonucleotide
accauagcacccugaggug

SEQ ID NO: 2787229 - RNA, 19 nt, Artificial Sequence
  Description of Artificial Sequence: Synthetic oligonucleotide
cucacucaggcgucggcag

SEQ ID NO: 2787230 - RNA, 19 nt, Artificial Sequence
  Description of Artificial Sequence: Synthetic oligonucleotide
cgacauauggaaauaucag

SEQ ID NO: 2787231 - RNA, 19 nt, Artificial Sequence
  Description of Artificial Sequence: Synthetic oligonucleotide
cacagucaugcgguaaagg

SEQ ID NO: 2787232 - RNA, 19 nt, Artificial Sequence
  Description of Artificial Sequence: Synthetic oligonucleotide
ugggguagguugcgcagca

SEQ ID NO: 2787233 - RNA, 19 nt, Artificial Sequence
  Description of Artificial Sequence: Synthetic oligonucleotide
guacagcucacucaggcgu

SEQ ID NO: 2787234 - RNA, 19 nt, Artificial Sequence
  Description of Artificial Sequence: Synthetic oligonucleotide
ugggcaucucccgacauau

SEQ ID NO: 2787235 - RNA, 19 nt, Artificial Sequence
  Description of Artificial Sequence: Synthetic oligonucleotide
ggugugguagguccuuuag

SEQ ID NO: 2787236 - RNA, 19 nt, Artificial Sequence
  Description of Artificial Sequence: Synthetic oligonucleotide
aucagugagcuggcugccc

SEQ ID NO: 2787237 - RNA, 19 nt, Artificial Sequence
  Description of Artificial Sequence: Synthetic oligonucleotide
ucacucaggcgucggcagc

SEQ ID NO: 2787238 - RNA, 19 nt, Artificial Sequence
  Description of Artificial Sequence: Synthetic oligonucleotide
uggggauacgguuccuccu

SEQ ID NO: 2787239 - RNA, 19 nt, Artificial Sequence
  Description of Artificial Sequence: Synthetic oligonucleotide
ggauguuccuauucuugug

SEQ ID NO: 2787240 - RNA, 19 nt, Artificial Sequence
  Description of Artificial Sequence: Synthetic oligonucleotide
aggcugggcaucucccgac

SEQ ID NO: 2787241 - RNA, 19 nt, Artificial Sequence
  Description of Artificial Sequence: Synthetic oligonucleotide
guugacacugagugugauc

SEQ ID NO: 2787242 - RNA, 19 nt, Artificial Sequence
  Description of Artificial Sequence: Synthetic oligonucleotide
caggcuggggauacgguuc

SEQ ID NO: 2787243 - RNA, 19 nt, Artificial Sequence
  Description of Artificial Sequence: Synthetic oligonucleotide
ccgacauauggaaauauca

SEQ ID NO: 2787244 - RNA, 19 nt, Artificial Sequence
  Description of Artificial Sequence: Synthetic oligonucleotide
uacagcucacucaggcguc

SEQ ID NO: 2787245 - RNA, 19 nt, Artificial Sequence
  Description of Artificial Sequence: Synthetic oligonucleotide
gguuccaggguggagacac

SEQ ID NO: 2787246 - RNA, 19 nt, Artificial Sequence
  Description of Artificial Sequence: Synthetic oligonucleotide
ucuagccccucugugucca

SEQ ID NO: 2787247 - RNA, 19 nt, Artificial Sequence
  Description of Artificial Sequence: Synthetic oligonucleotide
uaucagugagcuggcugcc

SEQ ID NO: 2787248 - RNA, 19 nt, Artificial Sequence
  Description of Artificial Sequence: Synthetic oligonucleotide
cacccugaggugugguagg

SEQ ID NO: 2787249 - RNA, 19 nt, Artificial Sequence
  Description of Artificial Sequence: Synthetic oligonucleotide
uacgguuccuccucaggua

SEQ ID NO: 2787250 - RNA, 19 nt, Artificial Sequence
  Description of Artificial Sequence: Synthetic oligonucleotide
agcagcaagauggcaguca

SEQ ID NO: 2787251 - RNA, 19 nt, Artificial Sequence
  Description of Artificial Sequence: Synthetic oligonucleotide
ccaaccauagcacccugag

SEQ ID NO: 2787252 - RNA, 19 nt, Artificial Sequence
  Description of Artificial Sequence: Synthetic oligonucleotide
caucucccgacauauggaa

SEQ ID NO: 2787253 - RNA, 19 nt, Artificial Sequence
  Description of Artificial Sequence: Synthetic oligonucleotide
gaucacuuccaggcugggc

SEQ ID NO: 2787254 - RNA, 19 nt, Artificial Sequence
  Description of Artificial Sequence: Synthetic oligonucleotide
cagcaagauggcagucagg

SEQ ID NO: 2787255 - RNA, 19 nt, Artificial Sequence
  Description of Artificial Sequence: Synthetic oligonucleotide
gguagguugcgcagcacag

SEQ ID NO: 2787256 - RNA, 19 nt, Artificial Sequence
  Description of Artificial Sequence: Synthetic oligonucleotide
ucacuccauauccguccug

SEQ ID NO: 2787257 - RNA, 19 nt, Artificial Sequence
  Description of Artificial Sequence: Synthetic oligonucleotide
ugaucacuuccaggcuggg

SEQ ID NO: 2787258 - RNA, 19 nt, Artificial Sequence
  Description of Artificial Sequence: Synthetic oligonucleotide
cuguguagcucagcaggcc

SEQ ID NO: 2787259 - RNA, 19 nt, Artificial Sequence
  Description of Artificial Sequence: Synthetic oligonucleotide
cacugagugugaucacuuc

SEQ ID NO: 2787260 - RNA, 19 nt, Artificial Sequence
  Description of Artificial Sequence: Synthetic oligonucleotide
uguuuccucuguguagcuc

SEQ ID NO: 2787261 - RNA, 19 nt, Artificial Sequence
  Description of Artificial Sequence: Synthetic oligonucleotide
guccaggcuggggauacgg

SEQ ID NO: 2787262 - RNA, 19 nt, Artificial Sequence
  Description of Artificial Sequence: Synthetic oligonucleotide
ugacacugagugugaucac

SEQ ID NO: 2787263 - RNA, 19 nt, Artificial Sequence
  Description of Artificial Sequence: Synthetic oligonucleotide
cuuccuuugugagaaggaa

SEQ ID NO: 2787264 - RNA, 19 nt, Artificial Sequence
  Description of Artificial Sequence: Synthetic oligonucleotide
uccaggcuggggauacggu

SEQ ID NO: 2787265 - RNA, 19 nt, Artificial Sequence
  Description of Artificial Sequence: Synthetic oligonucleotide
gugcagcgccuguagcugg

SEQ ID NO: 2787266 - RNA, 19 nt, Artificial Sequence
  Description of Artificial Sequence: Synthetic oligonucleotide
cucaguugagcuugguugu

SEQ ID NO: 2787267 - RNA, 19 nt, Artificial Sequence
  Description of Artificial Sequence: Synthetic oligonucleotide
cucuagccccucugugucc

SEQ ID NO: 2787268 - RNA, 19 nt, Artificial Sequence
  Description of Artificial Sequence: Synthetic oligonucleotide
auagcacccugaggugugg

SEQ ID NO: 2787269 - RNA, 19 nt, Artificial Sequence
  Description of Artificial Sequence: Synthetic oligonucleotide
uguugacacugagugugau

SEQ ID NO: 2787270 - RNA, 19 nt, Artificial Sequence
  Description of Artificial Sequence: Synthetic oligonucleotide
uggcccuggacuucuguuu

SEQ ID NO: 2787271 - RNA, 19 nt, Artificial Sequence
  Description of Artificial Sequence: Synthetic oligonucleotide
gguugucuagcuucugcga

SEQ ID NO: 2787272 - RNA, 19 nt, Artificial Sequence
  Description of Artificial Sequence: Synthetic oligonucleotide
ucccgacauauggaaauau

SEQ ID NO: 2787273 - RNA, 19 nt, Artificial Sequence
  Description of Artificial Sequence: Synthetic oligonucleotide
gacacugagugugaucacu

SEQ ID NO: 2787274 - RNA, 19 nt, Artificial Sequence
  Description of Artificial Sequence: Synthetic oligonucleotide
gacacuguugacacugagu

SEQ ID NO: 2787275 - RNA, 19 nt, Artificial Sequence
  Description of Artificial Sequence: Synthetic oligonucleotide
ggcgucggcagccacguac

SEQ ID NO: 2787276 - RNA, 19 nt, Artificial Sequence
  Description of Artificial Sequence: Synthetic oligonucleotide
cacucaggcgucggcagcc

SEQ ID NO: 2787277 - RNA, 19 nt, Artificial Sequence
  Description of Artificial Sequence: Synthetic oligonucleotide
ucaguugagcuugguuguc

SEQ ID NO: 2787278 - RNA, 19 nt, Artificial Sequence
  Description of Artificial Sequence: Synthetic oligonucleotide
agccccucuguguccagcu

SEQ ID NO: 2787279 - RNA, 19 nt, Artificial Sequence
  Description of Artificial Sequence: Synthetic oligonucleotide
cguacagguuccagggugg

SEQ ID NO: 2787280 - RNA, 19 nt, Artificial Sequence
  Description of Artificial Sequence: Synthetic oligonucleotide
guaaaggugcgggcuggug

SEQ ID NO: 2787281 - RNA, 19 nt, Artificial Sequence
  Description of Artificial Sequence: Synthetic oligonucleotide
agcuucugcgagguggggu

SEQ ID NO: 2787282 - RNA, 19 nt, Artificial Sequence
  Description of Artificial Sequence: Synthetic oligonucleotide
agcaggcccuggcuggucu

SEQ ID NO: 2787283 - RNA, 19 nt, Artificial Sequence
  Description of Artificial Sequence: Synthetic oligonucleotide
cacggguucucggccaacc

SEQ ID NO: 2787284 - RNA, 19 nt, Artificial Sequence
  Description of Artificial Sequence: Synthetic oligonucleotide
gaaggagauuuggucucca

SEQ ID NO: 2787285 - RNA, 19 nt, Artificial Sequence
  Description of Artificial Sequence: Synthetic oligonucleotide
ucguccaggcuggggauac

SEQ ID NO: 2787286 - RNA, 19 nt, Artificial Sequence
  Description of Artificial Sequence: Synthetic oligonucleotide
gucucuagccccucugugu

SEQ ID NO: 2787287 - RNA, 19 nt, Artificial Sequence
  Description of Artificial Sequence: Synthetic oligonucleotide
ucugcgaggugggguaggu

SEQ ID NO: 2787288 - RNA, 19 nt, Artificial Sequence
  Description of Artificial Sequence: Synthetic oligonucleotide
gguuccuccucagguacag

SEQ ID NO: 2787289 - RNA, 19 nt, Artificial Sequence
  Description of Artificial Sequence: Synthetic oligonucleotide
gguucucggccaaccauag

SEQ ID NO: 2787290 - RNA, 19 nt, Artificial Sequence
  Description of Artificial Sequence: Synthetic oligonucleotide
uccagcagucuggcccugg

SEQ ID NO: 2787291 - RNA, 19 nt, Artificial Sequence
  Description of Artificial Sequence: Synthetic oligonucleotide
guucucggccaaccauagc

SEQ ID NO: 2787292 - RNA, 19 nt, Artificial Sequence
  Description of Artificial Sequence: Synthetic oligonucleotide
ggguagguugcgcagcaca

SEQ ID NO: 2787293 - RNA, 19 nt, Artificial Sequence
  Description of Artificial Sequence: Synthetic oligonucleotide
ggauacgguuccuccucag

SEQ ID NO: 2787294 - RNA, 19 nt, Artificial Sequence
  Description of Artificial Sequence: Synthetic oligonucleotide
ggggauacgguuccuccuc

SEQ ID NO: 2787295 - RNA, 19 nt, Artificial Sequence
  Description of Artificial Sequence: Synthetic oligonucleotide
cccgacauauggaaauauc

SEQ ID NO: 2787296 - RNA, 19 nt, Artificial Sequence
  Description of Artificial Sequence: Synthetic oligonucleotide
cuguugacacugaguguga

SEQ ID NO: 2787297 - RNA, 19 nt, Artificial Sequence
  Description of Artificial Sequence: Synthetic oligonucleotide
gcacccugaggugugguag

SEQ ID NO: 2787298 - RNA, 19 nt, Artificial Sequence
  Description of Artificial Sequence: Synthetic oligonucleotide
uagcuucugcgaggugggg

SEQ ID NO: 2787299 - RNA, 19 nt, Artificial Sequence
  Description of Artificial Sequence: Synthetic oligonucleotide
gugguagguccuuuaggua

SEQ ID NO: 2787300 - RNA, 19 nt, Artificial Sequence
  Description of Artificial Sequence: Synthetic oligonucleotide
acacugagugugaucacuu

SEQ ID NO: 2787301 - RNA, 19 nt, Artificial Sequence
  Description of Artificial Sequence: Synthetic oligonucleotide
gugggguagguugcgcagc

SEQ ID NO: 2787302 - RNA, 19 nt, Artificial Sequence
  Description of Artificial Sequence: Synthetic oligonucleotide
gcagcacggguucucggcc

SEQ ID NO: 2787303 - RNA, 19 nt, Artificial Sequence
  Description of Artificial Sequence: Synthetic oligonucleotide
gcagccacguacagguucc

SEQ ID NO: 2787304 - RNA, 19 nt, Artificial Sequence
  Description of Artificial Sequence: Synthetic oligonucleotide
aggugcgggcuggugccgc

SEQ ID NO: 2787305 - RNA, 19 nt, Artificial Sequence
  Description of Artificial Sequence: Synthetic oligonucleotide
guuccagccugugcagcgc

SEQ ID NO: 2787306 - RNA, 19 nt, Artificial Sequence
  Description of Artificial Sequence: Synthetic oligonucleotide
ggugccgcagcacggguuc

SEQ ID NO: 2787307 - RNA, 19 nt, Artificial Sequence
  Description of Artificial Sequence: Synthetic oligonucleotide
aggugugguagguccuuua

SEQ ID NO: 2787308 - RNA, 19 nt, Artificial Sequence
  Description of Artificial Sequence: Synthetic oligonucleotide
guagcucagcaggcccugg

SEQ ID NO: 2787309 - RNA, 19 nt, Artificial Sequence
  Description of Artificial Sequence: Synthetic oligonucleotide
gaggugggguagguugcgc

SEQ ID NO: 2787310 - RNA, 19 nt, Artificial Sequence
  Description of Artificial Sequence: Synthetic oligonucleotide
cugugcagcgccuguagcu

SEQ ID NO: 2787311 - RNA, 19 nt, Artificial Sequence
  Description of Artificial Sequence: Synthetic oligonucleotide
ccucuguguagcucagcag

SEQ ID NO: 2787312 - RNA, 19 nt, Artificial Sequence
  Description of Artificial Sequence: Synthetic oligonucleotide
agccacguacagguuccag

SEQ ID NO: 2787313 - RNA, 19 nt, Artificial Sequence
  Description of Artificial Sequence: Synthetic oligonucleotide
caguucguccaggcugggg

SEQ ID NO: 2787314 - RNA, 19 nt, Artificial Sequence
  Description of Artificial Sequence: Synthetic oligonucleotide
agcacccugagguguggua

SEQ ID NO: 2787315 - RNA, 19 nt, Artificial Sequence
  Description of Artificial Sequence: Synthetic oligonucleotide
gggguuccagccugugcag

SEQ ID NO: 2787316 - RNA, 19 nt, Artificial Sequence
  Description of Artificial Sequence: Synthetic oligonucleotide
cuucugcgaggugggguag

SEQ ID NO: 2787317 - RNA, 19 nt, Artificial Sequence
  Description of Artificial Sequence: Synthetic oligonucleotide
uggugccgcagcacggguu

SEQ ID NO: 2787318 - RNA, 19 nt, Artificial Sequence
  Description of Artificial Sequence: Synthetic oligonucleotide
gguagguccuuuagguaga

SEQ ID NO: 2787319 - RNA, 19 nt, Artificial Sequence
  Description of Artificial Sequence: Synthetic oligonucleotide
uggcugcccacagucugcu

SEQ ID NO: 2787320 - RNA, 19 nt, Artificial Sequence
  Description of Artificial Sequence: Synthetic oligonucleotide
cagcagucuggcccuggac

SEQ ID NO: 2787321 - RNA, 19 nt, Artificial Sequence
  Description of Artificial Sequence: Synthetic oligonucleotide
uccugggguuccagccugu

SEQ ID NO: 2787322 - RNA, 19 nt, Artificial Sequence
  Description of Artificial Sequence: Synthetic oligonucleotide
ggcccuggacuucuguuuc

SEQ ID NO: 2787323 - RNA, 19 nt, Artificial Sequence
  Description of Artificial Sequence: Synthetic oligonucleotide
uagccccucuguguccagc

SEQ ID NO: 2787324 - RNA, 19 nt, Artificial Sequence
  Description of Artificial Sequence: Synthetic oligonucleotide
agcacggguucucggccaa

SEQ ID NO: 2787325 - RNA, 19 nt, Artificial Sequence
  Description of Artificial Sequence: Synthetic oligonucleotide
acaguucguccaggcuggg

SEQ ID NO: 2787326 - RNA, 19 nt, Artificial Sequence
  Description of Artificial Sequence: Synthetic oligonucleotide
cauauccguccugggguuc

SEQ ID NO: 2787327 - RNA, 19 nt, Artificial Sequence
  Description of Artificial Sequence: Synthetic oligonucleotide
aucucccgacauauggaaa

SEQ ID NO: 2787328 - RNA, 19 nt, Artificial Sequence
  Description of Artificial Sequence: Synthetic oligonucleotide
gugugaucacuuccaggcu

SEQ ID NO: 2787329 - RNA, 19 nt, Artificial Sequence
  Description of Artificial Sequence: Synthetic oligonucleotide
gguugcgcagcacagucau

SEQ ID NO: 2787330 - RNA, 19 nt, Artificial Sequence
  Description of Artificial Sequence: Synthetic oligonucleotide
gcagucaggauguuccuau

SEQ ID NO: 2787331 - RNA, 19 nt, Artificial Sequence
  Description of Artificial Sequence: Synthetic oligonucleotide
ccuauucuugugacuccuc

SEQ ID NO: 2787332 - RNA, 19 nt, Artificial Sequence
  Description of Artificial Sequence: Synthetic oligonucleotide
gcccacagucugcugaaca

SEQ ID NO: 2787333 - RNA, 19 nt, Artificial Sequence
  Description of Artificial Sequence: Synthetic oligonucleotide
uauccguccugggguucca

SEQ ID NO: 2787334 - RNA, 19 nt, Artificial Sequence
  Description of Artificial Sequence: Synthetic oligonucleotide
gcacagucaugcgguaaag

SEQ ID NO: 2787335 - RNA, 19 nt, Artificial Sequence
  Description of Artificial Sequence: Synthetic oligonucleotide
uucguccaggcuggggaua

SEQ ID NO: 2787336 - RNA, 19 nt, Artificial Sequence
  Description of Artificial Sequence: Synthetic oligonucleotide
gucucaguugagcuugguu

SEQ ID NO: 2787337 - RNA, 19 nt, Artificial Sequence
  Description of Artificial Sequence: Synthetic oligonucleotide
cuagccccucuguguccag

SEQ ID NO: 2787338 - RNA, 19 nt, Artificial Sequence
  Description of Artificial Sequence: Synthetic oligonucleotide
ccugugcagcgccuguagc

SEQ ID NO: 2787339 - RNA, 19 nt, Artificial Sequence
  Description of Artificial Sequence: Synthetic oligonucleotide
gcagcagcaagauggcagu

SEQ ID NO: 2787340 - RNA, 19 nt, Artificial Sequence
  Description of Artificial Sequence: Synthetic oligonucleotide
acccugaggugugguaggu

SEQ ID NO: 2787341 - RNA, 19 nt, Artificial Sequence
  Description of Artificial Sequence: Synthetic oligonucleotide
cucaggcgucggcagccac

SEQ ID NO: 2787342 - RNA, 19 nt, Artificial Sequence
  Description of Artificial Sequence: Synthetic oligonucleotide
cagcucacucaggcgucgg

SEQ ID NO: 2787343 - RNA, 19 nt, Artificial Sequence
  Description of Artificial Sequence: Synthetic oligonucleotide
gggauacgguuccuccuca

SEQ ID NO: 2787344 - RNA, 19 nt, Artificial Sequence
  Description of Artificial Sequence: Synthetic oligonucleotide
cagcgccuguagcuggcug

SEQ ID NO: 2787345 - RNA, 19 nt, Artificial Sequence
  Description of Artificial Sequence: Synthetic oligonucleotide
uagcacccugagguguggu

SEQ ID NO: 2787346 - RNA, 19 nt, Artificial Sequence
  Description of Artificial Sequence: Synthetic oligonucleotide
gccuguagcuggcugccca

SEQ ID NO: 2787347 - RNA, 19 nt, Artificial Sequence
  Description of Artificial Sequence: Synthetic oligonucleotide
cagcacggguucucggcca

SEQ ID NO: 2787348 - RNA, 19 nt, Artificial Sequence
  Description of Artificial Sequence: Synthetic oligonucleotide
cgcagcacggguucucggc

SEQ ID NO: 2787349 - RNA, 19 nt, Artificial Sequence
  Description of Artificial Sequence: Synthetic oligonucleotide
ccuguagcuggcugcccac

SEQ ID NO: 2787350 - RNA, 19 nt, Artificial Sequence
  Description of Artificial Sequence: Synthetic oligonucleotide
ggguggagacacuguugac

SEQ ID NO: 2787351 - RNA, 19 nt, Artificial Sequence
  Description of Artificial Sequence: Synthetic oligonucleotide
guagcuggcugcccacagu

SEQ ID NO: 2787352 - RNA, 19 nt, Artificial Sequence
  Description of Artificial Sequence: Synthetic oligonucleotide
ggcuggugccgcagcacgg

SEQ ID NO: 2787353 - RNA, 19 nt, Artificial Sequence
  Description of Artificial Sequence: Synthetic oligonucleotide
cagugagcuggcugcccca

SEQ ID NO: 2787354 - RNA, 19 nt, Artificial Sequence
  Description of Artificial Sequence: Synthetic oligonucleotide
gcgaggugggguagguugc

SEQ ID NO: 2787355 - RNA, 19 nt, Artificial Sequence
  Description of Artificial Sequence: Synthetic oligonucleotide
guagguugcgcagcacagu

SEQ ID NO: 2787356 - RNA, 19 nt, Artificial Sequence
  Description of Artificial Sequence: Synthetic oligonucleotide
gcucacucaggcgucggca

SEQ ID NO: 2787357 - RNA, 19 nt, Artificial Sequence
  Description of Artificial Sequence: Synthetic oligonucleotide
guagguccuuuagguagaa

SEQ ID NO: 2787358 - RNA, 19 nt, Artificial Sequence
  Description of Artificial Sequence: Synthetic oligonucleotide
gcccuggacuucuguuucc

SEQ ID NO: 2787359 - RNA, 19 nt, Artificial Sequence
  Description of Artificial Sequence: Synthetic oligonucleotide
ggccaaccauagcacccug

SEQ ID NO: 2787360 - RNA, 19 nt, Artificial Sequence
  Description of Artificial Sequence: Synthetic oligonucleotide
cagcagcaagauggcaguc

SEQ ID NO: 2787361 - RNA, 19 nt, Artificial Sequence
  Description of Artificial Sequence: Synthetic oligonucleotide
gccgcagcacggguucucg

SEQ ID NO: 2787362 - RNA, 19 nt, Artificial Sequence
  Description of Artificial Sequence: Synthetic oligonucleotide
gagcuugguugucuagcuu

SEQ ID NO: 2787363 - RNA, 19 nt, Artificial Sequence
  Description of Artificial Sequence: Synthetic oligonucleotide
cagucucuagccccucugu

SEQ ID NO: 2787364 - RNA, 19 nt, Artificial Sequence
  Description of Artificial Sequence: Synthetic oligonucleotide
acucaggcgucggcagcca

SEQ ID NO: 2787365 - RNA, 19 nt, Artificial Sequence
  Description of Artificial Sequence: Synthetic oligonucleotide
ggguuccagccugugcagc

SEQ ID NO: 2787366 - RNA, 19 nt, Artificial Sequence
  Description of Artificial Sequence: Synthetic oligonucleotide
ggguucucggccaaccaua

SEQ ID NO: 2787367 - RNA, 19 nt, Artificial Sequence
  Description of Artificial Sequence: Synthetic oligonucleotide
guguagcucagcaggcccu

SEQ ID NO: 2787368 - RNA, 19 nt, Artificial Sequence
  Description of Artificial Sequence: Synthetic oligonucleotide
ugccgcagcacggguucuc

SEQ ID NO: 2787369 - RNA, 19 nt, Artificial Sequence
  Description of Artificial Sequence: Synthetic oligonucleotide
agguuccaggguggagaca

SEQ ID NO: 2787370 - RNA, 19 nt, Artificial Sequence
  Description of Artificial Sequence: Synthetic oligonucleotide
cucccgacauauggaaaua

SEQ ID NO: 2787371 - RNA, 19 nt, Artificial Sequence
  Description of Artificial Sequence: Synthetic oligonucleotide
cuguagcuggcugcccaca

SEQ ID NO: 2787372 - RNA, 19 nt, Artificial Sequence
  Description of Artificial Sequence: Synthetic oligonucleotide
cuguuuccucuguguagcu

SEQ ID NO: 2787373 - RNA, 19 nt, Artificial Sequence
  Description of Artificial Sequence: Synthetic oligonucleotide
caguugagcuugguugucu

SEQ ID NO: 2787374 - RNA, 19 nt, Artificial Sequence
  Description of Artificial Sequence: Synthetic oligonucleotide
ccuuugugagaaggaagga

SEQ ID NO: 2787375 - RNA, 19 nt, Artificial Sequence
  Description of Artificial Sequence: Synthetic oligonucleotide
cgguaaaggugcgggcugg

SEQ ID NO: 2787376 - RNA, 19 nt, Artificial Sequence
  Description of Artificial Sequence: Synthetic oligonucleotide
cacguacagguuccagggu

SEQ ID NO: 2787377 - RNA, 19 nt, Artificial Sequence
  Description of Artificial Sequence: Synthetic oligonucleotide
gcgccuguagcuggcugcc

SEQ ID NO: 2787378 - RNA, 19 nt, Artificial Sequence
  Description of Artificial Sequence: Synthetic oligonucleotide
gugcgggcuggugccgcag

SEQ ID NO: 2787379 - RNA, 19 nt, Artificial Sequence
  Description of Artificial Sequence: Synthetic oligonucleotide
ccgcagcacggguucucgg

SEQ ID NO: 2787380 - RNA, 19 nt, Artificial Sequence
  Description of Artificial Sequence: Synthetic oligonucleotide
cuggcccuggacuucuguu

SEQ ID NO: 2787381 - RNA, 19 nt, Artificial Sequence
  Description of Artificial Sequence: Synthetic oligonucleotide
gcuugguugucuagcuucu

SEQ ID NO: 2787382 - RNA, 19 nt, Artificial Sequence
  Description of Artificial Sequence: Synthetic oligonucleotide
gccaaccauagcacccuga

SEQ ID NO: 2787383 - RNA, 19 nt, Artificial Sequence
  Description of Artificial Sequence: Synthetic oligonucleotide
ggcagucaggauguuccua

SEQ ID NO: 2787384 - RNA, 19 nt, Artificial Sequence
  Description of Artificial Sequence: Synthetic oligonucleotide
cgaggugggguagguugcg

SEQ ID NO: 2787385 - RNA, 19 nt, Artificial Sequence
  Description of Artificial Sequence: Synthetic oligonucleotide
caggcgucggcagccacgu

SEQ ID NO: 2787386 - RNA, 19 nt, Artificial Sequence
  Description of Artificial Sequence: Synthetic oligonucleotide
ccagccugugcagcgccug

SEQ ID NO: 2787387 - RNA, 19 nt, Artificial Sequence
  Description of Artificial Sequence: Synthetic oligonucleotide
gggcaucucccgacauaug

SEQ ID NO: 2787388 - RNA, 19 nt, Artificial Sequence
  Description of Artificial Sequence: Synthetic oligonucleotide
ggugcgggcuggugccgca

SEQ ID NO: 2787389 - RNA, 19 nt, Artificial Sequence
  Description of Artificial Sequence: Synthetic oligonucleotide
gaggugugguagguccuuu

SEQ ID NO: 2787390 - RNA, 19 nt, Artificial Sequence
  Description of Artificial Sequence: Synthetic oligonucleotide
cuccagcagucuggcccug

SEQ ID NO: 2787391 - RNA, 19 nt, Artificial Sequence
  Description of Artificial Sequence: Synthetic oligonucleotide
gucuggcccuggacuucug

SEQ ID NO: 2787392 - RNA, 19 nt, Artificial Sequence
  Description of Artificial Sequence: Synthetic oligonucleotide
ccauagcacccugaggugu

SEQ ID NO: 2787393 - RNA, 19 nt, Artificial Sequence
  Description of Artificial Sequence: Synthetic oligonucleotide
ccagcagucuggcccugga

SEQ ID NO: 2787394 - RNA, 19 nt, Artificial Sequence
  Description of Artificial Sequence: Synthetic oligonucleotide
gguaaaggugcgggcuggu

SEQ ID NO: 2787395 - RNA, 19 nt, Artificial Sequence
  Description of Artificial Sequence: Synthetic oligonucleotide
gggguagguugcgcagcac

SEQ ID NO: 2787396 - RNA, 19 nt, Artificial Sequence
  Description of Artificial Sequence: Synthetic oligonucleotide
cuggugccgcagcacgggu

SEQ ID NO: 2787397 - RNA, 19 nt, Artificial Sequence
  Description of Artificial Sequence: Synthetic oligonucleotide
ccugggguuccagccugug

SEQ ID NO: 2787398 - RNA, 19 nt, Artificial Sequence
  Description of Artificial Sequence: Synthetic oligonucleotide
guuccaggguggagacacu

SEQ ID NO: 2787399 - RNA, 19 nt, Artificial Sequence
  Description of Artificial Sequence: Synthetic oligonucleotide
cagccacguacagguucca

SEQ ID NO: 2787400 - RNA, 19 nt, Artificial Sequence
  Description of Artificial Sequence: Synthetic oligonucleotide
cccugaggugugguagguc

SEQ ID NO: 2787401 - RNA, 19 nt, Artificial Sequence
  Description of Artificial Sequence: Synthetic oligonucleotide
cgucggcagccacguacag

SEQ ID NO: 2787402 - RNA, 19 nt, Artificial Sequence
  Description of Artificial Sequence: Synthetic oligonucleotide
cagccugugcagcgccugu

SEQ ID NO: 2787403 - RNA, 19 nt, Artificial Sequence
  Description of Artificial Sequence: Synthetic oligonucleotide
ccauauccguccugggguu

SEQ ID NO: 2787404 - RNA, 19 nt, Artificial Sequence
  Description of Artificial Sequence: Synthetic oligonucleotide
aggcgucggcagccacgua

SEQ ID NO: 2787405 - RNA, 19 nt, Artificial Sequence
  Description of Artificial Sequence: Synthetic oligonucleotide
gcacggguucucggccaac

SEQ ID NO: 2787406 - RNA, 19 nt, Artificial Sequence
  Description of Artificial Sequence: Synthetic oligonucleotide
cgguuccuccucagguaca

SEQ ID NO: 2787407 - RNA, 19 nt, Artificial Sequence
  Description of Artificial Sequence: Synthetic oligonucleotide
cguccaggcuggggauacg

SEQ ID NO: 2787408 - RNA, 19 nt, Artificial Sequence
  Description of Artificial Sequence: Synthetic oligonucleotide
cggguucucggccaaccau

SEQ ID NO: 2787409 - RNA, 19 nt, Artificial Sequence
  Description of Artificial Sequence: Synthetic oligonucleotide
cugcgaggugggguagguu

SEQ ID NO: 2787410 - RNA, 19 nt, Artificial Sequence
  Description of Artificial Sequence: Synthetic oligonucleotide
ggcuggggauacgguuccu

SEQ ID NO: 2787411 - RNA, 19 nt, Artificial Sequence
  Description of Artificial Sequence: Synthetic oligonucleotide
cggccaaccauagcacccu

SEQ ID NO: 2787412 - RNA, 19 nt, Artificial Sequence
  Description of Artificial Sequence: Synthetic oligonucleotide
cggcagccacguacagguu

SEQ ID NO: 2787413 - RNA, 19 nt, Artificial Sequence
  Description of Artificial Sequence: Synthetic oligonucleotide
agagugaugacacagaggg

SEQ ID NO: 2787414 - RNA, 19 nt, Artificial Sequence
  Description of Artificial Sequence: Synthetic oligonucleotide
aaagugacugcaaagauuc

SEQ ID NO: 2787415 - RNA, 19 nt, Artificial Sequence
  Description of Artificial Sequence: Synthetic oligonucleotide
agugaugacacagagggcg

SEQ ID NO: 2787416 - RNA, 19 nt, Artificial Sequence
  Description of Artificial Sequence: Synthetic oligonucleotide
aagauucccaagucgaaag

SEQ ID NO: 2787417 - RNA, 19 nt, Artificial Sequence
  Description of Artificial Sequence: Synthetic oligonucleotide
aagaugaucccagagauga

SEQ ID NO: 2787418 - RNA, 19 nt, Artificial Sequence
  Description of Artificial Sequence: Synthetic oligonucleotide
ugcaaagauucccaagucg

SEQ ID NO: 2787419 - RNA, 19 nt, Artificial Sequence
  Description of Artificial Sequence: Synthetic oligonucleotide
gagacgacaaagaugaucc

SEQ ID NO: 2787420 - RNA, 19 nt, Artificial Sequence
  Description of Artificial Sequence: Synthetic oligonucleotide
aagauuugcagaccggcag

SEQ ID NO: 2787421 - RNA, 19 nt, Artificial Sequence
  Description of Artificial Sequence: Synthetic oligonucleotide
gacaccagggcauugaccc

SEQ ID NO: 2787422 - RNA, 19 nt, Artificial Sequence
  Description of Artificial Sequence: Synthetic oligonucleotide
auucuugucuuccacacag

SEQ ID NO: 2787423 - RNA, 19 nt, Artificial Sequence
  Description of Artificial Sequence: Synthetic oligonucleotide
aauaaggagagugaugaca

SEQ ID NO: 2787424 - RNA, 19 nt, Artificial Sequence
  Description of Artificial Sequence: Synthetic oligonucleotide
uauuaggccugcaaaagug

SEQ ID NO: 2787425 - RNA, 19 nt, Artificial Sequence
  Description of Artificial Sequence: Synthetic oligonucleotide
ucagcuuuguccgagggcg

SEQ ID NO: 2787426 - RNA, 19 nt, Artificial Sequence
  Description of Artificial Sequence: Synthetic oligonucleotide
acaauaaggagagugauga

SEQ ID NO: 2787427 - RNA, 19 nt, Artificial Sequence
  Description of Artificial Sequence: Synthetic oligonucleotide
auaaggagagugaugacac

SEQ ID NO: 2787428 - RNA, 19 nt, Artificial Sequence
  Description of Artificial Sequence: Synthetic oligonucleotide
acugcaaagauucccaagu

SEQ ID NO: 2787429 - RNA, 19 nt, Artificial Sequence
  Description of Artificial Sequence: Synthetic oligonucleotide
ugauuauuaggccugcaaa

SEQ ID NO: 2787430 - RNA, 19 nt, Artificial Sequence
  Description of Artificial Sequence: Synthetic oligonucleotide
agguagugcauuuggcucc

SEQ ID NO: 2787431 - RNA, 19 nt, Artificial Sequence
  Description of Artificial Sequence: Synthetic oligonucleotide
agugacugcaaagauuccc

SEQ ID NO: 2787432 - RNA, 19 nt, Artificial Sequence
  Description of Artificial Sequence: Synthetic oligonucleotide
ugcaaaagugacugcaaag

SEQ ID NO: 2787433 - RNA, 19 nt, Artificial Sequence
  Description of Artificial Sequence: Synthetic oligonucleotide
auccccaagauuugcagac

SEQ ID NO: 2787434 - RNA, 19 nt, Artificial Sequence
  Description of Artificial Sequence: Synthetic oligonucleotide
aggaaugagggucaggaug

SEQ ID NO: 2787435 - RNA, 19 nt, Artificial Sequence
  Description of Artificial Sequence: Synthetic oligonucleotide
acagagggcgucuugcggc

SEQ ID NO: 2787436 - RNA, 19 nt, Artificial Sequence
  Description of Artificial Sequence: Synthetic oligonucleotide
ugggcuguccagcagacag

SEQ ID NO: 2787437 - RNA, 19 nt, Artificial Sequence
  Description of Artificial Sequence: Synthetic oligonucleotide
gacaaagaugaucccagag

SEQ ID NO: 2787438 - RNA, 19 nt, Artificial Sequence
  Description of Artificial Sequence: Synthetic oligonucleotide
ugcgagguagaccagcaag

SEQ ID NO: 2787439 - RNA, 19 nt, Artificial Sequence
  Description of Artificial Sequence: Synthetic oligonucleotide
aaggagagugaugacacag

SEQ ID NO: 2787440 - RNA, 19 nt, Artificial Sequence
  Description of Artificial Sequence: Synthetic oligonucleotide
cagcagacaggaaugaggg

SEQ ID NO: 2787441 - RNA, 19 nt, Artificial Sequence
  Description of Artificial Sequence: Synthetic oligonucleotide
gaauucuugucuuccacac

SEQ ID NO: 2787442 - RNA, 19 nt, Artificial Sequence
  Description of Artificial Sequence: Synthetic oligonucleotide
auuauuaggccugcaaaag

SEQ ID NO: 2787443 - RNA, 19 nt, Artificial Sequence
  Description of Artificial Sequence: Synthetic oligonucleotide
uucccaagucgaaaguagg

SEQ ID NO: 2787444 - RNA, 19 nt, Artificial Sequence
  Description of Artificial Sequence: Synthetic oligonucleotide
gauuauuaggccugcaaaa

SEQ ID NO: 2787445 - RNA, 19 nt, Artificial Sequence
  Description of Artificial Sequence: Synthetic oligonucleotide
ugcauuuggcuccugcgag

SEQ ID NO: 2787446 - RNA, 19 nt, Artificial Sequence
  Description of Artificial Sequence: Synthetic oligonucleotide
agugcauuuggcuccugcg

SEQ ID NO: 2787447 - RNA, 19 nt, Artificial Sequence
  Description of Artificial Sequence: Synthetic oligonucleotide
ugguugauuauuaggccug

SEQ ID NO: 2787448 - RNA, 19 nt, Artificial Sequence
  Description of Artificial Sequence: Synthetic oligonucleotide
agacuuggaauucuugucu

SEQ ID NO: 2787449 - RNA, 19 nt, Artificial Sequence
  Description of Artificial Sequence: Synthetic oligonucleotide
agaccagcaagccaagcag

SEQ ID NO: 2787450 - RNA, 19 nt, Artificial Sequence
  Description of Artificial Sequence: Synthetic oligonucleotide
agagacgacaaagaugauc

SEQ ID NO: 2787451 - RNA, 19 nt, Artificial Sequence
  Description of Artificial Sequence: Synthetic oligonucleotide
agcagggucaggacgaucc

SEQ ID NO: 2787452 - RNA, 19 nt, Artificial Sequence
  Description of Artificial Sequence: Synthetic oligonucleotide
uagaccagcaagccaagca

SEQ ID NO: 2787453 - RNA, 19 nt, Artificial Sequence
  Description of Artificial Sequence: Synthetic oligonucleotide
uugauuauuaggccugcaa

SEQ ID NO: 2787454 - RNA, 19 nt, Artificial Sequence
  Description of Artificial Sequence: Synthetic oligonucleotide
uguccagcagacaggaaug

SEQ ID NO: 2787455 - RNA, 19 nt, Artificial Sequence
  Description of Artificial Sequence: Synthetic oligonucleotide
acacagguagugcauuugg

SEQ ID NO: 2787456 - RNA, 19 nt, Artificial Sequence
  Description of Artificial Sequence: Synthetic oligonucleotide
aagcaggacaauaaggaga

SEQ ID NO: 2787457 - RNA, 19 nt, Artificial Sequence
  Description of Artificial Sequence: Synthetic oligonucleotide
uuuggcuccugcgagguag

SEQ ID NO: 2787458 - RNA, 19 nt, Artificial Sequence
  Description of Artificial Sequence: Synthetic oligonucleotide
gaugaucccagagaugagc

SEQ ID NO: 2787459 - RNA, 19 nt, Artificial Sequence
  Description of Artificial Sequence: Synthetic oligonucleotide
ucuugcggcuuguaggucc

SEQ ID NO: 2787460 - RNA, 19 nt, Artificial Sequence
  Description of Artificial Sequence: Synthetic oligonucleotide
gccaugaugaagucaaggg

SEQ ID NO: 2787461 - RNA, 19 nt, Artificial Sequence
  Description of Artificial Sequence: Synthetic oligonucleotide
agggcauugacccagccaa

SEQ ID NO: 2787462 - RNA, 19 nt, Artificial Sequence
  Description of Artificial Sequence: Synthetic oligonucleotide
gaagccaugaugaagucaa

SEQ ID NO: 2787463 - RNA, 19 nt, Artificial Sequence
  Description of Artificial Sequence: Synthetic oligonucleotide
caagcaggacaauaaggag

SEQ ID NO: 2787464 - RNA, 19 nt, Artificial Sequence
  Description of Artificial Sequence: Synthetic oligonucleotide
agcaggacaauaaggagag

SEQ ID NO: 2787465 - RNA, 19 nt, Artificial Sequence
  Description of Artificial Sequence: Synthetic oligonucleotide
aauucuugucuuccacaca

SEQ ID NO: 2787466 - RNA, 19 nt, Artificial Sequence
  Description of Artificial Sequence: Synthetic oligonucleotide
caggacaauaaggagagug

SEQ ID NO: 2787467 - RNA, 19 nt, Artificial Sequence
  Description of Artificial Sequence: Synthetic oligonucleotide
gaucccagagaugagcacc

SEQ ID NO: 2787468 - RNA, 19 nt, Artificial Sequence
  Description of Artificial Sequence: Synthetic oligonucleotide
uggaauucuugucuuccac

SEQ ID NO: 2787469 - RNA, 19 nt, Artificial Sequence
  Description of Artificial Sequence: Synthetic oligonucleotide
acuuggaauucuugucuuc

SEQ ID NO: 2787470 - RNA, 19 nt, Artificial Sequence
  Description of Artificial Sequence: Synthetic oligonucleotide
aaaagugacugcaaagauu

SEQ ID NO: 2787471 - RNA, 19 nt, Artificial Sequence
  Description of Artificial Sequence: Synthetic oligonucleotide
aaagauucccaagucgaaa

SEQ ID NO: 2787472 - RNA, 19 nt, Artificial Sequence
  Description of Artificial Sequence: Synthetic oligonucleotide
uugcagaccggcagaagcc

SEQ ID NO: 2787473 - RNA, 19 nt, Artificial Sequence
  Description of Artificial Sequence: Synthetic oligonucleotide
uuaggccugcaaaagugac

SEQ ID NO: 2787474 - RNA, 19 nt, Artificial Sequence
  Description of Artificial Sequence: Synthetic oligonucleotide
auugacccagccaagcagg

SEQ ID NO: 2787475 - RNA, 19 nt, Artificial Sequence
  Description of Artificial Sequence: Synthetic oligonucleotide
cauugacccagccaagcag

SEQ ID NO: 2787476 - RNA, 19 nt, Artificial Sequence
  Description of Artificial Sequence: Synthetic oligonucleotide
agacgacaaagaugauccc

SEQ ID NO: 2787477 - RNA, 19 nt, Artificial Sequence
  Description of Artificial Sequence: Synthetic oligonucleotide
gacaauaaggagagugaug

SEQ ID NO: 2787478 - RNA, 19 nt, Artificial Sequence
  Description of Artificial Sequence: Synthetic oligonucleotide
accggcagaagccaugaug

SEQ ID NO: 2787479 - RNA, 19 nt, Artificial Sequence
  Description of Artificial Sequence: Synthetic oligonucleotide
aggacgauccccaagauuu

SEQ ID NO: 2787480 - RNA, 19 nt, Artificial Sequence
  Description of Artificial Sequence: Synthetic oligonucleotide
gcucacucagcuuuguccg

SEQ ID NO: 2787481 - RNA, 19 nt, Artificial Sequence
  Description of Artificial Sequence: Synthetic oligonucleotide
ucuggcucggccacccggg

SEQ ID NO: 2787482 - RNA, 19 nt, Artificial Sequence
  Description of Artificial Sequence: Synthetic oligonucleotide
gagagugaugacacagagg

SEQ ID NO: 2787483 - RNA, 19 nt, Artificial Sequence
  Description of Artificial Sequence: Synthetic oligonucleotide
acgacaaagaugaucccag

SEQ ID NO: 2787484 - RNA, 19 nt, Artificial Sequence
  Description of Artificial Sequence: Synthetic oligonucleotide
agccaugaugaagucaagg

SEQ ID NO: 2787485 - RNA, 19 nt, Artificial Sequence
  Description of Artificial Sequence: Synthetic oligonucleotide
ucgagacuuggaauucuug

SEQ ID NO: 2787486 - RNA, 19 nt, Artificial Sequence
  Description of Artificial Sequence: Synthetic oligonucleotide
auucccaagucgaaaguag

SEQ ID NO: 2787487 - RNA, 19 nt, Artificial Sequence
  Description of Artificial Sequence: Synthetic oligonucleotide
ggagagugaugacacagag

SEQ ID NO: 2787488 - RNA, 19 nt, Artificial Sequence
  Description of Artificial Sequence: Synthetic oligonucleotide
cagguagugcauuuggcuc

SEQ ID NO: 2787489 - RNA, 19 nt, Artificial Sequence
  Description of Artificial Sequence: Synthetic oligonucleotide
ccaugaugaagucaagggg

SEQ ID NO: 2787490 - RNA, 19 nt, Artificial Sequence
  Description of Artificial Sequence: Synthetic oligonucleotide
gagaugagcaccagucgag

SEQ ID NO: 2787491 - RNA, 19 nt, Artificial Sequence
  Description of Artificial Sequence: Synthetic oligonucleotide
uugacccagccaagcaggg

SEQ ID NO: 2787492 - RNA, 19 nt, Artificial Sequence
  Description of Artificial Sequence: Synthetic oligonucleotide
acucagcuuuguccgaggg

SEQ ID NO: 2787493 - RNA, 19 nt, Artificial Sequence
  Description of Artificial Sequence: Synthetic oligonucleotide
aaagaugaucccagagaug

SEQ ID NO: 2787494 - RNA, 19 nt, Artificial Sequence
  Description of Artificial Sequence: Synthetic oligonucleotide
ggcugguugauuauuaggc

SEQ ID NO: 2787495 - RNA, 19 nt, Artificial Sequence
  Description of Artificial Sequence: Synthetic oligonucleotide
augagcaccagucgagacu

SEQ ID NO: 2787496 - RNA, 19 nt, Artificial Sequence
  Description of Artificial Sequence: Synthetic oligonucleotide
ucuuccacacagguagugc

SEQ ID NO: 2787497 - RNA, 19 nt, Artificial Sequence
  Description of Artificial Sequence: Synthetic oligonucleotide
agauuugcagaccggcaga

SEQ ID NO: 2787498 - RNA, 19 nt, Artificial Sequence
  Description of Artificial Sequence: Synthetic oligonucleotide
ggaaugagggucaggaugc

SEQ ID NO: 2787499 - RNA, 19 nt, Artificial Sequence
  Description of Artificial Sequence: Synthetic oligonucleotide
aggacaccagggcauugac

SEQ ID NO: 2787500 - RNA, 19 nt, Artificial Sequence
  Description of Artificial Sequence: Synthetic oligonucleotide
aagugacugcaaagauucc

SEQ ID NO: 2787501 - RNA, 19 nt, Artificial Sequence
  Description of Artificial Sequence: Synthetic oligonucleotide
gucaggacgauccccaaga

SEQ ID NO: 2787502 - RNA, 19 nt, Artificial Sequence
  Description of Artificial Sequence: Synthetic oligonucleotide
gacgacaaagaugauccca

SEQ ID NO: 2787503 - RNA, 19 nt, Artificial Sequence
  Description of Artificial Sequence: Synthetic oligonucleotide
gaugagcaccagucgagac

SEQ ID NO: 2787504 - RNA, 19 nt, Artificial Sequence
  Description of Artificial Sequence: Synthetic oligonucleotide
acacagagggcgucuugcg

SEQ ID NO: 2787505 - RNA, 19 nt, Artificial Sequence
  Description of Artificial Sequence: Synthetic oligonucleotide
gacacagagggcgucuugc

SEQ ID NO: 2787506 - RNA, 19 nt, Artificial Sequence
  Description of Artificial Sequence: Synthetic oligonucleotide
ccagcagacaggaaugagg

SEQ ID NO: 2787507 - RNA, 19 nt, Artificial Sequence
  Description of Artificial Sequence: Synthetic oligonucleotide
agauucccaagucgaaagu

SEQ ID NO: 2787508 - RNA, 19 nt, Artificial Sequence
  Description of Artificial Sequence: Synthetic oligonucleotide
gauccccaagauuugcaga

SEQ ID NO: 2787509 - RNA, 19 nt, Artificial Sequence
  Description of Artificial Sequence: Synthetic oligonucleotide
agggcgugcugucuggcuc

SEQ ID NO: 2787510 - RNA, 19 nt, Artificial Sequence
  Description of Artificial Sequence: Synthetic oligonucleotide
aggacaauaaggagaguga

SEQ ID NO: 2787511 - RNA, 19 nt, Artificial Sequence
  Description of Artificial Sequence: Synthetic oligonucleotide
agguagaccagcaagccaa

SEQ ID NO: 2787512 - RNA, 19 nt, Artificial Sequence
  Description of Artificial Sequence: Synthetic oligonucleotide
cagagcgcaggacaccagg

SEQ ID NO: 2787513 - RNA, 19 nt, Artificial Sequence
  Description of Artificial Sequence: Synthetic oligonucleotide
agcgcaggacaccagggca

SEQ ID NO: 2787514 - RNA, 19 nt, Artificial Sequence
  Description of Artificial Sequence: Synthetic oligonucleotide
caaagaugaucccagagau

SEQ ID NO: 2787515 - RNA, 19 nt, Artificial Sequence
  Description of Artificial Sequence: Synthetic oligonucleotide
ccagagaugagcaccaguc

SEQ ID NO: 2787516 - RNA, 19 nt, Artificial Sequence
  Description of Artificial Sequence: Synthetic oligonucleotide
gcugguugauuauuaggcc

SEQ ID NO: 2787517 - RNA, 19 nt, Artificial Sequence
  Description of Artificial Sequence: Synthetic oligonucleotide
cuuccacacagguagugca

SEQ ID NO: 2787518 - RNA, 19 nt, Artificial Sequence
  Description of Artificial Sequence: Synthetic oligonucleotide
uaaggagagugaugacaca

SEQ ID NO: 2787519 - RNA, 19 nt, Artificial Sequence
  Description of Artificial Sequence: Synthetic oligonucleotide
gcuccugcgagguagacca

SEQ ID NO: 2787520 - RNA, 19 nt, Artificial Sequence
  Description of Artificial Sequence: Synthetic oligonucleotide
aagccaagcaggacaauaa

SEQ ID NO: 2787521 - RNA, 19 nt, Artificial Sequence
  Description of Artificial Sequence: Synthetic oligonucleotide
ccaagcaggacaauaagga

SEQ ID NO: 2787522 - RNA, 19 nt, Artificial Sequence
  Description of Artificial Sequence: Synthetic oligonucleotide
gcgucuugcggcuuguagg

SEQ ID NO: 2787523 - RNA, 19 nt, Artificial Sequence
  Description of Artificial Sequence: Synthetic oligonucleotide
ugagcaccagucgagacuu

SEQ ID NO: 2787524 - RNA, 19 nt, Artificial Sequence
  Description of Artificial Sequence: Synthetic oligonucleotide
ucacucagcuuuguccgag

SEQ ID NO: 2787525 - RNA, 19 nt, Artificial Sequence
  Description of Artificial Sequence: Synthetic oligonucleotide
gcaaaagugacugcaaaga

SEQ ID NO: 2787526 - RNA, 19 nt, Artificial Sequence
  Description of Artificial Sequence: Synthetic oligonucleotide
cacagagggcgucuugcgg

SEQ ID NO: 2787527 - RNA, 19 nt, Artificial Sequence
  Description of Artificial Sequence: Synthetic oligonucleotide
agcaccagucgagacuugg

SEQ ID NO: 2787528 - RNA, 19 nt, Artificial Sequence
  Description of Artificial Sequence: Synthetic oligonucleotide
gggcugguugauuauuagg

SEQ ID NO: 2787529 - RNA, 19 nt, Artificial Sequence
  Description of Artificial Sequence: Synthetic oligonucleotide
ugggcagagcgcaggacac

SEQ ID NO: 2787530 - RNA, 19 nt, Artificial Sequence
  Description of Artificial Sequence: Synthetic oligonucleotide
aaugagggucaggaugcca

SEQ ID NO: 2787531 - RNA, 19 nt, Artificial Sequence
  Description of Artificial Sequence: Synthetic oligonucleotide
cucagcuuuguccgagggc

SEQ ID NO: 2787532 - RNA, 19 nt, Artificial Sequence
  Description of Artificial Sequence: Synthetic oligonucleotide
caauaaggagagugaugac

SEQ ID NO: 2787533 - RNA, 19 nt, Artificial Sequence
  Description of Artificial Sequence: Synthetic oligonucleotide
agccaagcagggucaggac

SEQ ID NO: 2787534 - RNA, 19 nt, Artificial Sequence
  Description of Artificial Sequence: Synthetic oligonucleotide
accagucgagacuuggaau

SEQ ID NO: 2787535 - RNA, 19 nt, Artificial Sequence
  Description of Artificial Sequence: Synthetic oligonucleotide
uccgagggcgugcugucug

SEQ ID NO: 2787536 - RNA, 19 nt, Artificial Sequence
  Description of Artificial Sequence: Synthetic oligonucleotide
auuaggccugcaaaaguga

SEQ ID NO: 2787537 - RNA, 19 nt, Artificial Sequence
  Description of Artificial Sequence: Synthetic oligonucleotide
gccaagcagggucaggacg

SEQ ID NO: 2787538 - RNA, 19 nt, Artificial Sequence
  Description of Artificial Sequence: Synthetic oligonucleotide
caagauuugcagaccggca

SEQ ID NO: 2787539 - RNA, 19 nt, Artificial Sequence
  Description of Artificial Sequence: Synthetic oligonucleotide
gagguagaccagcaagcca

SEQ ID NO: 2787540 - RNA, 19 nt, Artificial Sequence
  Description of Artificial Sequence: Synthetic oligonucleotide
ggaauucuugucuuccaca

SEQ ID NO: 2787541 - RNA, 19 nt, Artificial Sequence
  Description of Artificial Sequence: Synthetic oligonucleotide
gccaagcaggacaauaagg

SEQ ID NO: 2787542 - RNA, 19 nt, Artificial Sequence
  Description of Artificial Sequence: Synthetic oligonucleotide
gacgauccccaagauuugc

SEQ ID NO: 2787543 - RNA, 19 nt, Artificial Sequence
  Description of Artificial Sequence: Synthetic oligonucleotide
ugacugcaaagauucccaa

SEQ ID NO: 2787544 - RNA, 19 nt, Artificial Sequence
  Description of Artificial Sequence: Synthetic oligonucleotide
uccagcagacaggaaugag

SEQ ID NO: 2787545 - RNA, 19 nt, Artificial Sequence
  Description of Artificial Sequence: Synthetic oligonucleotide
ugacacagagggcgucuug

SEQ ID NO: 2787546 - RNA, 19 nt, Artificial Sequence
  Description of Artificial Sequence: Synthetic oligonucleotide
gagcgcaggacaccagggc

SEQ ID NO: 2787547 - RNA, 19 nt, Artificial Sequence
  Description of Artificial Sequence: Synthetic oligonucleotide
agaagccaugaugaaguca

SEQ ID NO: 2787548 - RNA, 19 nt, Artificial Sequence
  Description of Artificial Sequence: Synthetic oligonucleotide
ugaucccagagaugagcac

SEQ ID NO: 2787549 - RNA, 19 nt, Artificial Sequence
  Description of Artificial Sequence: Synthetic oligonucleotide
cagcaagccaagcaggaca

SEQ ID NO: 2787550 - RNA, 19 nt, Artificial Sequence
  Description of Artificial Sequence: Synthetic oligonucleotide
gcaaagauucccaagucga

SEQ ID NO: 2787551 - RNA, 19 nt, Artificial Sequence
  Description of Artificial Sequence: Synthetic oligonucleotide
augaucccagagaugagca

SEQ ID NO: 2787552 - RNA, 19 nt, Artificial Sequence
  Description of Artificial Sequence: Synthetic oligonucleotide
ugcggcuuguagguccugg

SEQ ID NO: 2787553 - RNA, 19 nt, Artificial Sequence
  Description of Artificial Sequence: Synthetic oligonucleotide
gugacugcaaagauuccca

SEQ ID NO: 2787554 - RNA, 19 nt, Artificial Sequence
  Description of Artificial Sequence: Synthetic oligonucleotide
uuccacacagguagugcau

SEQ ID NO: 2787555 - RNA, 19 nt, Artificial Sequence
  Description of Artificial Sequence: Synthetic oligonucleotide
gcagacaggaaugaggguc

SEQ ID NO: 2787556 - RNA, 19 nt, Artificial Sequence
  Description of Artificial Sequence: Synthetic oligonucleotide
cagacaggaaugaggguca

SEQ ID NO: 2787557 - RNA, 19 nt, Artificial Sequence
  Description of Artificial Sequence: Synthetic oligonucleotide
gagugggcuguccagcaga

SEQ ID NO: 2787558 - RNA, 19 nt, Artificial Sequence
  Description of Artificial Sequence: Synthetic oligonucleotide
cugguugauuauuaggccu

SEQ ID NO: 2787559 - RNA, 19 nt, Artificial Sequence
  Description of Artificial Sequence: Synthetic oligonucleotide
gauucccaagucgaaagua

SEQ ID NO: 2787560 - RNA, 19 nt, Artificial Sequence
  Description of Artificial Sequence: Synthetic oligonucleotide
gggucaggaugccagagac

SEQ ID NO: 2787561 - RNA, 19 nt, Artificial Sequence
  Description of Artificial Sequence: Synthetic oligonucleotide
ugucuuccacacagguagu

SEQ ID NO: 2787562 - RNA, 19 nt, Artificial Sequence
  Description of Artificial Sequence: Synthetic oligonucleotide
uuguccgagggcgugcugu

SEQ ID NO: 2787563 - RNA, 19 nt, Artificial Sequence
  Description of Artificial Sequence: Synthetic oligonucleotide
gucuggcucggccacccgg

SEQ ID NO: 2787564 - RNA, 19 nt, Artificial Sequence
  Description of Artificial Sequence: Synthetic oligonucleotide
gugcauuuggcuccugcga

SEQ ID NO: 2787565 - RNA, 19 nt, Artificial Sequence
  Description of Artificial Sequence: Synthetic oligonucleotide
ugcugucuggcucggccac

SEQ ID NO: 2787566 - RNA, 19 nt, Artificial Sequence
  Description of Artificial Sequence: Synthetic oligonucleotide
gacaggaaugagggucagg

SEQ ID NO: 2787567 - RNA, 19 nt, Artificial Sequence
  Description of Artificial Sequence: Synthetic oligonucleotide
ugcagaccggcagaagcca

SEQ ID NO: 2787568 - RNA, 19 nt, Artificial Sequence
  Description of Artificial Sequence: Synthetic oligonucleotide
ccaagauuugcagaccggc

SEQ ID NO: 2787569 - RNA, 19 nt, Artificial Sequence
  Description of Artificial Sequence: Synthetic oligonucleotide
agugggcuguccagcagac

SEQ ID NO: 2787570 - RNA, 19 nt, Artificial Sequence
  Description of Artificial Sequence: Synthetic oligonucleotide
caaagauucccaagucgaa

SEQ ID NO: 2787571 - RNA, 19 nt, Artificial Sequence
  Description of Artificial Sequence: Synthetic oligonucleotide
cacucagcuuuguccgagg

SEQ ID NO: 2787572 - RNA, 19 nt, Artificial Sequence
  Description of Artificial Sequence: Synthetic oligonucleotide
agggucaggaugccagaga

SEQ ID NO: 2787573 - RNA, 19 nt, Artificial Sequence
  Description of Artificial Sequence: Synthetic oligonucleotide
uccugcgagguagaccagc

SEQ ID NO: 2787574 - RNA, 19 nt, Artificial Sequence
  Description of Artificial Sequence: Synthetic oligonucleotide
ucaggacgauccccaagau

SEQ ID NO: 2787575 - RNA, 19 nt, Artificial Sequence
  Description of Artificial Sequence: Synthetic oligonucleotide
gcauuuggcuccugcgagg

SEQ ID NO: 2787576 - RNA, 19 nt, Artificial Sequence
  Description of Artificial Sequence: Synthetic oligonucleotide
agaugagcaccagucgaga

SEQ ID NO: 2787577 - RNA, 19 nt, Artificial Sequence
  Description of Artificial Sequence: Synthetic oligonucleotide
ccccaagauuugcagaccg

SEQ ID NO: 2787578 - RNA, 19 nt, Artificial Sequence
  Description of Artificial Sequence: Synthetic oligonucleotide
ucaggaugccagagacgac

SEQ ID NO: 2787579 - RNA, 19 nt, Artificial Sequence
  Description of Artificial Sequence: Synthetic oligonucleotide
gauuugcagaccggcagaa

SEQ ID NO: 2787580 - RNA, 19 nt, Artificial Sequence
  Description of Artificial Sequence: Synthetic oligonucleotide
uccccaagauuugcagacc

SEQ ID NO: 2787581 - RNA, 19 nt, Artificial Sequence
  Description of Artificial Sequence: Synthetic oligonucleotide
gccagagacgacaaagaug

SEQ ID NO: 2787582 - RNA, 19 nt, Artificial Sequence
  Description of Artificial Sequence: Synthetic oligonucleotide
gagugaugacacagagggc

SEQ ID NO: 2787583 - RNA, 19 nt, Artificial Sequence
  Description of Artificial Sequence: Synthetic oligonucleotide
ccggcagaagccaugauga

SEQ ID NO: 2787584 - RNA, 19 nt, Artificial Sequence
  Description of Artificial Sequence: Synthetic oligonucleotide
ggggcgagugcucacucag

SEQ ID NO: 2787585 - RNA, 19 nt, Artificial Sequence
  Description of Artificial Sequence: Synthetic oligonucleotide
caccagggcauugacccag

SEQ ID NO: 2787586 - RNA, 19 nt, Artificial Sequence
  Description of Artificial Sequence: Synthetic oligonucleotide
agucgagacuuggaauucu

SEQ ID NO: 2787587 - RNA, 19 nt, Artificial Sequence
  Description of Artificial Sequence: Synthetic oligonucleotide
caaaagugacugcaaagau

SEQ ID NO: 2787588 - RNA, 19 nt, Artificial Sequence
  Description of Artificial Sequence: Synthetic oligonucleotide
gaaugagggucaggaugcc

SEQ ID NO: 2787589 - RNA, 19 nt, Artificial Sequence
  Description of Artificial Sequence: Synthetic oligonucleotide
cugcaaaagugacugcaaa

SEQ ID NO: 2787590 - RNA, 19 nt, Artificial Sequence
  Description of Artificial Sequence: Synthetic oligonucleotide
cacacagguagugcauuug

SEQ ID NO: 2787591 - RNA, 19 nt, Artificial Sequence
  Description of Artificial Sequence: Synthetic oligonucleotide
uuggcuccugcgagguaga

SEQ ID NO: 2787592 - RNA, 19 nt, Artificial Sequence
  Description of Artificial Sequence: Synthetic oligonucleotide
aagccaugaugaagucaag

SEQ ID NO: 2787593 - RNA, 19 nt, Artificial Sequence
  Description of Artificial Sequence: Synthetic oligonucleotide
ugucuggcucggccacccg

SEQ ID NO: 2787594 - RNA, 19 nt, Artificial Sequence
  Description of Artificial Sequence: Synthetic oligonucleotide
ggggcugguugauuauuag

SEQ ID NO: 2787595 - RNA, 19 nt, Artificial Sequence
  Description of Artificial Sequence: Synthetic oligonucleotide
uuuguccgagggcgugcug

SEQ ID NO: 2787596 - RNA, 19 nt, Artificial Sequence
  Description of Artificial Sequence: Synthetic oligonucleotide
aggagagugaugacacaga

SEQ ID NO: 2787597 - RNA, 19 nt, Artificial Sequence
  Description of Artificial Sequence: Synthetic oligonucleotide
cagaagccaugaugaaguc

SEQ ID NO: 2787598 - RNA, 19 nt, Artificial Sequence
  Description of Artificial Sequence: Synthetic oligonucleotide
gcagaagccaugaugaagu

SEQ ID NO: 2787599 - RNA, 19 nt, Artificial Sequence
  Description of Artificial Sequence: Synthetic oligonucleotide
ggcgucuugcggcuuguag

SEQ ID NO: 2787600 - RNA, 19 nt, Artificial Sequence
  Description of Artificial Sequence: Synthetic oligonucleotide
gagggcgucuugcggcuug

SEQ ID NO: 2787601 - RNA, 19 nt, Artificial Sequence
  Description of Artificial Sequence: Synthetic oligonucleotide
gucuuccacacagguagug

SEQ ID NO: 2787602 - RNA, 19 nt, Artificial Sequence
  Description of Artificial Sequence: Synthetic oligonucleotide
agggucaggacgaucccca

SEQ ID NO: 2787603 - RNA, 19 nt, Artificial Sequence
  Description of Artificial Sequence: Synthetic oligonucleotide
agcaagccaagcaggacaa

SEQ ID NO: 2787604 - RNA, 19 nt, Artificial Sequence
  Description of Artificial Sequence: Synthetic oligonucleotide
ugaugacacagagggcguc

SEQ ID NO: 2787605 - RNA, 19 nt, Artificial Sequence
  Description of Artificial Sequence: Synthetic oligonucleotide
agaugaucccagagaugag

SEQ ID NO: 2787606 - RNA, 19 nt, Artificial Sequence
  Description of Artificial Sequence: Synthetic oligonucleotide
gcgagguagaccagcaagc

SEQ ID NO: 2787607 - RNA, 19 nt, Artificial Sequence
  Description of Artificial Sequence: Synthetic oligonucleotide
agaccggcagaagccauga

SEQ ID NO: 2787608 - RNA, 19 nt, Artificial Sequence
  Description of Artificial Sequence: Synthetic oligonucleotide
ggcauugacccagccaagc

SEQ ID NO: 2787609 - RNA, 19 nt, Artificial Sequence
  Description of Artificial Sequence: Synthetic oligonucleotide
gguugauuauuaggccugc

SEQ ID NO: 2787610 - RNA, 19 nt, Artificial Sequence
  Description of Artificial Sequence: Synthetic oligonucleotide
cagggucaggacgaucccc

SEQ ID NO: 2787611 - RNA, 19 nt, Artificial Sequence
  Description of Artificial Sequence: Synthetic oligonucleotide
gacuuggaauucuugucuu

SEQ ID NO: 2787612 - RNA, 19 nt, Artificial Sequence
  Description of Artificial Sequence: Synthetic oligonucleotide
ggucaggacgauccccaag

SEQ ID NO: 2787613 - RNA, 19 nt, Artificial Sequence
  Description of Artificial Sequence: Synthetic oligonucleotide
guagaccagcaagccaagc

SEQ ID NO: 2787614 - RNA, 19 nt, Artificial Sequence
  Description of Artificial Sequence: Synthetic oligonucleotide
cccaagauuugcagaccgg

SEQ ID NO: 2787615 - RNA, 19 nt, Artificial Sequence
  Description of Artificial Sequence: Synthetic oligonucleotide
agcuuuguccgagggcgug

SEQ ID NO: 2787616 - RNA, 19 nt, Artificial Sequence
  Description of Artificial Sequence: Synthetic oligonucleotide
gagugcucacucagcuuug

SEQ ID NO: 2787617 - RNA, 19 nt, Artificial Sequence
  Description of Artificial Sequence: Synthetic oligonucleotide
caccagucgagacuuggaa

SEQ ID NO: 2787618 - RNA, 19 nt, Artificial Sequence
  Description of Artificial Sequence: Synthetic oligonucleotide
uguccgagggcgugcuguc

SEQ ID NO: 2787619 - RNA, 19 nt, Artificial Sequence
  Description of Artificial Sequence: Synthetic oligonucleotide
gggcgugcugucuggcucg

SEQ ID NO: 2787620 - RNA, 19 nt, Artificial Sequence
  Description of Artificial Sequence: Synthetic oligonucleotide
guugauuauuaggccugca

SEQ ID NO: 2787621 - RNA, 19 nt, Artificial Sequence
  Description of Artificial Sequence: Synthetic oligonucleotide
uggcucggccacccggggc

SEQ ID NO: 2787622 - RNA, 19 nt, Artificial Sequence
  Description of Artificial Sequence: Synthetic oligonucleotide
cagucgagacuuggaauuc

SEQ ID NO: 2787623 - RNA, 19 nt, Artificial Sequence
  Description of Artificial Sequence: Synthetic oligonucleotide
acaccagggcauugaccca

SEQ ID NO: 2787624 - RNA, 19 nt, Artificial Sequence
  Description of Artificial Sequence: Synthetic oligonucleotide
cagccaagcagggucagga

SEQ ID NO: 2787625 - RNA, 19 nt, Artificial Sequence
  Description of Artificial Sequence: Synthetic oligonucleotide
agacaggaaugagggucag

SEQ ID NO: 2787626 - RNA, 19 nt, Artificial Sequence
  Description of Artificial Sequence: Synthetic oligonucleotide
ggucaggaugccagagacg

SEQ ID NO: 2787627 - RNA, 19 nt, Artificial Sequence
  Description of Artificial Sequence: Synthetic oligonucleotide
gaugacacagagggcgucu

SEQ ID NO: 2787628 - RNA, 19 nt, Artificial Sequence
  Description of Artificial Sequence: Synthetic oligonucleotide
ccaagcagggucaggacga

SEQ ID NO: 2787629 - RNA, 19 nt, Artificial Sequence
  Description of Artificial Sequence: Synthetic oligonucleotide
cugucuggcucggccaccc

SEQ ID NO: 2787630 - RNA, 19 nt, Artificial Sequence
  Description of Artificial Sequence: Synthetic oligonucleotide
acgauccccaagauuugca

SEQ ID NO: 2787631 - RNA, 19 nt, Artificial Sequence
  Description of Artificial Sequence: Synthetic oligonucleotide
accagggcauugacccagc

SEQ ID NO: 2787632 - RNA, 19 nt, Artificial Sequence
  Description of Artificial Sequence: Synthetic oligonucleotide
agugcucacucagcuuugu

SEQ ID NO: 2787633 - RNA, 19 nt, Artificial Sequence
  Description of Artificial Sequence: Synthetic oligonucleotide
cagggcauugacccagcca

SEQ ID NO: 2787634 - RNA, 19 nt, Artificial Sequence
  Description of Artificial Sequence: Synthetic oligonucleotide
gccugcaaaagugacugca

SEQ ID NO: 2787635 - RNA, 19 nt, Artificial Sequence
  Description of Artificial Sequence: Synthetic oligonucleotide
gugcugucuggcucggcca

SEQ ID NO: 2787636 - RNA, 19 nt, Artificial Sequence
  Description of Artificial Sequence: Synthetic oligonucleotide
acccggggcugguugauua

SEQ ID NO: 2787637 - RNA, 19 nt, Artificial Sequence
  Description of Artificial Sequence: Synthetic oligonucleotide
ugacccagccaagcagggu

SEQ ID NO: 2787638 - RNA, 19 nt, Artificial Sequence
  Description of Artificial Sequence: Synthetic oligonucleotide
gguagaccagcaagccaag

SEQ ID NO: 2787639 - RNA, 19 nt, Artificial Sequence
  Description of Artificial Sequence: Synthetic oligonucleotide
cucacucagcuuuguccga

SEQ ID NO: 2787640 - RNA, 19 nt, Artificial Sequence
  Description of Artificial Sequence: Synthetic oligonucleotide
cgugcugucuggcucggcc

SEQ ID NO: 2787641 - RNA, 19 nt, Artificial Sequence
  Description of Artificial Sequence: Synthetic oligonucleotide
ggacaccagggcauugacc

SEQ ID NO: 2787642 - RNA, 19 nt, Artificial Sequence
  Description of Artificial Sequence: Synthetic oligonucleotide
gugcucacucagcuuuguc

SEQ ID NO: 2787643 - RNA, 19 nt, Artificial Sequence
  Description of Artificial Sequence: Synthetic oligonucleotide
aggaugccagagacgacaa

SEQ ID NO: 2787644 - RNA, 19 nt, Artificial Sequence
  Description of Artificial Sequence: Synthetic oligonucleotide
ggcuguccagcagacagga

SEQ ID NO: 2787645 - RNA, 19 nt, Artificial Sequence
  Description of Artificial Sequence: Synthetic oligonucleotide
caggacaccagggcauuga

SEQ ID NO: 2787646 - RNA, 19 nt, Artificial Sequence
  Description of Artificial Sequence: Synthetic oligonucleotide
cgagguagaccagcaagcc

SEQ ID NO: 2787647 - RNA, 19 nt, Artificial Sequence
  Description of Artificial Sequence: Synthetic oligonucleotide
gggcuguccagcagacagg

SEQ ID NO: 2787648 - RNA, 19 nt, Artificial Sequence
  Description of Artificial Sequence: Synthetic oligonucleotide
ggcgagugcucacucagcu

SEQ ID NO: 2787649 - RNA, 19 nt, Artificial Sequence
  Description of Artificial Sequence: Synthetic oligonucleotide
ggacaauaaggagagugau

SEQ ID NO: 2787650 - RNA, 19 nt, Artificial Sequence
  Description of Artificial Sequence: Synthetic oligonucleotide
ggcagagcgcaggacacca

SEQ ID NO: 2787651 - RNA, 19 nt, Artificial Sequence
  Description of Artificial Sequence: Synthetic oligonucleotide
ccugcaaaagugacugcaa

SEQ ID NO: 2787652 - RNA, 19 nt, Artificial Sequence
  Description of Artificial Sequence: Synthetic oligonucleotide
ggacgauccccaagauuug

SEQ ID NO: 2787653 - RNA, 19 nt, Artificial Sequence
  Description of Artificial Sequence: Synthetic oligonucleotide
cauuuggcuccugcgaggu

SEQ ID NO: 2787654 - RNA, 19 nt, Artificial Sequence
  Description of Artificial Sequence: Synthetic oligonucleotide
ggcuccugcgagguagacc

SEQ ID NO: 2787655 - RNA, 19 nt, Artificial Sequence
  Description of Artificial Sequence: Synthetic oligonucleotide
augacacagagggcgucuu

SEQ ID NO: 2787656 - RNA, 19 nt, Artificial Sequence
  Description of Artificial Sequence: Synthetic oligonucleotide
cuccugcgagguagaccag

SEQ ID NO: 2787657 - RNA, 19 nt, Artificial Sequence
  Description of Artificial Sequence: Synthetic oligonucleotide
gcuuuguccgagggcgugc

SEQ ID NO: 2787658 - RNA, 19 nt, Artificial Sequence
  Description of Artificial Sequence: Synthetic oligonucleotide
cuugcggcuuguagguccu

SEQ ID NO: 2787659 - RNA, 19 nt, Artificial Sequence
  Description of Artificial Sequence: Synthetic oligonucleotide
ggccugcaaaagugacugc

SEQ ID NO: 2787660 - RNA, 19 nt, Artificial Sequence
  Description of Artificial Sequence: Synthetic oligonucleotide
cgagacuuggaauucuugu

SEQ ID NO: 2787661 - RNA, 19 nt, Artificial Sequence
  Description of Artificial Sequence: Synthetic oligonucleotide
ccugcgagguagaccagca

SEQ ID NO: 2787662 - RNA, 19 nt, Artificial Sequence
  Description of Artificial Sequence: Synthetic oligonucleotide
gagggcgugcugucuggcu

SEQ ID NO: 2787663 - RNA, 19 nt, Artificial Sequence
  Description of Artificial Sequence: Synthetic oligonucleotide
gugaugacacagagggcgu

SEQ ID NO: 2787664 - RNA, 19 nt, Artificial Sequence
  Description of Artificial Sequence: Synthetic oligonucleotide
ccagucgagacuuggaauu

SEQ ID NO: 2787665 - RNA, 19 nt, Artificial Sequence
  Description of Artificial Sequence: Synthetic oligonucleotide
ggccacccggggcugguug

SEQ ID NO: 2787666 - RNA, 19 nt, Artificial Sequence
  Description of Artificial Sequence: Synthetic oligonucleotide
ccgagggcgugcugucugg

SEQ ID NO: 2787667 - RNA, 19 nt, Artificial Sequence
  Description of Artificial Sequence: Synthetic oligonucleotide
gggcauugacccagccaag

SEQ ID NO: 2787668 - RNA, 19 nt, Artificial Sequence
  Description of Artificial Sequence: Synthetic oligonucleotide
uggcuccugcgagguagac

SEQ ID NO: 2787669 - RNA, 19 nt, Artificial Sequence
  Description of Artificial Sequence: Synthetic oligonucleotide
gagcaccagucgagacuug

SEQ ID NO: 2787670 - RNA, 19 nt, Artificial Sequence
  Description of Artificial Sequence: Synthetic oligonucleotide
gucuugcggcuuguagguc

SEQ ID NO: 2787671 - RNA, 19 nt, Artificial Sequence
  Description of Artificial Sequence: Synthetic oligonucleotide
caggaaugagggucaggau

SEQ ID NO: 2787672 - RNA, 19 nt, Artificial Sequence
  Description of Artificial Sequence: Synthetic oligonucleotide
cugcgagguagaccagcaa

SEQ ID NO: 2787673 - RNA, 19 nt, Artificial Sequence
  Description of Artificial Sequence: Synthetic oligonucleotide
cagagggcgucuugcggcu

SEQ ID NO: 2787674 - RNA, 19 nt, Artificial Sequence
  Description of Artificial Sequence: Synthetic oligonucleotide
guagugcauuuggcuccug

SEQ ID NO: 2787675 - RNA, 19 nt, Artificial Sequence
  Description of Artificial Sequence: Synthetic oligonucleotide
cuuuguccgagggcgugcu

SEQ ID NO: 2787676 - RNA, 19 nt, Artificial Sequence
  Description of Artificial Sequence: Synthetic oligonucleotide
ggcucggccacccggggcu

SEQ ID NO: 2787677 - RNA, 19 nt, Artificial Sequence
  Description of Artificial Sequence: Synthetic oligonucleotide
cucggccacccggggcugg

SEQ ID NO: 2787678 - RNA, 19 nt, Artificial Sequence
  Description of Artificial Sequence: Synthetic oligonucleotide
caggacgauccccaagauu

SEQ ID NO: 2787679 - RNA, 19 nt, Artificial Sequence
  Description of Artificial Sequence: Synthetic oligonucleotide
agggcgucuugcggcuugu

SEQ ID NO: 2787680 - RNA, 19 nt, Artificial Sequence
  Description of Artificial Sequence: Synthetic oligonucleotide
gggcgagugcucacucagc

SEQ ID NO: 2787681 - RNA, 19 nt, Artificial Sequence
  Description of Artificial Sequence: Synthetic oligonucleotide
gcaccagucgagacuugga

SEQ ID NO: 2787682 - RNA, 19 nt, Artificial Sequence
  Description of Artificial Sequence: Synthetic oligonucleotide
ggaugccagagacgacaaa

SEQ ID NO: 2787683 - RNA, 19 nt, Artificial Sequence
  Description of Artificial Sequence: Synthetic oligonucleotide
gucgagacuuggaauucuu

SEQ ID NO: 2787684 - RNA, 19 nt, Artificial Sequence
  Description of Artificial Sequence: Synthetic oligonucleotide
ccagccaagcagggucagg

SEQ ID NO: 2787685 - RNA, 19 nt, Artificial Sequence
  Description of Artificial Sequence: Synthetic oligonucleotide
ucggccacccggggcuggu

SEQ ID NO: 2787686 - RNA, 19 nt, Artificial Sequence
  Description of Artificial Sequence: Synthetic oligonucleotide
gcagagcgcaggacaccag

SEQ ID NO: 2787687 - RNA, 19 nt, Artificial Sequence
  Description of Artificial Sequence: Synthetic oligonucleotide
gguagugcauuuggcuccu

SEQ ID NO: 2787688 - RNA, 19 nt, Artificial Sequence
  Description of Artificial Sequence: Synthetic oligonucleotide
gcaggacaccagggcauug

SEQ ID NO: 2787689 - RNA, 19 nt, Artificial Sequence
  Description of Artificial Sequence: Synthetic oligonucleotide
ggcgugcugucuggcucgg

SEQ ID NO: 2787690 - RNA, 19 nt, Artificial Sequence
  Description of Artificial Sequence: Synthetic oligonucleotide
cgacaaagaugaucccaga

SEQ ID NO: 2787691 - RNA, 19 nt, Artificial Sequence
  Description of Artificial Sequence: Synthetic oligonucleotide
gcugucuggcucggccacc

SEQ ID NO: 2787692 - RNA, 19 nt, Artificial Sequence
  Description of Artificial Sequence: Synthetic oligonucleotide
gugggcuguccagcagaca

SEQ ID NO: 2787693 - RNA, 19 nt, Artificial Sequence
  Description of Artificial Sequence: Synthetic oligonucleotide
cgucuugcggcuuguaggu

SEQ ID NO: 2787694 - RNA, 19 nt, Artificial Sequence
  Description of Artificial Sequence: Synthetic oligonucleotide
cgagugcucacucagcuuu

SEQ ID NO: 2787695 - RNA, 19 nt, Artificial Sequence
  Description of Artificial Sequence: Synthetic oligonucleotide
cagcuuuguccgagggcgu

SEQ ID NO: 2787696 - RNA, 19 nt, Artificial Sequence
  Description of Artificial Sequence: Synthetic oligonucleotide
gccacccggggcugguuga

SEQ ID NO: 2787697 - RNA, 19 nt, Artificial Sequence
  Description of Artificial Sequence: Synthetic oligonucleotide
gggucaggacgauccccaa

SEQ ID NO: 2787698 - RNA, 19 nt, Artificial Sequence
  Description of Artificial Sequence: Synthetic oligonucleotide
agagggcgucuugcggcuu

SEQ ID NO: 2787699 - RNA, 19 nt, Artificial Sequence
  Description of Artificial Sequence: Synthetic oligonucleotide
gaccggcagaagccaugau

SEQ ID NO: 2787700 - RNA, 19 nt, Artificial Sequence
  Description of Artificial Sequence: Synthetic oligonucleotide
cccagccaagcagggucag

SEQ ID NO: 2787701 - RNA, 19 nt, Artificial Sequence
  Description of Artificial Sequence: Synthetic oligonucleotide
cccagagaugagcaccagu

SEQ ID NO: 2787702 - RNA, 19 nt, Artificial Sequence
  Description of Artificial Sequence: Synthetic oligonucleotide
cagagacgacaaagaugau

SEQ ID NO: 2787703 - RNA, 19 nt, Artificial Sequence
  Description of Artificial Sequence: Synthetic oligonucleotide
cggggcugguugauuauua

SEQ ID NO: 2787704 - RNA, 19 nt, Artificial Sequence
  Description of Artificial Sequence: Synthetic oligonucleotide
caagcagggucaggacgau

SEQ ID NO: 2787705 - RNA, 19 nt, Artificial Sequence
  Description of Artificial Sequence: Synthetic oligonucleotide
cgagggcgugcugucuggc

SEQ ID NO: 2787706 - RNA, 19 nt, Artificial Sequence
  Description of Artificial Sequence: Synthetic oligonucleotide
guccgagggcgugcugucu

SEQ ID NO: 2787707 - RNA, 19 nt, Artificial Sequence
  Description of Artificial Sequence: Synthetic oligonucleotide
gcgagugcucacucagcuu

SEQ ID NO: 2787708 - RNA, 19 nt, Artificial Sequence
  Description of Artificial Sequence: Synthetic oligonucleotide
ccacacagguagugcauuu

SEQ ID NO: 2787709 - RNA, 19 nt, Artificial Sequence
  Description of Artificial Sequence: Synthetic oligonucleotide
gcgcaggacaccagggcau

SEQ ID NO: 2787710 - RNA, 19 nt, Artificial Sequence
  Description of Artificial Sequence: Synthetic oligonucleotide
gcucggccacccggggcug

SEQ ID NO: 2787711 - RNA, 19 nt, Artificial Sequence
  Description of Artificial Sequence: Synthetic oligonucleotide
cggcagaagccaugaugaa

SEQ ID NO: 2787712 - RNA, 19 nt, Artificial Sequence
  Description of Artificial Sequence: Synthetic oligonucleotide
gcaggacaauaaggagagu

SEQ ID NO: 2787713 - RNA, 19 nt, Artificial Sequence
  Description of Artificial Sequence: Synthetic oligonucleotide
gcgugcugucuggcucggc

SEQ ID NO: 2787714 - RNA, 19 nt, Artificial Sequence
  Description of Artificial Sequence: Synthetic oligonucleotide
gcaagccaagcaggacaau

SEQ ID NO: 2787715 - RNA, 19 nt, Artificial Sequence
  Description of Artificial Sequence: Synthetic oligonucleotide
cccggggcugguugauuau

SEQ ID NO: 2787716 - RNA, 19 nt, Artificial Sequence
  Description of Artificial Sequence: Synthetic oligonucleotide
gggcgucuugcggcuugua

SEQ ID NO: 2787717 - RNA, 19 nt, Artificial Sequence
  Description of Artificial Sequence: Synthetic oligonucleotide
cacccggggcugguugauu

SEQ ID NO: 2787718 - RNA, 19 nt, Artificial Sequence
  Description of Artificial Sequence: Synthetic oligonucleotide
ccggggcugguugauuauu

SEQ ID NO: 2787719 - RNA, 19 nt, Artificial Sequence
  Description of Artificial Sequence: Synthetic oligonucleotide
ccacccggggcugguugau

SEQ ID NO: 2787720 - RNA, 19 nt, Artificial Sequence
  Description of Artificial Sequence: Synthetic oligonucleotide
cggccacccggggcugguu

SEQ ID NO: 2787721 - RNA, 19 nt, Artificial Sequence
  Description of Artificial Sequence: Synthetic oligonucleotide
uauguaaaagaacucaggg

SEQ ID NO: 2787722 - RNA, 19 nt, Artificial Sequence
  Description of Artificial Sequence: Synthetic oligonucleotide
aauacuagagaacuauggg

SEQ ID NO: 2787723 - RNA, 19 nt, Artificial Sequence
  Description of Artificial Sequence: Synthetic oligonucleotide
aaaacuugaagcucucagc

SEQ ID NO: 2787724 - RNA, 19 nt, Artificial Sequence
  Description of Artificial Sequence: Synthetic oligonucleotide
aauuguaccaacucgugag

SEQ ID NO: 2787725 - RNA, 19 nt, Artificial Sequence
  Description of Artificial Sequence: Synthetic oligonucleotide
aaaacaccagcauaaguac

SEQ ID NO: 2787726 - RNA, 19 nt, Artificial Sequence
  Description of Artificial Sequence: Synthetic oligonucleotide
aauuauggucuacaaauuc

SEQ ID NO: 2787727 - RNA, 19 nt, Artificial Sequence
  Description of Artificial Sequence: Synthetic oligonucleotide
aauacauauuccuccuugc

SEQ ID NO: 2787728 - RNA, 19 nt, Artificial Sequence
  Description of Artificial Sequence: Synthetic oligonucleotide
uaauacuagagaacuaugg

SEQ ID NO: 2787729 - RNA, 19 nt, Artificial Sequence
  Description of Artificial Sequence: Synthetic oligonucleotide
aacagaaacuacuaaaaca

SEQ ID NO: 2787730 - RNA, 19 nt, Artificial Sequence
  Description of Artificial Sequence: Synthetic oligonucleotide
aaacuacuaaaacaccagc

SEQ ID NO: 2787731 - RNA, 19 nt, Artificial Sequence
  Description of Artificial Sequence: Synthetic oligonucleotide
uguaaaagaacucagggua

SEQ ID NO: 2787732 - RNA, 19 nt, Artificial Sequence
  Description of Artificial Sequence: Synthetic oligonucleotide
ucauaauuguaccaacucg

SEQ ID NO: 2787733 - RNA, 19 nt, Artificial Sequence
  Description of Artificial Sequence: Synthetic oligonucleotide
agaauuauggucuacaaau

SEQ ID NO: 2787734 - RNA, 19 nt, Artificial Sequence
  Description of Artificial Sequence: Synthetic oligonucleotide
aauuccagcuauauuaagc

SEQ ID NO: 2787735 - RNA, 19 nt, Artificial Sequence
  Description of Artificial Sequence: Synthetic oligonucleotide
uuuauguaaaagaacucag

SEQ ID NO: 2787736 - RNA, 19 nt, Artificial Sequence
  Description of Artificial Sequence: Synthetic oligonucleotide
auagugaauacuucaauuc

SEQ ID NO: 2787737 - RNA, 19 nt, Artificial Sequence
  Description of Artificial Sequence: Synthetic oligonucleotide
acagaaacuacuaaaacac

SEQ ID NO: 2787738 - RNA, 19 nt, Artificial Sequence
  Description of Artificial Sequence: Synthetic oligonucleotide
aagacgaagucuuacuuuc

SEQ ID NO: 2787739 - RNA, 19 nt, Artificial Sequence
  Description of Artificial Sequence: Synthetic oligonucleotide
aacacuguuaaguugaaaa

SEQ ID NO: 2787740 - RNA, 19 nt, Artificial Sequence
  Description of Artificial Sequence: Synthetic oligonucleotide
uguuaauacuuccauaaug

SEQ ID NO: 2787741 - RNA, 19 nt, Artificial Sequence
  Description of Artificial Sequence: Synthetic oligonucleotide
uuauguaaaagaacucagg

SEQ ID NO: 2787742 - RNA, 19 nt, Artificial Sequence
  Description of Artificial Sequence: Synthetic oligonucleotide
uuaaaggcaaaacuugaag

SEQ ID NO: 2787743 - RNA, 19 nt, Artificial Sequence
  Description of Artificial Sequence: Synthetic oligonucleotide
aaaggcaaaacuugaagcu

SEQ ID NO: 2787744 - RNA, 19 nt, Artificial Sequence
  Description of Artificial Sequence: Synthetic oligonucleotide
aaaauuuggcauuucaaau

SEQ ID NO: 2787745 - RNA, 19 nt, Artificial Sequence
  Description of Artificial Sequence: Synthetic oligonucleotide
uauauuaagcucauguuaa

SEQ ID NO: 2787746 - RNA, 19 nt, Artificial Sequence
  Description of Artificial Sequence: Synthetic oligonucleotide
uccacaagggucuuaaagg

SEQ ID NO: 2787747 - RNA, 19 nt, Artificial Sequence
  Description of Artificial Sequence: Synthetic oligonucleotide
uuuggaaugcaauagcagc

SEQ ID NO: 2787748 - RNA, 19 nt, Artificial Sequence
  Description of Artificial Sequence: Synthetic oligonucleotide
auggucuacaaauucuucc

SEQ ID NO: 2787749 - RNA, 19 nt, Artificial Sequence
  Description of Artificial Sequence: Synthetic oligonucleotide
auaaguacauagugaauac

SEQ ID NO: 2787750 - RNA, 19 nt, Artificial Sequence
  Description of Artificial Sequence: Synthetic oligonucleotide
aauacccucauaauuguac

SEQ ID NO: 2787751 - RNA, 19 nt, Artificial Sequence
  Description of Artificial Sequence: Synthetic oligonucleotide
aacucgugaguccacaagg

SEQ ID NO: 2787752 - RNA, 19 nt, Artificial Sequence
  Description of Artificial Sequence: Synthetic oligonucleotide
aaacuugaagcucucagcu

SEQ ID NO: 2787753 - RNA, 19 nt, Artificial Sequence
  Description of Artificial Sequence: Synthetic oligonucleotide
uaaguaauacuagagaacu

SEQ ID NO: 2787754 - RNA, 19 nt, Artificial Sequence
  Description of Artificial Sequence: Synthetic oligonucleotide
aaagcacccaggaauaccc

SEQ ID NO: 2787755 - RNA, 19 nt, Artificial Sequence
  Description of Artificial Sequence: Synthetic oligonucleotide
cucugaauaauacauauuc

SEQ ID NO: 2787756 - RNA, 19 nt, Artificial Sequence
  Description of Artificial Sequence: Synthetic oligonucleotide
ucugaauaauacauauucc

SEQ ID NO: 2787757 - RNA, 19 nt, Artificial Sequence
  Description of Artificial Sequence: Synthetic oligonucleotide
uguuccaaaacacuguuaa

SEQ ID NO: 2787758 - RNA, 19 nt, Artificial Sequence
  Description of Artificial Sequence: Synthetic oligonucleotide
uaauacauauuccuccuug

SEQ ID NO: 2787759 - RNA, 19 nt, Artificial Sequence
  Description of Artificial Sequence: Synthetic oligonucleotide
agcuauauuaagcucaugu

SEQ ID NO: 2787760 - RNA, 19 nt, Artificial Sequence
  Description of Artificial Sequence: Synthetic oligonucleotide
agaugggauauccucaugg

SEQ ID NO: 2787761 - RNA, 19 nt, Artificial Sequence
  Description of Artificial Sequence: Synthetic oligonucleotide
uagugaauacuucaauucc

SEQ ID NO: 2787762 - RNA, 19 nt, Artificial Sequence
  Description of Artificial Sequence: Synthetic oligonucleotide
uacuaaaacaccagcauaa

SEQ ID NO: 2787763 - RNA, 19 nt, Artificial Sequence
  Description of Artificial Sequence: Synthetic oligonucleotide
uccagcuauauuaagcuca

SEQ ID NO: 2787764 - RNA, 19 nt, Artificial Sequence
  Description of Artificial Sequence: Synthetic oligonucleotide
aagucuuacuuucucaggu

SEQ ID NO: 2787765 - RNA, 19 nt, Artificial Sequence
  Description of Artificial Sequence: Synthetic oligonucleotide
aaaagcacccaggaauacc

SEQ ID NO: 2787766 - RNA, 19 nt, Artificial Sequence
  Description of Artificial Sequence: Synthetic oligonucleotide
ugcuguaucaaccacuggu

SEQ ID NO: 2787767 - RNA, 19 nt, Artificial Sequence
  Description of Artificial Sequence: Synthetic oligonucleotide
aauacuucaauuccagcua

SEQ ID NO: 2787768 - RNA, 19 nt, Artificial Sequence
  Description of Artificial Sequence: Synthetic oligonucleotide
auacccucauaauuguacc

SEQ ID NO: 2787769 - RNA, 19 nt, Artificial Sequence
  Description of Artificial Sequence: Synthetic oligonucleotide
aauagcagcaacccuucug

SEQ ID NO: 2787770 - RNA, 19 nt, Artificial Sequence
  Description of Artificial Sequence: Synthetic oligonucleotide
uaauacuuccauaauguau

SEQ ID NO: 2787771 - RNA, 19 nt, Artificial Sequence
  Description of Artificial Sequence: Synthetic oligonucleotide
aauacuuccauaauguauu

SEQ ID NO: 2787772 - RNA, 19 nt, Artificial Sequence
  Description of Artificial Sequence: Synthetic oligonucleotide
uacuagagaacuaugggau

SEQ ID NO: 2787773 - RNA, 19 nt, Artificial Sequence
  Description of Artificial Sequence: Synthetic oligonucleotide
uggaguuacaaaaggggcc

SEQ ID NO: 2787774 - RNA, 19 nt, Artificial Sequence
  Description of Artificial Sequence: Synthetic oligonucleotide
ugggauauccucauggagu

SEQ ID NO: 2787775 - RNA, 19 nt, Artificial Sequence
  Description of Artificial Sequence: Synthetic oligonucleotide
auuccagcuauauuaagcu

SEQ ID NO: 2787776 - RNA, 19 nt, Artificial Sequence
  Description of Artificial Sequence: Synthetic oligonucleotide
auacuagagaacuauggga

SEQ ID NO: 2787777 - RNA, 19 nt, Artificial Sequence
  Description of Artificial Sequence: Synthetic oligonucleotide
uacauauuccuccuugcug

SEQ ID NO: 2787778 - RNA, 19 nt, Artificial Sequence
  Description of Artificial Sequence: Synthetic oligonucleotide
agcauaaguacauagugaa

SEQ ID NO: 2787779 - RNA, 19 nt, Artificial Sequence
  Description of Artificial Sequence: Synthetic oligonucleotide
agcucauguuaauacuucc

SEQ ID NO: 2787780 - RNA, 19 nt, Artificial Sequence
  Description of Artificial Sequence: Synthetic oligonucleotide
uuggaaugcaauagcagca

SEQ ID NO: 2787781 - RNA, 19 nt, Artificial Sequence
  Description of Artificial Sequence: Synthetic oligonucleotide
gaaacuacuaaaacaccag

SEQ ID NO: 2787782 - RNA, 19 nt, Artificial Sequence
  Description of Artificial Sequence: Synthetic oligonucleotide
acauauuccuccuugcugu

SEQ ID NO: 2787783 - RNA, 19 nt, Artificial Sequence
  Description of Artificial Sequence: Synthetic oligonucleotide
agguuuaguauccaaguca

SEQ ID NO: 2787784 - RNA, 19 nt, Artificial Sequence
  Description of Artificial Sequence: Synthetic oligonucleotide
ucagguuuaguauccaagu

SEQ ID NO: 2787785 - RNA, 19 nt, Artificial Sequence
  Description of Artificial Sequence: Synthetic oligonucleotide
acuaugggauccuggauuc

SEQ ID NO: 2787786 - RNA, 19 nt, Artificial Sequence
  Description of Artificial Sequence: Synthetic oligonucleotide
aaggcaaaacuugaagcuc

SEQ ID NO: 2787787 - RNA, 19 nt, Artificial Sequence
  Description of Artificial Sequence: Synthetic oligonucleotide
aagcucucagcuucuaaag

SEQ ID NO: 2787788 - RNA, 19 nt, Artificial Sequence
  Description of Artificial Sequence: Synthetic oligonucleotide
aacucaggguaaguaauac

SEQ ID NO: 2787789 - RNA, 19 nt, Artificial Sequence
  Description of Artificial Sequence: Synthetic oligonucleotide
caaaacuugaagcucucag

SEQ ID NO: 2787790 - RNA, 19 nt, Artificial Sequence
  Description of Artificial Sequence: Synthetic oligonucleotide
ucaaccacugguagagagg

SEQ ID NO: 2787791 - RNA, 19 nt, Artificial Sequence
  Description of Artificial Sequence: Synthetic oligonucleotide
aacuaugggauccuggauu

SEQ ID NO: 2787792 - RNA, 19 nt, Artificial Sequence
  Description of Artificial Sequence: Synthetic oligonucleotide
gaagucuuacuuucucagg

SEQ ID NO: 2787793 - RNA, 19 nt, Artificial Sequence
  Description of Artificial Sequence: Synthetic oligonucleotide
gaauacuucaauuccagcu

SEQ ID NO: 2787794 - RNA, 19 nt, Artificial Sequence
  Description of Artificial Sequence: Synthetic oligonucleotide
cauguuaauacuuccauaa

SEQ ID NO: 2787795 - RNA, 19 nt, Artificial Sequence
  Description of Artificial Sequence: Synthetic oligonucleotide
uuaagcucauguuaauacu

SEQ ID NO: 2787796 - RNA, 19 nt, Artificial Sequence
  Description of Artificial Sequence: Synthetic oligonucleotide
auguaaaagaacucagggu

SEQ ID NO: 2787797 - RNA, 19 nt, Artificial Sequence
  Description of Artificial Sequence: Synthetic oligonucleotide
uaauuguaccaacucguga

SEQ ID NO: 2787798 - RNA, 19 nt, Artificial Sequence
  Description of Artificial Sequence: Synthetic oligonucleotide
auagcagcaacccuucugu

SEQ ID NO: 2787799 - RNA, 19 nt, Artificial Sequence
  Description of Artificial Sequence: Synthetic oligonucleotide
aaagacgaagucuuacuuu

SEQ ID NO: 2787800 - RNA, 19 nt, Artificial Sequence
  Description of Artificial Sequence: Synthetic oligonucleotide
aguaauacuagagaacuau

SEQ ID NO: 2787801 - RNA, 19 nt, Artificial Sequence
  Description of Artificial Sequence: Synthetic oligonucleotide
aacuacuaaaacaccagca

SEQ ID NO: 2787802 - RNA, 19 nt, Artificial Sequence
  Description of Artificial Sequence: Synthetic oligonucleotide
agaacuaugggauccugga

SEQ ID NO: 2787803 - RNA, 19 nt, Artificial Sequence
  Description of Artificial Sequence: Synthetic oligonucleotide
aggaauacccucauaauug

SEQ ID NO: 2787804 - RNA, 19 nt, Artificial Sequence
  Description of Artificial Sequence: Synthetic oligonucleotide
uacauagugaauacuucaa

SEQ ID NO: 2787805 - RNA, 19 nt, Artificial Sequence
  Description of Artificial Sequence: Synthetic oligonucleotide
ucaauuccagcuauauuaa

SEQ ID NO: 2787806 - RNA, 19 nt, Artificial Sequence
  Description of Artificial Sequence: Synthetic oligonucleotide
aucaaccacugguagagag

SEQ ID NO: 2787807 - RNA, 19 nt, Artificial Sequence
  Description of Artificial Sequence: Synthetic oligonucleotide
uccucugaauaauacauau

SEQ ID NO: 2787808 - RNA, 19 nt, Artificial Sequence
  Description of Artificial Sequence: Synthetic oligonucleotide
uucuuccucacuuguuugg

SEQ ID NO: 2787809 - RNA, 19 nt, Artificial Sequence
  Description of Artificial Sequence: Synthetic oligonucleotide
uacaaaaggggcccuagaa

SEQ ID NO: 2787810 - RNA, 19 nt, Artificial Sequence
  Description of Artificial Sequence: Synthetic oligonucleotide
agaaacuacuaaaacacca

SEQ ID NO: 2787811 - RNA, 19 nt, Artificial Sequence
  Description of Artificial Sequence: Synthetic oligonucleotide
uguaucaaccacugguaga

SEQ ID NO: 2787812 - RNA, 19 nt, Artificial Sequence
  Description of Artificial Sequence: Synthetic oligonucleotide
cuagagaacuaugggaucc

SEQ ID NO: 2787813 - RNA, 19 nt, Artificial Sequence
  Description of Artificial Sequence: Synthetic oligonucleotide
gaaugcaauagcagcaacc

SEQ ID NO: 2787814 - RNA, 19 nt, Artificial Sequence
  Description of Artificial Sequence: Synthetic oligonucleotide
acuagagaacuaugggauc

SEQ ID NO: 2787815 - RNA, 19 nt, Artificial Sequence
  Description of Artificial Sequence: Synthetic oligonucleotide
cuugcuguaucaaccacug

SEQ ID NO: 2787816 - RNA, 19 nt, Artificial Sequence
  Description of Artificial Sequence: Synthetic oligonucleotide
caaaauuuggcauuucaaa

SEQ ID NO: 2787817 - RNA, 19 nt, Artificial Sequence
  Description of Artificial Sequence: Synthetic oligonucleotide
agcuucuaaagacgaaguc

SEQ ID NO: 2787818 - RNA, 19 nt, Artificial Sequence
  Description of Artificial Sequence: Synthetic oligonucleotide
cuuucucagguuuaguauc

SEQ ID NO: 2787819 - RNA, 19 nt, Artificial Sequence
  Description of Artificial Sequence: Synthetic oligonucleotide
ucuacaaauucuuccucac

SEQ ID NO: 2787820 - RNA, 19 nt, Artificial Sequence
  Description of Artificial Sequence: Synthetic oligonucleotide
uaaagacgaagucuuacuu

SEQ ID NO: 2787821 - RNA, 19 nt, Artificial Sequence
  Description of Artificial Sequence: Synthetic oligonucleotide
uguaccaacucgugagucc

SEQ ID NO: 2787822 - RNA, 19 nt, Artificial Sequence
  Description of Artificial Sequence: Synthetic oligonucleotide
ucuaaagacgaagucuuac

SEQ ID NO: 2787823 - RNA, 19 nt, Artificial Sequence
  Description of Artificial Sequence: Synthetic oligonucleotide
uaaaagaacucaggguaag

SEQ ID NO: 2787824 - RNA, 19 nt, Artificial Sequence
  Description of Artificial Sequence: Synthetic oligonucleotide
uaagcucauguuaauacuu

SEQ ID NO: 2787825 - RNA, 19 nt, Artificial Sequence
  Description of Artificial Sequence: Synthetic oligonucleotide
gauauccucauggaguuac

SEQ ID NO: 2787826 - RNA, 19 nt, Artificial Sequence
  Description of Artificial Sequence: Synthetic oligonucleotide
aguacauagugaauacuuc

SEQ ID NO: 2787827 - RNA, 19 nt, Artificial Sequence
  Description of Artificial Sequence: Synthetic oligonucleotide
cucauaauuguaccaacuc

SEQ ID NO: 2787828 - RNA, 19 nt, Artificial Sequence
  Description of Artificial Sequence: Synthetic oligonucleotide
uuauggucuacaaauucuu

SEQ ID NO: 2787829 - RNA, 19 nt, Artificial Sequence
  Description of Artificial Sequence: Synthetic oligonucleotide
guccacaagggucuuaaag

SEQ ID NO: 2787830 - RNA, 19 nt, Artificial Sequence
  Description of Artificial Sequence: Synthetic oligonucleotide
ugaauacuucaauuccagc

SEQ ID NO: 2787831 - RNA, 19 nt, Artificial Sequence
  Description of Artificial Sequence: Synthetic oligonucleotide
guacauagugaauacuuca

SEQ ID NO: 2787832 - RNA, 19 nt, Artificial Sequence
  Description of Artificial Sequence: Synthetic oligonucleotide
ucugugcaaaauuuggcau

SEQ ID NO: 2787833 - RNA, 19 nt, Artificial Sequence
  Description of Artificial Sequence: Synthetic oligonucleotide
caaaaggggcccuagaaga

SEQ ID NO: 2787834 - RNA, 19 nt, Artificial Sequence
  Description of Artificial Sequence: Synthetic oligonucleotide
guaaguaauacuagagaac

SEQ ID NO: 2787835 - RNA, 19 nt, Artificial Sequence
  Description of Artificial Sequence: Synthetic oligonucleotide
cuauauuaagcucauguua

SEQ ID NO: 2787836 - RNA, 19 nt, Artificial Sequence
  Description of Artificial Sequence: Synthetic oligonucleotide
uauguuccaaaacacuguu

SEQ ID NO: 2787837 - RNA, 19 nt, Artificial Sequence
  Description of Artificial Sequence: Synthetic oligonucleotide
aagcucauguuaauacuuc

SEQ ID NO: 2787838 - RNA, 19 nt, Artificial Sequence
  Description of Artificial Sequence: Synthetic oligonucleotide
gucuuaaaggcaaaacuug

SEQ ID NO: 2787839 - RNA, 19 nt, Artificial Sequence
  Description of Artificial Sequence: Synthetic oligonucleotide
auuauggucuacaaauucu

SEQ ID NO: 2787840 - RNA, 19 nt, Artificial Sequence
  Description of Artificial Sequence: Synthetic oligonucleotide
guuaauacuuccauaaugu

SEQ ID NO: 2787841 - RNA, 19 nt, Artificial Sequence
  Description of Artificial Sequence: Synthetic oligonucleotide
uacuuucucagguuuagua

SEQ ID NO: 2787842 - RNA, 19 nt, Artificial Sequence
  Description of Artificial Sequence: Synthetic oligonucleotide
cagaaacuacuaaaacacc

SEQ ID NO: 2787843 - RNA, 19 nt, Artificial Sequence
  Description of Artificial Sequence: Synthetic oligonucleotide
acuuucucagguuuaguau

SEQ ID NO: 2787844 - RNA, 19 nt, Artificial Sequence
  Description of Artificial Sequence: Synthetic oligonucleotide
uuuacuccucugaauaaua

SEQ ID NO: 2787845 - RNA, 19 nt, Artificial Sequence
  Description of Artificial Sequence: Synthetic oligonucleotide
augggauauccucauggag

SEQ ID NO: 2787846 - RNA, 19 nt, Artificial Sequence
  Description of Artificial Sequence: Synthetic oligonucleotide
agaagaauuauggucuaca

SEQ ID NO: 2787847 - RNA, 19 nt, Artificial Sequence
  Description of Artificial Sequence: Synthetic oligonucleotide
caaccacugguagagaggg

SEQ ID NO: 2787848 - RNA, 19 nt, Artificial Sequence
  Description of Artificial Sequence: Synthetic oligonucleotide
uuaauacuuccauaaugua

SEQ ID NO: 2787849 - RNA, 19 nt, Artificial Sequence
  Description of Artificial Sequence: Synthetic oligonucleotide
uacuccucugaauaauaca

SEQ ID NO: 2787850 - RNA, 19 nt, Artificial Sequence
  Description of Artificial Sequence: Synthetic oligonucleotide
cauaaguacauagugaaua

SEQ ID NO: 2787851 - RNA, 19 nt, Artificial Sequence
  Description of Artificial Sequence: Synthetic oligonucleotide
uguggcagaugggauaucc

SEQ ID NO: 2787852 - RNA, 19 nt, Artificial Sequence
  Description of Artificial Sequence: Synthetic oligonucleotide
guuuggaaugcaauagcag

SEQ ID NO: 2787853 - RNA, 19 nt, Artificial Sequence
  Description of Artificial Sequence: Synthetic oligonucleotide
ggcccuagaagaauuaugg

SEQ ID NO: 2787854 - RNA, 19 nt, Artificial Sequence
  Description of Artificial Sequence: Synthetic oligonucleotide
gaagaauuauggucuacaa

SEQ ID NO: 2787855 - RNA, 19 nt, Artificial Sequence
  Description of Artificial Sequence: Synthetic oligonucleotide
ucgugaguccacaaggguc

SEQ ID NO: 2787856 - RNA, 19 nt, Artificial Sequence
  Description of Artificial Sequence: Synthetic oligonucleotide
uauggucuacaaauucuuc

SEQ ID NO: 2787857 - RNA, 19 nt, Artificial Sequence
  Description of Artificial Sequence: Synthetic oligonucleotide
aacccuucugugcaaaauu

SEQ ID NO: 2787858 - RNA, 19 nt, Artificial Sequence
  Description of Artificial Sequence: Synthetic oligonucleotide
aggguaaguaauacuagag

SEQ ID NO: 2787859 - RNA, 19 nt, Artificial Sequence
  Description of Artificial Sequence: Synthetic oligonucleotide
aggagggaguaaauuauac

SEQ ID NO: 2787860 - RNA, 19 nt, Artificial Sequence
  Description of Artificial Sequence: Synthetic oligonucleotide
gugaauacuucaauuccag

SEQ ID NO: 2787861 - RNA, 19 nt, Artificial Sequence
  Description of Artificial Sequence: Synthetic oligonucleotide
cauaauuguaccaacucgu

SEQ ID NO: 2787862 - RNA, 19 nt, Artificial Sequence
  Description of Artificial Sequence: Synthetic oligonucleotide
caguuuggaaugcaauagc

SEQ ID NO: 2787863 - RNA, 19 nt, Artificial Sequence
  Description of Artificial Sequence: Synthetic oligonucleotide
gagaacuaugggauccugg

SEQ ID NO: 2787864 - RNA, 19 nt, Artificial Sequence
  Description of Artificial Sequence: Synthetic oligonucleotide
cucaggguaaguaauacua

SEQ ID NO: 2787865 - RNA, 19 nt, Artificial Sequence
  Description of Artificial Sequence: Synthetic oligonucleotide
ucauguuaauacuuccaua

SEQ ID NO: 2787866 - RNA, 19 nt, Artificial Sequence
  Description of Artificial Sequence: Synthetic oligonucleotide
cuuacuuucucagguuuag

SEQ ID NO: 2787867 - RNA, 19 nt, Artificial Sequence
  Description of Artificial Sequence: Synthetic oligonucleotide
uuccucacuuguuugggga

SEQ ID NO: 2787868 - RNA, 19 nt, Artificial Sequence
  Description of Artificial Sequence: Synthetic oligonucleotide
aacaccagcauaaguacau

SEQ ID NO: 2787869 - RNA, 19 nt, Artificial Sequence
  Description of Artificial Sequence: Synthetic oligonucleotide
agugaauacuucaauucca

SEQ ID NO: 2787870 - RNA, 19 nt, Artificial Sequence
  Description of Artificial Sequence: Synthetic oligonucleotide
uuguuuggggaggagggag

SEQ ID NO: 2787871 - RNA, 19 nt, Artificial Sequence
  Description of Artificial Sequence: Synthetic oligonucleotide
aaaagaacucaggguaagu

SEQ ID NO: 2787872 - RNA, 19 nt, Artificial Sequence
  Description of Artificial Sequence: Synthetic oligonucleotide
aguuuggaaugcaauagca

SEQ ID NO: 2787873 - RNA, 19 nt, Artificial Sequence
  Description of Artificial Sequence: Synthetic oligonucleotide
cuguaucaaccacugguag

SEQ ID NO: 2787874 - RNA, 19 nt, Artificial Sequence
  Description of Artificial Sequence: Synthetic oligonucleotide
gaugggauauccucaugga

SEQ ID NO: 2787875 - RNA, 19 nt, Artificial Sequence
  Description of Artificial Sequence: Synthetic oligonucleotide
acuaaaacaccagcauaag

SEQ ID NO: 2787876 - RNA, 19 nt, Artificial Sequence
  Description of Artificial Sequence: Synthetic oligonucleotide
uaaguacauagugaauacu

SEQ ID NO: 2787877 - RNA, 19 nt, Artificial Sequence
  Description of Artificial Sequence: Synthetic oligonucleotide
uauuaagcucauguuaaua

SEQ ID NO: 2787878 - RNA, 19 nt, Artificial Sequence
  Description of Artificial Sequence: Synthetic oligonucleotide
caccagcauaaguacauag

SEQ ID NO: 2787879 - RNA, 19 nt, Artificial Sequence
  Description of Artificial Sequence: Synthetic oligonucleotide
acugguagagagggcaugg

SEQ ID NO: 2787880 - RNA, 19 nt, Artificial Sequence
  Description of Artificial Sequence: Synthetic oligonucleotide
guaauacuagagaacuaug

SEQ ID NO: 2787881 - RNA, 19 nt, Artificial Sequence
  Description of Artificial Sequence: Synthetic oligonucleotide
ggauccuggauucuguggc

SEQ ID NO: 2787882 - RNA, 19 nt, Artificial Sequence
  Description of Artificial Sequence: Synthetic oligonucleotide
auuguaccaacucgugagu

SEQ ID NO: 2787883 - RNA, 19 nt, Artificial Sequence
  Description of Artificial Sequence: Synthetic oligonucleotide
auauguuccaaaacacugu

SEQ ID NO: 2787884 - RNA, 19 nt, Artificial Sequence
  Description of Artificial Sequence: Synthetic oligonucleotide
gggaguaaauuauacaaaa

SEQ ID NO: 2787885 - RNA, 19 nt, Artificial Sequence
  Description of Artificial Sequence: Synthetic oligonucleotide
acuccucugaauaauacau

SEQ ID NO: 2787886 - RNA, 19 nt, Artificial Sequence
  Description of Artificial Sequence: Synthetic oligonucleotide
uaugggauccuggauucug

SEQ ID NO: 2787887 - RNA, 19 nt, Artificial Sequence
  Description of Artificial Sequence: Synthetic oligonucleotide
auaauuguaccaacucgug

SEQ ID NO: 2787888 - RNA, 19 nt, Artificial Sequence
  Description of Artificial Sequence: Synthetic oligonucleotide
ucuuacuuucucagguuua

SEQ ID NO: 2787889 - RNA, 19 nt, Artificial Sequence
  Description of Artificial Sequence: Synthetic oligonucleotide
uauccaagucacacuuuac

SEQ ID NO: 2787890 - RNA, 19 nt, Artificial Sequence
  Description of Artificial Sequence: Synthetic oligonucleotide
gacgaagucuuacuuucuc

SEQ ID NO: 2787891 - RNA, 19 nt, Artificial Sequence
  Description of Artificial Sequence: Synthetic oligonucleotide
agcacccaggaauacccuc

SEQ ID NO: 2787892 - RNA, 19 nt, Artificial Sequence
  Description of Artificial Sequence: Synthetic oligonucleotide
auacuucaauuccagcuau

SEQ ID NO: 2787893 - RNA, 19 nt, Artificial Sequence
  Description of Artificial Sequence: Synthetic oligonucleotide
uacccucauaauuguacca

SEQ ID NO: 2787894 - RNA, 19 nt, Artificial Sequence
  Description of Artificial Sequence: Synthetic oligonucleotide
cuuccucacuuguuugggg

SEQ ID NO: 2787895 - RNA, 19 nt, Artificial Sequence
  Description of Artificial Sequence: Synthetic oligonucleotide
ccagcauaaguacauagug

SEQ ID NO: 2787896 - RNA, 19 nt, Artificial Sequence
  Description of Artificial Sequence: Synthetic oligonucleotide
uccucacuuguuuggggag

SEQ ID NO: 2787897 - RNA, 19 nt, Artificial Sequence
  Description of Artificial Sequence: Synthetic oligonucleotide
agucacacuuuacuccucu

SEQ ID NO: 2787898 - RNA, 19 nt, Artificial Sequence
  Description of Artificial Sequence: Synthetic oligonucleotide
uggcagaugggauauccuc

SEQ ID NO: 2787899 - RNA, 19 nt, Artificial Sequence
  Description of Artificial Sequence: Synthetic oligonucleotide
caauuccagcuauauuaag

SEQ ID NO: 2787900 - RNA, 19 nt, Artificial Sequence
  Description of Artificial Sequence: Synthetic oligonucleotide
guuacaaaaggggcccuag

SEQ ID NO: 2787901 - RNA, 19 nt, Artificial Sequence
  Description of Artificial Sequence: Synthetic oligonucleotide
acucaggguaaguaauacu

SEQ ID NO: 2787902 - RNA, 19 nt, Artificial Sequence
  Description of Artificial Sequence: Synthetic oligonucleotide
gguuuaguauccaagucac

SEQ ID NO: 2787903 - RNA, 19 nt, Artificial Sequence
  Description of Artificial Sequence: Synthetic oligonucleotide
aaacaccagcauaaguaca

SEQ ID NO: 2787904 - RNA, 19 nt, Artificial Sequence
  Description of Artificial Sequence: Synthetic oligonucleotide
acuuuacuccucugaauaa

SEQ ID NO: 2787905 - RNA, 19 nt, Artificial Sequence
  Description of Artificial Sequence: Synthetic oligonucleotide
aacuugaagcucucagcuu

SEQ ID NO: 2787906 - RNA, 19 nt, Artificial Sequence
  Description of Artificial Sequence: Synthetic oligonucleotide
ggaguuacaaaaggggccc

SEQ ID NO: 2787907 - RNA, 19 nt, Artificial Sequence
  Description of Artificial Sequence: Synthetic oligonucleotide
cacuuguuuggggaggagg

SEQ ID NO: 2787908 - RNA, 19 nt, Artificial Sequence
  Description of Artificial Sequence: Synthetic oligonucleotide
auguuaauacuuccauaau

SEQ ID NO: 2787909 - RNA, 19 nt, Artificial Sequence
  Description of Artificial Sequence: Synthetic oligonucleotide
cagcauaaguacauaguga

SEQ ID NO: 2787910 - RNA, 19 nt, Artificial Sequence
  Description of Artificial Sequence: Synthetic oligonucleotide
uguuuggggaggagggagu

SEQ ID NO: 2787911 - RNA, 19 nt, Artificial Sequence
  Description of Artificial Sequence: Synthetic oligonucleotide
gcaguuuggaaugcaauag

SEQ ID NO: 2787912 - RNA, 19 nt, Artificial Sequence
  Description of Artificial Sequence: Synthetic oligonucleotide
accacugguagagagggca

SEQ ID NO: 2787913 - RNA, 19 nt, Artificial Sequence
  Description of Artificial Sequence: Synthetic oligonucleotide
agcucucagcuucuaaaga

SEQ ID NO: 2787914 - RNA, 19 nt, Artificial Sequence
  Description of Artificial Sequence: Synthetic oligonucleotide
uccuccuugcuguaucaac

SEQ ID NO: 2787915 - RNA, 19 nt, Artificial Sequence
  Description of Artificial Sequence: Synthetic oligonucleotide
cagguuuaguauccaaguc

SEQ ID NO: 2787916 - RNA, 19 nt, Artificial Sequence
  Description of Artificial Sequence: Synthetic oligonucleotide
cacuuuacuccucugaaua

SEQ ID NO: 2787917 - RNA, 19 nt, Artificial Sequence
  Description of Artificial Sequence: Synthetic oligonucleotide
ggguaaguaauacuagaga

SEQ ID NO: 2787918 - RNA, 19 nt, Artificial Sequence
  Description of Artificial Sequence: Synthetic oligonucleotide
caggguaaguaauacuaga

SEQ ID NO: 2787919 - RNA, 19 nt, Artificial Sequence
  Description of Artificial Sequence: Synthetic oligonucleotide
acucgugaguccacaaggg

SEQ ID NO: 2787920 - RNA, 19 nt, Artificial Sequence
  Description of Artificial Sequence: Synthetic oligonucleotide
ugaagcucucagcuucuaa

SEQ ID NO: 2787921 - RNA, 19 nt, Artificial Sequence
  Description of Artificial Sequence: Synthetic oligonucleotide
caacucgugaguccacaag

SEQ ID NO: 2787922 - RNA, 19 nt, Artificial Sequence
  Description of Artificial Sequence: Synthetic oligonucleotide
uggcaguuuggaaugcaau

SEQ ID NO: 2787923 - RNA, 19 nt, Artificial Sequence
  Description of Artificial Sequence: Synthetic oligonucleotide
gcucucagcuucuaaagac

SEQ ID NO: 2787924 - RNA, 19 nt, Artificial Sequence
  Description of Artificial Sequence: Synthetic oligonucleotide
guauccaagucacacuuua

SEQ ID NO: 2787925 - RNA, 19 nt, Artificial Sequence
  Description of Artificial Sequence: Synthetic oligonucleotide
uuccagcuauauuaagcuc

SEQ ID NO: 2787926 - RNA, 19 nt, Artificial Sequence
  Description of Artificial Sequence: Synthetic oligonucleotide
acaagggucuuaaaggcaa

SEQ ID NO: 2787927 - RNA, 19 nt, Artificial Sequence
  Description of Artificial Sequence: Synthetic oligonucleotide
ggcauggcaguuuggaaug

SEQ ID NO: 2787928 - RNA, 19 nt, Artificial Sequence
  Description of Artificial Sequence: Synthetic oligonucleotide
uggaaugcaauagcagcaa

SEQ ID NO: 2787929 - RNA, 19 nt, Artificial Sequence
  Description of Artificial Sequence: Synthetic oligonucleotide
ucucagguuuaguauccaa

SEQ ID NO: 2787930 - RNA, 19 nt, Artificial Sequence
  Description of Artificial Sequence: Synthetic oligonucleotide
cuacuaaaacaccagcaua

SEQ ID NO: 2787931 - RNA, 19 nt, Artificial Sequence
  Description of Artificial Sequence: Synthetic oligonucleotide
acacuuuacuccucugaau

SEQ ID NO: 2787932 - RNA, 19 nt, Artificial Sequence
  Description of Artificial Sequence: Synthetic oligonucleotide
uccuugcuguaucaaccac

SEQ ID NO: 2787933 - RNA, 19 nt, Artificial Sequence
  Description of Artificial Sequence: Synthetic oligonucleotide
ccaaaacacuguuaaguug

SEQ ID NO: 2787934 - RNA, 19 nt, Artificial Sequence
  Description of Artificial Sequence: Synthetic oligonucleotide
auccucauggaguuacaaa

SEQ ID NO: 2787935 - RNA, 19 nt, Artificial Sequence
  Description of Artificial Sequence: Synthetic oligonucleotide
uucuaaagacgaagucuua

SEQ ID NO: 2787936 - RNA, 19 nt, Artificial Sequence
  Description of Artificial Sequence: Synthetic oligonucleotide
cuucuaaagacgaagucuu

SEQ ID NO: 2787937 - RNA, 19 nt, Artificial Sequence
  Description of Artificial Sequence: Synthetic oligonucleotide
aggcaaaacuugaagcucu

SEQ ID NO: 2787938 - RNA, 19 nt, Artificial Sequence
  Description of Artificial Sequence: Synthetic oligonucleotide
accagcauaaguacauagu

SEQ ID NO: 2787939 - RNA, 19 nt, Artificial Sequence
  Description of Artificial Sequence: Synthetic oligonucleotide
cuaaagacgaagucuuacu

SEQ ID NO: 2787940 - RNA, 19 nt, Artificial Sequence
  Description of Artificial Sequence: Synthetic oligonucleotide
cauagugaauacuucaauu

SEQ ID NO: 2787941 - RNA, 19 nt, Artificial Sequence
  Description of Artificial Sequence: Synthetic oligonucleotide
auuccuccuugcuguauca

SEQ ID NO: 2787942 - RNA, 19 nt, Artificial Sequence
  Description of Artificial Sequence: Synthetic oligonucleotide
augcaauagcagcaacccu

SEQ ID NO: 2787943 - RNA, 19 nt, Artificial Sequence
  Description of Artificial Sequence: Synthetic oligonucleotide
aaaggggcccuagaagaau

SEQ ID NO: 2787944 - RNA, 19 nt, Artificial Sequence
  Description of Artificial Sequence: Synthetic oligonucleotide
ggagggaguaaauuauaca

SEQ ID NO: 2787945 - RNA, 19 nt, Artificial Sequence
  Description of Artificial Sequence: Synthetic oligonucleotide
agucuuacuuucucagguu

SEQ ID NO: 2787946 - RNA, 19 nt, Artificial Sequence
  Description of Artificial Sequence: Synthetic oligonucleotide
uagaagaauuauggucuac

SEQ ID NO: 2787947 - RNA, 19 nt, Artificial Sequence
  Description of Artificial Sequence: Synthetic oligonucleotide
gggauccuggauucugugg

SEQ ID NO: 2787948 - RNA, 19 nt, Artificial Sequence
  Description of Artificial Sequence: Synthetic oligonucleotide
uuguaccaacucgugaguc

SEQ ID NO: 2787949 - RNA, 19 nt, Artificial Sequence
  Description of Artificial Sequence: Synthetic oligonucleotide
aagggucuuaaaggcaaaa

SEQ ID NO: 2787950 - RNA, 19 nt, Artificial Sequence
  Description of Artificial Sequence: Synthetic oligonucleotide
aaccacugguagagagggc

SEQ ID NO: 2787951 - RNA, 19 nt, Artificial Sequence
  Description of Artificial Sequence: Synthetic oligonucleotide
uauccucauggaguuacaa

SEQ ID NO: 2787952 - RNA, 19 nt, Artificial Sequence
  Description of Artificial Sequence: Synthetic oligonucleotide
aaacacuguuaaguugaaa

SEQ ID NO: 2787953 - RNA, 19 nt, Artificial Sequence
  Description of Artificial Sequence: Synthetic oligonucleotide
ccucauggaguuacaaaag

SEQ ID NO: 2787954 - RNA, 19 nt, Artificial Sequence
  Description of Artificial Sequence: Synthetic oligonucleotide
gauccuggauucuguggca

SEQ ID NO: 2787955 - RNA, 19 nt, Artificial Sequence
  Description of Artificial Sequence: Synthetic oligonucleotide
aaguaauacuagagaacua

SEQ ID NO: 2787956 - RNA, 19 nt, Artificial Sequence
  Description of Artificial Sequence: Synthetic oligonucleotide
cacacuuuacuccucugaa

SEQ ID NO: 2787957 - RNA, 19 nt, Artificial Sequence
  Description of Artificial Sequence: Synthetic oligonucleotide
cgaagucuuacuuucucag

SEQ ID NO: 2787958 - RNA, 19 nt, Artificial Sequence
  Description of Artificial Sequence: Synthetic oligonucleotide
aaaacacuguuaaguugaa

SEQ ID NO: 2787959 - RNA, 19 nt, Artificial Sequence
  Description of Artificial Sequence: Synthetic oligonucleotide
caagucacacuuuacuccu

SEQ ID NO: 2787960 - RNA, 19 nt, Artificial Sequence
  Description of Artificial Sequence: Synthetic oligonucleotide
auacuuccauaauguauuu

SEQ ID NO: 2787961 - RNA, 19 nt, Artificial Sequence
  Description of Artificial Sequence: Synthetic oligonucleotide
cacaagggucuuaaaggca

SEQ ID NO: 2787962 - RNA, 19 nt, Artificial Sequence
  Description of Artificial Sequence: Synthetic oligonucleotide
uagagaacuaugggauccu

SEQ ID NO: 2787963 - RNA, 19 nt, Artificial Sequence
  Description of Artificial Sequence: Synthetic oligonucleotide
gagggcauggcaguuugga

SEQ ID NO: 2787964 - RNA, 19 nt, Artificial Sequence
  Description of Artificial Sequence: Synthetic oligonucleotide
uacuucaauuccagcuaua

SEQ ID NO: 2787965 - RNA, 19 nt, Artificial Sequence
  Description of Artificial Sequence: Synthetic oligonucleotide
acccucauaauuguaccaa

SEQ ID NO: 2787966 - RNA, 19 nt, Artificial Sequence
  Description of Artificial Sequence: Synthetic oligonucleotide
guaccaacucgugagucca

SEQ ID NO: 2787967 - RNA, 19 nt, Artificial Sequence
  Description of Artificial Sequence: Synthetic oligonucleotide
caaauucuuccucacuugu

SEQ ID NO: 2787968 - RNA, 19 nt, Artificial Sequence
  Description of Artificial Sequence: Synthetic oligonucleotide
cuccuugcuguaucaacca

SEQ ID NO: 2787969 - RNA, 19 nt, Artificial Sequence
  Description of Artificial Sequence: Synthetic oligonucleotide
agagaacuaugggauccug

SEQ ID NO: 2787970 - RNA, 19 nt, Artificial Sequence
  Description of Artificial Sequence: Synthetic oligonucleotide
uucucagguuuaguaucca

SEQ ID NO: 2787971 - RNA, 19 nt, Artificial Sequence
  Description of Artificial Sequence: Synthetic oligonucleotide
gucacacuuuacuccucug

SEQ ID NO: 2787972 - RNA, 19 nt, Artificial Sequence
  Description of Artificial Sequence: Synthetic oligonucleotide
cuagaagaauuauggucua

SEQ ID NO: 2787973 - RNA, 19 nt, Artificial Sequence
  Description of Artificial Sequence: Synthetic oligonucleotide
gcuucuaaagacgaagucu

SEQ ID NO: 2787974 - RNA, 19 nt, Artificial Sequence
  Description of Artificial Sequence: Synthetic oligonucleotide
gaguccacaagggucuuaa

SEQ ID NO: 2787975 - RNA, 19 nt, Artificial Sequence
  Description of Artificial Sequence: Synthetic oligonucleotide
gggaggagggaguaaauua

SEQ ID NO: 2787976 - RNA, 19 nt, Artificial Sequence
  Description of Artificial Sequence: Synthetic oligonucleotide
ggaaugcaauagcagcaac

SEQ ID NO: 2787977 - RNA, 19 nt, Artificial Sequence
  Description of Artificial Sequence: Synthetic oligonucleotide
ggcaguuuggaaugcaaua

SEQ ID NO: 2787978 - RNA, 19 nt, Artificial Sequence
  Description of Artificial Sequence: Synthetic oligonucleotide
uaucaaccacugguagaga

SEQ ID NO: 2787979 - RNA, 19 nt, Artificial Sequence
  Description of Artificial Sequence: Synthetic oligonucleotide
guagagagggcauggcagu

SEQ ID NO: 2787980 - RNA, 19 nt, Artificial Sequence
  Description of Artificial Sequence: Synthetic oligonucleotide
agggcauggcaguuuggaa

SEQ ID NO: 2787981 - RNA, 19 nt, Artificial Sequence
  Description of Artificial Sequence: Synthetic oligonucleotide
gcaaaauuuggcauuucaa

SEQ ID NO: 2787982 - RNA, 19 nt, Artificial Sequence
  Description of Artificial Sequence: Synthetic oligonucleotide
gaauuauggucuacaaauu

SEQ ID NO: 2787983 - RNA, 19 nt, Artificial Sequence
  Description of Artificial Sequence: Synthetic oligonucleotide
ucacuuguuuggggaggag

SEQ ID NO: 2787984 - RNA, 19 nt, Artificial Sequence
  Description of Artificial Sequence: Synthetic oligonucleotide
caggaauacccucauaauu

SEQ ID NO: 2787985 - RNA, 19 nt, Artificial Sequence
  Description of Artificial Sequence: Synthetic oligonucleotide
cccaggaauacccucauaa

SEQ ID NO: 2787986 - RNA, 19 nt, Artificial Sequence
  Description of Artificial Sequence: Synthetic oligonucleotide
aaggggcccuagaagaauu

SEQ ID NO: 2787987 - RNA, 19 nt, Artificial Sequence
  Description of Artificial Sequence: Synthetic oligonucleotide
ggaauacccucauaauugu

SEQ ID NO: 2787988 - RNA, 19 nt, Artificial Sequence
  Description of Artificial Sequence: Synthetic oligonucleotide
uaccaacucgugaguccac

SEQ ID NO: 2787989 - RNA, 19 nt, Artificial Sequence
  Description of Artificial Sequence: Synthetic oligonucleotide
gcuauauuaagcucauguu

SEQ ID NO: 2787990 - RNA, 19 nt, Artificial Sequence
  Description of Artificial Sequence: Synthetic oligonucleotide
cagaugggauauccucaug

SEQ ID NO: 2787991 - RNA, 19 nt, Artificial Sequence
  Description of Artificial Sequence: Synthetic oligonucleotide
gaacuaugggauccuggau

SEQ ID NO: 2787992 - RNA, 19 nt, Artificial Sequence
  Description of Artificial Sequence: Synthetic oligonucleotide
cuccucugaauaauacaua

SEQ ID NO: 2787993 - RNA, 19 nt, Artificial Sequence
  Description of Artificial Sequence: Synthetic oligonucleotide
cccuucugugcaaaauuug

SEQ ID NO: 2787994 - RNA, 19 nt, Artificial Sequence
  Description of Artificial Sequence: Synthetic oligonucleotide
gaggagggaguaaauuaua

SEQ ID NO: 2787995 - RNA, 19 nt, Artificial Sequence
  Description of Artificial Sequence: Synthetic oligonucleotide
cccucauaauuguaccaac

SEQ ID NO: 2787996 - RNA, 19 nt, Artificial Sequence
  Description of Artificial Sequence: Synthetic oligonucleotide
gaauacccucauaauugua

SEQ ID NO: 2787997 - RNA, 19 nt, Artificial Sequence
  Description of Artificial Sequence: Synthetic oligonucleotide
ggcagaugggauauccuca

SEQ ID NO: 2787998 - RNA, 19 nt, Artificial Sequence
  Description of Artificial Sequence: Synthetic oligonucleotide
agacgaagucuuacuuucu

SEQ ID NO: 2787999 - RNA, 19 nt, Artificial Sequence
  Description of Artificial Sequence: Synthetic oligonucleotide
gucuuacuuucucagguuu

SEQ ID NO: 2788000 - RNA, 19 nt, Artificial Sequence
  Description of Artificial Sequence: Synthetic oligonucleotide
cuacaaauucuuccucacu

SEQ ID NO: 2788001 - RNA, 19 nt, Artificial Sequence
  Description of Artificial Sequence: Synthetic oligonucleotide
gcucauguuaauacuucca

SEQ ID NO: 2788002 - RNA, 19 nt, Artificial Sequence
  Description of Artificial Sequence: Synthetic oligonucleotide
aguuacaaaaggggcccua

SEQ ID NO: 2788003 - RNA, 19 nt, Artificial Sequence
  Description of Artificial Sequence: Synthetic oligonucleotide
acccuucugugcaaaauuu

SEQ ID NO: 2788004 - RNA, 19 nt, Artificial Sequence
  Description of Artificial Sequence: Synthetic oligonucleotide
auucuguggcagaugggau

SEQ ID NO: 2788005 - RNA, 19 nt, Artificial Sequence
  Description of Artificial Sequence: Synthetic oligonucleotide
aagcacccaggaauacccu

SEQ ID NO: 2788006 - RNA, 19 nt, Artificial Sequence
  Description of Artificial Sequence: Synthetic oligonucleotide
cacugguagagagggcaug

SEQ ID NO: 2788007 - RNA, 19 nt, Artificial Sequence
  Description of Artificial Sequence: Synthetic oligonucleotide
cuggauucuguggcagaug

SEQ ID NO: 2788008 - RNA, 19 nt, Artificial Sequence
  Description of Artificial Sequence: Synthetic oligonucleotide
auauuccuccuugcuguau

SEQ ID NO: 2788009 - RNA, 19 nt, Artificial Sequence
  Description of Artificial Sequence: Synthetic oligonucleotide
gggcccuagaagaauuaug

SEQ ID NO: 2788010 - RNA, 19 nt, Artificial Sequence
  Description of Artificial Sequence: Synthetic oligonucleotide
cugugcaaaauuuggcauu

SEQ ID NO: 2788011 - RNA, 19 nt, Artificial Sequence
  Description of Artificial Sequence: Synthetic oligonucleotide
gcaauagcagcaacccuuc

SEQ ID NO: 2788012 - RNA, 19 nt, Artificial Sequence
  Description of Artificial Sequence: Synthetic oligonucleotide
cuuuacuccucugaauaau

SEQ ID NO: 2788013 - RNA, 19 nt, Artificial Sequence
  Description of Artificial Sequence: Synthetic oligonucleotide
auauccucauggaguuaca

SEQ ID NO: 2788014 - RNA, 19 nt, Artificial Sequence
  Description of Artificial Sequence: Synthetic oligonucleotide
aguauccaagucacacuuu

SEQ ID NO: 2788015 - RNA, 19 nt, Artificial Sequence
  Description of Artificial Sequence: Synthetic oligonucleotide
uuccuccuugcuguaucaa

SEQ ID NO: 2788016 - RNA, 19 nt, Artificial Sequence
  Description of Artificial Sequence: Synthetic oligonucleotide
aguccacaagggucuuaaa

SEQ ID NO: 2788017 - RNA, 19 nt, Artificial Sequence
  Description of Artificial Sequence: Synthetic oligonucleotide
ccucacuuguuuggggagg

SEQ ID NO: 2788018 - RNA, 19 nt, Artificial Sequence
  Description of Artificial Sequence: Synthetic oligonucleotide
gcuguaucaaccacuggua

SEQ ID NO: 2788019 - RNA, 19 nt, Artificial Sequence
  Description of Artificial Sequence: Synthetic oligonucleotide
cauggcaguuuggaaugca

SEQ ID NO: 2788020 - RNA, 19 nt, Artificial Sequence
  Description of Artificial Sequence: Synthetic oligonucleotide
caagggucuuaaaggcaaa

SEQ ID NO: 2788021 - RNA, 19 nt, Artificial Sequence
  Description of Artificial Sequence: Synthetic oligonucleotide
gggcauggcaguuuggaau

SEQ ID NO: 2788022 - RNA, 19 nt, Artificial Sequence
  Description of Artificial Sequence: Synthetic oligonucleotide
cauauuccuccuugcugua

SEQ ID NO: 2788023 - RNA, 19 nt, Artificial Sequence
  Description of Artificial Sequence: Synthetic oligonucleotide
agcaacccuucugugcaaa

SEQ ID NO: 2788024 - RNA, 19 nt, Artificial Sequence
  Description of Artificial Sequence: Synthetic oligonucleotide
gggauauccucauggaguu

SEQ ID NO: 2788025 - RNA, 19 nt, Artificial Sequence
  Description of Artificial Sequence: Synthetic oligonucleotide
cucgugaguccacaagggu

SEQ ID NO: 2788026 - RNA, 19 nt, Artificial Sequence
  Description of Artificial Sequence: Synthetic oligonucleotide
ggaggagggaguaaauuau

SEQ ID NO: 2788027 - RNA, 19 nt, Artificial Sequence
  Description of Artificial Sequence: Synthetic oligonucleotide
ugaguccacaagggucuua

SEQ ID NO: 2788028 - RNA, 19 nt, Artificial Sequence
  Description of Artificial Sequence: Synthetic oligonucleotide
ccucauaauuguaccaacu

SEQ ID NO: 2788029 - RNA, 19 nt, Artificial Sequence
  Description of Artificial Sequence: Synthetic oligonucleotide
cagcuauauuaagcucaug

SEQ ID NO: 2788030 - RNA, 19 nt, Artificial Sequence
  Description of Artificial Sequence: Synthetic oligonucleotide
gcacccaggaauacccuca

SEQ ID NO: 2788031 - RNA, 19 nt, Artificial Sequence
  Description of Artificial Sequence: Synthetic oligonucleotide
ggcaaaacuugaagcucuc

SEQ ID NO: 2788032 - RNA, 19 nt, Artificial Sequence
  Description of Artificial Sequence: Synthetic oligonucleotide
ccuugcuguaucaaccacu

SEQ ID NO: 2788033 - RNA, 19 nt, Artificial Sequence
  Description of Artificial Sequence: Synthetic oligonucleotide
gaguuacaaaaggggcccu

SEQ ID NO: 2788034 - RNA, 19 nt, Artificial Sequence
  Description of Artificial Sequence: Synthetic oligonucleotide
cgugaguccacaagggucu

SEQ ID NO: 2788035 - RNA, 19 nt, Artificial Sequence
  Description of Artificial Sequence: Synthetic oligonucleotide
gcauggcaguuuggaaugc

SEQ ID NO: 2788036 - RNA, 19 nt, Artificial Sequence
  Description of Artificial Sequence: Synthetic oligonucleotide
gcccuagaagaauuauggu

SEQ ID NO: 2788037 - RNA, 19 nt, Artificial Sequence
  Description of Artificial Sequence: Synthetic oligonucleotide
guggcagaugggauauccu

SEQ ID NO: 2788038 - RNA, 19 nt, Artificial Sequence
  Description of Artificial Sequence: Synthetic oligonucleotide
aggggcccuagaagaauua

SEQ ID NO: 2788039 - RNA, 19 nt, Artificial Sequence
  Description of Artificial Sequence: Synthetic oligonucleotide
caacccuucugugcaaaau

SEQ ID NO: 2788040 - RNA, 19 nt, Artificial Sequence
  Description of Artificial Sequence: Synthetic oligonucleotide
gcaacccuucugugcaaaa

SEQ ID NO: 2788041 - RNA, 19 nt, Artificial Sequence
  Description of Artificial Sequence: Synthetic oligonucleotide
gcauaaguacauagugaau

SEQ ID NO: 2788042 - RNA, 19 nt, Artificial Sequence
  Description of Artificial Sequence: Synthetic oligonucleotide
ccaggaauacccucauaau

SEQ ID NO: 2788043 - RNA, 19 nt, Artificial Sequence
  Description of Artificial Sequence: Synthetic oligonucleotide
ccaacucgugaguccacaa

SEQ ID NO: 2788044 - RNA, 19 nt, Artificial Sequence
  Description of Artificial Sequence: Synthetic oligonucleotide
cuguggcagaugggauauc

SEQ ID NO: 2788045 - RNA, 19 nt, Artificial Sequence
  Description of Artificial Sequence: Synthetic oligonucleotide
cuaugggauccuggauucu

SEQ ID NO: 2788046 - RNA, 19 nt, Artificial Sequence
  Description of Artificial Sequence: Synthetic oligonucleotide
ggauauccucauggaguua

SEQ ID NO: 2788047 - RNA, 19 nt, Artificial Sequence
  Description of Artificial Sequence: Synthetic oligonucleotide
ggggaggagggaguaaauu

SEQ ID NO: 2788048 - RNA, 19 nt, Artificial Sequence
  Description of Artificial Sequence: Synthetic oligonucleotide
ggggcccuagaagaauuau

SEQ ID NO: 2788049 - RNA, 19 nt, Artificial Sequence
  Description of Artificial Sequence: Synthetic oligonucleotide
ccacugguagagagggcau

SEQ ID NO: 2788050 - RNA, 19 nt, Artificial Sequence
  Description of Artificial Sequence: Synthetic oligonucleotide
uaaucuaagaaccauuccg

SEQ ID NO: 2788051 - RNA, 19 nt, Artificial Sequence
  Description of Artificial Sequence: Synthetic oligonucleotide
ucuuaugcucuucaaaucg

SEQ ID NO: 2788052 - RNA, 19 nt, Artificial Sequence
  Description of Artificial Sequence: Synthetic oligonucleotide
ucuuggaaaaguaaucagg

SEQ ID NO: 2788053 - RNA, 19 nt, Artificial Sequence
  Description of Artificial Sequence: Synthetic oligonucleotide
aaguaaucaggauacacug

SEQ ID NO: 2788054 - RNA, 19 nt, Artificial Sequence
  Description of Artificial Sequence: Synthetic oligonucleotide
aaucuaagaaccauuccgg

SEQ ID NO: 2788055 - RNA, 19 nt, Artificial Sequence
  Description of Artificial Sequence: Synthetic oligonucleotide
auucguaucucucauagga

SEQ ID NO: 2788056 - RNA, 19 nt, Artificial Sequence
  Description of Artificial Sequence: Synthetic oligonucleotide
ucagcaaacaagcaaagua

SEQ ID NO: 2788057 - RNA, 19 nt, Artificial Sequence
  Description of Artificial Sequence: Synthetic oligonucleotide
agagcuucagucaugacac

SEQ ID NO: 2788058 - RNA, 19 nt, Artificial Sequence
  Description of Artificial Sequence: Synthetic oligonucleotide
ucaugacaccgucagaggg

SEQ ID NO: 2788059 - RNA, 19 nt, Artificial Sequence
  Description of Artificial Sequence: Synthetic oligonucleotide
ugccaguaaucuaagaacc

SEQ ID NO: 2788060 - RNA, 19 nt, Artificial Sequence
  Description of Artificial Sequence: Synthetic oligonucleotide
uggaaaaguaaucaggaua

SEQ ID NO: 2788061 - RNA, 19 nt, Artificial Sequence
  Description of Artificial Sequence: Synthetic oligonucleotide
aaacaagcaaaguaccggu

SEQ ID NO: 2788062 - RNA, 19 nt, Artificial Sequence
  Description of Artificial Sequence: Synthetic oligonucleotide
uguggauacaccacgacuc

SEQ ID NO: 2788063 - RNA, 19 nt, Artificial Sequence
  Description of Artificial Sequence: Synthetic oligonucleotide
ucguaucucucauaggagg

SEQ ID NO: 2788064 - RNA, 19 nt, Artificial Sequence
  Description of Artificial Sequence: Synthetic oligonucleotide
aaaguaaucaggauacacu

SEQ ID NO: 2788065 - RNA, 19 nt, Artificial Sequence
  Description of Artificial Sequence: Synthetic oligonucleotide
uuaugcucuucaaaucggg

SEQ ID NO: 2788066 - RNA, 19 nt, Artificial Sequence
  Description of Artificial Sequence: Synthetic oligonucleotide
cuaagaaccauuccggaac

SEQ ID NO: 2788067 - RNA, 19 nt, Artificial Sequence
  Description of Artificial Sequence: Synthetic oligonucleotide
acgauaugccaccacagcg

SEQ ID NO: 2788068 - RNA, 19 nt, Artificial Sequence
  Description of Artificial Sequence: Synthetic oligonucleotide
aguaaucuaagaaccauuc

SEQ ID NO: 2788069 - RNA, 19 nt, Artificial Sequence
  Description of Artificial Sequence: Synthetic oligonucleotide
ucaaaucgggcucucagca

SEQ ID NO: 2788070 - RNA, 19 nt, Artificial Sequence
  Description of Artificial Sequence: Synthetic oligonucleotide
uguguagccuucaucaugu

SEQ ID NO: 2788071 - RNA, 19 nt, Artificial Sequence
  Description of Artificial Sequence: Synthetic oligonucleotide
cauuccggaaccuuguagc

SEQ ID NO: 2788072 - RNA, 19 nt, Artificial Sequence
  Description of Artificial Sequence: Synthetic oligonucleotide
cuuggaaaaguaaucagga

SEQ ID NO: 2788073 - RNA, 19 nt, Artificial Sequence
  Description of Artificial Sequence: Synthetic oligonucleotide
cagcaaacaagcaaaguac

SEQ ID NO: 2788074 - RNA, 19 nt, Artificial Sequence
  Description of Artificial Sequence: Synthetic oligonucleotide
caaacaagcaaaguaccgg

SEQ ID NO: 2788075 - RNA, 19 nt, Artificial Sequence
  Description of Artificial Sequence: Synthetic oligonucleotide
agucaugacaccgucagag

SEQ ID NO: 2788076 - RNA, 19 nt, Artificial Sequence
  Description of Artificial Sequence: Synthetic oligonucleotide
agcaaacaagcaaaguacc

SEQ ID NO: 2788077 - RNA, 19 nt, Artificial Sequence
  Description of Artificial Sequence: Synthetic oligonucleotide
gauaugccaccacagcggg

SEQ ID NO: 2788078 - RNA, 19 nt, Artificial Sequence
  Description of Artificial Sequence: Synthetic oligonucleotide
gaagauguacggcugagga

SEQ ID NO: 2788079 - RNA, 19 nt, Artificial Sequence
  Description of Artificial Sequence: Synthetic oligonucleotide
cuuaugcucuucaaaucgg

SEQ ID NO: 2788080 - RNA, 19 nt, Artificial Sequence
  Description of Artificial Sequence: Synthetic oligonucleotide
agauguacggcugaggaug

SEQ ID NO: 2788081 - RNA, 19 nt, Artificial Sequence
  Description of Artificial Sequence: Synthetic oligonucleotide
guccuucucauucuuaugc

SEQ ID NO: 2788082 - RNA, 19 nt, Artificial Sequence
  Description of Artificial Sequence: Synthetic oligonucleotide
aggaugcugauuuugccag

SEQ ID NO: 2788083 - RNA, 19 nt, Artificial Sequence
  Description of Artificial Sequence: Synthetic oligonucleotide
uguagccuucaucaugucc

SEQ ID NO: 2788084 - RNA, 19 nt, Artificial Sequence
  Description of Artificial Sequence: Synthetic oligonucleotide
uucguaucucucauaggag

SEQ ID NO: 2788085 - RNA, 19 nt, Artificial Sequence
  Description of Artificial Sequence: Synthetic oligonucleotide
ggaaaaguaaucaggauac

SEQ ID NO: 2788086 - RNA, 19 nt, Artificial Sequence
  Description of Artificial Sequence: Synthetic oligonucleotide
uacaccacgacucgaggug

SEQ ID NO: 2788087 - RNA, 19 nt, Artificial Sequence
  Description of Artificial Sequence: Synthetic oligonucleotide
uaagaaccauuccggaacc

SEQ ID NO: 2788088 - RNA, 19 nt, Artificial Sequence
  Description of Artificial Sequence: Synthetic oligonucleotide
aagucaccuuccuuucugg

SEQ ID NO: 2788089 - RNA, 19 nt, Artificial Sequence
  Description of Artificial Sequence: Synthetic oligonucleotide
uuucccuguggauacacca

SEQ ID NO: 2788090 - RNA, 19 nt, Artificial Sequence
  Description of Artificial Sequence: Synthetic oligonucleotide
ucuggcgggaggcagagcu

SEQ ID NO: 2788091 - RNA, 19 nt, Artificial Sequence
  Description of Artificial Sequence: Synthetic oligonucleotide
uuugccagaauuccucuuc

SEQ ID NO: 2788092 - RNA, 19 nt, Artificial Sequence
  Description of Artificial Sequence: Synthetic oligonucleotide
caucauguccuucucauuc

SEQ ID NO: 2788093 - RNA, 19 nt, Artificial Sequence
  Description of Artificial Sequence: Synthetic oligonucleotide
ucacgauaugccaccacag

SEQ ID NO: 2788094 - RNA, 19 nt, Artificial Sequence
  Description of Artificial Sequence: Synthetic oligonucleotide
uaugcucuucaaaucgggc

SEQ ID NO: 2788095 - RNA, 19 nt, Artificial Sequence
  Description of Artificial Sequence: Synthetic oligonucleotide
gauacaccacgacucgagg

SEQ ID NO: 2788096 - RNA, 19 nt, Artificial Sequence
  Description of Artificial Sequence: Synthetic oligonucleotide
aguaaucaggauacacugc

SEQ ID NO: 2788097 - RNA, 19 nt, Artificial Sequence
  Description of Artificial Sequence: Synthetic oligonucleotide
ucccuguggauacaccacg

SEQ ID NO: 2788098 - RNA, 19 nt, Artificial Sequence
  Description of Artificial Sequence: Synthetic oligonucleotide
cugauuuugccagaauucc

SEQ ID NO: 2788099 - RNA, 19 nt, Artificial Sequence
  Description of Artificial Sequence: Synthetic oligonucleotide
uggugcgucagguaggccc

SEQ ID NO: 2788100 - RNA, 19 nt, Artificial Sequence
  Description of Artificial Sequence: Synthetic oligonucleotide
aaaucgggcucucagcaaa

SEQ ID NO: 2788101 - RNA, 19 nt, Artificial Sequence
  Description of Artificial Sequence: Synthetic oligonucleotide
ucucagcaaacaagcaaag

SEQ ID NO: 2788102 - RNA, 19 nt, Artificial Sequence
  Description of Artificial Sequence: Synthetic oligonucleotide
uucaaaucgggcucucagc

SEQ ID NO: 2788103 - RNA, 19 nt, Artificial Sequence
  Description of Artificial Sequence: Synthetic oligonucleotide
ucuaagaaccauuccggaa

SEQ ID NO: 2788104 - RNA, 19 nt, Artificial Sequence
  Description of Artificial Sequence: Synthetic oligonucleotide
ugauuuugccagaauuccu

SEQ ID NO: 2788105 - RNA, 19 nt, Artificial Sequence
  Description of Artificial Sequence: Synthetic oligonucleotide
uucaucauguccuucucau

SEQ ID NO: 2788106 - RNA, 19 nt, Artificial Sequence
  Description of Artificial Sequence: Synthetic oligonucleotide
uguagcauucguaucucuc

SEQ ID NO: 2788107 - RNA, 19 nt, Artificial Sequence
  Description of Artificial Sequence: Synthetic oligonucleotide
ugcugauuuugccagaauu

SEQ ID NO: 2788108 - RNA, 19 nt, Artificial Sequence
  Description of Artificial Sequence: Synthetic oligonucleotide
aucaggauacacugcuuuc

SEQ ID NO: 2788109 - RNA, 19 nt, Artificial Sequence
  Description of Artificial Sequence: Synthetic oligonucleotide
cucuuggaaaaguaaucag

SEQ ID NO: 2788110 - RNA, 19 nt, Artificial Sequence
  Description of Artificial Sequence: Synthetic oligonucleotide
cuucaaaucgggcucucag

SEQ ID NO: 2788111 - RNA, 19 nt, Artificial Sequence
  Description of Artificial Sequence: Synthetic oligonucleotide
gugccaguaaucuaagaac

SEQ ID NO: 2788112 - RNA, 19 nt, Artificial Sequence
  Description of Artificial Sequence: Synthetic oligonucleotide
ucuggucacgauaugccac

SEQ ID NO: 2788113 - RNA, 19 nt, Artificial Sequence
  Description of Artificial Sequence: Synthetic oligonucleotide
gucaccuuccuuucuggcg

SEQ ID NO: 2788114 - RNA, 19 nt, Artificial Sequence
  Description of Artificial Sequence: Synthetic oligonucleotide
gauuuugccagaauuccuc

SEQ ID NO: 2788115 - RNA, 19 nt, Artificial Sequence
  Description of Artificial Sequence: Synthetic oligonucleotide
agucaccuuccuuucuggc

SEQ ID NO: 2788116 - RNA, 19 nt, Artificial Sequence
  Description of Artificial Sequence: Synthetic oligonucleotide
uccgggaagauguacggcu

SEQ ID NO: 2788117 - RNA, 19 nt, Artificial Sequence
  Description of Artificial Sequence: Synthetic oligonucleotide
ugcucuucaaaucgggcuc

SEQ ID NO: 2788118 - RNA, 19 nt, Artificial Sequence
  Description of Artificial Sequence: Synthetic oligonucleotide
uuccacugcucccucuugg

SEQ ID NO: 2788119 - RNA, 19 nt, Artificial Sequence
  Description of Artificial Sequence: Synthetic oligonucleotide
aguccgggaagauguacgg

SEQ ID NO: 2788120 - RNA, 19 nt, Artificial Sequence
  Description of Artificial Sequence: Synthetic oligonucleotide
agcaccuucugcuggugcg

SEQ ID NO: 2788121 - RNA, 19 nt, Artificial Sequence
  Description of Artificial Sequence: Synthetic oligonucleotide
uuucucagaagggugccag

SEQ ID NO: 2788122 - RNA, 19 nt, Artificial Sequence
  Description of Artificial Sequence: Synthetic oligonucleotide
augcucuucaaaucgggcu

SEQ ID NO: 2788123 - RNA, 19 nt, Artificial Sequence
  Description of Artificial Sequence: Synthetic oligonucleotide
uucuuaugcucuucaaauc

SEQ ID NO: 2788124 - RNA, 19 nt, Artificial Sequence
  Description of Artificial Sequence: Synthetic oligonucleotide
acaagcaaaguaccgguau

SEQ ID NO: 2788125 - RNA, 19 nt, Artificial Sequence
  Description of Artificial Sequence: Synthetic oligonucleotide
uacacugcuuucucagaag

SEQ ID NO: 2788126 - RNA, 19 nt, Artificial Sequence
  Description of Artificial Sequence: Synthetic oligonucleotide
uccucaguuucuuccacug

SEQ ID NO: 2788127 - RNA, 19 nt, Artificial Sequence
  Description of Artificial Sequence: Synthetic oligonucleotide
gcauucguaucucucauag

SEQ ID NO: 2788128 - RNA, 19 nt, Artificial Sequence
  Description of Artificial Sequence: Synthetic oligonucleotide
gaggaugcugauuuugcca

SEQ ID NO: 2788129 - RNA, 19 nt, Artificial Sequence
  Description of Artificial Sequence: Synthetic oligonucleotide
ggauacacugcuuucucag

SEQ ID NO: 2788130 - RNA, 19 nt, Artificial Sequence
  Description of Artificial Sequence: Synthetic oligonucleotide
agagggugucuccuccugc

SEQ ID NO: 2788131 - RNA, 19 nt, Artificial Sequence
  Description of Artificial Sequence: Synthetic oligonucleotide
uaucucucauaggaggugc

SEQ ID NO: 2788132 - RNA, 19 nt, Artificial Sequence
  Description of Artificial Sequence: Synthetic oligonucleotide
uuaaccucccguucccagc

SEQ ID NO: 2788133 - RNA, 19 nt, Artificial Sequence
  Description of Artificial Sequence: Synthetic oligonucleotide
agcuucagucaugacaccg

SEQ ID NO: 2788134 - RNA, 19 nt, Artificial Sequence
  Description of Artificial Sequence: Synthetic oligonucleotide
cucgagguggcgcagcgcg

SEQ ID NO: 2788135 - RNA, 19 nt, Artificial Sequence
  Description of Artificial Sequence: Synthetic oligonucleotide
aagggugccaguaaucuaa

SEQ ID NO: 2788136 - RNA, 19 nt, Artificial Sequence
  Description of Artificial Sequence: Synthetic oligonucleotide
uugccagaauuccucuucc

SEQ ID NO: 2788137 - RNA, 19 nt, Artificial Sequence
  Description of Artificial Sequence: Synthetic oligonucleotide
ucagaagggugccaguaau

SEQ ID NO: 2788138 - RNA, 19 nt, Artificial Sequence
  Description of Artificial Sequence: Synthetic oligonucleotide
guagcauucguaucucuca

SEQ ID NO: 2788139 - RNA, 19 nt, Artificial Sequence
  Description of Artificial Sequence: Synthetic oligonucleotide
ucccucuuggaaaaguaau

SEQ ID NO: 2788140 - RNA, 19 nt, Artificial Sequence
  Description of Artificial Sequence: Synthetic oligonucleotide
auuuugccagaauuccucu

SEQ ID NO: 2788141 - RNA, 19 nt, Artificial Sequence
  Description of Artificial Sequence: Synthetic oligonucleotide
acugcuuucucagaagggu

SEQ ID NO: 2788142 - RNA, 19 nt, Artificial Sequence
  Description of Artificial Sequence: Synthetic oligonucleotide
guggauacaccacgacucg

SEQ ID NO: 2788143 - RNA, 19 nt, Artificial Sequence
  Description of Artificial Sequence: Synthetic oligonucleotide
aagauguacggcugaggau

SEQ ID NO: 2788144 - RNA, 19 nt, Artificial Sequence
  Description of Artificial Sequence: Synthetic oligonucleotide
ucaggauacacugcuuucu

SEQ ID NO: 2788145 - RNA, 19 nt, Artificial Sequence
  Description of Artificial Sequence: Synthetic oligonucleotide
aucuaagaaccauuccgga

SEQ ID NO: 2788146 - RNA, 19 nt, Artificial Sequence
  Description of Artificial Sequence: Synthetic oligonucleotide
gaguccgggaagauguacg

SEQ ID NO: 2788147 - RNA, 19 nt, Artificial Sequence
  Description of Artificial Sequence: Synthetic oligonucleotide
cagagcuucagucaugaca

SEQ ID NO: 2788148 - RNA, 19 nt, Artificial Sequence
  Description of Artificial Sequence: Synthetic oligonucleotide
gucagguaggccccgggcg

SEQ ID NO: 2788149 - RNA, 19 nt, Artificial Sequence
  Description of Artificial Sequence: Synthetic oligonucleotide
uccugcagcugcuuaaccu

SEQ ID NO: 2788150 - RNA, 19 nt, Artificial Sequence
  Description of Artificial Sequence: Synthetic oligonucleotide
auacacugcuuucucagaa

SEQ ID NO: 2788151 - RNA, 19 nt, Artificial Sequence
  Description of Artificial Sequence: Synthetic oligonucleotide
agaagggugccaguaaucu

SEQ ID NO: 2788152 - RNA, 19 nt, Artificial Sequence
  Description of Artificial Sequence: Synthetic oligonucleotide
ucagguaggccccgggcgc

SEQ ID NO: 2788153 - RNA, 19 nt, Artificial Sequence
  Description of Artificial Sequence: Synthetic oligonucleotide
uuggaaaaguaaucaggau

SEQ ID NO: 2788154 - RNA, 19 nt, Artificial Sequence
  Description of Artificial Sequence: Synthetic oligonucleotide
uuuucccuguggauacacc

SEQ ID NO: 2788155 - RNA, 19 nt, Artificial Sequence
  Description of Artificial Sequence: Synthetic oligonucleotide
gucaugacaccgucagagg

SEQ ID NO: 2788156 - RNA, 19 nt, Artificial Sequence
  Description of Artificial Sequence: Synthetic oligonucleotide
accuuguagcauucguauc

SEQ ID NO: 2788157 - RNA, 19 nt, Artificial Sequence
  Description of Artificial Sequence: Synthetic oligonucleotide
cuggucacgauaugccacc

SEQ ID NO: 2788158 - RNA, 19 nt, Artificial Sequence
  Description of Artificial Sequence: Synthetic oligonucleotide
ugcuuaaccucccguuccc

SEQ ID NO: 2788159 - RNA, 19 nt, Artificial Sequence
  Description of Artificial Sequence: Synthetic oligonucleotide
cauucguaucucucauagg

SEQ ID NO: 2788160 - RNA, 19 nt, Artificial Sequence
  Description of Artificial Sequence: Synthetic oligonucleotide
agcgcgcgcuuguacagcc

SEQ ID NO: 2788161 - RNA, 19 nt, Artificial Sequence
  Description of Artificial Sequence: Synthetic oligonucleotide
uucagucaugacaccguca

SEQ ID NO: 2788162 - RNA, 19 nt, Artificial Sequence
  Description of Artificial Sequence: Synthetic oligonucleotide
auacaccacgacucgaggu

SEQ ID NO: 2788163 - RNA, 19 nt, Artificial Sequence
  Description of Artificial Sequence: Synthetic oligonucleotide
cuuaaccucccguucccag

SEQ ID NO: 2788164 - RNA, 19 nt, Artificial Sequence
  Description of Artificial Sequence: Synthetic oligonucleotide
ucuuccgccuccugcagca

SEQ ID NO: 2788165 - RNA, 19 nt, Artificial Sequence
  Description of Artificial Sequence: Synthetic oligonucleotide
ugccagaauuccucuuccg

SEQ ID NO: 2788166 - RNA, 19 nt, Artificial Sequence
  Description of Artificial Sequence: Synthetic oligonucleotide
cacgauaugccaccacagc

SEQ ID NO: 2788167 - RNA, 19 nt, Artificial Sequence
  Description of Artificial Sequence: Synthetic oligonucleotide
ugcuggugcgucagguagg

SEQ ID NO: 2788168 - RNA, 19 nt, Artificial Sequence
  Description of Artificial Sequence: Synthetic oligonucleotide
caagucaccuuccuuucug

SEQ ID NO: 2788169 - RNA, 19 nt, Artificial Sequence
  Description of Artificial Sequence: Synthetic oligonucleotide
gaaccauuccggaaccuug

SEQ ID NO: 2788170 - RNA, 19 nt, Artificial Sequence
  Description of Artificial Sequence: Synthetic oligonucleotide
cugcuuaaccucccguucc

SEQ ID NO: 2788171 - RNA, 19 nt, Artificial Sequence
  Description of Artificial Sequence: Synthetic oligonucleotide
uaaccucccguucccagcu

SEQ ID NO: 2788172 - RNA, 19 nt, Artificial Sequence
  Description of Artificial Sequence: Synthetic oligonucleotide
cacugcuuucucagaaggg

SEQ ID NO: 2788173 - RNA, 19 nt, Artificial Sequence
  Description of Artificial Sequence: Synthetic oligonucleotide
gucacgauaugccaccaca

SEQ ID NO: 2788174 - RNA, 19 nt, Artificial Sequence
  Description of Artificial Sequence: Synthetic oligonucleotide
cuguguagccuucaucaug

SEQ ID NO: 2788175 - RNA, 19 nt, Artificial Sequence
  Description of Artificial Sequence: Synthetic oligonucleotide
uguccuucucauucuuaug

SEQ ID NO: 2788176 - RNA, 19 nt, Artificial Sequence
  Description of Artificial Sequence: Synthetic oligonucleotide
accgucagagggugucucc

SEQ ID NO: 2788177 - RNA, 19 nt, Artificial Sequence
  Description of Artificial Sequence: Synthetic oligonucleotide
auuccggaaccuuguagca

SEQ ID NO: 2788178 - RNA, 19 nt, Artificial Sequence
  Description of Artificial Sequence: Synthetic oligonucleotide
caguuucuuccacugcucc

SEQ ID NO: 2788179 - RNA, 19 nt, Artificial Sequence
  Description of Artificial Sequence: Synthetic oligonucleotide
ucauucuuaugcucuucaa

SEQ ID NO: 2788180 - RNA, 19 nt, Artificial Sequence
  Description of Artificial Sequence: Synthetic oligonucleotide
gcaaacaagcaaaguaccg

SEQ ID NO: 2788181 - RNA, 19 nt, Artificial Sequence
  Description of Artificial Sequence: Synthetic oligonucleotide
cugcuggugcgucagguag

SEQ ID NO: 2788182 - RNA, 19 nt, Artificial Sequence
  Description of Artificial Sequence: Synthetic oligonucleotide
uucccuguggauacaccac

SEQ ID NO: 2788183 - RNA, 19 nt, Artificial Sequence
  Description of Artificial Sequence: Synthetic oligonucleotide
aagcaaaguaccgguauuu

SEQ ID NO: 2788184 - RNA, 19 nt, Artificial Sequence
  Description of Artificial Sequence: Synthetic oligonucleotide
ggugccaguaaucuaagaa

SEQ ID NO: 2788185 - RNA, 19 nt, Artificial Sequence
  Description of Artificial Sequence: Synthetic oligonucleotide
aaucgggcucucagcaaac

SEQ ID NO: 2788186 - RNA, 19 nt, Artificial Sequence
  Description of Artificial Sequence: Synthetic oligonucleotide
uguacggcugaggaugcug

SEQ ID NO: 2788187 - RNA, 19 nt, Artificial Sequence
  Description of Artificial Sequence: Synthetic oligonucleotide
uagcauucguaucucucau

SEQ ID NO: 2788188 - RNA, 19 nt, Artificial Sequence
  Description of Artificial Sequence: Synthetic oligonucleotide
aggauacacugcuuucuca

SEQ ID NO: 2788189 - RNA, 19 nt, Artificial Sequence
  Description of Artificial Sequence: Synthetic oligonucleotide
agaguccgggaagauguac

SEQ ID NO: 2788190 - RNA, 19 nt, Artificial Sequence
  Description of Artificial Sequence: Synthetic oligonucleotide
cauucuuaugcucuucaaa

SEQ ID NO: 2788191 - RNA, 19 nt, Artificial Sequence
  Description of Artificial Sequence: Synthetic oligonucleotide
aacgccauggcgcccggau

SEQ ID NO: 2788192 - RNA, 19 nt, Artificial Sequence
  Description of Artificial Sequence: Synthetic oligonucleotide
gacucgagguggcgcagcg

SEQ ID NO: 2788193 - RNA, 19 nt, Artificial Sequence
  Description of Artificial Sequence: Synthetic oligonucleotide
agccgcagcaccuucugcu

SEQ ID NO: 2788194 - RNA, 19 nt, Artificial Sequence
  Description of Artificial Sequence: Synthetic oligonucleotide
uuccuuucuggcgggaggc

SEQ ID NO: 2788195 - RNA, 19 nt, Artificial Sequence
  Description of Artificial Sequence: Synthetic oligonucleotide
guagccuucaucauguccu

SEQ ID NO: 2788196 - RNA, 19 nt, Artificial Sequence
  Description of Artificial Sequence: Synthetic oligonucleotide
uccggaaccuuguagcauu

SEQ ID NO: 2788197 - RNA, 19 nt, Artificial Sequence
  Description of Artificial Sequence: Synthetic oligonucleotide
cucauucuuaugcucuuca

SEQ ID NO: 2788198 - RNA, 19 nt, Artificial Sequence
  Description of Artificial Sequence: Synthetic oligonucleotide
cugcagcugcuuaaccucc

SEQ ID NO: 2788199 - RNA, 19 nt, Artificial Sequence
  Description of Artificial Sequence: Synthetic oligonucleotide
aucucucauaggaggugcc

SEQ ID NO: 2788200 - RNA, 19 nt, Artificial Sequence
  Description of Artificial Sequence: Synthetic oligonucleotide
cuucagucaugacaccguc

SEQ ID NO: 2788201 - RNA, 19 nt, Artificial Sequence
  Description of Artificial Sequence: Synthetic oligonucleotide
aaccauuccggaaccuugu

SEQ ID NO: 2788202 - RNA, 19 nt, Artificial Sequence
  Description of Artificial Sequence: Synthetic oligonucleotide
gauguacggcugaggaugc

SEQ ID NO: 2788203 - RNA, 19 nt, Artificial Sequence
  Description of Artificial Sequence: Synthetic oligonucleotide
uuguagcauucguaucucu

SEQ ID NO: 2788204 - RNA, 19 nt, Artificial Sequence
  Description of Artificial Sequence: Synthetic oligonucleotide
ugcagcugcuuaaccuccc

SEQ ID NO: 2788205 - RNA, 19 nt, Artificial Sequence
  Description of Artificial Sequence: Synthetic oligonucleotide
uccacugcucccucuugga

SEQ ID NO: 2788206 - RNA, 19 nt, Artificial Sequence
  Description of Artificial Sequence: Synthetic oligonucleotide
uuucuggcgggaggcagag

SEQ ID NO: 2788207 - RNA, 19 nt, Artificial Sequence
  Description of Artificial Sequence: Synthetic oligonucleotide
guaucucucauaggaggug

SEQ ID NO: 2788208 - RNA, 19 nt, Artificial Sequence
  Description of Artificial Sequence: Synthetic oligonucleotide
ucuuccacugcucccucuu

SEQ ID NO: 2788209 - RNA, 19 nt, Artificial Sequence
  Description of Artificial Sequence: Synthetic oligonucleotide
cgauaugccaccacagcgg

SEQ ID NO: 2788210 - RNA, 19 nt, Artificial Sequence
  Description of Artificial Sequence: Synthetic oligonucleotide
augacaccgucagagggug

SEQ ID NO: 2788211 - RNA, 19 nt, Artificial Sequence
  Description of Artificial Sequence: Synthetic oligonucleotide
acaccacgacucgaggugg

SEQ ID NO: 2788212 - RNA, 19 nt, Artificial Sequence
  Description of Artificial Sequence: Synthetic oligonucleotide
caggauacacugcuuucuc

SEQ ID NO: 2788213 - RNA, 19 nt, Artificial Sequence
  Description of Artificial Sequence: Synthetic oligonucleotide
gcugauuuugccagaauuc

SEQ ID NO: 2788214 - RNA, 19 nt, Artificial Sequence
  Description of Artificial Sequence: Synthetic oligonucleotide
auccucaguuucuuccacu

SEQ ID NO: 2788215 - RNA, 19 nt, Artificial Sequence
  Description of Artificial Sequence: Synthetic oligonucleotide
uuuugccagaauuccucuu

SEQ ID NO: 2788216 - RNA, 19 nt, Artificial Sequence
  Description of Artificial Sequence: Synthetic oligonucleotide
gccagaauuccucuuccgc

SEQ ID NO: 2788217 - RNA, 19 nt, Artificial Sequence
  Description of Artificial Sequence: Synthetic oligonucleotide
ucgggcucucagcaaacaa

SEQ ID NO: 2788218 - RNA, 19 nt, Artificial Sequence
  Description of Artificial Sequence: Synthetic oligonucleotide
ucucagaagggugccagua

SEQ ID NO: 2788219 - RNA, 19 nt, Artificial Sequence
  Description of Artificial Sequence: Synthetic oligonucleotide
gagggugucuccuccugca

SEQ ID NO: 2788220 - RNA, 19 nt, Artificial Sequence
  Description of Artificial Sequence: Synthetic oligonucleotide
cagaagggugccaguaauc

SEQ ID NO: 2788221 - RNA, 19 nt, Artificial Sequence
  Description of Artificial Sequence: Synthetic oligonucleotide
agcugcuuaaccucccguu

SEQ ID NO: 2788222 - RNA, 19 nt, Artificial Sequence
  Description of Artificial Sequence: Synthetic oligonucleotide
ggauacaccacgacucgag

SEQ ID NO: 2788223 - RNA, 19 nt, Artificial Sequence
  Description of Artificial Sequence: Synthetic oligonucleotide
cuuguagcauucguaucuc

SEQ ID NO: 2788224 - RNA, 19 nt, Artificial Sequence
  Description of Artificial Sequence: Synthetic oligonucleotide
cacaacgccauggcgcccg

SEQ ID NO: 2788225 - RNA, 19 nt, Artificial Sequence
  Description of Artificial Sequence: Synthetic oligonucleotide
gaugcugauuuugccagaa

SEQ ID NO: 2788226 - RNA, 19 nt, Artificial Sequence
  Description of Artificial Sequence: Synthetic oligonucleotide
uacagccgcagcaccuucu

SEQ ID NO: 2788227 - RNA, 19 nt, Artificial Sequence
  Description of Artificial Sequence: Synthetic oligonucleotide
gucuggucacgauaugcca

SEQ ID NO: 2788228 - RNA, 19 nt, Artificial Sequence
  Description of Artificial Sequence: Synthetic oligonucleotide
cucaguuucuuccacugcu

SEQ ID NO: 2788229 - RNA, 19 nt, Artificial Sequence
  Description of Artificial Sequence: Synthetic oligonucleotide
ucuucaaaucgggcucuca

SEQ ID NO: 2788230 - RNA, 19 nt, Artificial Sequence
  Description of Artificial Sequence: Synthetic oligonucleotide
ugcagcagcuguguagccu

SEQ ID NO: 2788231 - RNA, 19 nt, Artificial Sequence
  Description of Artificial Sequence: Synthetic oligonucleotide
acagccgcagcaccuucug

SEQ ID NO: 2788232 - RNA, 19 nt, Artificial Sequence
  Description of Artificial Sequence: Synthetic oligonucleotide
aacaagcaaaguaccggua

SEQ ID NO: 2788233 - RNA, 19 nt, Artificial Sequence
  Description of Artificial Sequence: Synthetic oligonucleotide
gaaccuuguagcauucgua

SEQ ID NO: 2788234 - RNA, 19 nt, Artificial Sequence
  Description of Artificial Sequence: Synthetic oligonucleotide
ggucuggucacgauaugcc

SEQ ID NO: 2788235 - RNA, 19 nt, Artificial Sequence
  Description of Artificial Sequence: Synthetic oligonucleotide
gacaccgucagaggguguc

SEQ ID NO: 2788236 - RNA, 19 nt, Artificial Sequence
  Description of Artificial Sequence: Synthetic oligonucleotide
ggaagauguacggcugagg

SEQ ID NO: 2788237 - RNA, 19 nt, Artificial Sequence
  Description of Artificial Sequence: Synthetic oligonucleotide
cauccucaguuucuuccac

SEQ ID NO: 2788238 - RNA, 19 nt, Artificial Sequence
  Description of Artificial Sequence: Synthetic oligonucleotide
aagaaccauuccggaaccu

SEQ ID NO: 2788239 - RNA, 19 nt, Artificial Sequence
  Description of Artificial Sequence: Synthetic oligonucleotide
uucucagaagggugccagu

SEQ ID NO: 2788240 - RNA, 19 nt, Artificial Sequence
  Description of Artificial Sequence: Synthetic oligonucleotide
aaccucccguucccagcuc

SEQ ID NO: 2788241 - RNA, 19 nt, Artificial Sequence
  Description of Artificial Sequence: Synthetic oligonucleotide
ucaucauguccuucucauu

SEQ ID NO: 2788242 - RNA, 19 nt, Artificial Sequence
  Description of Artificial Sequence: Synthetic oligonucleotide
gggcucucagcaaacaagc

SEQ ID NO: 2788243 - RNA, 19 nt, Artificial Sequence
  Description of Artificial Sequence: Synthetic oligonucleotide
ucucauucuuaugcucuuc

SEQ ID NO: 2788244 - RNA, 19 nt, Artificial Sequence
  Description of Artificial Sequence: Synthetic oligonucleotide
uuucuuccacugcucccuc

SEQ ID NO: 2788245 - RNA, 19 nt, Artificial Sequence
  Description of Artificial Sequence: Synthetic oligonucleotide
uggauacaccacgacucga

SEQ ID NO: 2788246 - RNA, 19 nt, Artificial Sequence
  Description of Artificial Sequence: Synthetic oligonucleotide
guucccgaggucuggucac

SEQ ID NO: 2788247 - RNA, 19 nt, Artificial Sequence
  Description of Artificial Sequence: Synthetic oligonucleotide
ucccguucccagcucucca

SEQ ID NO: 2788248 - RNA, 19 nt, Artificial Sequence
  Description of Artificial Sequence: Synthetic oligonucleotide
agggugucuccuccugcag

SEQ ID NO: 2788249 - RNA, 19 nt, Artificial Sequence
  Description of Artificial Sequence: Synthetic oligonucleotide
ucugcuggugcgucaggua

SEQ ID NO: 2788250 - RNA, 19 nt, Artificial Sequence
  Description of Artificial Sequence: Synthetic oligonucleotide
agaaccauuccggaaccuu

SEQ ID NO: 2788251 - RNA, 19 nt, Artificial Sequence
  Description of Artificial Sequence: Synthetic oligonucleotide
ugcucccucuuggaaaagu

SEQ ID NO: 2788252 - RNA, 19 nt, Artificial Sequence
  Description of Artificial Sequence: Synthetic oligonucleotide
gaagggugccaguaaucua

SEQ ID NO: 2788253 - RNA, 19 nt, Artificial Sequence
  Description of Artificial Sequence: Synthetic oligonucleotide
gcucucagcaaacaagcaa

SEQ ID NO: 2788254 - RNA, 19 nt, Artificial Sequence
  Description of Artificial Sequence: Synthetic oligonucleotide
gcugaggaugcugauuuug

SEQ ID NO: 2788255 - RNA, 19 nt, Artificial Sequence
  Description of Artificial Sequence: Synthetic oligonucleotide
gggaggcagagcuucaguc

SEQ ID NO: 2788256 - RNA, 19 nt, Artificial Sequence
  Description of Artificial Sequence: Synthetic oligonucleotide
guuucuuccacugcucccu

SEQ ID NO: 2788257 - RNA, 19 nt, Artificial Sequence
  Description of Artificial Sequence: Synthetic oligonucleotide
ccugcagcugcuuaaccuc

SEQ ID NO: 2788258 - RNA, 19 nt, Artificial Sequence
  Description of Artificial Sequence: Synthetic oligonucleotide
uucccgaggucuggucacg

SEQ ID NO: 2788259 - RNA, 19 nt, Artificial Sequence
  Description of Artificial Sequence: Synthetic oligonucleotide
agcauucguaucucucaua

SEQ ID NO: 2788260 - RNA, 19 nt, Artificial Sequence
  Description of Artificial Sequence: Synthetic oligonucleotide
cccucuuggaaaaguaauc

SEQ ID NO: 2788261 - RNA, 19 nt, Artificial Sequence
  Description of Artificial Sequence: Synthetic oligonucleotide
gaggcagagcuucagucau

SEQ ID NO: 2788262 - RNA, 19 nt, Artificial Sequence
  Description of Artificial Sequence: Synthetic oligonucleotide
agcaaaguaccgguauuuu

SEQ ID NO: 2788263 - RNA, 19 nt, Artificial Sequence
  Description of Artificial Sequence: Synthetic oligonucleotide
uucuuccacugcucccucu

SEQ ID NO: 2788264 - RNA, 19 nt, Artificial Sequence
  Description of Artificial Sequence: Synthetic oligonucleotide
acgccauggcgcccggauc

SEQ ID NO: 2788265 - RNA, 19 nt, Artificial Sequence
  Description of Artificial Sequence: Synthetic oligonucleotide
ggagaguccgggaagaugu

SEQ ID NO: 2788266 - RNA, 19 nt, Artificial Sequence
  Description of Artificial Sequence: Synthetic oligonucleotide
uguacagccgcagcaccuu

SEQ ID NO: 2788267 - RNA, 19 nt, Artificial Sequence
  Description of Artificial Sequence: Synthetic oligonucleotide
cuuucuggcgggaggcaga

SEQ ID NO: 2788268 - RNA, 19 nt, Artificial Sequence
  Description of Artificial Sequence: Synthetic oligonucleotide
acucgagguggcgcagcgc

SEQ ID NO: 2788269 - RNA, 19 nt, Artificial Sequence
  Description of Artificial Sequence: Synthetic oligonucleotide
cucccucuuggaaaaguaa

SEQ ID NO: 2788270 - RNA, 19 nt, Artificial Sequence
  Description of Artificial Sequence: Synthetic oligonucleotide
caugacaccgucagagggu

SEQ ID NO: 2788271 - RNA, 19 nt, Artificial Sequence
  Description of Artificial Sequence: Synthetic oligonucleotide
ucgagguggcgcagcgcgc

SEQ ID NO: 2788272 - RNA, 19 nt, Artificial Sequence
  Description of Artificial Sequence: Synthetic oligonucleotide
ccauuccggaaccuuguag

SEQ ID NO: 2788273 - RNA, 19 nt, Artificial Sequence
  Description of Artificial Sequence: Synthetic oligonucleotide
gcugcuuaaccucccguuc

SEQ ID NO: 2788274 - RNA, 19 nt, Artificial Sequence
  Description of Artificial Sequence: Synthetic oligonucleotide
cuguggauacaccacgacu

SEQ ID NO: 2788275 - RNA, 19 nt, Artificial Sequence
  Description of Artificial Sequence: Synthetic oligonucleotide
cuuccacugcucccucuug

SEQ ID NO: 2788276 - RNA, 19 nt, Artificial Sequence
  Description of Artificial Sequence: Synthetic oligonucleotide
caccuuccuuucuggcggg

SEQ ID NO: 2788277 - RNA, 19 nt, Artificial Sequence
  Description of Artificial Sequence: Synthetic oligonucleotide
accucccguucccagcucu

SEQ ID NO: 2788278 - RNA, 19 nt, Artificial Sequence
  Description of Artificial Sequence: Synthetic oligonucleotide
accacgacucgagguggcg

SEQ ID NO: 2788279 - RNA, 19 nt, Artificial Sequence
  Description of Artificial Sequence: Synthetic oligonucleotide
uuccggaaccuuguagcau

SEQ ID NO: 2788280 - RNA, 19 nt, Artificial Sequence
  Description of Artificial Sequence: Synthetic oligonucleotide
cagagggugucuccuccug

SEQ ID NO: 2788281 - RNA, 19 nt, Artificial Sequence
  Description of Artificial Sequence: Synthetic oligonucleotide
ccucuuggaaaaguaauca

SEQ ID NO: 2788282 - RNA, 19 nt, Artificial Sequence
  Description of Artificial Sequence: Synthetic oligonucleotide
cagcuguguagccuucauc

SEQ ID NO: 2788283 - RNA, 19 nt, Artificial Sequence
  Description of Artificial Sequence: Synthetic oligonucleotide
gcagcugcuuaaccucccg

SEQ ID NO: 2788284 - RNA, 19 nt, Artificial Sequence
  Description of Artificial Sequence: Synthetic oligonucleotide
cacgacucgagguggcgca

SEQ ID NO: 2788285 - RNA, 19 nt, Artificial Sequence
  Description of Artificial Sequence: Synthetic oligonucleotide
cuucugcuggugcgucagg

SEQ ID NO: 2788286 - RNA, 19 nt, Artificial Sequence
  Description of Artificial Sequence: Synthetic oligonucleotide
ggcaagucaccuuccuuuc

SEQ ID NO: 2788287 - RNA, 19 nt, Artificial Sequence
  Description of Artificial Sequence: Synthetic oligonucleotide
gcgcacaacgccauggcgc

SEQ ID NO: 2788288 - RNA, 19 nt, Artificial Sequence
  Description of Artificial Sequence: Synthetic oligonucleotide
caccacgacucgagguggc

SEQ ID NO: 2788289 - RNA, 19 nt, Artificial Sequence
  Description of Artificial Sequence: Synthetic oligonucleotide
auaugccaccacagcgggg

SEQ ID NO: 2788290 - RNA, 19 nt, Artificial Sequence
  Description of Artificial Sequence: Synthetic oligonucleotide
cucagaagggugccaguaa

SEQ ID NO: 2788291 - RNA, 19 nt, Artificial Sequence
  Description of Artificial Sequence: Synthetic oligonucleotide
ccuuguagcauucguaucu

SEQ ID NO: 2788292 - RNA, 19 nt, Artificial Sequence
  Description of Artificial Sequence: Synthetic oligonucleotide
guacggcugaggaugcuga

SEQ ID NO: 2788293 - RNA, 19 nt, Artificial Sequence
  Description of Artificial Sequence: Synthetic oligonucleotide
augcugauuuugccagaau

SEQ ID NO: 2788294 - RNA, 19 nt, Artificial Sequence
  Description of Artificial Sequence: Synthetic oligonucleotide
uggucacgauaugccacca

SEQ ID NO: 2788295 - RNA, 19 nt, Artificial Sequence
  Description of Artificial Sequence: Synthetic oligonucleotide
agcucuccauccucaguuu

SEQ ID NO: 2788296 - RNA, 19 nt, Artificial Sequence
  Description of Artificial Sequence: Synthetic oligonucleotide
agggugccaguaaucuaag

SEQ ID NO: 2788297 - RNA, 19 nt, Artificial Sequence
  Description of Artificial Sequence: Synthetic oligonucleotide
caguaaucuaagaaccauu

SEQ ID NO: 2788298 - RNA, 19 nt, Artificial Sequence
  Description of Artificial Sequence: Synthetic oligonucleotide
cgggcucucagcaaacaag

SEQ ID NO: 2788299 - RNA, 19 nt, Artificial Sequence
  Description of Artificial Sequence: Synthetic oligonucleotide
uacggcugaggaugcugau

SEQ ID NO: 2788300 - RNA, 19 nt, Artificial Sequence
  Description of Artificial Sequence: Synthetic oligonucleotide
ggugcgucagguaggcccc

SEQ ID NO: 2788301 - RNA, 19 nt, Artificial Sequence
  Description of Artificial Sequence: Synthetic oligonucleotide
gggaagauguacggcugag

SEQ ID NO: 2788302 - RNA, 19 nt, Artificial Sequence
  Description of Artificial Sequence: Synthetic oligonucleotide
ugcgucagguaggccccgg

SEQ ID NO: 2788303 - RNA, 19 nt, Artificial Sequence
  Description of Artificial Sequence: Synthetic oligonucleotide
acaacgccauggcgcccgg

SEQ ID NO: 2788304 - RNA, 19 nt, Artificial Sequence
  Description of Artificial Sequence: Synthetic oligonucleotide
caaaucgggcucucagcaa

SEQ ID NO: 2788305 - RNA, 19 nt, Artificial Sequence
  Description of Artificial Sequence: Synthetic oligonucleotide
ggaaccuuguagcauucgu

SEQ ID NO: 2788306 - RNA, 19 nt, Artificial Sequence
  Description of Artificial Sequence: Synthetic oligonucleotide
cugcagcagcuguguagcc

SEQ ID NO: 2788307 - RNA, 19 nt, Artificial Sequence
  Description of Artificial Sequence: Synthetic oligonucleotide
ggcgcgcacaacgccaugg

SEQ ID NO: 2788308 - RNA, 19 nt, Artificial Sequence
  Description of Artificial Sequence: Synthetic oligonucleotide
uggcgcccggaucaccuuc

SEQ ID NO: 2788309 - RNA, 19 nt, Artificial Sequence
  Description of Artificial Sequence: Synthetic oligonucleotide
gcuuucucagaagggugcc

SEQ ID NO: 2788310 - RNA, 19 nt, Artificial Sequence
  Description of Artificial Sequence: Synthetic oligonucleotide
guccgggaagauguacggc

SEQ ID NO: 2788311 - RNA, 19 nt, Artificial Sequence
  Description of Artificial Sequence: Synthetic oligonucleotide
accauuccggaaccuugua

SEQ ID NO: 2788312 - RNA, 19 nt, Artificial Sequence
  Description of Artificial Sequence: Synthetic oligonucleotide
uccuuucuggcgggaggca

SEQ ID NO: 2788313 - RNA, 19 nt, Artificial Sequence
  Description of Artificial Sequence: Synthetic oligonucleotide
ggcagagcuucagucauga

SEQ ID NO: 2788314 - RNA, 19 nt, Artificial Sequence
  Description of Artificial Sequence: Synthetic oligonucleotide
cucccguucccagcucucc

SEQ ID NO: 2788315 - RNA, 19 nt, Artificial Sequence
  Description of Artificial Sequence: Synthetic oligonucleotide
gcagcgcgcgcuuguacag

SEQ ID NO: 2788316 - RNA, 19 nt, Artificial Sequence
  Description of Artificial Sequence: Synthetic oligonucleotide
ugacaccgucagagggugu

SEQ ID NO: 2788317 - RNA, 19 nt, Artificial Sequence
  Description of Artificial Sequence: Synthetic oligonucleotide
cgcacaacgccauggcgcc

SEQ ID NO: 2788318 - RNA, 19 nt, Artificial Sequence
  Description of Artificial Sequence: Synthetic oligonucleotide
cuuucucagaagggugcca

SEQ ID NO: 2788319 - RNA, 19 nt, Artificial Sequence
  Description of Artificial Sequence: Synthetic oligonucleotide
gccaguaaucuaagaacca

SEQ ID NO: 2788320 - RNA, 19 nt, Artificial Sequence
  Description of Artificial Sequence: Synthetic oligonucleotide
aucgggcucucagcaaaca

SEQ ID NO: 2788321 - RNA, 19 nt, Artificial Sequence
  Description of Artificial Sequence: Synthetic oligonucleotide
ccuguggauacaccacgac

SEQ ID NO: 2788322 - RNA, 19 nt, Artificial Sequence
  Description of Artificial Sequence: Synthetic oligonucleotide
cagguaggccccgggcgcg

SEQ ID NO: 2788323 - RNA, 19 nt, Artificial Sequence
  Description of Artificial Sequence: Synthetic oligonucleotide
gggagaguccgggaagaug

SEQ ID NO: 2788324 - RNA, 19 nt, Artificial Sequence
  Description of Artificial Sequence: Synthetic oligonucleotide
guacagccgcagcaccuuc

SEQ ID NO: 2788325 - RNA, 19 nt, Artificial Sequence
  Description of Artificial Sequence: Synthetic oligonucleotide
gccuucaucauguccuucu

SEQ ID NO: 2788326 - RNA, 19 nt, Artificial Sequence
  Description of Artificial Sequence: Synthetic oligonucleotide
uggcgcagcgcgcgcuugu

SEQ ID NO: 2788327 - RNA, 19 nt, Artificial Sequence
  Description of Artificial Sequence: Synthetic oligonucleotide
agguaggccccgggcgcgc

SEQ ID NO: 2788328 - RNA, 19 nt, Artificial Sequence
  Description of Artificial Sequence: Synthetic oligonucleotide
gcuggugcgucagguaggc

SEQ ID NO: 2788329 - RNA, 19 nt, Artificial Sequence
  Description of Artificial Sequence: Synthetic oligonucleotide
ggucacgauaugccaccac

SEQ ID NO: 2788330 - RNA, 19 nt, Artificial Sequence
  Description of Artificial Sequence: Synthetic oligonucleotide
gagguggcgcagcgcgcgc

SEQ ID NO: 2788331 - RNA, 19 nt, Artificial Sequence
  Description of Artificial Sequence: Synthetic oligonucleotide
gggcaagucaccuuccuuu

SEQ ID NO: 2788332 - RNA, 19 nt, Artificial Sequence
  Description of Artificial Sequence: Synthetic oligonucleotide
cagcucuccauccucaguu

SEQ ID NO: 2788333 - RNA, 19 nt, Artificial Sequence
  Description of Artificial Sequence: Synthetic oligonucleotide
cauggcgcccggaucaccu

SEQ ID NO: 2788334 - RNA, 19 nt, Artificial Sequence
  Description of Artificial Sequence: Synthetic oligonucleotide
ucccgaggucuggucacga

SEQ ID NO: 2788335 - RNA, 19 nt, Artificial Sequence
  Description of Artificial Sequence: Synthetic oligonucleotide
ccgggaagauguacggcug

SEQ ID NO: 2788336 - RNA, 19 nt, Artificial Sequence
  Description of Artificial Sequence: Synthetic oligonucleotide
cguucccagcucuccaucc

SEQ ID NO: 2788337 - RNA, 19 nt, Artificial Sequence
  Description of Artificial Sequence: Synthetic oligonucleotide
gcucuccauccucaguuuc

SEQ ID NO: 2788338 - RNA, 19 nt, Artificial Sequence
  Description of Artificial Sequence: Synthetic oligonucleotide
acgacucgagguggcgcag

SEQ ID NO: 2788339 - RNA, 19 nt, Artificial Sequence
  Description of Artificial Sequence: Synthetic oligonucleotide
acaccgucagagggugucu

SEQ ID NO: 2788340 - RNA, 19 nt, Artificial Sequence
  Description of Artificial Sequence: Synthetic oligonucleotide
cucagcaaacaagcaaagu

SEQ ID NO: 2788341 - RNA, 19 nt, Artificial Sequence
  Description of Artificial Sequence: Synthetic oligonucleotide
caagcaaaguaccgguauu

SEQ ID NO: 2788342 - RNA, 19 nt, Artificial Sequence
  Description of Artificial Sequence: Synthetic oligonucleotide
ggaugcugauuuugccaga

SEQ ID NO: 2788343 - RNA, 19 nt, Artificial Sequence
  Description of Artificial Sequence: Synthetic oligonucleotide
ccuucugcuggugcgucag

SEQ ID NO: 2788344 - RNA, 19 nt, Artificial Sequence
  Description of Artificial Sequence: Synthetic oligonucleotide
guguagccuucaucauguc

SEQ ID NO: 2788345 - RNA, 19 nt, Artificial Sequence
  Description of Artificial Sequence: Synthetic oligonucleotide
acggcugaggaugcugauu

SEQ ID NO: 2788346 - RNA, 19 nt, Artificial Sequence
  Description of Artificial Sequence: Synthetic oligonucleotide
ccuuucuggcgggaggcag

SEQ ID NO: 2788347 - RNA, 19 nt, Artificial Sequence
  Description of Artificial Sequence: Synthetic oligonucleotide
aggcagagcuucagucaug

SEQ ID NO: 2788348 - RNA, 19 nt, Artificial Sequence
  Description of Artificial Sequence: Synthetic oligonucleotide
caccgucagagggugucuc

SEQ ID NO: 2788349 - RNA, 19 nt, Artificial Sequence
  Description of Artificial Sequence: Synthetic oligonucleotide
gcgucagguaggccccggg

SEQ ID NO: 2788350 - RNA, 19 nt, Artificial Sequence
  Description of Artificial Sequence: Synthetic oligonucleotide
cagcgcgcgcuuguacagc

SEQ ID NO: 2788351 - RNA, 19 nt, Artificial Sequence
  Description of Artificial Sequence: Synthetic oligonucleotide
cagcagcuguguagccuuc

SEQ ID NO: 2788352 - RNA, 19 nt, Artificial Sequence
  Description of Artificial Sequence: Synthetic oligonucleotide
ccgcagcaccuucugcugg

SEQ ID NO: 2788353 - RNA, 19 nt, Artificial Sequence
  Description of Artificial Sequence: Synthetic oligonucleotide
cccgggagaguccgggaag

SEQ ID NO: 2788354 - RNA, 19 nt, Artificial Sequence
  Description of Artificial Sequence: Synthetic oligonucleotide
caccuucugcuggugcguc

SEQ ID NO: 2788355 - RNA, 19 nt, Artificial Sequence
  Description of Artificial Sequence: Synthetic oligonucleotide
gcgcgcacaacgccauggc

SEQ ID NO: 2788356 - RNA, 19 nt, Artificial Sequence
  Description of Artificial Sequence: Synthetic oligonucleotide
uaggccccgggcgcgcaca

SEQ ID NO: 2788357 - RNA, 19 nt, Artificial Sequence
  Description of Artificial Sequence: Synthetic oligonucleotide
auguacggcugaggaugcu

SEQ ID NO: 2788358 - RNA, 19 nt, Artificial Sequence
  Description of Artificial Sequence: Synthetic oligonucleotide
uucuggcgggaggcagagc

SEQ ID NO: 2788359 - RNA, 19 nt, Artificial Sequence
  Description of Artificial Sequence: Synthetic oligonucleotide
ggcucucagcaaacaagca

SEQ ID NO: 2788360 - RNA, 19 nt, Artificial Sequence
  Description of Artificial Sequence: Synthetic oligonucleotide
gggugccaguaaucuaaga

SEQ ID NO: 2788361 - RNA, 19 nt, Artificial Sequence
  Description of Artificial Sequence: Synthetic oligonucleotide
cgcgcacaacgccauggcg

SEQ ID NO: 2788362 - RNA, 19 nt, Artificial Sequence
  Description of Artificial Sequence: Synthetic oligonucleotide
gugcgucagguaggccccg

SEQ ID NO: 2788363 - RNA, 19 nt, Artificial Sequence
  Description of Artificial Sequence: Synthetic oligonucleotide
cugcucccucuuggaaaag

SEQ ID NO: 2788364 - RNA, 19 nt, Artificial Sequence
  Description of Artificial Sequence: Synthetic oligonucleotide
ccacgacucgagguggcgc

SEQ ID NO: 2788365 - RNA, 19 nt, Artificial Sequence
  Description of Artificial Sequence: Synthetic oligonucleotide
gagaguccgggaagaugua

SEQ ID NO: 2788366 - RNA, 19 nt, Artificial Sequence
  Description of Artificial Sequence: Synthetic oligonucleotide
cuggugcgucagguaggcc

SEQ ID NO: 2788367 - RNA, 19 nt, Artificial Sequence
  Description of Artificial Sequence: Synthetic oligonucleotide
auggcgcccggaucaccuu

SEQ ID NO: 2788368 - RNA, 19 nt, Artificial Sequence
  Description of Artificial Sequence: Synthetic oligonucleotide
gcuucagucaugacaccgu

SEQ ID NO: 2788369 - RNA, 19 nt, Artificial Sequence
  Description of Artificial Sequence: Synthetic oligonucleotide
cguaucucucauaggaggu

SEQ ID NO: 2788370 - RNA, 19 nt, Artificial Sequence
  Description of Artificial Sequence: Synthetic oligonucleotide
cccuguggauacaccacga

SEQ ID NO: 2788371 - RNA, 19 nt, Artificial Sequence
  Description of Artificial Sequence: Synthetic oligonucleotide
gcagagcuucagucaugac

SEQ ID NO: 2788372 - RNA, 19 nt, Artificial Sequence
  Description of Artificial Sequence: Synthetic oligonucleotide
gcagcagcuguguagccuu

SEQ ID NO: 2788373 - RNA, 19 nt, Artificial Sequence
  Description of Artificial Sequence: Synthetic oligonucleotide
cgcgcgcuuguacagccgc

SEQ ID NO: 2788374 - RNA, 19 nt, Artificial Sequence
  Description of Artificial Sequence: Synthetic oligonucleotide
cgcuuguacagccgcagca

SEQ ID NO: 2788375 - RNA, 19 nt, Artificial Sequence
  Description of Artificial Sequence: Synthetic oligonucleotide
ccggaaccuuguagcauuc

SEQ ID NO: 2788376 - RNA, 19 nt, Artificial Sequence
  Description of Artificial Sequence: Synthetic oligonucleotide
gcaagucaccuuccuuucu

SEQ ID NO: 2788377 - RNA, 19 nt, Artificial Sequence
  Description of Artificial Sequence: Synthetic oligonucleotide
gccuccugcagcagcugug

SEQ ID NO: 2788378 - RNA, 19 nt, Artificial Sequence
  Description of Artificial Sequence: Synthetic oligonucleotide
guaggccccgggcgcgcac

SEQ ID NO: 2788379 - RNA, 19 nt, Artificial Sequence
  Description of Artificial Sequence: Synthetic oligonucleotide
agguggcgcagcgcgcgcu

SEQ ID NO: 2788380 - RNA, 19 nt, Artificial Sequence
  Description of Artificial Sequence: Synthetic oligonucleotide
ggccguucccgaggucugg

SEQ ID NO: 2788381 - RNA, 19 nt, Artificial Sequence
  Description of Artificial Sequence: Synthetic oligonucleotide
cgagguggcgcagcgcgcg

SEQ ID NO: 2788382 - RNA, 19 nt, Artificial Sequence
  Description of Artificial Sequence: Synthetic oligonucleotide
ccaguaaucuaagaaccau

SEQ ID NO: 2788383 - RNA, 19 nt, Artificial Sequence
  Description of Artificial Sequence: Synthetic oligonucleotide
gcucccucuuggaaaagua

SEQ ID NO: 2788384 - RNA, 19 nt, Artificial Sequence
  Description of Artificial Sequence: Synthetic oligonucleotide
gcuuaaccucccguuccca

SEQ ID NO: 2788385 - RNA, 19 nt, Artificial Sequence
  Description of Artificial Sequence: Synthetic oligonucleotide
cagcugcuuaaccucccgu

SEQ ID NO: 2788386 - RNA, 19 nt, Artificial Sequence
  Description of Artificial Sequence: Synthetic oligonucleotide
gcuguguagccuucaucau

SEQ ID NO: 2788387 - RNA, 19 nt, Artificial Sequence
  Description of Artificial Sequence: Synthetic oligonucleotide
cguucccgaggucugguca

SEQ ID NO: 2788388 - RNA, 19 nt, Artificial Sequence
  Description of Artificial Sequence: Synthetic oligonucleotide
cccgggcgcgcacaacgcc

SEQ ID NO: 2788389 - RNA, 19 nt, Artificial Sequence
  Description of Artificial Sequence: Synthetic oligonucleotide
cggaaccuuguagcauucg

SEQ ID NO: 2788390 - RNA, 19 nt, Artificial Sequence
  Description of Artificial Sequence: Synthetic oligonucleotide
ccguucccagcucuccauc

SEQ ID NO: 2788391 - RNA, 19 nt, Artificial Sequence
  Description of Artificial Sequence: Synthetic oligonucleotide
cgcgcuuguacagccgcag

SEQ ID NO: 2788392 - RNA, 19 nt, Artificial Sequence
  Description of Artificial Sequence: Synthetic oligonucleotide
cgccauggcgcccggauca

SEQ ID NO: 2788393 - RNA, 19 nt, Artificial Sequence
  Description of Artificial Sequence: Synthetic oligonucleotide
gcucuucaaaucgggcucu

SEQ ID NO: 2788394 - RNA, 19 nt, Artificial Sequence
  Description of Artificial Sequence: Synthetic oligonucleotide
cgaggucuggucacgauau

SEQ ID NO: 2788395 - RNA, 19 nt, Artificial Sequence
  Description of Artificial Sequence: Synthetic oligonucleotide
ccgaggucuggucacgaua

SEQ ID NO: 2788396 - RNA, 19 nt, Artificial Sequence
  Description of Artificial Sequence: Synthetic oligonucleotide
cgucagagggugucuccuc

SEQ ID NO: 2788397 - RNA, 19 nt, Artificial Sequence
  Description of Artificial Sequence: Synthetic oligonucleotide
ccccgggcgcgcacaacgc

SEQ ID NO: 2788398 - RNA, 19 nt, Artificial Sequence
  Description of Artificial Sequence: Synthetic oligonucleotide
gggccguucccgaggucug

SEQ ID NO: 2788399 - RNA, 19 nt, Artificial Sequence
  Description of Artificial Sequence: Synthetic oligonucleotide
cgcagcgcgcgcuuguaca

SEQ ID NO: 2788400 - RNA, 19 nt, Artificial Sequence
  Description of Artificial Sequence: Synthetic oligonucleotide
ccucccguucccagcucuc

SEQ ID NO: 2788401 - RNA, 19 nt, Artificial Sequence
  Description of Artificial Sequence: Synthetic oligonucleotide
ccgggcgcgcacaacgcca

SEQ ID NO: 2788402 - RNA, 19 nt, Artificial Sequence
  Description of Artificial Sequence: Synthetic oligonucleotide
gcgcagcgcgcgcuuguac

SEQ ID NO: 2788403 - RNA, 19 nt, Artificial Sequence
  Description of Artificial Sequence: Synthetic oligonucleotide
aggccccgggcgcgcacaa

SEQ ID NO: 2788404 - RNA, 19 nt, Artificial Sequence
  Description of Artificial Sequence: Synthetic oligonucleotide
ccguucccgaggucugguc

SEQ ID NO: 2788405 - RNA, 19 nt, Artificial Sequence
  Description of Artificial Sequence: Synthetic oligonucleotide
ggcgcccggaucaccuuca

SEQ ID NO: 2788406 - RNA, 19 nt, Artificial Sequence
  Description of Artificial Sequence: Synthetic oligonucleotide
gcagcuguguagccuucau

SEQ ID NO: 2788407 - RNA, 19 nt, Artificial Sequence
  Description of Artificial Sequence: Synthetic oligonucleotide
ccacugcucccucuuggaa

SEQ ID NO: 2788408 - RNA, 19 nt, Artificial Sequence
  Description of Artificial Sequence: Synthetic oligonucleotide
ggggcaagucaccuuccuu

SEQ ID NO: 2788409 - RNA, 19 nt, Artificial Sequence
  Description of Artificial Sequence: Synthetic oligonucleotide
gcgcgcgcuuguacagccg

SEQ ID NO: 2788410 - RNA, 19 nt, Artificial Sequence
  Description of Artificial Sequence: Synthetic oligonucleotide
gcacaacgccauggcgccc

SEQ ID NO: 2788411 - RNA, 19 nt, Artificial Sequence
  Description of Artificial Sequence: Synthetic oligonucleotide
ccgggagaguccgggaaga

SEQ ID NO: 2788412 - RNA, 19 nt, Artificial Sequence
  Description of Artificial Sequence: Synthetic oligonucleotide
gggcgcgcacaacgccaug

SEQ ID NO: 2788413 - RNA, 19 nt, Artificial Sequence
  Description of Artificial Sequence: Synthetic oligonucleotide
ggcgggaggcagagcuuca

SEQ ID NO: 2788414 - RNA, 19 nt, Artificial Sequence
  Description of Artificial Sequence: Synthetic oligonucleotide
cggcugaggaugcugauuu

SEQ ID NO: 2788415 - RNA, 19 nt, Artificial Sequence
  Description of Artificial Sequence: Synthetic oligonucleotide
gcaccuucugcuggugcgu

SEQ ID NO: 2788416 - RNA, 19 nt, Artificial Sequence
  Description of Artificial Sequence: Synthetic oligonucleotide
cgacucgagguggcgcagc

SEQ ID NO: 2788417 - RNA, 19 nt, Artificial Sequence
  Description of Artificial Sequence: Synthetic oligonucleotide
ccccgggagaguccgggaa

SEQ ID NO: 2788418 - RNA, 19 nt, Artificial Sequence
  Description of Artificial Sequence: Synthetic oligonucleotide
cuggcgggaggcagagcuu

SEQ ID NO: 2788419 - RNA, 19 nt, Artificial Sequence
  Description of Artificial Sequence: Synthetic oligonucleotide
ggcugaggaugcugauuuu

SEQ ID NO: 2788420 - RNA, 19 nt, Artificial Sequence
  Description of Artificial Sequence: Synthetic oligonucleotide
caacgccauggcgcccgga

SEQ ID NO: 2788421 - RNA, 19 nt, Artificial Sequence
  Description of Artificial Sequence: Synthetic oligonucleotide
gguaggccccgggcgcgca

SEQ ID NO: 2788422 - RNA, 19 nt, Artificial Sequence
  Description of Artificial Sequence: Synthetic oligonucleotide
gcgcgcuuguacagccgca

SEQ ID NO: 2788423 - RNA, 19 nt, Artificial Sequence
  Description of Artificial Sequence: Synthetic oligonucleotide
ccgucagagggugucuccu

SEQ ID NO: 2788424 - RNA, 19 nt, Artificial Sequence
  Description of Artificial Sequence: Synthetic oligonucleotide
gguggcgcagcgcgcgcuu

SEQ ID NO: 2788425 - RNA, 19 nt, Artificial Sequence
  Description of Artificial Sequence: Synthetic oligonucleotide
cccguucccagcucuccau

SEQ ID NO: 2788426 - RNA, 19 nt, Artificial Sequence
  Description of Artificial Sequence: Synthetic oligonucleotide
gccguucccgaggucuggu

SEQ ID NO: 2788427 - RNA, 19 nt, Artificial Sequence
  Description of Artificial Sequence: Synthetic oligonucleotide
ggcgcagcgcgcgcuugua

SEQ ID NO: 2788428 - RNA, 19 nt, Artificial Sequence
  Description of Artificial Sequence: Synthetic oligonucleotide
cgggaggcagagcuucagu

SEQ ID NO: 2788429 - RNA, 19 nt, Artificial Sequence
  Description of Artificial Sequence: Synthetic oligonucleotide
cccgaggucuggucacgau

SEQ ID NO: 2788430 - RNA, 19 nt, Artificial Sequence
  Description of Artificial Sequence: Synthetic oligonucleotide
cgggcgcgcacaacgccau

SEQ ID NO: 2788431 - RNA, 19 nt, Artificial Sequence
  Description of Artificial Sequence: Synthetic oligonucleotide
cgggagaguccgggaagau

SEQ ID NO: 2788432 - RNA, 19 nt, Artificial Sequence
  Description of Artificial Sequence: Synthetic oligonucleotide
aagauauucugucggaacg

SEQ ID NO: 2788433 - RNA, 19 nt, Artificial Sequence
  Description of Artificial Sequence: Synthetic oligonucleotide
aaagauauucugucggaac

SEQ ID NO: 2788434 - RNA, 19 nt, Artificial Sequence
  Description of Artificial Sequence: Synthetic oligonucleotide
ucuaggaagguccugaggc

SEQ ID NO: 2788435 - RNA, 19 nt, Artificial Sequence
  Description of Artificial Sequence: Synthetic oligonucleotide
uggaaagauauucugucgg

SEQ ID NO: 2788436 - RNA, 19 nt, Artificial Sequence
  Description of Artificial Sequence: Synthetic oligonucleotide
cugacacagacauagaagg

SEQ ID NO: 2788437 - RNA, 19 nt, Artificial Sequence
  Description of Artificial Sequence: Synthetic oligonucleotide
uuuuaaacugucuuccgag

SEQ ID NO: 2788438 - RNA, 19 nt, Artificial Sequence
  Description of Artificial Sequence: Synthetic oligonucleotide
aagcagucuguucacaugg

SEQ ID NO: 2788439 - RNA, 19 nt, Artificial Sequence
  Description of Artificial Sequence: Synthetic oligonucleotide
gaugaauucgccucuuggg

SEQ ID NO: 2788440 - RNA, 19 nt, Artificial Sequence
  Description of Artificial Sequence: Synthetic oligonucleotide
uauucugucggaacgcacg

SEQ ID NO: 2788441 - RNA, 19 nt, Artificial Sequence
  Description of Artificial Sequence: Synthetic oligonucleotide
ucugacacagacauagaag

SEQ ID NO: 2788442 - RNA, 19 nt, Artificial Sequence
  Description of Artificial Sequence: Synthetic oligonucleotide
ucaaaucgcacccggaaag

SEQ ID NO: 2788443 - RNA, 19 nt, Artificial Sequence
  Description of Artificial Sequence: Synthetic oligonucleotide
agaaaaguagaucuguggu

SEQ ID NO: 2788444 - RNA, 19 nt, Artificial Sequence
  Description of Artificial Sequence: Synthetic oligonucleotide
agucuguucacauggaaag

SEQ ID NO: 2788445 - RNA, 19 nt, Artificial Sequence
  Description of Artificial Sequence: Synthetic oligonucleotide
agacucuccagccaucucc

SEQ ID NO: 2788446 - RNA, 19 nt, Artificial Sequence
  Description of Artificial Sequence: Synthetic oligonucleotide
ugaugaauucgccucuugg

SEQ ID NO: 2788447 - RNA, 19 nt, Artificial Sequence
  Description of Artificial Sequence: Synthetic oligonucleotide
uuaggggugucuaggaagg

SEQ ID NO: 2788448 - RNA, 19 nt, Artificial Sequence
  Description of Artificial Sequence: Synthetic oligonucleotide
agaucugugguuccugagc

SEQ ID NO: 2788449 - RNA, 19 nt, Artificial Sequence
  Description of Artificial Sequence: Synthetic oligonucleotide
  modified_base (14)..(14): a, c, u, g, unknown or other
caucauacugggcngaaag

SEQ ID NO: 2788450 - RNA, 19 nt, Artificial Sequence
  Description of Artificial Sequence: Synthetic oligonucleotide
agaaugaggagccggcuac

SEQ ID NO: 2788451 - RNA, 19 nt, Artificial Sequence
  Description of Artificial Sequence: Synthetic oligonucleotide
aauagcggagggcuguguc

SEQ ID NO: 2788452 - RNA, 19 nt, Artificial Sequence
  Description of Artificial Sequence: Synthetic oligonucleotide
cagaaaaguagaucugugg

SEQ ID NO: 2788453 - RNA, 19 nt, Artificial Sequence
  Description of Artificial Sequence: Synthetic oligonucleotide
uaaacugucuuccgagugc

SEQ ID NO: 2788454 - RNA, 19 nt, Artificial Sequence
  Description of Artificial Sequence: Synthetic oligonucleotide
aguuccagaaugaggagcc

SEQ ID NO: 2788455 - RNA, 19 nt, Artificial Sequence
  Description of Artificial Sequence: Synthetic oligonucleotide
auggaaagauauucugucg

SEQ ID NO: 2788456 - RNA, 19 nt, Artificial Sequence
  Description of Artificial Sequence: Synthetic oligonucleotide
ugaggagccggcuacagug

SEQ ID NO: 2788457 - RNA, 19 nt, Artificial Sequence
  Description of Artificial Sequence: Synthetic oligonucleotide
ucgucuucaaaucgcaccc

SEQ ID NO: 2788458 - RNA, 19 nt, Artificial Sequence
  Description of Artificial Sequence: Synthetic oligonucleotide
cauggaaagauauucuguc

SEQ ID NO: 2788459 - RNA, 19 nt, Artificial Sequence
  Description of Artificial Sequence: Synthetic oligonucleotide
ucagaaaaguagaucugug

SEQ ID NO: 2788460 - RNA, 19 nt, Artificial Sequence
  Description of Artificial Sequence: Synthetic oligonucleotide
uguucacauggaaagauau

SEQ ID NO: 2788461 - RNA, 19 nt, Artificial Sequence
  Description of Artificial Sequence: Synthetic oligonucleotide
ugaauucgccucuugggag

SEQ ID NO: 2788462 - RNA, 19 nt, Artificial Sequence
  Description of Artificial Sequence: Synthetic oligonucleotide
guggaugaaggguaggcgg

SEQ ID NO: 2788463 - RNA, 19 nt, Artificial Sequence
  Description of Artificial Sequence: Synthetic oligonucleotide
guuaggggugucuaggaag

SEQ ID NO: 2788464 - RNA, 19 nt, Artificial Sequence
  Description of Artificial Sequence: Synthetic oligonucleotide
aaacugucuuccgagugcg

SEQ ID NO: 2788465 - RNA, 19 nt, Artificial Sequence
  Description of Artificial Sequence: Synthetic oligonucleotide
agauauucugucggaacgc

SEQ ID NO: 2788466 - RNA, 19 nt, Artificial Sequence
  Description of Artificial Sequence: Synthetic oligonucleotide
  modified_base (12)..(12): a, c, u, g, unknown or other
ucauacugggcngaaagug

SEQ ID NO: 2788467 - RNA, 19 nt, Artificial Sequence
  Description of Artificial Sequence: Synthetic oligonucleotide
cucgucuucaaaucgcacc

SEQ ID NO: 2788468 - RNA, 19 nt, Artificial Sequence
  Description of Artificial Sequence: Synthetic oligonucleotide
auagcggagggcugugucc

SEQ ID NO: 2788469 - RNA, 19 nt, Artificial Sequence
  Description of Artificial Sequence: Synthetic oligonucleotide
cuggcugugaugaauucgc

SEQ ID NO: 2788470 - RNA, 19 nt, Artificial Sequence
  Description of Artificial Sequence: Synthetic oligonucleotide
agggcguuggccuuucugg

SEQ ID NO: 2788471 - RNA, 19 nt, Artificial Sequence
  Description of Artificial Sequence: Synthetic oligonucleotide
acccggaaaggacaauugc

SEQ ID NO: 2788472 - RNA, 19 nt, Artificial Sequence
  Description of Artificial Sequence: Synthetic oligonucleotide
aggcaaagcagucuguuca

SEQ ID NO: 2788473 - RNA, 19 nt, Artificial Sequence
  Description of Artificial Sequence: Synthetic oligonucleotide
uuuaaacugucuuccgagu

SEQ ID NO: 2788474 - RNA, 19 nt, Artificial Sequence
  Description of Artificial Sequence: Synthetic oligonucleotide
cacauggaaagauauucug

SEQ ID NO: 2788475 - RNA, 19 nt, Artificial Sequence
  Description of Artificial Sequence: Synthetic oligonucleotide
acaauugcgucugcgaguc

SEQ ID NO: 2788476 - RNA, 19 nt, Artificial Sequence
  Description of Artificial Sequence: Synthetic oligonucleotide
uguggaugaaggguaggcg

SEQ ID NO: 2788477 - RNA, 19 nt, Artificial Sequence
  Description of Artificial Sequence: Synthetic oligonucleotide
augaauucgccucuuggga

SEQ ID NO: 2788478 - RNA, 19 nt, Artificial Sequence
  Description of Artificial Sequence: Synthetic oligonucleotide
uguucccugcuccacacug

SEQ ID NO: 2788479 - RNA, 19 nt, Artificial Sequence
  Description of Artificial Sequence: Synthetic oligonucleotide
aaaguguucccugcuccac

SEQ ID NO: 2788480 - RNA, 19 nt, Artificial Sequence
  Description of Artificial Sequence: Synthetic oligonucleotide
  modified_base (8)..(8): a, c, u, g, unknown or other
acugggcngaaaguguucc

SEQ ID NO: 2788481 - RNA, 19 nt, Artificial Sequence
  Description of Artificial Sequence: Synthetic oligonucleotide
ugacacagacauagaaggc

SEQ ID NO: 2788482 - RNA, 19 nt, Artificial Sequence
  Description of Artificial Sequence: Synthetic oligonucleotide
aaaggacaauugcgucugc

SEQ ID NO: 2788483 - RNA, 19 nt, Artificial Sequence
  Description of Artificial Sequence: Synthetic oligonucleotide
ucuggcugugaugaauucg

SEQ ID NO: 2788484 - RNA, 19 nt, Artificial Sequence
  Description of Artificial Sequence: Synthetic oligonucleotide
aauucgccucuugggagcc

SEQ ID NO: 2788485 - RNA, 19 nt, Artificial Sequence
  Description of Artificial Sequence: Synthetic oligonucleotide
ucugucggaacgcacggcu

SEQ ID NO: 2788486 - RNA, 19 nt, Artificial Sequence
  Description of Artificial Sequence: Synthetic oligonucleotide
acuguuaggggugucuagg

SEQ ID NO: 2788487 - RNA, 19 nt, Artificial Sequence
  Description of Artificial Sequence: Synthetic oligonucleotide
aguguucccugcuccacac

SEQ ID NO: 2788488 - RNA, 19 nt, Artificial Sequence
  Description of Artificial Sequence: Synthetic oligonucleotide
uccagaaugaggagccggc

SEQ ID NO: 2788489 - RNA, 19 nt, Artificial Sequence
  Description of Artificial Sequence: Synthetic oligonucleotide
aaucgcacccggaaaggac

SEQ ID NO: 2788490 - RNA, 19 nt, Artificial Sequence
  Description of Artificial Sequence: Synthetic oligonucleotide
aaggacaauugcgucugcg

SEQ ID NO: 2788491 - RNA, 19 nt, Artificial Sequence
  Description of Artificial Sequence: Synthetic oligonucleotide
ugucuuccgagugcgacgg

SEQ ID NO: 2788492 - RNA, 19 nt, Artificial Sequence
  Description of Artificial Sequence: Synthetic oligonucleotide
aauugcgucugcgaguccu

SEQ ID NO: 2788493 - RNA, 19 nt, Artificial Sequence
  Description of Artificial Sequence: Synthetic oligonucleotide
gaauucgccucuugggagc

SEQ ID NO: 2788494 - RNA, 19 nt, Artificial Sequence
  Description of Artificial Sequence: Synthetic oligonucleotide
ucugugguuccugagcugc

SEQ ID NO: 2788495 - RNA, 19 nt, Artificial Sequence
  Description of Artificial Sequence: Synthetic oligonucleotide
uucaaaucgcacccggaaa

SEQ ID NO: 2788496 - RNA, 19 nt, Artificial Sequence
  Description of Artificial Sequence: Synthetic oligonucleotide
ucaagccuucucuggagag

SEQ ID NO: 2788497 - RNA, 19 nt, Artificial Sequence
  Description of Artificial Sequence: Synthetic oligonucleotide
uuccugagcugccacucgg

SEQ ID NO: 2788498 - RNA, 19 nt, Artificial Sequence
  Description of Artificial Sequence: Synthetic oligonucleotide
uguuggcauccucagaaaa

SEQ ID NO: 2788499 - RNA, 19 nt, Artificial Sequence
  Description of Artificial Sequence: Synthetic oligonucleotide
caagcacccgcucugacac

SEQ ID NO: 2788500 - RNA, 19 nt, Artificial Sequence
  Description of Artificial Sequence: Synthetic oligonucleotide
augaaggguaggcggcugc

SEQ ID NO: 2788501 - RNA, 19 nt, Artificial Sequence
  Description of Artificial Sequence: Synthetic oligonucleotide
ugucuugggcccugggacg

SEQ ID NO: 2788502 - RNA, 19 nt, Artificial Sequence
  Description of Artificial Sequence: Synthetic oligonucleotide
agggucucgucuucaaauc

SEQ ID NO: 2788503 - RNA, 19 nt, Artificial Sequence
  Description of Artificial Sequence: Synthetic oligonucleotide
aaggguaggcggcugcuca

SEQ ID NO: 2788504 - RNA, 19 nt, Artificial Sequence
  Description of Artificial Sequence: Synthetic oligonucleotide
cauagaaggcaaagcaguc

SEQ ID NO: 2788505 - RNA, 19 nt, Artificial Sequence
  Description of Artificial Sequence: Synthetic oligonucleotide
ucugggcagacucuccagc

SEQ ID NO: 2788506 - RNA, 19 nt, Artificial Sequence
  Description of Artificial Sequence: Synthetic oligonucleotide
gucuucaaaucgcacccgg

SEQ ID NO: 2788507 - RNA, 19 nt, Artificial Sequence
  Description of Artificial Sequence: Synthetic oligonucleotide
ucuguucacauggaaagau

SEQ ID NO: 2788508 - RNA, 19 nt, Artificial Sequence
  Description of Artificial Sequence: Synthetic oligonucleotide
acugucuuccgagugcgac

SEQ ID NO: 2788509 - RNA, 19 nt, Artificial Sequence
  Description of Artificial Sequence: Synthetic oligonucleotide
ugucggaacgcacggcugc

SEQ ID NO: 2788510 - RNA, 19 nt, Artificial Sequence
  Description of Artificial Sequence: Synthetic oligonucleotide
ucuucaaaucgcacccgga

SEQ ID NO: 2788511 - RNA, 19 nt, Artificial Sequence
  Description of Artificial Sequence: Synthetic oligonucleotide
uccucaagccuucucugga

SEQ ID NO: 2788512 - RNA, 19 nt, Artificial Sequence
  Description of Artificial Sequence: Synthetic oligonucleotide
guuggcauccucagaaaag

SEQ ID NO: 2788513 - RNA, 19 nt, Artificial Sequence
  Description of Artificial Sequence: Synthetic oligonucleotide
uauggcgguggcccugugg

SEQ ID NO: 2788514 - RNA, 19 nt, Artificial Sequence
  Description of Artificial Sequence: Synthetic oligonucleotide
aaugaggagccggcuacag

SEQ ID NO: 2788515 - RNA, 19 nt, Artificial Sequence
  Description of Artificial Sequence: Synthetic oligonucleotide
auccucagaaaaguagauc

SEQ ID NO: 2788516 - RNA, 19 nt, Artificial Sequence
  Description of Artificial Sequence: Synthetic oligonucleotide
aaguguucccugcuccaca

SEQ ID NO: 2788517 - RNA, 19 nt, Artificial Sequence
  Description of Artificial Sequence: Synthetic oligonucleotide
aggacaauugcgucugcga

SEQ ID NO: 2788518 - RNA, 19 nt, Artificial Sequence
  Description of Artificial Sequence: Synthetic oligonucleotide
uagaucugugguuccugag

SEQ ID NO: 2788519 - RNA, 19 nt, Artificial Sequence
  Description of Artificial Sequence: Synthetic oligonucleotide
ugucuaggaagguccugag

SEQ ID NO: 2788520 - RNA, 19 nt, Artificial Sequence
  Description of Artificial Sequence: Synthetic oligonucleotide
ugcgcucccaauagcggag

SEQ ID NO: 2788521 - RNA, 19 nt, Artificial Sequence
  Description of Artificial Sequence: Synthetic oligonucleotide
uguuaggggugucuaggaa

SEQ ID NO: 2788522 - RNA, 19 nt, Artificial Sequence
  Description of Artificial Sequence: Synthetic oligonucleotide
gugucuugggcccugggac

SEQ ID NO: 2788523 - RNA, 19 nt, Artificial Sequence
  Description of Artificial Sequence: Synthetic oligonucleotide
uuccgagugcgacgguugg

SEQ ID NO: 2788524 - RNA, 19 nt, Artificial Sequence
  Description of Artificial Sequence: Synthetic oligonucleotide
ggacaauugcgucugcgag

SEQ ID NO: 2788525 - RNA, 19 nt, Artificial Sequence
  Description of Artificial Sequence: Synthetic oligonucleotide
cugucuuccgagugcgacg

SEQ ID NO: 2788526 - RNA, 19 nt, Artificial Sequence
  Description of Artificial Sequence: Synthetic oligonucleotide
gaaaguguucccugcucca

SEQ ID NO: 2788527 - RNA, 19 nt, Artificial Sequence
  Description of Artificial Sequence: Synthetic oligonucleotide
uccugagcugccacucggg

SEQ ID NO: 2788528 - RNA, 19 nt, Artificial Sequence
  Description of Artificial Sequence: Synthetic oligonucleotide
ggcuacagugucuugggcc

SEQ ID NO: 2788529 - RNA, 19 nt, Artificial Sequence
  Description of Artificial Sequence: Synthetic oligonucleotide
ggucccacaggucugggag

SEQ ID NO: 2788530 - RNA, 19 nt, Artificial Sequence
  Description of Artificial Sequence: Synthetic oligonucleotide
ucauguuggcauccucaga

SEQ ID NO: 2788531 - RNA, 19 nt, Artificial Sequence
  Description of Artificial Sequence: Synthetic oligonucleotide
agugucuugggcccuggga

SEQ ID NO: 2788532 - RNA, 19 nt, Artificial Sequence
  Description of Artificial Sequence: Synthetic oligonucleotide
gcuacagugucuugggccc

SEQ ID NO: 2788533 - RNA, 19 nt, Artificial Sequence
  Description of Artificial Sequence: Synthetic oligonucleotide
aaaucgcacccggaaagga

SEQ ID NO: 2788534 - RNA, 19 nt, Artificial Sequence
  Description of Artificial Sequence: Synthetic oligonucleotide
auggcgguggcccugugga

SEQ ID NO: 2788535 - RNA, 19 nt, Artificial Sequence
  Description of Artificial Sequence: Synthetic oligonucleotide
guccucaagccuucucugg

SEQ ID NO: 2788536 - RNA, 19 nt, Artificial Sequence
  Description of Artificial Sequence: Synthetic oligonucleotide
gcugugaugaauucgccuc

SEQ ID NO: 2788537 - RNA, 19 nt, Artificial Sequence
  Description of Artificial Sequence: Synthetic oligonucleotide
gaaagauauucugucggaa

SEQ ID NO: 2788538 - RNA, 19 nt, Artificial Sequence
  Description of Artificial Sequence: Synthetic oligonucleotide
caaaucgcacccggaaagg

SEQ ID NO: 2788539 - RNA, 19 nt, Artificial Sequence
  Description of Artificial Sequence: Synthetic oligonucleotide
cugggcagacucuccagcc

SEQ ID NO: 2788540 - RNA, 19 nt, Artificial Sequence
  Description of Artificial Sequence: Synthetic oligonucleotide
gauauucugucggaacgca

SEQ ID NO: 2788541 - RNA, 19 nt, Artificial Sequence
  Description of Artificial Sequence: Synthetic oligonucleotide
auauucugucggaacgcac

SEQ ID NO: 2788542 - RNA, 19 nt, Artificial Sequence
  Description of Artificial Sequence: Synthetic oligonucleotide
gaaaaguagaucugugguu

SEQ ID NO: 2788543 - RNA, 19 nt, Artificial Sequence
  Description of Artificial Sequence: Synthetic oligonucleotide
agguccugaggccuccccg

SEQ ID NO: 2788544 - RNA, 19 nt, Artificial Sequence
  Description of Artificial Sequence: Synthetic oligonucleotide
cuccccguggccuuauggc

SEQ ID NO: 2788545 - RNA, 19 nt, Artificial Sequence
  Description of Artificial Sequence: Synthetic oligonucleotide
  modified_base (6)..(6): a, c, u, g, unknown or other
ugggcngaaaguguucccu

SEQ ID NO: 2788546 - RNA, 19 nt, Artificial Sequence
  Description of Artificial Sequence: Synthetic oligonucleotide
ucucgucuucaaaucgcac

SEQ ID NO: 2788547 - RNA, 19 nt, Artificial Sequence
  Description of Artificial Sequence: Synthetic oligonucleotide
ggcauccucagaaaaguag

SEQ ID NO: 2788548 - RNA, 19 nt, Artificial Sequence
  Description of Artificial Sequence: Synthetic oligonucleotide
gggucucgucuucaaaucg

SEQ ID NO: 2788549 - RNA, 19 nt, Artificial Sequence
  Description of Artificial Sequence: Synthetic oligonucleotide
aaguagaucugugguuccu

SEQ ID NO: 2788550 - RNA, 19 nt, Artificial Sequence
  Description of Artificial Sequence: Synthetic oligonucleotide
gucugcgaguccucaagcc

SEQ ID NO: 2788551 - RNA, 19 nt, Artificial Sequence
  Description of Artificial Sequence: Synthetic oligonucleotide
  modified_base (7)..(7): a, c, u, g, unknown or other
cugggcngaaaguguuccc

SEQ ID NO: 2788552 - RNA, 19 nt, Artificial Sequence
  Description of Artificial Sequence: Synthetic oligonucleotide
cagccaucucccaacacuc

SEQ ID NO: 2788553 - RNA, 19 nt, Artificial Sequence
  Description of Artificial Sequence: Synthetic oligonucleotide
gaacgcacggcugcgcucc

SEQ ID NO: 2788554 - RNA, 19 nt, Artificial Sequence
  Description of Artificial Sequence: Synthetic oligonucleotide
gagugcgacgguugguccc

SEQ ID NO: 2788555 - RNA, 19 nt, Artificial Sequence
  Description of Artificial Sequence: Synthetic oligonucleotide
  modified_base (18)..(18): a, c, u, g, unknown or other
gcaucaucauacugggcng

SEQ ID NO: 2788556 - RNA, 19 nt, Artificial Sequence
  Description of Artificial Sequence: Synthetic oligonucleotide
cccaacacucccaagcacc

SEQ ID NO: 2788557 - RNA, 19 nt, Artificial Sequence
  Description of Artificial Sequence: Synthetic oligonucleotide
cuuccgagugcgacgguug

SEQ ID NO: 2788558 - RNA, 19 nt, Artificial Sequence
  Description of Artificial Sequence: Synthetic oligonucleotide
cuucaaaucgcacccggaa

SEQ ID NO: 2788559 - RNA, 19 nt, Artificial Sequence
  Description of Artificial Sequence: Synthetic oligonucleotide
aguagaucugugguuccug

SEQ ID NO: 2788560 - RNA, 19 nt, Artificial Sequence
  Description of Artificial Sequence: Synthetic oligonucleotide
uucgccucuugggagcccg

SEQ ID NO: 2788561 - RNA, 19 nt, Artificial Sequence
  Description of Artificial Sequence: Synthetic oligonucleotide
gacgguuggucccacaggu

SEQ ID NO: 2788562 - RNA, 19 nt, Artificial Sequence
  Description of Artificial Sequence: Synthetic oligonucleotide
caagccuucucuggagagg

SEQ ID NO: 2788563 - RNA, 19 nt, Artificial Sequence
  Description of Artificial Sequence: Synthetic oligonucleotide
ugggcagacucuccagcca

SEQ ID NO: 2788564 - RNA, 19 nt, Artificial Sequence
  Description of Artificial Sequence: Synthetic oligonucleotide
ucccaacacucccaagcac

SEQ ID NO: 2788565 - RNA, 19 nt, Artificial Sequence
  Description of Artificial Sequence: Synthetic oligonucleotide
  modified_base (4)..(4): a, c, u, g, unknown or other
ggcngaaaguguucccugc

SEQ ID NO: 2788566 - RNA, 19 nt, Artificial Sequence
  Description of Artificial Sequence: Synthetic oligonucleotide
gacgcagggcucugggcag

SEQ ID NO: 2788567 - RNA, 19 nt, Artificial Sequence
  Description of Artificial Sequence: Synthetic oligonucleotide
  modified_base (2)..(2): a, c, u, g, unknown or other
cngaaaguguucccugcuc

SEQ ID NO: 2788568 - RNA, 19 nt, Artificial Sequence
  Description of Artificial Sequence: Synthetic oligonucleotide
ggaaagauauucugucgga

SEQ ID NO: 2788569 - RNA, 19 nt, Artificial Sequence
  Description of Artificial Sequence: Synthetic oligonucleotide
acucccaagcacccgcucu

SEQ ID NO: 2788570 - RNA, 19 nt, Artificial Sequence
  Description of Artificial Sequence: Synthetic oligonucleotide
aggggugucuaggaagguc

SEQ ID NO: 2788571 - RNA, 19 nt, Artificial Sequence
  Description of Artificial Sequence: Synthetic oligonucleotide
guagaucugugguuccuga

SEQ ID NO: 2788572 - RNA, 19 nt, Artificial Sequence
  Description of Artificial Sequence: Synthetic oligonucleotide
gagggcguuggccuuucug

SEQ ID NO: 2788573 - RNA, 19 nt, Artificial Sequence
  Description of Artificial Sequence: Synthetic oligonucleotide
  modified_base (9)..(9): a, c, u, g, unknown or other
uacugggcngaaaguguuc

SEQ ID NO: 2788574 - RNA, 19 nt, Artificial Sequence
  Description of Artificial Sequence: Synthetic oligonucleotide
cacccggaaaggacaauug

SEQ ID NO: 2788575 - RNA, 19 nt, Artificial Sequence
  Description of Artificial Sequence: Synthetic oligonucleotide
cacuguuaggggugucuag

SEQ ID NO: 2788576 - RNA, 19 nt, Artificial Sequence
  Description of Artificial Sequence: Synthetic oligonucleotide
gacaauugcgucugcgagu

SEQ ID NO: 2788577 - RNA, 19 nt, Artificial Sequence
  Description of Artificial Sequence: Synthetic oligonucleotide
guuggucccacaggucugg

SEQ ID NO: 2788578 - RNA, 19 nt, Artificial Sequence
  Description of Artificial Sequence: Synthetic oligonucleotide
aggagccggcuacaguguc

SEQ ID NO: 2788579 - RNA, 19 nt, Artificial Sequence
  Description of Artificial Sequence: Synthetic oligonucleotide
cagucuguucacauggaaa

SEQ ID NO: 2788580 - RNA, 19 nt, Artificial Sequence
  Description of Artificial Sequence: Synthetic oligonucleotide
  modified_base (13)..(13): a, c, u, g, unknown or other
aucauacugggcngaaagu

SEQ ID NO: 2788581 - RNA, 19 nt, Artificial Sequence
  Description of Artificial Sequence: Synthetic oligonucleotide
cuugggagcccgcgguagg

SEQ ID NO: 2788582 - RNA, 19 nt, Artificial Sequence
  Description of Artificial Sequence: Synthetic oligonucleotide
guggcccuguggaugaagg

SEQ ID NO: 2788583 - RNA, 19 nt, Artificial Sequence
  Description of Artificial Sequence: Synthetic oligonucleotide
  modified_base (11)..(11): a, c, u, g, unknown or other
cauacugggcngaaagugu

SEQ ID NO: 2788584 - RNA, 19 nt, Artificial Sequence
  Description of Artificial Sequence: Synthetic oligonucleotide
gugaugaauucgccucuug

SEQ ID NO: 2788585 - RNA, 19 nt, Artificial Sequence
  Description of Artificial Sequence: Synthetic oligonucleotide
ugugguuccugagcugcca

SEQ ID NO: 2788586 - RNA, 19 nt, Artificial Sequence
  Description of Artificial Sequence: Synthetic oligonucleotide
ggggugucuaggaaggucc

SEQ ID NO: 2788587 - RNA, 19 nt, Artificial Sequence
  Description of Artificial Sequence: Synthetic oligonucleotide
  modified_base (10)..(10): a, c, u, g, unknown or other
auacugggcngaaaguguu

SEQ ID NO: 2788588 - RNA, 19 nt, Artificial Sequence
  Description of Artificial Sequence: Synthetic oligonucleotide
gaugaaggguaggcggcug

SEQ ID NO: 2788589 - RNA, 19 nt, Artificial Sequence
  Description of Artificial Sequence: Synthetic oligonucleotide
ucccaauagcggagggcug

SEQ ID NO: 2788590 - RNA, 19 nt, Artificial Sequence
  Description of Artificial Sequence: Synthetic oligonucleotide
agcacccgcucugacacag

SEQ ID NO: 2788591 - RNA, 19 nt, Artificial Sequence
  Description of Artificial Sequence: Synthetic oligonucleotide
gugucuaggaagguccuga

SEQ ID NO: 2788592 - RNA, 19 nt, Artificial Sequence
  Description of Artificial Sequence: Synthetic oligonucleotide
cccugcuccacacuguuag

SEQ ID NO: 2788593 - RNA, 19 nt, Artificial Sequence
  Description of Artificial Sequence: Synthetic oligonucleotide
aucgcacccggaaaggaca

SEQ ID NO: 2788594 - RNA, 19 nt, Artificial Sequence
  Description of Artificial Sequence: Synthetic oligonucleotide
cucugggcagacucuccag

SEQ ID NO: 2788595 - RNA, 19 nt, Artificial Sequence
  Description of Artificial Sequence: Synthetic oligonucleotide
ggcugcgcucccaauagcg

SEQ ID NO: 2788596 - RNA, 19 nt, Artificial Sequence
  Description of Artificial Sequence: Synthetic oligonucleotide
ugcgaguccucaagccuuc

SEQ ID NO: 2788597 - RNA, 19 nt, Artificial Sequence
  Description of Artificial Sequence: Synthetic oligonucleotide
augaggagccggcuacagu

SEQ ID NO: 2788598 - RNA, 19 nt, Artificial Sequence
  Description of Artificial Sequence: Synthetic oligonucleotide
uagcggagggcuguguccu

SEQ ID NO: 2788599 - RNA, 19 nt, Artificial Sequence
  Description of Artificial Sequence: Synthetic oligonucleotide
ggccuuauggcgguggccc

SEQ ID NO: 2788600 - RNA, 19 nt, Artificial Sequence
  Description of Artificial Sequence: Synthetic oligonucleotide
ugguuccugagcugccacu

SEQ ID NO: 2788601 - RNA, 19 nt, Artificial Sequence
  Description of Artificial Sequence: Synthetic oligonucleotide
ccaacacucccaagcaccc

SEQ ID NO: 2788602 - RNA, 19 nt, Artificial Sequence
  Description of Artificial Sequence: Synthetic oligonucleotide
auguuggcauccucagaaa

SEQ ID NO: 2788603 - RNA, 19 nt, Artificial Sequence
  Description of Artificial Sequence: Synthetic oligonucleotide
cuguuaggggugucuagga

SEQ ID NO: 2788604 - RNA, 19 nt, Artificial Sequence
  Description of Artificial Sequence: Synthetic oligonucleotide
ggucucgucuucaaaucgc

SEQ ID NO: 2788605 - RNA, 19 nt, Artificial Sequence
  Description of Artificial Sequence: Synthetic oligonucleotide
ccucagaaaaguagaucug

SEQ ID NO: 2788606 - RNA, 19 nt, Artificial Sequence
  Description of Artificial Sequence: Synthetic oligonucleotide
cugucggaacgcacggcug

SEQ ID NO: 2788607 - RNA, 19 nt, Artificial Sequence
  Description of Artificial Sequence: Synthetic oligonucleotide
cacccgcucugacacagac

SEQ ID NO: 2788608 - RNA, 19 nt, Artificial Sequence
  Description of Artificial Sequence: Synthetic oligonucleotide
cugugguuccugagcugcc

SEQ ID NO: 2788609 - RNA, 19 nt, Artificial Sequence
  Description of Artificial Sequence: Synthetic oligonucleotide
uccagccaucucccaacac

SEQ ID NO: 2788610 - RNA, 19 nt, Artificial Sequence
  Description of Artificial Sequence: Synthetic oligonucleotide
gcauccucagaaaaguaga

SEQ ID NO: 2788611 - RNA, 19 nt, Artificial Sequence
  Description of Artificial Sequence: Synthetic oligonucleotide
gccuucucuggagagggcg

SEQ ID NO: 2788612 - RNA, 19 nt, Artificial Sequence
  Description of Artificial Sequence: Synthetic oligonucleotide
ggcaaagcagucuguucac

SEQ ID NO: 2788613 - RNA, 19 nt, Artificial Sequence
  Description of Artificial Sequence: Synthetic oligonucleotide
  modified_base (5)..(5): a, c, u, g, unknown or other
gggcngaaaguguucccug

SEQ ID NO: 2788614 - RNA, 19 nt, Artificial Sequence
  Description of Artificial Sequence: Synthetic oligonucleotide
cucaagccuucucuggaga

SEQ ID NO: 2788615 - RNA, 19 nt, Artificial Sequence
  Description of Artificial Sequence: Synthetic oligonucleotide
uucugucggaacgcacggc

SEQ ID NO: 2788616 - RNA, 19 nt, Artificial Sequence
  Description of Artificial Sequence: Synthetic oligonucleotide
gggcaguuccagaaugagg

SEQ ID NO: 2788617 - RNA, 19 nt, Artificial Sequence
  Description of Artificial Sequence: Synthetic oligonucleotide
ucuuccgagugcgacgguu

SEQ ID NO: 2788618 - RNA, 19 nt, Artificial Sequence
  Description of Artificial Sequence: Synthetic oligonucleotide
auugcgucugcgaguccuc

SEQ ID NO: 2788619 - RNA, 19 nt, Artificial Sequence
  Description of Artificial Sequence: Synthetic oligonucleotide
gccggcuacagugucuugg

SEQ ID NO: 2788620 - RNA, 19 nt, Artificial Sequence
  Description of Artificial Sequence: Synthetic oligonucleotide
ugcagggucucgucuucaa

SEQ ID NO: 2788621 - RNA, 19 nt, Artificial Sequence
  Description of Artificial Sequence: Synthetic oligonucleotide
uugggcccugggacgcagg

SEQ ID NO: 2788622 - RNA, 19 nt, Artificial Sequence
  Description of Artificial Sequence: Synthetic oligonucleotide
gccuuucuggcugugauga

SEQ ID NO: 2788623 - RNA, 19 nt, Artificial Sequence
  Description of Artificial Sequence: Synthetic oligonucleotide
gcaguuccagaaugaggag

SEQ ID NO: 2788624 - RNA, 19 nt, Artificial Sequence
  Description of Artificial Sequence: Synthetic oligonucleotide
cuguucacauggaaagaua

SEQ ID NO: 2788625 - RNA, 19 nt, Artificial Sequence
  Description of Artificial Sequence: Synthetic oligonucleotide
ucgcacccggaaaggacaa

SEQ ID NO: 2788626 - RNA, 19 nt, Artificial Sequence
  Description of Artificial Sequence: Synthetic oligonucleotide
agugcgacgguugguccca

SEQ ID NO: 2788627 - RNA, 19 nt, Artificial Sequence
  Description of Artificial Sequence: Synthetic oligonucleotide
aggaagguccugaggccuc

SEQ ID NO: 2788628 - RNA, 19 nt, Artificial Sequence
  Description of Artificial Sequence: Synthetic oligonucleotide
gcgacgguuggucccacag

SEQ ID NO: 2788629 - RNA, 19 nt, Artificial Sequence
  Description of Artificial Sequence: Synthetic oligonucleotide
cugcgcucccaauagcgga

SEQ ID NO: 2788630 - RNA, 19 nt, Artificial Sequence
  Description of Artificial Sequence: Synthetic oligonucleotide
gucucgucuucaaaucgca

SEQ ID NO: 2788631 - RNA, 19 nt, Artificial Sequence
  Description of Artificial Sequence: Synthetic oligonucleotide
agaaggcaaagcagucugu

SEQ ID NO: 2788632 - RNA, 19 nt, Artificial Sequence
  Description of Artificial Sequence: Synthetic oligonucleotide
gucggaacgcacggcugcg

SEQ ID NO: 2788633 - RNA, 19 nt, Artificial Sequence
  Description of Artificial Sequence: Synthetic oligonucleotide
ccggcuacagugucuuggg

SEQ ID NO: 2788634 - RNA, 19 nt, Artificial Sequence
  Description of Artificial Sequence: Synthetic oligonucleotide
gaaugaggagccggcuaca

SEQ ID NO: 2788635 - RNA, 19 nt, Artificial Sequence
  Description of Artificial Sequence: Synthetic oligonucleotide
gcgucugcgaguccucaag

SEQ ID NO: 2788636 - RNA, 19 nt, Artificial Sequence
  Description of Artificial Sequence: Synthetic oligonucleotide
uuggucccacaggucuggg

SEQ ID NO: 2788637 - RNA, 19 nt, Artificial Sequence
  Description of Artificial Sequence: Synthetic oligonucleotide
gucuugggcccugggacgc

SEQ ID NO: 2788638 - RNA, 19 nt, Artificial Sequence
  Description of Artificial Sequence: Synthetic oligonucleotide
aagcacccgcucugacaca

SEQ ID NO: 2788639 - RNA, 19 nt, Artificial Sequence
  Description of Artificial Sequence: Synthetic oligonucleotide
gcguuggccuuucuggcug

SEQ ID NO: 2788640 - RNA, 19 nt, Artificial Sequence
  Description of Artificial Sequence: Synthetic oligonucleotide
ugcgucugcgaguccucaa

SEQ ID NO: 2788641 - RNA, 19 nt, Artificial Sequence
  Description of Artificial Sequence: Synthetic oligonucleotide
gcucauguuggcauccuca

SEQ ID NO: 2788642 - RNA, 19 nt, Artificial Sequence
  Description of Artificial Sequence: Synthetic oligonucleotide
ccugagcugccacucgggg

SEQ ID NO: 2788643 - RNA, 19 nt, Artificial Sequence
  Description of Artificial Sequence: Synthetic oligonucleotide
gggcguuggccuuucuggc

SEQ ID NO: 2788644 - RNA, 19 nt, Artificial Sequence
  Description of Artificial Sequence: Synthetic oligonucleotide
cagggucucgucuucaaau

SEQ ID NO: 2788645 - RNA, 19 nt, Artificial Sequence
  Description of Artificial Sequence: Synthetic oligonucleotide
gaaggcaaagcagucuguu

SEQ ID NO: 2788646 - RNA, 19 nt, Artificial Sequence
  Description of Artificial Sequence: Synthetic oligonucleotide
acacuguuaggggugucua

SEQ ID NO: 2788647 - RNA, 19 nt, Artificial Sequence
  Description of Artificial Sequence: Synthetic oligonucleotide
cagaaugaggagccggcua

SEQ ID NO: 2788648 - RNA, 19 nt, Artificial Sequence
  Description of Artificial Sequence: Synthetic oligonucleotide
gaaggguaggcggcugcuc

SEQ ID NO: 2788649 - RNA, 19 nt, Artificial Sequence
  Description of Artificial Sequence: Synthetic oligonucleotide
cauccucagaaaaguagau

SEQ ID NO: 2788650 - RNA, 19 nt, Artificial Sequence
  Description of Artificial Sequence: Synthetic oligonucleotide
cagugucuugggcccuggg

SEQ ID NO: 2788651 - RNA, 19 nt, Artificial Sequence
  Description of Artificial Sequence: Synthetic oligonucleotide
acgguuggucccacagguc

SEQ ID NO: 2788652 - RNA, 19 nt, Artificial Sequence
  Description of Artificial Sequence: Synthetic oligonucleotide
cacagacauagaaggcaaa

SEQ ID NO: 2788653 - RNA, 19 nt, Artificial Sequence
  Description of Artificial Sequence: Synthetic oligonucleotide
gcugcucauguuggcaucc

SEQ ID NO: 2788654 - RNA, 19 nt, Artificial Sequence
  Description of Artificial Sequence: Synthetic oligonucleotide
ccccguggccuuauggcgg

SEQ ID NO: 2788655 - RNA, 19 nt, Artificial Sequence
  Description of Artificial Sequence: Synthetic oligonucleotide
ucggaacgcacggcugcgc

SEQ ID NO: 2788656 - RNA, 19 nt, Artificial Sequence
  Description of Artificial Sequence: Synthetic oligonucleotide
uuauggcgguggcccugug

SEQ ID NO: 2788657 - RNA, 19 nt, Artificial Sequence
  Description of Artificial Sequence: Synthetic oligonucleotide
ggccuuucuggcugugaug

SEQ ID NO: 2788658 - RNA, 19 nt, Artificial Sequence
  Description of Artificial Sequence: Synthetic oligonucleotide
uggagagggcguuggccuu

SEQ ID NO: 2788659 - RNA, 19 nt, Artificial Sequence
  Description of Artificial Sequence: Synthetic oligonucleotide
caucucccaacacucccaa

SEQ ID NO: 2788660 - RNA, 19 nt, Artificial Sequence
  Description of Artificial Sequence: Synthetic oligonucleotide
ucccaagcacccgcucuga

SEQ ID NO: 2788661 - RNA, 19 nt, Artificial Sequence
  Description of Artificial Sequence: Synthetic oligonucleotide
aacugucuuccgagugcga

SEQ ID NO: 2788662 - RNA, 19 nt, Artificial Sequence
  Description of Artificial Sequence: Synthetic oligonucleotide
agcagucuguucacaugga

SEQ ID NO: 2788663 - RNA, 19 nt, Artificial Sequence
  Description of Artificial Sequence: Synthetic oligonucleotide
aggguaggcggcugcucau

SEQ ID NO: 2788664 - RNA, 19 nt, Artificial Sequence
  Description of Artificial Sequence: Synthetic oligonucleotide
cugugaugaauucgccucu

SEQ ID NO: 2788665 - RNA, 19 nt, Artificial Sequence
  Description of Artificial Sequence: Synthetic oligonucleotide
caauugcgucugcgagucc

SEQ ID NO: 2788666 - RNA, 19 nt, Artificial Sequence
  Description of Artificial Sequence: Synthetic oligonucleotide
uaggggugucuaggaaggu

SEQ ID NO: 2788667 - RNA, 19 nt, Artificial Sequence
  Description of Artificial Sequence: Synthetic oligonucleotide
ccuccccguggccuuaugg

SEQ ID NO: 2788668 - RNA, 19 nt, Artificial Sequence
  Description of Artificial Sequence: Synthetic oligonucleotide
gcagucuguucacauggaa

SEQ ID NO: 2788669 - RNA, 19 nt, Artificial Sequence
  Description of Artificial Sequence: Synthetic oligonucleotide
ugcgacgguuggucccaca

SEQ ID NO: 2788670 - RNA, 19 nt, Artificial Sequence
  Description of Artificial Sequence: Synthetic oligonucleotide
ggcugugaugaauucgccu

SEQ ID NO: 2788671 - RNA, 19 nt, Artificial Sequence
  Description of Artificial Sequence: Synthetic oligonucleotide
cuugggcccugggacgcag

SEQ ID NO: 2788672 - RNA, 19 nt, Artificial Sequence
  Description of Artificial Sequence: Synthetic oligonucleotide
ucgccucuugggagcccgc

SEQ ID NO: 2788673 - RNA, 19 nt, Artificial Sequence
  Description of Artificial Sequence: Synthetic oligonucleotide
ggugucuaggaagguccug

SEQ ID NO: 2788674 - RNA, 19 nt, Artificial Sequence
  Description of Artificial Sequence: Synthetic oligonucleotide
ccggaaaggacaauugcgu

SEQ ID NO: 2788675 - RNA, 19 nt, Artificial Sequence
  Description of Artificial Sequence: Synthetic oligonucleotide
gcucugggcagacucucca

SEQ ID NO: 2788676 - RNA, 19 nt, Artificial Sequence
  Description of Artificial Sequence: Synthetic oligonucleotide
ugggagcccgcgguaggcu

SEQ ID NO: 2788677 - RNA, 19 nt, Artificial Sequence
  Description of Artificial Sequence: Synthetic oligonucleotide
  modified_base (3)..(3): a, c, u, g, unknown or other
gcngaaaguguucccugcu

SEQ ID NO: 2788678 - RNA, 19 nt, Artificial Sequence
  Description of Artificial Sequence: Synthetic oligonucleotide
gcucccaauagcggagggc

SEQ ID NO: 2788679 - RNA, 19 nt, Artificial Sequence
  Description of Artificial Sequence: Synthetic oligonucleotide
cugaggccuccccguggcc

SEQ ID NO: 2788680 - RNA, 19 nt, Artificial Sequence
  Description of Artificial Sequence: Synthetic oligonucleotide
ggaagguccugaggccucc

SEQ ID NO: 2788681 - RNA, 19 nt, Artificial Sequence
  Description of Artificial Sequence: Synthetic oligonucleotide
cacucccaagcacccgcuc

SEQ ID NO: 2788682 - RNA, 19 nt, Artificial Sequence
  Description of Artificial Sequence: Synthetic oligonucleotide
cuccagccaucucccaaca

SEQ ID NO: 2788683 - RNA, 19 nt, Artificial Sequence
  Description of Artificial Sequence: Synthetic oligonucleotide
ggcugcucauguuggcauc

SEQ ID NO: 2788684 - RNA, 19 nt, Artificial Sequence
  Description of Artificial Sequence: Synthetic oligonucleotide
acacucccaagcacccgcu

SEQ ID NO: 2788685 - RNA, 19 nt, Artificial Sequence
  Description of Artificial Sequence: Synthetic oligonucleotide
guuggccuuucuggcugug

SEQ ID NO: 2788686 - RNA, 19 nt, Artificial Sequence
  Description of Artificial Sequence: Synthetic oligonucleotide
cccgcucugacacagacau

SEQ ID NO: 2788687 - RNA, 19 nt, Artificial Sequence
  Description of Artificial Sequence: Synthetic oligonucleotide
ccaucucccaacacuccca

SEQ ID NO: 2788688 - RNA, 19 nt, Artificial Sequence
  Description of Artificial Sequence: Synthetic oligonucleotide
gguggcccuguggaugaag

SEQ ID NO: 2788689 - RNA, 19 nt, Artificial Sequence
  Description of Artificial Sequence: Synthetic oligonucleotide
ggaacgcacggcugcgcuc

SEQ ID NO: 2788690 - RNA, 19 nt, Artificial Sequence
  Description of Artificial Sequence: Synthetic oligonucleotide
cacacuguuaggggugucu

SEQ ID NO: 2788691 - RNA, 19 nt, Artificial Sequence
  Description of Artificial Sequence: Synthetic oligonucleotide
cgucugcgaguccucaagc

SEQ ID NO: 2788692 - RNA, 19 nt, Artificial Sequence
  Description of Artificial Sequence: Synthetic oligonucleotide
cugcgaguccucaagccuu

SEQ ID NO: 2788693 - RNA, 19 nt, Artificial Sequence
  Description of Artificial Sequence: Synthetic oligonucleotide
agccggcuacagugucuug

SEQ ID NO: 2788694 - RNA, 19 nt, Artificial Sequence
  Description of Artificial Sequence: Synthetic oligonucleotide
ccgagugcgacgguugguc

SEQ ID NO: 2788695 - RNA, 19 nt, Artificial Sequence
  Description of Artificial Sequence: Synthetic oligonucleotide
cgagugcgacgguuggucc

SEQ ID NO: 2788696 - RNA, 19 nt, Artificial Sequence
  Description of Artificial Sequence: Synthetic oligonucleotide
gagagggcguuggccuuuc

SEQ ID NO: 2788697 - RNA, 19 nt, Artificial Sequence
  Description of Artificial Sequence: Synthetic oligonucleotide
cgacgguuggucccacagg

SEQ ID NO: 2788698 - RNA, 19 nt, Artificial Sequence
  Description of Artificial Sequence: Synthetic oligonucleotide
acccgcucugacacagaca

SEQ ID NO: 2788699 - RNA, 19 nt, Artificial Sequence
  Description of Artificial Sequence: Synthetic oligonucleotide
agagggcguuggccuuucu

SEQ ID NO: 2788700 - RNA, 19 nt, Artificial Sequence
  Description of Artificial Sequence: Synthetic oligonucleotide
gaggagccggcuacagugu

SEQ ID NO: 2788701 - RNA, 19 nt, Artificial Sequence
  Description of Artificial Sequence: Synthetic oligonucleotide
gcgguggcccuguggauga

SEQ ID NO: 2788702 - RNA, 19 nt, Artificial Sequence
  Description of Artificial Sequence: Synthetic oligonucleotide
cgucuucaaaucgcacccg

SEQ ID NO: 2788703 - RNA, 19 nt, Artificial Sequence
  Description of Artificial Sequence: Synthetic oligonucleotide
ggcccuguggaugaagggu

SEQ ID NO: 2788704 - RNA, 19 nt, Artificial Sequence
  Description of Artificial Sequence: Synthetic oligonucleotide
gguccugaggccuccccgu

SEQ ID NO: 2788705 - RNA, 19 nt, Artificial Sequence
  Description of Artificial Sequence: Synthetic oligonucleotide
gcgcucccaauagcggagg

SEQ ID NO: 2788706 - RNA, 19 nt, Artificial Sequence
  Description of Artificial Sequence: Synthetic oligonucleotide
ggcucugggcagacucucc

SEQ ID NO: 2788707 - RNA, 19 nt, Artificial Sequence
  Description of Artificial Sequence: Synthetic oligonucleotide
ggguaggcggcugcucaug

SEQ ID NO: 2788708 - RNA, 19 nt, Artificial Sequence
  Description of Artificial Sequence: Synthetic oligonucleotide
gcagggucucgucuucaaa

SEQ ID NO: 2788709 - RNA, 19 nt, Artificial Sequence
  Description of Artificial Sequence: Synthetic oligonucleotide
ggcguuggccuuucuggcu

SEQ ID NO: 2788710 - RNA, 19 nt, Artificial Sequence
  Description of Artificial Sequence: Synthetic oligonucleotide
guucccugcuccacacugu

SEQ ID NO: 2788711 - RNA, 19 nt, Artificial Sequence
  Description of Artificial Sequence: Synthetic oligonucleotide
cguggccuuauggcggugg

SEQ ID NO: 2788712 - RNA, 19 nt, Artificial Sequence
  Description of Artificial Sequence: Synthetic oligonucleotide
gagccggcuacagugucuu

SEQ ID NO: 2788713 - RNA, 19 nt, Artificial Sequence
  Description of Artificial Sequence: Synthetic oligonucleotide
cuuauggcgguggcccugu

SEQ ID NO: 2788714 - RNA, 19 nt, Artificial Sequence
  Description of Artificial Sequence: Synthetic oligonucleotide
ccuuauggcgguggcccug

SEQ ID NO: 2788715 - RNA, 19 nt, Artificial Sequence
  Description of Artificial Sequence: Synthetic oligonucleotide
ccaauagcggagggcugug

SEQ ID NO: 2788716 - RNA, 19 nt, Artificial Sequence
  Description of Artificial Sequence: Synthetic oligonucleotide
gcggcugcucauguuggca

SEQ ID NO: 2788717 - RNA, 19 nt, Artificial Sequence
  Description of Artificial Sequence: Synthetic oligonucleotide
ggaugaaggguaggcggcu

SEQ ID NO: 2788718 - RNA, 19 nt, Artificial Sequence
  Description of Artificial Sequence: Synthetic oligonucleotide
cccaagcacccgcucugac

SEQ ID NO: 2788719 - RNA, 19 nt, Artificial Sequence
  Description of Artificial Sequence: Synthetic oligonucleotide
guguucccugcuccacacu

SEQ ID NO: 2788720 - RNA, 19 nt, Artificial Sequence
  Description of Artificial Sequence: Synthetic oligonucleotide
cgcucccaauagcggaggg

SEQ ID NO: 2788721 - RNA, 19 nt, Artificial Sequence
  Description of Artificial Sequence: Synthetic oligonucleotide
gaggccuccccguggccuu

SEQ ID NO: 2788722 - RNA, 19 nt, Artificial Sequence
  Description of Artificial Sequence: Synthetic oligonucleotide
cggcuacagugucuugggc

SEQ ID NO: 2788723 - RNA, 19 nt, Artificial Sequence
  Description of Artificial Sequence: Synthetic oligonucleotide
ggagcccgcgguaggcuuc

SEQ ID NO: 2788724 - RNA, 19 nt, Artificial Sequence
  Description of Artificial Sequence: Synthetic oligonucleotide
cgaguccucaagccuucuc

SEQ ID NO: 2788725 - RNA, 19 nt, Artificial Sequence
  Description of Artificial Sequence: Synthetic oligonucleotide
cgguuggucccacaggucu

SEQ ID NO: 2788726 - RNA, 19 nt, Artificial Sequence
  Description of Artificial Sequence: Synthetic oligonucleotide
caauagcggagggcugugu

SEQ ID NO: 2788727 - RNA, 19 nt, Artificial Sequence
  Description of Artificial Sequence: Synthetic oligonucleotide
ccuucucuggagagggcgu

SEQ ID NO: 2788728 - RNA, 19 nt, Artificial Sequence
  Description of Artificial Sequence: Synthetic oligonucleotide
cuucucuggagagggcguu

SEQ ID NO: 2788729 - RNA, 19 nt, Artificial Sequence
  Description of Artificial Sequence: Synthetic oligonucleotide
gcacccggaaaggacaauu

SEQ ID NO: 2788730 - RNA, 19 nt, Artificial Sequence
  Description of Artificial Sequence: Synthetic oligonucleotide
acgcacggcugcgcuccca

SEQ ID NO: 2788731 - RNA, 19 nt, Artificial Sequence
  Description of Artificial Sequence: Synthetic oligonucleotide
gagcccgcgguaggcuucu

SEQ ID NO: 2788732 - RNA, 19 nt, Artificial Sequence
  Description of Artificial Sequence: Synthetic oligonucleotide
ggagccggcuacagugucu

SEQ ID NO: 2788733 - RNA, 19 nt, Artificial Sequence
  Description of Artificial Sequence: Synthetic oligonucleotide
cccaauagcggagggcugu

SEQ ID NO: 2788734 - RNA, 19 nt, Artificial Sequence
  Description of Artificial Sequence: Synthetic oligonucleotide
gggugucuaggaagguccu

SEQ ID NO: 2788735 - RNA, 19 nt, Artificial Sequence
  Description of Artificial Sequence: Synthetic oligonucleotide
cugcucauguuggcauccu

SEQ ID NO: 2788736 - RNA, 19 nt, Artificial Sequence
  Description of Artificial Sequence: Synthetic oligonucleotide
gugcgacgguuggucccac

SEQ ID NO: 2788737 - RNA, 19 nt, Artificial Sequence
  Description of Artificial Sequence: Synthetic oligonucleotide
cgccucuugggagcccgcg

SEQ ID NO: 2788738 - RNA, 19 nt, Artificial Sequence
  Description of Artificial Sequence: Synthetic oligonucleotide
gccuuauggcgguggcccu

SEQ ID NO: 2788739 - RNA, 19 nt, Artificial Sequence
  Description of Artificial Sequence: Synthetic oligonucleotide
cccgcgguaggcuucuuuu

SEQ ID NO: 2788740 - RNA, 19 nt, Artificial Sequence
  Description of Artificial Sequence: Synthetic oligonucleotide
gucuuccgagugcgacggu

SEQ ID NO: 2788741 - RNA, 19 nt, Artificial Sequence
  Description of Artificial Sequence: Synthetic oligonucleotide
cggcugcgcucccaauagc

SEQ ID NO: 2788742 - RNA, 19 nt, Artificial Sequence
  Description of Artificial Sequence: Synthetic oligonucleotide
ccagaaugaggagccggcu

SEQ ID NO: 2788743 - RNA, 19 nt, Artificial Sequence
  Description of Artificial Sequence: Synthetic oligonucleotide
gccuccccguggccuuaug

SEQ ID NO: 2788744 - RNA, 19 nt, Artificial Sequence
  Description of Artificial Sequence: Synthetic oligonucleotide
gggagcccgcgguaggcuu

SEQ ID NO: 2788745 - RNA, 19 nt, Artificial Sequence
  Description of Artificial Sequence: Synthetic oligonucleotide
ggagagggcguuggccuuu

SEQ ID NO: 2788746 - RNA, 19 nt, Artificial Sequence
  Description of Artificial Sequence: Synthetic oligonucleotide
cccguggccuuauggcggu

SEQ ID NO: 2788747 - RNA, 19 nt, Artificial Sequence
  Description of Artificial Sequence: Synthetic oligonucleotide
gcacccgcucugacacaga

SEQ ID NO: 2788748 - RNA, 19 nt, Artificial Sequence
  Description of Artificial Sequence: Synthetic oligonucleotide
cggcugcucauguuggcau

SEQ ID NO: 2788749 - RNA, 19 nt, Artificial Sequence
  Description of Artificial Sequence: Synthetic oligonucleotide
cgcacggcugcgcucccaa

SEQ ID NO: 2788750 - RNA, 19 nt, Artificial Sequence
  Description of Artificial Sequence: Synthetic oligonucleotide
cggaacgcacggcugcgcu

SEQ ID NO: 2788751 - RNA, 19 nt, Artificial Sequence
  Description of Artificial Sequence: Synthetic oligonucleotide
gcccgcgguaggcuucuuu

SEQ ID NO: 2788752 - RNA, 19 nt, Artificial Sequence
  Description of Artificial Sequence: Synthetic oligonucleotide
ccgcucugacacagacaua

SEQ ID NO: 2788753 - RNA, 19 nt, Artificial Sequence
  Description of Artificial Sequence: Synthetic oligonucleotide
cguuggccuuucuggcugu

SEQ ID NO: 2788754 - RNA, 19 nt, Artificial Sequence
  Description of Artificial Sequence: Synthetic oligonucleotide
ccguggccuuauggcggug

SEQ ID NO: 2788755 - RNA, 19 nt, Artificial Sequence
  Description of Artificial Sequence: Synthetic oligonucleotide
gcacggcugcgcucccaau

SEQ ID NO: 2788756 - RNA, 19 nt, Artificial Sequence
  Description of Artificial Sequence: Synthetic oligonucleotide
agcccgcgguaggcuucuu

SEQ ID NO: 2788757 - RNA, 19 nt, Artificial Sequence
  Description of Artificial Sequence: Synthetic oligonucleotide
ggccuccccguggccuuau

SEQ ID NO: 2788758 - RNA, 19 nt, Artificial Sequence
  Description of Artificial Sequence: Synthetic oligonucleotide
cgcacccggaaaggacaau

SEQ ID NO: 2788759 - RNA, 19 nt, Artificial Sequence
  Description of Artificial Sequence: Synthetic oligonucleotide
  modified_base (1)..(1): a, c, u, g, unknown or other
ngaaaguguucccugcucc

SEQ ID NO: 2788760 - RNA, 19 nt, Artificial Sequence
  Description of Artificial Sequence: Synthetic oligonucleotide
agugccagcaucuagaucc

SEQ ID NO: 2788761 - RNA, 19 nt, Artificial Sequence
  Description of Artificial Sequence: Synthetic oligonucleotide
uucacauuuauuucaaugg

SEQ ID NO: 2788762 - RNA, 19 nt, Artificial Sequence
  Description of Artificial Sequence: Synthetic oligonucleotide
aaacuucaaguucacaggc

SEQ ID NO: 2788763 - RNA, 19 nt, Artificial Sequence
  Description of Artificial Sequence: Synthetic oligonucleotide
auauaauacauccuaagag

SEQ ID NO: 2788764 - RNA, 19 nt, Artificial Sequence
  Description of Artificial Sequence: Synthetic oligonucleotide
aaacauuuaacacacuucu

SEQ ID NO: 2788765 - RNA, 19 nt, Artificial Sequence
  Description of Artificial Sequence: Synthetic oligonucleotide
uuuauuaaacggaauaaug

SEQ ID NO: 2788766 - RNA, 19 nt, Artificial Sequence
  Description of Artificial Sequence: Synthetic oligonucleotide
cuaguaaauauauacauac

SEQ ID NO: 2788767 - RNA, 19 nt, Artificial Sequence
  Description of Artificial Sequence: Synthetic oligonucleotide
uuaaacggaauaaugaugu

SEQ ID NO: 2788768 - RNA, 19 nt, Artificial Sequence
  Description of Artificial Sequence: Synthetic oligonucleotide
uuauuaaacggaauaauga

SEQ ID NO: 2788769 - RNA, 19 nt, Artificial Sequence
  Description of Artificial Sequence: Synthetic oligonucleotide
uuugcaaacauuuaacaca

SEQ ID NO: 2788770 - RNA, 19 nt, Artificial Sequence
  Description of Artificial Sequence: Synthetic oligonucleotide
acuucuuagguuuugacag

SEQ ID NO: 2788771 - RNA, 19 nt, Artificial Sequence
  Description of Artificial Sequence: Synthetic oligonucleotide
uuggcauuaauuuucuugg

SEQ ID NO: 2788772 - RNA, 19 nt, Artificial Sequence
  Description of Artificial Sequence: Synthetic oligonucleotide
uauaauacauccuaagagu

SEQ ID NO: 2788773 - RNA, 19 nt, Artificial Sequence
  Description of Artificial Sequence: Synthetic oligonucleotide
acaaacuucaaguucacag

SEQ ID NO: 2788774 - RNA, 19 nt, Artificial Sequence
  Description of Artificial Sequence: Synthetic oligonucleotide
aauuuucuuggucugaaca

SEQ ID NO: 2788775 - RNA, 19 nt, Artificial Sequence
  Description of Artificial Sequence: Synthetic oligonucleotide
uacgucauauaauacaucc

SEQ ID NO: 2788776 - RNA, 19 nt, Artificial Sequence
  Description of Artificial Sequence: Synthetic oligonucleotide
uuuugcacaaacuucaagu

SEQ ID NO: 2788777 - RNA, 19 nt, Artificial Sequence
  Description of Artificial Sequence: Synthetic oligonucleotide
cuugcuguauuuuacacgc

SEQ ID NO: 2788778 - RNA, 19 nt, Artificial Sequence
  Description of Artificial Sequence: Synthetic oligonucleotide
ugauuuucaguauuuacug

SEQ ID NO: 2788779 - RNA, 19 nt, Artificial Sequence
  Description of Artificial Sequence: Synthetic oligonucleotide
uugauuuucaguauuuacu

SEQ ID NO: 2788780 - RNA, 19 nt, Artificial Sequence
  Description of Artificial Sequence: Synthetic oligonucleotide
cucaucaccaaucacaagc

SEQ ID NO: 2788781 - RNA, 19 nt, Artificial Sequence
  Description of Artificial Sequence: Synthetic oligonucleotide
ucagguucuuuauuaaacg

SEQ ID NO: 2788782 - RNA, 19 nt, Artificial Sequence
  Description of Artificial Sequence: Synthetic oligonucleotide
uacauguacauauacguca

SEQ ID NO: 2788783 - RNA, 19 nt, Artificial Sequence
  Description of Artificial Sequence: Synthetic oligonucleotide
ugaacuuuggcauuaauuu

SEQ ID NO: 2788784 - RNA, 19 nt, Artificial Sequence
  Description of Artificial Sequence: Synthetic oligonucleotide
ucauauaauacauccuaag

SEQ ID NO: 2788785 - RNA, 19 nt, Artificial Sequence
  Description of Artificial Sequence: Synthetic oligonucleotide
auuuucuuggucugaacac

SEQ ID NO: 2788786 - RNA, 19 nt, Artificial Sequence
  Description of Artificial Sequence: Synthetic oligonucleotide
ugcacaaacuucaaguuca

SEQ ID NO: 2788787 - RNA, 19 nt, Artificial Sequence
  Description of Artificial Sequence: Synthetic oligonucleotide
uccaucaugaacuuuggca

SEQ ID NO: 2788788 - RNA, 19 nt, Artificial Sequence
  Description of Artificial Sequence: Synthetic oligonucleotide
uuuauuucaaugguucuag

SEQ ID NO: 2788789 - RNA, 19 nt, Artificial Sequence
  Description of Artificial Sequence: Synthetic oligonucleotide
cuaagagucuccaucgucg

SEQ ID NO: 2788790 - RNA, 19 nt, Artificial Sequence
  Description of Artificial Sequence: Synthetic oligonucleotide
uauuuacugaaguuucagg

SEQ ID NO: 2788791 - RNA, 19 nt, Artificial Sequence
  Description of Artificial Sequence: Synthetic oligonucleotide
auauacgucauauaauaca

SEQ ID NO: 2788792 - RNA, 19 nt, Artificial Sequence
  Description of Artificial Sequence: Synthetic oligonucleotide
uuuuacacgccacucaaga

SEQ ID NO: 2788793 - RNA, 19 nt, Artificial Sequence
  Description of Artificial Sequence: Synthetic oligonucleotide
uuuugcaaacauuuaacac

SEQ ID NO: 2788794 - RNA, 19 nt, Artificial Sequence
  Description of Artificial Sequence: Synthetic oligonucleotide
aacuuuggcauuaauuuuc

SEQ ID NO: 2788795 - RNA, 19 nt, Artificial Sequence
  Description of Artificial Sequence: Synthetic oligonucleotide
uauacgucauauaauacau

SEQ ID NO: 2788796 - RNA, 19 nt, Artificial Sequence
  Description of Artificial Sequence: Synthetic oligonucleotide
acuucaaguucacaggcac

SEQ ID NO: 2788797 - RNA, 19 nt, Artificial Sequence
  Description of Artificial Sequence: Synthetic oligonucleotide
ggucugaacacucuuaucg

SEQ ID NO: 2788798 - RNA, 19 nt, Artificial Sequence
  Description of Artificial Sequence: Synthetic oligonucleotide
ucaagaacuucuuugcagc

SEQ ID NO: 2788799 - RNA, 19 nt, Artificial Sequence
  Description of Artificial Sequence: Synthetic oligonucleotide
uacuccaucaugaacuuug

SEQ ID NO: 2788800 - RNA, 19 nt, Artificial Sequence
  Description of Artificial Sequence: Synthetic oligonucleotide
gguucuaguaaauauauac

SEQ ID NO: 2788801 - RNA, 19 nt, Artificial Sequence
  Description of Artificial Sequence: Synthetic oligonucleotide
uauuaaacggaauaaugau

SEQ ID NO: 2788802 - RNA, 19 nt, Artificial Sequence
  Description of Artificial Sequence: Synthetic oligonucleotide
agaaccuugauuuucagua

SEQ ID NO: 2788803 - RNA, 19 nt, Artificial Sequence
  Description of Artificial Sequence: Synthetic oligonucleotide
caaacuucaaguucacagg

SEQ ID NO: 2788804 - RNA, 19 nt, Artificial Sequence
  Description of Artificial Sequence: Synthetic oligonucleotide
uucuuuauuaaacggaaua

SEQ ID NO: 2788805 - RNA, 19 nt, Artificial Sequence
  Description of Artificial Sequence: Synthetic oligonucleotide
augaugucuucuuucuucc

SEQ ID NO: 2788806 - RNA, 19 nt, Artificial Sequence
  Description of Artificial Sequence: Synthetic oligonucleotide
aaugugguaagaguccuuc

SEQ ID NO: 2788807 - RNA, 19 nt, Artificial Sequence
  Description of Artificial Sequence: Synthetic oligonucleotide
auuucaaugguucuaguaa

SEQ ID NO: 2788808 - RNA, 19 nt, Artificial Sequence
  Description of Artificial Sequence: Synthetic oligonucleotide
uggccuacacauaaugugg

SEQ ID NO: 2788809 - RNA, 19 nt, Artificial Sequence
  Description of Artificial Sequence: Synthetic oligonucleotide
cauaaugugguaagagucc

SEQ ID NO: 2788810 - RNA, 19 nt, Artificial Sequence
  Description of Artificial Sequence: Synthetic oligonucleotide
auuuaacacacuucuuagg

SEQ ID NO: 2788811 - RNA, 19 nt, Artificial Sequence
  Description of Artificial Sequence: Synthetic oligonucleotide
uucagguucuuuauuaaac

SEQ ID NO: 2788812 - RNA, 19 nt, Artificial Sequence
  Description of Artificial Sequence: Synthetic oligonucleotide
uugcaaacauuuaacacac

SEQ ID NO: 2788813 - RNA, 19 nt, Artificial Sequence
  Description of Artificial Sequence: Synthetic oligonucleotide
uuuucaguauuuacugaag

SEQ ID NO: 2788814 - RNA, 19 nt, Artificial Sequence
  Description of Artificial Sequence: Synthetic oligonucleotide
aguucacaggcacauggcc

SEQ ID NO: 2788815 - RNA, 19 nt, Artificial Sequence
  Description of Artificial Sequence: Synthetic oligonucleotide
agcaucuagauccucauca

SEQ ID NO: 2788816 - RNA, 19 nt, Artificial Sequence
  Description of Artificial Sequence: Synthetic oligonucleotide
acauaaugugguaagaguc

SEQ ID NO: 2788817 - RNA, 19 nt, Artificial Sequence
  Description of Artificial Sequence: Synthetic oligonucleotide
ucuuucuucccacauuuug

SEQ ID NO: 2788818 - RNA, 19 nt, Artificial Sequence
  Description of Artificial Sequence: Synthetic oligonucleotide
acauauacgucauauaaua

SEQ ID NO: 2788819 - RNA, 19 nt, Artificial Sequence
  Description of Artificial Sequence: Synthetic oligonucleotide
caaguucacaggcacaugg

SEQ ID NO: 2788820 - RNA, 19 nt, Artificial Sequence
  Description of Artificial Sequence: Synthetic oligonucleotide
acucuuaucgaacuuguca

SEQ ID NO: 2788821 - RNA, 19 nt, Artificial Sequence
  Description of Artificial Sequence: Synthetic oligonucleotide
uuacugaaguuucagguuc

SEQ ID NO: 2788822 - RNA, 19 nt, Artificial Sequence
  Description of Artificial Sequence: Synthetic oligonucleotide
uuucugggaacucaucacc

SEQ ID NO: 2788823 - RNA, 19 nt, Artificial Sequence
  Description of Artificial Sequence: Synthetic oligonucleotide
auccuaagagucuccaucg

SEQ ID NO: 2788824 - RNA, 19 nt, Artificial Sequence
  Description of Artificial Sequence: Synthetic oligonucleotide
acuugcuguauuuuacacg

SEQ ID NO: 2788825 - RNA, 19 nt, Artificial Sequence
  Description of Artificial Sequence: Synthetic oligonucleotide
uguacuugcuguauuuuac

SEQ ID NO: 2788826 - RNA, 19 nt, Artificial Sequence
  Description of Artificial Sequence: Synthetic oligonucleotide
uuucaguauuuacugaagu

SEQ ID NO: 2788827 - RNA, 19 nt, Artificial Sequence
  Description of Artificial Sequence: Synthetic oligonucleotide
ucacauuuauuucaauggu

SEQ ID NO: 2788828 - RNA, 19 nt, Artificial Sequence
  Description of Artificial Sequence: Synthetic oligonucleotide
uuugacagugguuuguacu

SEQ ID NO: 2788829 - RNA, 19 nt, Artificial Sequence
  Description of Artificial Sequence: Synthetic oligonucleotide
uuacacgccacucaagaac

SEQ ID NO: 2788830 - RNA, 19 nt, Artificial Sequence
  Description of Artificial Sequence: Synthetic oligonucleotide
auaaugaugucuucuuucu

SEQ ID NO: 2788831 - RNA, 19 nt, Artificial Sequence
  Description of Artificial Sequence: Synthetic oligonucleotide
cuuucuucccacauuuugc

SEQ ID NO: 2788832 - RNA, 19 nt, Artificial Sequence
  Description of Artificial Sequence: Synthetic oligonucleotide
agugguuuguacuugcugu

SEQ ID NO: 2788833 - RNA, 19 nt, Artificial Sequence
  Description of Artificial Sequence: Synthetic oligonucleotide
cuugauuuucaguauuuac

SEQ ID NO: 2788834 - RNA, 19 nt, Artificial Sequence
  Description of Artificial Sequence: Synthetic oligonucleotide
ucuaguaaauauauacaua

SEQ ID NO: 2788835 - RNA, 19 nt, Artificial Sequence
  Description of Artificial Sequence: Synthetic oligonucleotide
aaacggaauaaugaugucu

SEQ ID NO: 2788836 - RNA, 19 nt, Artificial Sequence
  Description of Artificial Sequence: Synthetic oligonucleotide
auuuucaguauuuacugaa

SEQ ID NO: 2788837 - RNA, 19 nt, Artificial Sequence
  Description of Artificial Sequence: Synthetic oligonucleotide
aagaacuucuuugcagcgc

SEQ ID NO: 2788838 - RNA, 19 nt, Artificial Sequence
  Description of Artificial Sequence: Synthetic oligonucleotide
uauucuggugcuucugagg

SEQ ID NO: 2788839 - RNA, 19 nt, Artificial Sequence
  Description of Artificial Sequence: Synthetic oligonucleotide
uauuuuacacgccacucaa

SEQ ID NO: 2788840 - RNA, 19 nt, Artificial Sequence
  Description of Artificial Sequence: Synthetic oligonucleotide
ugaaggugaacguauucug

SEQ ID NO: 2788841 - RNA, 19 nt, Artificial Sequence
  Description of Artificial Sequence: Synthetic oligonucleotide
guacauauacgucauauaa

SEQ ID NO: 2788842 - RNA, 19 nt, Artificial Sequence
  Description of Artificial Sequence: Synthetic oligonucleotide
acauacuccaucaugaacu

SEQ ID NO: 2788843 - RNA, 19 nt, Artificial Sequence
  Description of Artificial Sequence: Synthetic oligonucleotide
aaggugaacguauucuggu

SEQ ID NO: 2788844 - RNA, 19 nt, Artificial Sequence
  Description of Artificial Sequence: Synthetic oligonucleotide
uaguaaauauauacauaca

SEQ ID NO: 2788845 - RNA, 19 nt, Artificial Sequence
  Description of Artificial Sequence: Synthetic oligonucleotide
cucaagaacuucuuugcag

SEQ ID NO: 2788846 - RNA, 19 nt, Artificial Sequence
  Description of Artificial Sequence: Synthetic oligonucleotide
cagguucuuuauuaaacgg

SEQ ID NO: 2788847 - RNA, 19 nt, Artificial Sequence
  Description of Artificial Sequence: Synthetic oligonucleotide
aacacucuuaucgaacuug

SEQ ID NO: 2788848 - RNA, 19 nt, Artificial Sequence
  Description of Artificial Sequence: Synthetic oligonucleotide
caaacauuuaacacacuuc

SEQ ID NO: 2788849 - RNA, 19 nt, Artificial Sequence
  Description of Artificial Sequence: Synthetic oligonucleotide
ugcuguauuuuacacgcca

SEQ ID NO: 2788850 - RNA, 19 nt, Artificial Sequence
  Description of Artificial Sequence: Synthetic oligonucleotide
ugugguaagaguccuucac

SEQ ID NO: 2788851 - RNA, 19 nt, Artificial Sequence
  Description of Artificial Sequence: Synthetic oligonucleotide
auggccuacacauaaugug

SEQ ID NO: 2788852 - RNA, 19 nt, Artificial Sequence
  Description of Artificial Sequence: Synthetic oligonucleotide
ugaacacucuuaucgaacu

SEQ ID NO: 2788853 - RNA, 19 nt, Artificial Sequence
  Description of Artificial Sequence: Synthetic oligonucleotide
ugguaagaguccuucacug

SEQ ID NO: 2788854 - RNA, 19 nt, Artificial Sequence
  Description of Artificial Sequence: Synthetic oligonucleotide
ucaucaccaaucacaagca

SEQ ID NO: 2788855 - RNA, 19 nt, Artificial Sequence
  Description of Artificial Sequence: Synthetic oligonucleotide
cacucaagaacuucuuugc

SEQ ID NO: 2788856 - RNA, 19 nt, Artificial Sequence
  Description of Artificial Sequence: Synthetic oligonucleotide
cuacacauaaugugguaag

SEQ ID NO: 2788857 - RNA, 19 nt, Artificial Sequence
  Description of Artificial Sequence: Synthetic oligonucleotide
uuucaaugguucuaguaaa

SEQ ID NO: 2788858 - RNA, 19 nt, Artificial Sequence
  Description of Artificial Sequence: Synthetic oligonucleotide
uacauauacgucauauaau

SEQ ID NO: 2788859 - RNA, 19 nt, Artificial Sequence
  Description of Artificial Sequence: Synthetic oligonucleotide
gaacucaucaccaaucaca

SEQ ID NO: 2788860 - RNA, 19 nt, Artificial Sequence
  Description of Artificial Sequence: Synthetic oligonucleotide
auuaaacggaauaaugaug

SEQ ID NO: 2788861 - RNA, 19 nt, Artificial Sequence
  Description of Artificial Sequence: Synthetic oligonucleotide
uccaucgucgucauccgag

SEQ ID NO: 2788862 - RNA, 19 nt, Artificial Sequence
  Description of Artificial Sequence: Synthetic oligonucleotide
cauauaauacauccuaaga

SEQ ID NO: 2788863 - RNA, 19 nt, Artificial Sequence
  Description of Artificial Sequence: Synthetic oligonucleotide
cacauuuugcacaaacuuc

SEQ ID NO: 2788864 - RNA, 19 nt, Artificial Sequence
  Description of Artificial Sequence: Synthetic oligonucleotide
auuuugcacaaacuucaag

SEQ ID NO: 2788865 - RNA, 19 nt, Artificial Sequence
  Description of Artificial Sequence: Synthetic oligonucleotide
ucuucugcgguuagaaccu

SEQ ID NO: 2788866 - RNA, 19 nt, Artificial Sequence
  Description of Artificial Sequence: Synthetic oligonucleotide
uucuuugcagcgcugacau

SEQ ID NO: 2788867 - RNA, 19 nt, Artificial Sequence
  Description of Artificial Sequence: Synthetic oligonucleotide
ucuuagguuuugacagugg

SEQ ID NO: 2788868 - RNA, 19 nt, Artificial Sequence
  Description of Artificial Sequence: Synthetic oligonucleotide
uagauccucaucacugucc

SEQ ID NO: 2788869 - RNA, 19 nt, Artificial Sequence
  Description of Artificial Sequence: Synthetic oligonucleotide
gaaggugaacguauucugg

SEQ ID NO: 2788870 - RNA, 19 nt, Artificial Sequence
  Description of Artificial Sequence: Synthetic oligonucleotide
uauuucaaugguucuagua

SEQ ID NO: 2788871 - RNA, 19 nt, Artificial Sequence
  Description of Artificial Sequence: Synthetic oligonucleotide
cauauacgucauauaauac

SEQ ID NO: 2788872 - RNA, 19 nt, Artificial Sequence
  Description of Artificial Sequence: Synthetic oligonucleotide
agcgcugacauacuccauc

SEQ ID NO: 2788873 - RNA, 19 nt, Artificial Sequence
  Description of Artificial Sequence: Synthetic oligonucleotide
acauuuugcacaaacuuca

SEQ ID NO: 2788874 - RNA, 19 nt, Artificial Sequence
  Description of Artificial Sequence: Synthetic oligonucleotide
cuuugcagcgcugacauac

SEQ ID NO: 2788875 - RNA, 19 nt, Artificial Sequence
  Description of Artificial Sequence: Synthetic oligonucleotide
cuuuugcaaacauuuaaca

SEQ ID NO: 2788876 - RNA, 19 nt, Artificial Sequence
  Description of Artificial Sequence: Synthetic oligonucleotide
caguauuuacugaaguuuc

SEQ ID NO: 2788877 - RNA, 19 nt, Artificial Sequence
  Description of Artificial Sequence: Synthetic oligonucleotide
aaguucacaggcacauggc

SEQ ID NO: 2788878 - RNA, 19 nt, Artificial Sequence
  Description of Artificial Sequence: Synthetic oligonucleotide
uuuacugaaguuucagguu

SEQ ID NO: 2788879 - RNA, 19 nt, Artificial Sequence
  Description of Artificial Sequence: Synthetic oligonucleotide
aaugguucuaguaaauaua

SEQ ID NO: 2788880 - RNA, 19 nt, Artificial Sequence
  Description of Artificial Sequence: Synthetic oligonucleotide
agaacuucuuugcagcgcu

SEQ ID NO: 2788881 - RNA, 19 nt, Artificial Sequence
  Description of Artificial Sequence: Synthetic oligonucleotide
uacacgccacucaagaacu

SEQ ID NO: 2788882 - RNA, 19 nt, Artificial Sequence
  Description of Artificial Sequence: Synthetic oligonucleotide
aguuucagguucuuuauua

SEQ ID NO: 2788883 - RNA, 19 nt, Artificial Sequence
  Description of Artificial Sequence: Synthetic oligonucleotide
uugaaggugaacguauucu

SEQ ID NO: 2788884 - RNA, 19 nt, Artificial Sequence
  Description of Artificial Sequence: Synthetic oligonucleotide
uuugaaggugaacguauuc

SEQ ID NO: 2788885 - RNA, 19 nt, Artificial Sequence
  Description of Artificial Sequence: Synthetic oligonucleotide
uuugcacaaacuucaaguu

SEQ ID NO: 2788886 - RNA, 19 nt, Artificial Sequence
  Description of Artificial Sequence: Synthetic oligonucleotide
acacuucuuagguuuugac

SEQ ID NO: 2788887 - RNA, 19 nt, Artificial Sequence
  Description of Artificial Sequence: Synthetic oligonucleotide
uagguuuugacagugguuu

SEQ ID NO: 2788888 - RNA, 19 nt, Artificial Sequence
  Description of Artificial Sequence: Synthetic oligonucleotide
cugacauacuccaucauga

SEQ ID NO: 2788889 - RNA, 19 nt, Artificial Sequence
  Description of Artificial Sequence: Synthetic oligonucleotide
caagaacuucuuugcagcg

SEQ ID NO: 2788890 - RNA, 19 nt, Artificial Sequence
  Description of Artificial Sequence: Synthetic oligonucleotide
acacauaaugugguaagag

SEQ ID NO: 2788891 - RNA, 19 nt, Artificial Sequence
  Description of Artificial Sequence: Synthetic oligonucleotide
uguauuuuacacgccacuc

SEQ ID NO: 2788892 - RNA, 19 nt, Artificial Sequence
  Description of Artificial Sequence: Synthetic oligonucleotide
uucaguauuuacugaaguu

SEQ ID NO: 2788893 - RNA, 19 nt, Artificial Sequence
  Description of Artificial Sequence: Synthetic oligonucleotide
uugcacaaacuucaaguuc

SEQ ID NO: 2788894 - RNA, 19 nt, Artificial Sequence
  Description of Artificial Sequence: Synthetic oligonucleotide
gucuccaucgucgucaucc

SEQ ID NO: 2788895 - RNA, 19 nt, Artificial Sequence
  Description of Artificial Sequence: Synthetic oligonucleotide
acauggccuacacauaaug

SEQ ID NO: 2788896 - RNA, 19 nt, Artificial Sequence
  Description of Artificial Sequence: Synthetic oligonucleotide
gaugucuucuuucuuccca

SEQ ID NO: 2788897 - RNA, 19 nt, Artificial Sequence
  Description of Artificial Sequence: Synthetic oligonucleotide
gauuuucaguauuuacuga

SEQ ID NO: 2788898 - RNA, 19 nt, Artificial Sequence
  Description of Artificial Sequence: Synthetic oligonucleotide
cauccuaagagucuccauc

SEQ ID NO: 2788899 - RNA, 19 nt, Artificial Sequence
  Description of Artificial Sequence: Synthetic oligonucleotide
gacauacuccaucaugaac

SEQ ID NO: 2788900 - RNA, 19 nt, Artificial Sequence
  Description of Artificial Sequence: Synthetic oligonucleotide
uaagaguccuucacugucu

SEQ ID NO: 2788901 - RNA, 19 nt, Artificial Sequence
  Description of Artificial Sequence: Synthetic oligonucleotide
guauuuacugaaguuucag

SEQ ID NO: 2788902 - RNA, 19 nt, Artificial Sequence
  Description of Artificial Sequence: Synthetic oligonucleotide
uucugggaacucaucacca

SEQ ID NO: 2788903 - RNA, 19 nt, Artificial Sequence
  Description of Artificial Sequence: Synthetic oligonucleotide
aacggaauaaugaugucuu

SEQ ID NO: 2788904 - RNA, 19 nt, Artificial Sequence
  Description of Artificial Sequence: Synthetic oligonucleotide
auacauguacauauacguc

SEQ ID NO: 2788905 - RNA, 19 nt, Artificial Sequence
  Description of Artificial Sequence: Synthetic oligonucleotide
uuuucuuggucugaacacu

SEQ ID NO: 2788906 - RNA, 19 nt, Artificial Sequence
  Description of Artificial Sequence: Synthetic oligonucleotide
uuagaaccuugauuuucag

SEQ ID NO: 2788907 - RNA, 19 nt, Artificial Sequence
  Description of Artificial Sequence: Synthetic oligonucleotide
uuaauuuucuuggucugaa

SEQ ID NO: 2788908 - RNA, 19 nt, Artificial Sequence
  Description of Artificial Sequence: Synthetic oligonucleotide
gcuucugaggccuggaccg

SEQ ID NO: 2788909 - RNA, 19 nt, Artificial Sequence
  Description of Artificial Sequence: Synthetic oligonucleotide
cuuucugggaacucaucac

SEQ ID NO: 2788910 - RNA, 19 nt, Artificial Sequence
  Description of Artificial Sequence: Synthetic oligonucleotide
uuucagguucuuuauuaaa

SEQ ID NO: 2788911 - RNA, 19 nt, Artificial Sequence
  Description of Artificial Sequence: Synthetic oligonucleotide
uacuugcuguauuuuacac

SEQ ID NO: 2788912 - RNA, 19 nt, Artificial Sequence
  Description of Artificial Sequence: Synthetic oligonucleotide
ucugcgguuagaaccuuga

SEQ ID NO: 2788913 - RNA, 19 nt, Artificial Sequence
  Description of Artificial Sequence: Synthetic oligonucleotide
cugaacacucuuaucgaac

SEQ ID NO: 2788914 - RNA, 19 nt, Artificial Sequence
  Description of Artificial Sequence: Synthetic oligonucleotide
uguacauauacgucauaua

SEQ ID NO: 2788915 - RNA, 19 nt, Artificial Sequence
  Description of Artificial Sequence: Synthetic oligonucleotide
guaagaguccuucacuguc

SEQ ID NO: 2788916 - RNA, 19 nt, Artificial Sequence
  Description of Artificial Sequence: Synthetic oligonucleotide
ucugaacacucuuaucgaa

SEQ ID NO: 2788917 - RNA, 19 nt, Artificial Sequence
  Description of Artificial Sequence: Synthetic oligonucleotide
uuucuuggucugaacacuc

SEQ ID NO: 2788918 - RNA, 19 nt, Artificial Sequence
  Description of Artificial Sequence: Synthetic oligonucleotide
gacagugguuuguacuugc

SEQ ID NO: 2788919 - RNA, 19 nt, Artificial Sequence
  Description of Artificial Sequence: Synthetic oligonucleotide
uuggucugaacacucuuau

SEQ ID NO: 2788920 - RNA, 19 nt, Artificial Sequence
  Description of Artificial Sequence: Synthetic oligonucleotide
ugggaacucaucaccaauc

SEQ ID NO: 2788921 - RNA, 19 nt, Artificial Sequence
  Description of Artificial Sequence: Synthetic oligonucleotide
ugcgguuagaaccuugauu

SEQ ID NO: 2788922 - RNA, 19 nt, Artificial Sequence
  Description of Artificial Sequence: Synthetic oligonucleotide
aagagucuccaucgucguc

SEQ ID NO: 2788923 - RNA, 19 nt, Artificial Sequence
  Description of Artificial Sequence: Synthetic oligonucleotide
uucuuagguuuugacagug

SEQ ID NO: 2788924 - RNA, 19 nt, Artificial Sequence
  Description of Artificial Sequence: Synthetic oligonucleotide
uugacagugguuuguacuu

SEQ ID NO: 2788925 - RNA, 19 nt, Artificial Sequence
  Description of Artificial Sequence: Synthetic oligonucleotide
uucaaugguucuaguaaau

SEQ ID NO: 2788926 - RNA, 19 nt, Artificial Sequence
  Description of Artificial Sequence: Synthetic oligonucleotide
aacguauucuggugcuucu

SEQ ID NO: 2788927 - RNA, 19 nt, Artificial Sequence
  Description of Artificial Sequence: Synthetic oligonucleotide
aaccuugauuuucaguauu

SEQ ID NO: 2788928 - RNA, 19 nt, Artificial Sequence
  Description of Artificial Sequence: Synthetic oligonucleotide
acuucuuugcagcgcugac

SEQ ID NO: 2788929 - RNA, 19 nt, Artificial Sequence
  Description of Artificial Sequence: Synthetic oligonucleotide
aucacuguccuccuucccu

SEQ ID NO: 2788930 - RNA, 19 nt, Artificial Sequence
  Description of Artificial Sequence: Synthetic oligonucleotide
agauccucaucacuguccu

SEQ ID NO: 2788931 - RNA, 19 nt, Artificial Sequence
  Description of Artificial Sequence: Synthetic oligonucleotide
aacucaucaccaaucacaa

SEQ ID NO: 2788932 - RNA, 19 nt, Artificial Sequence
  Description of Artificial Sequence: Synthetic oligonucleotide
acaggcacauggccuacac

SEQ ID NO: 2788933 - RNA, 19 nt, Artificial Sequence
  Description of Artificial Sequence: Synthetic oligonucleotide
auguacauauacgucauau

SEQ ID NO: 2788934 - RNA, 19 nt, Artificial Sequence
  Description of Artificial Sequence: Synthetic oligonucleotide
uuagguuuugacagugguu

SEQ ID NO: 2788935 - RNA, 19 nt, Artificial Sequence
  Description of Artificial Sequence: Synthetic oligonucleotide
ggugaacguauucuggugc

SEQ ID NO: 2788936 - RNA, 19 nt, Artificial Sequence
  Description of Artificial Sequence: Synthetic oligonucleotide
uagaaccuugauuuucagu

SEQ ID NO: 2788937 - RNA, 19 nt, Artificial Sequence
  Description of Artificial Sequence: Synthetic oligonucleotide
uuaacacacuucuuagguu

SEQ ID NO: 2788938 - RNA, 19 nt, Artificial Sequence
  Description of Artificial Sequence: Synthetic oligonucleotide
uuuacacgccacucaagaa

SEQ ID NO: 2788939 - RNA, 19 nt, Artificial Sequence
  Description of Artificial Sequence: Synthetic oligonucleotide
auaaugugguaagaguccu

SEQ ID NO: 2788940 - RNA, 19 nt, Artificial Sequence
  Description of Artificial Sequence: Synthetic oligonucleotide
auuaauuuucuuggucuga

SEQ ID NO: 2788941 - RNA, 19 nt, Artificial Sequence
  Description of Artificial Sequence: Synthetic oligonucleotide
acucaagaacuucuuugca

SEQ ID NO: 2788942 - RNA, 19 nt, Artificial Sequence
  Description of Artificial Sequence: Synthetic oligonucleotide
uuguacuugcuguauuuua

SEQ ID NO: 2788943 - RNA, 19 nt, Artificial Sequence
  Description of Artificial Sequence: Synthetic oligonucleotide
uuuugacagugguuuguac

SEQ ID NO: 2788944 - RNA, 19 nt, Artificial Sequence
  Description of Artificial Sequence: Synthetic oligonucleotide
ucuggugcuucugaggccu

SEQ ID NO: 2788945 - RNA, 19 nt, Artificial Sequence
  Description of Artificial Sequence: Synthetic oligonucleotide
ucuccaucgucgucauccg

SEQ ID NO: 2788946 - RNA, 19 nt, Artificial Sequence
  Description of Artificial Sequence: Synthetic oligonucleotide
acggaauaaugaugucuuc

SEQ ID NO: 2788947 - RNA, 19 nt, Artificial Sequence
  Description of Artificial Sequence: Synthetic oligonucleotide
uuauuucaaugguucuagu

SEQ ID NO: 2788948 - RNA, 19 nt, Artificial Sequence
  Description of Artificial Sequence: Synthetic oligonucleotide
uuuugaaggugaacguauu

SEQ ID NO: 2788949 - RNA, 19 nt, Artificial Sequence
  Description of Artificial Sequence: Synthetic oligonucleotide
uacacauaaugugguaaga

SEQ ID NO: 2788950 - RNA, 19 nt, Artificial Sequence
  Description of Artificial Sequence: Synthetic oligonucleotide
ugucuuuugcaaacauuua

SEQ ID NO: 2788951 - RNA, 19 nt, Artificial Sequence
  Description of Artificial Sequence: Synthetic oligonucleotide
cacuucuuagguuuugaca

SEQ ID NO: 2788952 - RNA, 19 nt, Artificial Sequence
  Description of Artificial Sequence: Synthetic oligonucleotide
uaagagucuccaucgucgu

SEQ ID NO: 2788953 - RNA, 19 nt, Artificial Sequence
  Description of Artificial Sequence: Synthetic oligonucleotide
augguucuaguaaauauau

SEQ ID NO: 2788954 - RNA, 19 nt, Artificial Sequence
  Description of Artificial Sequence: Synthetic oligonucleotide
agguucuuuauuaaacgga

SEQ ID NO: 2788955 - RNA, 19 nt, Artificial Sequence
  Description of Artificial Sequence: Synthetic oligonucleotide
guuagaaccuugauuuuca

SEQ ID NO: 2788956 - RNA, 19 nt, Artificial Sequence
  Description of Artificial Sequence: Synthetic oligonucleotide
aaguuucagguucuuuauu

SEQ ID NO: 2788957 - RNA, 19 nt, Artificial Sequence
  Description of Artificial Sequence: Synthetic oligonucleotide
aacuucuuugcagcgcuga

SEQ ID NO: 2788958 - RNA, 19 nt, Artificial Sequence
  Description of Artificial Sequence: Synthetic oligonucleotide
ucgucauccgagucagugc

SEQ ID NO: 2788959 - RNA, 19 nt, Artificial Sequence
  Description of Artificial Sequence: Synthetic oligonucleotide
aggugaacguauucuggug

SEQ ID NO: 2788960 - RNA, 19 nt, Artificial Sequence
  Description of Artificial Sequence: Synthetic oligonucleotide
agucagugccagcaucuag

SEQ ID NO: 2788961 - RNA, 19 nt, Artificial Sequence
  Description of Artificial Sequence: Synthetic oligonucleotide
ucaaugguucuaguaaaua

SEQ ID NO: 2788962 - RNA, 19 nt, Artificial Sequence
  Description of Artificial Sequence: Synthetic oligonucleotide
gcugacauacuccaucaug

SEQ ID NO: 2788963 - RNA, 19 nt, Artificial Sequence
  Description of Artificial Sequence: Synthetic oligonucleotide
ucauccgagucagugccag

SEQ ID NO: 2788964 - RNA, 19 nt, Artificial Sequence
  Description of Artificial Sequence: Synthetic oligonucleotide
ugaugucuucuuucuuccc

SEQ ID NO: 2788965 - RNA, 19 nt, Artificial Sequence
  Description of Artificial Sequence: Synthetic oligonucleotide
ugacauacuccaucaugaa

SEQ ID NO: 2788966 - RNA, 19 nt, Artificial Sequence
  Description of Artificial Sequence: Synthetic oligonucleotide
uaaacggaauaaugauguc

SEQ ID NO: 2788967 - RNA, 19 nt, Artificial Sequence
  Description of Artificial Sequence: Synthetic oligonucleotide
aacuucaaguucacaggca

SEQ ID NO: 2788968 - RNA, 19 nt, Artificial Sequence
  Description of Artificial Sequence: Synthetic oligonucleotide
guacuugcuguauuuuaca

SEQ ID NO: 2788969 - RNA, 19 nt, Artificial Sequence
  Description of Artificial Sequence: Synthetic oligonucleotide
uucuuggucugaacacucu

SEQ ID NO: 2788970 - RNA, 19 nt, Artificial Sequence
  Description of Artificial Sequence: Synthetic oligonucleotide
augaacuuuggcauuaauu

SEQ ID NO: 2788971 - RNA, 19 nt, Artificial Sequence
  Description of Artificial Sequence: Synthetic oligonucleotide
ucuuggucugaacacucuu

SEQ ID NO: 2788972 - RNA, 19 nt, Artificial Sequence
  Description of Artificial Sequence: Synthetic oligonucleotide
auacgucauauaauacauc

SEQ ID NO: 2788973 - RNA, 19 nt, Artificial Sequence
  Description of Artificial Sequence: Synthetic oligonucleotide
uggcauuaauuuucuuggu

SEQ ID NO: 2788974 - RNA, 19 nt, Artificial Sequence
  Description of Artificial Sequence: Synthetic oligonucleotide
ggcauuaauuuucuugguc

SEQ ID NO: 2788975 - RNA, 19 nt, Artificial Sequence
  Description of Artificial Sequence: Synthetic oligonucleotide
gucgucauccgagucagug

SEQ ID NO: 2788976 - RNA, 19 nt, Artificial Sequence
  Description of Artificial Sequence: Synthetic oligonucleotide
gcauuaauuuucuuggucu

SEQ ID NO: 2788977 - RNA, 19 nt, Artificial Sequence
  Description of Artificial Sequence: Synthetic oligonucleotide
aguccuucacugucuuuug

SEQ ID NO: 2788978 - RNA, 19 nt, Artificial Sequence
  Description of Artificial Sequence: Synthetic oligonucleotide
uuugcagcgcugacauacu

SEQ ID NO: 2788979 - RNA, 19 nt, Artificial Sequence
  Description of Artificial Sequence: Synthetic oligonucleotide
ccacucaagaacuucuuug

SEQ ID NO: 2788980 - RNA, 19 nt, Artificial Sequence
  Description of Artificial Sequence: Synthetic oligonucleotide
uuaucgaacuugucauuuu

SEQ ID NO: 2788981 - RNA, 19 nt, Artificial Sequence
  Description of Artificial Sequence: Synthetic oligonucleotide
gccacguugccuuucuggg

SEQ ID NO: 2788982 - RNA, 19 nt, Artificial Sequence
  Description of Artificial Sequence: Synthetic oligonucleotide
gucugaacacucuuaucga

SEQ ID NO: 2788983 - RNA, 19 nt, Artificial Sequence
  Description of Artificial Sequence: Synthetic oligonucleotide
ucuuaucgaacuugucauu

SEQ ID NO: 2788984 - RNA, 19 nt, Artificial Sequence
  Description of Artificial Sequence: Synthetic oligonucleotide
cugucuuuugcaaacauuu

SEQ ID NO: 2788985 - RNA, 19 nt, Artificial Sequence
  Description of Artificial Sequence: Synthetic oligonucleotide
guuucagguucuuuauuaa

SEQ ID NO: 2788986 - RNA, 19 nt, Artificial Sequence
  Description of Artificial Sequence: Synthetic oligonucleotide
gaacguauucuggugcuuc

SEQ ID NO: 2788987 - RNA, 19 nt, Artificial Sequence
  Description of Artificial Sequence: Synthetic oligonucleotide
aagaguccuucacugucuu

SEQ ID NO: 2788988 - RNA, 19 nt, Artificial Sequence
  Description of Artificial Sequence: Synthetic oligonucleotide
gaaguuucagguucuuuau

SEQ ID NO: 2788989 - RNA, 19 nt, Artificial Sequence
  Description of Artificial Sequence: Synthetic oligonucleotide
uccuaagagucuccaucgu

SEQ ID NO: 2788990 - RNA, 19 nt, Artificial Sequence
  Description of Artificial Sequence: Synthetic oligonucleotide
uugcuguauuuuacacgcc

SEQ ID NO: 2788991 - RNA, 19 nt, Artificial Sequence
  Description of Artificial Sequence: Synthetic oligonucleotide
ugguucuaguaaauauaua

SEQ ID NO: 2788992 - RNA, 19 nt, Artificial Sequence
  Description of Artificial Sequence: Synthetic oligonucleotide
agguuuugacagugguuug

SEQ ID NO: 2788993 - RNA, 19 nt, Artificial Sequence
  Description of Artificial Sequence: Synthetic oligonucleotide
uuuguacuugcuguauuuu

SEQ ID NO: 2788994 - RNA, 19 nt, Artificial Sequence
  Description of Artificial Sequence: Synthetic oligonucleotide
uucugcgguuagaaccuug

SEQ ID NO: 2788995 - RNA, 19 nt, Artificial Sequence
  Description of Artificial Sequence: Synthetic oligonucleotide
ugucuucuuucuucccaca

SEQ ID NO: 2788996 - RNA, 19 nt, Artificial Sequence
  Description of Artificial Sequence: Synthetic oligonucleotide
gaggccuggaccgagccac

SEQ ID NO: 2788997 - RNA, 19 nt, Artificial Sequence
  Description of Artificial Sequence: Synthetic oligonucleotide
cuagauccucaucacuguc

SEQ ID NO: 2788998 - RNA, 19 nt, Artificial Sequence
  Description of Artificial Sequence: Synthetic oligonucleotide
cagugguuuguacuugcug

SEQ ID NO: 2788999 - RNA, 19 nt, Artificial Sequence
  Description of Artificial Sequence: Synthetic oligonucleotide
cacauaaugugguaagagu

SEQ ID NO: 2789000 - RNA, 19 nt, Artificial Sequence
  Description of Artificial Sequence: Synthetic oligonucleotide
uugccuuucugggaacuca

SEQ ID NO: 2789001 - RNA, 19 nt, Artificial Sequence
  Description of Artificial Sequence: Synthetic oligonucleotide
aacauuuaacacacuucuu

SEQ ID NO: 2789002 - RNA, 19 nt, Artificial Sequence
  Description of Artificial Sequence: Synthetic oligonucleotide
ucagugccagcaucuagau

SEQ ID NO: 2789003 - RNA, 19 nt, Artificial Sequence
  Description of Artificial Sequence: Synthetic oligonucleotide
acucaucaccaaucacaag

SEQ ID NO: 2789004 - RNA, 19 nt, Artificial Sequence
  Description of Artificial Sequence: Synthetic oligonucleotide
auuuuacacgccacucaag

SEQ ID NO: 2789005 - RNA, 19 nt, Artificial Sequence
  Description of Artificial Sequence: Synthetic oligonucleotide
uucuggugcuucugaggcc

SEQ ID NO: 2789006 - RNA, 19 nt, Artificial Sequence
  Description of Artificial Sequence: Synthetic oligonucleotide
ucugaggccuggaccgagc

SEQ ID NO: 2789007 - RNA, 19 nt, Artificial Sequence
  Description of Artificial Sequence: Synthetic oligonucleotide
caaugguucuaguaaauau

SEQ ID NO: 2789008 - RNA, 19 nt, Artificial Sequence
  Description of Artificial Sequence: Synthetic oligonucleotide
cucuuaucgaacuugucau

SEQ ID NO: 2789009 - RNA, 19 nt, Artificial Sequence
  Description of Artificial Sequence: Synthetic oligonucleotide
uguccuccuucccucugca

SEQ ID NO: 2789010 - RNA, 19 nt, Artificial Sequence
  Description of Artificial Sequence: Synthetic oligonucleotide
gucagugccagcaucuaga

SEQ ID NO: 2789011 - RNA, 19 nt, Artificial Sequence
  Description of Artificial Sequence: Synthetic oligonucleotide
gucauauaauacauccuaa

SEQ ID NO: 2789012 - RNA, 19 nt, Artificial Sequence
  Description of Artificial Sequence: Synthetic oligonucleotide
acuccaucaugaacuuugg

SEQ ID NO: 2789013 - RNA, 19 nt, Artificial Sequence
  Description of Artificial Sequence: Synthetic oligonucleotide
acuuuggcauuaauuuucu

SEQ ID NO: 2789014 - RNA, 19 nt, Artificial Sequence
  Description of Artificial Sequence: Synthetic oligonucleotide
ugcaaacauuuaacacacu

SEQ ID NO: 2789015 - RNA, 19 nt, Artificial Sequence
  Description of Artificial Sequence: Synthetic oligonucleotide
cuccaucaugaacuuuggc

SEQ ID NO: 2789016 - RNA, 19 nt, Artificial Sequence
  Description of Artificial Sequence: Synthetic oligonucleotide
cuuagguuuugacaguggu

SEQ ID NO: 2789017 - RNA, 19 nt, Artificial Sequence
  Description of Artificial Sequence: Synthetic oligonucleotide
gaauaaugaugucuucuuu

SEQ ID NO: 2789018 - RNA, 19 nt, Artificial Sequence
  Description of Artificial Sequence: Synthetic oligonucleotide
auccgagucagugccagca

SEQ ID NO: 2789019 - RNA, 19 nt, Artificial Sequence
  Description of Artificial Sequence: Synthetic oligonucleotide
gcgguuagaaccuugauuu

SEQ ID NO: 2789020 - RNA, 19 nt, Artificial Sequence
  Description of Artificial Sequence: Synthetic oligonucleotide
acauguacauauacgucau

SEQ ID NO: 2789021 - RNA, 19 nt, Artificial Sequence
  Description of Artificial Sequence: Synthetic oligonucleotide
gguuagaaccuugauuuuc

SEQ ID NO: 2789022 - RNA, 19 nt, Artificial Sequence
  Description of Artificial Sequence: Synthetic oligonucleotide
ugccuuucugggaacucau

SEQ ID NO: 2789023 - RNA, 19 nt, Artificial Sequence
  Description of Artificial Sequence: Synthetic oligonucleotide
cuuuauuaaacggaauaau

SEQ ID NO: 2789024 - RNA, 19 nt, Artificial Sequence
  Description of Artificial Sequence: Synthetic oligonucleotide
uaaugugguaagaguccuu

SEQ ID NO: 2789025 - RNA, 19 nt, Artificial Sequence
  Description of Artificial Sequence: Synthetic oligonucleotide
acacucuuaucgaacuugu

SEQ ID NO: 2789026 - RNA, 19 nt, Artificial Sequence
  Description of Artificial Sequence: Synthetic oligonucleotide
uggucugaacacucuuauc

SEQ ID NO: 2789027 - RNA, 19 nt, Artificial Sequence
  Description of Artificial Sequence: Synthetic oligonucleotide
cuucaaguucacaggcaca

SEQ ID NO: 2789028 - RNA, 19 nt, Artificial Sequence
  Description of Artificial Sequence: Synthetic oligonucleotide
uggaccgagccacguugcc

SEQ ID NO: 2789029 - RNA, 19 nt, Artificial Sequence
  Description of Artificial Sequence: Synthetic oligonucleotide
guccuucacugucuuuugc

SEQ ID NO: 2789030 - RNA, 19 nt, Artificial Sequence
  Description of Artificial Sequence: Synthetic oligonucleotide
acgucauauaauacauccu

SEQ ID NO: 2789031 - RNA, 19 nt, Artificial Sequence
  Description of Artificial Sequence: Synthetic oligonucleotide
cuggaccgagccacguugc

SEQ ID NO: 2789032 - RNA, 19 nt, Artificial Sequence
  Description of Artificial Sequence: Synthetic oligonucleotide
cuuggucugaacacucuua

SEQ ID NO: 2789033 - RNA, 19 nt, Artificial Sequence
  Description of Artificial Sequence: Synthetic oligonucleotide
acauccuaagagucuccau

SEQ ID NO: 2789034 - RNA, 19 nt, Artificial Sequence
  Description of Artificial Sequence: Synthetic oligonucleotide
cugaggccuggaccgagcc

SEQ ID NO: 2789035 - RNA, 19 nt, Artificial Sequence
  Description of Artificial Sequence: Synthetic oligonucleotide
acguugccuuucugggaac

SEQ ID NO: 2789036 - RNA, 19 nt, Artificial Sequence
  Description of Artificial Sequence: Synthetic oligonucleotide
gggaacucaucaccaauca

SEQ ID NO: 2789037 - RNA, 19 nt, Artificial Sequence
  Description of Artificial Sequence: Synthetic oligonucleotide
uucuuucuucccacauuuu

SEQ ID NO: 2789038 - RNA, 19 nt, Artificial Sequence
  Description of Artificial Sequence: Synthetic oligonucleotide
ugguuuguacuugcuguau

SEQ ID NO: 2789039 - RNA, 19 nt, Artificial Sequence
  Description of Artificial Sequence: Synthetic oligonucleotide
ggaacucaucaccaaucac

SEQ ID NO: 2789040 - RNA, 19 nt, Artificial Sequence
  Description of Artificial Sequence: Synthetic oligonucleotide
cuguccuccuucccucugc

SEQ ID NO: 2789041 - RNA, 19 nt, Artificial Sequence
  Description of Artificial Sequence: Synthetic oligonucleotide
cacguugccuuucugggaa

SEQ ID NO: 2789042 - RNA, 19 nt, Artificial Sequence
  Description of Artificial Sequence: Synthetic oligonucleotide
guuuguacuugcuguauuu

SEQ ID NO: 2789043 - RNA, 19 nt, Artificial Sequence
  Description of Artificial Sequence: Synthetic oligonucleotide
uucugaggccuggaccgag

SEQ ID NO: 2789044 - RNA, 19 nt, Artificial Sequence
  Description of Artificial Sequence: Synthetic oligonucleotide
caucacuguccuccuuccc

SEQ ID NO: 2789045 - RNA, 19 nt, Artificial Sequence
  Description of Artificial Sequence: Synthetic oligonucleotide
ugcagcuucuucugcgguu

SEQ ID NO: 2789046 - RNA, 19 nt, Artificial Sequence
  Description of Artificial Sequence: Synthetic oligonucleotide
gaaccuugauuuucaguau

SEQ ID NO: 2789047 - RNA, 19 nt, Artificial Sequence
  Description of Artificial Sequence: Synthetic oligonucleotide
gcaucuagauccucaucac

SEQ ID NO: 2789048 - RNA, 19 nt, Artificial Sequence
  Description of Artificial Sequence: Synthetic oligonucleotide
gcaaacauuuaacacacuu

SEQ ID NO: 2789049 - RNA, 19 nt, Artificial Sequence
  Description of Artificial Sequence: Synthetic oligonucleotide
gugguaagaguccuucacu

SEQ ID NO: 2789050 - RNA, 19 nt, Artificial Sequence
  Description of Artificial Sequence: Synthetic oligonucleotide
uggugcuucugaggccugg

SEQ ID NO: 2789051 - RNA, 19 nt, Artificial Sequence
  Description of Artificial Sequence: Synthetic oligonucleotide
cacucuuaucgaacuuguc

SEQ ID NO: 2789052 - RNA, 19 nt, Artificial Sequence
  Description of Artificial Sequence: Synthetic oligonucleotide
cauuuugcacaaacuucaa

SEQ ID NO: 2789053 - RNA, 19 nt, Artificial Sequence
  Description of Artificial Sequence: Synthetic oligonucleotide
cauggccuacacauaaugu

SEQ ID NO: 2789054 - RNA, 19 nt, Artificial Sequence
  Description of Artificial Sequence: Synthetic oligonucleotide
acuguccuccuucccucug

SEQ ID NO: 2789055 - RNA, 19 nt, Artificial Sequence
  Description of Artificial Sequence: Synthetic oligonucleotide
cgucauccgagucagugcc

SEQ ID NO: 2789056 - RNA, 19 nt, Artificial Sequence
  Description of Artificial Sequence: Synthetic oligonucleotide
acugucuuuugcaaacauu

SEQ ID NO: 2789057 - RNA, 19 nt, Artificial Sequence
  Description of Artificial Sequence: Synthetic oligonucleotide
aacacacuucuuagguuuu

SEQ ID NO: 2789058 - RNA, 19 nt, Artificial Sequence
  Description of Artificial Sequence: Synthetic oligonucleotide
cuucuuugcagcgcugaca

SEQ ID NO: 2789059 - RNA, 19 nt, Artificial Sequence
  Description of Artificial Sequence: Synthetic oligonucleotide
ggaauaaugaugucuucuu

SEQ ID NO: 2789060 - RNA, 19 nt, Artificial Sequence
  Description of Artificial Sequence: Synthetic oligonucleotide
ccuuucugggaacucauca

SEQ ID NO: 2789061 - RNA, 19 nt, Artificial Sequence
  Description of Artificial Sequence: Synthetic oligonucleotide
ucaugaacuuuggcauuaa

SEQ ID NO: 2789062 - RNA, 19 nt, Artificial Sequence
  Description of Artificial Sequence: Synthetic oligonucleotide
uccgagucagugccagcau

SEQ ID NO: 2789063 - RNA, 19 nt, Artificial Sequence
  Description of Artificial Sequence: Synthetic oligonucleotide
gugaacguauucuggugcu

SEQ ID NO: 2789064 - RNA, 19 nt, Artificial Sequence
  Description of Artificial Sequence: Synthetic oligonucleotide
gugguuuguacuugcugua

SEQ ID NO: 2789065 - RNA, 19 nt, Artificial Sequence
  Description of Artificial Sequence: Synthetic oligonucleotide
cuguauuuuacacgccacu

SEQ ID NO: 2789066 - RNA, 19 nt, Artificial Sequence
  Description of Artificial Sequence: Synthetic oligonucleotide
ccuaagagucuccaucguc

SEQ ID NO: 2789067 - RNA, 19 nt, Artificial Sequence
  Description of Artificial Sequence: Synthetic oligonucleotide
acguauucuggugcuucug

SEQ ID NO: 2789068 - RNA, 19 nt, Artificial Sequence
  Description of Artificial Sequence: Synthetic oligonucleotide
gaguccuucacugucuuuu

SEQ ID NO: 2789069 - RNA, 19 nt, Artificial Sequence
  Description of Artificial Sequence: Synthetic oligonucleotide
accuugauuuucaguauuu

SEQ ID NO: 2789070 - RNA, 19 nt, Artificial Sequence
  Description of Artificial Sequence: Synthetic oligonucleotide
uccuucccucugcagcuuc

SEQ ID NO: 2789071 - RNA, 19 nt, Artificial Sequence
  Description of Artificial Sequence: Synthetic oligonucleotide
acgccacucaagaacuucu

SEQ ID NO: 2789072 - RNA, 19 nt, Artificial Sequence
  Description of Artificial Sequence: Synthetic oligonucleotide
gaacuucuuugcagcgcug

SEQ ID NO: 2789073 - RNA, 19 nt, Artificial Sequence
  Description of Artificial Sequence: Synthetic oligonucleotide
guuuugacagugguuugua

SEQ ID NO: 2789074 - RNA, 19 nt, Artificial Sequence
  Description of Artificial Sequence: Synthetic oligonucleotide
cacgccacucaagaacuuc

SEQ ID NO: 2789075 - RNA, 19 nt, Artificial Sequence
  Description of Artificial Sequence: Synthetic oligonucleotide
ccuggaccgagccacguug

SEQ ID NO: 2789076 - RNA, 19 nt, Artificial Sequence
  Description of Artificial Sequence: Synthetic oligonucleotide
gcuguauuuuacacgccac

SEQ ID NO: 2789077 - RNA, 19 nt, Artificial Sequence
  Description of Artificial Sequence: Synthetic oligonucleotide
guucacaggcacauggccu

SEQ ID NO: 2789078 - RNA, 19 nt, Artificial Sequence
  Description of Artificial Sequence: Synthetic oligonucleotide
cgucauauaauacauccua

SEQ ID NO: 2789079 - RNA, 19 nt, Artificial Sequence
  Description of Artificial Sequence: Synthetic oligonucleotide
cuuaucgaacuugucauuu

SEQ ID NO: 2789080 - RNA, 19 nt, Artificial Sequence
  Description of Artificial Sequence: Synthetic oligonucleotide
ugaacguauucuggugcuu

SEQ ID NO: 2789081 - RNA, 19 nt, Artificial Sequence
  Description of Artificial Sequence: Synthetic oligonucleotide
cauccgagucagugccagc

SEQ ID NO: 2789082 - RNA, 19 nt, Artificial Sequence
  Description of Artificial Sequence: Synthetic oligonucleotide
ccaucaugaacuuuggcau

SEQ ID NO: 2789083 - RNA, 19 nt, Artificial Sequence
  Description of Artificial Sequence: Synthetic oligonucleotide
cagcaucuagauccucauc

SEQ ID NO: 2789084 - RNA, 19 nt, Artificial Sequence
  Description of Artificial Sequence: Synthetic oligonucleotide
acagugguuuguacuugcu

SEQ ID NO: 2789085 - RNA, 19 nt, Artificial Sequence
  Description of Artificial Sequence: Synthetic oligonucleotide
caucuagauccucaucacu

SEQ ID NO: 2789086 - RNA, 19 nt, Artificial Sequence
  Description of Artificial Sequence: Synthetic oligonucleotide
cuucuuagguuuugacagu

SEQ ID NO: 2789087 - RNA, 19 nt, Artificial Sequence
  Description of Artificial Sequence: Synthetic oligonucleotide
gguaagaguccuucacugu

SEQ ID NO: 2789088 - RNA, 19 nt, Artificial Sequence
  Description of Artificial Sequence: Synthetic oligonucleotide
gaccgagccacguugccuu

SEQ ID NO: 2789089 - RNA, 19 nt, Artificial Sequence
  Description of Artificial Sequence: Synthetic oligonucleotide
gaacacucuuaucgaacuu

SEQ ID NO: 2789090 - RNA, 19 nt, Artificial Sequence
  Description of Artificial Sequence: Synthetic oligonucleotide
gcgcugacauacuccauca

SEQ ID NO: 2789091 - RNA, 19 nt, Artificial Sequence
  Description of Artificial Sequence: Synthetic oligonucleotide
guccuccuucccucugcag

SEQ ID NO: 2789092 - RNA, 19 nt, Artificial Sequence
  Description of Artificial Sequence: Synthetic oligonucleotide
ucacaggcacauggccuac

SEQ ID NO: 2789093 - RNA, 19 nt, Artificial Sequence
  Description of Artificial Sequence: Synthetic oligonucleotide
cacaaacuucaaguucaca

SEQ ID NO: 2789094 - RNA, 19 nt, Artificial Sequence
  Description of Artificial Sequence: Synthetic oligonucleotide
agaguccuucacugucuuu

SEQ ID NO: 2789095 - RNA, 19 nt, Artificial Sequence
  Description of Artificial Sequence: Synthetic oligonucleotide
gagccacguugccuuucug

SEQ ID NO: 2789096 - RNA, 19 nt, Artificial Sequence
  Description of Artificial Sequence: Synthetic oligonucleotide
ccuacacauaaugugguaa

SEQ ID NO: 2789097 - RNA, 19 nt, Artificial Sequence
  Description of Artificial Sequence: Synthetic oligonucleotide
gucuucuuucuucccacau

SEQ ID NO: 2789098 - RNA, 19 nt, Artificial Sequence
  Description of Artificial Sequence: Synthetic oligonucleotide
ucuuugcagcgcugacaua

SEQ ID NO: 2789099 - RNA, 19 nt, Artificial Sequence
  Description of Artificial Sequence: Synthetic oligonucleotide
cagugccagcaucuagauc

SEQ ID NO: 2789100 - RNA, 19 nt, Artificial Sequence
  Description of Artificial Sequence: Synthetic oligonucleotide
cauacuccaucaugaacuu

SEQ ID NO: 2789101 - RNA, 19 nt, Artificial Sequence
  Description of Artificial Sequence: Synthetic oligonucleotide
cagcuucuucugcgguuag

SEQ ID NO: 2789102 - RNA, 19 nt, Artificial Sequence
  Description of Artificial Sequence: Synthetic oligonucleotide
cauguacauauacgucaua

SEQ ID NO: 2789103 - RNA, 19 nt, Artificial Sequence
  Description of Artificial Sequence: Synthetic oligonucleotide
gccagcaucuagauccuca

SEQ ID NO: 2789104 - RNA, 19 nt, Artificial Sequence
  Description of Artificial Sequence: Synthetic oligonucleotide
gguuuugacagugguuugu

SEQ ID NO: 2789105 - RNA, 19 nt, Artificial Sequence
  Description of Artificial Sequence: Synthetic oligonucleotide
caucaugaacuuuggcauu

SEQ ID NO: 2789106 - RNA, 19 nt, Artificial Sequence
  Description of Artificial Sequence: Synthetic oligonucleotide
caggcacauggccuacaca

SEQ ID NO: 2789107 - RNA, 19 nt, Artificial Sequence
  Description of Artificial Sequence: Synthetic oligonucleotide
cugggaacucaucaccaau

SEQ ID NO: 2789108 - RNA, 19 nt, Artificial Sequence
  Description of Artificial Sequence: Synthetic oligonucleotide
cuggugcuucugaggccug

SEQ ID NO: 2789109 - RNA, 19 nt, Artificial Sequence
  Description of Artificial Sequence: Synthetic oligonucleotide
gcacaaacuucaaguucac

SEQ ID NO: 2789110 - RNA, 19 nt, Artificial Sequence
  Description of Artificial Sequence: Synthetic oligonucleotide
caugaacuuuggcauuaau

SEQ ID NO: 2789111 - RNA, 19 nt, Artificial Sequence
  Description of Artificial Sequence: Synthetic oligonucleotide
cguauucuggugcuucuga

SEQ ID NO: 2789112 - RNA, 19 nt, Artificial Sequence
  Description of Artificial Sequence: Synthetic oligonucleotide
cacugucuuuugcaaacau

SEQ ID NO: 2789113 - RNA, 19 nt, Artificial Sequence
  Description of Artificial Sequence: Synthetic oligonucleotide
gguuuguacuugcuguauu

SEQ ID NO: 2789114 - RNA, 19 nt, Artificial Sequence
  Description of Artificial Sequence: Synthetic oligonucleotide
gagucagugccagcaucua

SEQ ID NO: 2789115 - RNA, 19 nt, Artificial Sequence
  Description of Artificial Sequence: Synthetic oligonucleotide
cuccaucgucgucauccga

SEQ ID NO: 2789116 - RNA, 19 nt, Artificial Sequence
  Description of Artificial Sequence: Synthetic oligonucleotide
ccgagucagugccagcauc

SEQ ID NO: 2789117 - RNA, 19 nt, Artificial Sequence
  Description of Artificial Sequence: Synthetic oligonucleotide
gucauccgagucagugcca

SEQ ID NO: 2789118 - RNA, 19 nt, Artificial Sequence
  Description of Artificial Sequence: Synthetic oligonucleotide
gccuacacauaauguggua

SEQ ID NO: 2789119 - RNA, 19 nt, Artificial Sequence
  Description of Artificial Sequence: Synthetic oligonucleotide
ugccagcaucuagauccuc

SEQ ID NO: 2789120 - RNA, 19 nt, Artificial Sequence
  Description of Artificial Sequence: Synthetic oligonucleotide
aggccuggaccgagccacg

SEQ ID NO: 2789121 - RNA, 19 nt, Artificial Sequence
  Description of Artificial Sequence: Synthetic oligonucleotide
cuucugaggccuggaccga

SEQ ID NO: 2789122 - RNA, 19 nt, Artificial Sequence
  Description of Artificial Sequence: Synthetic oligonucleotide
gcagcuucuucugcgguua

SEQ ID NO: 2789123 - RNA, 19 nt, Artificial Sequence
  Description of Artificial Sequence: Synthetic oligonucleotide
ggccuacacauaauguggu

SEQ ID NO: 2789124 - RNA, 19 nt, Artificial Sequence
  Description of Artificial Sequence: Synthetic oligonucleotide
cacauggccuacacauaau

SEQ ID NO: 2789125 - RNA, 19 nt, Artificial Sequence
  Description of Artificial Sequence: Synthetic oligonucleotide
cuuuggcauuaauuuucuu

SEQ ID NO: 2789126 - RNA, 19 nt, Artificial Sequence
  Description of Artificial Sequence: Synthetic oligonucleotide
accgagccacguugccuuu

SEQ ID NO: 2789127 - RNA, 19 nt, Artificial Sequence
  Description of Artificial Sequence: Synthetic oligonucleotide
ccuugauuuucaguauuua

SEQ ID NO: 2789128 - RNA, 19 nt, Artificial Sequence
  Description of Artificial Sequence: Synthetic oligonucleotide
ccacguugccuuucuggga

SEQ ID NO: 2789129 - RNA, 19 nt, Artificial Sequence
  Description of Artificial Sequence: Synthetic oligonucleotide
cggaauaaugaugucuucu

SEQ ID NO: 2789130 - RNA, 19 nt, Artificial Sequence
  Description of Artificial Sequence: Synthetic oligonucleotide
cugcagcuucuucugcggu

SEQ ID NO: 2789131 - RNA, 19 nt, Artificial Sequence
  Description of Artificial Sequence: Synthetic oligonucleotide
ccuccuucccucugcagcu

SEQ ID NO: 2789132 - RNA, 19 nt, Artificial Sequence
  Description of Artificial Sequence: Synthetic oligonucleotide
gccacucaagaacuucuuu

SEQ ID NO: 2789133 - RNA, 19 nt, Artificial Sequence
  Description of Artificial Sequence: Synthetic oligonucleotide
cacuguccuccuucccucu

SEQ ID NO: 2789134 - RNA, 19 nt, Artificial Sequence
  Description of Artificial Sequence: Synthetic oligonucleotide
acacgccacucaagaacuu

SEQ ID NO: 2789135 - RNA, 19 nt, Artificial Sequence
  Description of Artificial Sequence: Synthetic oligonucleotide
gccuuucugggaacucauc

SEQ ID NO: 2789136 - RNA, 19 nt, Artificial Sequence
  Description of Artificial Sequence: Synthetic oligonucleotide
ggcacauggccuacacaua

SEQ ID NO: 2789137 - RNA, 19 nt, Artificial Sequence
  Description of Artificial Sequence: Synthetic oligonucleotide
cugcgguuagaaccuugau

SEQ ID NO: 2789138 - RNA, 19 nt, Artificial Sequence
  Description of Artificial Sequence: Synthetic oligonucleotide
ccagcaucuagauccucau

SEQ ID NO: 2789139 - RNA, 19 nt, Artificial Sequence
  Description of Artificial Sequence: Synthetic oligonucleotide
gugccagcaucuagauccu

SEQ ID NO: 2789140 - RNA, 19 nt, Artificial Sequence
  Description of Artificial Sequence: Synthetic oligonucleotide
ggaccgagccacguugccu

SEQ ID NO: 2789141 - RNA, 19 nt, Artificial Sequence
  Description of Artificial Sequence: Synthetic oligonucleotide
cagcgcugacauacuccau

SEQ ID NO: 2789142 - RNA, 19 nt, Artificial Sequence
  Description of Artificial Sequence: Synthetic oligonucleotide
ccgagccacguugccuuuc

SEQ ID NO: 2789143 - RNA, 19 nt, Artificial Sequence
  Description of Artificial Sequence: Synthetic oligonucleotide
cuucugcgguuagaaccuu

SEQ ID NO: 2789144 - RNA, 19 nt, Artificial Sequence
  Description of Artificial Sequence: Synthetic oligonucleotide
cgagccacguugccuuucu

SEQ ID NO: 2789145 - RNA, 19 nt, Artificial Sequence
  Description of Artificial Sequence: Synthetic oligonucleotide
gccuggaccgagccacguu

SEQ ID NO: 2789146 - RNA, 19 nt, Artificial Sequence
  Description of Artificial Sequence: Synthetic oligonucleotide
ggccuggaccgagccacgu

SEQ ID NO: 2789147 - RNA, 19 nt, Artificial Sequence
  Description of Artificial Sequence: Synthetic oligonucleotide
cuccuucccucugcagcuu

SEQ ID NO: 2789148 - RNA, 19 nt, Artificial Sequence
  Description of Artificial Sequence: Synthetic oligonucleotide
cguugccuuucugggaacu

SEQ ID NO: 2789149 - RNA, 19 nt, Artificial Sequence
  Description of Artificial Sequence: Synthetic oligonucleotide
cgguuagaaccuugauuuu

SEQ ID NO: 2789150 - RNA, 19 nt, Artificial Sequence
  Description of Artificial Sequence: Synthetic oligonucleotide
cgccacucaagaacuucuu

SEQ ID NO: 2789151 - RNA, 19 nt, Artificial Sequence
  Description of Artificial Sequence: Synthetic oligonucleotide
cgcugacauacuccaucau

SEQ ID NO: 2789152 - RNA, 19 nt, Artificial Sequence
  Description of Artificial Sequence: Synthetic oligonucleotide
acaacaaccacuuucuggc

SEQ ID NO: 2789153 - RNA, 19 nt, Artificial Sequence
  Description of Artificial Sequence: Synthetic oligonucleotide
ucagauuccgccauagccg

SEQ ID NO: 2789154 - RNA, 19 nt, Artificial Sequence
  Description of Artificial Sequence: Synthetic oligonucleotide
aucuacaacaaccacuuuc

SEQ ID NO: 2789155 - RNA, 19 nt, Artificial Sequence
  Description of Artificial Sequence: Synthetic oligonucleotide
auguagucgaucuugccgc

SEQ ID NO: 2789156 - RNA, 19 nt, Artificial Sequence
  Description of Artificial Sequence: Synthetic oligonucleotide
acaagaauccccuggaguc

SEQ ID NO: 2789157 - RNA, 19 nt, Artificial Sequence
  Description of Artificial Sequence: Synthetic oligonucleotide
aaugguacugauccuagcu

SEQ ID NO: 2789158 - RNA, 19 nt, Artificial Sequence
  Description of Artificial Sequence: Synthetic oligonucleotide
ucuacaacaaccacuuucu

SEQ ID NO: 2789159 - RNA, 19 nt, Artificial Sequence
  Description of Artificial Sequence: Synthetic oligonucleotide
uacucgagagcauaggagg

SEQ ID NO: 2789160 - RNA, 19 nt, Artificial Sequence
  Description of Artificial Sequence: Synthetic oligonucleotide
uacaacaaccacuuucugg

SEQ ID NO: 2789161 - RNA, 19 nt, Artificial Sequence
  Description of Artificial Sequence: Synthetic oligonucleotide
gagaucaucuacaacaacc

SEQ ID NO: 2789162 - RNA, 19 nt, Artificial Sequence
  Description of Artificial Sequence: Synthetic oligonucleotide
cuuaagugaggucagcucc

SEQ ID NO: 2789163 - RNA, 19 nt, Artificial Sequence
  Description of Artificial Sequence: Synthetic oligonucleotide
acaugguuccuccaguggc

SEQ ID NO: 2789164 - RNA, 19 nt, Artificial Sequence
  Description of Artificial Sequence: Synthetic oligonucleotide
uauugcaggagagagaaga

SEQ ID NO: 2789165 - RNA, 19 nt, Artificial Sequence
  Description of Artificial Sequence: Synthetic oligonucleotide
aacaagaauccccuggagu

SEQ ID NO: 2789166 - RNA, 19 nt, Artificial Sequence
  Description of Artificial Sequence: Synthetic oligonucleotide
uucuaguucagccuugcca

SEQ ID NO: 2789167 - RNA, 19 nt, Artificial Sequence
  Description of Artificial Sequence: Synthetic oligonucleotide
ucacaggcagcgcacaugg

SEQ ID NO: 2789168 - RNA, 19 nt, Artificial Sequence
  Description of Artificial Sequence: Synthetic oligonucleotide
uucuaaggcgucuuucugg

SEQ ID NO: 2789169 - RNA, 19 nt, Artificial Sequence
  Description of Artificial Sequence: Synthetic oligonucleotide
cuggauuucuaguucagcc

SEQ ID NO: 2789170 - RNA, 19 nt, Artificial Sequence
  Description of Artificial Sequence: Synthetic oligonucleotide
gauaucccugaacagcacg

SEQ ID NO: 2789171 - RNA, 19 nt, Artificial Sequence
  Description of Artificial Sequence: Synthetic oligonucleotide
caggagaucaucuacaaca

SEQ ID NO: 2789172 - RNA, 19 nt, Artificial Sequence
  Description of Artificial Sequence: Synthetic oligonucleotide
ucaucuacaacaaccacuu

SEQ ID NO: 2789173 - RNA, 19 nt, Artificial Sequence
  Description of Artificial Sequence: Synthetic oligonucleotide
ucuaguucagccuugccau

SEQ ID NO: 2789174 - RNA, 19 nt, Artificial Sequence
  Description of Artificial Sequence: Synthetic oligonucleotide
uccggaugagcacacagcc

SEQ ID NO: 2789175 - RNA, 19 nt, Artificial Sequence
  Description of Artificial Sequence: Synthetic oligonucleotide
caugcguggacuuaaggug

SEQ ID NO: 2789176 - RNA, 19 nt, Artificial Sequence
  Description of Artificial Sequence: Synthetic oligonucleotide
aaacaagaauccccuggag

SEQ ID NO: 2789177 - RNA, 19 nt, Artificial Sequence
  Description of Artificial Sequence: Synthetic oligonucleotide
ucacucauauugcaggaga

SEQ ID NO: 2789178 - RNA, 19 nt, Artificial Sequence
  Description of Artificial Sequence: Synthetic oligonucleotide
gagcauaggaggcugacac

SEQ ID NO: 2789179 - RNA, 19 nt, Artificial Sequence
  Description of Artificial Sequence: Synthetic oligonucleotide
acugauccuagcuucucuc

SEQ ID NO: 2789180 - RNA, 19 nt, Artificial Sequence
  Description of Artificial Sequence: Synthetic oligonucleotide
ucuaaggcgucuuucugga

SEQ ID NO: 2789181 - RNA, 19 nt, Artificial Sequence
  Description of Artificial Sequence: Synthetic oligonucleotide
augagcacacagcccaggc

SEQ ID NO: 2789182 - RNA, 19 nt, Artificial Sequence
  Description of Artificial Sequence: Synthetic oligonucleotide
uggauuucuaguucagccu

SEQ ID NO: 2789183 - RNA, 19 nt, Artificial Sequence
  Description of Artificial Sequence: Synthetic oligonucleotide
ucccugaacagcacgccgg

SEQ ID NO: 2789184 - RNA, 19 nt, Artificial Sequence
  Description of Artificial Sequence: Synthetic oligonucleotide
gaggcugacacuguggggc

SEQ ID NO: 2789185 - RNA, 19 nt, Artificial Sequence
  Description of Artificial Sequence: Synthetic oligonucleotide
aagucggggaaacugcgga

SEQ ID NO: 2789186 - RNA, 19 nt, Artificial Sequence
  Description of Artificial Sequence: Synthetic oligonucleotide
auaucccugaacagcacgc

SEQ ID NO: 2789187 - RNA, 19 nt, Artificial Sequence
  Description of Artificial Sequence: Synthetic oligonucleotide
auuucuaguucagccuugc

SEQ ID NO: 2789188 - RNA, 19 nt, Artificial Sequence
  Description of Artificial Sequence: Synthetic oligonucleotide
ucuuucuggauuucuaguu

SEQ ID NO: 2789189 - RNA, 19 nt, Artificial Sequence
  Description of Artificial Sequence: Synthetic oligonucleotide
agagagaagaaugguacug

SEQ ID NO: 2789190 - RNA, 19 nt, Artificial Sequence
  Description of Artificial Sequence: Synthetic oligonucleotide
ugcgauguagucgaucuug

SEQ ID NO: 2789191 - RNA, 19 nt, Artificial Sequence
  Description of Artificial Sequence: Synthetic oligonucleotide
aacagcacgccggggaugg

SEQ ID NO: 2789192 - RNA, 19 nt, Artificial Sequence
  Description of Artificial Sequence: Synthetic oligonucleotide
cuggccagguucuaaggcg

SEQ ID NO: 2789193 - RNA, 19 nt, Artificial Sequence
  Description of Artificial Sequence: Synthetic oligonucleotide
ucucucugcccuuaaguga

SEQ ID NO: 2789194 - RNA, 19 nt, Artificial Sequence
  Description of Artificial Sequence: Synthetic oligonucleotide
ccagcugcaacucagauuc

SEQ ID NO: 2789195 - RNA, 19 nt, Artificial Sequence
  Description of Artificial Sequence: Synthetic oligonucleotide
auccuagcuucucucugcc

SEQ ID NO: 2789196 - RNA, 19 nt, Artificial Sequence
  Description of Artificial Sequence: Synthetic oligonucleotide
cuugccauacucgagagca

SEQ ID NO: 2789197 - RNA, 19 nt, Artificial Sequence
  Description of Artificial Sequence: Synthetic oligonucleotide
uagggaggggccaaacaag

SEQ ID NO: 2789198 - RNA, 19 nt, Artificial Sequence
  Description of Artificial Sequence: Synthetic oligonucleotide
gaagcucggaaggaggcgg

SEQ ID NO: 2789199 - RNA, 19 nt, Artificial Sequence
  Description of Artificial Sequence: Synthetic oligonucleotide
cuuaaggugacuggccagg

SEQ ID NO: 2789200 - RNA, 19 nt, Artificial Sequence
  Description of Artificial Sequence: Synthetic oligonucleotide
gaaacugcggaugcgcugc

SEQ ID NO: 2789201 - RNA, 19 nt, Artificial Sequence
  Description of Artificial Sequence: Synthetic oligonucleotide
uucaggaggggcgagauau

SEQ ID NO: 2789202 - RNA, 19 nt, Artificial Sequence
  Description of Artificial Sequence: Synthetic oligonucleotide
acacuccaccaccucagcc

SEQ ID NO: 2789203 - RNA, 19 nt, Artificial Sequence
  Description of Artificial Sequence: Synthetic oligonucleotide
uaggaggcugacacugugg

SEQ ID NO: 2789204 - RNA, 19 nt, Artificial Sequence
  Description of Artificial Sequence: Synthetic oligonucleotide
acaaccacuuucuggccag

SEQ ID NO: 2789205 - RNA, 19 nt, Artificial Sequence
  Description of Artificial Sequence: Synthetic oligonucleotide
aacucagauuccgccauag

SEQ ID NO: 2789206 - RNA, 19 nt, Artificial Sequence
  Description of Artificial Sequence: Synthetic oligonucleotide
guggacuuaaggugacugg

SEQ ID NO: 2789207 - RNA, 19 nt, Artificial Sequence
  Description of Artificial Sequence: Synthetic oligonucleotide
cuuucuggauuucuaguuc

SEQ ID NO: 2789208 - RNA, 19 nt, Artificial Sequence
  Description of Artificial Sequence: Synthetic oligonucleotide
aagaaugguacugauccua

SEQ ID NO: 2789209 - RNA, 19 nt, Artificial Sequence
  Description of Artificial Sequence: Synthetic oligonucleotide
ugguacugauccuagcuuc

SEQ ID NO: 2789210 - RNA, 19 nt, Artificial Sequence
  Description of Artificial Sequence: Synthetic oligonucleotide
uuccggaugagcacacagc

SEQ ID NO: 2789211 - RNA, 19 nt, Artificial Sequence
  Description of Artificial Sequence: Synthetic oligonucleotide
uaggccugcgauguagucg

SEQ ID NO: 2789212 - RNA, 19 nt, Artificial Sequence
  Description of Artificial Sequence: Synthetic oligonucleotide
uaaggcgucuuucuggauu

SEQ ID NO: 2789213 - RNA, 19 nt, Artificial Sequence
  Description of Artificial Sequence: Synthetic oligonucleotide
acuuaaggugacuggccag

SEQ ID NO: 2789214 - RNA, 19 nt, Artificial Sequence
  Description of Artificial Sequence: Synthetic oligonucleotide
agaucaucuacaacaacca

SEQ ID NO: 2789215 - RNA, 19 nt, Artificial Sequence
  Description of Artificial Sequence: Synthetic oligonucleotide
gagauaucccugaacagca

SEQ ID NO: 2789216 - RNA, 19 nt, Artificial Sequence
  Description of Artificial Sequence: Synthetic oligonucleotide
acucagauuccgccauagc

SEQ ID NO: 2789217 - RNA, 19 nt, Artificial Sequence
  Description of Artificial Sequence: Synthetic oligonucleotide
ugcgccaccagcugcaacu

SEQ ID NO: 2789218 - RNA, 19 nt, Artificial Sequence
  Description of Artificial Sequence: Synthetic oligonucleotide
gacuuaaggugacuggcca

SEQ ID NO: 2789219 - RNA, 19 nt, Artificial Sequence
  Description of Artificial Sequence: Synthetic oligonucleotide
ugagcacacagcccaggcc

SEQ ID NO: 2789220 - RNA, 19 nt, Artificial Sequence
  Description of Artificial Sequence: Synthetic oligonucleotide
cagauuccgccauagccgc

SEQ ID NO: 2789221 - RNA, 19 nt, Artificial Sequence
  Description of Artificial Sequence: Synthetic oligonucleotide
cugcaacucagauuccgcc

SEQ ID NO: 2789222 - RNA, 19 nt, Artificial Sequence
  Description of Artificial Sequence: Synthetic oligonucleotide
ucgaucuugccgccaugcg

SEQ ID NO: 2789223 - RNA, 19 nt, Artificial Sequence
  Description of Artificial Sequence: Synthetic oligonucleotide
ggagagagaagaaugguac

SEQ ID NO: 2789224 - RNA, 19 nt, Artificial Sequence
  Description of Artificial Sequence: Synthetic oligonucleotide
aucccugaacagcacgccg

SEQ ID NO: 2789225 - RNA, 19 nt, Artificial Sequence
  Description of Artificial Sequence: Synthetic oligonucleotide
auacucgagagcauaggag

SEQ ID NO: 2789226 - RNA, 19 nt, Artificial Sequence
  Description of Artificial Sequence: Synthetic oligonucleotide
uaaggugacuggccaggag

SEQ ID NO: 2789227 - RNA, 19 nt, Artificial Sequence
  Description of Artificial Sequence: Synthetic oligonucleotide
gaaugguacugauccuagc

SEQ ID NO: 2789228 - RNA, 19 nt, Artificial Sequence
  Description of Artificial Sequence: Synthetic oligonucleotide
cuuccggaugagcacacag

SEQ ID NO: 2789229 - RNA, 19 nt, Artificial Sequence
  Description of Artificial Sequence: Synthetic oligonucleotide
auaggaggcugacacugug

SEQ ID NO: 2789230 - RNA, 19 nt, Artificial Sequence
  Description of Artificial Sequence: Synthetic oligonucleotide
aaggcgucuuucuggauuu

SEQ ID NO: 2789231 - RNA, 19 nt, Artificial Sequence
  Description of Artificial Sequence: Synthetic oligonucleotide
uacugauccuagcuucucu

SEQ ID NO: 2789232 - RNA, 19 nt, Artificial Sequence
  Description of Artificial Sequence: Synthetic oligonucleotide
ucggggaaacugcggaugc

SEQ ID NO: 2789233 - RNA, 19 nt, Artificial Sequence
  Description of Artificial Sequence: Synthetic oligonucleotide
caaacaagaauccccugga

SEQ ID NO: 2789234 - RNA, 19 nt, Artificial Sequence
  Description of Artificial Sequence: Synthetic oligonucleotide
uuucuaguucagccuugcc

SEQ ID NO: 2789235 - RNA, 19 nt, Artificial Sequence
  Description of Artificial Sequence: Synthetic oligonucleotide
agagaagaaugguacugau

SEQ ID NO: 2789236 - RNA, 19 nt, Artificial Sequence
  Description of Artificial Sequence: Synthetic oligonucleotide
cuguagcuggcccagcagc

SEQ ID NO: 2789237 - RNA, 19 nt, Artificial Sequence
  Description of Artificial Sequence: Synthetic oligonucleotide
agccuugccauacucgaga

SEQ ID NO: 2789238 - RNA, 19 nt, Artificial Sequence
  Description of Artificial Sequence: Synthetic oligonucleotide
aggccugcgauguagucga

SEQ ID NO: 2789239 - RNA, 19 nt, Artificial Sequence
  Description of Artificial Sequence: Synthetic oligonucleotide
agcugcaacucagauuccg

SEQ ID NO: 2789240 - RNA, 19 nt, Artificial Sequence
  Description of Artificial Sequence: Synthetic oligonucleotide
guucuaaggcgucuuucug

SEQ ID NO: 2789241 - RNA, 19 nt, Artificial Sequence
  Description of Artificial Sequence: Synthetic oligonucleotide
gaggggccaaacaagaauc

SEQ ID NO: 2789242 - RNA, 19 nt, Artificial Sequence
  Description of Artificial Sequence: Synthetic oligonucleotide
agaaugguacugauccuag

SEQ ID NO: 2789243 - RNA, 19 nt, Artificial Sequence
  Description of Artificial Sequence: Synthetic oligonucleotide
ugcccuuaagugaggucag

SEQ ID NO: 2789244 - RNA, 19 nt, Artificial Sequence
  Description of Artificial Sequence: Synthetic oligonucleotide
cauacucgagagcauagga

SEQ ID NO: 2789245 - RNA, 19 nt, Artificial Sequence
  Description of Artificial Sequence: Synthetic oligonucleotide
gagagaagaaugguacuga

SEQ ID NO: 2789246 - RNA, 19 nt, Artificial Sequence
  Description of Artificial Sequence: Synthetic oligonucleotide
aggcugacacuguggggcc

SEQ ID NO: 2789247 - RNA, 19 nt, Artificial Sequence
  Description of Artificial Sequence: Synthetic oligonucleotide
ucagccuguagcuggccca

SEQ ID NO: 2789248 - RNA, 19 nt, Artificial Sequence
  Description of Artificial Sequence: Synthetic oligonucleotide
uggagucuaggccugcgau

SEQ ID NO: 2789249 - RNA, 19 nt, Artificial Sequence
  Description of Artificial Sequence: Synthetic oligonucleotide
aggggccaaacaagaaucc

SEQ ID NO: 2789250 - RNA, 19 nt, Artificial Sequence
  Description of Artificial Sequence: Synthetic oligonucleotide
gaagucggggaaacugcgg

SEQ ID NO: 2789251 - RNA, 19 nt, Artificial Sequence
  Description of Artificial Sequence: Synthetic oligonucleotide
gaugagcacacagcccagg

SEQ ID NO: 2789252 - RNA, 19 nt, Artificial Sequence
  Description of Artificial Sequence: Synthetic oligonucleotide
uguagucgaucuugccgcc

SEQ ID NO: 2789253 - RNA, 19 nt, Artificial Sequence
  Description of Artificial Sequence: Synthetic oligonucleotide
aaacugcggaugcgcugcg

SEQ ID NO: 2789254 - RNA, 19 nt, Artificial Sequence
  Description of Artificial Sequence: Synthetic oligonucleotide
gauuucuaguucagccuug

SEQ ID NO: 2789255 - RNA, 19 nt, Artificial Sequence
  Description of Artificial Sequence: Synthetic oligonucleotide
auggaagcucggaaggagg

SEQ ID NO: 2789256 - RNA, 19 nt, Artificial Sequence
  Description of Artificial Sequence: Synthetic oligonucleotide
uggccagguucuaaggcgu

SEQ ID NO: 2789257 - RNA, 19 nt, Artificial Sequence
  Description of Artificial Sequence: Synthetic oligonucleotide
gaugcgcugcgccaccagc

SEQ ID NO: 2789258 - RNA, 19 nt, Artificial Sequence
  Description of Artificial Sequence: Synthetic oligonucleotide
agguucuaaggcgucuuuc

SEQ ID NO: 2789259 - RNA, 19 nt, Artificial Sequence
  Description of Artificial Sequence: Synthetic oligonucleotide
acaggcagcgcacaugguu

SEQ ID NO: 2789260 - RNA, 19 nt, Artificial Sequence
  Description of Artificial Sequence: Synthetic oligonucleotide
augguacugauccuagcuu

SEQ ID NO: 2789261 - RNA, 19 nt, Artificial Sequence
  Description of Artificial Sequence: Synthetic oligonucleotide
ucgagagcauaggaggcug

SEQ ID NO: 2789262 - RNA, 19 nt, Artificial Sequence
  Description of Artificial Sequence: Synthetic oligonucleotide
gagaagaaugguacugauc

SEQ ID NO: 2789263 - RNA, 19 nt, Artificial Sequence
  Description of Artificial Sequence: Synthetic oligonucleotide
caggcagcgcacaugguuc

SEQ ID NO: 2789264 - RNA, 19 nt, Artificial Sequence
  Description of Artificial Sequence: Synthetic oligonucleotide
uguggggccuggcagcuuc

SEQ ID NO: 2789265 - RNA, 19 nt, Artificial Sequence
  Description of Artificial Sequence: Synthetic oligonucleotide
uaucccugaacagcacgcc

SEQ ID NO: 2789266 - RNA, 19 nt, Artificial Sequence
  Description of Artificial Sequence: Synthetic oligonucleotide
cugcccuuaagugagguca

SEQ ID NO: 2789267 - RNA, 19 nt, Artificial Sequence
  Description of Artificial Sequence: Synthetic oligonucleotide
ggcgggguccuucaggagg

SEQ ID NO: 2789268 - RNA, 19 nt, Artificial Sequence
  Description of Artificial Sequence: Synthetic oligonucleotide
aaggaggcgggguccuuca

SEQ ID NO: 2789269 - RNA, 19 nt, Artificial Sequence
  Description of Artificial Sequence: Synthetic oligonucleotide
caacaaccacuuucuggcc

SEQ ID NO: 2789270 - RNA, 19 nt, Artificial Sequence
  Description of Artificial Sequence: Synthetic oligonucleotide
acucauauugcaggagaga

SEQ ID NO: 2789271 - RNA, 19 nt, Artificial Sequence
  Description of Artificial Sequence: Synthetic oligonucleotide
gaggcgggguccuucagga

SEQ ID NO: 2789272 - RNA, 19 nt, Artificial Sequence
  Description of Artificial Sequence: Synthetic oligonucleotide
gacacuguggggccuggca

SEQ ID NO: 2789273 - RNA, 19 nt, Artificial Sequence
  Description of Artificial Sequence: Synthetic oligonucleotide
ucucugcccuuaagugagg

SEQ ID NO: 2789274 - RNA, 19 nt, Artificial Sequence
  Description of Artificial Sequence: Synthetic oligonucleotide
cucgcuuccggaugagcac

SEQ ID NO: 2789275 - RNA, 19 nt, Artificial Sequence
  Description of Artificial Sequence: Synthetic oligonucleotide
uucccucgcuuccggauga

SEQ ID NO: 2789276 - RNA, 19 nt, Artificial Sequence
  Description of Artificial Sequence: Synthetic oligonucleotide
aacugcggaugcgcugcgc

SEQ ID NO: 2789277 - RNA, 19 nt, Artificial Sequence
  Description of Artificial Sequence: Synthetic oligonucleotide
uuaaggugacuggccagga

SEQ ID NO: 2789278 - RNA, 19 nt, Artificial Sequence
  Description of Artificial Sequence: Synthetic oligonucleotide
uccaccaggcucacacacu

SEQ ID NO: 2789279 - RNA, 19 nt, Artificial Sequence
  Description of Artificial Sequence: Synthetic oligonucleotide
agauaucccugaacagcac

SEQ ID NO: 2789280 - RNA, 19 nt, Artificial Sequence
  Description of Artificial Sequence: Synthetic oligonucleotide
cacuguggggccuggcagc

SEQ ID NO: 2789281 - RNA, 19 nt, Artificial Sequence
  Description of Artificial Sequence: Synthetic oligonucleotide
caggaggggcgagauaucc

SEQ ID NO: 2789282 - RNA, 19 nt, Artificial Sequence
  Description of Artificial Sequence: Synthetic oligonucleotide
agcauaggaggcugacacu

SEQ ID NO: 2789283 - RNA, 19 nt, Artificial Sequence
  Description of Artificial Sequence: Synthetic oligonucleotide
uagucgaucuugccgccau

SEQ ID NO: 2789284 - RNA, 19 nt, Artificial Sequence
  Description of Artificial Sequence: Synthetic oligonucleotide
gcggauggaagcucggaag

SEQ ID NO: 2789285 - RNA, 19 nt, Artificial Sequence
  Description of Artificial Sequence: Synthetic oligonucleotide
acacacuccaccaccucag

SEQ ID NO: 2789286 - RNA, 19 nt, Artificial Sequence
  Description of Artificial Sequence: Synthetic oligonucleotide
agcuccugagcuagggagg

SEQ ID NO: 2789287 - RNA, 19 nt, Artificial Sequence
  Description of Artificial Sequence: Synthetic oligonucleotide
cuacaacaaccacuuucug

SEQ ID NO: 2789288 - RNA, 19 nt, Artificial Sequence
  Description of Artificial Sequence: Synthetic oligonucleotide
aggaggggcgagauauccc

SEQ ID NO: 2789289 - RNA, 19 nt, Artificial Sequence
  Description of Artificial Sequence: Synthetic oligonucleotide
gagagagaagaaugguacu

SEQ ID NO: 2789290 - RNA, 19 nt, Artificial Sequence
  Description of Artificial Sequence: Synthetic oligonucleotide
gaauccccuggagucuagg

SEQ ID NO: 2789291 - RNA, 19 nt, Artificial Sequence
  Description of Artificial Sequence: Synthetic oligonucleotide
uugcaggagagagaagaau

SEQ ID NO: 2789292 - RNA, 19 nt, Artificial Sequence
  Description of Artificial Sequence: Synthetic oligonucleotide
ugcguggacuuaaggugac

SEQ ID NO: 2789293 - RNA, 19 nt, Artificial Sequence
  Description of Artificial Sequence: Synthetic oligonucleotide
ggaagucggggaaacugcg

SEQ ID NO: 2789294 - RNA, 19 nt, Artificial Sequence
  Description of Artificial Sequence: Synthetic oligonucleotide
aguucagccuugccauacu

SEQ ID NO: 2789295 - RNA, 19 nt, Artificial Sequence
  Description of Artificial Sequence: Synthetic oligonucleotide
aggggcgagauaucccuga

SEQ ID NO: 2789296 - RNA, 19 nt, Artificial Sequence
  Description of Artificial Sequence: Synthetic oligonucleotide
cuucccucgcuuccggaug

SEQ ID NO: 2789297 - RNA, 19 nt, Artificial Sequence
  Description of Artificial Sequence: Synthetic oligonucleotide
cuugccgccaugcguggac

SEQ ID NO: 2789298 - RNA, 19 nt, Artificial Sequence
  Description of Artificial Sequence: Synthetic oligonucleotide
augcguggacuuaagguga

SEQ ID NO: 2789299 - RNA, 19 nt, Artificial Sequence
  Description of Artificial Sequence: Synthetic oligonucleotide
gggccaaacaagaaucccc

SEQ ID NO: 2789300 - RNA, 19 nt, Artificial Sequence
  Description of Artificial Sequence: Synthetic oligonucleotide
aagcucggaaggaggcggg

SEQ ID NO: 2789301 - RNA, 19 nt, Artificial Sequence
  Description of Artificial Sequence: Synthetic oligonucleotide
cagcgcacaugguuccucc

SEQ ID NO: 2789302 - RNA, 19 nt, Artificial Sequence
  Description of Artificial Sequence: Synthetic oligonucleotide
ucugcccuuaagugagguc

SEQ ID NO: 2789303 - RNA, 19 nt, Artificial Sequence
  Description of Artificial Sequence: Synthetic oligonucleotide
aagaauccccuggagucua

SEQ ID NO: 2789304 - RNA, 19 nt, Artificial Sequence
  Description of Artificial Sequence: Synthetic oligonucleotide
uccuagcuucucucugccc

SEQ ID NO: 2789305 - RNA, 19 nt, Artificial Sequence
  Description of Artificial Sequence: Synthetic oligonucleotide
ucggaaggaggcggggucc

SEQ ID NO: 2789306 - RNA, 19 nt, Artificial Sequence
  Description of Artificial Sequence: Synthetic oligonucleotide
aggagaucaucuacaacaa

SEQ ID NO: 2789307 - RNA, 19 nt, Artificial Sequence
  Description of Artificial Sequence: Synthetic oligonucleotide
ggaaacugcggaugcgcug

SEQ ID NO: 2789308 - RNA, 19 nt, Artificial Sequence
  Description of Artificial Sequence: Synthetic oligonucleotide
ggagucuaggccugcgaug

SEQ ID NO: 2789309 - RNA, 19 nt, Artificial Sequence
  Description of Artificial Sequence: Synthetic oligonucleotide
gagagcauaggaggcugac

SEQ ID NO: 2789310 - RNA, 19 nt, Artificial Sequence
  Description of Artificial Sequence: Synthetic oligonucleotide
ucgcuuccggaugagcaca

SEQ ID NO: 2789311 - RNA, 19 nt, Artificial Sequence
  Description of Artificial Sequence: Synthetic oligonucleotide
guucagccuugccauacuc

SEQ ID NO: 2789312 - RNA, 19 nt, Artificial Sequence
  Description of Artificial Sequence: Synthetic oligonucleotide
gagucuaggccugcgaugu

SEQ ID NO: 2789313 - RNA, 19 nt, Artificial Sequence
  Description of Artificial Sequence: Synthetic oligonucleotide
gucggggaaacugcggaug

SEQ ID NO: 2789314 - RNA, 19 nt, Artificial Sequence
  Description of Artificial Sequence: Synthetic oligonucleotide
ugccauacucgagagcaua

SEQ ID NO: 2789315 - RNA, 19 nt, Artificial Sequence
  Description of Artificial Sequence: Synthetic oligonucleotide
aaccacuuucuggccaggu

SEQ ID NO: 2789316 - RNA, 19 nt, Artificial Sequence
  Description of Artificial Sequence: Synthetic oligonucleotide
ccggggauggggaagucgg

SEQ ID NO: 2789317 - RNA, 19 nt, Artificial Sequence
  Description of Artificial Sequence: Synthetic oligonucleotide
ggaggcgggguccuucagg

SEQ ID NO: 2789318 - RNA, 19 nt, Artificial Sequence
  Description of Artificial Sequence: Synthetic oligonucleotide
cagcagcucacaggcagcg

SEQ ID NO: 2789319 - RNA, 19 nt, Artificial Sequence
  Description of Artificial Sequence: Synthetic oligonucleotide
cucggaaggaggcgggguc

SEQ ID NO: 2789320 - RNA, 19 nt, Artificial Sequence
  Description of Artificial Sequence: Synthetic oligonucleotide
ccuuaagugaggucagcuc

SEQ ID NO: 2789321 - RNA, 19 nt, Artificial Sequence
  Description of Artificial Sequence: Synthetic oligonucleotide
agagcauaggaggcugaca

SEQ ID NO: 2789322 - RNA, 19 nt, Artificial Sequence
  Description of Artificial Sequence: Synthetic oligonucleotide
ggacuuaaggugacuggcc

SEQ ID NO: 2789323 - RNA, 19 nt, Artificial Sequence
  Description of Artificial Sequence: Synthetic oligonucleotide
ccaggaggcggauggaagc

SEQ ID NO: 2789324 - RNA, 19 nt, Artificial Sequence
  Description of Artificial Sequence: Synthetic oligonucleotide
agggaggggccaaacaaga

SEQ ID NO: 2789325 - RNA, 19 nt, Artificial Sequence
  Description of Artificial Sequence: Synthetic oligonucleotide
ggguccuucaggaggggcg

SEQ ID NO: 2789326 - RNA, 19 nt, Artificial Sequence
  Description of Artificial Sequence: Synthetic oligonucleotide
agcuagggaggggccaaac

SEQ ID NO: 2789327 - RNA, 19 nt, Artificial Sequence
  Description of Artificial Sequence: Synthetic oligonucleotide
ggagaucaucuacaacaac

SEQ ID NO: 2789328 - RNA, 19 nt, Artificial Sequence
  Description of Artificial Sequence: Synthetic oligonucleotide
cagccuugccauacucgag

SEQ ID NO: 2789329 - RNA, 19 nt, Artificial Sequence
  Description of Artificial Sequence: Synthetic oligonucleotide
auugcaggagagagaagaa

SEQ ID NO: 2789330 - RNA, 19 nt, Artificial Sequence
  Description of Artificial Sequence: Synthetic oligonucleotide
agucggggaaacugcggau

SEQ ID NO: 2789331 - RNA, 19 nt, Artificial Sequence
  Description of Artificial Sequence: Synthetic oligonucleotide
accacuuucuggccagguu

SEQ ID NO: 2789332 - RNA, 19 nt, Artificial Sequence
  Description of Artificial Sequence: Synthetic oligonucleotide
ggaggcggauggaagcucg

SEQ ID NO: 2789333 - RNA, 19 nt, Artificial Sequence
  Description of Artificial Sequence: Synthetic oligonucleotide
cgucuuucuggauuucuag

SEQ ID NO: 2789334 - RNA, 19 nt, Artificial Sequence
  Description of Artificial Sequence: Synthetic oligonucleotide
gccaugcguggacuuaagg

SEQ ID NO: 2789335 - RNA, 19 nt, Artificial Sequence
  Description of Artificial Sequence: Synthetic oligonucleotide
aggaggcggauggaagcuc

SEQ ID NO: 2789336 - RNA, 19 nt, Artificial Sequence
  Description of Artificial Sequence: Synthetic oligonucleotide
ggggaaacugcggaugcgc

SEQ ID NO: 2789337 - RNA, 19 nt, Artificial Sequence
  Description of Artificial Sequence: Synthetic oligonucleotide
uugccauacucgagagcau

SEQ ID NO: 2789338 - RNA, 19 nt, Artificial Sequence
  Description of Artificial Sequence: Synthetic oligonucleotide
cagcucacaggcagcgcac

SEQ ID NO: 2789339 - RNA, 19 nt, Artificial Sequence
  Description of Artificial Sequence: Synthetic oligonucleotide
gcagcucacaggcagcgca

SEQ ID NO: 2789340 - RNA, 19 nt, Artificial Sequence
  Description of Artificial Sequence: Synthetic oligonucleotide
gaggcggauggaagcucgg

SEQ ID NO: 2789341 - RNA, 19 nt, Artificial Sequence
  Description of Artificial Sequence: Synthetic oligonucleotide
auauugcaggagagagaag

SEQ ID NO: 2789342 - RNA, 19 nt, Artificial Sequence
  Description of Artificial Sequence: Synthetic oligonucleotide
cuggcccagcagcucacag

SEQ ID NO: 2789343 - RNA, 19 nt, Artificial Sequence
  Description of Artificial Sequence: Synthetic oligonucleotide
gccuugccauacucgagag

SEQ ID NO: 2789344 - RNA, 19 nt, Artificial Sequence
  Description of Artificial Sequence: Synthetic oligonucleotide
ccauacucgagagcauagg

SEQ ID NO: 2789345 - RNA, 19 nt, Artificial Sequence
  Description of Artificial Sequence: Synthetic oligonucleotide
gccauacucgagagcauag

SEQ ID NO: 2789346 - RNA, 19 nt, Artificial Sequence
  Description of Artificial Sequence: Synthetic oligonucleotide
agcucggaaggaggcgggg

SEQ ID NO: 2789347 - RNA, 19 nt, Artificial Sequence
  Description of Artificial Sequence: Synthetic oligonucleotide
ggauuucuaguucagccuu

SEQ ID NO: 2789348 - RNA, 19 nt, Artificial Sequence
  Description of Artificial Sequence: Synthetic oligonucleotide
cagcacgccggggaugggg

SEQ ID NO: 2789349 - RNA, 19 nt, Artificial Sequence
  Description of Artificial Sequence: Synthetic oligonucleotide
gcugcaacucagauuccgc

SEQ ID NO: 2789350 - RNA, 19 nt, Artificial Sequence
  Description of Artificial Sequence: Synthetic oligonucleotide
cagcuucccucgcuuccgg

SEQ ID NO: 2789351 - RNA, 19 nt, Artificial Sequence
  Description of Artificial Sequence: Synthetic oligonucleotide
gauuccgccauagccgcgu

SEQ ID NO: 2789352 - RNA, 19 nt, Artificial Sequence
  Description of Artificial Sequence: Synthetic oligonucleotide
auuccgccauagccgcgug

SEQ ID NO: 2789353 - RNA, 19 nt, Artificial Sequence
  Description of Artificial Sequence: Synthetic oligonucleotide
gccaaacaagaauccccug

SEQ ID NO: 2789354 - RNA, 19 nt, Artificial Sequence
  Description of Artificial Sequence: Synthetic oligonucleotide
gaggggcgagauaucccug

SEQ ID NO: 2789355 - RNA, 19 nt, Artificial Sequence
  Description of Artificial Sequence: Synthetic oligonucleotide
ggaggggcgagauaucccu

SEQ ID NO: 2789356 - RNA, 19 nt, Artificial Sequence
  Description of Artificial Sequence: Synthetic oligonucleotide
gcgauguagucgaucuugc

SEQ ID NO: 2789357 - RNA, 19 nt, Artificial Sequence
  Description of Artificial Sequence: Synthetic oligonucleotide
gcagcuucccucgcuuccg

SEQ ID NO: 2789358 - RNA, 19 nt, Artificial Sequence
  Description of Artificial Sequence: Synthetic oligonucleotide
agauuccgccauagccgcg

SEQ ID NO: 2789359 - RNA, 19 nt, Artificial Sequence
  Description of Artificial Sequence: Synthetic oligonucleotide
cagccuguagcuggcccag

SEQ ID NO: 2789360 - RNA, 19 nt, Artificial Sequence
  Description of Artificial Sequence: Synthetic oligonucleotide
agcuucccucgcuuccgga

SEQ ID NO: 2789361 - RNA, 19 nt, Artificial Sequence
  Description of Artificial Sequence: Synthetic oligonucleotide
caaccacuuucuggccagg

SEQ ID NO: 2789362 - RNA, 19 nt, Artificial Sequence
  Description of Artificial Sequence: Synthetic oligonucleotide
ccggaugagcacacagccc

SEQ ID NO: 2789363 - RNA, 19 nt, Artificial Sequence
  Description of Artificial Sequence: Synthetic oligonucleotide
ggaggggccaaacaagaau

SEQ ID NO: 2789364 - RNA, 19 nt, Artificial Sequence
  Description of Artificial Sequence: Synthetic oligonucleotide
ccucgcuuccggaugagca

SEQ ID NO: 2789365 - RNA, 19 nt, Artificial Sequence
  Description of Artificial Sequence: Synthetic oligonucleotide
augcgcugcgccaccagcu

SEQ ID NO: 2789366 - RNA, 19 nt, Artificial Sequence
  Description of Artificial Sequence: Synthetic oligonucleotide
gcuagggaggggccaaaca

SEQ ID NO: 2789367 - RNA, 19 nt, Artificial Sequence
  Description of Artificial Sequence: Synthetic oligonucleotide
aggcgggguccuucaggag

SEQ ID NO: 2789368 - RNA, 19 nt, Artificial Sequence
  Description of Artificial Sequence: Synthetic oligonucleotide
ccugcgauguagucgaucu

SEQ ID NO: 2789369 - RNA, 19 nt, Artificial Sequence
  Description of Artificial Sequence: Synthetic oligonucleotide
cuggagucuaggccugcga

SEQ ID NO: 2789370 - RNA, 19 nt, Artificial Sequence
  Description of Artificial Sequence: Synthetic oligonucleotide
ccaugcguggacuuaaggu

SEQ ID NO: 2789371 - RNA, 19 nt, Artificial Sequence
  Description of Artificial Sequence: Synthetic oligonucleotide
agaauccccuggagucuag

SEQ ID NO: 2789372 - RNA, 19 nt, Artificial Sequence
  Description of Artificial Sequence: Synthetic oligonucleotide
cguggacuuaaggugacug

SEQ ID NO: 2789373 - RNA, 19 nt, Artificial Sequence
  Description of Artificial Sequence: Synthetic oligonucleotide
cgauguagucgaucuugcc

SEQ ID NO: 2789374 - RNA, 19 nt, Artificial Sequence
  Description of Artificial Sequence: Synthetic oligonucleotide
ucuugccgccaugcgugga

SEQ ID NO: 2789375 - RNA, 19 nt, Artificial Sequence
  Description of Artificial Sequence: Synthetic oligonucleotide
cacgccggggauggggaag

SEQ ID NO: 2789376 - RNA, 19 nt, Artificial Sequence
  Description of Artificial Sequence: Synthetic oligonucleotide
gccaggaggcggauggaag

SEQ ID NO: 2789377 - RNA, 19 nt, Artificial Sequence
  Description of Artificial Sequence: Synthetic oligonucleotide
ggcggauggaagcucggaa

SEQ ID NO: 2789378 - RNA, 19 nt, Artificial Sequence
  Description of Artificial Sequence: Synthetic oligonucleotide
uugccgccaugcguggacu

SEQ ID NO: 2789379 - RNA, 19 nt, Artificial Sequence
  Description of Artificial Sequence: Synthetic oligonucleotide
ggccaggagaucaucuaca

SEQ ID NO: 2789380 - RNA, 19 nt, Artificial Sequence
  Description of Artificial Sequence: Synthetic oligonucleotide
gggcgagauaucccugaac

SEQ ID NO: 2789381 - RNA, 19 nt, Artificial Sequence
  Description of Artificial Sequence: Synthetic oligonucleotide
cauaggaggcugacacugu

SEQ ID NO: 2789382 - RNA, 19 nt, Artificial Sequence
  Description of Artificial Sequence: Synthetic oligonucleotide
agcacgccggggaugggga

SEQ ID NO: 2789383 - RNA, 19 nt, Artificial Sequence
  Description of Artificial Sequence: Synthetic oligonucleotide
ggaugagcacacagcccag

SEQ ID NO: 2789384 - RNA, 19 nt, Artificial Sequence
  Description of Artificial Sequence: Synthetic oligonucleotide
cacacagcccaggcccagc

SEQ ID NO: 2789385 - RNA, 19 nt, Artificial Sequence
  Description of Artificial Sequence: Synthetic oligonucleotide
ggccaaacaagaauccccu

SEQ ID NO: 2789386 - RNA, 19 nt, Artificial Sequence
  Description of Artificial Sequence: Synthetic oligonucleotide
guagucgaucuugccgcca

SEQ ID NO: 2789387 - RNA, 19 nt, Artificial Sequence
  Description of Artificial Sequence: Synthetic oligonucleotide
cuccugagcuagggagggg

SEQ ID NO: 2789388 - RNA, 19 nt, Artificial Sequence
  Description of Artificial Sequence: Synthetic oligonucleotide
caagaauccccuggagucu

SEQ ID NO: 2789389 - RNA, 19 nt, Artificial Sequence
  Description of Artificial Sequence: Synthetic oligonucleotide
aggcggauggaagcucgga

SEQ ID NO: 2789390 - RNA, 19 nt, Artificial Sequence
  Description of Artificial Sequence: Synthetic oligonucleotide
ccuagcuucucucugcccu

SEQ ID NO: 2789391 - RNA, 19 nt, Artificial Sequence
  Description of Artificial Sequence: Synthetic oligonucleotide
aggcgucuuucuggauuuc

SEQ ID NO: 2789392 - RNA, 19 nt, Artificial Sequence
  Description of Artificial Sequence: Synthetic oligonucleotide
cugagcuagggaggggcca

SEQ ID NO: 2789393 - RNA, 19 nt, Artificial Sequence
  Description of Artificial Sequence: Synthetic oligonucleotide
uggggccuggcagcuuccc

SEQ ID NO: 2789394 - RNA, 19 nt, Artificial Sequence
  Description of Artificial Sequence: Synthetic oligonucleotide
guuccuccaguggccagga

SEQ ID NO: 2789395 - RNA, 19 nt, Artificial Sequence
  Description of Artificial Sequence: Synthetic oligonucleotide
uagcuucucucugcccuua

SEQ ID NO: 2789396 - RNA, 19 nt, Artificial Sequence
  Description of Artificial Sequence: Synthetic oligonucleotide
cugcggaugcgcugcgcca

SEQ ID NO: 2789397 - RNA, 19 nt, Artificial Sequence
  Description of Artificial Sequence: Synthetic oligonucleotide
ggaugcgcugcgccaccag

SEQ ID NO: 2789398 - RNA, 19 nt, Artificial Sequence
  Description of Artificial Sequence: Synthetic oligonucleotide
gccggggauggggaagucg

SEQ ID NO: 2789399 - RNA, 19 nt, Artificial Sequence
  Description of Artificial Sequence: Synthetic oligonucleotide
gcaacucagauuccgccau

SEQ ID NO: 2789400 - RNA, 19 nt, Artificial Sequence
  Description of Artificial Sequence: Synthetic oligonucleotide
ucccucgcuuccggaugag

SEQ ID NO: 2789401 - RNA, 19 nt, Artificial Sequence
  Description of Artificial Sequence: Synthetic oligonucleotide
cacagcccaggcccagcuc

SEQ ID NO: 2789402 - RNA, 19 nt, Artificial Sequence
  Description of Artificial Sequence: Synthetic oligonucleotide
acgccggggauggggaagu

SEQ ID NO: 2789403 - RNA, 19 nt, Artificial Sequence
  Description of Artificial Sequence: Synthetic oligonucleotide
gguacugauccuagcuucu

SEQ ID NO: 2789404 - RNA, 19 nt, Artificial Sequence
  Description of Artificial Sequence: Synthetic oligonucleotide
cucgagagcauaggaggcu

SEQ ID NO: 2789405 - RNA, 19 nt, Artificial Sequence
  Description of Artificial Sequence: Synthetic oligonucleotide
ccuggagucuaggccugcg

SEQ ID NO: 2789406 - RNA, 19 nt, Artificial Sequence
  Description of Artificial Sequence: Synthetic oligonucleotide
ugccgccaugcguggacuu

SEQ ID NO: 2789407 - RNA, 19 nt, Artificial Sequence
  Description of Artificial Sequence: Synthetic oligonucleotide
acuuucuggccagguucua

SEQ ID NO: 2789408 - RNA, 19 nt, Artificial Sequence
  Description of Artificial Sequence: Synthetic oligonucleotide
caacucagauuccgccaua

SEQ ID NO: 2789409 - RNA, 19 nt, Artificial Sequence
  Description of Artificial Sequence: Synthetic oligonucleotide
acagcacgccggggauggg

SEQ ID NO: 2789410 - RNA, 19 nt, Artificial Sequence
  Description of Artificial Sequence: Synthetic oligonucleotide
ccugaacagcacgccgggg

SEQ ID NO: 2789411 - RNA, 19 nt, Artificial Sequence
  Description of Artificial Sequence: Synthetic oligonucleotide
cuagcuucucucugcccuu

SEQ ID NO: 2789412 - RNA, 19 nt, Artificial Sequence
  Description of Artificial Sequence: Synthetic oligonucleotide
cuucaggaggggcgagaua

SEQ ID NO: 2789413 - RNA, 19 nt, Artificial Sequence
  Description of Artificial Sequence: Synthetic oligonucleotide
gcccuuaagugaggucagc

SEQ ID NO: 2789414 - RNA, 19 nt, Artificial Sequence
  Description of Artificial Sequence: Synthetic oligonucleotide
ggggcgagauaucccugaa

SEQ ID NO: 2789415 - RNA, 19 nt, Artificial Sequence
  Description of Artificial Sequence: Synthetic oligonucleotide
caggaggcggauggaagcu

SEQ ID NO: 2789416 - RNA, 19 nt, Artificial Sequence
  Description of Artificial Sequence: Synthetic oligonucleotide
guggggccuggcagcuucc

SEQ ID NO: 2789417 - RNA, 19 nt, Artificial Sequence
  Description of Artificial Sequence: Synthetic oligonucleotide
cucugcccuuaagugaggu

SEQ ID NO: 2789418 - RNA, 19 nt, Artificial Sequence
  Description of Artificial Sequence: Synthetic oligonucleotide
gcgucuuucuggauuucua

SEQ ID NO: 2789419 - RNA, 19 nt, Artificial Sequence
  Description of Artificial Sequence: Synthetic oligonucleotide
cuaaggcgucuuucuggau

SEQ ID NO: 2789420 - RNA, 19 nt, Artificial Sequence
  Description of Artificial Sequence: Synthetic oligonucleotide
gcacacagcccaggcccag

SEQ ID NO: 2789421 - RNA, 19 nt, Artificial Sequence
  Description of Artificial Sequence: Synthetic oligonucleotide
gagcuagggaggggccaaa

SEQ ID NO: 2789422 - RNA, 19 nt, Artificial Sequence
  Description of Artificial Sequence: Synthetic oligonucleotide
gggaaacugcggaugcgcu

SEQ ID NO: 2789423 - RNA, 19 nt, Artificial Sequence
  Description of Artificial Sequence: Synthetic oligonucleotide
gcagcgcacaugguuccuc

SEQ ID NO: 2789424 - RNA, 19 nt, Artificial Sequence
  Description of Artificial Sequence: Synthetic oligonucleotide
ggcgucuuucuggauuucu

SEQ ID NO: 2789425 - RNA, 19 nt, Artificial Sequence
  Description of Artificial Sequence: Synthetic oligonucleotide
cuggcagcuucccucgcuu

SEQ ID NO: 2789426 - RNA, 19 nt, Artificial Sequence
  Description of Artificial Sequence: Synthetic oligonucleotide
gcuucccucgcuuccggau

SEQ ID NO: 2789427 - RNA, 19 nt, Artificial Sequence
  Description of Artificial Sequence: Synthetic oligonucleotide
gccugcgauguagucgauc

SEQ ID NO: 2789428 - RNA, 19 nt, Artificial Sequence
  Description of Artificial Sequence: Synthetic oligonucleotide
cggggaaacugcggaugcg

SEQ ID NO: 2789429 - RNA, 19 nt, Artificial Sequence
  Description of Artificial Sequence: Synthetic oligonucleotide
cagguucuaaggcgucuuu

SEQ ID NO: 2789430 - RNA, 19 nt, Artificial Sequence
  Description of Artificial Sequence: Synthetic oligonucleotide
cccuuaagugaggucagcu

SEQ ID NO: 2789431 - RNA, 19 nt, Artificial Sequence
  Description of Artificial Sequence: Synthetic oligonucleotide
caucuacaacaaccacuuu

SEQ ID NO: 2789432 - RNA, 19 nt, Artificial Sequence
  Description of Artificial Sequence: Synthetic oligonucleotide
cccucgcuuccggaugagc

SEQ ID NO: 2789433 - RNA, 19 nt, Artificial Sequence
  Description of Artificial Sequence: Synthetic oligonucleotide
cgccaugcguggacuuaag

SEQ ID NO: 2789434 - RNA, 19 nt, Artificial Sequence
  Description of Artificial Sequence: Synthetic oligonucleotide
ccucagccuguagcuggcc

SEQ ID NO: 2789435 - RNA, 19 nt, Artificial Sequence
  Description of Artificial Sequence: Synthetic oligonucleotide
cgagagcauaggaggcuga

SEQ ID NO: 2789436 - RNA, 19 nt, Artificial Sequence
  Description of Artificial Sequence: Synthetic oligonucleotide
cacaggcagcgcacauggu

SEQ ID NO: 2789437 - RNA, 19 nt, Artificial Sequence
  Description of Artificial Sequence: Synthetic oligonucleotide
gcuuccggaugagcacaca

SEQ ID NO: 2789438 - RNA, 19 nt, Artificial Sequence
  Description of Artificial Sequence: Synthetic oligonucleotide
cugcgauguagucgaucuu

SEQ ID NO: 2789439 - RNA, 19 nt, Artificial Sequence
  Description of Artificial Sequence: Synthetic oligonucleotide
gccagguucuaaggcgucu

SEQ ID NO: 2789440 - RNA, 19 nt, Artificial Sequence
  Description of Artificial Sequence: Synthetic oligonucleotide
gcgccaccagcugcaacuc

SEQ ID NO: 2789441 - RNA, 19 nt, Artificial Sequence
  Description of Artificial Sequence: Synthetic oligonucleotide
gcucacaggcagcgcacau

SEQ ID NO: 2789442 - RNA, 19 nt, Artificial Sequence
  Description of Artificial Sequence: Synthetic oligonucleotide
cccuggagucuaggccugc

SEQ ID NO: 2789443 - RNA, 19 nt, Artificial Sequence
  Description of Artificial Sequence: Synthetic oligonucleotide
gcacgccggggauggggaa

SEQ ID NO: 2789444 - RNA, 19 nt, Artificial Sequence
  Description of Artificial Sequence: Synthetic oligonucleotide
gccgccaugcguggacuua

SEQ ID NO: 2789445 - RNA, 19 nt, Artificial Sequence
  Description of Artificial Sequence: Synthetic oligonucleotide
ccgccaugcguggacuuaa

SEQ ID NO: 2789446 - RNA, 19 nt, Artificial Sequence
  Description of Artificial Sequence: Synthetic oligonucleotide
gacuggccaggaggcggau

SEQ ID NO: 2789447 - RNA, 19 nt, Artificial Sequence
  Description of Artificial Sequence: Synthetic oligonucleotide
ggcagcgcacaugguuccu

SEQ ID NO: 2789448 - RNA, 19 nt, Artificial Sequence
  Description of Artificial Sequence: Synthetic oligonucleotide
gcguggacuuaaggugacu

SEQ ID NO: 2789449 - RNA, 19 nt, Artificial Sequence
  Description of Artificial Sequence: Synthetic oligonucleotide
ggaaggaggcgggguccuu

SEQ ID NO: 2789450 - RNA, 19 nt, Artificial Sequence
  Description of Artificial Sequence: Synthetic oligonucleotide
cgccggggauggggaaguc

SEQ ID NO: 2789451 - RNA, 19 nt, Artificial Sequence
  Description of Artificial Sequence: Synthetic oligonucleotide
ggccugcgauguagucgau

SEQ ID NO: 2789452 - RNA, 19 nt, Artificial Sequence
  Description of Artificial Sequence: Synthetic oligonucleotide
aaugcuaccagguagauga

SEQ ID NO: 2789453 - RNA, 19 nt, Artificial Sequence
  Description of Artificial Sequence: Synthetic oligonucleotide
aagucuguguacuugcggg

SEQ ID NO: 2789454 - RNA, 19 nt, Artificial Sequence
  Description of Artificial Sequence: Synthetic oligonucleotide
aauguccucaagcguaggc

SEQ ID NO: 2789455 - RNA, 19 nt, Artificial Sequence
  Description of Artificial Sequence: Synthetic oligonucleotide
aacuggguaacguugucgg

SEQ ID NO: 2789456 - RNA, 19 nt, Artificial Sequence
  Description of Artificial Sequence: Synthetic oligonucleotide
auugaaagaguucugccag

SEQ ID NO: 2789457 - RNA, 19 nt, Artificial Sequence
  Description of Artificial Sequence: Synthetic oligonucleotide
uugagguaaguccacauga

SEQ ID NO: 2789458 - RNA, 19 nt, Artificial Sequence
  Description of Artificial Sequence: Synthetic oligonucleotide
ugcuaaugcuaccagguag

SEQ ID NO: 2789459 - RNA, 19 nt, Artificial Sequence
  Description of Artificial Sequence: Synthetic oligonucleotide
uuuuggagaguacugcuug

SEQ ID NO: 2789460 - RNA, 19 nt, Artificial Sequence
  Description of Artificial Sequence: Synthetic oligonucleotide
aacguugucgguugguguc

SEQ ID NO: 2789461 - RNA, 19 nt, Artificial Sequence
  Description of Artificial Sequence: Synthetic oligonucleotide
aaggcuaggagcagguucc

SEQ ID NO: 2789462 - RNA, 19 nt, Artificial Sequence
  Description of Artificial Sequence: Synthetic oligonucleotide
aggcuugaggacuagacuc

SEQ ID NO: 2789463 - RNA, 19 nt, Artificial Sequence
  Description of Artificial Sequence: Synthetic oligonucleotide
gaggacgucacuaagcucc

SEQ ID NO: 2789464 - RNA, 19 nt, Artificial Sequence
  Description of Artificial Sequence: Synthetic oligonucleotide
cagacuuccauugaaagag

SEQ ID NO: 2789465 - RNA, 19 nt, Artificial Sequence
  Description of Artificial Sequence: Synthetic oligonucleotide
uugguguccauuuuggaga

SEQ ID NO: 2789466 - RNA, 19 nt, Artificial Sequence
  Description of Artificial Sequence: Synthetic oligonucleotide
uacugcuugagguaagucc

SEQ ID NO: 2789467 - RNA, 19 nt, Artificial Sequence
  Description of Artificial Sequence: Synthetic oligonucleotide
agcagcgucuucuugcccc

SEQ ID NO: 2789468 - RNA, 19 nt, Artificial Sequence
  Description of Artificial Sequence: Synthetic oligonucleotide
uguacuugcgggcggaacc

SEQ ID NO: 2789469 - RNA, 19 nt, Artificial Sequence
  Description of Artificial Sequence: Synthetic oligonucleotide
aucagacuuccauugaaag

SEQ ID NO: 2789470 - RNA, 19 nt, Artificial Sequence
  Description of Artificial Sequence: Synthetic oligonucleotide
uccauuuuggagaguacug

SEQ ID NO: 2789471 - RNA, 19 nt, Artificial Sequence
  Description of Artificial Sequence: Synthetic oligonucleotide
acuaagcuccucuugaaga

SEQ ID NO: 2789472 - RNA, 19 nt, Artificial Sequence
  Description of Artificial Sequence: Synthetic oligonucleotide
ucgggagagaugaacuggg

SEQ ID NO: 2789473 - RNA, 19 nt, Artificial Sequence
  Description of Artificial Sequence: Synthetic oligonucleotide
uaccagguagaugaggacg

SEQ ID NO: 2789474 - RNA, 19 nt, Artificial Sequence
  Description of Artificial Sequence: Synthetic oligonucleotide
cacagccugauuuucagag

SEQ ID NO: 2789475 - RNA, 19 nt, Artificial Sequence
  Description of Artificial Sequence: Synthetic oligonucleotide
ucaacucagagguaggguc

SEQ ID NO: 2789476 - RNA, 19 nt, Artificial Sequence
  Description of Artificial Sequence: Synthetic oligonucleotide
gaugaacuggguaacguug

SEQ ID NO: 2789477 - RNA, 19 nt, Artificial Sequence
  Description of Artificial Sequence: Synthetic oligonucleotide
uugaggacuagacucugca

SEQ ID NO: 2789478 - RNA, 19 nt, Artificial Sequence
  Description of Artificial Sequence: Synthetic oligonucleotide
uggaacugcucccaguccc

SEQ ID NO: 2789479 - RNA, 19 nt, Artificial Sequence
  Description of Artificial Sequence: Synthetic oligonucleotide
uggagaguacugcuugagg

SEQ ID NO: 2789480 - RNA, 19 nt, Artificial Sequence
  Description of Artificial Sequence: Synthetic oligonucleotide
ucgaauguccucaagcgua

SEQ ID NO: 2789481 - RNA, 19 nt, Artificial Sequence
  Description of Artificial Sequence: Synthetic oligonucleotide
uuucaacucagagguaggg

SEQ ID NO: 2789482 - RNA, 19 nt, Artificial Sequence
  Description of Artificial Sequence: Synthetic oligonucleotide
uccauugaaagaguucugc

SEQ ID NO: 2789483 - RNA, 19 nt, Artificial Sequence
  Description of Artificial Sequence: Synthetic oligonucleotide
guaaguccacaugacaacg

SEQ ID NO: 2789484 - RNA, 19 nt, Artificial Sequence
  Description of Artificial Sequence: Synthetic oligonucleotide
accgccgccagcuugggac

SEQ ID NO: 2789485 - RNA, 19 nt, Artificial Sequence
  Description of Artificial Sequence: Synthetic oligonucleotide
agagguagggucguacagc

SEQ ID NO: 2789486 - RNA, 19 nt, Artificial Sequence
  Description of Artificial Sequence: Synthetic oligonucleotide
gaggacuagacucugcauc

SEQ ID NO: 2789487 - RNA, 19 nt, Artificial Sequence
  Description of Artificial Sequence: Synthetic oligonucleotide
augaggacgucacuaagcu

SEQ ID NO: 2789488 - RNA, 19 nt, Artificial Sequence
  Description of Artificial Sequence: Synthetic oligonucleotide
gagguagggucguacagcc

SEQ ID NO: 2789489 - RNA, 19 nt, Artificial Sequence
  Description of Artificial Sequence: Synthetic oligonucleotide
aagaguucugccagcucgc

SEQ ID NO: 2789490 - RNA, 19 nt, Artificial Sequence
  Description of Artificial Sequence: Synthetic oligonucleotide
gaugaggacgucacuaagc

SEQ ID NO: 2789491 - RNA, 19 nt, Artificial Sequence
  Description of Artificial Sequence: Synthetic oligonucleotide
caacucagagguagggucg

SEQ ID NO: 2789492 - RNA, 19 nt, Artificial Sequence
  Description of Artificial Sequence: Synthetic oligonucleotide
ugcucuuuccuuugguggc

SEQ ID NO: 2789493 - RNA, 19 nt, Artificial Sequence
  Description of Artificial Sequence: Synthetic oligonucleotide
uucuugccccgcaucaccg

SEQ ID NO: 2789494 - RNA, 19 nt, Artificial Sequence
  Description of Artificial Sequence: Synthetic oligonucleotide
ugagguaaguccacaugac

SEQ ID NO: 2789495 - RNA, 19 nt, Artificial Sequence
  Description of Artificial Sequence: Synthetic oligonucleotide
aggacuagacucugcauca

SEQ ID NO: 2789496 - RNA, 19 nt, Artificial Sequence
  Description of Artificial Sequence: Synthetic oligonucleotide
cauugaaagaguucugcca

SEQ ID NO: 2789497 - RNA, 19 nt, Artificial Sequence
  Description of Artificial Sequence: Synthetic oligonucleotide
ugcauggaggcgucgaaug

SEQ ID NO: 2789498 - RNA, 19 nt, Artificial Sequence
  Description of Artificial Sequence: Synthetic oligonucleotide
aaacucugcauggaggcgu

SEQ ID NO: 2789499 - RNA, 19 nt, Artificial Sequence
  Description of Artificial Sequence: Synthetic oligonucleotide
agcugaaucggccgccggc

SEQ ID NO: 2789500 - RNA, 19 nt, Artificial Sequence
  Description of Artificial Sequence: Synthetic oligonucleotide
aaccucgggagagaugaac

SEQ ID NO: 2789501 - RNA, 19 nt, Artificial Sequence
  Description of Artificial Sequence: Synthetic oligonucleotide
ucuguguacuugcgggcgg

SEQ ID NO: 2789502 - RNA, 19 nt, Artificial Sequence
  Description of Artificial Sequence: Synthetic oligonucleotide
ucgguugguguccauuuug

SEQ ID NO: 2789503 - RNA, 19 nt, Artificial Sequence
  Description of Artificial Sequence: Synthetic oligonucleotide
ucaagcguaggcuccgggc

SEQ ID NO: 2789504 - RNA, 19 nt, Artificial Sequence
  Description of Artificial Sequence: Synthetic oligonucleotide
uuucuagguggaagccugg

SEQ ID NO: 2789505 - RNA, 19 nt, Artificial Sequence
  Description of Artificial Sequence: Synthetic oligonucleotide
caagucuguguacuugcgg

SEQ ID NO: 2789506 - RNA, 19 nt, Artificial Sequence
  Description of Artificial Sequence: Synthetic oligonucleotide
agaugaggacgucacuaag

SEQ ID NO: 2789507 - RNA, 19 nt, Artificial Sequence
  Description of Artificial Sequence: Synthetic oligonucleotide
cugcaucagacuuccauug

SEQ ID NO: 2789508 - RNA, 19 nt, Artificial Sequence
  Description of Artificial Sequence: Synthetic oligonucleotide
uuuucagagauggucccga

SEQ ID NO: 2789509 - RNA, 19 nt, Artificial Sequence
  Description of Artificial Sequence: Synthetic oligonucleotide
ucugcaucagacuuccauu

SEQ ID NO: 2789510 - RNA, 19 nt, Artificial Sequence
  Description of Artificial Sequence: Synthetic oligonucleotide
uggguaacguugucgguug

SEQ ID NO: 2789511 - RNA, 19 nt, Artificial Sequence
  Description of Artificial Sequence: Synthetic oligonucleotide
uugaaagaguucugccagc

SEQ ID NO: 2789512 - RNA, 19 nt, Artificial Sequence
  Description of Artificial Sequence: Synthetic oligonucleotide
acugcuugagguaagucca

SEQ ID NO: 2789513 - RNA, 19 nt, Artificial Sequence
  Description of Artificial Sequence: Synthetic oligonucleotide
acuuccauugaaagaguuc

SEQ ID NO: 2789514 - RNA, 19 nt, Artificial Sequence
  Description of Artificial Sequence: Synthetic oligonucleotide
ugguguccauuuuggagag

SEQ ID NO: 2789515 - RNA, 19 nt, Artificial Sequence
  Description of Artificial Sequence: Synthetic oligonucleotide
uucagagauggucccgaug

SEQ ID NO: 2789516 - RNA, 19 nt, Artificial Sequence
  Description of Artificial Sequence: Synthetic oligonucleotide
ucagagguagggucguaca

SEQ ID NO: 2789517 - RNA, 19 nt, Artificial Sequence
  Description of Artificial Sequence: Synthetic oligonucleotide
ugaaagaguucugccagcu

SEQ ID NO: 2789518 - RNA, 19 nt, Artificial Sequence
  Description of Artificial Sequence: Synthetic oligonucleotide
ggucguacagccuccacag

SEQ ID NO: 2789519 - RNA, 19 nt, Artificial Sequence
  Description of Artificial Sequence: Synthetic oligonucleotide
agguagaugaggacgucac

SEQ ID NO: 2789520 - RNA, 19 nt, Artificial Sequence
  Description of Artificial Sequence: Synthetic oligonucleotide
uuuggagaguacugcuuga

SEQ ID NO: 2789521 - RNA, 19 nt, Artificial Sequence
  Description of Artificial Sequence: Synthetic oligonucleotide
guuucuagguggaagccug

SEQ ID NO: 2789522 - RNA, 19 nt, Artificial Sequence
  Description of Artificial Sequence: Synthetic oligonucleotide
uuccauugaaagaguucug

SEQ ID NO: 2789523 - RNA, 19 nt, Artificial Sequence
  Description of Artificial Sequence: Synthetic oligonucleotide
gccugauuuucagagaugg

SEQ ID NO: 2789524 - RNA, 19 nt, Artificial Sequence
  Description of Artificial Sequence: Synthetic oligonucleotide
auggaggcgucgaaugucc

SEQ ID NO: 2789525 - RNA, 19 nt, Artificial Sequence
  Description of Artificial Sequence: Synthetic oligonucleotide
gacucugcaucagacuucc

SEQ ID NO: 2789526 - RNA, 19 nt, Artificial Sequence
  Description of Artificial Sequence: Synthetic oligonucleotide
uagaugaggacgucacuaa

SEQ ID NO: 2789527 - RNA, 19 nt, Artificial Sequence
  Description of Artificial Sequence: Synthetic oligonucleotide
gagguaaguccacaugaca

SEQ ID NO: 2789528 - RNA, 19 nt, Artificial Sequence
  Description of Artificial Sequence: Synthetic oligonucleotide
aguccacaugacaacgggc

SEQ ID NO: 2789529 - RNA, 19 nt, Artificial Sequence
  Description of Artificial Sequence: Synthetic oligonucleotide
ugcaucagacuuccauuga

SEQ ID NO: 2789530 - RNA, 19 nt, Artificial Sequence
  Description of Artificial Sequence: Synthetic oligonucleotide
ucccgauggggcaagucug

SEQ ID NO: 2789531 - RNA, 19 nt, Artificial Sequence
  Description of Artificial Sequence: Synthetic oligonucleotide
acaacgggcugcuaaugcu

SEQ ID NO: 2789532 - RNA, 19 nt, Artificial Sequence
  Description of Artificial Sequence: Synthetic oligonucleotide
uguccucaagcguaggcuc

SEQ ID NO: 2789533 - RNA, 19 nt, Artificial Sequence
  Description of Artificial Sequence: Synthetic oligonucleotide
ggagagaugaacuggguaa

SEQ ID NO: 2789534 - RNA, 19 nt, Artificial Sequence
  Description of Artificial Sequence: Synthetic oligonucleotide
uaacguugucgguuggugu

SEQ ID NO: 2789535 - RNA, 19 nt, Artificial Sequence
  Description of Artificial Sequence: Synthetic oligonucleotide
gagauggucccgauggggc

SEQ ID NO: 2789536 - RNA, 19 nt, Artificial Sequence
  Description of Artificial Sequence: Synthetic oligonucleotide
gauggggcaagucugugua

SEQ ID NO: 2789537 - RNA, 19 nt, Artificial Sequence
  Description of Artificial Sequence: Synthetic oligonucleotide
cucgggagagaugaacugg

SEQ ID NO: 2789538 - RNA, 19 nt, Artificial Sequence
  Description of Artificial Sequence: Synthetic oligonucleotide
cacuaagcuccucuugaag

SEQ ID NO: 2789539 - RNA, 19 nt, Artificial Sequence
  Description of Artificial Sequence: Synthetic oligonucleotide
gguaaguccacaugacaac

SEQ ID NO: 2789540 - RNA, 19 nt, Artificial Sequence
  Description of Artificial Sequence: Synthetic oligonucleotide
agguaaguccacaugacaa

SEQ ID NO: 2789541 - RNA, 19 nt, Artificial Sequence
  Description of Artificial Sequence: Synthetic oligonucleotide
cugaagcugaaucggccgc

SEQ ID NO: 2789542 - RNA, 19 nt, Artificial Sequence
  Description of Artificial Sequence: Synthetic oligonucleotide
ugggacaucccgcccaccu

SEQ ID NO: 2789543 - RNA, 19 nt, Artificial Sequence
  Description of Artificial Sequence: Synthetic oligonucleotide
agaugaacuggguaacguu

SEQ ID NO: 2789544 - RNA, 19 nt, Artificial Sequence
  Description of Artificial Sequence: Synthetic oligonucleotide
cuugaggacuagacucugc

SEQ ID NO: 2789545 - RNA, 19 nt, Artificial Sequence
  Description of Artificial Sequence: Synthetic oligonucleotide
uucaacucagagguagggu

SEQ ID NO: 2789546 - RNA, 19 nt, Artificial Sequence
  Description of Artificial Sequence: Synthetic oligonucleotide
gagagaugaacuggguaac

SEQ ID NO: 2789547 - RNA, 19 nt, Artificial Sequence
  Description of Artificial Sequence: Synthetic oligonucleotide
uaagcuccucuugaagagc

SEQ ID NO: 2789548 - RNA, 19 nt, Artificial Sequence
  Description of Artificial Sequence: Synthetic oligonucleotide
aagcguaggcuccgggcug

SEQ ID NO: 2789549 - RNA, 19 nt, Artificial Sequence
  Description of Artificial Sequence: Synthetic oligonucleotide
aagcugaaucggccgccgg

SEQ ID NO: 2789550 - RNA, 19 nt, Artificial Sequence
  Description of Artificial Sequence: Synthetic oligonucleotide
ucucccaccaaggcuagga

SEQ ID NO: 2789551 - RNA, 19 nt, Artificial Sequence
  Description of Artificial Sequence: Synthetic oligonucleotide
uccuuugguggccaggcuu

SEQ ID NO: 2789552 - RNA, 19 nt, Artificial Sequence
  Description of Artificial Sequence: Synthetic oligonucleotide
gcuaggagcagguuccgag

SEQ ID NO: 2789553 - RNA, 19 nt, Artificial Sequence
  Description of Artificial Sequence: Synthetic oligonucleotide
gucuguguacuugcgggcg

SEQ ID NO: 2789554 - RNA, 19 nt, Artificial Sequence
  Description of Artificial Sequence: Synthetic oligonucleotide
guaacguugucgguuggug

SEQ ID NO: 2789555 - RNA, 19 nt, Artificial Sequence
  Description of Artificial Sequence: Synthetic oligonucleotide
gaagcugaaucggccgccg

SEQ ID NO: 2789556 - RNA, 19 nt, Artificial Sequence
  Description of Artificial Sequence: Synthetic oligonucleotide
agcuugggacaucccgccc

SEQ ID NO: 2789557 - RNA, 19 nt, Artificial Sequence
  Description of Artificial Sequence: Synthetic oligonucleotide
uguccauuuuggagaguac

SEQ ID NO: 2789558 - RNA, 19 nt, Artificial Sequence
  Description of Artificial Sequence: Synthetic oligonucleotide
ggaaccucgggagagauga

SEQ ID NO: 2789559 - RNA, 19 nt, Artificial Sequence
  Description of Artificial Sequence: Synthetic oligonucleotide
cagagguagggucguacag

SEQ ID NO: 2789560 - RNA, 19 nt, Artificial Sequence
  Description of Artificial Sequence: Synthetic oligonucleotide
ugaagcugaaucggccgcc

SEQ ID NO: 2789561 - RNA, 19 nt, Artificial Sequence
  Description of Artificial Sequence: Synthetic oligonucleotide
ucacuaagcuccucuugaa

SEQ ID NO: 2789562 - RNA, 19 nt, Artificial Sequence
  Description of Artificial Sequence: Synthetic oligonucleotide
gguagggucguacagccuc

SEQ ID NO: 2789563 - RNA, 19 nt, Artificial Sequence
  Description of Artificial Sequence: Synthetic oligonucleotide
uaaugcuaccagguagaug

SEQ ID NO: 2789564 - RNA, 19 nt, Artificial Sequence
  Description of Artificial Sequence: Synthetic oligonucleotide
acguugucgguuggugucc

SEQ ID NO: 2789565 - RNA, 19 nt, Artificial Sequence
  Description of Artificial Sequence: Synthetic oligonucleotide
ugaaucggccgccggcagc

SEQ ID NO: 2789566 - RNA, 19 nt, Artificial Sequence
  Description of Artificial Sequence: Synthetic oligonucleotide
gagaguacugcuugaggua

SEQ ID NO: 2789567 - RNA, 19 nt, Artificial Sequence
  Description of Artificial Sequence: Synthetic oligonucleotide
ugaacuggguaacguuguc

SEQ ID NO: 2789568 - RNA, 19 nt, Artificial Sequence
  Description of Artificial Sequence: Synthetic oligonucleotide
cuugccccgcaucaccgcg

SEQ ID NO: 2789569 - RNA, 19 nt, Artificial Sequence
  Description of Artificial Sequence: Synthetic oligonucleotide
ugccagcucgcccacuucu

SEQ ID NO: 2789570 - RNA, 19 nt, Artificial Sequence
  Description of Artificial Sequence: Synthetic oligonucleotide
agaguucugccagcucgcc

SEQ ID NO: 2789571 - RNA, 19 nt, Artificial Sequence
  Description of Artificial Sequence: Synthetic oligonucleotide
agaguacugcuugagguaa

SEQ ID NO: 2789572 - RNA, 19 nt, Artificial Sequence
  Description of Artificial Sequence: Synthetic oligonucleotide
auggggcaagucuguguac

SEQ ID NO: 2789573 - RNA, 19 nt, Artificial Sequence
  Description of Artificial Sequence: Synthetic oligonucleotide
ucggcagcaaacucugcau

SEQ ID NO: 2789574 - RNA, 19 nt, Artificial Sequence
  Description of Artificial Sequence: Synthetic oligonucleotide
ugucgguugguguccauuu

SEQ ID NO: 2789575 - RNA, 19 nt, Artificial Sequence
  Description of Artificial Sequence: Synthetic oligonucleotide
ucuagguggaagccugguu

SEQ ID NO: 2789576 - RNA, 19 nt, Artificial Sequence
  Description of Artificial Sequence: Synthetic oligonucleotide
auguccucaagcguaggcu

SEQ ID NO: 2789577 - RNA, 19 nt, Artificial Sequence
  Description of Artificial Sequence: Synthetic oligonucleotide
uccucaagcguaggcuccg

SEQ ID NO: 2789578 - RNA, 19 nt, Artificial Sequence
  Description of Artificial Sequence: Synthetic oligonucleotide
ggcugcuaaugcuaccagg

SEQ ID NO: 2789579 - RNA, 19 nt, Artificial Sequence
  Description of Artificial Sequence: Synthetic oligonucleotide
gacuagacucugcaucaga

SEQ ID NO: 2789580 - RNA, 19 nt, Artificial Sequence
  Description of Artificial Sequence: Synthetic oligonucleotide
guagaugaggacgucacua

SEQ ID NO: 2789581 - RNA, 19 nt, Artificial Sequence
  Description of Artificial Sequence: Synthetic oligonucleotide
gaaagaguucugccagcuc

SEQ ID NO: 2789582 - RNA, 19 nt, Artificial Sequence
  Description of Artificial Sequence: Synthetic oligonucleotide
cuaccagguagaugaggac

SEQ ID NO: 2789583 - RNA, 19 nt, Artificial Sequence
  Description of Artificial Sequence: Synthetic oligonucleotide
cagcuugggacaucccgcc

SEQ ID NO: 2789584 - RNA, 19 nt, Artificial Sequence
  Description of Artificial Sequence: Synthetic oligonucleotide
cgucgaauguccucaagcg

SEQ ID NO: 2789585 - RNA, 19 nt, Artificial Sequence
  Description of Artificial Sequence: Synthetic oligonucleotide
ugaggacuagacucugcau

SEQ ID NO: 2789586 - RNA, 19 nt, Artificial Sequence
  Description of Artificial Sequence: Synthetic oligonucleotide
cuugcgggcggaaccucgg

SEQ ID NO: 2789587 - RNA, 19 nt, Artificial Sequence
  Description of Artificial Sequence: Synthetic oligonucleotide
ucugcauggaggcgucgaa

SEQ ID NO: 2789588 - RNA, 19 nt, Artificial Sequence
  Description of Artificial Sequence: Synthetic oligonucleotide
caucccgcccaccuguccc

SEQ ID NO: 2789589 - RNA, 19 nt, Artificial Sequence
  Description of Artificial Sequence: Synthetic oligonucleotide
cuuuccuuugguggccagg

SEQ ID NO: 2789590 - RNA, 19 nt, Artificial Sequence
  Description of Artificial Sequence: Synthetic oligonucleotide
uggggcaagucuguguacu

SEQ ID NO: 2789591 - RNA, 19 nt, Artificial Sequence
  Description of Artificial Sequence: Synthetic oligonucleotide
gaguucugccagcucgccc

SEQ ID NO: 2789592 - RNA, 19 nt, Artificial Sequence
  Description of Artificial Sequence: Synthetic oligonucleotide
gaggcgucgaauguccuca

SEQ ID NO: 2789593 - RNA, 19 nt, Artificial Sequence
  Description of Artificial Sequence: Synthetic oligonucleotide
agauggucccgauggggca

SEQ ID NO: 2789594 - RNA, 19 nt, Artificial Sequence
  Description of Artificial Sequence: Synthetic oligonucleotide
ucgcccacuucucccacca

SEQ ID NO: 2789595 - RNA, 19 nt, Artificial Sequence
  Description of Artificial Sequence: Synthetic oligonucleotide
agccuccacagccugauuu

SEQ ID NO: 2789596 - RNA, 19 nt, Artificial Sequence
  Description of Artificial Sequence: Synthetic oligonucleotide
aacucagagguagggucgu

SEQ ID NO: 2789597 - RNA, 19 nt, Artificial Sequence
  Description of Artificial Sequence: Synthetic oligonucleotide
gcgucgaauguccucaagc

SEQ ID NO: 2789598 - RNA, 19 nt, Artificial Sequence
  Description of Artificial Sequence: Synthetic oligonucleotide
gguggaacugcucccaguc

SEQ ID NO: 2789599 - RNA, 19 nt, Artificial Sequence
  Description of Artificial Sequence: Synthetic oligonucleotide
uaggcuccgggcugaagcu

SEQ ID NO: 2789600 - RNA, 19 nt, Artificial Sequence
  Description of Artificial Sequence: Synthetic oligonucleotide
gacgucacuaagcuccucu

SEQ ID NO: 2789601 - RNA, 19 nt, Artificial Sequence
  Description of Artificial Sequence: Synthetic oligonucleotide
aguacugcuugagguaagu

SEQ ID NO: 2789602 - RNA, 19 nt, Artificial Sequence
  Description of Artificial Sequence: Synthetic oligonucleotide
uugccccgcaucaccgcgg

SEQ ID NO: 2789603 - RNA, 19 nt, Artificial Sequence
  Description of Artificial Sequence: Synthetic oligonucleotide
augaacuggguaacguugu

SEQ ID NO: 2789604 - RNA, 19 nt, Artificial Sequence
  Description of Artificial Sequence: Synthetic oligonucleotide
accagguagaugaggacgu

SEQ ID NO: 2789605 - RNA, 19 nt, Artificial Sequence
  Description of Artificial Sequence: Synthetic oligonucleotide
ugaggacgucacuaagcuc

SEQ ID NO: 2789606 - RNA, 19 nt, Artificial Sequence
  Description of Artificial Sequence: Synthetic oligonucleotide
cagagauggucccgauggg

SEQ ID NO: 2789607 - RNA, 19 nt, Artificial Sequence
  Description of Artificial Sequence: Synthetic oligonucleotide
ugccccgcaucaccgcggg

SEQ ID NO: 2789608 - RNA, 19 nt, Artificial Sequence
  Description of Artificial Sequence: Synthetic oligonucleotide
cucaagcguaggcuccggg

SEQ ID NO: 2789609 - RNA, 19 nt, Artificial Sequence
  Description of Artificial Sequence: Synthetic oligonucleotide
uagguggaagccugguuuu

SEQ ID NO: 2789610 - RNA, 19 nt, Artificial Sequence
  Description of Artificial Sequence: Synthetic oligonucleotide
uugcgggcggaaccucggg

SEQ ID NO: 2789611 - RNA, 19 nt, Artificial Sequence
  Description of Artificial Sequence: Synthetic oligonucleotide
ucggccgccggcagcagca

SEQ ID NO: 2789612 - RNA, 19 nt, Artificial Sequence
  Description of Artificial Sequence: Synthetic oligonucleotide
ugcuugagguaaguccaca

SEQ ID NO: 2789613 - RNA, 19 nt, Artificial Sequence
  Description of Artificial Sequence: Synthetic oligonucleotide
ucuugccccgcaucaccgc

SEQ ID NO: 2789614 - RNA, 19 nt, Artificial Sequence
  Description of Artificial Sequence: Synthetic oligonucleotide
accugucccagccgcgcgg

SEQ ID NO: 2789615 - RNA, 19 nt, Artificial Sequence
  Description of Artificial Sequence: Synthetic oligonucleotide
guggaacugcucccagucc

SEQ ID NO: 2789616 - RNA, 19 nt, Artificial Sequence
  Description of Artificial Sequence: Synthetic oligonucleotide
cauggaggcgucgaauguc

SEQ ID NO: 2789617 - RNA, 19 nt, Artificial Sequence
  Description of Artificial Sequence: Synthetic oligonucleotide
ccagcuugggacaucccgc

SEQ ID NO: 2789618 - RNA, 19 nt, Artificial Sequence
  Description of Artificial Sequence: Synthetic oligonucleotide
acuggguaacguugucggu

SEQ ID NO: 2789619 - RNA, 19 nt, Artificial Sequence
  Description of Artificial Sequence: Synthetic oligonucleotide
agggucguacagccuccac

SEQ ID NO: 2789620 - RNA, 19 nt, Artificial Sequence
  Description of Artificial Sequence: Synthetic oligonucleotide
ugcgggcggaaccucggga

SEQ ID NO: 2789621 - RNA, 19 nt, Artificial Sequence
  Description of Artificial Sequence: Synthetic oligonucleotide
cucagagguagggucguac

SEQ ID NO: 2789622 - RNA, 19 nt, Artificial Sequence
  Description of Artificial Sequence: Synthetic oligonucleotide
auuuuggagaguacugcuu

SEQ ID NO: 2789623 - RNA, 19 nt, Artificial Sequence
  Description of Artificial Sequence: Synthetic oligonucleotide
aucaccgcgggaaccgccg

SEQ ID NO: 2789624 - RNA, 19 nt, Artificial Sequence
  Description of Artificial Sequence: Synthetic oligonucleotide
cuugggacaucccgcccac

SEQ ID NO: 2789625 - RNA, 19 nt, Artificial Sequence
  Description of Artificial Sequence: Synthetic oligonucleotide
uuccgaggcugguggaacu

SEQ ID NO: 2789626 - RNA, 19 nt, Artificial Sequence
  Description of Artificial Sequence: Synthetic oligonucleotide
uucuagguggaagccuggu

SEQ ID NO: 2789627 - RNA, 19 nt, Artificial Sequence
  Description of Artificial Sequence: Synthetic oligonucleotide
uuucagagauggucccgau

SEQ ID NO: 2789628 - RNA, 19 nt, Artificial Sequence
  Description of Artificial Sequence: Synthetic oligonucleotide
ccgggcugaagcugaaucg

SEQ ID NO: 2789629 - RNA, 19 nt, Artificial Sequence
  Description of Artificial Sequence: Synthetic oligonucleotide
caucaccgcgggaaccgcc

SEQ ID NO: 2789630 - RNA, 19 nt, Artificial Sequence
  Description of Artificial Sequence: Synthetic oligonucleotide
gaguacugcuugagguaag

SEQ ID NO: 2789631 - RNA, 19 nt, Artificial Sequence
  Description of Artificial Sequence: Synthetic oligonucleotide
gcuaaugcuaccagguaga

SEQ ID NO: 2789632 - RNA, 19 nt, Artificial Sequence
  Description of Artificial Sequence: Synthetic oligonucleotide
gaaucggccgccggcagca

SEQ ID NO: 2789633 - RNA, 19 nt, Artificial Sequence
  Description of Artificial Sequence: Synthetic oligonucleotide
acuugcgggcggaaccucg

SEQ ID NO: 2789634 - RNA, 19 nt, Artificial Sequence
  Description of Artificial Sequence: Synthetic oligonucleotide
cagcucgcccacuucuccc

SEQ ID NO: 2789635 - RNA, 19 nt, Artificial Sequence
  Description of Artificial Sequence: Synthetic oligonucleotide
guguccauuuuggagagua

SEQ ID NO: 2789636 - RNA, 19 nt, Artificial Sequence
  Description of Artificial Sequence: Synthetic oligonucleotide
cucccaccaaggcuaggag

SEQ ID NO: 2789637 - RNA, 19 nt, Artificial Sequence
  Description of Artificial Sequence: Synthetic oligonucleotide
cugcuugagguaaguccac

SEQ ID NO: 2789638 - RNA, 19 nt, Artificial Sequence
  Description of Artificial Sequence: Synthetic oligonucleotide
agcucgcccacuucuccca

SEQ ID NO: 2789639 - RNA, 19 nt, Artificial Sequence
  Description of Artificial Sequence: Synthetic oligonucleotide
ggaaccgccgccagcuugg

SEQ ID NO: 2789640 - RNA, 19 nt, Artificial Sequence
  Description of Artificial Sequence: Synthetic oligonucleotide
guccacaugacaacgggcu

SEQ ID NO: 2789641 - RNA, 19 nt, Artificial Sequence
  Description of Artificial Sequence: Synthetic oligonucleotide
gagcagguuccgaggcugg

SEQ ID NO: 2789642 - RNA, 19 nt, Artificial Sequence
  Description of Artificial Sequence: Synthetic oligonucleotide
guagggucguacagccucc

SEQ ID NO: 2789643 - RNA, 19 nt, Artificial Sequence
  Description of Artificial Sequence: Synthetic oligonucleotide
guccauuuuggagaguacu

SEQ ID NO: 2789644 - RNA, 19 nt, Artificial Sequence
  Description of Artificial Sequence: Synthetic oligonucleotide
ugcucccagucccgcucgg

SEQ ID NO: 2789645 - RNA, 19 nt, Artificial Sequence
  Description of Artificial Sequence: Synthetic oligonucleotide
gucgaauguccucaagcgu

SEQ ID NO: 2789646 - RNA, 19 nt, Artificial Sequence
  Description of Artificial Sequence: Synthetic oligonucleotide
guccucaagcguaggcucc

SEQ ID NO: 2789647 - RNA, 19 nt, Artificial Sequence
  Description of Artificial Sequence: Synthetic oligonucleotide
uggaggcgucgaauguccu

SEQ ID NO: 2789648 - RNA, 19 nt, Artificial Sequence
  Description of Artificial Sequence: Synthetic oligonucleotide
gcaagucuguguacuugcg

SEQ ID NO: 2789649 - RNA, 19 nt, Artificial Sequence
  Description of Artificial Sequence: Synthetic oligonucleotide
cugcucccagucccgcucg

SEQ ID NO: 2789650 - RNA, 19 nt, Artificial Sequence
  Description of Artificial Sequence: Synthetic oligonucleotide
cugaaucggccgccggcag

SEQ ID NO: 2789651 - RNA, 19 nt, Artificial Sequence
  Description of Artificial Sequence: Synthetic oligonucleotide
acgucacuaagcuccucuu

SEQ ID NO: 2789652 - RNA, 19 nt, Artificial Sequence
  Description of Artificial Sequence: Synthetic oligonucleotide
agcgucuucuugccccgca

SEQ ID NO: 2789653 - RNA, 19 nt, Artificial Sequence
  Description of Artificial Sequence: Synthetic oligonucleotide
agacuuccauugaaagagu

SEQ ID NO: 2789654 - RNA, 19 nt, Artificial Sequence
  Description of Artificial Sequence: Synthetic oligonucleotide
gggucguacagccuccaca

SEQ ID NO: 2789655 - RNA, 19 nt, Artificial Sequence
  Description of Artificial Sequence: Synthetic oligonucleotide
guuccgaggcugguggaac

SEQ ID NO: 2789656 - RNA, 19 nt, Artificial Sequence
  Description of Artificial Sequence: Synthetic oligonucleotide
gucccgauggggcaagucu

SEQ ID NO: 2789657 - RNA, 19 nt, Artificial Sequence
  Description of Artificial Sequence: Synthetic oligonucleotide
cucugcaucagacuuccau

SEQ ID NO: 2789658 - RNA, 19 nt, Artificial Sequence
  Description of Artificial Sequence: Synthetic oligonucleotide
gcaucagacuuccauugaa

SEQ ID NO: 2789659 - RNA, 19 nt, Artificial Sequence
  Description of Artificial Sequence: Synthetic oligonucleotide
ccacaugacaacgggcugc

SEQ ID NO: 2789660 - RNA, 19 nt, Artificial Sequence
  Description of Artificial Sequence: Synthetic oligonucleotide
cgguugguguccauuuugg

SEQ ID NO: 2789661 - RNA, 19 nt, Artificial Sequence
  Description of Artificial Sequence: Synthetic oligonucleotide
gucguacagccuccacagc

SEQ ID NO: 2789662 - RNA, 19 nt, Artificial Sequence
  Description of Artificial Sequence: Synthetic oligonucleotide
cucgcccacuucucccacc

SEQ ID NO: 2789663 - RNA, 19 nt, Artificial Sequence
  Description of Artificial Sequence: Synthetic oligonucleotide
uugucgguugguguccauu

SEQ ID NO: 2789664 - RNA, 19 nt, Artificial Sequence
  Description of Artificial Sequence: Synthetic oligonucleotide
caagcguaggcuccgggcu

SEQ ID NO: 2789665 - RNA, 19 nt, Artificial Sequence
  Description of Artificial Sequence: Synthetic oligonucleotide
ucccgcucggcagcaaacu

SEQ ID NO: 2789666 - RNA, 19 nt, Artificial Sequence
  Description of Artificial Sequence: Synthetic oligonucleotide
agucccgcucggcagcaaa

SEQ ID NO: 2789667 - RNA, 19 nt, Artificial Sequence
  Description of Artificial Sequence: Synthetic oligonucleotide
caccugucccagccgcgcg

SEQ ID NO: 2789668 - RNA, 19 nt, Artificial Sequence
  Description of Artificial Sequence: Synthetic oligonucleotide
gcgggcggaaccucgggag

SEQ ID NO: 2789669 - RNA, 19 nt, Artificial Sequence
  Description of Artificial Sequence: Synthetic oligonucleotide
cgaauguccucaagcguag

SEQ ID NO: 2789670 - RNA, 19 nt, Artificial Sequence
  Description of Artificial Sequence: Synthetic oligonucleotide
agccugauuuucagagaug

SEQ ID NO: 2789671 - RNA, 19 nt, Artificial Sequence
  Description of Artificial Sequence: Synthetic oligonucleotide
guacugcuugagguaaguc

SEQ ID NO: 2789672 - RNA, 19 nt, Artificial Sequence
  Description of Artificial Sequence: Synthetic oligonucleotide
gggagagaugaacugggua

SEQ ID NO: 2789673 - RNA, 19 nt, Artificial Sequence
  Description of Artificial Sequence: Synthetic oligonucleotide
gcuugggacaucccgccca

SEQ ID NO: 2789674 - RNA, 19 nt, Artificial Sequence
  Description of Artificial Sequence: Synthetic oligonucleotide
ccucgggagagaugaacug

SEQ ID NO: 2789675 - RNA, 19 nt, Artificial Sequence
  Description of Artificial Sequence: Synthetic oligonucleotide
uucucccaccaaggcuagg

SEQ ID NO: 2789676 - RNA, 19 nt, Artificial Sequence
  Description of Artificial Sequence: Synthetic oligonucleotide
gaagagcugcucuuuccuu

SEQ ID NO: 2789677 - RNA, 19 nt, Artificial Sequence
  Description of Artificial Sequence: Synthetic oligonucleotide
gggaaccgccgccagcuug

SEQ ID NO: 2789678 - RNA, 19 nt, Artificial Sequence
  Description of Artificial Sequence: Synthetic oligonucleotide
uguguacuugcgggcggaa

SEQ ID NO: 2789679 - RNA, 19 nt, Artificial Sequence
  Description of Artificial Sequence: Synthetic oligonucleotide
aaccgccgccagcuuggga

SEQ ID NO: 2789680 - RNA, 19 nt, Artificial Sequence
  Description of Artificial Sequence: Synthetic oligonucleotide
uagggucguacagccucca

SEQ ID NO: 2789681 - RNA, 19 nt, Artificial Sequence
  Description of Artificial Sequence: Synthetic oligonucleotide
acucugcauggaggcgucg

SEQ ID NO: 2789682 - RNA, 19 nt, Artificial Sequence
  Description of Artificial Sequence: Synthetic oligonucleotide
gaggcugguggaacugcuc

SEQ ID NO: 2789683 - RNA, 19 nt, Artificial Sequence
  Description of Artificial Sequence: Synthetic oligonucleotide
agguuccgaggcuggugga

SEQ ID NO: 2789684 - RNA, 19 nt, Artificial Sequence
  Description of Artificial Sequence: Synthetic oligonucleotide
gggcaagucuguguacuug

SEQ ID NO: 2789685 - RNA, 19 nt, Artificial Sequence
  Description of Artificial Sequence: Synthetic oligonucleotide
guguacuugcgggcggaac

SEQ ID NO: 2789686 - RNA, 19 nt, Artificial Sequence
  Description of Artificial Sequence: Synthetic oligonucleotide
ggaggcgucgaauguccuc

SEQ ID NO: 2789687 - RNA, 19 nt, Artificial Sequence
  Description of Artificial Sequence: Synthetic oligonucleotide
gacuuccauugaaagaguu

SEQ ID NO: 2789688 - RNA, 19 nt, Artificial Sequence
  Description of Artificial Sequence: Synthetic oligonucleotide
ggacuagacucugcaucag

SEQ ID NO: 2789689 - RNA, 19 nt, Artificial Sequence
  Description of Artificial Sequence: Synthetic oligonucleotide
cugcuaaugcuaccaggua

SEQ ID NO: 2789690 - RNA, 19 nt, Artificial Sequence
  Description of Artificial Sequence: Synthetic oligonucleotide
ggcgucgaauguccucaag

SEQ ID NO: 2789691 - RNA, 19 nt, Artificial Sequence
  Description of Artificial Sequence: Synthetic oligonucleotide
gcucuuuccuuugguggcc

SEQ ID NO: 2789692 - RNA, 19 nt, Artificial Sequence
  Description of Artificial Sequence: Synthetic oligonucleotide
gaaccgccgccagcuuggg

SEQ ID NO: 2789693 - RNA, 19 nt, Artificial Sequence
  Description of Artificial Sequence: Synthetic oligonucleotide
gggacaucccgcccaccug

SEQ ID NO: 2789694 - RNA, 19 nt, Artificial Sequence
  Description of Artificial Sequence: Synthetic oligonucleotide
augcuaccagguagaugag

SEQ ID NO: 2789695 - RNA, 19 nt, Artificial Sequence
  Description of Artificial Sequence: Synthetic oligonucleotide
gguggccaggcuugaggac

SEQ ID NO: 2789696 - RNA, 19 nt, Artificial Sequence
  Description of Artificial Sequence: Synthetic oligonucleotide
cucugcauggaggcgucga

SEQ ID NO: 2789697 - RNA, 19 nt, Artificial Sequence
  Description of Artificial Sequence: Synthetic oligonucleotide
caccgcgggaaccgccgcc

SEQ ID NO: 2789698 - RNA, 19 nt, Artificial Sequence
  Description of Artificial Sequence: Synthetic oligonucleotide
aggacgucacuaagcuccu

SEQ ID NO: 2789699 - RNA, 19 nt, Artificial Sequence
  Description of Artificial Sequence: Synthetic oligonucleotide
aaucggccgccggcagcag

SEQ ID NO: 2789700 - RNA, 19 nt, Artificial Sequence
  Description of Artificial Sequence: Synthetic oligonucleotide
agcagguuccgaggcuggu

SEQ ID NO: 2789701 - RNA, 19 nt, Artificial Sequence
  Description of Artificial Sequence: Synthetic oligonucleotide
gcccaccugucccagccgc

SEQ ID NO: 2789702 - RNA, 19 nt, Artificial Sequence
  Description of Artificial Sequence: Synthetic oligonucleotide
uugggacaucccgcccacc

SEQ ID NO: 2789703 - RNA, 19 nt, Artificial Sequence
  Description of Artificial Sequence: Synthetic oligonucleotide
gcugaaucggccgccggca

SEQ ID NO: 2789704 - RNA, 19 nt, Artificial Sequence
  Description of Artificial Sequence: Synthetic oligonucleotide
accgcgggaaccgccgcca

SEQ ID NO: 2789705 - RNA, 19 nt, Artificial Sequence
  Description of Artificial Sequence: Synthetic oligonucleotide
cgucacuaagcuccucuug

SEQ ID NO: 2789706 - RNA, 19 nt, Artificial Sequence
  Description of Artificial Sequence: Synthetic oligonucleotide
ggacaucccgcccaccugu

SEQ ID NO: 2789707 - RNA, 19 nt, Artificial Sequence
  Description of Artificial Sequence: Synthetic oligonucleotide
gggcggaaccucgggagag

SEQ ID NO: 2789708 - RNA, 19 nt, Artificial Sequence
  Description of Artificial Sequence: Synthetic oligonucleotide
guacuugcgggcggaaccu

SEQ ID NO: 2789709 - RNA, 19 nt, Artificial Sequence
  Description of Artificial Sequence: Synthetic oligonucleotide
cuggguaacguugucgguu

SEQ ID NO: 2789710 - RNA, 19 nt, Artificial Sequence
  Description of Artificial Sequence: Synthetic oligonucleotide
gacaucccgcccaccuguc

SEQ ID NO: 2789711 - RNA, 19 nt, Artificial Sequence
  Description of Artificial Sequence: Synthetic oligonucleotide
cuguguacuugcgggcgga

SEQ ID NO: 2789712 - RNA, 19 nt, Artificial Sequence
  Description of Artificial Sequence: Synthetic oligonucleotide
gcagguuccgaggcuggug

SEQ ID NO: 2789713 - RNA, 19 nt, Artificial Sequence
  Description of Artificial Sequence: Synthetic oligonucleotide
aggcgucgaauguccucaa

SEQ ID NO: 2789714 - RNA, 19 nt, Artificial Sequence
  Description of Artificial Sequence: Synthetic oligonucleotide
gucccgcucggcagcaaac

SEQ ID NO: 2789715 - RNA, 19 nt, Artificial Sequence
  Description of Artificial Sequence: Synthetic oligonucleotide
ccgcccaccugucccagcc

SEQ ID NO: 2789716 - RNA, 19 nt, Artificial Sequence
  Description of Artificial Sequence: Synthetic oligonucleotide
cuuugguggccaggcuuga

SEQ ID NO: 2789717 - RNA, 19 nt, Artificial Sequence
  Description of Artificial Sequence: Synthetic oligonucleotide
agguagggucguacagccu

SEQ ID NO: 2789718 - RNA, 19 nt, Artificial Sequence
  Description of Artificial Sequence: Synthetic oligonucleotide
cacaugacaacgggcugcu

SEQ ID NO: 2789719 - RNA, 19 nt, Artificial Sequence
  Description of Artificial Sequence: Synthetic oligonucleotide
ggcuugaggacuagacucu

SEQ ID NO: 2789720 - RNA, 19 nt, Artificial Sequence
  Description of Artificial Sequence: Synthetic oligonucleotide
cccaccugucccagccgcg

SEQ ID NO: 2789721 - RNA, 19 nt, Artificial Sequence
  Description of Artificial Sequence: Synthetic oligonucleotide
ccucuugaagagcugcucu

SEQ ID NO: 2789722 - RNA, 19 nt, Artificial Sequence
  Description of Artificial Sequence: Synthetic oligonucleotide
cuaaugcuaccagguagau

SEQ ID NO: 2789723 - RNA, 19 nt, Artificial Sequence
  Description of Artificial Sequence: Synthetic oligonucleotide
gcauggaggcgucgaaugu

SEQ ID NO: 2789724 - RNA, 19 nt, Artificial Sequence
  Description of Artificial Sequence: Synthetic oligonucleotide
ccgccagcuugggacaucc

SEQ ID NO: 2789725 - RNA, 19 nt, Artificial Sequence
  Description of Artificial Sequence: Synthetic oligonucleotide
gaaccucgggagagaugaa

SEQ ID NO: 2789726 - RNA, 19 nt, Artificial Sequence
  Description of Artificial Sequence: Synthetic oligonucleotide
ccaccugucccagccgcgc

SEQ ID NO: 2789727 - RNA, 19 nt, Artificial Sequence
  Description of Artificial Sequence: Synthetic oligonucleotide
gguuccgaggcugguggaa

SEQ ID NO: 2789728 - RNA, 19 nt, Artificial Sequence
  Description of Artificial Sequence: Synthetic oligonucleotide
ccugucccagccgcgcggg

SEQ ID NO: 2789729 - RNA, 19 nt, Artificial Sequence
  Description of Artificial Sequence: Synthetic oligonucleotide
ccgaggcugguggaacugc

SEQ ID NO: 2789730 - RNA, 19 nt, Artificial Sequence
  Description of Artificial Sequence: Synthetic oligonucleotide
ccuccacagccugauuuuc

SEQ ID NO: 2789731 - RNA, 19 nt, Artificial Sequence
  Description of Artificial Sequence: Synthetic oligonucleotide
gucgguugguguccauuuu

SEQ ID NO: 2789732 - RNA, 19 nt, Artificial Sequence
  Description of Artificial Sequence: Synthetic oligonucleotide
cccgcaucaccgcgggaac

SEQ ID NO: 2789733 - RNA, 19 nt, Artificial Sequence
  Description of Artificial Sequence: Synthetic oligonucleotide
ccacagccugauuuucaga

SEQ ID NO: 2789734 - RNA, 19 nt, Artificial Sequence
  Description of Artificial Sequence: Synthetic oligonucleotide
cccgcucggcagcaaacuc

SEQ ID NO: 2789735 - RNA, 19 nt, Artificial Sequence
  Description of Artificial Sequence: Synthetic oligonucleotide
acucagagguagggucgua

SEQ ID NO: 2789736 - RNA, 19 nt, Artificial Sequence
  Description of Artificial Sequence: Synthetic oligonucleotide
gcaucaccgcgggaaccgc

SEQ ID NO: 2789737 - RNA, 19 nt, Artificial Sequence
  Description of Artificial Sequence: Synthetic oligonucleotide
ccaccaaggcuaggagcag

SEQ ID NO: 2789738 - RNA, 19 nt, Artificial Sequence
  Description of Artificial Sequence: Synthetic oligonucleotide
uggucccgauggggcaagu

SEQ ID NO: 2789739 - RNA, 19 nt, Artificial Sequence
  Description of Artificial Sequence: Synthetic oligonucleotide
ccucaagcguaggcuccgg

SEQ ID NO: 2789740 - RNA, 19 nt, Artificial Sequence
  Description of Artificial Sequence: Synthetic oligonucleotide
ccugauuuucagagauggu

SEQ ID NO: 2789741 - RNA, 19 nt, Artificial Sequence
  Description of Artificial Sequence: Synthetic oligonucleotide
gcucgcccacuucucccac

SEQ ID NO: 2789742 - RNA, 19 nt, Artificial Sequence
  Description of Artificial Sequence: Synthetic oligonucleotide
ggucccgauggggcaaguc

SEQ ID NO: 2789743 - RNA, 19 nt, Artificial Sequence
  Description of Artificial Sequence: Synthetic oligonucleotide
acucugcaucagacuucca

SEQ ID NO: 2789744 - RNA, 19 nt, Artificial Sequence
  Description of Artificial Sequence: Synthetic oligonucleotide
ccgcaucaccgcgggaacc

SEQ ID NO: 2789745 - RNA, 19 nt, Artificial Sequence
  Description of Artificial Sequence: Synthetic oligonucleotide
cugcauggaggcgucgaau

SEQ ID NO: 2789746 - RNA, 19 nt, Artificial Sequence
  Description of Artificial Sequence: Synthetic oligonucleotide
ggcuaggagcagguuccga

SEQ ID NO: 2789747 - RNA, 19 nt, Artificial Sequence
  Description of Artificial Sequence: Synthetic oligonucleotide
gcgggaaccgccgccagcu

SEQ ID NO: 2789748 - RNA, 19 nt, Artificial Sequence
  Description of Artificial Sequence: Synthetic oligonucleotide
ccgauggggcaagucugug

SEQ ID NO: 2789749 - RNA, 19 nt, Artificial Sequence
  Description of Artificial Sequence: Synthetic oligonucleotide
ggcggaaccucgggagaga

SEQ ID NO: 2789750 - RNA, 19 nt, Artificial Sequence
  Description of Artificial Sequence: Synthetic oligonucleotide
guugucgguugguguccau

SEQ ID NO: 2789751 - RNA, 19 nt, Artificial Sequence
  Description of Artificial Sequence: Synthetic oligonucleotide
ccgcucggcagcaaacucu

SEQ ID NO: 2789752 - RNA, 19 nt, Artificial Sequence
  Description of Artificial Sequence: Synthetic oligonucleotide
cggaaccucgggagagaug

SEQ ID NO: 2789753 - RNA, 19 nt, Artificial Sequence
  Description of Artificial Sequence: Synthetic oligonucleotide
gcucggcagcaaacucugc

SEQ ID NO: 2789754 - RNA, 19 nt, Artificial Sequence
  Description of Artificial Sequence: Synthetic oligonucleotide
gccaggcuugaggacuaga

SEQ ID NO: 2789755 - RNA, 19 nt, Artificial Sequence
  Description of Artificial Sequence: Synthetic oligonucleotide
ccccgcaucaccgcgggaa

SEQ ID NO: 2789756 - RNA, 19 nt, Artificial Sequence
  Description of Artificial Sequence: Synthetic oligonucleotide
ggccaggcuugaggacuag

SEQ ID NO: 2789757 - RNA, 19 nt, Artificial Sequence
  Description of Artificial Sequence: Synthetic oligonucleotide
ggacgucacuaagcuccuc

SEQ ID NO: 2789758 - RNA, 19 nt, Artificial Sequence
  Description of Artificial Sequence: Synthetic oligonucleotide
cugucccagccgcgcggga

SEQ ID NO: 2789759 - RNA, 19 nt, Artificial Sequence
  Description of Artificial Sequence: Synthetic oligonucleotide
cccgauggggcaagucugu

SEQ ID NO: 2789760 - RNA, 19 nt, Artificial Sequence
  Description of Artificial Sequence: Synthetic oligonucleotide
cgauggggcaagucugugu

SEQ ID NO: 2789761 - RNA, 19 nt, Artificial Sequence
  Description of Artificial Sequence: Synthetic oligonucleotide
cccgcccaccugucccagc

SEQ ID NO: 2789762 - RNA, 19 nt, Artificial Sequence
  Description of Artificial Sequence: Synthetic oligonucleotide
gcgucuucuugccccgcau

SEQ ID NO: 2789763 - RNA, 19 nt, Artificial Sequence
  Description of Artificial Sequence: Synthetic oligonucleotide
ccgccgccagcuugggaca

SEQ ID NO: 2789764 - RNA, 19 nt, Artificial Sequence
  Description of Artificial Sequence: Synthetic oligonucleotide
cgccagcuugggacauccc

SEQ ID NO: 2789765 - RNA, 19 nt, Artificial Sequence
  Description of Artificial Sequence: Synthetic oligonucleotide
gguguccauuuuggagagu

SEQ ID NO: 2789766 - RNA, 19 nt, Artificial Sequence
  Description of Artificial Sequence: Synthetic oligonucleotide
gcggaaccucgggagagau

SEQ ID NO: 2789767 - RNA, 19 nt, Artificial Sequence
  Description of Artificial Sequence: Synthetic oligonucleotide
cgggcggaaccucgggaga

SEQ ID NO: 2789768 - RNA, 19 nt, Artificial Sequence
  Description of Artificial Sequence: Synthetic oligonucleotide
cguugucgguuggugucca

SEQ ID NO: 2789769 - RNA, 19 nt, Artificial Sequence
  Description of Artificial Sequence: Synthetic oligonucleotide
ccagucccgcucggcagca

SEQ ID NO: 2789770 - RNA, 19 nt, Artificial Sequence
  Description of Artificial Sequence: Synthetic oligonucleotide
cagucccgcucggcagcaa

SEQ ID NO: 2789771 - RNA, 19 nt, Artificial Sequence
  Description of Artificial Sequence: Synthetic oligonucleotide
cagccuccacagccugauu

SEQ ID NO: 2789772 - RNA, 19 nt, Artificial Sequence
  Description of Artificial Sequence: Synthetic oligonucleotide
gccccgcaucaccgcggga

SEQ ID NO: 2789773 - RNA, 19 nt, Artificial Sequence
  Description of Artificial Sequence: Synthetic oligonucleotide
gcguaggcuccgggcugaa

SEQ ID NO: 2789774 - RNA, 19 nt, Artificial Sequence
  Description of Artificial Sequence: Synthetic oligonucleotide
ccaaggcuaggagcagguu

SEQ ID NO: 2789775 - RNA, 19 nt, Artificial Sequence
  Description of Artificial Sequence: Synthetic oligonucleotide
cgggaaccgccgccagcuu

SEQ ID NO: 2789776 - RNA, 19 nt, Artificial Sequence
  Description of Artificial Sequence: Synthetic oligonucleotide
cgccgccagcuugggacau

SEQ ID NO: 2789777 - RNA, 19 nt, Artificial Sequence
  Description of Artificial Sequence: Synthetic oligonucleotide
aauauaucaagguuaagcu

SEQ ID NO: 2789778 - RNA, 19 nt, Artificial Sequence
  Description of Artificial Sequence: Synthetic oligonucleotide
ucuaggagaggcuagaggg

SEQ ID NO: 2789779 - RNA, 19 nt, Artificial Sequence
  Description of Artificial Sequence: Synthetic oligonucleotide
aaagggacaagacacauga

SEQ ID NO: 2789780 - RNA, 19 nt, Artificial Sequence
  Description of Artificial Sequence: Synthetic oligonucleotide
gaauauaucaagguuaagc

SEQ ID NO: 2789781 - RNA, 19 nt, Artificial Sequence
  Description of Artificial Sequence: Synthetic oligonucleotide
uagcauuagggauagagag

SEQ ID NO: 2789782 - RNA, 19 nt, Artificial Sequence
  Description of Artificial Sequence: Synthetic oligonucleotide
aacugugacggcuuaagag

SEQ ID NO: 2789783 - RNA, 19 nt, Artificial Sequence
  Description of Artificial Sequence: Synthetic oligonucleotide
gucucuacaacugugacgg

SEQ ID NO: 2789784 - RNA, 19 nt, Artificial Sequence
  Description of Artificial Sequence: Synthetic oligonucleotide
gaaguagaagaaugaaggg

SEQ ID NO: 2789785 - RNA, 19 nt, Artificial Sequence
  Description of Artificial Sequence: Synthetic oligonucleotide
uuuccucagggucagaugc

SEQ ID NO: 2789786 - RNA, 19 nt, Artificial Sequence
  Description of Artificial Sequence: Synthetic oligonucleotide
ggaaguagaagaaugaagg

SEQ ID NO: 2789787 - RNA, 19 nt, Artificial Sequence
  Description of Artificial Sequence: Synthetic oligonucleotide
uuaagcuugccucuaggag

SEQ ID NO: 2789788 - RNA, 19 nt, Artificial Sequence
  Description of Artificial Sequence: Synthetic oligonucleotide
acacaugagagccagagcu

SEQ ID NO: 2789789 - RNA, 19 nt, Artificial Sequence
  Description of Artificial Sequence: Synthetic oligonucleotide
cauacagagauccaccugc

SEQ ID NO: 2789790 - RNA, 19 nt, Artificial Sequence
  Description of Artificial Sequence: Synthetic oligonucleotide
gauagagagaggucaaacc

SEQ ID NO: 2789791 - RNA, 19 nt, Artificial Sequence
  Description of Artificial Sequence: Synthetic oligonucleotide
cuugaacauacagagaucc

SEQ ID NO: 2789792 - RNA, 19 nt, Artificial Sequence
  Description of Artificial Sequence: Synthetic oligonucleotide
gacaagacacaugagagcc

SEQ ID NO: 2789793 - RNA, 19 nt, Artificial Sequence
  Description of Artificial Sequence: Synthetic oligonucleotide
auagagagaggucaaaccu

SEQ ID NO: 2789794 - RNA, 19 nt, Artificial Sequence
  Description of Artificial Sequence: Synthetic oligonucleotide
aagagaauauaucaagguu

SEQ ID NO: 2789795 - RNA, 19 nt, Artificial Sequence
  Description of Artificial Sequence: Synthetic oligonucleotide
uuaagagagccugagaaga

SEQ ID NO: 2789796 - RNA, 19 nt, Artificial Sequence
  Description of Artificial Sequence: Synthetic oligonucleotide
cuuagcauuagggauagag

SEQ ID NO: 2789797 - RNA, 19 nt, Artificial Sequence
  Description of Artificial Sequence: Synthetic oligonucleotide
uuuguucucugcaagggac

SEQ ID NO: 2789798 - RNA, 19 nt, Artificial Sequence
  Description of Artificial Sequence: Synthetic oligonucleotide
ucaagguuaagcuugccuc

SEQ ID NO: 2789799 - RNA, 19 nt, Artificial Sequence
  Description of Artificial Sequence: Synthetic oligonucleotide
uaagcuugccucuaggaga

SEQ ID NO: 2789800 - RNA, 19 nt, Artificial Sequence
  Description of Artificial Sequence: Synthetic oligonucleotide
aaguagaagaaugaaggga

SEQ ID NO: 2789801 - RNA, 19 nt, Artificial Sequence
  Description of Artificial Sequence: Synthetic oligonucleotide
uuagcauuagggauagaga

SEQ ID NO: 2789802 - RNA, 19 nt, Artificial Sequence
  Description of Artificial Sequence: Synthetic oligonucleotide
ugagaagagaauauaucaa

SEQ ID NO: 2789803 - RNA, 19 nt, Artificial Sequence
  Description of Artificial Sequence: Synthetic oligonucleotide
aaugaagggaaggcuggcc

SEQ ID NO: 2789804 - RNA, 19 nt, Artificial Sequence
  Description of Artificial Sequence: Synthetic oligonucleotide
agaagagaauauaucaagg

SEQ ID NO: 2789805 - RNA, 19 nt, Artificial Sequence
  Description of Artificial Sequence: Synthetic oligonucleotide
aaugucaaucuccuccucu

SEQ ID NO: 2789806 - RNA, 19 nt, Artificial Sequence
  Description of Artificial Sequence: Synthetic oligonucleotide
ucuuccaaguucuggaggc

SEQ ID NO: 2789807 - RNA, 19 nt, Artificial Sequence
  Description of Artificial Sequence: Synthetic oligonucleotide
aacauacagagauccaccu

SEQ ID NO: 2789808 - RNA, 19 nt, Artificial Sequence
  Description of Artificial Sequence: Synthetic oligonucleotide
aagucauuuguucucugca

SEQ ID NO: 2789809 - RNA, 19 nt, Artificial Sequence
  Description of Artificial Sequence: Synthetic oligonucleotide
aacugaaaucuucuugugu

SEQ ID NO: 2789810 - RNA, 19 nt, Artificial Sequence
  Description of Artificial Sequence: Synthetic oligonucleotide
cugagaagagaauauauca

SEQ ID NO: 2789811 - RNA, 19 nt, Artificial Sequence
  Description of Artificial Sequence: Synthetic oligonucleotide
aggcuagagggauaaaggg

SEQ ID NO: 2789812 - RNA, 19 nt, Artificial Sequence
  Description of Artificial Sequence: Synthetic oligonucleotide
aagaaugaagggaaggcug

SEQ ID NO: 2789813 - RNA, 19 nt, Artificial Sequence
  Description of Artificial Sequence: Synthetic oligonucleotide
acugugacggcuuaagaga

SEQ ID NO: 2789814 - RNA, 19 nt, Artificial Sequence
  Description of Artificial Sequence: Synthetic oligonucleotide
gagaggucaaaccucgaag

SEQ ID NO: 2789815 - RNA, 19 nt, Artificial Sequence
  Description of Artificial Sequence: Synthetic oligonucleotide
aaaccucgaagucauuugu

SEQ ID NO: 2789816 - RNA, 19 nt, Artificial Sequence
  Description of Artificial Sequence: Synthetic oligonucleotide
auuagggauagagagaggu

SEQ ID NO: 2789817 - RNA, 19 nt, Artificial Sequence
  Description of Artificial Sequence: Synthetic oligonucleotide
aaucgccugaacuugcccu

SEQ ID NO: 2789818 - RNA, 19 nt, Artificial Sequence
  Description of Artificial Sequence: Synthetic oligonucleotide
ugaacauacagagauccac

SEQ ID NO: 2789819 - RNA, 19 nt, Artificial Sequence
  Description of Artificial Sequence: Synthetic oligonucleotide
cuuaagagagccugagaag

SEQ ID NO: 2789820 - RNA, 19 nt, Artificial Sequence
  Description of Artificial Sequence: Synthetic oligonucleotide
cuugcccugaauugcaagg

SEQ ID NO: 2789821 - RNA, 19 nt, Artificial Sequence
  Description of Artificial Sequence: Synthetic oligonucleotide
ucuucuuguguccuugugu

SEQ ID NO: 2789822 - RNA, 19 nt, Artificial Sequence
  Description of Artificial Sequence: Synthetic oligonucleotide
ucagaugccugguugguug

SEQ ID NO: 2789823 - RNA, 19 nt, Artificial Sequence
  Description of Artificial Sequence: Synthetic oligonucleotide
aggcuggccauucaggaac

SEQ ID NO: 2789824 - RNA, 19 nt, Artificial Sequence
  Description of Artificial Sequence: Synthetic oligonucleotide
accaacugaaaucuucuug

SEQ ID NO: 2789825 - RNA, 19 nt, Artificial Sequence
  Description of Artificial Sequence: Synthetic oligonucleotide
gugacuaccaacugaaauc

SEQ ID NO: 2789826 - RNA, 19 nt, Artificial Sequence
  Description of Artificial Sequence: Synthetic oligonucleotide
agggacaagacacaugaga

SEQ ID NO: 2789827 - RNA, 19 nt, Artificial Sequence
  Description of Artificial Sequence: Synthetic oligonucleotide
gaagucauuuguucucugc

SEQ ID NO: 2789828 - RNA, 19 nt, Artificial Sequence
  Description of Artificial Sequence: Synthetic oligonucleotide
cucugcaagggacugaccc

SEQ ID NO: 2789829 - RNA, 19 nt, Artificial Sequence
  Description of Artificial Sequence: Synthetic oligonucleotide
ugaacuugcccugaauugc

SEQ ID NO: 2789830 - RNA, 19 nt, Artificial Sequence
  Description of Artificial Sequence: Synthetic oligonucleotide
agaggucaaaccucgaagu

SEQ ID NO: 2789831 - RNA, 19 nt, Artificial Sequence
  Description of Artificial Sequence: Synthetic oligonucleotide
uagggauagagagagguca

SEQ ID NO: 2789832 - RNA, 19 nt, Artificial Sequence
  Description of Artificial Sequence: Synthetic oligonucleotide
accucgaagucauuuguuc

SEQ ID NO: 2789833 - RNA, 19 nt, Artificial Sequence
  Description of Artificial Sequence: Synthetic oligonucleotide
agugacuaccaacugaaau

SEQ ID NO: 2789834 - RNA, 19 nt, Artificial Sequence
  Description of Artificial Sequence: Synthetic oligonucleotide
uucuggaaucgccugaacu

SEQ ID NO: 2789835 - RNA, 19 nt, Artificial Sequence
  Description of Artificial Sequence: Synthetic oligonucleotide
gacugacccacccuuagcc

SEQ ID NO: 2789836 - RNA, 19 nt, Artificial Sequence
  Description of Artificial Sequence: Synthetic oligonucleotide
acuaccaacugaaaucuuc

SEQ ID NO: 2789837 - RNA, 19 nt, Artificial Sequence
  Description of Artificial Sequence: Synthetic oligonucleotide
uaagagagccugagaagag

SEQ ID NO: 2789838 - RNA, 19 nt, Artificial Sequence
  Description of Artificial Sequence: Synthetic oligonucleotide
aaggcacucccauccugcc

SEQ ID NO: 2789839 - RNA, 19 nt, Artificial Sequence
  Description of Artificial Sequence: Synthetic oligonucleotide
aguagaagaaugaagggaa

SEQ ID NO: 2789840 - RNA, 19 nt, Artificial Sequence
  Description of Artificial Sequence: Synthetic oligonucleotide
gaagagaauauaucaaggu

SEQ ID NO: 2789841 - RNA, 19 nt, Artificial Sequence
  Description of Artificial Sequence: Synthetic oligonucleotide
ugacuaccaacugaaaucu

SEQ ID NO: 2789842 - RNA, 19 nt, Artificial Sequence
  Description of Artificial Sequence: Synthetic oligonucleotide
ggauaaagggacaagacac

SEQ ID NO: 2789843 - RNA, 19 nt, Artificial Sequence
  Description of Artificial Sequence: Synthetic oligonucleotide
agagaauauaucaagguua

SEQ ID NO: 2789844 - RNA, 19 nt, Artificial Sequence
  Description of Artificial Sequence: Synthetic oligonucleotide
aaaucuucuuguguccuug

SEQ ID NO: 2789845 - RNA, 19 nt, Artificial Sequence
  Description of Artificial Sequence: Synthetic oligonucleotide
gaacauacagagauccacc

SEQ ID NO: 2789846 - RNA, 19 nt, Artificial Sequence
  Description of Artificial Sequence: Synthetic oligonucleotide
agagccagagcuguggagg

SEQ ID NO: 2789847 - RNA, 19 nt, Artificial Sequence
  Description of Artificial Sequence: Synthetic oligonucleotide
ucuggaaucgccugaacuu

SEQ ID NO: 2789848 - RNA, 19 nt, Artificial Sequence
  Description of Artificial Sequence: Synthetic oligonucleotide
cuucuuguguccuuguguc

SEQ ID NO: 2789849 - RNA, 19 nt, Artificial Sequence
  Description of Artificial Sequence: Synthetic oligonucleotide
agcuguggagggcagagag

SEQ ID NO: 2789850 - RNA, 19 nt, Artificial Sequence
  Description of Artificial Sequence: Synthetic oligonucleotide
ugucaggucaaugucaauc

SEQ ID NO: 2789851 - RNA, 19 nt, Artificial Sequence
  Description of Artificial Sequence: Synthetic oligonucleotide
uaaagggacaagacacaug

SEQ ID NO: 2789852 - RNA, 19 nt, Artificial Sequence
  Description of Artificial Sequence: Synthetic oligonucleotide
cauucaggaacuggaaucc

SEQ ID NO: 2789853 - RNA, 19 nt, Artificial Sequence
  Description of Artificial Sequence: Synthetic oligonucleotide
cugaaaucuucuugugucc

SEQ ID NO: 2789854 - RNA, 19 nt, Artificial Sequence
  Description of Artificial Sequence: Synthetic oligonucleotide
agagagaggucaaaccucg

SEQ ID NO: 2789855 - RNA, 19 nt, Artificial Sequence
  Description of Artificial Sequence: Synthetic oligonucleotide
aucaagguuaagcuugccu

SEQ ID NO: 2789856 - RNA, 19 nt, Artificial Sequence
  Description of Artificial Sequence: Synthetic oligonucleotide
aaguucuggaggcacugca

SEQ ID NO: 2789857 - RNA, 19 nt, Artificial Sequence
  Description of Artificial Sequence: Synthetic oligonucleotide
cugaacuugcccugaauug

SEQ ID NO: 2789858 - RNA, 19 nt, Artificial Sequence
  Description of Artificial Sequence: Synthetic oligonucleotide
agaaugaagggaaggcugg

SEQ ID NO: 2789859 - RNA, 19 nt, Artificial Sequence
  Description of Artificial Sequence: Synthetic oligonucleotide
agaggcuagagggauaaag

SEQ ID NO: 2789860 - RNA, 19 nt, Artificial Sequence
  Description of Artificial Sequence: Synthetic oligonucleotide
aggaaguagaagaaugaag

SEQ ID NO: 2789861 - RNA, 19 nt, Artificial Sequence
  Description of Artificial Sequence: Synthetic oligonucleotide
ugucuuccaaguucuggag

SEQ ID NO: 2789862 - RNA, 19 nt, Artificial Sequence
  Description of Artificial Sequence: Synthetic oligonucleotide
aauugcaagggcagccuuc

SEQ ID NO: 2789863 - RNA, 19 nt, Artificial Sequence
  Description of Artificial Sequence: Synthetic oligonucleotide
agacacaugagagccagag

SEQ ID NO: 2789864 - RNA, 19 nt, Artificial Sequence
  Description of Artificial Sequence: Synthetic oligonucleotide
uagagagaggucaaaccuc

SEQ ID NO: 2789865 - RNA, 19 nt, Artificial Sequence
  Description of Artificial Sequence: Synthetic oligonucleotide
uggccauucaggaacugga

SEQ ID NO: 2789866 - RNA, 19 nt, Artificial Sequence
  Description of Artificial Sequence: Synthetic oligonucleotide
ugcaagggcagccuucucu

SEQ ID NO: 2789867 - RNA, 19 nt, Artificial Sequence
  Description of Artificial Sequence: Synthetic oligonucleotide
auaucaagguuaagcuugc

SEQ ID NO: 2789868 - RNA, 19 nt, Artificial Sequence
  Description of Artificial Sequence: Synthetic oligonucleotide
uccuuuucuggaaucgccu

SEQ ID NO: 2789869 - RNA, 19 nt, Artificial Sequence
  Description of Artificial Sequence: Synthetic oligonucleotide
agggauaaagggacaagac

SEQ ID NO: 2789870 - RNA, 19 nt, Artificial Sequence
  Description of Artificial Sequence: Synthetic oligonucleotide
gcagagaggaaguagaaga

SEQ ID NO: 2789871 - RNA, 19 nt, Artificial Sequence
  Description of Artificial Sequence: Synthetic oligonucleotide
caaaccucgaagucauuug

SEQ ID NO: 2789872 - RNA, 19 nt, Artificial Sequence
  Description of Artificial Sequence: Synthetic oligonucleotide
gcauuagggauagagagag

SEQ ID NO: 2789873 - RNA, 19 nt, Artificial Sequence
  Description of Artificial Sequence: Synthetic oligonucleotide
auuuguucucugcaaggga

SEQ ID NO: 2789874 - RNA, 19 nt, Artificial Sequence
  Description of Artificial Sequence: Synthetic oligonucleotide
gacggcuuaagagagccug

SEQ ID NO: 2789875 - RNA, 19 nt, Artificial Sequence
  Description of Artificial Sequence: Synthetic oligonucleotide
cuagugacuaccaacugaa

SEQ ID NO: 2789876 - RNA, 19 nt, Artificial Sequence
  Description of Artificial Sequence: Synthetic oligonucleotide
uccuugugucucuacaacu

SEQ ID NO: 2789877 - RNA, 19 nt, Artificial Sequence
  Description of Artificial Sequence: Synthetic oligonucleotide
ugucucuggagcugucagg

SEQ ID NO: 2789878 - RNA, 19 nt, Artificial Sequence
  Description of Artificial Sequence: Synthetic oligonucleotide
uugaacauacagagaucca

SEQ ID NO: 2789879 - RNA, 19 nt, Artificial Sequence
  Description of Artificial Sequence: Synthetic oligonucleotide
gucuuccaaguucuggagg

SEQ ID NO: 2789880 - RNA, 19 nt, Artificial Sequence
  Description of Artificial Sequence: Synthetic oligonucleotide
aagcuugccucuaggagag

SEQ ID NO: 2789881 - RNA, 19 nt, Artificial Sequence
  Description of Artificial Sequence: Synthetic oligonucleotide
ucuacaacugugacggcuu

SEQ ID NO: 2789882 - RNA, 19 nt, Artificial Sequence
  Description of Artificial Sequence: Synthetic oligonucleotide
cucuaggagaggcuagagg

SEQ ID NO: 2789883 - RNA, 19 nt, Artificial Sequence
  Description of Artificial Sequence: Synthetic oligonucleotide
cugugacggcuuaagagag

SEQ ID NO: 2789884 - RNA, 19 nt, Artificial Sequence
  Description of Artificial Sequence: Synthetic oligonucleotide
gagaauauaucaagguuaa

SEQ ID NO: 2789885 - RNA, 19 nt, Artificial Sequence
  Description of Artificial Sequence: Synthetic oligonucleotide
uuuuccucagggucagaug

SEQ ID NO: 2789886 - RNA, 19 nt, Artificial Sequence
  Description of Artificial Sequence: Synthetic oligonucleotide
augaagggaaggcuggcca

SEQ ID NO: 2789887 - RNA, 19 nt, Artificial Sequence
  Description of Artificial Sequence: Synthetic oligonucleotide
uagccuagugacuaccaac

SEQ ID NO: 2789888 - RNA, 19 nt, Artificial Sequence
  Description of Artificial Sequence: Synthetic oligonucleotide
ugcccuuagcauuagggau

SEQ ID NO: 2789889 - RNA, 19 nt, Artificial Sequence
  Description of Artificial Sequence: Synthetic oligonucleotide
gaaggcuggccauucagga

SEQ ID NO: 2789890 - RNA, 19 nt, Artificial Sequence
  Description of Artificial Sequence: Synthetic oligonucleotide
ugaaaucuucuuguguccu

SEQ ID NO: 2789891 - RNA, 19 nt, Artificial Sequence
  Description of Artificial Sequence: Synthetic oligonucleotide
uuagggauagagagagguc

SEQ ID NO: 2789892 - RNA, 19 nt, Artificial Sequence
  Description of Artificial Sequence: Synthetic oligonucleotide
uugcccugaauugcaaggg

SEQ ID NO: 2789893 - RNA, 19 nt, Artificial Sequence
  Description of Artificial Sequence: Synthetic oligonucleotide
ucugcaagggacugaccca

SEQ ID NO: 2789894 - RNA, 19 nt, Artificial Sequence
  Description of Artificial Sequence: Synthetic oligonucleotide
caagacacaugagagccag

SEQ ID NO: 2789895 - RNA, 19 nt, Artificial Sequence
  Description of Artificial Sequence: Synthetic oligonucleotide
cugaauugcaagggcagcc

SEQ ID NO: 2789896 - RNA, 19 nt, Artificial Sequence
  Description of Artificial Sequence: Synthetic oligonucleotide
aaucuucuuguguccuugu

SEQ ID NO: 2789897 - RNA, 19 nt, Artificial Sequence
  Description of Artificial Sequence: Synthetic oligonucleotide
cucgaagucauuuguucuc

SEQ ID NO: 2789898 - RNA, 19 nt, Artificial Sequence
  Description of Artificial Sequence: Synthetic oligonucleotide
ucaggaacuggaauccuuu

SEQ ID NO: 2789899 - RNA, 19 nt, Artificial Sequence
  Description of Artificial Sequence: Synthetic oligonucleotide
acauacagagauccaccug

SEQ ID NO: 2789900 - RNA, 19 nt, Artificial Sequence
  Description of Artificial Sequence: Synthetic oligonucleotide
guuaagcuugccucuagga

SEQ ID NO: 2789901 - RNA, 19 nt, Artificial Sequence
  Description of Artificial Sequence: Synthetic oligonucleotide
agggucagaugccugguug

SEQ ID NO: 2789902 - RNA, 19 nt, Artificial Sequence
  Description of Artificial Sequence: Synthetic oligonucleotide
gcuuaagagagccugagaa

SEQ ID NO: 2789903 - RNA, 19 nt, Artificial Sequence
  Description of Artificial Sequence: Synthetic oligonucleotide
acaacugugacggcuuaag

SEQ ID NO: 2789904 - RNA, 19 nt, Artificial Sequence
  Description of Artificial Sequence: Synthetic oligonucleotide
uuuccuuuucuggaaucgc

SEQ ID NO: 2789905 - RNA, 19 nt, Artificial Sequence
  Description of Artificial Sequence: Synthetic oligonucleotide
ugaaggcacucccauccug

SEQ ID NO: 2789906 - RNA, 19 nt, Artificial Sequence
  Description of Artificial Sequence: Synthetic oligonucleotide
uguccuugugucucuacaa

SEQ ID NO: 2789907 - RNA, 19 nt, Artificial Sequence
  Description of Artificial Sequence: Synthetic oligonucleotide
uggaaucgccugaacuugc

SEQ ID NO: 2789908 - RNA, 19 nt, Artificial Sequence
  Description of Artificial Sequence: Synthetic oligonucleotide
gagggauaaagggacaaga

SEQ ID NO: 2789909 - RNA, 19 nt, Artificial Sequence
  Description of Artificial Sequence: Synthetic oligonucleotide
aagggacugacccacccuu

SEQ ID NO: 2789910 - RNA, 19 nt, Artificial Sequence
  Description of Artificial Sequence: Synthetic oligonucleotide
uuagccuagugacuaccaa

SEQ ID NO: 2789911 - RNA, 19 nt, Artificial Sequence
  Description of Artificial Sequence: Synthetic oligonucleotide
ucuugaugcugccagccuu

SEQ ID NO: 2789912 - RNA, 19 nt, Artificial Sequence
  Description of Artificial Sequence: Synthetic oligonucleotide
ucccauccugcccuuagca

SEQ ID NO: 2789913 - RNA, 19 nt, Artificial Sequence
  Description of Artificial Sequence: Synthetic oligonucleotide
cuucuugaugcugccagcc

SEQ ID NO: 2789914 - RNA, 19 nt, Artificial Sequence
  Description of Artificial Sequence: Synthetic oligonucleotide
ucaaaccucgaagucauuu

SEQ ID NO: 2789915 - RNA, 19 nt, Artificial Sequence
  Description of Artificial Sequence: Synthetic oligonucleotide
acuugcccugaauugcaag

SEQ ID NO: 2789916 - RNA, 19 nt, Artificial Sequence
  Description of Artificial Sequence: Synthetic oligonucleotide
gacacaugagagccagagc

SEQ ID NO: 2789917 - RNA, 19 nt, Artificial Sequence
  Description of Artificial Sequence: Synthetic oligonucleotide
aagagagccugagaagaga

SEQ ID NO: 2789918 - RNA, 19 nt, Artificial Sequence
  Description of Artificial Sequence: Synthetic oligonucleotide
gagccagagcuguggaggg

SEQ ID NO: 2789919 - RNA, 19 nt, Artificial Sequence
  Description of Artificial Sequence: Synthetic oligonucleotide
ugcccugaauugcaagggc

SEQ ID NO: 2789920 - RNA, 19 nt, Artificial Sequence
  Description of Artificial Sequence: Synthetic oligonucleotide
gaaggcacucccauccugc

SEQ ID NO: 2789921 - RNA, 19 nt, Artificial Sequence
  Description of Artificial Sequence: Synthetic oligonucleotide
aagggaaggcuggccauuc

SEQ ID NO: 2789922 - RNA, 19 nt, Artificial Sequence
  Description of Artificial Sequence: Synthetic oligonucleotide
gaaucgccugaacuugccc

SEQ ID NO: 2789923 - RNA, 19 nt, Artificial Sequence
  Description of Artificial Sequence: Synthetic oligonucleotide
gugacggcuuaagagagcc

SEQ ID NO: 2789924 - RNA, 19 nt, Artificial Sequence
  Description of Artificial Sequence: Synthetic oligonucleotide
agagaggucaaaccucgaa

SEQ ID NO: 2789925 - RNA, 19 nt, Artificial Sequence
  Description of Artificial Sequence: Synthetic oligonucleotide
caacugaaaucuucuugug

SEQ ID NO: 2789926 - RNA, 19 nt, Artificial Sequence
  Description of Artificial Sequence: Synthetic oligonucleotide
auaaagggacaagacacau

SEQ ID NO: 2789927 - RNA, 19 nt, Artificial Sequence
  Description of Artificial Sequence: Synthetic oligonucleotide
guagaagaaugaagggaag

SEQ ID NO: 2789928 - RNA, 19 nt, Artificial Sequence
  Description of Artificial Sequence: Synthetic oligonucleotide
ugugacggcuuaagagagc

SEQ ID NO: 2789929 - RNA, 19 nt, Artificial Sequence
  Description of Artificial Sequence: Synthetic oligonucleotide
ugaauugcaagggcagccu

SEQ ID NO: 2789930 - RNA, 19 nt, Artificial Sequence
  Description of Artificial Sequence: Synthetic oligonucleotide
gaggucaaaccucgaaguc

SEQ ID NO: 2789931 - RNA, 19 nt, Artificial Sequence
  Description of Artificial Sequence: Synthetic oligonucleotide
gaugcugccagccuucccu

SEQ ID NO: 2789932 - RNA, 19 nt, Artificial Sequence
  Description of Artificial Sequence: Synthetic oligonucleotide
gggauaaagggacaagaca

SEQ ID NO: 2789933 - RNA, 19 nt, Artificial Sequence
  Description of Artificial Sequence: Synthetic oligonucleotide
uucucugcaagggacugac

SEQ ID NO: 2789934 - RNA, 19 nt, Artificial Sequence
  Description of Artificial Sequence: Synthetic oligonucleotide
aggucaaaccucgaaguca

SEQ ID NO: 2789935 - RNA, 19 nt, Artificial Sequence
  Description of Artificial Sequence: Synthetic oligonucleotide
ucaggucaaugucaaucuc

SEQ ID NO: 2789936 - RNA, 19 nt, Artificial Sequence
  Description of Artificial Sequence: Synthetic oligonucleotide
gguuaagcuugccucuagg

SEQ ID NO: 2789937 - RNA, 19 nt, Artificial Sequence
  Description of Artificial Sequence: Synthetic oligonucleotide
ccugcccuuagcauuaggg

SEQ ID NO: 2789938 - RNA, 19 nt, Artificial Sequence
  Description of Artificial Sequence: Synthetic oligonucleotide
augccugguugguugcugg

SEQ ID NO: 2789939 - RNA, 19 nt, Artificial Sequence
  Description of Artificial Sequence: Synthetic oligonucleotide
uucuugaugcugccagccu

SEQ ID NO: 2789940 - RNA, 19 nt, Artificial Sequence
  Description of Artificial Sequence: Synthetic oligonucleotide
uuuucuggaaucgccugaa

SEQ ID NO: 2789941 - RNA, 19 nt, Artificial Sequence
  Description of Artificial Sequence: Synthetic oligonucleotide
ucgaagucauuuguucucu

SEQ ID NO: 2789942 - RNA, 19 nt, Artificial Sequence
  Description of Artificial Sequence: Synthetic oligonucleotide
agagccugagaagagaaua

SEQ ID NO: 2789943 - RNA, 19 nt, Artificial Sequence
  Description of Artificial Sequence: Synthetic oligonucleotide
uccaaguucuggaggcacu

SEQ ID NO: 2789944 - RNA, 19 nt, Artificial Sequence
  Description of Artificial Sequence: Synthetic oligonucleotide
guggagggcagagaggaag

SEQ ID NO: 2789945 - RNA, 19 nt, Artificial Sequence
  Description of Artificial Sequence: Synthetic oligonucleotide
uucaggaacuggaauccuu

SEQ ID NO: 2789946 - RNA, 19 nt, Artificial Sequence
  Description of Artificial Sequence: Synthetic oligonucleotide
gagggcagagaggaaguag

SEQ ID NO: 2789947 - RNA, 19 nt, Artificial Sequence
  Description of Artificial Sequence: Synthetic oligonucleotide
ggacaagacacaugagagc

SEQ ID NO: 2789948 - RNA, 19 nt, Artificial Sequence
  Description of Artificial Sequence: Synthetic oligonucleotide
aggcacucccauccugccc

SEQ ID NO: 2789949 - RNA, 19 nt, Artificial Sequence
  Description of Artificial Sequence: Synthetic oligonucleotide
aucuucuuguguccuugug

SEQ ID NO: 2789950 - RNA, 19 nt, Artificial Sequence
  Description of Artificial Sequence: Synthetic oligonucleotide
aaggcuggccauucaggaa

SEQ ID NO: 2789951 - RNA, 19 nt, Artificial Sequence
  Description of Artificial Sequence: Synthetic oligonucleotide
cauuagggauagagagagg

SEQ ID NO: 2789952 - RNA, 19 nt, Artificial Sequence
  Description of Artificial Sequence: Synthetic oligonucleotide
agccuagugacuaccaacu

SEQ ID NO: 2789953 - RNA, 19 nt, Artificial Sequence
  Description of Artificial Sequence: Synthetic oligonucleotide
cacaugagagccagagcug

SEQ ID NO: 2789954 - RNA, 19 nt, Artificial Sequence
  Description of Artificial Sequence: Synthetic oligonucleotide
aucgccugaacuugcccug

SEQ ID NO: 2789955 - RNA, 19 nt, Artificial Sequence
  Description of Artificial Sequence: Synthetic oligonucleotide
ccauucaggaacuggaauc

SEQ ID NO: 2789956 - RNA, 19 nt, Artificial Sequence
  Description of Artificial Sequence: Synthetic oligonucleotide
gagagccagagcuguggag

SEQ ID NO: 2789957 - RNA, 19 nt, Artificial Sequence
  Description of Artificial Sequence: Synthetic oligonucleotide
ccugagaagagaauauauc

SEQ ID NO: 2789958 - RNA, 19 nt, Artificial Sequence
  Description of Artificial Sequence: Synthetic oligonucleotide
gaagaaugaagggaaggcu

SEQ ID NO: 2789959 - RNA, 19 nt, Artificial Sequence
  Description of Artificial Sequence: Synthetic oligonucleotide
cacugcacucugaaggcac

SEQ ID NO: 2789960 - RNA, 19 nt, Artificial Sequence
  Description of Artificial Sequence: Synthetic oligonucleotide
agagggauaaagggacaag

SEQ ID NO: 2789961 - RNA, 19 nt, Artificial Sequence
  Description of Artificial Sequence: Synthetic oligonucleotide
acaugagagccagagcugu

SEQ ID NO: 2789962 - RNA, 19 nt, Artificial Sequence
  Description of Artificial Sequence: Synthetic oligonucleotide
acucugaaggcacucccau

SEQ ID NO: 2789963 - RNA, 19 nt, Artificial Sequence
  Description of Artificial Sequence: Synthetic oligonucleotide
agaauauaucaagguuaag

SEQ ID NO: 2789964 - RNA, 19 nt, Artificial Sequence
  Description of Artificial Sequence: Synthetic oligonucleotide
cugucucuggagcugucag

SEQ ID NO: 2789965 - RNA, 19 nt, Artificial Sequence
  Description of Artificial Sequence: Synthetic oligonucleotide
ucuggagcugucaggucaa

SEQ ID NO: 2789966 - RNA, 19 nt, Artificial Sequence
  Description of Artificial Sequence: Synthetic oligonucleotide
ugccucuaggagaggcuag

SEQ ID NO: 2789967 - RNA, 19 nt, Artificial Sequence
  Description of Artificial Sequence: Synthetic oligonucleotide
gaaugaagggaaggcuggc

SEQ ID NO: 2789968 - RNA, 19 nt, Artificial Sequence
  Description of Artificial Sequence: Synthetic oligonucleotide
uagagggauaaagggacaa

SEQ ID NO: 2789969 - RNA, 19 nt, Artificial Sequence
  Description of Artificial Sequence: Synthetic oligonucleotide
agguuaagcuugccucuag

SEQ ID NO: 2789970 - RNA, 19 nt, Artificial Sequence
  Description of Artificial Sequence: Synthetic oligonucleotide
gaggaaguagaagaaugaa

SEQ ID NO: 2789971 - RNA, 19 nt, Artificial Sequence
  Description of Artificial Sequence: Synthetic oligonucleotide
cuggaaucgccugaacuug

SEQ ID NO: 2789972 - RNA, 19 nt, Artificial Sequence
  Description of Artificial Sequence: Synthetic oligonucleotide
ucuggaggcacugcacucu

SEQ ID NO: 2789973 - RNA, 19 nt, Artificial Sequence
  Description of Artificial Sequence: Synthetic oligonucleotide
auugcaagggcagccuucu

SEQ ID NO: 2789974 - RNA, 19 nt, Artificial Sequence
  Description of Artificial Sequence: Synthetic oligonucleotide
augucaaucuccuccucuu

SEQ ID NO: 2789975 - RNA, 19 nt, Artificial Sequence
  Description of Artificial Sequence: Synthetic oligonucleotide
guccuugugucucuacaac

SEQ ID NO: 2789976 - RNA, 19 nt, Artificial Sequence
  Description of Artificial Sequence: Synthetic oligonucleotide
acucccauccugcccuuag

SEQ ID NO: 2789977 - RNA, 19 nt, Artificial Sequence
  Description of Artificial Sequence: Synthetic oligonucleotide
acugacccacccuuagccu

SEQ ID NO: 2789978 - RNA, 19 nt, Artificial Sequence
  Description of Artificial Sequence: Synthetic oligonucleotide
uucuuguguccuugugucu

SEQ ID NO: 2789979 - RNA, 19 nt, Artificial Sequence
  Description of Artificial Sequence: Synthetic oligonucleotide
cuggccauucaggaacugg

SEQ ID NO: 2789980 - RNA, 19 nt, Artificial Sequence
  Description of Artificial Sequence: Synthetic oligonucleotide
ugaagggaaggcuggccau

SEQ ID NO: 2789981 - RNA, 19 nt, Artificial Sequence
  Description of Artificial Sequence: Synthetic oligonucleotide
agagaggaaguagaagaau

SEQ ID NO: 2789982 - RNA, 19 nt, Artificial Sequence
  Description of Artificial Sequence: Synthetic oligonucleotide
uucucugucucuggagcug

SEQ ID NO: 2789983 - RNA, 19 nt, Artificial Sequence
  Description of Artificial Sequence: Synthetic oligonucleotide
ccacccuuagccuagugac

SEQ ID NO: 2789984 - RNA, 19 nt, Artificial Sequence
  Description of Artificial Sequence: Synthetic oligonucleotide
ugcacucugaaggcacucc

SEQ ID NO: 2789985 - RNA, 19 nt, Artificial Sequence
  Description of Artificial Sequence: Synthetic oligonucleotide
uuucuggaaucgccugaac

SEQ ID NO: 2789986 - RNA, 19 nt, Artificial Sequence
  Description of Artificial Sequence: Synthetic oligonucleotide
agcauuagggauagagaga

SEQ ID NO: 2789987 - RNA, 19 nt, Artificial Sequence
  Description of Artificial Sequence: Synthetic oligonucleotide
ugccugguugguugcuggg

SEQ ID NO: 2789988 - RNA, 19 nt, Artificial Sequence
  Description of Artificial Sequence: Synthetic oligonucleotide
cuuagccuagugacuacca

SEQ ID NO: 2789989 - RNA, 19 nt, Artificial Sequence
  Description of Artificial Sequence: Synthetic oligonucleotide
uaggagaggcuagagggau

SEQ ID NO: 2789990 - RNA, 19 nt, Artificial Sequence
  Description of Artificial Sequence: Synthetic oligonucleotide
uuccaaguucuggaggcac

SEQ ID NO: 2789991 - RNA, 19 nt, Artificial Sequence
  Description of Artificial Sequence: Synthetic oligonucleotide
cuuuucuggaaucgccuga

SEQ ID NO: 2789992 - RNA, 19 nt, Artificial Sequence
  Description of Artificial Sequence: Synthetic oligonucleotide
gggucagaugccugguugg

SEQ ID NO: 2789993 - RNA, 19 nt, Artificial Sequence
  Description of Artificial Sequence: Synthetic oligonucleotide
uucuggaggcacugcacuc

SEQ ID NO: 2789994 - RNA, 19 nt, Artificial Sequence
  Description of Artificial Sequence: Synthetic oligonucleotide
agggcagagaggaaguaga

SEQ ID NO: 2789995 - RNA, 19 nt, Artificial Sequence
  Description of Artificial Sequence: Synthetic oligonucleotide
ggcacugcacucugaaggc

SEQ ID NO: 2789996 - RNA, 19 nt, Artificial Sequence
  Description of Artificial Sequence: Synthetic oligonucleotide
cugcccuuagcauuaggga

SEQ ID NO: 2789997 - RNA, 19 nt, Artificial Sequence
  Description of Artificial Sequence: Synthetic oligonucleotide
gaacuugcccugaauugca

SEQ ID NO: 2789998 - RNA, 19 nt, Artificial Sequence
  Description of Artificial Sequence: Synthetic oligonucleotide
ucugucucuggagcuguca

SEQ ID NO: 2789999 - RNA, 19 nt, Artificial Sequence
  Description of Artificial Sequence: Synthetic oligonucleotide
cagagaggaaguagaagaa

SEQ ID NO: 2790000 - RNA, 19 nt, Artificial Sequence
  Description of Artificial Sequence: Synthetic oligonucleotide
cuaccaacugaaaucuucu

SEQ ID NO: 2790001 - RNA, 19 nt, Artificial Sequence
  Description of Artificial Sequence: Synthetic oligonucleotide
aagggacaagacacaugag

SEQ ID NO: 2790002 - RNA, 19 nt, Artificial Sequence
  Description of Artificial Sequence: Synthetic oligonucleotide
uccugcccuuagcauuagg

SEQ ID NO: 2790003 - RNA, 19 nt, Artificial Sequence
  Description of Artificial Sequence: Synthetic oligonucleotide
cuaggagaggcuagaggga

SEQ ID NO: 2790004 - RNA, 19 nt, Artificial Sequence
  Description of Artificial Sequence: Synthetic oligonucleotide
ggauagagagaggucaaac

SEQ ID NO: 2790005 - RNA, 19 nt, Artificial Sequence
  Description of Artificial Sequence: Synthetic oligonucleotide
uguguccuugugucucuac

SEQ ID NO: 2790006 - RNA, 19 nt, Artificial Sequence
  Description of Artificial Sequence: Synthetic oligonucleotide
cagaugccugguugguugc

SEQ ID NO: 2790007 - RNA, 19 nt, Artificial Sequence
  Description of Artificial Sequence: Synthetic oligonucleotide
ugaugcugccagccuuccc

SEQ ID NO: 2790008 - RNA, 19 nt, Artificial Sequence
  Description of Artificial Sequence: Synthetic oligonucleotide
ggaaggcuggccauucagg

SEQ ID NO: 2790009 - RNA, 19 nt, Artificial Sequence
  Description of Artificial Sequence: Synthetic oligonucleotide
ggagcugucaggucaaugu

SEQ ID NO: 2790010 - RNA, 19 nt, Artificial Sequence
  Description of Artificial Sequence: Synthetic oligonucleotide
guguccuugugucucuaca

SEQ ID NO: 2790011 - RNA, 19 nt, Artificial Sequence
  Description of Artificial Sequence: Synthetic oligonucleotide
cugcaagggacugacccac

SEQ ID NO: 2790012 - RNA, 19 nt, Artificial Sequence
  Description of Artificial Sequence: Synthetic oligonucleotide
gaugccugguugguugcug

SEQ ID NO: 2790013 - RNA, 19 nt, Artificial Sequence
  Description of Artificial Sequence: Synthetic oligonucleotide
ugcaagggacugacccacc

SEQ ID NO: 2790014 - RNA, 19 nt, Artificial Sequence
  Description of Artificial Sequence: Synthetic oligonucleotide
uaucaagguuaagcuugcc

SEQ ID NO: 2790015 - RNA, 19 nt, Artificial Sequence
  Description of Artificial Sequence: Synthetic oligonucleotide
uagugacuaccaacugaaa

SEQ ID NO: 2790016 - RNA, 19 nt, Artificial Sequence
  Description of Artificial Sequence: Synthetic oligonucleotide
agagagccugagaagagaa

SEQ ID NO: 2790017 - RNA, 19 nt, Artificial Sequence
  Description of Artificial Sequence: Synthetic oligonucleotide
ucucugcaagggacugacc

SEQ ID NO: 2790018 - RNA, 19 nt, Artificial Sequence
  Description of Artificial Sequence: Synthetic oligonucleotide
uaccaacugaaaucuucuu

SEQ ID NO: 2790019 - RNA, 19 nt, Artificial Sequence
  Description of Artificial Sequence: Synthetic oligonucleotide
gggaaggcuggccauucag

SEQ ID NO: 2790020 - RNA, 19 nt, Artificial Sequence
  Description of Artificial Sequence: Synthetic oligonucleotide
caugagagccagagcugug

SEQ ID NO: 2790021 - RNA, 19 nt, Artificial Sequence
  Description of Artificial Sequence: Synthetic oligonucleotide
aagguuaagcuugccucua

SEQ ID NO: 2790022 - RNA, 19 nt, Artificial Sequence
  Description of Artificial Sequence: Synthetic oligonucleotide
uccucagggucagaugccu

SEQ ID NO: 2790023 - RNA, 19 nt, Artificial Sequence
  Description of Artificial Sequence: Synthetic oligonucleotide
uggagcugucaggucaaug

SEQ ID NO: 2790024 - RNA, 19 nt, Artificial Sequence
  Description of Artificial Sequence: Synthetic oligonucleotide
gccucugucuuccaaguuc

SEQ ID NO: 2790025 - RNA, 19 nt, Artificial Sequence
  Description of Artificial Sequence: Synthetic oligonucleotide
cccugaauugcaagggcag

SEQ ID NO: 2790026 - RNA, 19 nt, Artificial Sequence
  Description of Artificial Sequence: Synthetic oligonucleotide
caagguuaagcuugccucu

SEQ ID NO: 2790027 - RNA, 19 nt, Artificial Sequence
  Description of Artificial Sequence: Synthetic oligonucleotide
ggcagagaggaaguagaag

SEQ ID NO: 2790028 - RNA, 19 nt, Artificial Sequence
  Description of Artificial Sequence: Synthetic oligonucleotide
cagccuucucugucucugg

SEQ ID NO: 2790029 - RNA, 19 nt, Artificial Sequence
  Description of Artificial Sequence: Synthetic oligonucleotide
cucugaaggcacucccauc

SEQ ID NO: 2790030 - RNA, 19 nt, Artificial Sequence
  Description of Artificial Sequence: Synthetic oligonucleotide
ccaacugaaaucuucuugu

SEQ ID NO: 2790031 - RNA, 19 nt, Artificial Sequence
  Description of Artificial Sequence: Synthetic oligonucleotide
agccuucucugucucugga

SEQ ID NO: 2790032 - RNA, 19 nt, Artificial Sequence
  Description of Artificial Sequence: Synthetic oligonucleotide
uugccucuaggagaggcua

SEQ ID NO: 2790033 - RNA, 19 nt, Artificial Sequence
  Description of Artificial Sequence: Synthetic oligonucleotide
aaccucgaagucauuuguu

SEQ ID NO: 2790034 - RNA, 19 nt, Artificial Sequence
  Description of Artificial Sequence: Synthetic oligonucleotide
auucaggaacuggaauccu

SEQ ID NO: 2790035 - RNA, 19 nt, Artificial Sequence
  Description of Artificial Sequence: Synthetic oligonucleotide
acccuuagccuagugacua

SEQ ID NO: 2790036 - RNA, 19 nt, Artificial Sequence
  Description of Artificial Sequence: Synthetic oligonucleotide
ucagggucagaugccuggu

SEQ ID NO: 2790037 - RNA, 19 nt, Artificial Sequence
  Description of Artificial Sequence: Synthetic oligonucleotide
ugacggcuuaagagagccu

SEQ ID NO: 2790038 - RNA, 19 nt, Artificial Sequence
  Description of Artificial Sequence: Synthetic oligonucleotide
gggacugacccacccuuag

SEQ ID NO: 2790039 - RNA, 19 nt, Artificial Sequence
  Description of Artificial Sequence: Synthetic oligonucleotide
guucuggaggcacugcacu

SEQ ID NO: 2790040 - RNA, 19 nt, Artificial Sequence
  Description of Artificial Sequence: Synthetic oligonucleotide
agccagagcuguggagggc

SEQ ID NO: 2790041 - RNA, 19 nt, Artificial Sequence
  Description of Artificial Sequence: Synthetic oligonucleotide
ucucuacaacugugacggc

SEQ ID NO: 2790042 - RNA, 19 nt, Artificial Sequence
  Description of Artificial Sequence: Synthetic oligonucleotide
ccuuuucuggaaucgccug

SEQ ID NO: 2790043 - RNA, 19 nt, Artificial Sequence
  Description of Artificial Sequence: Synthetic oligonucleotide
gcacucugaaggcacuccc

SEQ ID NO: 2790044 - RNA, 19 nt, Artificial Sequence
  Description of Artificial Sequence: Synthetic oligonucleotide
ccuagugacuaccaacuga

SEQ ID NO: 2790045 - RNA, 19 nt, Artificial Sequence
  Description of Artificial Sequence: Synthetic oligonucleotide
gcaagggacugacccaccc

SEQ ID NO: 2790046 - RNA, 19 nt, Artificial Sequence
  Description of Artificial Sequence: Synthetic oligonucleotide
uacaacugugacggcuuaa

SEQ ID NO: 2790047 - RNA, 19 nt, Artificial Sequence
  Description of Artificial Sequence: Synthetic oligonucleotide
cucccauccugcccuuagc

SEQ ID NO: 2790048 - RNA, 19 nt, Artificial Sequence
  Description of Artificial Sequence: Synthetic oligonucleotide
cauccugcccuuagcauua

SEQ ID NO: 2790049 - RNA, 19 nt, Artificial Sequence
  Description of Artificial Sequence: Synthetic oligonucleotide
cacucugaaggcacuccca

SEQ ID NO: 2790050 - RNA, 19 nt, Artificial Sequence
  Description of Artificial Sequence: Synthetic oligonucleotide
caacugugacggcuuaaga

SEQ ID NO: 2790051 - RNA, 19 nt, Artificial Sequence
  Description of Artificial Sequence: Synthetic oligonucleotide
cuugugucucuacaacugu

SEQ ID NO: 2790052 - RNA, 19 nt, Artificial Sequence
  Description of Artificial Sequence: Synthetic oligonucleotide
ucucuggagcugucagguc

SEQ ID NO: 2790053 - RNA, 19 nt, Artificial Sequence
  Description of Artificial Sequence: Synthetic oligonucleotide
gcuugccucuaggagaggc

SEQ ID NO: 2790054 - RNA, 19 nt, Artificial Sequence
  Description of Artificial Sequence: Synthetic oligonucleotide
ccuugaacauacagagauc

SEQ ID NO: 2790055 - RNA, 19 nt, Artificial Sequence
  Description of Artificial Sequence: Synthetic oligonucleotide
agccugagaagagaauaua

SEQ ID NO: 2790056 - RNA, 19 nt, Artificial Sequence
  Description of Artificial Sequence: Synthetic oligonucleotide
aacuugcccugaauugcaa

SEQ ID NO: 2790057 - RNA, 19 nt, Artificial Sequence
  Description of Artificial Sequence: Synthetic oligonucleotide
gucucuggagcugucaggu

SEQ ID NO: 2790058 - RNA, 19 nt, Artificial Sequence
  Description of Artificial Sequence: Synthetic oligonucleotide
gccuucucugucucuggag

SEQ ID NO: 2790059 - RNA, 19 nt, Artificial Sequence
  Description of Artificial Sequence: Synthetic oligonucleotide
ugccucugucuuccaaguu

SEQ ID NO: 2790060 - RNA, 19 nt, Artificial Sequence
  Description of Artificial Sequence: Synthetic oligonucleotide
ggacugacccacccuuagc

SEQ ID NO: 2790061 - RNA, 19 nt, Artificial Sequence
  Description of Artificial Sequence: Synthetic oligonucleotide
cugacccacccuuagccua

SEQ ID NO: 2790062 - RNA, 19 nt, Artificial Sequence
  Description of Artificial Sequence: Synthetic oligonucleotide
agggauagagagaggucaa

SEQ ID NO: 2790063 - RNA, 19 nt, Artificial Sequence
  Description of Artificial Sequence: Synthetic oligonucleotide
aagacacaugagagccaga

SEQ ID NO: 2790064 - RNA, 19 nt, Artificial Sequence
  Description of Artificial Sequence: Synthetic oligonucleotide
ggaaucgccugaacuugcc

SEQ ID NO: 2790065 - RNA, 19 nt, Artificial Sequence
  Description of Artificial Sequence: Synthetic oligonucleotide
cuucucugucucuggagcu

SEQ ID NO: 2790066 - RNA, 19 nt, Artificial Sequence
  Description of Artificial Sequence: Synthetic oligonucleotide
cucuacaacugugacggcu

SEQ ID NO: 2790067 - RNA, 19 nt, Artificial Sequence
  Description of Artificial Sequence: Synthetic oligonucleotide
ggaggcacugcacucugaa

SEQ ID NO: 2790068 - RNA, 19 nt, Artificial Sequence
  Description of Artificial Sequence: Synthetic oligonucleotide
ccuuagccuagugacuacc

SEQ ID NO: 2790069 - RNA, 19 nt, Artificial Sequence
  Description of Artificial Sequence: Synthetic oligonucleotide
acugcacucugaaggcacu

SEQ ID NO: 2790070 - RNA, 19 nt, Artificial Sequence
  Description of Artificial Sequence: Synthetic oligonucleotide
gccuagugacuaccaacug

SEQ ID NO: 2790071 - RNA, 19 nt, Artificial Sequence
  Description of Artificial Sequence: Synthetic oligonucleotide
ggagaggcuagagggauaa

SEQ ID NO: 2790072 - RNA, 19 nt, Artificial Sequence
  Description of Artificial Sequence: Synthetic oligonucleotide
gaauugcaagggcagccuu

SEQ ID NO: 2790073 - RNA, 19 nt, Artificial Sequence
  Description of Artificial Sequence: Synthetic oligonucleotide
ggcuuaagagagccugaga

SEQ ID NO: 2790074 - RNA, 19 nt, Artificial Sequence
  Description of Artificial Sequence: Synthetic oligonucleotide
ucgccugaacuugcccuga

SEQ ID NO: 2790075 - RNA, 19 nt, Artificial Sequence
  Description of Artificial Sequence: Synthetic oligonucleotide
gagccugagaagagaauau

SEQ ID NO: 2790076 - RNA, 19 nt, Artificial Sequence
  Description of Artificial Sequence: Synthetic oligonucleotide
acggcuuaagagagccuga

SEQ ID NO: 2790077 - RNA, 19 nt, Artificial Sequence
  Description of Artificial Sequence: Synthetic oligonucleotide
ggcacucccauccugcccu

SEQ ID NO: 2790078 - RNA, 19 nt, Artificial Sequence
  Description of Artificial Sequence: Synthetic oligonucleotide
cccuuagcauuagggauag

SEQ ID NO: 2790079 - RNA, 19 nt, Artificial Sequence
  Description of Artificial Sequence: Synthetic oligonucleotide
cuugccucuaggagaggcu

SEQ ID NO: 2790080 - RNA, 19 nt, Artificial Sequence
  Description of Artificial Sequence: Synthetic oligonucleotide
uugcaagggcagccuucuc

SEQ ID NO: 2790081 - RNA, 19 nt, Artificial Sequence
  Description of Artificial Sequence: Synthetic oligonucleotide
agaugccugguugguugcu

SEQ ID NO: 2790082 - RNA, 19 nt, Artificial Sequence
  Description of Artificial Sequence: Synthetic oligonucleotide
gcugucaggucaaugucaa

SEQ ID NO: 2790083 - RNA, 19 nt, Artificial Sequence
  Description of Artificial Sequence: Synthetic oligonucleotide
ccaaguucuggaggcacug

SEQ ID NO: 2790084 - RNA, 19 nt, Artificial Sequence
  Description of Artificial Sequence: Synthetic oligonucleotide
gagagaggucaaaccucga

SEQ ID NO: 2790085 - RNA, 19 nt, Artificial Sequence
  Description of Artificial Sequence: Synthetic oligonucleotide
guucucugcaagggacuga

SEQ ID NO: 2790086 - RNA, 19 nt, Artificial Sequence
  Description of Artificial Sequence: Synthetic oligonucleotide
augcugccagccuucccuu

SEQ ID NO: 2790087 - RNA, 19 nt, Artificial Sequence
  Description of Artificial Sequence: Synthetic oligonucleotide
cugcacucugaaggcacuc

SEQ ID NO: 2790088 - RNA, 19 nt, Artificial Sequence
  Description of Artificial Sequence: Synthetic oligonucleotide
cucugucucuggagcuguc

SEQ ID NO: 2790089 - RNA, 19 nt, Artificial Sequence
  Description of Artificial Sequence: Synthetic oligonucleotide
ggucaaaccucgaagucau

SEQ ID NO: 2790090 - RNA, 19 nt, Artificial Sequence
  Description of Artificial Sequence: Synthetic oligonucleotide
acccacccuuagccuagug

SEQ ID NO: 2790091 - RNA, 19 nt, Artificial Sequence
  Description of Artificial Sequence: Synthetic oligonucleotide
gcccugaauugcaagggca

SEQ ID NO: 2790092 - RNA, 19 nt, Artificial Sequence
  Description of Artificial Sequence: Synthetic oligonucleotide
uuguguccuugugucucua

SEQ ID NO: 2790093 - RNA, 19 nt, Artificial Sequence
  Description of Artificial Sequence: Synthetic oligonucleotide
cuacaacugugacggcuua

SEQ ID NO: 2790094 - RNA, 19 nt, Artificial Sequence
  Description of Artificial Sequence: Synthetic oligonucleotide
ccucgaagucauuuguucu

SEQ ID NO: 2790095 - RNA, 19 nt, Artificial Sequence
  Description of Artificial Sequence: Synthetic oligonucleotide
ugcugccagccuucccuuu

SEQ ID NO: 2790096 - RNA, 19 nt, Artificial Sequence
  Description of Artificial Sequence: Synthetic oligonucleotide
caagggacugacccacccu

SEQ ID NO: 2790097 - RNA, 19 nt, Artificial Sequence
  Description of Artificial Sequence: Synthetic oligonucleotide
cacccuuagccuagugacu

SEQ ID NO: 2790098 - RNA, 19 nt, Artificial Sequence
  Description of Artificial Sequence: Synthetic oligonucleotide
agcuugccucuaggagagg

SEQ ID NO: 2790099 - RNA, 19 nt, Artificial Sequence
  Description of Artificial Sequence: Synthetic oligonucleotide
gccauucaggaacuggaau

SEQ ID NO: 2790100 - RNA, 19 nt, Artificial Sequence
  Description of Artificial Sequence: Synthetic oligonucleotide
gagcuguggagggcagaga

SEQ ID NO: 2790101 - RNA, 19 nt, Artificial Sequence
  Description of Artificial Sequence: Synthetic oligonucleotide
ccucuaggagaggcuagag

SEQ ID NO: 2790102 - RNA, 19 nt, Artificial Sequence
  Description of Artificial Sequence: Synthetic oligonucleotide
cccacccuuagccuaguga

SEQ ID NO: 2790103 - RNA, 19 nt, Artificial Sequence
  Description of Artificial Sequence: Synthetic oligonucleotide
ccucugucuuccaaguucu

SEQ ID NO: 2790104 - RNA, 19 nt, Artificial Sequence
  Description of Artificial Sequence: Synthetic oligonucleotide
auccugcccuuagcauuag

SEQ ID NO: 2790105 - RNA, 19 nt, Artificial Sequence
  Description of Artificial Sequence: Synthetic oligonucleotide
gccugagaagagaauauau

SEQ ID NO: 2790106 - RNA, 19 nt, Artificial Sequence
  Description of Artificial Sequence: Synthetic oligonucleotide
cgaagucauuuguucucug

SEQ ID NO: 2790107 - RNA, 19 nt, Artificial Sequence
  Description of Artificial Sequence: Synthetic oligonucleotide
gcccuuagcauuagggaua

SEQ ID NO: 2790108 - RNA, 19 nt, Artificial Sequence
  Description of Artificial Sequence: Synthetic oligonucleotide
ccugaacuugcccugaauu

SEQ ID NO: 2790109 - RNA, 19 nt, Artificial Sequence
  Description of Artificial Sequence: Synthetic oligonucleotide
gagagccugagaagagaau

SEQ ID NO: 2790110 - RNA, 19 nt, Artificial Sequence
  Description of Artificial Sequence: Synthetic oligonucleotide
gaagggaaggcuggccauu

SEQ ID NO: 2790111 - RNA, 19 nt, Artificial Sequence
  Description of Artificial Sequence: Synthetic oligonucleotide
ccagagcuguggagggcag

SEQ ID NO: 2790112 - RNA, 19 nt, Artificial Sequence
  Description of Artificial Sequence: Synthetic oligonucleotide
ccucagggucagaugccug

SEQ ID NO: 2790113 - RNA, 19 nt, Artificial Sequence
  Description of Artificial Sequence: Synthetic oligonucleotide
cccuuagccuagugacuac

SEQ ID NO: 2790114 - RNA, 19 nt, Artificial Sequence
  Description of Artificial Sequence: Synthetic oligonucleotide
gggauagagagaggucaaa

SEQ ID NO: 2790115 - RNA, 19 nt, Artificial Sequence
  Description of Artificial Sequence: Synthetic oligonucleotide
aggagaggcuagagggaua

SEQ ID NO: 2790116 - RNA, 19 nt, Artificial Sequence
  Description of Artificial Sequence: Synthetic oligonucleotide
ggccauucaggaacuggaa

SEQ ID NO: 2790117 - RNA, 19 nt, Artificial Sequence
  Description of Artificial Sequence: Synthetic oligonucleotide
caggaacuggaauccuuuu

SEQ ID NO: 2790118 - RNA, 19 nt, Artificial Sequence
  Description of Artificial Sequence: Synthetic oligonucleotide
agggacugacccacccuua

SEQ ID NO: 2790119 - RNA, 19 nt, Artificial Sequence
  Description of Artificial Sequence: Synthetic oligonucleotide
gccucuaggagaggcuaga

SEQ ID NO: 2790120 - RNA, 19 nt, Artificial Sequence
  Description of Artificial Sequence: Synthetic oligonucleotide
cggcuuaagagagccugag

SEQ ID NO: 2790121 - RNA, 19 nt, Artificial Sequence
  Description of Artificial Sequence: Synthetic oligonucleotide
gggcagagaggaaguagaa

SEQ ID NO: 2790122 - RNA, 19 nt, Artificial Sequence
  Description of Artificial Sequence: Synthetic oligonucleotide
caagggcagccuucucugu

SEQ ID NO: 2790123 - RNA, 19 nt, Artificial Sequence
  Description of Artificial Sequence: Synthetic oligonucleotide
gagaggcuagagggauaaa

SEQ ID NO: 2790124 - RNA, 19 nt, Artificial Sequence
  Description of Artificial Sequence: Synthetic oligonucleotide
gcacugcacucugaaggca

SEQ ID NO: 2790125 - RNA, 19 nt, Artificial Sequence
  Description of Artificial Sequence: Synthetic oligonucleotide
gacuaccaacugaaaucuu

SEQ ID NO: 2790126 - RNA, 19 nt, Artificial Sequence
  Description of Artificial Sequence: Synthetic oligonucleotide
ccauccugcccuuagcauu

SEQ ID NO: 2790127 - RNA, 19 nt, Artificial Sequence
  Description of Artificial Sequence: Synthetic oligonucleotide
ggucagaugccugguuggu

SEQ ID NO: 2790128 - RNA, 19 nt, Artificial Sequence
  Description of Artificial Sequence: Synthetic oligonucleotide
gucagaugccugguugguu

SEQ ID NO: 2790129 - RNA, 19 nt, Artificial Sequence
  Description of Artificial Sequence: Synthetic oligonucleotide
gcuggccauucaggaacug

SEQ ID NO: 2790130 - RNA, 19 nt, Artificial Sequence
  Description of Artificial Sequence: Synthetic oligonucleotide
ggagggcagagaggaagua

SEQ ID NO: 2790131 - RNA, 19 nt, Artificial Sequence
  Description of Artificial Sequence: Synthetic oligonucleotide
cugucaggucaaugucaau

SEQ ID NO: 2790132 - RNA, 19 nt, Artificial Sequence
  Description of Artificial Sequence: Synthetic oligonucleotide
gcugccagccuucccuuuu

SEQ ID NO: 2790133 - RNA, 19 nt, Artificial Sequence
  Description of Artificial Sequence: Synthetic oligonucleotide
gccugaacuugcccugaau

SEQ ID NO: 2790134 - RNA, 19 nt, Artificial Sequence
  Description of Artificial Sequence: Synthetic oligonucleotide
cagggucagaugccugguu

SEQ ID NO: 2790135 - RNA, 19 nt, Artificial Sequence
  Description of Artificial Sequence: Synthetic oligonucleotide
gacccacccuuagccuagu

SEQ ID NO: 2790136 - RNA, 19 nt, Artificial Sequence
  Description of Artificial Sequence: Synthetic oligonucleotide
cccauccugcccuuagcau

SEQ ID NO: 2790137 - RNA, 19 nt, Artificial Sequence
  Description of Artificial Sequence: Synthetic oligonucleotide
gucaaaccucgaagucauu

SEQ ID NO: 2790138 - RNA, 19 nt, Artificial Sequence
  Description of Artificial Sequence: Synthetic oligonucleotide
cacucccauccugcccuua

SEQ ID NO: 2790139 - RNA, 19 nt, Artificial Sequence
  Description of Artificial Sequence: Synthetic oligonucleotide
cuggagcugucaggucaau

SEQ ID NO: 2790140 - RNA, 19 nt, Artificial Sequence
  Description of Artificial Sequence: Synthetic oligonucleotide
ccucagccuucuugaugcu

SEQ ID NO: 2790141 - RNA, 19 nt, Artificial Sequence
  Description of Artificial Sequence: Synthetic oligonucleotide
ccuuagcauuagggauaga

SEQ ID NO: 2790142 - RNA, 19 nt, Artificial Sequence
  Description of Artificial Sequence: Synthetic oligonucleotide
cgccugaacuugcccugaa

SEQ ID NO: 2790143 - RNA, 19 nt, Artificial Sequence
  Description of Artificial Sequence: Synthetic oligonucleotide
gcacucccauccugcccuu

SEQ ID NO: 2790144 - RNA, 19 nt, Artificial Sequence
  Description of Artificial Sequence: Synthetic oligonucleotide
uauauauauauauauaucu

SEQ ID NO: 2790145 - RNA, 19 nt, Artificial Sequence
  Description of Artificial Sequence: Synthetic oligonucleotide
uuuauauauauauauauau

SEQ ID NO: 2790146 - RNA, 19 nt, Artificial Sequence
  Description of Artificial Sequence: Synthetic oligonucleotide
uauauauauauauauauau

SEQ ID NO: 2790147 - RNA, 19 nt, Artificial Sequence
  Description of Artificial Sequence: Synthetic oligonucleotide
aaaauccagguguaguugc

SEQ ID NO: 2790148 - RNA, 19 nt, Artificial Sequence
  Description of Artificial Sequence: Synthetic oligonucleotide
uauauauauaucuauauuu

SEQ ID NO: 2790149 - RNA, 19 nt, Artificial Sequence
  Description of Artificial Sequence: Synthetic oligonucleotide
uauauauauauauaucuau

SEQ ID NO: 2790150 - RNA, 19 nt, Artificial Sequence
  Description of Artificial Sequence: Synthetic oligonucleotide
aggaauaaaaguuguuugg

SEQ ID NO: 2790151 - RNA, 19 nt, Artificial Sequence
  Description of Artificial Sequence: Synthetic oligonucleotide
uuccauaggguuaaggaag

SEQ ID NO: 2790152 - RNA, 19 nt, Artificial Sequence
  Description of Artificial Sequence: Synthetic oligonucleotide
uauauauauauaucuauau

SEQ ID NO: 2790153 - RNA, 19 nt, Artificial Sequence
  Description of Artificial Sequence: Synthetic oligonucleotide
uuuuauauauauauauaua

SEQ ID NO: 2790154 - RNA, 19 nt, Artificial Sequence
  Description of Artificial Sequence: Synthetic oligonucleotide
ugauagagaaccacaagca

SEQ ID NO: 2790155 - RNA, 19 nt, Artificial Sequence
  Description of Artificial Sequence: Synthetic oligonucleotide
uuauauauauauauauaua

SEQ ID NO: 2790156 - RNA, 19 nt, Artificial Sequence
  Description of Artificial Sequence: Synthetic oligonucleotide
aguagaaaagaaagcagcc

SEQ ID NO: 2790157 - RNA, 19 nt, Artificial Sequence
  Description of Artificial Sequence: Synthetic oligonucleotide
uuucauuccugcuucuugg

SEQ ID NO: 2790158 - RNA, 19 nt, Artificial Sequence
  Description of Artificial Sequence: Synthetic oligonucleotide
gaaagcagccccuauacug

SEQ ID NO: 2790159 - RNA, 19 nt, Artificial Sequence
  Description of Artificial Sequence: Synthetic oligonucleotide
aaccacaagcaagaaaagc

SEQ ID NO: 2790160 - RNA, 19 nt, Artificial Sequence
  Description of Artificial Sequence: Synthetic oligonucleotide
gaggaauaaaaguuguuug

SEQ ID NO: 2790161 - RNA, 19 nt, Artificial Sequence
  Description of Artificial Sequence: Synthetic oligonucleotide
gugauagagaaccacaagc

SEQ ID NO: 2790162 - RNA, 19 nt, Artificial Sequence
  Description of Artificial Sequence: Synthetic oligonucleotide
auauauauauauauauauc

SEQ ID NO: 2790163 - RNA, 19 nt, Artificial Sequence
  Description of Artificial Sequence: Synthetic oligonucleotide
augaagugaagugugaagg

SEQ ID NO: 2790164 - RNA, 19 nt, Artificial Sequence
  Description of Artificial Sequence: Synthetic oligonucleotide
uguuccauaggguuaagga

SEQ ID NO: 2790165 - RNA, 19 nt, Artificial Sequence
  Description of Artificial Sequence: Synthetic oligonucleotide
cagacuauguccuggaacc

SEQ ID NO: 2790166 - RNA, 19 nt, Artificial Sequence
  Description of Artificial Sequence: Synthetic oligonucleotide
uuugaggaauaaaaguugu

SEQ ID NO: 2790167 - RNA, 19 nt, Artificial Sequence
  Description of Artificial Sequence: Synthetic oligonucleotide
accacaagcaagaaaagcg

SEQ ID NO: 2790168 - RNA, 19 nt, Artificial Sequence
  Description of Artificial Sequence: Synthetic oligonucleotide
gagggaguagaaaagaaag

SEQ ID NO: 2790169 - RNA, 19 nt, Artificial Sequence
  Description of Artificial Sequence: Synthetic oligonucleotide
aagugaagugugaaggccc

SEQ ID NO: 2790170 - RNA, 19 nt, Artificial Sequence
  Description of Artificial Sequence: Synthetic oligonucleotide
uauacugggcccuauucag

SEQ ID NO: 2790171 - RNA, 19 nt, Artificial Sequence
  Description of Artificial Sequence: Synthetic oligonucleotide
cuuugaggaauaaaaguug

SEQ ID NO: 2790172 - RNA, 19 nt, Artificial Sequence
  Description of Artificial Sequence: Synthetic oligonucleotide
auuguugacugccacguag

SEQ ID NO: 2790173 - RNA, 19 nt, Artificial Sequence
  Description of Artificial Sequence: Synthetic oligonucleotide
gaugaagugaagugugaag

SEQ ID NO: 2790174 - RNA, 19 nt, Artificial Sequence
  Description of Artificial Sequence: Synthetic oligonucleotide
cacguagugauagagaacc

SEQ ID NO: 2790175 - RNA, 19 nt, Artificial Sequence
  Description of Artificial Sequence: Synthetic oligonucleotide
gaguagaaaagaaagcagc

SEQ ID NO: 2790176 - RNA, 19 nt, Artificial Sequence
  Description of Artificial Sequence: Synthetic oligonucleotide
uccgugaucauccugcgga

SEQ ID NO: 2790177 - RNA, 19 nt, Artificial Sequence
  Description of Artificial Sequence: Synthetic oligonucleotide
aaaagcgacacgcccagca

SEQ ID NO: 2790178 - RNA, 19 nt, Artificial Sequence
  Description of Artificial Sequence: Synthetic oligonucleotide
gaagauggcgagcugcacg

SEQ ID NO: 2790179 - RNA, 19 nt, Artificial Sequence
  Description of Artificial Sequence: Synthetic oligonucleotide
agaaccacaagcaagaaaa

SEQ ID NO: 2790180 - RNA, 19 nt, Artificial Sequence
  Description of Artificial Sequence: Synthetic oligonucleotide
ucauccugcggacaagggg

SEQ ID NO: 2790181 - RNA, 19 nt, Artificial Sequence
  Description of Artificial Sequence: Synthetic oligonucleotide
ugcacguccgugaucaucc

SEQ ID NO: 2790182 - RNA, 19 nt, Artificial Sequence
  Description of Artificial Sequence: Synthetic oligonucleotide
auauauauauaucuauauu

SEQ ID NO: 2790183 - RNA, 19 nt, Artificial Sequence
  Description of Artificial Sequence: Synthetic oligonucleotide
aaagcagccccuauacugg

SEQ ID NO: 2790184 - RNA, 19 nt, Artificial Sequence
  Description of Artificial Sequence: Synthetic oligonucleotide
ucagacuauguccuggaac

SEQ ID NO: 2790185 - RNA, 19 nt, Artificial Sequence
  Description of Artificial Sequence: Synthetic oligonucleotide
uugacugccacguagugau

SEQ ID NO: 2790186 - RNA, 19 nt, Artificial Sequence
  Description of Artificial Sequence: Synthetic oligonucleotide
ugauggguaggagagauga

SEQ ID NO: 2790187 - RNA, 19 nt, Artificial Sequence
  Description of Artificial Sequence: Synthetic oligonucleotide
caagaaaagcgacacgccc

SEQ ID NO: 2790188 - RNA, 19 nt, Artificial Sequence
  Description of Artificial Sequence: Synthetic oligonucleotide
acacccuccaucuugccuc

SEQ ID NO: 2790189 - RNA, 19 nt, Artificial Sequence
  Description of Artificial Sequence: Synthetic oligonucleotide
auagagaaccacaagcaag

SEQ ID NO: 2790190 - RNA, 19 nt, Artificial Sequence
  Description of Artificial Sequence: Synthetic oligonucleotide
agugauagagaaccacaag

SEQ ID NO: 2790191 - RNA, 19 nt, Artificial Sequence
  Description of Artificial Sequence: Synthetic oligonucleotide
aagauggcgagcugcacgu

SEQ ID NO: 2790192 - RNA, 19 nt, Artificial Sequence
  Description of Artificial Sequence: Synthetic oligonucleotide
aaagaaagcagccccuaua

SEQ ID NO: 2790193 - RNA, 19 nt, Artificial Sequence
  Description of Artificial Sequence: Synthetic oligonucleotide
aacccuggggcggagagcg

SEQ ID NO: 2790194 - RNA, 19 nt, Artificial Sequence
  Description of Artificial Sequence: Synthetic oligonucleotide
ugaggaauaaaaguuguuu

SEQ ID NO: 2790195 - RNA, 19 nt, Artificial Sequence
  Description of Artificial Sequence: Synthetic oligonucleotide
gaauaaaaguuguuuggaa

SEQ ID NO: 2790196 - RNA, 19 nt, Artificial Sequence
  Description of Artificial Sequence: Synthetic oligonucleotide
aagugugaaggccccucac

SEQ ID NO: 2790197 - RNA, 19 nt, Artificial Sequence
  Description of Artificial Sequence: Synthetic oligonucleotide
ugugagacggcaccuguga

SEQ ID NO: 2790198 - RNA, 19 nt, Artificial Sequence
  Description of Artificial Sequence: Synthetic oligonucleotide
agggacugagccucgggcc

SEQ ID NO: 2790199 - RNA, 19 nt, Artificial Sequence
  Description of Artificial Sequence: Synthetic oligonucleotide
gaagugaagugugaaggcc

SEQ ID NO: 2790200 - RNA, 19 nt, Artificial Sequence
  Description of Artificial Sequence: Synthetic oligonucleotide
cuuuguaugcugugauggg

SEQ ID NO: 2790201 - RNA, 19 nt, Artificial Sequence
  Description of Artificial Sequence: Synthetic oligonucleotide
agggaguagaaaagaaagc

SEQ ID NO: 2790202 - RNA, 19 nt, Artificial Sequence
  Description of Artificial Sequence: Synthetic oligonucleotide
gacuuugaggaauaaaagu

SEQ ID NO: 2790203 - RNA, 19 nt, Artificial Sequence
  Description of Artificial Sequence: Synthetic oligonucleotide
uagugauagagaaccacaa

SEQ ID NO: 2790204 - RNA, 19 nt, Artificial Sequence
  Description of Artificial Sequence: Synthetic oligonucleotide
acuuugaggaauaaaaguu

SEQ ID NO: 2790205 - RNA, 19 nt, Artificial Sequence
  Description of Artificial Sequence: Synthetic oligonucleotide
uucuugggauuguugacug

SEQ ID NO: 2790206 - RNA, 19 nt, Artificial Sequence
  Description of Artificial Sequence: Synthetic oligonucleotide
cuugggauuguugacugcc

SEQ ID NO: 2790207 - RNA, 19 nt, Artificial Sequence
  Description of Artificial Sequence: Synthetic oligonucleotide
uguaugcugugauggguag

SEQ ID NO: 2790208 - RNA, 19 nt, Artificial Sequence
  Description of Artificial Sequence: Synthetic oligonucleotide
aaaagaaagcagccccuau

SEQ ID NO: 2790209 - RNA, 19 nt, Artificial Sequence
  Description of Artificial Sequence: Synthetic oligonucleotide
gugaaggccccucacaccc

SEQ ID NO: 2790210 - RNA, 19 nt, Artificial Sequence
  Description of Artificial Sequence: Synthetic oligonucleotide
uaugcugugauggguagga

SEQ ID NO: 2790211 - RNA, 19 nt, Artificial Sequence
  Description of Artificial Sequence: Synthetic oligonucleotide
aagaaaagcgacacgccca

SEQ ID NO: 2790212 - RNA, 19 nt, Artificial Sequence
  Description of Artificial Sequence: Synthetic oligonucleotide
gacacgcccagcauguugg

SEQ ID NO: 2790213 - RNA, 19 nt, Artificial Sequence
  Description of Artificial Sequence: Synthetic oligonucleotide
ggagagaugaagugaagug

SEQ ID NO: 2790214 - RNA, 19 nt, Artificial Sequence
  Description of Artificial Sequence: Synthetic oligonucleotide
gcuuuguaugcugugaugg

SEQ ID NO: 2790215 - RNA, 19 nt, Artificial Sequence
  Description of Artificial Sequence: Synthetic oligonucleotide
guguaguugcuuuguaugc

SEQ ID NO: 2790216 - RNA, 19 nt, Artificial Sequence
  Description of Artificial Sequence: Synthetic oligonucleotide
gauagagaaccacaagcaa

SEQ ID NO: 2790217 - RNA, 19 nt, Artificial Sequence
  Description of Artificial Sequence: Synthetic oligonucleotide
uauguccuggaacccuggg

SEQ ID NO: 2790218 - RNA, 19 nt, Artificial Sequence
  Description of Artificial Sequence: Synthetic oligonucleotide
acguccgugaucauccugc

SEQ ID NO: 2790219 - RNA, 19 nt, Artificial Sequence
  Description of Artificial Sequence: Synthetic oligonucleotide
cuuucauuccugcuucuug

SEQ ID NO: 2790220 - RNA, 19 nt, Artificial Sequence
  Description of Artificial Sequence: Synthetic oligonucleotide
auauauauauauauaucua

SEQ ID NO: 2790221 - RNA, 19 nt, Artificial Sequence
  Description of Artificial Sequence: Synthetic oligonucleotide
auauauauauauaucuaua

SEQ ID NO: 2790222 - RNA, 19 nt, Artificial Sequence
  Description of Artificial Sequence: Synthetic oligonucleotide
auaggguuaaggaagacuu

SEQ ID NO: 2790223 - RNA, 19 nt, Artificial Sequence
  Description of Artificial Sequence: Synthetic oligonucleotide
cucucaccugacuagcucc

SEQ ID NO: 2790224 - RNA, 19 nt, Artificial Sequence
  Description of Artificial Sequence: Synthetic oligonucleotide
gaucauccugcggacaagg

SEQ ID NO: 2790225 - RNA, 19 nt, Artificial Sequence
  Description of Artificial Sequence: Synthetic oligonucleotide
uuuguaugcugugaugggu

SEQ ID NO: 2790226 - RNA, 19 nt, Artificial Sequence
  Description of Artificial Sequence: Synthetic oligonucleotide
ugagacggcaccugugagc

SEQ ID NO: 2790227 - RNA, 19 nt, Artificial Sequence
  Description of Artificial Sequence: Synthetic oligonucleotide
agugaagugugaaggcccc

SEQ ID NO: 2790228 - RNA, 19 nt, Artificial Sequence
  Description of Artificial Sequence: Synthetic oligonucleotide
gguuaaggaagacuuugag

SEQ ID NO: 2790229 - RNA, 19 nt, Artificial Sequence
  Description of Artificial Sequence: Synthetic oligonucleotide
gagacggcaccugugagcc

SEQ ID NO: 2790230 - RNA, 19 nt, Artificial Sequence
  Description of Artificial Sequence: Synthetic oligonucleotide
guaguugcuuuguaugcug

SEQ ID NO: 2790231 - RNA, 19 nt, Artificial Sequence
  Description of Artificial Sequence: Synthetic oligonucleotide
uacugggcccuauucagug

SEQ ID NO: 2790232 - RNA, 19 nt, Artificial Sequence
  Description of Artificial Sequence: Synthetic oligonucleotide
cacaagcaagaaaagcgac

SEQ ID NO: 2790233 - RNA, 19 nt, Artificial Sequence
  Description of Artificial Sequence: Synthetic oligonucleotide
aggguuaaggaagacuuug

SEQ ID NO: 2790234 - RNA, 19 nt, Artificial Sequence
  Description of Artificial Sequence: Synthetic oligonucleotide
uguaguugcuuuguaugcu

SEQ ID NO: 2790235 - RNA, 19 nt, Artificial Sequence
  Description of Artificial Sequence: Synthetic oligonucleotide
aagcgacacgcccagcaug

SEQ ID NO: 2790236 - RNA, 19 nt, Artificial Sequence
  Description of Artificial Sequence: Synthetic oligonucleotide
uuguugacugccacguagu

SEQ ID NO: 2790237 - RNA, 19 nt, Artificial Sequence
  Description of Artificial Sequence: Synthetic oligonucleotide
gauggcgagcugcacgucc

SEQ ID NO: 2790238 - RNA, 19 nt, Artificial Sequence
  Description of Artificial Sequence: Synthetic oligonucleotide
ugugauggguaggagagau

SEQ ID NO: 2790239 - RNA, 19 nt, Artificial Sequence
  Description of Artificial Sequence: Synthetic oligonucleotide
uguugacugccacguagug

SEQ ID NO: 2790240 - RNA, 19 nt, Artificial Sequence
  Description of Artificial Sequence: Synthetic oligonucleotide
cugacuagcuccacucggc

SEQ ID NO: 2790241 - RNA, 19 nt, Artificial Sequence
  Description of Artificial Sequence: Synthetic oligonucleotide
ucauuccugcuucuuggga

SEQ ID NO: 2790242 - RNA, 19 nt, Artificial Sequence
  Description of Artificial Sequence: Synthetic oligonucleotide
guuccauaggguuaaggaa

SEQ ID NO: 2790243 - RNA, 19 nt, Artificial Sequence
  Description of Artificial Sequence: Synthetic oligonucleotide
uuguuccauaggguuaagg

SEQ ID NO: 2790244 - RNA, 19 nt, Artificial Sequence
  Description of Artificial Sequence: Synthetic oligonucleotide
ugcuuuguaugcugugaug

SEQ ID NO: 2790245 - RNA, 19 nt, Artificial Sequence
  Description of Artificial Sequence: Synthetic oligonucleotide
ugugaaggccccucacacc

SEQ ID NO: 2790246 - RNA, 19 nt, Artificial Sequence
  Description of Artificial Sequence: Synthetic oligonucleotide
ucuugccucagacuauguc

SEQ ID NO: 2790247 - RNA, 19 nt, Artificial Sequence
  Description of Artificial Sequence: Synthetic oligonucleotide
cauccugcggacaagggga

SEQ ID NO: 2790248 - RNA, 19 nt, Artificial Sequence
  Description of Artificial Sequence: Synthetic oligonucleotide
uaaggaagacuuugaggaa

SEQ ID NO: 2790249 - RNA, 19 nt, Artificial Sequence
  Description of Artificial Sequence: Synthetic oligonucleotide
uugcuuuguaugcugugau

SEQ ID NO: 2790250 - RNA, 19 nt, Artificial Sequence
  Description of Artificial Sequence: Synthetic oligonucleotide
gacugccacguagugauag

SEQ ID NO: 2790251 - RNA, 19 nt, Artificial Sequence
  Description of Artificial Sequence: Synthetic oligonucleotide
cucguugcccucaccaggc

SEQ ID NO: 2790252 - RNA, 19 nt, Artificial Sequence
  Description of Artificial Sequence: Synthetic oligonucleotide
gggaguagaaaagaaagca

SEQ ID NO: 2790253 - RNA, 19 nt, Artificial Sequence
  Description of Artificial Sequence: Synthetic oligonucleotide
guagugauagagaaccaca

SEQ ID NO: 2790254 - RNA, 19 nt, Artificial Sequence
  Description of Artificial Sequence: Synthetic oligonucleotide
ugggauuguugacugccac

SEQ ID NO: 2790255 - RNA, 19 nt, Artificial Sequence
  Description of Artificial Sequence: Synthetic oligonucleotide
aaagcgacacgcccagcau

SEQ ID NO: 2790256 - RNA, 19 nt, Artificial Sequence
  Description of Artificial Sequence: Synthetic oligonucleotide
agacuauguccuggaaccc

SEQ ID NO: 2790257 - RNA, 19 nt, Artificial Sequence
  Description of Artificial Sequence: Synthetic oligonucleotide
ugccacguagugauagaga

SEQ ID NO: 2790258 - RNA, 19 nt, Artificial Sequence
  Description of Artificial Sequence: Synthetic oligonucleotide
uugaggaauaaaaguuguu

SEQ ID NO: 2790259 - RNA, 19 nt, Artificial Sequence
  Description of Artificial Sequence: Synthetic oligonucleotide
accugacuagcuccacucg

SEQ ID NO: 2790260 - RNA, 19 nt, Artificial Sequence
  Description of Artificial Sequence: Synthetic oligonucleotide
aaggggagggacugagccu

SEQ ID NO: 2790261 - RNA, 19 nt, Artificial Sequence
  Description of Artificial Sequence: Synthetic oligonucleotide
ucgcgugugagacggcacc

SEQ ID NO: 2790262 - RNA, 19 nt, Artificial Sequence
  Description of Artificial Sequence: Synthetic oligonucleotide
aggggagggacugagccuc

SEQ ID NO: 2790263 - RNA, 19 nt, Artificial Sequence
  Description of Artificial Sequence: Synthetic oligonucleotide
ucucaccugacuagcucca

SEQ ID NO: 2790264 - RNA, 19 nt, Artificial Sequence
  Description of Artificial Sequence: Synthetic oligonucleotide
agcugcacguccgugauca

SEQ ID NO: 2790265 - RNA, 19 nt, Artificial Sequence
  Description of Artificial Sequence: Synthetic oligonucleotide
gugugaaggccccucacac

SEQ ID NO: 2790266 - RNA, 19 nt, Artificial Sequence
  Description of Artificial Sequence: Synthetic oligonucleotide
ugacuagcuccacucggcu

SEQ ID NO: 2790267 - RNA, 19 nt, Artificial Sequence
  Description of Artificial Sequence: Synthetic oligonucleotide
gaaccacaagcaagaaaag

SEQ ID NO: 2790268 - RNA, 19 nt, Artificial Sequence
  Description of Artificial Sequence: Synthetic oligonucleotide
acaagcaagaaaagcgaca

SEQ ID NO: 2790269 - RNA, 19 nt, Artificial Sequence
  Description of Artificial Sequence: Synthetic oligonucleotide
cuauacugggcccuauuca

SEQ ID NO: 2790270 - RNA, 19 nt, Artificial Sequence
  Description of Artificial Sequence: Synthetic oligonucleotide
agaaaagaaagcagccccu

SEQ ID NO: 2790271 - RNA, 19 nt, Artificial Sequence
  Description of Artificial Sequence: Synthetic oligonucleotide
ggaauaaaaguuguuugga

SEQ ID NO: 2790272 - RNA, 19 nt, Artificial Sequence
  Description of Artificial Sequence: Synthetic oligonucleotide
guugcccucaccaggcccg

SEQ ID NO: 2790273 - RNA, 19 nt, Artificial Sequence
  Description of Artificial Sequence: Synthetic oligonucleotide
agaaagcagccccuauacu

SEQ ID NO: 2790274 - RNA, 19 nt, Artificial Sequence
  Description of Artificial Sequence: Synthetic oligonucleotide
cucgccaccacaguccagc

SEQ ID NO: 2790275 - RNA, 19 nt, Artificial Sequence
  Description of Artificial Sequence: Synthetic oligonucleotide
gggauuguugacugccacg

SEQ ID NO: 2790276 - RNA, 19 nt, Artificial Sequence
  Description of Artificial Sequence: Synthetic oligonucleotide
agguguaguugcuuuguau

SEQ ID NO: 2790277 - RNA, 19 nt, Artificial Sequence
  Description of Artificial Sequence: Synthetic oligonucleotide
acugggcccuauucagugg

SEQ ID NO: 2790278 - RNA, 19 nt, Artificial Sequence
  Description of Artificial Sequence: Synthetic oligonucleotide
cuauguccuggaacccugg

SEQ ID NO: 2790279 - RNA, 19 nt, Artificial Sequence
  Description of Artificial Sequence: Synthetic oligonucleotide
ucaccugacuagcuccacu

SEQ ID NO: 2790280 - RNA, 19 nt, Artificial Sequence
  Description of Artificial Sequence: Synthetic oligonucleotide
cugggcccuauucaguggc

SEQ ID NO: 2790281 - RNA, 19 nt, Artificial Sequence
  Description of Artificial Sequence: Synthetic oligonucleotide
ucuugggauuguugacugc

SEQ ID NO: 2790282 - RNA, 19 nt, Artificial Sequence
  Description of Artificial Sequence: Synthetic oligonucleotide
caccugacuagcuccacuc

SEQ ID NO: 2790283 - RNA, 19 nt, Artificial Sequence
  Description of Artificial Sequence: Synthetic oligonucleotide
aaauccagguguaguugcu

SEQ ID NO: 2790284 - RNA, 19 nt, Artificial Sequence
  Description of Artificial Sequence: Synthetic oligonucleotide
gaagugugaaggccccuca

SEQ ID NO: 2790285 - RNA, 19 nt, Artificial Sequence
  Description of Artificial Sequence: Synthetic oligonucleotide
gaagacuuugaggaauaaa

SEQ ID NO: 2790286 - RNA, 19 nt, Artificial Sequence
  Description of Artificial Sequence: Synthetic oligonucleotide
uccuggaacccuggggcgg

SEQ ID NO: 2790287 - RNA, 19 nt, Artificial Sequence
  Description of Artificial Sequence: Synthetic oligonucleotide
agcuccacucggcuccgac

SEQ ID NO: 2790288 - RNA, 19 nt, Artificial Sequence
  Description of Artificial Sequence: Synthetic oligonucleotide
gguaggagagaugaaguga

SEQ ID NO: 2790289 - RNA, 19 nt, Artificial Sequence
  Description of Artificial Sequence: Synthetic oligonucleotide
uccucgccaccacagucca

SEQ ID NO: 2790290 - RNA, 19 nt, Artificial Sequence
  Description of Artificial Sequence: Synthetic oligonucleotide
acuauguccuggaacccug

SEQ ID NO: 2790291 - RNA, 19 nt, Artificial Sequence
  Description of Artificial Sequence: Synthetic oligonucleotide
ugaucauccugcggacaag

SEQ ID NO: 2790292 - RNA, 19 nt, Artificial Sequence
  Description of Artificial Sequence: Synthetic oligonucleotide
guccuggaacccuggggcg

SEQ ID NO: 2790293 - RNA, 19 nt, Artificial Sequence
  Description of Artificial Sequence: Synthetic oligonucleotide
auguuggcgaagauggcga

SEQ ID NO: 2790294 - RNA, 19 nt, Artificial Sequence
  Description of Artificial Sequence: Synthetic oligonucleotide
uaggguuaaggaagacuuu

SEQ ID NO: 2790295 - RNA, 19 nt, Artificial Sequence
  Description of Artificial Sequence: Synthetic oligonucleotide
gugaucauccugcggacaa

SEQ ID NO: 2790296 - RNA, 19 nt, Artificial Sequence
  Description of Artificial Sequence: Synthetic oligonucleotide
guaugcugugauggguagg

SEQ ID NO: 2790297 - RNA, 19 nt, Artificial Sequence
  Description of Artificial Sequence: Synthetic oligonucleotide
agcgcuacuuucauuccug

SEQ ID NO: 2790298 - RNA, 19 nt, Artificial Sequence
  Description of Artificial Sequence: Synthetic oligonucleotide
acacgcccagcauguuggc

SEQ ID NO: 2790299 - RNA, 19 nt, Artificial Sequence
  Description of Artificial Sequence: Synthetic oligonucleotide
gaaaagaaagcagccccua

SEQ ID NO: 2790300 - RNA, 19 nt, Artificial Sequence
  Description of Artificial Sequence: Synthetic oligonucleotide
uacuuucauuccugcuucu

SEQ ID NO: 2790301 - RNA, 19 nt, Artificial Sequence
  Description of Artificial Sequence: Synthetic oligonucleotide
gccacguagugauagagaa

SEQ ID NO: 2790302 - RNA, 19 nt, Artificial Sequence
  Description of Artificial Sequence: Synthetic oligonucleotide
gugagacggcaccugugag

SEQ ID NO: 2790303 - RNA, 19 nt, Artificial Sequence
  Description of Artificial Sequence: Synthetic oligonucleotide
cugccacguagugauagag

SEQ ID NO: 2790304 - RNA, 19 nt, Artificial Sequence
  Description of Artificial Sequence: Synthetic oligonucleotide
ccugacuagcuccacucgg

SEQ ID NO: 2790305 - RNA, 19 nt, Artificial Sequence
  Description of Artificial Sequence: Synthetic oligonucleotide
uauucaguggcagcuucuu

SEQ ID NO: 2790306 - RNA, 19 nt, Artificial Sequence
  Description of Artificial Sequence: Synthetic oligonucleotide
ucaccaggcccgguccucg

SEQ ID NO: 2790307 - RNA, 19 nt, Artificial Sequence
  Description of Artificial Sequence: Synthetic oligonucleotide
auccagguguaguugcuuu

SEQ ID NO: 2790308 - RNA, 19 nt, Artificial Sequence
  Description of Artificial Sequence: Synthetic oligonucleotide
gacuagcuccacucggcuc

SEQ ID NO: 2790309 - RNA, 19 nt, Artificial Sequence
  Description of Artificial Sequence: Synthetic oligonucleotide
acugccacguagugauaga

SEQ ID NO: 2790310 - RNA, 19 nt, Artificial Sequence
  Description of Artificial Sequence: Synthetic oligonucleotide
guugacugccacguaguga

SEQ ID NO: 2790311 - RNA, 19 nt, Artificial Sequence
  Description of Artificial Sequence: Synthetic oligonucleotide
caccugugagccucucacc

SEQ ID NO: 2790312 - RNA, 19 nt, Artificial Sequence
  Description of Artificial Sequence: Synthetic oligonucleotide
gacggcaccugugagccuc

SEQ ID NO: 2790313 - RNA, 19 nt, Artificial Sequence
  Description of Artificial Sequence: Synthetic oligonucleotide
ucgggccgcgcucucguug

SEQ ID NO: 2790314 - RNA, 19 nt, Artificial Sequence
  Description of Artificial Sequence: Synthetic oligonucleotide
gcaccugugagccucucac

SEQ ID NO: 2790315 - RNA, 19 nt, Artificial Sequence
  Description of Artificial Sequence: Synthetic oligonucleotide
auggcgagcugcacguccg

SEQ ID NO: 2790316 - RNA, 19 nt, Artificial Sequence
  Description of Artificial Sequence: Synthetic oligonucleotide
cugugagccucucaccuga

SEQ ID NO: 2790317 - RNA, 19 nt, Artificial Sequence
  Description of Artificial Sequence: Synthetic oligonucleotide
guccgugaucauccugcgg

SEQ ID NO: 2790318 - RNA, 19 nt, Artificial Sequence
  Description of Artificial Sequence: Synthetic oligonucleotide
guccucgccaccacagucc

SEQ ID NO: 2790319 - RNA, 19 nt, Artificial Sequence
  Description of Artificial Sequence: Synthetic oligonucleotide
gcaagaaaagcgacacgcc

SEQ ID NO: 2790320 - RNA, 19 nt, Artificial Sequence
  Description of Artificial Sequence: Synthetic oligonucleotide
gcagccccuauacugggcc

SEQ ID NO: 2790321 - RNA, 19 nt, Artificial Sequence
  Description of Artificial Sequence: Synthetic oligonucleotide
ggcgaagauggcgagcugc

SEQ ID NO: 2790322 - RNA, 19 nt, Artificial Sequence
  Description of Artificial Sequence: Synthetic oligonucleotide
ugagccucgggccgcgcuc

SEQ ID NO: 2790323 - RNA, 19 nt, Artificial Sequence
  Description of Artificial Sequence: Synthetic oligonucleotide
agcgacacgcccagcaugu

SEQ ID NO: 2790324 - RNA, 19 nt, Artificial Sequence
  Description of Artificial Sequence: Synthetic oligonucleotide
ccacaagcaagaaaagcga

SEQ ID NO: 2790325 - RNA, 19 nt, Artificial Sequence
  Description of Artificial Sequence: Synthetic oligonucleotide
ccuauacugggcccuauuc

SEQ ID NO: 2790326 - RNA, 19 nt, Artificial Sequence
  Description of Artificial Sequence: Synthetic oligonucleotide
gaaggccccucacacccuc

SEQ ID NO: 2790327 - RNA, 19 nt, Artificial Sequence
  Description of Artificial Sequence: Synthetic oligonucleotide
ugaaggccccucacacccu

SEQ ID NO: 2790328 - RNA, 19 nt, Artificial Sequence
  Description of Artificial Sequence: Synthetic oligonucleotide
uuccugcuucuugggauug

SEQ ID NO: 2790329 - RNA, 19 nt, Artificial Sequence
  Description of Artificial Sequence: Synthetic oligonucleotide
ugugagccucucaccugac

SEQ ID NO: 2790330 - RNA, 19 nt, Artificial Sequence
  Description of Artificial Sequence: Synthetic oligonucleotide
agcagccccuauacugggc

SEQ ID NO: 2790331 - RNA, 19 nt, Artificial Sequence
  Description of Artificial Sequence: Synthetic oligonucleotide
ugccucagacuauguccug

SEQ ID NO: 2790332 - RNA, 19 nt, Artificial Sequence
  Description of Artificial Sequence: Synthetic oligonucleotide
gcucucguugcccucacca

SEQ ID NO: 2790333 - RNA, 19 nt, Artificial Sequence
  Description of Artificial Sequence: Synthetic oligonucleotide
guuggcgaagauggcgagc

SEQ ID NO: 2790334 - RNA, 19 nt, Artificial Sequence
  Description of Artificial Sequence: Synthetic oligonucleotide
cauaggguuaaggaagacu

SEQ ID NO: 2790335 - RNA, 19 nt, Artificial Sequence
  Description of Artificial Sequence: Synthetic oligonucleotide
ucguugcccucaccaggcc

SEQ ID NO: 2790336 - RNA, 19 nt, Artificial Sequence
  Description of Artificial Sequence: Synthetic oligonucleotide
ugggcccuauucaguggca

SEQ ID NO: 2790337 - RNA, 19 nt, Artificial Sequence
  Description of Artificial Sequence: Synthetic oligonucleotide
ggccucgcgugugagacgg

SEQ ID NO: 2790338 - RNA, 19 nt, Artificial Sequence
  Description of Artificial Sequence: Synthetic oligonucleotide
cauuccugcuucuugggau

SEQ ID NO: 2790339 - RNA, 19 nt, Artificial Sequence
  Description of Artificial Sequence: Synthetic oligonucleotide
cucgcgugugagacggcac

SEQ ID NO: 2790340 - RNA, 19 nt, Artificial Sequence
  Description of Artificial Sequence: Synthetic oligonucleotide
ugcggacaaggggagggac

SEQ ID NO: 2790341 - RNA, 19 nt, Artificial Sequence
  Description of Artificial Sequence: Synthetic oligonucleotide
gcuacuuucauuccugcuu

SEQ ID NO: 2790342 - RNA, 19 nt, Artificial Sequence
  Description of Artificial Sequence: Synthetic oligonucleotide
cuucuugggauuguugacu

SEQ ID NO: 2790343 - RNA, 19 nt, Artificial Sequence
  Description of Artificial Sequence: Synthetic oligonucleotide
ggagggacugagccucggg

SEQ ID NO: 2790344 - RNA, 19 nt, Artificial Sequence
  Description of Artificial Sequence: Synthetic oligonucleotide
uccugcggacaaggggagg

SEQ ID NO: 2790345 - RNA, 19 nt, Artificial Sequence
  Description of Artificial Sequence: Synthetic oligonucleotide
gaaaagcgacacgcccagc

SEQ ID NO: 2790346 - RNA, 19 nt, Artificial Sequence
  Description of Artificial Sequence: Synthetic oligonucleotide
gccucagacuauguccugg

SEQ ID NO: 2790347 - RNA, 19 nt, Artificial Sequence
  Description of Artificial Sequence: Synthetic oligonucleotide
ccuccaucuugccucagac

SEQ ID NO: 2790348 - RNA, 19 nt, Artificial Sequence
  Description of Artificial Sequence: Synthetic oligonucleotide
gacuauguccuggaacccu

SEQ ID NO: 2790349 - RNA, 19 nt, Artificial Sequence
  Description of Artificial Sequence: Synthetic oligonucleotide
auacugggcccuauucagu

SEQ ID NO: 2790350 - RNA, 19 nt, Artificial Sequence
  Description of Artificial Sequence: Synthetic oligonucleotide
cagccccuauacugggccc

SEQ ID NO: 2790351 - RNA, 19 nt, Artificial Sequence
  Description of Artificial Sequence: Synthetic oligonucleotide
ccuauucaguggcagcuuc

SEQ ID NO: 2790352 - RNA, 19 nt, Artificial Sequence
  Description of Artificial Sequence: Synthetic oligonucleotide
ccugcggacaaggggaggg

SEQ ID NO: 2790353 - RNA, 19 nt, Artificial Sequence
  Description of Artificial Sequence: Synthetic oligonucleotide
ggauuguugacugccacgu

SEQ ID NO: 2790354 - RNA, 19 nt, Artificial Sequence
  Description of Artificial Sequence: Synthetic oligonucleotide
uggcgaagauggcgagcug

SEQ ID NO: 2790355 - RNA, 19 nt, Artificial Sequence
  Description of Artificial Sequence: Synthetic oligonucleotide
cacguccgugaucauccug

SEQ ID NO: 2790356 - RNA, 19 nt, Artificial Sequence
  Description of Artificial Sequence: Synthetic oligonucleotide
ggcccuauucaguggcagc

SEQ ID NO: 2790357 - RNA, 19 nt, Artificial Sequence
  Description of Artificial Sequence: Synthetic oligonucleotide
cguagugauagagaaccac

SEQ ID NO: 2790358 - RNA, 19 nt, Artificial Sequence
  Description of Artificial Sequence: Synthetic oligonucleotide
gguccucgccaccacaguc

SEQ ID NO: 2790359 - RNA, 19 nt, Artificial Sequence
  Description of Artificial Sequence: Synthetic oligonucleotide
cuagcuccacucggcuccg

SEQ ID NO: 2790360 - RNA, 19 nt, Artificial Sequence
  Description of Artificial Sequence: Synthetic oligonucleotide
gugugagacggcaccugug

SEQ ID NO: 2790361 - RNA, 19 nt, Artificial Sequence
  Description of Artificial Sequence: Synthetic oligonucleotide
ggcggagagcgcuacuuuc

SEQ ID NO: 2790362 - RNA, 19 nt, Artificial Sequence
  Description of Artificial Sequence: Synthetic oligonucleotide
gacugagccucgggccgcg

SEQ ID NO: 2790363 - RNA, 19 nt, Artificial Sequence
  Description of Artificial Sequence: Synthetic oligonucleotide
gugauggguaggagagaug

SEQ ID NO: 2790364 - RNA, 19 nt, Artificial Sequence
  Description of Artificial Sequence: Synthetic oligonucleotide
cuuguuccauaggguuaag

SEQ ID NO: 2790365 - RNA, 19 nt, Artificial Sequence
  Description of Artificial Sequence: Synthetic oligonucleotide
gauggguaggagagaugaa

SEQ ID NO: 2790366 - RNA, 19 nt, Artificial Sequence
  Description of Artificial Sequence: Synthetic oligonucleotide
uccaccggccucgcgugug

SEQ ID NO: 2790367 - RNA, 19 nt, Artificial Sequence
  Description of Artificial Sequence: Synthetic oligonucleotide
aggcccgguccucgccacc

SEQ ID NO: 2790368 - RNA, 19 nt, Artificial Sequence
  Description of Artificial Sequence: Synthetic oligonucleotide
ccacguagugauagagaac

SEQ ID NO: 2790369 - RNA, 19 nt, Artificial Sequence
  Description of Artificial Sequence: Synthetic oligonucleotide
auccugcggacaaggggag

SEQ ID NO: 2790370 - RNA, 19 nt, Artificial Sequence
  Description of Artificial Sequence: Synthetic oligonucleotide
agauggcgagcugcacguc

SEQ ID NO: 2790371 - RNA, 19 nt, Artificial Sequence
  Description of Artificial Sequence: Synthetic oligonucleotide
ggguuaaggaagacuuuga

SEQ ID NO: 2790372 - RNA, 19 nt, Artificial Sequence
  Description of Artificial Sequence: Synthetic oligonucleotide
agccccuauacugggcccu

SEQ ID NO: 2790373 - RNA, 19 nt, Artificial Sequence
  Description of Artificial Sequence: Synthetic oligonucleotide
acguagugauagagaacca

SEQ ID NO: 2790374 - RNA, 19 nt, Artificial Sequence
  Description of Artificial Sequence: Synthetic oligonucleotide
uggcgagcugcacguccgu

SEQ ID NO: 2790375 - RNA, 19 nt, Artificial Sequence
  Description of Artificial Sequence: Synthetic oligonucleotide
gcgcuacuuucauuccugc

SEQ ID NO: 2790376 - RNA, 19 nt, Artificial Sequence
  Description of Artificial Sequence: Synthetic oligonucleotide
cucagacuauguccuggaa

SEQ ID NO: 2790377 - RNA, 19 nt, Artificial Sequence
  Description of Artificial Sequence: Synthetic oligonucleotide
cucaccugacuagcuccac

SEQ ID NO: 2790378 - RNA, 19 nt, Artificial Sequence
  Description of Artificial Sequence: Synthetic oligonucleotide
ugacugccacguagugaua

SEQ ID NO: 2790379 - RNA, 19 nt, Artificial Sequence
  Description of Artificial Sequence: Synthetic oligonucleotide
ccugugagccucucaccug

SEQ ID NO: 2790380 - RNA, 19 nt, Artificial Sequence
  Description of Artificial Sequence: Synthetic oligonucleotide
ccucucaccugacuagcuc

SEQ ID NO: 2790381 - RNA, 19 nt, Artificial Sequence
  Description of Artificial Sequence: Synthetic oligonucleotide
gggagggaguagaaaagaa

SEQ ID NO: 2790382 - RNA, 19 nt, Artificial Sequence
  Description of Artificial Sequence: Synthetic oligonucleotide
uggggcggagagcgcuacu

SEQ ID NO: 2790383 - RNA, 19 nt, Artificial Sequence
  Description of Artificial Sequence: Synthetic oligonucleotide
gggcccuauucaguggcag

SEQ ID NO: 2790384 - RNA, 19 nt, Artificial Sequence
  Description of Artificial Sequence: Synthetic oligonucleotide
ccgguccucgccaccacag

SEQ ID NO: 2790385 - RNA, 19 nt, Artificial Sequence
  Description of Artificial Sequence: Synthetic oligonucleotide
accggccucgcgugugaga

SEQ ID NO: 2790386 - RNA, 19 nt, Artificial Sequence
  Description of Artificial Sequence: Synthetic oligonucleotide
gcgagcugcacguccguga

SEQ ID NO: 2790387 - RNA, 19 nt, Artificial Sequence
  Description of Artificial Sequence: Synthetic oligonucleotide
gagcugcacguccgugauc

SEQ ID NO: 2790388 - RNA, 19 nt, Artificial Sequence
  Description of Artificial Sequence: Synthetic oligonucleotide
aucuugccucagacuaugu

SEQ ID NO: 2790389 - RNA, 19 nt, Artificial Sequence
  Description of Artificial Sequence: Synthetic oligonucleotide
cuccaucuugccucagacu

SEQ ID NO: 2790390 - RNA, 19 nt, Artificial Sequence
  Description of Artificial Sequence: Synthetic oligonucleotide
cacacccuccaucuugccu

SEQ ID NO: 2790391 - RNA, 19 nt, Artificial Sequence
  Description of Artificial Sequence: Synthetic oligonucleotide
ccgugaucauccugcggac

SEQ ID NO: 2790392 - RNA, 19 nt, Artificial Sequence
  Description of Artificial Sequence: Synthetic oligonucleotide
ccucagacuauguccugga

SEQ ID NO: 2790393 - RNA, 19 nt, Artificial Sequence
  Description of Artificial Sequence: Synthetic oligonucleotide
caggcccgguccucgccac

SEQ ID NO: 2790394 - RNA, 19 nt, Artificial Sequence
  Description of Artificial Sequence: Synthetic oligonucleotide
cagguguaguugcuuugua

SEQ ID NO: 2790395 - RNA, 19 nt, Artificial Sequence
  Description of Artificial Sequence: Synthetic oligonucleotide
cucaccaggcccgguccuc

SEQ ID NO: 2790396 - RNA, 19 nt, Artificial Sequence
  Description of Artificial Sequence: Synthetic oligonucleotide
gcauguuggcgaagauggc

SEQ ID NO: 2790397 - RNA, 19 nt, Artificial Sequence
  Description of Artificial Sequence: Synthetic oligonucleotide
cacccuccaucuugccuca

SEQ ID NO: 2790398 - RNA, 19 nt, Artificial Sequence
  Description of Artificial Sequence: Synthetic oligonucleotide
cguccgugaucauccugcg

SEQ ID NO: 2790399 - RNA, 19 nt, Artificial Sequence
  Description of Artificial Sequence: Synthetic oligonucleotide
agccuccaccggccucgcg

SEQ ID NO: 2790400 - RNA, 19 nt, Artificial Sequence
  Description of Artificial Sequence: Synthetic oligonucleotide
agacggcaccugugagccu

SEQ ID NO: 2790401 - RNA, 19 nt, Artificial Sequence
  Description of Artificial Sequence: Synthetic oligonucleotide
cugugauggguaggagaga

SEQ ID NO: 2790402 - RNA, 19 nt, Artificial Sequence
  Description of Artificial Sequence: Synthetic oligonucleotide
ccggccucgcgugugagac

SEQ ID NO: 2790403 - RNA, 19 nt, Artificial Sequence
  Description of Artificial Sequence: Synthetic oligonucleotide
gcggagagcgcuacuuuca

SEQ ID NO: 2790404 - RNA, 19 nt, Artificial Sequence
  Description of Artificial Sequence: Synthetic oligonucleotide
gcgaagauggcgagcugca

SEQ ID NO: 2790405 - RNA, 19 nt, Artificial Sequence
  Description of Artificial Sequence: Synthetic oligonucleotide
cguugcccucaccaggccc

SEQ ID NO: 2790406 - RNA, 19 nt, Artificial Sequence
  Description of Artificial Sequence: Synthetic oligonucleotide
cuggggcggagagcgcuac

SEQ ID NO: 2790407 - RNA, 19 nt, Artificial Sequence
  Description of Artificial Sequence: Synthetic oligonucleotide
ggcaccugugagccucuca

SEQ ID NO: 2790408 - RNA, 19 nt, Artificial Sequence
  Description of Artificial Sequence: Synthetic oligonucleotide
agccucgggccgcgcucuc

SEQ ID NO: 2790409 - RNA, 19 nt, Artificial Sequence
  Description of Artificial Sequence: Synthetic oligonucleotide
ccuccaccggccucgcgug

SEQ ID NO: 2790410 - RNA, 19 nt, Artificial Sequence
  Description of Artificial Sequence: Synthetic oligonucleotide
cggacaaggggagggacug

SEQ ID NO: 2790411 - RNA, 19 nt, Artificial Sequence
  Description of Artificial Sequence: Synthetic oligonucleotide
gggagggacugagccucgg

SEQ ID NO: 2790412 - RNA, 19 nt, Artificial Sequence
  Description of Artificial Sequence: Synthetic oligonucleotide
ggacugagccucgggccgc

SEQ ID NO: 2790413 - RNA, 19 nt, Artificial Sequence
  Description of Artificial Sequence: Synthetic oligonucleotide
cgacacgcccagcauguug

SEQ ID NO: 2790414 - RNA, 19 nt, Artificial Sequence
  Description of Artificial Sequence: Synthetic oligonucleotide
ccauaggguuaaggaagac

SEQ ID NO: 2790415 - RNA, 19 nt, Artificial Sequence
  Description of Artificial Sequence: Synthetic oligonucleotide
gcgugugagacggcaccug

SEQ ID NO: 2790416 - RNA, 19 nt, Artificial Sequence
  Description of Artificial Sequence: Synthetic oligonucleotide
cuggaacccuggggcggag

SEQ ID NO: 2790417 - RNA, 19 nt, Artificial Sequence
  Description of Artificial Sequence: Synthetic oligonucleotide
ggggagggacugagccucg

SEQ ID NO: 2790418 - RNA, 19 nt, Artificial Sequence
  Description of Artificial Sequence: Synthetic oligonucleotide
gccuccaccggccucgcgu

SEQ ID NO: 2790419 - RNA, 19 nt, Artificial Sequence
  Description of Artificial Sequence: Synthetic oligonucleotide
ggcgagcugcacguccgug

SEQ ID NO: 2790420 - RNA, 19 nt, Artificial Sequence
  Description of Artificial Sequence: Synthetic oligonucleotide
cugcggacaaggggaggga

SEQ ID NO: 2790421 - RNA, 19 nt, Artificial Sequence
  Description of Artificial Sequence: Synthetic oligonucleotide
caccggccucgcgugugag

SEQ ID NO: 2790422 - RNA, 19 nt, Artificial Sequence
  Description of Artificial Sequence: Synthetic oligonucleotide
gugaagugugaaggccccu

SEQ ID NO: 2790423 - RNA, 19 nt, Artificial Sequence
  Description of Artificial Sequence: Synthetic oligonucleotide
uagcuccacucggcuccga

SEQ ID NO: 2790424 - RNA, 19 nt, Artificial Sequence
  Description of Artificial Sequence: Synthetic oligonucleotide
caccacaguccagccucca

SEQ ID NO: 2790425 - RNA, 19 nt, Artificial Sequence
  Description of Artificial Sequence: Synthetic oligonucleotide
ggacaaggggagggacuga

SEQ ID NO: 2790426 - RNA, 19 nt, Artificial Sequence
  Description of Artificial Sequence: Synthetic oligonucleotide
ggccgcgcucucguugccc

SEQ ID NO: 2790427 - RNA, 19 nt, Artificial Sequence
  Description of Artificial Sequence: Synthetic oligonucleotide
ggagagcgcuacuuucauu

SEQ ID NO: 2790428 - RNA, 19 nt, Artificial Sequence
  Description of Artificial Sequence: Synthetic oligonucleotide
gagccucgggccgcgcucu

SEQ ID NO: 2790429 - RNA, 19 nt, Artificial Sequence
  Description of Artificial Sequence: Synthetic oligonucleotide
cugagccucgggccgcgcu

SEQ ID NO: 2790430 - RNA, 19 nt, Artificial Sequence
  Description of Artificial Sequence: Synthetic oligonucleotide
ccucgcgugugagacggca

SEQ ID NO: 2790431 - RNA, 19 nt, Artificial Sequence
  Description of Artificial Sequence: Synthetic oligonucleotide
ccagguguaguugcuuugu

SEQ ID NO: 2790432 - RNA, 19 nt, Artificial Sequence
  Description of Artificial Sequence: Synthetic oligonucleotide
ggcccgguccucgccacca

SEQ ID NO: 2790433 - RNA, 19 nt, Artificial Sequence
  Description of Artificial Sequence: Synthetic oligonucleotide
ccaucuugccucagacuau

SEQ ID NO: 2790434 - RNA, 19 nt, Artificial Sequence
  Description of Artificial Sequence: Synthetic oligonucleotide
gcggacaaggggagggacu

SEQ ID NO: 2790435 - RNA, 19 nt, Artificial Sequence
  Description of Artificial Sequence: Synthetic oligonucleotide
cgugaucauccugcggaca

SEQ ID NO: 2790436 - RNA, 19 nt, Artificial Sequence
  Description of Artificial Sequence: Synthetic oligonucleotide
ccuggaacccuggggcgga

SEQ ID NO: 2790437 - RNA, 19 nt, Artificial Sequence
  Description of Artificial Sequence: Synthetic oligonucleotide
gcgcucucguugcccucac

SEQ ID NO: 2790438 - RNA, 19 nt, Artificial Sequence
  Description of Artificial Sequence: Synthetic oligonucleotide
gggccgcgcucucguugcc

SEQ ID NO: 2790439 - RNA, 19 nt, Artificial Sequence
  Description of Artificial Sequence: Synthetic oligonucleotide
cggccucgcgugugagacg

SEQ ID NO: 2790440 - RNA, 19 nt, Artificial Sequence
  Description of Artificial Sequence: Synthetic oligonucleotide
cgugugagacggcaccugu

SEQ ID NO: 2790441 - RNA, 19 nt, Artificial Sequence
  Description of Artificial Sequence: Synthetic oligonucleotide
gggcggagagcgcuacuuu

SEQ ID NO: 2790442 - RNA, 19 nt, Artificial Sequence
  Description of Artificial Sequence: Synthetic oligonucleotide
ggggcggagagcgcuacuu

SEQ ID NO: 2790443 - RNA, 19 nt, Artificial Sequence
  Description of Artificial Sequence: Synthetic oligonucleotide
gccucucaccugacuagcu

SEQ ID NO: 2790444 - RNA, 19 nt, Artificial Sequence
  Description of Artificial Sequence: Synthetic oligonucleotide
cccgguccucgccaccaca

SEQ ID NO: 2790445 - RNA, 19 nt, Artificial Sequence
  Description of Artificial Sequence: Synthetic oligonucleotide
gcccgguccucgccaccac

SEQ ID NO: 2790446 - RNA, 19 nt, Artificial Sequence
  Description of Artificial Sequence: Synthetic oligonucleotide
gcacguccgugaucauccu

SEQ ID NO: 2790447 - RNA, 19 nt, Artificial Sequence
  Description of Artificial Sequence: Synthetic oligonucleotide
ccaccggccucgcguguga

SEQ ID NO: 2790448 - RNA, 19 nt, Artificial Sequence
  Description of Artificial Sequence: Synthetic oligonucleotide
cuccaccggccucgcgugu

SEQ ID NO: 2790449 - RNA, 19 nt, Artificial Sequence
  Description of Artificial Sequence: Synthetic oligonucleotide
ccuggggcggagagcgcua

SEQ ID NO: 2790450 - RNA, 19 nt, Artificial Sequence
  Description of Artificial Sequence: Synthetic oligonucleotide
cgagcugcacguccgugau

SEQ ID NO: 2790451 - RNA, 19 nt, Artificial Sequence
  Description of Artificial Sequence: Synthetic oligonucleotide
cgcgcucucguugcccuca

SEQ ID NO: 2790452 - RNA, 19 nt, Artificial Sequence
  Description of Artificial Sequence: Synthetic oligonucleotide
gccccuauacugggcccua

SEQ ID NO: 2790453 - RNA, 19 nt, Artificial Sequence
  Description of Artificial Sequence: Synthetic oligonucleotide
cccuauacugggcccuauu

SEQ ID NO: 2790454 - RNA, 19 nt, Artificial Sequence
  Description of Artificial Sequence: Synthetic oligonucleotide
gccucgcgugugagacggc

SEQ ID NO: 2790455 - RNA, 19 nt, Artificial Sequence
  Description of Artificial Sequence: Synthetic oligonucleotide
ccucaccaggcccgguccu

SEQ ID NO: 2790456 - RNA, 19 nt, Artificial Sequence
  Description of Artificial Sequence: Synthetic oligonucleotide
cccuggggcggagagcgcu

SEQ ID NO: 2790457 - RNA, 19 nt, Artificial Sequence
  Description of Artificial Sequence: Synthetic oligonucleotide
cggagagcgcuacuuucau

SEQ ID NO: 2790458 - RNA, 19 nt, Artificial Sequence
  Description of Artificial Sequence: Synthetic oligonucleotide
cucgggccgcgcucucguu

SEQ ID NO: 2790459 - RNA, 19 nt, Artificial Sequence
  Description of Artificial Sequence: Synthetic oligonucleotide
cgcgugugagacggcaccu

SEQ ID NO: 2790460 - RNA, 19 nt, Artificial Sequence
  Description of Artificial Sequence: Synthetic oligonucleotide
cgccaccacaguccagccu

SEQ ID NO: 2790461 - RNA, 19 nt, Artificial Sequence
  Description of Artificial Sequence: Synthetic oligonucleotide
cgguccucgccaccacagu

SEQ ID NO: 2790462 - RNA, 19 nt, Artificial Sequence
  Description of Artificial Sequence: Synthetic oligonucleotide
cccucacacccuccaucuu

SEQ ID NO: 2790463 - RNA, 19 nt, Artificial Sequence
  Description of Artificial Sequence: Synthetic oligonucleotide
cggcaccugugagccucuc

SEQ ID NO: 2790464 - RNA, 19 nt, Artificial Sequence
  Description of Artificial Sequence: Synthetic oligonucleotide
gcgacacgcccagcauguu

SEQ ID NO: 2790465 - RNA, 19 nt, Artificial Sequence
  Description of Artificial Sequence: Synthetic oligonucleotide
ccccuauacugggcccuau

SEQ ID NO: 2790466 - RNA, 19 nt, Artificial Sequence
  Description of Artificial Sequence: Synthetic oligonucleotide
ucaccagacaucaugaggg

SEQ ID NO: 2790467 - RNA, 19 nt, Artificial Sequence
  Description of Artificial Sequence: Synthetic oligonucleotide
acuucuuaaaugcuguggg

SEQ ID NO: 2790468 - RNA, 19 nt, Artificial Sequence
  Description of Artificial Sequence: Synthetic oligonucleotide
auagguuuccugcagguac

SEQ ID NO: 2790469 - RNA, 19 nt, Artificial Sequence
  Description of Artificial Sequence: Synthetic oligonucleotide
ucuagugagaguuuauacc

SEQ ID NO: 2790470 - RNA, 19 nt, Artificial Sequence
  Description of Artificial Sequence: Synthetic oligonucleotide
cuuugaauagguuuccugc

SEQ ID NO: 2790471 - RNA, 19 nt, Artificial Sequence
  Description of Artificial Sequence: Synthetic oligonucleotide
uuugucaccagacaucaug

SEQ ID NO: 2790472 - RNA, 19 nt, Artificial Sequence
  Description of Artificial Sequence: Synthetic oligonucleotide
uguaaggguagccacuggg

SEQ ID NO: 2790473 - RNA, 19 nt, Artificial Sequence
  Description of Artificial Sequence: Synthetic oligonucleotide
ggugugaggaacuugacgg

SEQ ID NO: 2790474 - RNA, 19 nt, Artificial Sequence
  Description of Artificial Sequence: Synthetic oligonucleotide
ucuucauauacugugccgg

SEQ ID NO: 2790475 - RNA, 19 nt, Artificial Sequence
  Description of Artificial Sequence: Synthetic oligonucleotide
agaguuuauaccucagguc

SEQ ID NO: 2790476 - RNA, 19 nt, Artificial Sequence
  Description of Artificial Sequence: Synthetic oligonucleotide
ugaauagguuuccugcagg

SEQ ID NO: 2790477 - RNA, 19 nt, Artificial Sequence
  Description of Artificial Sequence: Synthetic oligonucleotide
agcauguguguucaaaggg

SEQ ID NO: 2790478 - RNA, 19 nt, Artificial Sequence
  Description of Artificial Sequence: Synthetic oligonucleotide
acaucauacagugcggacc

SEQ ID NO: 2790479 - RNA, 19 nt, Artificial Sequence
  Description of Artificial Sequence: Synthetic oligonucleotide
uuuugcgaggccaucccgg

SEQ ID NO: 2790480 - RNA, 19 nt, Artificial Sequence
  Description of Artificial Sequence: Synthetic oligonucleotide
ugaacagguugucugauuc

SEQ ID NO: 2790481 - RNA, 19 nt, Artificial Sequence
  Description of Artificial Sequence: Synthetic oligonucleotide
uuugaauagguuuccugca

SEQ ID NO: 2790482 - RNA, 19 nt, Artificial Sequence
  Description of Artificial Sequence: Synthetic oligonucleotide
uugaauagguuuccugcag

SEQ ID NO: 2790483 - RNA, 19 nt, Artificial Sequence
  Description of Artificial Sequence: Synthetic oligonucleotide
cagguugucugauucaggg

SEQ ID NO: 2790484 - RNA, 19 nt, Artificial Sequence
  Description of Artificial Sequence: Synthetic oligonucleotide
ccugacaucauacagugcg

SEQ ID NO: 2790485 - RNA, 19 nt, Artificial Sequence
  Description of Artificial Sequence: Synthetic oligonucleotide
uacuucuuaaaugcugugg

SEQ ID NO: 2790486 - RNA, 19 nt, Artificial Sequence
  Description of Artificial Sequence: Synthetic oligonucleotide
aaucccuuugucaccagac

SEQ ID NO: 2790487 - RNA, 19 nt, Artificial Sequence
  Description of Artificial Sequence: Synthetic oligonucleotide
uagccucuugcccacaggg

SEQ ID NO: 2790488 - RNA, 19 nt, Artificial Sequence
  Description of Artificial Sequence: Synthetic oligonucleotide
ugcagguacuucuuaaaug

SEQ ID NO: 2790489 - RNA, 19 nt, Artificial Sequence
  Description of Artificial Sequence: Synthetic oligonucleotide
gaguuuauaccucaggucu

SEQ ID NO: 2790490 - RNA, 19 nt, Artificial Sequence
  Description of Artificial Sequence: Synthetic oligonucleotide
accucaggucuucauauac

SEQ ID NO: 2790491 - RNA, 19 nt, Artificial Sequence
  Description of Artificial Sequence: Synthetic oligonucleotide
gcagguacuucuuaaaugc

SEQ ID NO: 2790492 - RNA, 19 nt, Artificial Sequence
  Description of Artificial Sequence: Synthetic oligonucleotide
gaccacuuauccuugagga

SEQ ID NO: 2790493 - RNA, 19 nt, Artificial Sequence
  Description of Artificial Sequence: Synthetic oligonucleotide
uucaaagggcucucgaugu

SEQ ID NO: 2790494 - RNA, 19 nt, Artificial Sequence
  Description of Artificial Sequence: Synthetic oligonucleotide
aacagguugucugauucag

SEQ ID NO: 2790495 - RNA, 19 nt, Artificial Sequence
  Description of Artificial Sequence: Synthetic oligonucleotide
cuucuuaaaugcugugggg

SEQ ID NO: 2790496 - RNA, 19 nt, Artificial Sequence
  Description of Artificial Sequence: Synthetic oligonucleotide
uugucaccagacaucauga

SEQ ID NO: 2790497 - RNA, 19 nt, Artificial Sequence
  Description of Artificial Sequence: Synthetic oligonucleotide
ucuugcuguagccucuugc

SEQ ID NO: 2790498 - RNA, 19 nt, Artificial Sequence
  Description of Artificial Sequence: Synthetic oligonucleotide
uucuuaaaugcuguggggu

SEQ ID NO: 2790499 - RNA, 19 nt, Artificial Sequence
  Description of Artificial Sequence: Synthetic oligonucleotide
uccuagcagacucuggaug

SEQ ID NO: 2790500 - RNA, 19 nt, Artificial Sequence
  Description of Artificial Sequence: Synthetic oligonucleotide
agugagaguuuauaccuca

SEQ ID NO: 2790501 - RNA, 19 nt, Artificial Sequence
  Description of Artificial Sequence: Synthetic oligonucleotide
uaaggguagccacugggga

SEQ ID NO: 2790502 - RNA, 19 nt, Artificial Sequence
  Description of Artificial Sequence: Synthetic oligonucleotide
acuggggaacucuagugag

SEQ ID NO: 2790503 - RNA, 19 nt, Artificial Sequence
  Description of Artificial Sequence: Synthetic oligonucleotide
guucaaagggcucucgaug

SEQ ID NO: 2790504 - RNA, 19 nt, Artificial Sequence
  Description of Artificial Sequence: Synthetic oligonucleotide
cucuagugagaguuuauac

SEQ ID NO: 2790505 - RNA, 19 nt, Artificial Sequence
  Description of Artificial Sequence: Synthetic oligonucleotide
auuugaacagguugucuga

SEQ ID NO: 2790506 - RNA, 19 nt, Artificial Sequence
  Description of Artificial Sequence: Synthetic oligonucleotide
uauaccucaggucuucaua

SEQ ID NO: 2790507 - RNA, 19 nt, Artificial Sequence
  Description of Artificial Sequence: Synthetic oligonucleotide
uguuggguucuccuagcag

SEQ ID NO: 2790508 - RNA, 19 nt, Artificial Sequence
  Description of Artificial Sequence: Synthetic oligonucleotide
gucuucauauacugugccg

SEQ ID NO: 2790509 - RNA, 19 nt, Artificial Sequence
  Description of Artificial Sequence: Synthetic oligonucleotide
cuugcgaacggcugcgacg

SEQ ID NO: 2790510 - RNA, 19 nt, Artificial Sequence
  Description of Artificial Sequence: Synthetic oligonucleotide
uugacugcagaccugcuuu

SEQ ID NO: 2790511 - RNA, 19 nt, Artificial Sequence
  Description of Artificial Sequence: Synthetic oligonucleotide
gucugauucagggaaggcg

SEQ ID NO: 2790512 - RNA, 19 nt, Artificial Sequence
  Description of Artificial Sequence: Synthetic oligonucleotide
ugugccggcugcuccaugg

SEQ ID NO: 2790513 - RNA, 19 nt, Artificial Sequence
  Description of Artificial Sequence: Synthetic oligonucleotide
uacagugcggaccacuuau

SEQ ID NO: 2790514 - RNA, 19 nt, Artificial Sequence
  Description of Artificial Sequence: Synthetic oligonucleotide
uuugcgaggccaucccggg

SEQ ID NO: 2790515 - RNA, 19 nt, Artificial Sequence
  Description of Artificial Sequence: Synthetic oligonucleotide
guuggguucuccuagcaga

SEQ ID NO: 2790516 - RNA, 19 nt, Artificial Sequence
  Description of Artificial Sequence: Synthetic oligonucleotide
cacccauuugaacagguug

SEQ ID NO: 2790517 - RNA, 19 nt, Artificial Sequence
  Description of Artificial Sequence: Synthetic oligonucleotide
ugcgaggccaucccgggag

SEQ ID NO: 2790518 - RNA, 19 nt, Artificial Sequence
  Description of Artificial Sequence: Synthetic oligonucleotide
uggggaacucuagugagag

SEQ ID NO: 2790519 - RNA, 19 nt, Artificial Sequence
  Description of Artificial Sequence: Synthetic oligonucleotide
ugggucgcgguuuugcgag

SEQ ID NO: 2790520 - RNA, 19 nt, Artificial Sequence
  Description of Artificial Sequence: Synthetic oligonucleotide
uggguguccacguuggggu

SEQ ID NO: 2790521 - RNA, 19 nt, Artificial Sequence
  Description of Artificial Sequence: Synthetic oligonucleotide
uugucugauucagggaagg

SEQ ID NO: 2790522 - RNA, 19 nt, Artificial Sequence
  Description of Artificial Sequence: Synthetic oligonucleotide
aaaucccuuugucaccaga

SEQ ID NO: 2790523 - RNA, 19 nt, Artificial Sequence
  Description of Artificial Sequence: Synthetic oligonucleotide
uguguguucaaagggcucu

SEQ ID NO: 2790524 - RNA, 19 nt, Artificial Sequence
  Description of Artificial Sequence: Synthetic oligonucleotide
auaccucaggucuucauau

SEQ ID NO: 2790525 - RNA, 19 nt, Artificial Sequence
  Description of Artificial Sequence: Synthetic oligonucleotide
aaggcggaaaucccuuugu

SEQ ID NO: 2790526 - RNA, 19 nt, Artificial Sequence
  Description of Artificial Sequence: Synthetic oligonucleotide
aggaacuugacggugggug

SEQ ID NO: 2790527 - RNA, 19 nt, Artificial Sequence
  Description of Artificial Sequence: Synthetic oligonucleotide
cuucauauacugugccggc

SEQ ID NO: 2790528 - RNA, 19 nt, Artificial Sequence
  Description of Artificial Sequence: Synthetic oligonucleotide
cugacaucauacagugcgg

SEQ ID NO: 2790529 - RNA, 19 nt, Artificial Sequence
  Description of Artificial Sequence: Synthetic oligonucleotide
ucuuaaaugcugugggguu

SEQ ID NO: 2790530 - RNA, 19 nt, Artificial Sequence
  Description of Artificial Sequence: Synthetic oligonucleotide
guaaggguagccacugggg

SEQ ID NO: 2790531 - RNA, 19 nt, Artificial Sequence
  Description of Artificial Sequence: Synthetic oligonucleotide
uguucaaagggcucucgau

SEQ ID NO: 2790532 - RNA, 19 nt, Artificial Sequence
  Description of Artificial Sequence: Synthetic oligonucleotide
ugcagaccugcuuugaaua

SEQ ID NO: 2790533 - RNA, 19 nt, Artificial Sequence
  Description of Artificial Sequence: Synthetic oligonucleotide
ucccuuugucaccagacau

SEQ ID NO: 2790534 - RNA, 19 nt, Artificial Sequence
  Description of Artificial Sequence: Synthetic oligonucleotide
ugugaggaacuugacggug

SEQ ID NO: 2790535 - RNA, 19 nt, Artificial Sequence
  Description of Artificial Sequence: Synthetic oligonucleotide
gaaggcggaaaucccuuug

SEQ ID NO: 2790536 - RNA, 19 nt, Artificial Sequence
  Description of Artificial Sequence: Synthetic oligonucleotide
uucuccuagcagacucugg

SEQ ID NO: 2790537 - RNA, 19 nt, Artificial Sequence
  Description of Artificial Sequence: Synthetic oligonucleotide
ucagcagcauguguguuca

SEQ ID NO: 2790538 - RNA, 19 nt, Artificial Sequence
  Description of Artificial Sequence: Synthetic oligonucleotide
gaacuugacggugggugcg

SEQ ID NO: 2790539 - RNA, 19 nt, Artificial Sequence
  Description of Artificial Sequence: Synthetic oligonucleotide
aaggguagccacuggggaa

SEQ ID NO: 2790540 - RNA, 19 nt, Artificial Sequence
  Description of Artificial Sequence: Synthetic oligonucleotide
uuguaaggguagccacugg

SEQ ID NO: 2790541 - RNA, 19 nt, Artificial Sequence
  Description of Artificial Sequence: Synthetic oligonucleotide
guccccacccauuugaaca

SEQ ID NO: 2790542 - RNA, 19 nt, Artificial Sequence
  Description of Artificial Sequence: Synthetic oligonucleotide
uguguucaaagggcucucg

SEQ ID NO: 2790543 - RNA, 19 nt, Artificial Sequence
  Description of Artificial Sequence: Synthetic oligonucleotide
gcagauguugcccugggug

SEQ ID NO: 2790544 - RNA, 19 nt, Artificial Sequence
  Description of Artificial Sequence: Synthetic oligonucleotide
gacaucauacagugcggac

SEQ ID NO: 2790545 - RNA, 19 nt, Artificial Sequence
  Description of Artificial Sequence: Synthetic oligonucleotide
ugcguuguaaggguagcca

SEQ ID NO: 2790546 - RNA, 19 nt, Artificial Sequence
  Description of Artificial Sequence: Synthetic oligonucleotide
gagcucagcagcaugugug

SEQ ID NO: 2790547 - RNA, 19 nt, Artificial Sequence
  Description of Artificial Sequence: Synthetic oligonucleotide
guuuugcgaggccaucccg

SEQ ID NO: 2790548 - RNA, 19 nt, Artificial Sequence
  Description of Artificial Sequence: Synthetic oligonucleotide
uugcgaacggcugcgacgc

SEQ ID NO: 2790549 - RNA, 19 nt, Artificial Sequence
  Description of Artificial Sequence: Synthetic oligonucleotide
uccccacccauuugaacag

SEQ ID NO: 2790550 - RNA, 19 nt, Artificial Sequence
  Description of Artificial Sequence: Synthetic oligonucleotide
ugacaucauacagugcgga

SEQ ID NO: 2790551 - RNA, 19 nt, Artificial Sequence
  Description of Artificial Sequence: Synthetic oligonucleotide
aggguagccacuggggaac

SEQ ID NO: 2790552 - RNA, 19 nt, Artificial Sequence
  Description of Artificial Sequence: Synthetic oligonucleotide
caucauacagugcggacca

SEQ ID NO: 2790553 - RNA, 19 nt, Artificial Sequence
  Description of Artificial Sequence: Synthetic oligonucleotide
uagugagaguuuauaccuc

SEQ ID NO: 2790554 - RNA, 19 nt, Artificial Sequence
  Description of Artificial Sequence: Synthetic oligonucleotide
agugcggaccacuuauccu

SEQ ID NO: 2790555 - RNA, 19 nt, Artificial Sequence
  Description of Artificial Sequence: Synthetic oligonucleotide
ccugcuuugaauagguuuc

SEQ ID NO: 2790556 - RNA, 19 nt, Artificial Sequence
  Description of Artificial Sequence: Synthetic oligonucleotide
ggaccacuuauccuugagg

SEQ ID NO: 2790557 - RNA, 19 nt, Artificial Sequence
  Description of Artificial Sequence: Synthetic oligonucleotide
uccacguuggggugguagc

SEQ ID NO: 2790558 - RNA, 19 nt, Artificial Sequence
  Description of Artificial Sequence: Synthetic oligonucleotide
augguccccacccauuuga

SEQ ID NO: 2790559 - RNA, 19 nt, Artificial Sequence
  Description of Artificial Sequence: Synthetic oligonucleotide
agguacuucuuaaaugcug

SEQ ID NO: 2790560 - RNA, 19 nt, Artificial Sequence
  Description of Artificial Sequence: Synthetic oligonucleotide
aggcggaaaucccuuuguc

SEQ ID NO: 2790561 - RNA, 19 nt, Artificial Sequence
  Description of Artificial Sequence: Synthetic oligonucleotide
gcagcauguguguucaaag

SEQ ID NO: 2790562 - RNA, 19 nt, Artificial Sequence
  Description of Artificial Sequence: Synthetic oligonucleotide
gcggaaaucccuuugucac

SEQ ID NO: 2790563 - RNA, 19 nt, Artificial Sequence
  Description of Artificial Sequence: Synthetic oligonucleotide
gggugugaggaacuugacg

SEQ ID NO: 2790564 - RNA, 19 nt, Artificial Sequence
  Description of Artificial Sequence: Synthetic oligonucleotide
cagugcggaccacuuaucc

SEQ ID NO: 2790565 - RNA, 19 nt, Artificial Sequence
  Description of Artificial Sequence: Synthetic oligonucleotide
agacucuggauggacagca

SEQ ID NO: 2790566 - RNA, 19 nt, Artificial Sequence
  Description of Artificial Sequence: Synthetic oligonucleotide
gcuuugaauagguuuccug

SEQ ID NO: 2790567 - RNA, 19 nt, Artificial Sequence
  Description of Artificial Sequence: Synthetic oligonucleotide
gaacagguugucugauuca

SEQ ID NO: 2790568 - RNA, 19 nt, Artificial Sequence
  Description of Artificial Sequence: Synthetic oligonucleotide
ggugggugcguuguaaggg

SEQ ID NO: 2790569 - RNA, 19 nt, Artificial Sequence
  Description of Artificial Sequence: Synthetic oligonucleotide
ucauacagugcggaccacu

SEQ ID NO: 2790570 - RNA, 19 nt, Artificial Sequence
  Description of Artificial Sequence: Synthetic oligonucleotide
agagcucagcagcaugugu

SEQ ID NO: 2790571 - RNA, 19 nt, Artificial Sequence
  Description of Artificial Sequence: Synthetic oligonucleotide
uccauggaugguccccacc

SEQ ID NO: 2790572 - RNA, 19 nt, Artificial Sequence
  Description of Artificial Sequence: Synthetic oligonucleotide
cagaccugcuuugaauagg

SEQ ID NO: 2790573 - RNA, 19 nt, Artificial Sequence
  Description of Artificial Sequence: Synthetic oligonucleotide
aucccgggagcgcuggcac

SEQ ID NO: 2790574 - RNA, 19 nt, Artificial Sequence
  Description of Artificial Sequence: Synthetic oligonucleotide
acccauuugaacagguugu

SEQ ID NO: 2790575 - RNA, 19 nt, Artificial Sequence
  Description of Artificial Sequence: Synthetic oligonucleotide
uuauaccucaggucuucau

SEQ ID NO: 2790576 - RNA, 19 nt, Artificial Sequence
  Description of Artificial Sequence: Synthetic oligonucleotide
gaauagguuuccugcaggu

SEQ ID NO: 2790577 - RNA, 19 nt, Artificial Sequence
  Description of Artificial Sequence: Synthetic oligonucleotide
ggugguagcagggugugag

SEQ ID NO: 2790578 - RNA, 19 nt, Artificial Sequence
  Description of Artificial Sequence: Synthetic oligonucleotide
aauagguuuccugcaggua

SEQ ID NO: 2790579 - RNA, 19 nt, Artificial Sequence
  Description of Artificial Sequence: Synthetic oligonucleotide
uuugaacagguugucugau

SEQ ID NO: 2790580 - RNA, 19 nt, Artificial Sequence
  Description of Artificial Sequence: Synthetic oligonucleotide
aucccuuugucaccagaca

SEQ ID NO: 2790581 - RNA, 19 nt, Artificial Sequence
  Description of Artificial Sequence: Synthetic oligonucleotide
guugucugauucagggaag

SEQ ID NO: 2790582 - RNA, 19 nt, Artificial Sequence
  Description of Artificial Sequence: Synthetic oligonucleotide
cuggguguccacguugggg

SEQ ID NO: 2790583 - RNA, 19 nt, Artificial Sequence
  Description of Artificial Sequence: Synthetic oligonucleotide
ugacugcagaccugcuuug

SEQ ID NO: 2790584 - RNA, 19 nt, Artificial Sequence
  Description of Artificial Sequence: Synthetic oligonucleotide
ugcggaccacuuauccuug

SEQ ID NO: 2790585 - RNA, 19 nt, Artificial Sequence
  Description of Artificial Sequence: Synthetic oligonucleotide
accagacaucaugaggguc

SEQ ID NO: 2790586 - RNA, 19 nt, Artificial Sequence
  Description of Artificial Sequence: Synthetic oligonucleotide
guagcagggugugaggaac

SEQ ID NO: 2790587 - RNA, 19 nt, Artificial Sequence
  Description of Artificial Sequence: Synthetic oligonucleotide
ucgauguuggguucuccua

SEQ ID NO: 2790588 - RNA, 19 nt, Artificial Sequence
  Description of Artificial Sequence: Synthetic oligonucleotide
ggaacuugacggugggugc

SEQ ID NO: 2790589 - RNA, 19 nt, Artificial Sequence
  Description of Artificial Sequence: Synthetic oligonucleotide
acggugggugcguuguaag

SEQ ID NO: 2790590 - RNA, 19 nt, Artificial Sequence
  Description of Artificial Sequence: Synthetic oligonucleotide
gcauguguguucaaagggc

SEQ ID NO: 2790591 - RNA, 19 nt, Artificial Sequence
  Description of Artificial Sequence: Synthetic oligonucleotide
cucggcucccuugcgaacg

SEQ ID NO: 2790592 - RNA, 19 nt, Artificial Sequence
  Description of Artificial Sequence: Synthetic oligonucleotide
ucccuugcgaacggcugcg

SEQ ID NO: 2790593 - RNA, 19 nt, Artificial Sequence
  Description of Artificial Sequence: Synthetic oligonucleotide
gaaaucccuuugucaccag

SEQ ID NO: 2790594 - RNA, 19 nt, Artificial Sequence
  Description of Artificial Sequence: Synthetic oligonucleotide
uuaaaugcugugggguuuu

SEQ ID NO: 2790595 - RNA, 19 nt, Artificial Sequence
  Description of Artificial Sequence: Synthetic oligonucleotide
uccugacaucauacagugc

SEQ ID NO: 2790596 - RNA, 19 nt, Artificial Sequence
  Description of Artificial Sequence: Synthetic oligonucleotide
ugcuccauggauggucccc

SEQ ID NO: 2790597 - RNA, 19 nt, Artificial Sequence
  Description of Artificial Sequence: Synthetic oligonucleotide
uacugugccggcugcucca

SEQ ID NO: 2790598 - RNA, 19 nt, Artificial Sequence
  Description of Artificial Sequence: Synthetic oligonucleotide
ucggcucccuugcgaacgg

SEQ ID NO: 2790599 - RNA, 19 nt, Artificial Sequence
  Description of Artificial Sequence: Synthetic oligonucleotide
agaccugcuuugaauaggu

SEQ ID NO: 2790600 - RNA, 19 nt, Artificial Sequence
  Description of Artificial Sequence: Synthetic oligonucleotide
gauguugcccugggugucc

SEQ ID NO: 2790601 - RNA, 19 nt, Artificial Sequence
  Description of Artificial Sequence: Synthetic oligonucleotide
cugcuuugaauagguuucc

SEQ ID NO: 2790602 - RNA, 19 nt, Artificial Sequence
  Description of Artificial Sequence: Synthetic oligonucleotide
acagguugucugauucagg

SEQ ID NO: 2790603 - RNA, 19 nt, Artificial Sequence
  Description of Artificial Sequence: Synthetic oligonucleotide
gacagcaggaugguccuga

SEQ ID NO: 2790604 - RNA, 19 nt, Artificial Sequence
  Description of Artificial Sequence: Synthetic oligonucleotide
cucccuugcgaacggcugc

SEQ ID NO: 2790605 - RNA, 19 nt, Artificial Sequence
  Description of Artificial Sequence: Synthetic oligonucleotide
gguuuugcgaggccauccc

SEQ ID NO: 2790606 - RNA, 19 nt, Artificial Sequence
  Description of Artificial Sequence: Synthetic oligonucleotide
acugcagaccugcuuugaa

SEQ ID NO: 2790607 - RNA, 19 nt, Artificial Sequence
  Description of Artificial Sequence: Synthetic oligonucleotide
uagcagggugugaggaacu

SEQ ID NO: 2790608 - RNA, 19 nt, Artificial Sequence
  Description of Artificial Sequence: Synthetic oligonucleotide
cacuggggaacucuaguga

SEQ ID NO: 2790609 - RNA, 19 nt, Artificial Sequence
  Description of Artificial Sequence: Synthetic oligonucleotide
uugaacagguugucugauu

SEQ ID NO: 2790610 - RNA, 19 nt, Artificial Sequence
  Description of Artificial Sequence: Synthetic oligonucleotide
ugcuuugaauagguuuccu

SEQ ID NO: 2790611 - RNA, 19 nt, Artificial Sequence
  Description of Artificial Sequence: Synthetic oligonucleotide
gcagaccugcuuugaauag

SEQ ID NO: 2790612 - RNA, 19 nt, Artificial Sequence
  Description of Artificial Sequence: Synthetic oligonucleotide
acucuagugagaguuuaua

SEQ ID NO: 2790613 - RNA, 19 nt, Artificial Sequence
  Description of Artificial Sequence: Synthetic oligonucleotide
ccagacaucaugaggguca

SEQ ID NO: 2790614 - RNA, 19 nt, Artificial Sequence
  Description of Artificial Sequence: Synthetic oligonucleotide
ucuugacugcagaccugcu

SEQ ID NO: 2790615 - RNA, 19 nt, Artificial Sequence
  Description of Artificial Sequence: Synthetic oligonucleotide
ugagggucaucagcucuug

SEQ ID NO: 2790616 - RNA, 19 nt, Artificial Sequence
  Description of Artificial Sequence: Synthetic oligonucleotide
gaacucuagugagaguuua

SEQ ID NO: 2790617 - RNA, 19 nt, Artificial Sequence
  Description of Artificial Sequence: Synthetic oligonucleotide
cugggcucggcucccuugc

SEQ ID NO: 2790618 - RNA, 19 nt, Artificial Sequence
  Description of Artificial Sequence: Synthetic oligonucleotide
aacuugacggugggugcgu

SEQ ID NO: 2790619 - RNA, 19 nt, Artificial Sequence
  Description of Artificial Sequence: Synthetic oligonucleotide
ggaaaucccuuugucacca

SEQ ID NO: 2790620 - RNA, 19 nt, Artificial Sequence
  Description of Artificial Sequence: Synthetic oligonucleotide
cuugacggugggugcguug

SEQ ID NO: 2790621 - RNA, 19 nt, Artificial Sequence
  Description of Artificial Sequence: Synthetic oligonucleotide
guucuccuagcagacucug

SEQ ID NO: 2790622 - RNA, 19 nt, Artificial Sequence
  Description of Artificial Sequence: Synthetic oligonucleotide
gagggucaucagcucuugc

SEQ ID NO: 2790623 - RNA, 19 nt, Artificial Sequence
  Description of Artificial Sequence: Synthetic oligonucleotide
ugauucagggaaggcggaa

SEQ ID NO: 2790624 - RNA, 19 nt, Artificial Sequence
  Description of Artificial Sequence: Synthetic oligonucleotide
ucucgauguuggguucucc

SEQ ID NO: 2790625 - RNA, 19 nt, Artificial Sequence
  Description of Artificial Sequence: Synthetic oligonucleotide
ucgcgguuuugcgaggcca

SEQ ID NO: 2790626 - RNA, 19 nt, Artificial Sequence
  Description of Artificial Sequence: Synthetic oligonucleotide
uugcccuggguguccacgu

SEQ ID NO: 2790627 - RNA, 19 nt, Artificial Sequence
  Description of Artificial Sequence: Synthetic oligonucleotide
agggcucucgauguugggu

SEQ ID NO: 2790628 - RNA, 19 nt, Artificial Sequence
  Description of Artificial Sequence: Synthetic oligonucleotide
uggaugguccccacccauu

SEQ ID NO: 2790629 - RNA, 19 nt, Artificial Sequence
  Description of Artificial Sequence: Synthetic oligonucleotide
agggugugaggaacuugac

SEQ ID NO: 2790630 - RNA, 19 nt, Artificial Sequence
  Description of Artificial Sequence: Synthetic oligonucleotide
ccggcugcuccauggaugg

SEQ ID NO: 2790631 - RNA, 19 nt, Artificial Sequence
  Description of Artificial Sequence: Synthetic oligonucleotide
acagugcggaccacuuauc

SEQ ID NO: 2790632 - RNA, 19 nt, Artificial Sequence
  Description of Artificial Sequence: Synthetic oligonucleotide
gcugggucgcgguuuugcg

SEQ ID NO: 2790633 - RNA, 19 nt, Artificial Sequence
  Description of Artificial Sequence: Synthetic oligonucleotide
aguuuauaccucaggucuu

SEQ ID NO: 2790634 - RNA, 19 nt, Artificial Sequence
  Description of Artificial Sequence: Synthetic oligonucleotide
uaccucaggucuucauaua

SEQ ID NO: 2790635 - RNA, 19 nt, Artificial Sequence
  Description of Artificial Sequence: Synthetic oligonucleotide
ugggugcguuguaagggua

SEQ ID NO: 2790636 - RNA, 19 nt, Artificial Sequence
  Description of Artificial Sequence: Synthetic oligonucleotide
gcguuguaaggguagccac

SEQ ID NO: 2790637 - RNA, 19 nt, Artificial Sequence
  Description of Artificial Sequence: Synthetic oligonucleotide
auacagugcggaccacuua

SEQ ID NO: 2790638 - RNA, 19 nt, Artificial Sequence
  Description of Artificial Sequence: Synthetic oligonucleotide
auauacugugccggcugcu

SEQ ID NO: 2790639 - RNA, 19 nt, Artificial Sequence
  Description of Artificial Sequence: Synthetic oligonucleotide
cacuuauccuugaggaugu

SEQ ID NO: 2790640 - RNA, 19 nt, Artificial Sequence
  Description of Artificial Sequence: Synthetic oligonucleotide
aucauacagugcggaccac

SEQ ID NO: 2790641 - RNA, 19 nt, Artificial Sequence
  Description of Artificial Sequence: Synthetic oligonucleotide
caugagggucaucagcucu

SEQ ID NO: 2790642 - RNA, 19 nt, Artificial Sequence
  Description of Artificial Sequence: Synthetic oligonucleotide
uugcgaggccaucccggga

SEQ ID NO: 2790643 - RNA, 19 nt, Artificial Sequence
  Description of Artificial Sequence: Synthetic oligonucleotide
ugguccccacccauuugaa

SEQ ID NO: 2790644 - RNA, 19 nt, Artificial Sequence
  Description of Artificial Sequence: Synthetic oligonucleotide
uagccacuggggaacucua

SEQ ID NO: 2790645 - RNA, 19 nt, Artificial Sequence
  Description of Artificial Sequence: Synthetic oligonucleotide
cgauguuggguucuccuag

SEQ ID NO: 2790646 - RNA, 19 nt, Artificial Sequence
  Description of Artificial Sequence: Synthetic oligonucleotide
cugauucagggaaggcgga

SEQ ID NO: 2790647 - RNA, 19 nt, Artificial Sequence
  Description of Artificial Sequence: Synthetic oligonucleotide
cuggggaacucuagugaga

SEQ ID NO: 2790648 - RNA, 19 nt, Artificial Sequence
  Description of Artificial Sequence: Synthetic oligonucleotide
ccacuggggaacucuagug

SEQ ID NO: 2790649 - RNA, 19 nt, Artificial Sequence
  Description of Artificial Sequence: Synthetic oligonucleotide
gugcguuguaaggguagcc

SEQ ID NO: 2790650 - RNA, 19 nt, Artificial Sequence
  Description of Artificial Sequence: Synthetic oligonucleotide
gacgcuggcggcggcuggg

SEQ ID NO: 2790651 - RNA, 19 nt, Artificial Sequence
  Description of Artificial Sequence: Synthetic oligonucleotide
cagauguugcccugggugu

SEQ ID NO: 2790652 - RNA, 19 nt, Artificial Sequence
  Description of Artificial Sequence: Synthetic oligonucleotide
acuuauccuugaggauguc

SEQ ID NO: 2790653 - RNA, 19 nt, Artificial Sequence
  Description of Artificial Sequence: Synthetic oligonucleotide
cucgauguuggguucuccu

SEQ ID NO: 2790654 - RNA, 19 nt, Artificial Sequence
  Description of Artificial Sequence: Synthetic oligonucleotide
gucaucagcucuugcugua

SEQ ID NO: 2790655 - RNA, 19 nt, Artificial Sequence
  Description of Artificial Sequence: Synthetic oligonucleotide
gugcggaccacuuauccuu

SEQ ID NO: 2790656 - RNA, 19 nt, Artificial Sequence
  Description of Artificial Sequence: Synthetic oligonucleotide
cugggucgcgguuuugcga

SEQ ID NO: 2790657 - RNA, 19 nt, Artificial Sequence
  Description of Artificial Sequence: Synthetic oligonucleotide
ggugcguuguaaggguagc

SEQ ID NO: 2790658 - RNA, 19 nt, Artificial Sequence
  Description of Artificial Sequence: Synthetic oligonucleotide
gggaacucuagugagaguu

SEQ ID NO: 2790659 - RNA, 19 nt, Artificial Sequence
  Description of Artificial Sequence: Synthetic oligonucleotide
ugccggcugcuccauggau

SEQ ID NO: 2790660 - RNA, 19 nt, Artificial Sequence
  Description of Artificial Sequence: Synthetic oligonucleotide
uggguucuccuagcagacu

SEQ ID NO: 2790661 - RNA, 19 nt, Artificial Sequence
  Description of Artificial Sequence: Synthetic oligonucleotide
cugcuccauggaugguccc

SEQ ID NO: 2790662 - RNA, 19 nt, Artificial Sequence
  Description of Artificial Sequence: Synthetic oligonucleotide
gugggugcguuguaagggu

SEQ ID NO: 2790663 - RNA, 19 nt, Artificial Sequence
  Description of Artificial Sequence: Synthetic oligonucleotide
gucgcgguuuugcgaggcc

SEQ ID NO: 2790664 - RNA, 19 nt, Artificial Sequence
  Description of Artificial Sequence: Synthetic oligonucleotide
augagggucaucagcucuu

SEQ ID NO: 2790665 - RNA, 19 nt, Artificial Sequence
  Description of Artificial Sequence: Synthetic oligonucleotide
gugugaggaacuugacggu

SEQ ID NO: 2790666 - RNA, 19 nt, Artificial Sequence
  Description of Artificial Sequence: Synthetic oligonucleotide
gggugcguuguaaggguag

SEQ ID NO: 2790667 - RNA, 19 nt, Artificial Sequence
  Description of Artificial Sequence: Synthetic oligonucleotide
cuugcccacagggccccgg

SEQ ID NO: 2790668 - RNA, 19 nt, Artificial Sequence
  Description of Artificial Sequence: Synthetic oligonucleotide
ucccgggagcgcuggcacc

SEQ ID NO: 2790669 - RNA, 19 nt, Artificial Sequence
  Description of Artificial Sequence: Synthetic oligonucleotide
gcuguagccucuugcccac

SEQ ID NO: 2790670 - RNA, 19 nt, Artificial Sequence
  Description of Artificial Sequence: Synthetic oligonucleotide
gacggugggugcguuguaa

SEQ ID NO: 2790671 - RNA, 19 nt, Artificial Sequence
  Description of Artificial Sequence: Synthetic oligonucleotide
cuccauggaugguccccac

SEQ ID NO: 2790672 - RNA, 19 nt, Artificial Sequence
  Description of Artificial Sequence: Synthetic oligonucleotide
gguccugacaucauacagu

SEQ ID NO: 2790673 - RNA, 19 nt, Artificial Sequence
  Description of Artificial Sequence: Synthetic oligonucleotide
cagguacuucuuaaaugcu

SEQ ID NO: 2790674 - RNA, 19 nt, Artificial Sequence
  Description of Artificial Sequence: Synthetic oligonucleotide
cggaaaucccuuugucacc

SEQ ID NO: 2790675 - RNA, 19 nt, Artificial Sequence
  Description of Artificial Sequence: Synthetic oligonucleotide
cauacagugcggaccacuu

SEQ ID NO: 2790676 - RNA, 19 nt, Artificial Sequence
  Description of Artificial Sequence: Synthetic oligonucleotide
gguccccacccauuugaac

SEQ ID NO: 2790677 - RNA, 19 nt, Artificial Sequence
  Description of Artificial Sequence: Synthetic oligonucleotide
guagccacuggggaacucu

SEQ ID NO: 2790678 - RNA, 19 nt, Artificial Sequence
  Description of Artificial Sequence: Synthetic oligonucleotide
cuagcagacucuggaugga

SEQ ID NO: 2790679 - RNA, 19 nt, Artificial Sequence
  Description of Artificial Sequence: Synthetic oligonucleotide
gguagcagggugugaggaa

SEQ ID NO: 2790680 - RNA, 19 nt, Artificial Sequence
  Description of Artificial Sequence: Synthetic oligonucleotide
gaacggcugcgacgcuggc

SEQ ID NO: 2790681 - RNA, 19 nt, Artificial Sequence
  Description of Artificial Sequence: Synthetic oligonucleotide
cucuugcuguagccucuug

SEQ ID NO: 2790682 - RNA, 19 nt, Artificial Sequence
  Description of Artificial Sequence: Synthetic oligonucleotide
aggccaucccgggagcgcu

SEQ ID NO: 2790683 - RNA, 19 nt, Artificial Sequence
  Description of Artificial Sequence: Synthetic oligonucleotide
uguugcccuggguguccac

SEQ ID NO: 2790684 - RNA, 19 nt, Artificial Sequence
  Description of Artificial Sequence: Synthetic oligonucleotide
ggaugguccugacaucaua

SEQ ID NO: 2790685 - RNA, 19 nt, Artificial Sequence
  Description of Artificial Sequence: Synthetic oligonucleotide
cuuaaaugcugugggguuu

SEQ ID NO: 2790686 - RNA, 19 nt, Artificial Sequence
  Description of Artificial Sequence: Synthetic oligonucleotide
ggcugggucgcgguuuugc

SEQ ID NO: 2790687 - RNA, 19 nt, Artificial Sequence
  Description of Artificial Sequence: Synthetic oligonucleotide
cugcagaccugcuuugaau

SEQ ID NO: 2790688 - RNA, 19 nt, Artificial Sequence
  Description of Artificial Sequence: Synthetic oligonucleotide
cuugacugcagaccugcuu

SEQ ID NO: 2790689 - RNA, 19 nt, Artificial Sequence
  Description of Artificial Sequence: Synthetic oligonucleotide
cucucgauguuggguucuc

SEQ ID NO: 2790690 - RNA, 19 nt, Artificial Sequence
  Description of Artificial Sequence: Synthetic oligonucleotide
ggguguccacguuggggug

SEQ ID NO: 2790691 - RNA, 19 nt, Artificial Sequence
  Description of Artificial Sequence: Synthetic oligonucleotide
gcugggcucggcucccuug

SEQ ID NO: 2790692 - RNA, 19 nt, Artificial Sequence
  Description of Artificial Sequence: Synthetic oligonucleotide
agcagggugugaggaacuu

SEQ ID NO: 2790693 - RNA, 19 nt, Artificial Sequence
  Description of Artificial Sequence: Synthetic oligonucleotide
gccggcugcuccauggaug

SEQ ID NO: 2790694 - RNA, 19 nt, Artificial Sequence
  Description of Artificial Sequence: Synthetic oligonucleotide
cggugggugcguuguaagg

SEQ ID NO: 2790695 - RNA, 19 nt, Artificial Sequence
  Description of Artificial Sequence: Synthetic oligonucleotide
ggucgcgguuuugcgaggc

SEQ ID NO: 2790696 - RNA, 19 nt, Artificial Sequence
  Description of Artificial Sequence: Synthetic oligonucleotide
cccauuugaacagguuguc

SEQ ID NO: 2790697 - RNA, 19 nt, Artificial Sequence
  Description of Artificial Sequence: Synthetic oligonucleotide
ggcucucgauguuggguuc

SEQ ID NO: 2790698 - RNA, 19 nt, Artificial Sequence
  Description of Artificial Sequence: Synthetic oligonucleotide
ugcgaacggcugcgacgcu

SEQ ID NO: 2790699 - RNA, 19 nt, Artificial Sequence
  Description of Artificial Sequence: Synthetic oligonucleotide
gcagggugugaggaacuug

SEQ ID NO: 2790700 - RNA, 19 nt, Artificial Sequence
  Description of Artificial Sequence: Synthetic oligonucleotide
gcucccuugcgaacggcug

SEQ ID NO: 2790701 - RNA, 19 nt, Artificial Sequence
  Description of Artificial Sequence: Synthetic oligonucleotide
ugcgacgcuggcggcggcu

SEQ ID NO: 2790702 - RNA, 19 nt, Artificial Sequence
  Description of Artificial Sequence: Synthetic oligonucleotide
ccuugcgaacggcugcgac

SEQ ID NO: 2790703 - RNA, 19 nt, Artificial Sequence
  Description of Artificial Sequence: Synthetic oligonucleotide
auguugcccugggugucca

SEQ ID NO: 2790704 - RNA, 19 nt, Artificial Sequence
  Description of Artificial Sequence: Synthetic oligonucleotide
ggcugcgacgcuggcggcg

SEQ ID NO: 2790705 - RNA, 19 nt, Artificial Sequence
  Description of Artificial Sequence: Synthetic oligonucleotide
caccagacaucaugagggu

SEQ ID NO: 2790706 - RNA, 19 nt, Artificial Sequence
  Description of Artificial Sequence: Synthetic oligonucleotide
ggcucggcucccuugcgaa

SEQ ID NO: 2790707 - RNA, 19 nt, Artificial Sequence
  Description of Artificial Sequence: Synthetic oligonucleotide
gggucgcgguuuugcgagg

SEQ ID NO: 2790708 - RNA, 19 nt, Artificial Sequence
  Description of Artificial Sequence: Synthetic oligonucleotide
agguuuccugcagguacuu

SEQ ID NO: 2790709 - RNA, 19 nt, Artificial Sequence
  Description of Artificial Sequence: Synthetic oligonucleotide
cuccuagcagacucuggau

SEQ ID NO: 2790710 - RNA, 19 nt, Artificial Sequence
  Description of Artificial Sequence: Synthetic oligonucleotide
gcgaacggcugcgacgcug

SEQ ID NO: 2790711 - RNA, 19 nt, Artificial Sequence
  Description of Artificial Sequence: Synthetic oligonucleotide
cccgggagcgcuggcaccg

SEQ ID NO: 2790712 - RNA, 19 nt, Artificial Sequence
  Description of Artificial Sequence: Synthetic oligonucleotide
gcuccauggauggucccca

SEQ ID NO: 2790713 - RNA, 19 nt, Artificial Sequence
  Description of Artificial Sequence: Synthetic oligonucleotide
gugccggcugcuccaugga

SEQ ID NO: 2790714 - RNA, 19 nt, Artificial Sequence
  Description of Artificial Sequence: Synthetic oligonucleotide
cggaccacuuauccuugag

SEQ ID NO: 2790715 - RNA, 19 nt, Artificial Sequence
  Description of Artificial Sequence: Synthetic oligonucleotide
ccuggguguccacguuggg

SEQ ID NO: 2790716 - RNA, 19 nt, Artificial Sequence
  Description of Artificial Sequence: Synthetic oligonucleotide
gaggaacuugacggugggu

SEQ ID NO: 2790717 - RNA, 19 nt, Artificial Sequence
  Description of Artificial Sequence: Synthetic oligonucleotide
gguuuccugcagguacuuc

SEQ ID NO: 2790718 - RNA, 19 nt, Artificial Sequence
  Description of Artificial Sequence: Synthetic oligonucleotide
gccaucccgggagcgcugg

SEQ ID NO: 2790719 - RNA, 19 nt, Artificial Sequence
  Description of Artificial Sequence: Synthetic oligonucleotide
gggcucucgauguuggguu

SEQ ID NO: 2790720 - RNA, 19 nt, Artificial Sequence
  Description of Artificial Sequence: Synthetic oligonucleotide
cugugccggcugcuccaug

SEQ ID NO: 2790721 - RNA, 19 nt, Artificial Sequence
  Description of Artificial Sequence: Synthetic oligonucleotide
acuugacggugggugcguu

SEQ ID NO: 2790722 - RNA, 19 nt, Artificial Sequence
  Description of Artificial Sequence: Synthetic oligonucleotide
ccucaggucuucauauacu

SEQ ID NO: 2790723 - RNA, 19 nt, Artificial Sequence
  Description of Artificial Sequence: Synthetic oligonucleotide
ggaugguccccacccauuu

SEQ ID NO: 2790724 - RNA, 19 nt, Artificial Sequence
  Description of Artificial Sequence: Synthetic oligonucleotide
gcgaggccaucccgggagc

SEQ ID NO: 2790725 - RNA, 19 nt, Artificial Sequence
  Description of Artificial Sequence: Synthetic oligonucleotide
cccacagggccccgggcug

SEQ ID NO: 2790726 - RNA, 19 nt, Artificial Sequence
  Description of Artificial Sequence: Synthetic oligonucleotide
cuuugucaccagacaucau

SEQ ID NO: 2790727 - RNA, 19 nt, Artificial Sequence
  Description of Artificial Sequence: Synthetic oligonucleotide
gggcucggcucccuugcga

SEQ ID NO: 2790728 - RNA, 19 nt, Artificial Sequence
  Description of Artificial Sequence: Synthetic oligonucleotide
ccccacccauuugaacagg

SEQ ID NO: 2790729 - RNA, 19 nt, Artificial Sequence
  Description of Artificial Sequence: Synthetic oligonucleotide
cugcgacgcuggcggcggc

SEQ ID NO: 2790730 - RNA, 19 nt, Artificial Sequence
  Description of Artificial Sequence: Synthetic oligonucleotide
gcggaccacuuauccuuga

SEQ ID NO: 2790731 - RNA, 19 nt, Artificial Sequence
  Description of Artificial Sequence: Synthetic oligonucleotide
ggaaggcggaaaucccuuu

SEQ ID NO: 2790732 - RNA, 19 nt, Artificial Sequence
  Description of Artificial Sequence: Synthetic oligonucleotide
ggacagcaggaugguccug

SEQ ID NO: 2790733 - RNA, 19 nt, Artificial Sequence
  Description of Artificial Sequence: Synthetic oligonucleotide
ggaacucuagugagaguuu

SEQ ID NO: 2790734 - RNA, 19 nt, Artificial Sequence
  Description of Artificial Sequence: Synthetic oligonucleotide
cagacaucaugagggucau

SEQ ID NO: 2790735 - RNA, 19 nt, Artificial Sequence
  Description of Artificial Sequence: Synthetic oligonucleotide
ccacguuggggugguagca

SEQ ID NO: 2790736 - RNA, 19 nt, Artificial Sequence
  Description of Artificial Sequence: Synthetic oligonucleotide
gaccugcuuugaauagguu

SEQ ID NO: 2790737 - RNA, 19 nt, Artificial Sequence
  Description of Artificial Sequence: Synthetic oligonucleotide
guguccacguugggguggu

SEQ ID NO: 2790738 - RNA, 19 nt, Artificial Sequence
  Description of Artificial Sequence: Synthetic oligonucleotide
ggggaacucuagugagagu

SEQ ID NO: 2790739 - RNA, 19 nt, Artificial Sequence
  Description of Artificial Sequence: Synthetic oligonucleotide
gcgguuuugcgaggccauc

SEQ ID NO: 2790740 - RNA, 19 nt, Artificial Sequence
  Description of Artificial Sequence: Synthetic oligonucleotide
gggaaggcggaaaucccuu

SEQ ID NO: 2790741 - RNA, 19 nt, Artificial Sequence
  Description of Artificial Sequence: Synthetic oligonucleotide
cccacccauuugaacaggu

SEQ ID NO: 2790742 - RNA, 19 nt, Artificial Sequence
  Description of Artificial Sequence: Synthetic oligonucleotide
cuguagccucuugcccaca

SEQ ID NO: 2790743 - RNA, 19 nt, Artificial Sequence
  Description of Artificial Sequence: Synthetic oligonucleotide
uguccacguugggguggua

SEQ ID NO: 2790744 - RNA, 19 nt, Artificial Sequence
  Description of Artificial Sequence: Synthetic oligonucleotide
gcucucgauguuggguucu

SEQ ID NO: 2790745 - RNA, 19 nt, Artificial Sequence
  Description of Artificial Sequence: Synthetic oligonucleotide
cagcagcauguguguucaa

SEQ ID NO: 2790746 - RNA, 19 nt, Artificial Sequence
  Description of Artificial Sequence: Synthetic oligonucleotide
ggccaucccgggagcgcug

SEQ ID NO: 2790747 - RNA, 19 nt, Artificial Sequence
  Description of Artificial Sequence: Synthetic oligonucleotide
ccacccauuugaacagguu

SEQ ID NO: 2790748 - RNA, 19 nt, Artificial Sequence
  Description of Artificial Sequence: Synthetic oligonucleotide
gcucagcagcauguguguu

SEQ ID NO: 2790749 - RNA, 19 nt, Artificial Sequence
  Description of Artificial Sequence: Synthetic oligonucleotide
ggcggcugggucgcgguuu

SEQ ID NO: 2790750 - RNA, 19 nt, Artificial Sequence
  Description of Artificial Sequence: Synthetic oligonucleotide
cgcgguuuugcgaggccau

SEQ ID NO: 2790751 - RNA, 19 nt, Artificial Sequence
  Description of Artificial Sequence: Synthetic oligonucleotide
gcggcugggucgcgguuuu

SEQ ID NO: 2790752 - RNA, 19 nt, Artificial Sequence
  Description of Artificial Sequence: Synthetic oligonucleotide
cccuugcgaacggcugcga

SEQ ID NO: 2790753 - RNA, 19 nt, Artificial Sequence
  Description of Artificial Sequence: Synthetic oligonucleotide
cggcugggucgcgguuuug

SEQ ID NO: 2790754 - RNA, 19 nt, Artificial Sequence
  Description of Artificial Sequence: Synthetic oligonucleotide
cgcugggcucggcucccuu

SEQ ID NO: 2790755 - RNA, 19 nt, Artificial Sequence
  Description of Artificial Sequence: Synthetic oligonucleotide
cggcggcugggucgcgguu

SEQ ID NO: 2790756 - RNA, 19 nt, Artificial Sequence
  Description of Artificial Sequence: Synthetic oligonucleotide
uuuaguuugaguaacaagu

SEQ ID NO: 2790757 - RNA, 19 nt, Artificial Sequence
  Description of Artificial Sequence: Synthetic oligonucleotide
acaaaguaaacauugaaag

SEQ ID NO: 2790758 - RNA, 19 nt, Artificial Sequence
  Description of Artificial Sequence: Synthetic oligonucleotide
aaaagacacauauagauaa

SEQ ID NO: 2790759 - RNA, 19 nt, Artificial Sequence
  Description of Artificial Sequence: Synthetic oligonucleotide
uuaaaagacacauauagau

SEQ ID NO: 2790760 - RNA, 19 nt, Artificial Sequence
  Description of Artificial Sequence: Synthetic oligonucleotide
agugcuaaguuacuuaacc

SEQ ID NO: 2790761 - RNA, 19 nt, Artificial Sequence
  Description of Artificial Sequence: Synthetic oligonucleotide
aaguuacuuaaccuggccc

SEQ ID NO: 2790762 - RNA, 19 nt, Artificial Sequence
  Description of Artificial Sequence: Synthetic oligonucleotide
gauacuguuucucauuucg

SEQ ID NO: 2790763 - RNA, 19 nt, Artificial Sequence
  Description of Artificial Sequence: Synthetic oligonucleotide
uucugaaacacccaaacug

SEQ ID NO: 2790764 - RNA, 19 nt, Artificial Sequence
  Description of Artificial Sequence: Synthetic oligonucleotide
agaacuugggcuaagauac

SEQ ID NO: 2790765 - RNA, 19 nt, Artificial Sequence
  Description of Artificial Sequence: Synthetic oligonucleotide
uucuauuaaaccuuguuca

SEQ ID NO: 2790766 - RNA, 19 nt, Artificial Sequence
  Description of Artificial Sequence: Synthetic oligonucleotide
auugaaagguuguaauugc

SEQ ID NO: 2790767 - RNA, 19 nt, Artificial Sequence
  Description of Artificial Sequence: Synthetic oligonucleotide
uuaguaaucgucaucuuca

SEQ ID NO: 2790768 - RNA, 19 nt, Artificial Sequence
  Description of Artificial Sequence: Synthetic oligonucleotide
auagauaauaaacaaagua

SEQ ID NO: 2790769 - RNA, 19 nt, Artificial Sequence
  Description of Artificial Sequence: Synthetic oligonucleotide
auaauaaacaaaguaaaca

SEQ ID NO: 2790770 - RNA, 19 nt, Artificial Sequence
  Description of Artificial Sequence: Synthetic oligonucleotide
uuguaauugcccuagacac

SEQ ID NO: 2790771 - RNA, 19 nt, Artificial Sequence
  Description of Artificial Sequence: Synthetic oligonucleotide
uuaaaccuuguucagacac

SEQ ID NO: 2790772 - RNA, 19 nt, Artificial Sequence
  Description of Artificial Sequence: Synthetic oligonucleotide
uuuucuaggcuucacaagu

SEQ ID NO: 2790773 - RNA, 19 nt, Artificial Sequence
  Description of Artificial Sequence: Synthetic oligonucleotide
aucaccaggauccccaugc

SEQ ID NO: 2790774 - RNA, 19 nt, Artificial Sequence
  Description of Artificial Sequence: Synthetic oligonucleotide
uuucuauuaaaccuuguuc

SEQ ID NO: 2790775 - RNA, 19 nt, Artificial Sequence
  Description of Artificial Sequence: Synthetic oligonucleotide
aguuacuuaaccuggcccg

SEQ ID NO: 2790776 - RNA, 19 nt, Artificial Sequence
  Description of Artificial Sequence: Synthetic oligonucleotide
uucacaagugcuaaguuac

SEQ ID NO: 2790777 - RNA, 19 nt, Artificial Sequence
  Description of Artificial Sequence: Synthetic oligonucleotide
ucuucguccgccaauggcg

SEQ ID NO: 2790778 - RNA, 19 nt, Artificial Sequence
  Description of Artificial Sequence: Synthetic oligonucleotide
uauuaaaccuuguucagac

SEQ ID NO: 2790779 - RNA, 19 nt, Artificial Sequence
  Description of Artificial Sequence: Synthetic oligonucleotide
ucuucuguugaauuuaacu

SEQ ID NO: 2790780 - RNA, 19 nt, Artificial Sequence
  Description of Artificial Sequence: Synthetic oligonucleotide
uugaguaacaaguuuauuu

SEQ ID NO: 2790781 - RNA, 19 nt, Artificial Sequence
  Description of Artificial Sequence: Synthetic oligonucleotide
aacauugaaagguuguaau

SEQ ID NO: 2790782 - RNA, 19 nt, Artificial Sequence
  Description of Artificial Sequence: Synthetic oligonucleotide
aaacaaaguaaacauugaa

SEQ ID NO: 2790783 - RNA, 19 nt, Artificial Sequence
  Description of Artificial Sequence: Synthetic oligonucleotide
ugaaagguuguaauugccc

SEQ ID NO: 2790784 - RNA, 19 nt, Artificial Sequence
  Description of Artificial Sequence: Synthetic oligonucleotide
uguugaauuuaacuguugu

SEQ ID NO: 2790785 - RNA, 19 nt, Artificial Sequence
  Description of Artificial Sequence: Synthetic oligonucleotide
ucuauuaaaccuuguucag

SEQ ID NO: 2790786 - RNA, 19 nt, Artificial Sequence
  Description of Artificial Sequence: Synthetic oligonucleotide
uauaagguaguucuccacu

SEQ ID NO: 2790787 - RNA, 19 nt, Artificial Sequence
  Description of Artificial Sequence: Synthetic oligonucleotide
acauauagauaauaaacaa

SEQ ID NO: 2790788 - RNA, 19 nt, Artificial Sequence
  Description of Artificial Sequence: Synthetic oligonucleotide
uucuguugaauuuaacugu

SEQ ID NO: 2790789 - RNA, 19 nt, Artificial Sequence
  Description of Artificial Sequence: Synthetic oligonucleotide
uguucagacaccuucccgc

SEQ ID NO: 2790790 - RNA, 19 nt, Artificial Sequence
  Description of Artificial Sequence: Synthetic oligonucleotide
ugacugauccagaacuugg

SEQ ID NO: 2790791 - RNA, 19 nt, Artificial Sequence
  Description of Artificial Sequence: Synthetic oligonucleotide
uaaacaaaguaaacauuga

SEQ ID NO: 2790792 - RNA, 19 nt, Artificial Sequence
  Description of Artificial Sequence: Synthetic oligonucleotide
ugggcuaagauacuguuuc

SEQ ID NO: 2790793 - RNA, 19 nt, Artificial Sequence
  Description of Artificial Sequence: Synthetic oligonucleotide
aacaaaguaaacauugaaa

SEQ ID NO: 2790794 - RNA, 19 nt, Artificial Sequence
  Description of Artificial Sequence: Synthetic oligonucleotide
ugaguaacaaguuuauuuu

SEQ ID NO: 2790795 - RNA, 19 nt, Artificial Sequence
  Description of Artificial Sequence: Synthetic oligonucleotide
gaguccaucacuuuucuuc

SEQ ID NO: 2790796 - RNA, 19 nt, Artificial Sequence
  Description of Artificial Sequence: Synthetic oligonucleotide
uugccugugguucugaaac

SEQ ID NO: 2790797 - RNA, 19 nt, Artificial Sequence
  Description of Artificial Sequence: Synthetic oligonucleotide
cacauauagauaauaaaca

SEQ ID NO: 2790798 - RNA, 19 nt, Artificial Sequence
  Description of Artificial Sequence: Synthetic oligonucleotide
uugaauuuaacuguuguuu

SEQ ID NO: 2790799 - RNA, 19 nt, Artificial Sequence
  Description of Artificial Sequence: Synthetic oligonucleotide
cuagacacugcuccgaaag

SEQ ID NO: 2790800 - RNA, 19 nt, Artificial Sequence
  Description of Artificial Sequence: Synthetic oligonucleotide
uaaguuacuuaaccuggcc

SEQ ID NO: 2790801 - RNA, 19 nt, Artificial Sequence
  Description of Artificial Sequence: Synthetic oligonucleotide
cauugaaagguuguaauug

SEQ ID NO: 2790802 - RNA, 19 nt, Artificial Sequence
  Description of Artificial Sequence: Synthetic oligonucleotide
uguuguuucuuuucugucu

SEQ ID NO: 2790803 - RNA, 19 nt, Artificial Sequence
  Description of Artificial Sequence: Synthetic oligonucleotide
uugaaagguuguaauugcc

SEQ ID NO: 2790804 - RNA, 19 nt, Artificial Sequence
  Description of Artificial Sequence: Synthetic oligonucleotide
uugcccuagacacugcucc

SEQ ID NO: 2790805 - RNA, 19 nt, Artificial Sequence
  Description of Artificial Sequence: Synthetic oligonucleotide
agauaauaaacaaaguaaa

SEQ ID NO: 2790806 - RNA, 19 nt, Artificial Sequence
  Description of Artificial Sequence: Synthetic oligonucleotide
uguauaagguaguucucca

SEQ ID NO: 2790807 - RNA, 19 nt, Artificial Sequence
  Description of Artificial Sequence: Synthetic oligonucleotide
uucucaaguauuucuauua

SEQ ID NO: 2790808 - RNA, 19 nt, Artificial Sequence
  Description of Artificial Sequence: Synthetic oligonucleotide
aagguuguaauugcccuag

SEQ ID NO: 2790809 - RNA, 19 nt, Artificial Sequence
  Description of Artificial Sequence: Synthetic oligonucleotide
guuguaauugcccuagaca

SEQ ID NO: 2790810 - RNA, 19 nt, Artificial Sequence
  Description of Artificial Sequence: Synthetic oligonucleotide
ucuucaucggaguccauca

SEQ ID NO: 2790811 - RNA, 19 nt, Artificial Sequence
  Description of Artificial Sequence: Synthetic oligonucleotide
cuuaguaaucgucaucuuc

SEQ ID NO: 2790812 - RNA, 19 nt, Artificial Sequence
  Description of Artificial Sequence: Synthetic oligonucleotide
uaaucgucaucuucaucgg

SEQ ID NO: 2790813 - RNA, 19 nt, Artificial Sequence
  Description of Artificial Sequence: Synthetic oligonucleotide
aauaaacaaaguaaacauu

SEQ ID NO: 2790814 - RNA, 19 nt, Artificial Sequence
  Description of Artificial Sequence: Synthetic oligonucleotide
uuuaagcaucuccucuuag

SEQ ID NO: 2790815 - RNA, 19 nt, Artificial Sequence
  Description of Artificial Sequence: Synthetic oligonucleotide
uaaaccuuguucagacacc

SEQ ID NO: 2790816 - RNA, 19 nt, Artificial Sequence
  Description of Artificial Sequence: Synthetic oligonucleotide
uuaagcaucuccucuuagu

SEQ ID NO: 2790817 - RNA, 19 nt, Artificial Sequence
  Description of Artificial Sequence: Synthetic oligonucleotide
gacacauauagauaauaaa

SEQ ID NO: 2790818 - RNA, 19 nt, Artificial Sequence
  Description of Artificial Sequence: Synthetic oligonucleotide
auaagguaguucuccacug

SEQ ID NO: 2790819 - RNA, 19 nt, Artificial Sequence
  Description of Artificial Sequence: Synthetic oligonucleotide
uaagcaucuccucuuagua

SEQ ID NO: 2790820 - RNA, 19 nt, Artificial Sequence
  Description of Artificial Sequence: Synthetic oligonucleotide
uuaguuugaguaacaaguu

SEQ ID NO: 2790821 - RNA, 19 nt, Artificial Sequence
  Description of Artificial Sequence: Synthetic oligonucleotide
cauauagauaauaaacaaa

SEQ ID NO: 2790822 - RNA, 19 nt, Artificial Sequence
  Description of Artificial Sequence: Synthetic oligonucleotide
auuucuauuaaaccuuguu

SEQ ID NO: 2790823 - RNA, 19 nt, Artificial Sequence
  Description of Artificial Sequence: Synthetic oligonucleotide
aauggcguggccgucccac

SEQ ID NO: 2790824 - RNA, 19 nt, Artificial Sequence
  Description of Artificial Sequence: Synthetic oligonucleotide
cuaaguuacuuaaccuggc

SEQ ID NO: 2790825 - RNA, 19 nt, Artificial Sequence
  Description of Artificial Sequence: Synthetic oligonucleotide
uccgaaagucuguuuaagc

SEQ ID NO: 2790826 - RNA, 19 nt, Artificial Sequence
  Description of Artificial Sequence: Synthetic oligonucleotide
ucucaaguauuucuauuaa

SEQ ID NO: 2790827 - RNA, 19 nt, Artificial Sequence
  Description of Artificial Sequence: Synthetic oligonucleotide
uucuaggcuucacaagugc

SEQ ID NO: 2790828 - RNA, 19 nt, Artificial Sequence
  Description of Artificial Sequence: Synthetic oligonucleotide
uacuguuucucauuucggu

SEQ ID NO: 2790829 - RNA, 19 nt, Artificial Sequence
  Description of Artificial Sequence: Synthetic oligonucleotide
uaagguaguucuccacugc

SEQ ID NO: 2790830 - RNA, 19 nt, Artificial Sequence
  Description of Artificial Sequence: Synthetic oligonucleotide
uuagcuguccguaccgcgc

SEQ ID NO: 2790831 - RNA, 19 nt, Artificial Sequence
  Description of Artificial Sequence: Synthetic oligonucleotide
uuucuaggcuucacaagug

SEQ ID NO: 2790832 - RNA, 19 nt, Artificial Sequence
  Description of Artificial Sequence: Synthetic oligonucleotide
aauugcccuagacacugcu

SEQ ID NO: 2790833 - RNA, 19 nt, Artificial Sequence
  Description of Artificial Sequence: Synthetic oligonucleotide
aaacauugaaagguuguaa

SEQ ID NO: 2790834 - RNA, 19 nt, Artificial Sequence
  Description of Artificial Sequence: Synthetic oligonucleotide
ucuguugaauuuaacuguu

SEQ ID NO: 2790835 - RNA, 19 nt, Artificial Sequence
  Description of Artificial Sequence: Synthetic oligonucleotide
guaauugcccuagacacug

SEQ ID NO: 2790836 - RNA, 19 nt, Artificial Sequence
  Description of Artificial Sequence: Synthetic oligonucleotide
acugcuuuaguuugaguaa

SEQ ID NO: 2790837 - RNA, 19 nt, Artificial Sequence
  Description of Artificial Sequence: Synthetic oligonucleotide
aggauccccaugcuuggcc

SEQ ID NO: 2790838 - RNA, 19 nt, Artificial Sequence
  Description of Artificial Sequence: Synthetic oligonucleotide
uucgguuucccuuugcuuu

SEQ ID NO: 2790839 - RNA, 19 nt, Artificial Sequence
  Description of Artificial Sequence: Synthetic oligonucleotide
gcuaaguuacuuaaccugg

SEQ ID NO: 2790840 - RNA, 19 nt, Artificial Sequence
  Description of Artificial Sequence: Synthetic oligonucleotide
ucuaggcuucacaagugcu

SEQ ID NO: 2790841 - RNA, 19 nt, Artificial Sequence
  Description of Artificial Sequence: Synthetic oligonucleotide
uucaucggaguccaucacu

SEQ ID NO: 2790842 - RNA, 19 nt, Artificial Sequence
  Description of Artificial Sequence: Synthetic oligonucleotide
ucuccucuuaguaaucguc

SEQ ID NO: 2790843 - RNA, 19 nt, Artificial Sequence
  Description of Artificial Sequence: Synthetic oligonucleotide
ugauccagaacuugggcua

SEQ ID NO: 2790844 - RNA, 19 nt, Artificial Sequence
  Description of Artificial Sequence: Synthetic oligonucleotide
gaaagucuguuuaagcauc

SEQ ID NO: 2790845 - RNA, 19 nt, Artificial Sequence
  Description of Artificial Sequence: Synthetic oligonucleotide
agcaucuccucuuaguaau

SEQ ID NO: 2790846 - RNA, 19 nt, Artificial Sequence
  Description of Artificial Sequence: Synthetic oligonucleotide
cuuagcuguccguaccgcg

SEQ ID NO: 2790847 - RNA, 19 nt, Artificial Sequence
  Description of Artificial Sequence: Synthetic oligonucleotide
ucucauuucgguuucccuu

SEQ ID NO: 2790848 - RNA, 19 nt, Artificial Sequence
  Description of Artificial Sequence: Synthetic oligonucleotide
aguccaucacuuuucuucu

SEQ ID NO: 2790849 - RNA, 19 nt, Artificial Sequence
  Description of Artificial Sequence: Synthetic oligonucleotide
aaagguuguaauugcccua

SEQ ID NO: 2790850 - RNA, 19 nt, Artificial Sequence
  Description of Artificial Sequence: Synthetic oligonucleotide
aguaaacauugaaagguug

SEQ ID NO: 2790851 - RNA, 19 nt, Artificial Sequence
  Description of Artificial Sequence: Synthetic oligonucleotide
aagacacauauagauaaua

SEQ ID NO: 2790852 - RNA, 19 nt, Artificial Sequence
  Description of Artificial Sequence: Synthetic oligonucleotide
aagugcuaaguuacuuaac

SEQ ID NO: 2790853 - RNA, 19 nt, Artificial Sequence
  Description of Artificial Sequence: Synthetic oligonucleotide
uauuucuauuaaaccuugu

SEQ ID NO: 2790854 - RNA, 19 nt, Artificial Sequence
  Description of Artificial Sequence: Synthetic oligonucleotide
uaguuugaguaacaaguuu

SEQ ID NO: 2790855 - RNA, 19 nt, Artificial Sequence
  Description of Artificial Sequence: Synthetic oligonucleotide
ugcuccgaaagucuguuua

SEQ ID NO: 2790856 - RNA, 19 nt, Artificial Sequence
  Description of Artificial Sequence: Synthetic oligonucleotide
gaaagguuguaauugcccu

SEQ ID NO: 2790857 - RNA, 19 nt, Artificial Sequence
  Description of Artificial Sequence: Synthetic oligonucleotide
agauacuguuucucauuuc

SEQ ID NO: 2790858 - RNA, 19 nt, Artificial Sequence
  Description of Artificial Sequence: Synthetic oligonucleotide
gguucugaaacacccaaac

SEQ ID NO: 2790859 - RNA, 19 nt, Artificial Sequence
  Description of Artificial Sequence: Synthetic oligonucleotide
uuccuguugggcugcauca

SEQ ID NO: 2790860 - RNA, 19 nt, Artificial Sequence
  Description of Artificial Sequence: Synthetic oligonucleotide
aagcaucuccucuuaguaa

SEQ ID NO: 2790861 - RNA, 19 nt, Artificial Sequence
  Description of Artificial Sequence: Synthetic oligonucleotide
cuuguucagacaccuuccc

SEQ ID NO: 2790862 - RNA, 19 nt, Artificial Sequence
  Description of Artificial Sequence: Synthetic oligonucleotide
acauugaaagguuguaauu

SEQ ID NO: 2790863 - RNA, 19 nt, Artificial Sequence
  Description of Artificial Sequence: Synthetic oligonucleotide
agacacugcuccgaaaguc

SEQ ID NO: 2790864 - RNA, 19 nt, Artificial Sequence
  Description of Artificial Sequence: Synthetic oligonucleotide
uaaacauugaaagguugua

SEQ ID NO: 2790865 - RNA, 19 nt, Artificial Sequence
  Description of Artificial Sequence: Synthetic oligonucleotide
uuucucaaguauuucuauu

SEQ ID NO: 2790866 - RNA, 19 nt, Artificial Sequence
  Description of Artificial Sequence: Synthetic oligonucleotide
ugcuuuaguuugaguaaca

SEQ ID NO: 2790867 - RNA, 19 nt, Artificial Sequence
  Description of Artificial Sequence: Synthetic oligonucleotide
aacacccaaacugcuuuag

SEQ ID NO: 2790868 - RNA, 19 nt, Artificial Sequence
  Description of Artificial Sequence: Synthetic oligonucleotide
uccgccaauggcguggccg

SEQ ID NO: 2790869 - RNA, 19 nt, Artificial Sequence
  Description of Artificial Sequence: Synthetic oligonucleotide
aucuucaucggaguccauc

SEQ ID NO: 2790870 - RNA, 19 nt, Artificial Sequence
  Description of Artificial Sequence: Synthetic oligonucleotide
aucgucaucuucaucggag

SEQ ID NO: 2790871 - RNA, 19 nt, Artificial Sequence
  Description of Artificial Sequence: Synthetic oligonucleotide
gaauuuaacuguuguuucu

SEQ ID NO: 2790872 - RNA, 19 nt, Artificial Sequence
  Description of Artificial Sequence: Synthetic oligonucleotide
ucaucggaguccaucacuu

SEQ ID NO: 2790873 - RNA, 19 nt, Artificial Sequence
  Description of Artificial Sequence: Synthetic oligonucleotide
gacuuucucaaguauuucu

SEQ ID NO: 2790874 - RNA, 19 nt, Artificial Sequence
  Description of Artificial Sequence: Synthetic oligonucleotide
guauaagguaguucuccac

SEQ ID NO: 2790875 - RNA, 19 nt, Artificial Sequence
  Description of Artificial Sequence: Synthetic oligonucleotide
cuuuucugucuguuggcug

SEQ ID NO: 2790876 - RNA, 19 nt, Artificial Sequence
  Description of Artificial Sequence: Synthetic oligonucleotide
ugaaacacccaaacugcuu

SEQ ID NO: 2790877 - RNA, 19 nt, Artificial Sequence
  Description of Artificial Sequence: Synthetic oligonucleotide
acuguuucucauuucgguu

SEQ ID NO: 2790878 - RNA, 19 nt, Artificial Sequence
  Description of Artificial Sequence: Synthetic oligonucleotide
acaccuucccgcuuagcug

SEQ ID NO: 2790879 - RNA, 19 nt, Artificial Sequence
  Description of Artificial Sequence: Synthetic oligonucleotide
aaagucuguuuaagcaucu

SEQ ID NO: 2790880 - RNA, 19 nt, Artificial Sequence
  Description of Artificial Sequence: Synthetic oligonucleotide
guuacuuaaccuggcccgg

SEQ ID NO: 2790881 - RNA, 19 nt, Artificial Sequence
  Description of Artificial Sequence: Synthetic oligonucleotide
ugucuguuggcugacuuuc

SEQ ID NO: 2790882 - RNA, 19 nt, Artificial Sequence
  Description of Artificial Sequence: Synthetic oligonucleotide
uuucucauuucgguuuccc

SEQ ID NO: 2790883 - RNA, 19 nt, Artificial Sequence
  Description of Artificial Sequence: Synthetic oligonucleotide
caucuccucuuaguaaucg

SEQ ID NO: 2790884 - RNA, 19 nt, Artificial Sequence
  Description of Artificial Sequence: Synthetic oligonucleotide
ucagacaccuucccgcuua

SEQ ID NO: 2790885 - RNA, 19 nt, Artificial Sequence
  Description of Artificial Sequence: Synthetic oligonucleotide
auacuguuucucauuucgg

SEQ ID NO: 2790886 - RNA, 19 nt, Artificial Sequence
  Description of Artificial Sequence: Synthetic oligonucleotide
ucggaguccaucacuuuuc

SEQ ID NO: 2790887 - RNA, 19 nt, Artificial Sequence
  Description of Artificial Sequence: Synthetic oligonucleotide
uacuuaaccuggcccgggc

SEQ ID NO: 2790888 - RNA, 19 nt, Artificial Sequence
  Description of Artificial Sequence: Synthetic oligonucleotide
uucucauuucgguuucccu

SEQ ID NO: 2790889 - RNA, 19 nt, Artificial Sequence
  Description of Artificial Sequence: Synthetic oligonucleotide
guugggcugcaucaccagg

SEQ ID NO: 2790890 - RNA, 19 nt, Artificial Sequence
  Description of Artificial Sequence: Synthetic oligonucleotide
ucuguuggcugacuuucuc

SEQ ID NO: 2790891 - RNA, 19 nt, Artificial Sequence
  Description of Artificial Sequence: Synthetic oligonucleotide
agacacauauagauaauaa

SEQ ID NO: 2790892 - RNA, 19 nt, Artificial Sequence
  Description of Artificial Sequence: Synthetic oligonucleotide
aagucuguuuaagcaucuc

SEQ ID NO: 2790893 - RNA, 19 nt, Artificial Sequence
  Description of Artificial Sequence: Synthetic oligonucleotide
caagugcuaaguuacuuaa

SEQ ID NO: 2790894 - RNA, 19 nt, Artificial Sequence
  Description of Artificial Sequence: Synthetic oligonucleotide
uuacuuaaccuggcccggg

SEQ ID NO: 2790895 - RNA, 19 nt, Artificial Sequence
  Description of Artificial Sequence: Synthetic oligonucleotide
ucacuuuucuucuguugaa

SEQ ID NO: 2790896 - RNA, 19 nt, Artificial Sequence
  Description of Artificial Sequence: Synthetic oligonucleotide
ucgguuucccuuugcuuug

SEQ ID NO: 2790897 - RNA, 19 nt, Artificial Sequence
  Description of Artificial Sequence: Synthetic oligonucleotide
cucuucguccgccaauggc

SEQ ID NO: 2790898 - RNA, 19 nt, Artificial Sequence
  Description of Artificial Sequence: Synthetic oligonucleotide
cuguugaauuuaacuguug

SEQ ID NO: 2790899 - RNA, 19 nt, Artificial Sequence
  Description of Artificial Sequence: Synthetic oligonucleotide
cuuaaccuggcccgggcug

SEQ ID NO: 2790900 - RNA, 19 nt, Artificial Sequence
  Description of Artificial Sequence: Synthetic oligonucleotide
ugcccuagacacugcuccg

SEQ ID NO: 2790901 - RNA, 19 nt, Artificial Sequence
  Description of Artificial Sequence: Synthetic oligonucleotide
ucugucuguuggcugacuu

SEQ ID NO: 2790902 - RNA, 19 nt, Artificial Sequence
  Description of Artificial Sequence: Synthetic oligonucleotide
ucauuucgguuucccuuug

SEQ ID NO: 2790903 - RNA, 19 nt, Artificial Sequence
  Description of Artificial Sequence: Synthetic oligonucleotide
cuccucuuaguaaucguca

SEQ ID NO: 2790904 - RNA, 19 nt, Artificial Sequence
  Description of Artificial Sequence: Synthetic oligonucleotide
gaaacacccaaacugcuuu

SEQ ID NO: 2790905 - RNA, 19 nt, Artificial Sequence
  Description of Artificial Sequence: Synthetic oligonucleotide
cagaacuugggcuaagaua

SEQ ID NO: 2790906 - RNA, 19 nt, Artificial Sequence
  Description of Artificial Sequence: Synthetic oligonucleotide
aaacacccaaacugcuuua

SEQ ID NO: 2790907 - RNA, 19 nt, Artificial Sequence
  Description of Artificial Sequence: Synthetic oligonucleotide
uccucuuaguaaucgucau

SEQ ID NO: 2790908 - RNA, 19 nt, Artificial Sequence
  Description of Artificial Sequence: Synthetic oligonucleotide
gguuguaauugcccuagac

SEQ ID NO: 2790909 - RNA, 19 nt, Artificial Sequence
  Description of Artificial Sequence: Synthetic oligonucleotide
cugcuuuaguuugaguaac

SEQ ID NO: 2790910 - RNA, 19 nt, Artificial Sequence
  Description of Artificial Sequence: Synthetic oligonucleotide
uaccgcgccaucuguauaa

SEQ ID NO: 2790911 - RNA, 19 nt, Artificial Sequence
  Description of Artificial Sequence: Synthetic oligonucleotide
uuucgguuucccuuugcuu

SEQ ID NO: 2790912 - RNA, 19 nt, Artificial Sequence
  Description of Artificial Sequence: Synthetic oligonucleotide
uagcuguccguaccgcgcc

SEQ ID NO: 2790913 - RNA, 19 nt, Artificial Sequence
  Description of Artificial Sequence: Synthetic oligonucleotide
aucggaguccaucacuuuu

SEQ ID NO: 2790914 - RNA, 19 nt, Artificial Sequence
  Description of Artificial Sequence: Synthetic oligonucleotide
gacaccuucccgcuuagcu

SEQ ID NO: 2790915 - RNA, 19 nt, Artificial Sequence
  Description of Artificial Sequence: Synthetic oligonucleotide
cucuuaguaaucgucaucu

SEQ ID NO: 2790916 - RNA, 19 nt, Artificial Sequence
  Description of Artificial Sequence: Synthetic oligonucleotide
uaggcuucacaagugcuaa

SEQ ID NO: 2790917 - RNA, 19 nt, Artificial Sequence
  Description of Artificial Sequence: Synthetic oligonucleotide
ugguucugaaacacccaaa

SEQ ID NO: 2790918 - RNA, 19 nt, Artificial Sequence
  Description of Artificial Sequence: Synthetic oligonucleotide
cuauuaaaccuuguucaga

SEQ ID NO: 2790919 - RNA, 19 nt, Artificial Sequence
  Description of Artificial Sequence: Synthetic oligonucleotide
guuggcugacuuucucaag

SEQ ID NO: 2790920 - RNA, 19 nt, Artificial Sequence
  Description of Artificial Sequence: Synthetic oligonucleotide
cucaaguauuucuauuaaa

SEQ ID NO: 2790921 - RNA, 19 nt, Artificial Sequence
  Description of Artificial Sequence: Synthetic oligonucleotide
cuuccuguugggcugcauc

SEQ ID NO: 2790922 - RNA, 19 nt, Artificial Sequence
  Description of Artificial Sequence: Synthetic oligonucleotide
ucguccgccaauggcgugg

SEQ ID NO: 2790923 - RNA, 19 nt, Artificial Sequence
  Description of Artificial Sequence: Synthetic oligonucleotide
uugggcuaagauacuguuu

SEQ ID NO: 2790924 - RNA, 19 nt, Artificial Sequence
  Description of Artificial Sequence: Synthetic oligonucleotide
uaguaaucgucaucuucau

SEQ ID NO: 2790925 - RNA, 19 nt, Artificial Sequence
  Description of Artificial Sequence: Synthetic oligonucleotide
aucuccucuuaguaaucgu

SEQ ID NO: 2790926 - RNA, 19 nt, Artificial Sequence
  Description of Artificial Sequence: Synthetic oligonucleotide
guaaacauugaaagguugu

SEQ ID NO: 2790927 - RNA, 19 nt, Artificial Sequence
  Description of Artificial Sequence: Synthetic oligonucleotide
cuucccgcuuagcuguccg

SEQ ID NO: 2790928 - RNA, 19 nt, Artificial Sequence
  Description of Artificial Sequence: Synthetic oligonucleotide
cugacugauccagaacuug

SEQ ID NO: 2790929 - RNA, 19 nt, Artificial Sequence
  Description of Artificial Sequence: Synthetic oligonucleotide
uaauugcccuagacacugc

SEQ ID NO: 2790930 - RNA, 19 nt, Artificial Sequence
  Description of Artificial Sequence: Synthetic oligonucleotide
cccaaacugcuuuaguuug

SEQ ID NO: 2790931 - RNA, 19 nt, Artificial Sequence
  Description of Artificial Sequence: Synthetic oligonucleotide
ugcuuggccugcagcuccg

SEQ ID NO: 2790932 - RNA, 19 nt, Artificial Sequence
  Description of Artificial Sequence: Synthetic oligonucleotide
acuuaaccuggcccgggcu

SEQ ID NO: 2790933 - RNA, 19 nt, Artificial Sequence
  Description of Artificial Sequence: Synthetic oligonucleotide
uuaaccuggcccgggcuga

SEQ ID NO: 2790934 - RNA, 19 nt, Artificial Sequence
  Description of Artificial Sequence: Synthetic oligonucleotide
caucuguauaagguaguuc

SEQ ID NO: 2790935 - RNA, 19 nt, Artificial Sequence
  Description of Artificial Sequence: Synthetic oligonucleotide
auugcccuagacacugcuc

SEQ ID NO: 2790936 - RNA, 19 nt, Artificial Sequence
  Description of Artificial Sequence: Synthetic oligonucleotide
ugacuuucucaaguauuuc

SEQ ID NO: 2790937 - RNA, 19 nt, Artificial Sequence
  Description of Artificial Sequence: Synthetic oligonucleotide
cuccgaaagucuguuuaag

SEQ ID NO: 2790938 - RNA, 19 nt, Artificial Sequence
  Description of Artificial Sequence: Synthetic oligonucleotide
ccgaaagucuguuuaagca

SEQ ID NO: 2790939 - RNA, 19 nt, Artificial Sequence
  Description of Artificial Sequence: Synthetic oligonucleotide
cauuucgguuucccuuugc

SEQ ID NO: 2790940 - RNA, 19 nt, Artificial Sequence
  Description of Artificial Sequence: Synthetic oligonucleotide
ucuuaguaaucgucaucuu

SEQ ID NO: 2790941 - RNA, 19 nt, Artificial Sequence
  Description of Artificial Sequence: Synthetic oligonucleotide
ugccugugguucugaaaca

SEQ ID NO: 2790942 - RNA, 19 nt, Artificial Sequence
  Description of Artificial Sequence: Synthetic oligonucleotide
cuucaucggaguccaucac

SEQ ID NO: 2790943 - RNA, 19 nt, Artificial Sequence
  Description of Artificial Sequence: Synthetic oligonucleotide
gucuguuuaagcaucuccu

SEQ ID NO: 2790944 - RNA, 19 nt, Artificial Sequence
  Description of Artificial Sequence: Synthetic oligonucleotide
agcgccucgagcucuucgu

SEQ ID NO: 2790945 - RNA, 19 nt, Artificial Sequence
  Description of Artificial Sequence: Synthetic oligonucleotide
cuaggcuucacaagugcua

SEQ ID NO: 2790946 - RNA, 19 nt, Artificial Sequence
  Description of Artificial Sequence: Synthetic oligonucleotide
cugauccagaacuugggcu

SEQ ID NO: 2790947 - RNA, 19 nt, Artificial Sequence
  Description of Artificial Sequence: Synthetic oligonucleotide
uccguaccgcgccaucugu

SEQ ID NO: 2790948 - RNA, 19 nt, Artificial Sequence
  Description of Artificial Sequence: Synthetic oligonucleotide
cuguuggcugacuuucuca

SEQ ID NO: 2790949 - RNA, 19 nt, Artificial Sequence
  Description of Artificial Sequence: Synthetic oligonucleotide
ggcugacugauccagaacu

SEQ ID NO: 2790950 - RNA, 19 nt, Artificial Sequence
  Description of Artificial Sequence: Synthetic oligonucleotide
gauccccaugcuuggccug

SEQ ID NO: 2790951 - RNA, 19 nt, Artificial Sequence
  Description of Artificial Sequence: Synthetic oligonucleotide
cuaagauacuguuucucau

SEQ ID NO: 2790952 - RNA, 19 nt, Artificial Sequence
  Description of Artificial Sequence: Synthetic oligonucleotide
guucugaaacacccaaacu

SEQ ID NO: 2790953 - RNA, 19 nt, Artificial Sequence
  Description of Artificial Sequence: Synthetic oligonucleotide
uggcugacuuucucaagua

SEQ ID NO: 2790954 - RNA, 19 nt, Artificial Sequence
  Description of Artificial Sequence: Synthetic oligonucleotide
uguccguaccgcgccaucu

SEQ ID NO: 2790955 - RNA, 19 nt, Artificial Sequence
  Description of Artificial Sequence: Synthetic oligonucleotide
aggcuucacaagugcuaag

SEQ ID NO: 2790956 - RNA, 19 nt, Artificial Sequence
  Description of Artificial Sequence: Synthetic oligonucleotide
ugggcugcaucaccaggau

SEQ ID NO: 2790957 - RNA, 19 nt, Artificial Sequence
  Description of Artificial Sequence: Synthetic oligonucleotide
accuggcccgggcugacug

SEQ ID NO: 2790958 - RNA, 19 nt, Artificial Sequence
  Description of Artificial Sequence: Synthetic oligonucleotide
auggcguggccgucccacg

SEQ ID NO: 2790959 - RNA, 19 nt, Artificial Sequence
  Description of Artificial Sequence: Synthetic oligonucleotide
gacacugcuccgaaagucu

SEQ ID NO: 2790960 - RNA, 19 nt, Artificial Sequence
  Description of Artificial Sequence: Synthetic oligonucleotide
ccugugguucugaaacacc

SEQ ID NO: 2790961 - RNA, 19 nt, Artificial Sequence
  Description of Artificial Sequence: Synthetic oligonucleotide
uuucugucuguuggcugac

SEQ ID NO: 2790962 - RNA, 19 nt, Artificial Sequence
  Description of Artificial Sequence: Synthetic oligonucleotide
ucgagcucuucguccgcca

SEQ ID NO: 2790963 - RNA, 19 nt, Artificial Sequence
  Description of Artificial Sequence: Synthetic oligonucleotide
guggccgucccacgucgcg

SEQ ID NO: 2790964 - RNA, 19 nt, Artificial Sequence
  Description of Artificial Sequence: Synthetic oligonucleotide
cgccaucuguauaagguag

SEQ ID NO: 2790965 - RNA, 19 nt, Artificial Sequence
  Description of Artificial Sequence: Synthetic oligonucleotide
agacaccuucccgcuuagc

SEQ ID NO: 2790966 - RNA, 19 nt, Artificial Sequence
  Description of Artificial Sequence: Synthetic oligonucleotide
uccuguugggcugcaucac

SEQ ID NO: 2790967 - RNA, 19 nt, Artificial Sequence
  Description of Artificial Sequence: Synthetic oligonucleotide
cuuccgcagcgccucgagc

SEQ ID NO: 2790968 - RNA, 19 nt, Artificial Sequence
  Description of Artificial Sequence: Synthetic oligonucleotide
ggcccgggcugacugaucc

SEQ ID NO: 2790969 - RNA, 19 nt, Artificial Sequence
  Description of Artificial Sequence: Synthetic oligonucleotide
guccguaccgcgccaucug

SEQ ID NO: 2790970 - RNA, 19 nt, Artificial Sequence
  Description of Artificial Sequence: Synthetic oligonucleotide
acugcuccgaaagucuguu

SEQ ID NO: 2790971 - RNA, 19 nt, Artificial Sequence
  Description of Artificial Sequence: Synthetic oligonucleotide
cugaaacacccaaacugcu

SEQ ID NO: 2790972 - RNA, 19 nt, Artificial Sequence
  Description of Artificial Sequence: Synthetic oligonucleotide
agguuguaauugcccuaga

SEQ ID NO: 2790973 - RNA, 19 nt, Artificial Sequence
  Description of Artificial Sequence: Synthetic oligonucleotide
uggcguggccgucccacgu

SEQ ID NO: 2790974 - RNA, 19 nt, Artificial Sequence
  Description of Artificial Sequence: Synthetic oligonucleotide
uucguccgccaauggcgug

SEQ ID NO: 2790975 - RNA, 19 nt, Artificial Sequence
  Description of Artificial Sequence: Synthetic oligonucleotide
cagcgccucgagcucuucg

SEQ ID NO: 2790976 - RNA, 19 nt, Artificial Sequence
  Description of Artificial Sequence: Synthetic oligonucleotide
cucgagcucuucguccgcc

SEQ ID NO: 2790977 - RNA, 19 nt, Artificial Sequence
  Description of Artificial Sequence: Synthetic oligonucleotide
caugcuuggccugcagcuc

SEQ ID NO: 2790978 - RNA, 19 nt, Artificial Sequence
  Description of Artificial Sequence: Synthetic oligonucleotide
gauccagaacuugggcuaa

SEQ ID NO: 2790979 - RNA, 19 nt, Artificial Sequence
  Description of Artificial Sequence: Synthetic oligonucleotide
ccuguugggcugcaucacc

SEQ ID NO: 2790980 - RNA, 19 nt, Artificial Sequence
  Description of Artificial Sequence: Synthetic oligonucleotide
caccuucccgcuuagcugu

SEQ ID NO: 2790981 - RNA, 19 nt, Artificial Sequence
  Description of Artificial Sequence: Synthetic oligonucleotide
uucccgcuuagcuguccgu

SEQ ID NO: 2790982 - RNA, 19 nt, Artificial Sequence
  Description of Artificial Sequence: Synthetic oligonucleotide
cuugggcuaagauacuguu

SEQ ID NO: 2790983 - RNA, 19 nt, Artificial Sequence
  Description of Artificial Sequence: Synthetic oligonucleotide
cucauuucgguuucccuuu

SEQ ID NO: 2790984 - RNA, 19 nt, Artificial Sequence
  Description of Artificial Sequence: Synthetic oligonucleotide
cagacaccuucccgcuuag

SEQ ID NO: 2790985 - RNA, 19 nt, Artificial Sequence
  Description of Artificial Sequence: Synthetic oligonucleotide
gcuuuaguuugaguaacaa

SEQ ID NO: 2790986 - RNA, 19 nt, Artificial Sequence
  Description of Artificial Sequence: Synthetic oligonucleotide
ccucuuaguaaucgucauc

SEQ ID NO: 2790987 - RNA, 19 nt, Artificial Sequence
  Description of Artificial Sequence: Synthetic oligonucleotide
uggccgucccacgucgcgc

SEQ ID NO: 2790988 - RNA, 19 nt, Artificial Sequence
  Description of Artificial Sequence: Synthetic oligonucleotide
uucugucuguuggcugacu

SEQ ID NO: 2790989 - RNA, 19 nt, Artificial Sequence
  Description of Artificial Sequence: Synthetic oligonucleotide
gcucuucguccgccaaugg

SEQ ID NO: 2790990 - RNA, 19 nt, Artificial Sequence
  Description of Artificial Sequence: Synthetic oligonucleotide
accgcgccaucuguauaag

SEQ ID NO: 2790991 - RNA, 19 nt, Artificial Sequence
  Description of Artificial Sequence: Synthetic oligonucleotide
gccugugguucugaaacac

SEQ ID NO: 2790992 - RNA, 19 nt, Artificial Sequence
  Description of Artificial Sequence: Synthetic oligonucleotide
cccaugcuuggccugcagc

SEQ ID NO: 2790993 - RNA, 19 nt, Artificial Sequence
  Description of Artificial Sequence: Synthetic oligonucleotide
gcguggccgucccacgucg

SEQ ID NO: 2790994 - RNA, 19 nt, Artificial Sequence
  Description of Artificial Sequence: Synthetic oligonucleotide
cuucguccgccaauggcgu

SEQ ID NO: 2790995 - RNA, 19 nt, Artificial Sequence
  Description of Artificial Sequence: Synthetic oligonucleotide
gcuccgaaagucuguuuaa

SEQ ID NO: 2790996 - RNA, 19 nt, Artificial Sequence
  Description of Artificial Sequence: Synthetic oligonucleotide
caggauccccaugcuuggc

SEQ ID NO: 2790997 - RNA, 19 nt, Artificial Sequence
  Description of Artificial Sequence: Synthetic oligonucleotide
cgcuuagcuguccguaccg

SEQ ID NO: 2790998 - RNA, 19 nt, Artificial Sequence
  Description of Artificial Sequence: Synthetic oligonucleotide
agcuguccguaccgcgcca

SEQ ID NO: 2790999 - RNA, 19 nt, Artificial Sequence
  Description of Artificial Sequence: Synthetic oligonucleotide
gcuuugcuuccuguugggc

SEQ ID NO: 2791000 - RNA, 19 nt, Artificial Sequence
  Description of Artificial Sequence: Synthetic oligonucleotide
ccgcuuagcuguccguacc

SEQ ID NO: 2791001 - RNA, 19 nt, Artificial Sequence
  Description of Artificial Sequence: Synthetic oligonucleotide
aaccuuguucagacaccuu

SEQ ID NO: 2791002 - RNA, 19 nt, Artificial Sequence
  Description of Artificial Sequence: Synthetic oligonucleotide
gcuuagcuguccguaccgc

SEQ ID NO: 2791003 - RNA, 19 nt, Artificial Sequence
  Description of Artificial Sequence: Synthetic oligonucleotide
cugcuuccgcagcgccucg

SEQ ID NO: 2791004 - RNA, 19 nt, Artificial Sequence
  Description of Artificial Sequence: Synthetic oligonucleotide
uaaccuggcccgggcugac

SEQ ID NO: 2791005 - RNA, 19 nt, Artificial Sequence
  Description of Artificial Sequence: Synthetic oligonucleotide
ugcuuccgcagcgccucga

SEQ ID NO: 2791006 - RNA, 19 nt, Artificial Sequence
  Description of Artificial Sequence: Synthetic oligonucleotide
gccaauggcguggccgucc

SEQ ID NO: 2791007 - RNA, 19 nt, Artificial Sequence
  Description of Artificial Sequence: Synthetic oligonucleotide
gcgccaucuguauaaggua

SEQ ID NO: 2791008 - RNA, 19 nt, Artificial Sequence
  Description of Artificial Sequence: Synthetic oligonucleotide
gaacuugggcuaagauacu

SEQ ID NO: 2791009 - RNA, 19 nt, Artificial Sequence
  Description of Artificial Sequence: Synthetic oligonucleotide
aaccuggcccgggcugacu

SEQ ID NO: 2791010 - RNA, 19 nt, Artificial Sequence
  Description of Artificial Sequence: Synthetic oligonucleotide
cuguccguaccgcgccauc

SEQ ID NO: 2791011 - RNA, 19 nt, Artificial Sequence
  Description of Artificial Sequence: Synthetic oligonucleotide
ggauccccaugcuuggccu

SEQ ID NO: 2791012 - RNA, 19 nt, Artificial Sequence
  Description of Artificial Sequence: Synthetic oligonucleotide
guaccgcgccaucuguaua

SEQ ID NO: 2791013 - RNA, 19 nt, Artificial Sequence
  Description of Artificial Sequence: Synthetic oligonucleotide
cgaaagucuguuuaagcau

SEQ ID NO: 2791014 - RNA, 19 nt, Artificial Sequence
  Description of Artificial Sequence: Synthetic oligonucleotide
ccgcgccaucuguauaagg

SEQ ID NO: 2791015 - RNA, 19 nt, Artificial Sequence
  Description of Artificial Sequence: Synthetic oligonucleotide
gagcucuucguccgccaau

SEQ ID NO: 2791016 - RNA, 19 nt, Artificial Sequence
  Description of Artificial Sequence: Synthetic oligonucleotide
cgccucgagcucuucgucc

SEQ ID NO: 2791017 - RNA, 19 nt, Artificial Sequence
  Description of Artificial Sequence: Synthetic oligonucleotide
gcugacuuucucaaguauu

SEQ ID NO: 2791018 - RNA, 19 nt, Artificial Sequence
  Description of Artificial Sequence: Synthetic oligonucleotide
cacugcuccgaaagucugu

SEQ ID NO: 2791019 - RNA, 19 nt, Artificial Sequence
  Description of Artificial Sequence: Synthetic oligonucleotide
accuucccgcuuagcuguc

SEQ ID NO: 2791020 - RNA, 19 nt, Artificial Sequence
  Description of Artificial Sequence: Synthetic oligonucleotide
cugucuguuggcugacuuu

SEQ ID NO: 2791021 - RNA, 19 nt, Artificial Sequence
  Description of Artificial Sequence: Synthetic oligonucleotide
ggcugacuuucucaaguau

SEQ ID NO: 2791022 - RNA, 19 nt, Artificial Sequence
  Description of Artificial Sequence: Synthetic oligonucleotide
gcuucacaagugcuaaguu

SEQ ID NO: 2791023 - RNA, 19 nt, Artificial Sequence
  Description of Artificial Sequence: Synthetic oligonucleotide
uggcccgggcugacugauc

SEQ ID NO: 2791024 - RNA, 19 nt, Artificial Sequence
  Description of Artificial Sequence: Synthetic oligonucleotide
gggcugcaucaccaggauc

SEQ ID NO: 2791025 - RNA, 19 nt, Artificial Sequence
  Description of Artificial Sequence: Synthetic oligonucleotide
gggcuaagauacuguuucu

SEQ ID NO: 2791026 - RNA, 19 nt, Artificial Sequence
  Description of Artificial Sequence: Synthetic oligonucleotide
ggccgucccacgucgcgca

SEQ ID NO: 2791027 - RNA, 19 nt, Artificial Sequence
  Description of Artificial Sequence: Synthetic oligonucleotide
ggcguggccgucccacguc

SEQ ID NO: 2791028 - RNA, 19 nt, Artificial Sequence
  Description of Artificial Sequence: Synthetic oligonucleotide
gucuguuggcugacuuucu

SEQ ID NO: 2791029 - RNA, 19 nt, Artificial Sequence
  Description of Artificial Sequence: Synthetic oligonucleotide
ccucgagcucuucguccgc

SEQ ID NO: 2791030 - RNA, 19 nt, Artificial Sequence
  Description of Artificial Sequence: Synthetic oligonucleotide
gccaucuguauaagguagu

SEQ ID NO: 2791031 - RNA, 19 nt, Artificial Sequence
  Description of Artificial Sequence: Synthetic oligonucleotide
gcccuagacacugcuccga

SEQ ID NO: 2791032 - RNA, 19 nt, Artificial Sequence
  Description of Artificial Sequence: Synthetic oligonucleotide
ccuagacacugcuccgaaa

SEQ ID NO: 2791033 - RNA, 19 nt, Artificial Sequence
  Description of Artificial Sequence: Synthetic oligonucleotide
guccgccaauggcguggcc

SEQ ID NO: 2791034 - RNA, 19 nt, Artificial Sequence
  Description of Artificial Sequence: Synthetic oligonucleotide
gcgccucgagcucuucguc

SEQ ID NO: 2791035 - RNA, 19 nt, Artificial Sequence
  Description of Artificial Sequence: Synthetic oligonucleotide
caucggaguccaucacuuu

SEQ ID NO: 2791036 - RNA, 19 nt, Artificial Sequence
  Description of Artificial Sequence: Synthetic oligonucleotide
gguuucccuuugcuuugcu

SEQ ID NO: 2791037 - RNA, 19 nt, Artificial Sequence
  Description of Artificial Sequence: Synthetic oligonucleotide
caauggcguggccguccca

SEQ ID NO: 2791038 - RNA, 19 nt, Artificial Sequence
  Description of Artificial Sequence: Synthetic oligonucleotide
caccaggauccccaugcuu

SEQ ID NO: 2791039 - RNA, 19 nt, Artificial Sequence
  Description of Artificial Sequence: Synthetic oligonucleotide
cccuagacacugcuccgaa

SEQ ID NO: 2791040 - RNA, 19 nt, Artificial Sequence
  Description of Artificial Sequence: Synthetic oligonucleotide
cgggcugacugauccagaa

SEQ ID NO: 2791041 - RNA, 19 nt, Artificial Sequence
  Description of Artificial Sequence: Synthetic oligonucleotide
ggaguccaucacuuuucuu

SEQ ID NO: 2791042 - RNA, 19 nt, Artificial Sequence
  Description of Artificial Sequence: Synthetic oligonucleotide
gcugacugauccagaacuu

SEQ ID NO: 2791043 - RNA, 19 nt, Artificial Sequence
  Description of Artificial Sequence: Synthetic oligonucleotide
cguggccgucccacgucgc

SEQ ID NO: 2791044 - RNA, 19 nt, Artificial Sequence
  Description of Artificial Sequence: Synthetic oligonucleotide
cugcuccgaaagucuguuu

SEQ ID NO: 2791045 - RNA, 19 nt, Artificial Sequence
  Description of Artificial Sequence: Synthetic oligonucleotide
ccaucuguauaagguaguu

SEQ ID NO: 2791046 - RNA, 19 nt, Artificial Sequence
  Description of Artificial Sequence: Synthetic oligonucleotide
ccgggcugacugauccaga

SEQ ID NO: 2791047 - RNA, 19 nt, Artificial Sequence
  Description of Artificial Sequence: Synthetic oligonucleotide
gcccgggcugacugaucca

SEQ ID NO: 2791048 - RNA, 19 nt, Artificial Sequence
  Description of Artificial Sequence: Synthetic oligonucleotide
ccgccaauggcguggccgu

SEQ ID NO: 2791049 - RNA, 19 nt, Artificial Sequence
  Description of Artificial Sequence: Synthetic oligonucleotide
cguccgccaauggcguggc

SEQ ID NO: 2791050 - RNA, 19 nt, Artificial Sequence
  Description of Artificial Sequence: Synthetic oligonucleotide
ccguaccgcgccaucugua

SEQ ID NO: 2791051 - RNA, 19 nt, Artificial Sequence
  Description of Artificial Sequence: Synthetic oligonucleotide
cguaccgcgccaucuguau

SEQ ID NO: 2791052 - RNA, 19 nt, Artificial Sequence
  Description of Artificial Sequence: Synthetic oligonucleotide
cuggcccgggcugacugau

SEQ ID NO: 2791053 - RNA, 19 nt, Artificial Sequence
  Description of Artificial Sequence: Synthetic oligonucleotide
cggaguccaucacuuuucu

SEQ ID NO: 2791054 - RNA, 19 nt, Artificial Sequence
  Description of Artificial Sequence: Synthetic oligonucleotide
cgagcucuucguccgccaa

SEQ ID NO: 2791055 - RNA, 19 nt, Artificial Sequence
  Description of Artificial Sequence: Synthetic oligonucleotide
gcuguccguaccgcgccau

SEQ ID NO: 2791056 - RNA, 19 nt, Artificial Sequence
  Description of Artificial Sequence: Synthetic oligonucleotide
gcagcgccucgagcucuuc

SEQ ID NO: 2791057 - RNA, 19 nt, Artificial Sequence
  Description of Artificial Sequence: Synthetic oligonucleotide
cgccaauggcguggccguc

SEQ ID NO: 2791058 - RNA, 19 nt, Artificial Sequence
  Description of Artificial Sequence: Synthetic oligonucleotide
cgcagcgccucgagcucuu

SEQ ID NO: 2791059 - RNA, 19 nt, Artificial Sequence
  Description of Artificial Sequence: Synthetic oligonucleotide
aauacuagugaauauaaac

SEQ ID NO: 2791060 - RNA, 19 nt, Artificial Sequence
  Description of Artificial Sequence: Synthetic oligonucleotide
uuagggaaaacauauaugg

SEQ ID NO: 2791061 - RNA, 19 nt, Artificial Sequence
  Description of Artificial Sequence: Synthetic oligonucleotide
agggaaaacauauaugggc

SEQ ID NO: 2791062 - RNA, 19 nt, Artificial Sequence
  Description of Artificial Sequence: Synthetic oligonucleotide
caauuuaucaccaggaacc

SEQ ID NO: 2791063 - RNA, 19 nt, Artificial Sequence
  Description of Artificial Sequence: Synthetic oligonucleotide
aaaccguagcuauaaaagc

SEQ ID NO: 2791064 - RNA, 19 nt, Artificial Sequence
  Description of Artificial Sequence: Synthetic oligonucleotide
uaaaccguagcuauaaaag

SEQ ID NO: 2791065 - RNA, 19 nt, Artificial Sequence
  Description of Artificial Sequence: Synthetic oligonucleotide
ucaauuauaaaccguagcu

SEQ ID NO: 2791066 - RNA, 19 nt, Artificial Sequence
  Description of Artificial Sequence: Synthetic oligonucleotide
ucuucauuagcuuuguuag

SEQ ID NO: 2791067 - RNA, 19 nt, Artificial Sequence
  Description of Artificial Sequence: Synthetic oligonucleotide
ucaucaaccaucuuuaaca

SEQ ID NO: 2791068 - RNA, 19 nt, Artificial Sequence
  Description of Artificial Sequence: Synthetic oligonucleotide
aauuauaaaccguagcuau

SEQ ID NO: 2791069 - RNA, 19 nt, Artificial Sequence
  Description of Artificial Sequence: Synthetic oligonucleotide
uauaaaagcuuuccgaaca

SEQ ID NO: 2791070 - RNA, 19 nt, Artificial Sequence
  Description of Artificial Sequence: Synthetic oligonucleotide
uugauauuugcuaucagca

SEQ ID NO: 2791071 - RNA, 19 nt, Artificial Sequence
  Description of Artificial Sequence: Synthetic oligonucleotide
aucaauuauaaaccguagc

SEQ ID NO: 2791072 - RNA, 19 nt, Artificial Sequence
  Description of Artificial Sequence: Synthetic oligonucleotide
ucaaccaucuuuaacaggu

SEQ ID NO: 2791073 - RNA, 19 nt, Artificial Sequence
  Description of Artificial Sequence: Synthetic oligonucleotide
acagagcugauuuugauag

SEQ ID NO: 2791074 - RNA, 19 nt, Artificial Sequence
  Description of Artificial Sequence: Synthetic oligonucleotide
aagcuuuccgaacauuagc

SEQ ID NO: 2791075 - RNA, 19 nt, Artificial Sequence
  Description of Artificial Sequence: Synthetic oligonucleotide
aaaauuguuggucuuccug

SEQ ID NO: 2791076 - RNA, 19 nt, Artificial Sequence
  Description of Artificial Sequence: Synthetic oligonucleotide
uuuaucuucauuagcuuug

SEQ ID NO: 2791077 - RNA, 19 nt, Artificial Sequence
  Description of Artificial Sequence: Synthetic oligonucleotide
ucuugaaugagcuuauucu

SEQ ID NO: 2791078 - RNA, 19 nt, Artificial Sequence
  Description of Artificial Sequence: Synthetic oligonucleotide
uauaaacugcaauuuauca

SEQ ID NO: 2791079 - RNA, 19 nt, Artificial Sequence
  Description of Artificial Sequence: Synthetic oligonucleotide
ucuccugaaauucugcuag

SEQ ID NO: 2791080 - RNA, 19 nt, Artificial Sequence
  Description of Artificial Sequence: Synthetic oligonucleotide
uucauuuaggcuuagggaa

SEQ ID NO: 2791081 - RNA, 19 nt, Artificial Sequence
  Description of Artificial Sequence: Synthetic oligonucleotide
cuaauuuccaguccaaggc

SEQ ID NO: 2791082 - RNA, 19 nt, Artificial Sequence
  Description of Artificial Sequence: Synthetic oligonucleotide
uacuagugaauauaaacug

SEQ ID NO: 2791083 - RNA, 19 nt, Artificial Sequence
  Description of Artificial Sequence: Synthetic oligonucleotide
uuuacuucaucaaccaucu

SEQ ID NO: 2791084 - RNA, 19 nt, Artificial Sequence
  Description of Artificial Sequence: Synthetic oligonucleotide
cuugauauuugcuaucagc

SEQ ID NO: 2791085 - RNA, 19 nt, Artificial Sequence
  Description of Artificial Sequence: Synthetic oligonucleotide
aaauuguuggucuuccuga

SEQ ID NO: 2791086 - RNA, 19 nt, Artificial Sequence
  Description of Artificial Sequence: Synthetic oligonucleotide
uuugcuaucagcacuucca

SEQ ID NO: 2791087 - RNA, 19 nt, Artificial Sequence
  Description of Artificial Sequence: Synthetic oligonucleotide
agaauacucuuccuuaagg

SEQ ID NO: 2791088 - RNA, 19 nt, Artificial Sequence
  Description of Artificial Sequence: Synthetic oligonucleotide
uuauucugcuuacagagcu

SEQ ID NO: 2791089 - RNA, 19 nt, Artificial Sequence
  Description of Artificial Sequence: Synthetic oligonucleotide
ucuagcuucauuuaggcuu

SEQ ID NO: 2791090 - RNA, 19 nt, Artificial Sequence
  Description of Artificial Sequence: Synthetic oligonucleotide
uuuaucaccaggaaccuuc

SEQ ID NO: 2791091 - RNA, 19 nt, Artificial Sequence
  Description of Artificial Sequence: Synthetic oligonucleotide
aauuguuggucuuccugac

SEQ ID NO: 2791092 - RNA, 19 nt, Artificial Sequence
  Description of Artificial Sequence: Synthetic oligonucleotide
acugcaauuuaucaccagg

SEQ ID NO: 2791093 - RNA, 19 nt, Artificial Sequence
  Description of Artificial Sequence: Synthetic oligonucleotide
ugagcagucagacacuuca

SEQ ID NO: 2791094 - RNA, 19 nt, Artificial Sequence
  Description of Artificial Sequence: Synthetic oligonucleotide
aaucucuagcuucauuuag

SEQ ID NO: 2791095 - RNA, 19 nt, Artificial Sequence
  Description of Artificial Sequence: Synthetic oligonucleotide
acauauaugggcucucagg

SEQ ID NO: 2791096 - RNA, 19 nt, Artificial Sequence
  Description of Artificial Sequence: Synthetic oligonucleotide
uugaguuucagagacagcu

SEQ ID NO: 2791097 - RNA, 19 nt, Artificial Sequence
  Description of Artificial Sequence: Synthetic oligonucleotide
ucaauacuagugaauauaa

SEQ ID NO: 2791098 - RNA, 19 nt, Artificial Sequence
  Description of Artificial Sequence: Synthetic oligonucleotide
aaucucuguacauguccgc

SEQ ID NO: 2791099 - RNA, 19 nt, Artificial Sequence
  Description of Artificial Sequence: Synthetic oligonucleotide
acuagugaauauaaacugc

SEQ ID NO: 2791100 - RNA, 19 nt, Artificial Sequence
  Description of Artificial Sequence: Synthetic oligonucleotide
cuuagggucaauacuagug

SEQ ID NO: 2791101 - RNA, 19 nt, Artificial Sequence
  Description of Artificial Sequence: Synthetic oligonucleotide
aguggaaaugguuuccuuc

SEQ ID NO: 2791102 - RNA, 19 nt, Artificial Sequence
  Description of Artificial Sequence: Synthetic oligonucleotide
uagggaaaacauauauggg

SEQ ID NO: 2791103 - RNA, 19 nt, Artificial Sequence
  Description of Artificial Sequence: Synthetic oligonucleotide
aauauaaacugcaauuuau

SEQ ID NO: 2791104 - RNA, 19 nt, Artificial Sequence
  Description of Artificial Sequence: Synthetic oligonucleotide
uuagggucaauacuaguga

SEQ ID NO: 2791105 - RNA, 19 nt, Artificial Sequence
  Description of Artificial Sequence: Synthetic oligonucleotide
cuacaucaauuauaaaccg

SEQ ID NO: 2791106 - RNA, 19 nt, Artificial Sequence
  Description of Artificial Sequence: Synthetic oligonucleotide
uuuccgaacauuagcaaga

SEQ ID NO: 2791107 - RNA, 19 nt, Artificial Sequence
  Description of Artificial Sequence: Synthetic oligonucleotide
cugaaauucugcuaggcac

SEQ ID NO: 2791108 - RNA, 19 nt, Artificial Sequence
  Description of Artificial Sequence: Synthetic oligonucleotide
gaaaugguuuccuucuucc

SEQ ID NO: 2791109 - RNA, 19 nt, Artificial Sequence
  Description of Artificial Sequence: Synthetic oligonucleotide
uugaaugagcuuauucugc

SEQ ID NO: 2791110 - RNA, 19 nt, Artificial Sequence
  Description of Artificial Sequence: Synthetic oligonucleotide
uucaguuuaucuucauuag

SEQ ID NO: 2791111 - RNA, 19 nt, Artificial Sequence
  Description of Artificial Sequence: Synthetic oligonucleotide
auaaucucuagcuucauuu

SEQ ID NO: 2791112 - RNA, 19 nt, Artificial Sequence
  Description of Artificial Sequence: Synthetic oligonucleotide
cuuccuagaauacucuucc

SEQ ID NO: 2791113 - RNA, 19 nt, Artificial Sequence
  Description of Artificial Sequence: Synthetic oligonucleotide
ucagagacagcuuuucuga

SEQ ID NO: 2791114 - RNA, 19 nt, Artificial Sequence
  Description of Artificial Sequence: Synthetic oligonucleotide
ucaguuuaucuucauuagc

SEQ ID NO: 2791115 - RNA, 19 nt, Artificial Sequence
  Description of Artificial Sequence: Synthetic oligonucleotide
cuugaaugagcuuauucug

SEQ ID NO: 2791116 - RNA, 19 nt, Artificial Sequence
  Description of Artificial Sequence: Synthetic oligonucleotide
aacauuagcaagaaacgcu

SEQ ID NO: 2791117 - RNA, 19 nt, Artificial Sequence
  Description of Artificial Sequence: Synthetic oligonucleotide
uucauaaucucuagcuuca

SEQ ID NO: 2791118 - RNA, 19 nt, Artificial Sequence
  Description of Artificial Sequence: Synthetic oligonucleotide
uuccuugaguuucagagac

SEQ ID NO: 2791119 - RNA, 19 nt, Artificial Sequence
  Description of Artificial Sequence: Synthetic oligonucleotide
uagcuauaaaagcuuuccg

SEQ ID NO: 2791120 - RNA, 19 nt, Artificial Sequence
  Description of Artificial Sequence: Synthetic oligonucleotide
agcuauaaaagcuuuccga

SEQ ID NO: 2791121 - RNA, 19 nt, Artificial Sequence
  Description of Artificial Sequence: Synthetic oligonucleotide
uuuguuagcaguggaaaug

SEQ ID NO: 2791122 - RNA, 19 nt, Artificial Sequence
  Description of Artificial Sequence: Synthetic oligonucleotide
uuuccuucuuccuagaaua

SEQ ID NO: 2791123 - RNA, 19 nt, Artificial Sequence
  Description of Artificial Sequence: Synthetic oligonucleotide
auuugcuaucagcacuucc

SEQ ID NO: 2791124 - RNA, 19 nt, Artificial Sequence
  Description of Artificial Sequence: Synthetic oligonucleotide
uuagcaguggaaaugguuu

SEQ ID NO: 2791125 - RNA, 19 nt, Artificial Sequence
  Description of Artificial Sequence: Synthetic oligonucleotide
ugcuaggcacucaagauga

SEQ ID NO: 2791126 - RNA, 19 nt, Artificial Sequence
  Description of Artificial Sequence: Synthetic oligonucleotide
cuucauaaucucuagcuuc

SEQ ID NO: 2791127 - RNA, 19 nt, Artificial Sequence
  Description of Artificial Sequence: Synthetic oligonucleotide
uucauuagcuuuguuagca

SEQ ID NO: 2791128 - RNA, 19 nt, Artificial Sequence
  Description of Artificial Sequence: Synthetic oligonucleotide
uacuucaucaaccaucuuu

SEQ ID NO: 2791129 - RNA, 19 nt, Artificial Sequence
  Description of Artificial Sequence: Synthetic oligonucleotide
aacauauaugggcucucag

SEQ ID NO: 2791130 - RNA, 19 nt, Artificial Sequence
  Description of Artificial Sequence: Synthetic oligonucleotide
uuguuagcaguggaaaugg

SEQ ID NO: 2791131 - RNA, 19 nt, Artificial Sequence
  Description of Artificial Sequence: Synthetic oligonucleotide
ucuuuaacagguuaucuuu

SEQ ID NO: 2791132 - RNA, 19 nt, Artificial Sequence
  Description of Artificial Sequence: Synthetic oligonucleotide
uucagagacagcuuuucug

SEQ ID NO: 2791133 - RNA, 19 nt, Artificial Sequence
  Description of Artificial Sequence: Synthetic oligonucleotide
cuuagggaaaacauauaug

SEQ ID NO: 2791134 - RNA, 19 nt, Artificial Sequence
  Description of Artificial Sequence: Synthetic oligonucleotide
agugaauauaaacugcaau

SEQ ID NO: 2791135 - RNA, 19 nt, Artificial Sequence
  Description of Artificial Sequence: Synthetic oligonucleotide
uccuuaagguccuugauau

SEQ ID NO: 2791136 - RNA, 19 nt, Artificial Sequence
  Description of Artificial Sequence: Synthetic oligonucleotide
aauucuugcuucuugccuu

SEQ ID NO: 2791137 - RNA, 19 nt, Artificial Sequence
  Description of Artificial Sequence: Synthetic oligonucleotide
auacuagugaauauaaacu

SEQ ID NO: 2791138 - RNA, 19 nt, Artificial Sequence
  Description of Artificial Sequence: Synthetic oligonucleotide
auauaaacugcaauuuauc

SEQ ID NO: 2791139 - RNA, 19 nt, Artificial Sequence
  Description of Artificial Sequence: Synthetic oligonucleotide
uuaggcuuagggaaaacau

SEQ ID NO: 2791140 - RNA, 19 nt, Artificial Sequence
  Description of Artificial Sequence: Synthetic oligonucleotide
cuuuccgaacauuagcaag

SEQ ID NO: 2791141 - RNA, 19 nt, Artificial Sequence
  Description of Artificial Sequence: Synthetic oligonucleotide
uaggcacucaagaugaggu

SEQ ID NO: 2791142 - RNA, 19 nt, Artificial Sequence
  Description of Artificial Sequence: Synthetic oligonucleotide
uagcaagaaacgcugaaaa

SEQ ID NO: 2791143 - RNA, 19 nt, Artificial Sequence
  Description of Artificial Sequence: Synthetic oligonucleotide
gaacauuagcaagaaacgc

SEQ ID NO: 2791144 - RNA, 19 nt, Artificial Sequence
  Description of Artificial Sequence: Synthetic oligonucleotide
uacaucaauuauaaaccgu

SEQ ID NO: 2791145 - RNA, 19 nt, Artificial Sequence
  Description of Artificial Sequence: Synthetic oligonucleotide
ugaauauaaacugcaauuu

SEQ ID NO: 2791146 - RNA, 19 nt, Artificial Sequence
  Description of Artificial Sequence: Synthetic oligonucleotide
ucucuagcuucauuuaggc

SEQ ID NO: 2791147 - RNA, 19 nt, Artificial Sequence
  Description of Artificial Sequence: Synthetic oligonucleotide
uuagcuuuguuagcagugg

SEQ ID NO: 2791148 - RNA, 19 nt, Artificial Sequence
  Description of Artificial Sequence: Synthetic oligonucleotide
caaucucuguacauguccg

SEQ ID NO: 2791149 - RNA, 19 nt, Artificial Sequence
  Description of Artificial Sequence: Synthetic oligonucleotide
aauucugcuaggcacucaa

SEQ ID NO: 2791150 - RNA, 19 nt, Artificial Sequence
  Description of Artificial Sequence: Synthetic oligonucleotide
uagaauacucuuccuuaag

SEQ ID NO: 2791151 - RNA, 19 nt, Artificial Sequence
  Description of Artificial Sequence: Synthetic oligonucleotide
uucaucaaccaucuuuaac

SEQ ID NO: 2791152 - RNA, 19 nt, Artificial Sequence
  Description of Artificial Sequence: Synthetic oligonucleotide
guagcuauaaaagcuuucc

SEQ ID NO: 2791153 - RNA, 19 nt, Artificial Sequence
  Description of Artificial Sequence: Synthetic oligonucleotide
uccaauucuugcuucuugc

SEQ ID NO: 2791154 - RNA, 19 nt, Artificial Sequence
  Description of Artificial Sequence: Synthetic oligonucleotide
uuauaaaccguagcuauaa

SEQ ID NO: 2791155 - RNA, 19 nt, Artificial Sequence
  Description of Artificial Sequence: Synthetic oligonucleotide
gcuucauuuaggcuuaggg

SEQ ID NO: 2791156 - RNA, 19 nt, Artificial Sequence
  Description of Artificial Sequence: Synthetic oligonucleotide
ccgaacauuagcaagaaac

SEQ ID NO: 2791157 - RNA, 19 nt, Artificial Sequence
  Description of Artificial Sequence: Synthetic oligonucleotide
uuaagguccuugauauuug

SEQ ID NO: 2791158 - RNA, 19 nt, Artificial Sequence
  Description of Artificial Sequence: Synthetic oligonucleotide
aaugguuuccuucuuccua

SEQ ID NO: 2791159 - RNA, 19 nt, Artificial Sequence
  Description of Artificial Sequence: Synthetic oligonucleotide
uucuugaaugagcuuauuc

SEQ ID NO: 2791160 - RNA, 19 nt, Artificial Sequence
  Description of Artificial Sequence: Synthetic oligonucleotide
auaaaccguagcuauaaaa

SEQ ID NO: 2791161 - RNA, 19 nt, Artificial Sequence
  Description of Artificial Sequence: Synthetic oligonucleotide
uucugcuaggcacucaaga

SEQ ID NO: 2791162 - RNA, 19 nt, Artificial Sequence
  Description of Artificial Sequence: Synthetic oligonucleotide
gacacuucauaaucucuag

SEQ ID NO: 2791163 - RNA, 19 nt, Artificial Sequence
  Description of Artificial Sequence: Synthetic oligonucleotide
gagcuuauucugcuuacag

SEQ ID NO: 2791164 - RNA, 19 nt, Artificial Sequence
  Description of Artificial Sequence: Synthetic oligonucleotide
agagcugauuuugauaguc

SEQ ID NO: 2791165 - RNA, 19 nt, Artificial Sequence
  Description of Artificial Sequence: Synthetic oligonucleotide
cuauaaaagcuuuccgaac

SEQ ID NO: 2791166 - RNA, 19 nt, Artificial Sequence
  Description of Artificial Sequence: Synthetic oligonucleotide
ugaaugagcuuauucugcu

SEQ ID NO: 2791167 - RNA, 19 nt, Artificial Sequence
  Description of Artificial Sequence: Synthetic oligonucleotide
augguuuccuucuuccuag

SEQ ID NO: 2791168 - RNA, 19 nt, Artificial Sequence
  Description of Artificial Sequence: Synthetic oligonucleotide
cuagugaauauaaacugca

SEQ ID NO: 2791169 - RNA, 19 nt, Artificial Sequence
  Description of Artificial Sequence: Synthetic oligonucleotide
aaaacauauaugggcucuc

SEQ ID NO: 2791170 - RNA, 19 nt, Artificial Sequence
  Description of Artificial Sequence: Synthetic oligonucleotide
gauauuugcuaucagcacu

SEQ ID NO: 2791171 - RNA, 19 nt, Artificial Sequence
  Description of Artificial Sequence: Synthetic oligonucleotide
ugauauuugcuaucagcac

SEQ ID NO: 2791172 - RNA, 19 nt, Artificial Sequence
  Description of Artificial Sequence: Synthetic oligonucleotide
uucuuagggucaauacuag

SEQ ID NO: 2791173 - RNA, 19 nt, Artificial Sequence
  Description of Artificial Sequence: Synthetic oligonucleotide
aaagcuuuccgaacauuag

SEQ ID NO: 2791174 - RNA, 19 nt, Artificial Sequence
  Description of Artificial Sequence: Synthetic oligonucleotide
aaccguagcuauaaaagcu

SEQ ID NO: 2791175 - RNA, 19 nt, Artificial Sequence
  Description of Artificial Sequence: Synthetic oligonucleotide
cauauaugggcucucagga

SEQ ID NO: 2791176 - RNA, 19 nt, Artificial Sequence
  Description of Artificial Sequence: Synthetic oligonucleotide
uguacauguccgcugauuu

SEQ ID NO: 2791177 - RNA, 19 nt, Artificial Sequence
  Description of Artificial Sequence: Synthetic oligonucleotide
caucaauuauaaaccguag

SEQ ID NO: 2791178 - RNA, 19 nt, Artificial Sequence
  Description of Artificial Sequence: Synthetic oligonucleotide
uauaugggcucucaggauu

SEQ ID NO: 2791179 - RNA, 19 nt, Artificial Sequence
  Description of Artificial Sequence: Synthetic oligonucleotide
agcacuuccaauucuugcu

SEQ ID NO: 2791180 - RNA, 19 nt, Artificial Sequence
  Description of Artificial Sequence: Synthetic oligonucleotide
aaaacaucuccaccauccu

SEQ ID NO: 2791181 - RNA, 19 nt, Artificial Sequence
  Description of Artificial Sequence: Synthetic oligonucleotide
aaggcaaucucuguacaug

SEQ ID NO: 2791182 - RNA, 19 nt, Artificial Sequence
  Description of Artificial Sequence: Synthetic oligonucleotide
accuuccuaauuuccaguc

SEQ ID NO: 2791183 - RNA, 19 nt, Artificial Sequence
  Description of Artificial Sequence: Synthetic oligonucleotide
ucuuccuagaauacucuuc

SEQ ID NO: 2791184 - RNA, 19 nt, Artificial Sequence
  Description of Artificial Sequence: Synthetic oligonucleotide
cuugccuuuuacuucauca

SEQ ID NO: 2791185 - RNA, 19 nt, Artificial Sequence
  Description of Artificial Sequence: Synthetic oligonucleotide
aaaugguuuccuucuuccu

SEQ ID NO: 2791186 - RNA, 19 nt, Artificial Sequence
  Description of Artificial Sequence: Synthetic oligonucleotide
caucaaccaucuuuaacag

SEQ ID NO: 2791187 - RNA, 19 nt, Artificial Sequence
  Description of Artificial Sequence: Synthetic oligonucleotide
cuucauuuaggcuuaggga

SEQ ID NO: 2791188 - RNA, 19 nt, Artificial Sequence
  Description of Artificial Sequence: Synthetic oligonucleotide
uuuaggcuuagggaaaaca

SEQ ID NO: 2791189 - RNA, 19 nt, Artificial Sequence
  Description of Artificial Sequence: Synthetic oligonucleotide
augagcuuauucugcuuac

SEQ ID NO: 2791190 - RNA, 19 nt, Artificial Sequence
  Description of Artificial Sequence: Synthetic oligonucleotide
cucaagaugaggugagcag

SEQ ID NO: 2791191 - RNA, 19 nt, Artificial Sequence
  Description of Artificial Sequence: Synthetic oligonucleotide
ucuuccuuaagguccuuga

SEQ ID NO: 2791192 - RNA, 19 nt, Artificial Sequence
  Description of Artificial Sequence: Synthetic oligonucleotide
aauuuaucaccaggaaccu

SEQ ID NO: 2791193 - RNA, 19 nt, Artificial Sequence
  Description of Artificial Sequence: Synthetic oligonucleotide
gaauauaaacugcaauuua

SEQ ID NO: 2791194 - RNA, 19 nt, Artificial Sequence
  Description of Artificial Sequence: Synthetic oligonucleotide
aaaagcuuuccgaacauua

SEQ ID NO: 2791195 - RNA, 19 nt, Artificial Sequence
  Description of Artificial Sequence: Synthetic oligonucleotide
ucauuagcuuuguuagcag

SEQ ID NO: 2791196 - RNA, 19 nt, Artificial Sequence
  Description of Artificial Sequence: Synthetic oligonucleotide
aucaaccaucuuuaacagg

SEQ ID NO: 2791197 - RNA, 19 nt, Artificial Sequence
  Description of Artificial Sequence: Synthetic oligonucleotide
ugccuuuuacuucaucaac

SEQ ID NO: 2791198 - RNA, 19 nt, Artificial Sequence
  Description of Artificial Sequence: Synthetic oligonucleotide
ucauuuaggcuuagggaaa

SEQ ID NO: 2791199 - RNA, 19 nt, Artificial Sequence
  Description of Artificial Sequence: Synthetic oligonucleotide
uccaaggcaaucucuguac

SEQ ID NO: 2791200 - RNA, 19 nt, Artificial Sequence
  Description of Artificial Sequence: Synthetic oligonucleotide
aacugcaauuuaucaccag

SEQ ID NO: 2791201 - RNA, 19 nt, Artificial Sequence
  Description of Artificial Sequence: Synthetic oligonucleotide
uuuucuugaaugagcuuau

SEQ ID NO: 2791202 - RNA, 19 nt, Artificial Sequence
  Description of Artificial Sequence: Synthetic oligonucleotide
ucaagaugaggugagcagu

SEQ ID NO: 2791203 - RNA, 19 nt, Artificial Sequence
  Description of Artificial Sequence: Synthetic oligonucleotide
agcugauuuugauagucca

SEQ ID NO: 2791204 - RNA, 19 nt, Artificial Sequence
  Description of Artificial Sequence: Synthetic oligonucleotide
gauucuuagggucaauacu

SEQ ID NO: 2791205 - RNA, 19 nt, Artificial Sequence
  Description of Artificial Sequence: Synthetic oligonucleotide
aaccuuccuaauuuccagu

SEQ ID NO: 2791206 - RNA, 19 nt, Artificial Sequence
  Description of Artificial Sequence: Synthetic oligonucleotide
augaggugagcagucagac

SEQ ID NO: 2791207 - RNA, 19 nt, Artificial Sequence
  Description of Artificial Sequence: Synthetic oligonucleotide
acauuagcaagaaacgcug

SEQ ID NO: 2791208 - RNA, 19 nt, Artificial Sequence
  Description of Artificial Sequence: Synthetic oligonucleotide
aucuuuaacagguuaucuu

SEQ ID NO: 2791209 - RNA, 19 nt, Artificial Sequence
  Description of Artificial Sequence: Synthetic oligonucleotide
uuguuggucuuccugacuu

SEQ ID NO: 2791210 - RNA, 19 nt, Artificial Sequence
  Description of Artificial Sequence: Synthetic oligonucleotide
uuccuuaagguccuugaua

SEQ ID NO: 2791211 - RNA, 19 nt, Artificial Sequence
  Description of Artificial Sequence: Synthetic oligonucleotide
ucucaggauucuuaggguc

SEQ ID NO: 2791212 - RNA, 19 nt, Artificial Sequence
  Description of Artificial Sequence: Synthetic oligonucleotide
uaagguccuugauauuugc

SEQ ID NO: 2791213 - RNA, 19 nt, Artificial Sequence
  Description of Artificial Sequence: Synthetic oligonucleotide
ucugcuaggcacucaagau

SEQ ID NO: 2791214 - RNA, 19 nt, Artificial Sequence
  Description of Artificial Sequence: Synthetic oligonucleotide
uacauguccgcugauuucu

SEQ ID NO: 2791215 - RNA, 19 nt, Artificial Sequence
  Description of Artificial Sequence: Synthetic oligonucleotide
agcaguggaaaugguuucc

SEQ ID NO: 2791216 - RNA, 19 nt, Artificial Sequence
  Description of Artificial Sequence: Synthetic oligonucleotide
auuagcaagaaacgcugaa

SEQ ID NO: 2791217 - RNA, 19 nt, Artificial Sequence
  Description of Artificial Sequence: Synthetic oligonucleotide
auuagcuuuguuagcagug

SEQ ID NO: 2791218 - RNA, 19 nt, Artificial Sequence
  Description of Artificial Sequence: Synthetic oligonucleotide
ugacuuucuccugaaauuc

SEQ ID NO: 2791219 - RNA, 19 nt, Artificial Sequence
  Description of Artificial Sequence: Synthetic oligonucleotide
cuucauuagcuuuguuagc

SEQ ID NO: 2791220 - RNA, 19 nt, Artificial Sequence
  Description of Artificial Sequence: Synthetic oligonucleotide
gaauacucuuccuuaaggu

SEQ ID NO: 2791221 - RNA, 19 nt, Artificial Sequence
  Description of Artificial Sequence: Synthetic oligonucleotide
uuucagagacagcuuuucu

SEQ ID NO: 2791222 - RNA, 19 nt, Artificial Sequence
  Description of Artificial Sequence: Synthetic oligonucleotide
agaugaggugagcagucag

SEQ ID NO: 2791223 - RNA, 19 nt, Artificial Sequence
  Description of Artificial Sequence: Synthetic oligonucleotide
uccuagaauacucuuccuu

SEQ ID NO: 2791224 - RNA, 19 nt, Artificial Sequence
  Description of Artificial Sequence: Synthetic oligonucleotide
ucaccaggaaccuuccuaa

SEQ ID NO: 2791225 - RNA, 19 nt, Artificial Sequence
  Description of Artificial Sequence: Synthetic oligonucleotide
uccuugauauuugcuauca

SEQ ID NO: 2791226 - RNA, 19 nt, Artificial Sequence
  Description of Artificial Sequence: Synthetic oligonucleotide
aucucuagcuucauuuagg

SEQ ID NO: 2791227 - RNA, 19 nt, Artificial Sequence
  Description of Artificial Sequence: Synthetic oligonucleotide
aaccaucuuuaacagguua

SEQ ID NO: 2791228 - RNA, 19 nt, Artificial Sequence
  Description of Artificial Sequence: Synthetic oligonucleotide
ugauuuugauaguccaaaa

SEQ ID NO: 2791229 - RNA, 19 nt, Artificial Sequence
  Description of Artificial Sequence: Synthetic oligonucleotide
uuaucaccaggaaccuucc

SEQ ID NO: 2791230 - RNA, 19 nt, Artificial Sequence
  Description of Artificial Sequence: Synthetic oligonucleotide
ucagcacuuccaauucuug

SEQ ID NO: 2791231 - RNA, 19 nt, Artificial Sequence
  Description of Artificial Sequence: Synthetic oligonucleotide
aggaaccuuccuaauuucc

SEQ ID NO: 2791232 - RNA, 19 nt, Artificial Sequence
  Description of Artificial Sequence: Synthetic oligonucleotide
agcuuauucugcuuacaga

SEQ ID NO: 2791233 - RNA, 19 nt, Artificial Sequence
  Description of Artificial Sequence: Synthetic oligonucleotide
uagugaauauaaacugcaa

SEQ ID NO: 2791234 - RNA, 19 nt, Artificial Sequence
  Description of Artificial Sequence: Synthetic oligonucleotide
ugcuucuugccuuuuacuu

SEQ ID NO: 2791235 - RNA, 19 nt, Artificial Sequence
  Description of Artificial Sequence: Synthetic oligonucleotide
uaggcuuagggaaaacaua

SEQ ID NO: 2791236 - RNA, 19 nt, Artificial Sequence
  Description of Artificial Sequence: Synthetic oligonucleotide
cuugcuucuugccuuuuac

SEQ ID NO: 2791237 - RNA, 19 nt, Artificial Sequence
  Description of Artificial Sequence: Synthetic oligonucleotide
acaucaauuauaaaccgua

SEQ ID NO: 2791238 - RNA, 19 nt, Artificial Sequence
  Description of Artificial Sequence: Synthetic oligonucleotide
auucuuagggucaauacua

SEQ ID NO: 2791239 - RNA, 19 nt, Artificial Sequence
  Description of Artificial Sequence: Synthetic oligonucleotide
uuagcaagaaacgcugaaa

SEQ ID NO: 2791240 - RNA, 19 nt, Artificial Sequence
  Description of Artificial Sequence: Synthetic oligonucleotide
gcaauuuaucaccaggaac

SEQ ID NO: 2791241 - RNA, 19 nt, Artificial Sequence
  Description of Artificial Sequence: Synthetic oligonucleotide
cgaacauuagcaagaaacg

SEQ ID NO: 2791242 - RNA, 19 nt, Artificial Sequence
  Description of Artificial Sequence: Synthetic oligonucleotide
aaacauauaugggcucuca

SEQ ID NO: 2791243 - RNA, 19 nt, Artificial Sequence
  Description of Artificial Sequence: Synthetic oligonucleotide
uugccuuuuacuucaucaa

SEQ ID NO: 2791244 - RNA, 19 nt, Artificial Sequence
  Description of Artificial Sequence: Synthetic oligonucleotide
auaaaagcuuuccgaacau

SEQ ID NO: 2791245 - RNA, 19 nt, Artificial Sequence
  Description of Artificial Sequence: Synthetic oligonucleotide
uguccgcugauuucugcag

SEQ ID NO: 2791246 - RNA, 19 nt, Artificial Sequence
  Description of Artificial Sequence: Synthetic oligonucleotide
cuuccuaauuuccagucca

SEQ ID NO: 2791247 - RNA, 19 nt, Artificial Sequence
  Description of Artificial Sequence: Synthetic oligonucleotide
caguuuaucuucauuagcu

SEQ ID NO: 2791248 - RNA, 19 nt, Artificial Sequence
  Description of Artificial Sequence: Synthetic oligonucleotide
uaaucucuagcuucauuua

SEQ ID NO: 2791249 - RNA, 19 nt, Artificial Sequence
  Description of Artificial Sequence: Synthetic oligonucleotide
uacagagcugauuuugaua

SEQ ID NO: 2791250 - RNA, 19 nt, Artificial Sequence
  Description of Artificial Sequence: Synthetic oligonucleotide
gcaaucucuguacaugucc

SEQ ID NO: 2791251 - RNA, 19 nt, Artificial Sequence
  Description of Artificial Sequence: Synthetic oligonucleotide
acuucauaaucucuagcuu

SEQ ID NO: 2791252 - RNA, 19 nt, Artificial Sequence
  Description of Artificial Sequence: Synthetic oligonucleotide
aguuuaucuucauuagcuu

SEQ ID NO: 2791253 - RNA, 19 nt, Artificial Sequence
  Description of Artificial Sequence: Synthetic oligonucleotide
uaucagcacuuccaauucu

SEQ ID NO: 2791254 - RNA, 19 nt, Artificial Sequence
  Description of Artificial Sequence: Synthetic oligonucleotide
ucucuguacauguccgcug

SEQ ID NO: 2791255 - RNA, 19 nt, Artificial Sequence
  Description of Artificial Sequence: Synthetic oligonucleotide
cuaucagcacuuccaauuc

SEQ ID NO: 2791256 - RNA, 19 nt, Artificial Sequence
  Description of Artificial Sequence: Synthetic oligonucleotide
uauaaaccguagcuauaaa

SEQ ID NO: 2791257 - RNA, 19 nt, Artificial Sequence
  Description of Artificial Sequence: Synthetic oligonucleotide
uacucuuccuuaagguccu

SEQ ID NO: 2791258 - RNA, 19 nt, Artificial Sequence
  Description of Artificial Sequence: Synthetic oligonucleotide
aggcaaucucuguacaugu

SEQ ID NO: 2791259 - RNA, 19 nt, Artificial Sequence
  Description of Artificial Sequence: Synthetic oligonucleotide
agguccuugauauuugcua

SEQ ID NO: 2791260 - RNA, 19 nt, Artificial Sequence
  Description of Artificial Sequence: Synthetic oligonucleotide
cugcuaggcacucaagaug

SEQ ID NO: 2791261 - RNA, 19 nt, Artificial Sequence
  Description of Artificial Sequence: Synthetic oligonucleotide
cagcacuuccaauucuugc

SEQ ID NO: 2791262 - RNA, 19 nt, Artificial Sequence
  Description of Artificial Sequence: Synthetic oligonucleotide
cugcaauuuaucaccagga

SEQ ID NO: 2791263 - RNA, 19 nt, Artificial Sequence
  Description of Artificial Sequence: Synthetic oligonucleotide
uccuaauuuccaguccaag

SEQ ID NO: 2791264 - RNA, 19 nt, Artificial Sequence
  Description of Artificial Sequence: Synthetic oligonucleotide
aauuuccaguccaaggcaa

SEQ ID NO: 2791265 - RNA, 19 nt, Artificial Sequence
  Description of Artificial Sequence: Synthetic oligonucleotide
cuaggcacucaagaugagg

SEQ ID NO: 2791266 - RNA, 19 nt, Artificial Sequence
  Description of Artificial Sequence: Synthetic oligonucleotide
gcuauaaaagcuuuccgaa

SEQ ID NO: 2791267 - RNA, 19 nt, Artificial Sequence
  Description of Artificial Sequence: Synthetic oligonucleotide
caagaugaggugagcaguc

SEQ ID NO: 2791268 - RNA, 19 nt, Artificial Sequence
  Description of Artificial Sequence: Synthetic oligonucleotide
aaacugcaauuuaucacca

SEQ ID NO: 2791269 - RNA, 19 nt, Artificial Sequence
  Description of Artificial Sequence: Synthetic oligonucleotide
uuacagagcugauuuugau

SEQ ID NO: 2791270 - RNA, 19 nt, Artificial Sequence
  Description of Artificial Sequence: Synthetic oligonucleotide
uccugaaauucugcuaggc

SEQ ID NO: 2791271 - RNA, 19 nt, Artificial Sequence
  Description of Artificial Sequence: Synthetic oligonucleotide
uagcuuuguuagcagugga

SEQ ID NO: 2791272 - RNA, 19 nt, Artificial Sequence
  Description of Artificial Sequence: Synthetic oligonucleotide
uccgcugauuucugcaggc

SEQ ID NO: 2791273 - RNA, 19 nt, Artificial Sequence
  Description of Artificial Sequence: Synthetic oligonucleotide
cacuucauaaucucuagcu

SEQ ID NO: 2791274 - RNA, 19 nt, Artificial Sequence
  Description of Artificial Sequence: Synthetic oligonucleotide
caguccaaggcaaucucug

SEQ ID NO: 2791275 - RNA, 19 nt, Artificial Sequence
  Description of Artificial Sequence: Synthetic oligonucleotide
uugcuaucagcacuuccaa

SEQ ID NO: 2791276 - RNA, 19 nt, Artificial Sequence
  Description of Artificial Sequence: Synthetic oligonucleotide
aucaccaggaaccuuccua

SEQ ID NO: 2791277 - RNA, 19 nt, Artificial Sequence
  Description of Artificial Sequence: Synthetic oligonucleotide
acuucaucaaccaucuuua

SEQ ID NO: 2791278 - RNA, 19 nt, Artificial Sequence
  Description of Artificial Sequence: Synthetic oligonucleotide
uagggucaauacuagugaa

SEQ ID NO: 2791279 - RNA, 19 nt, Artificial Sequence
  Description of Artificial Sequence: Synthetic oligonucleotide
agcuuuccgaacauuagca

SEQ ID NO: 2791280 - RNA, 19 nt, Artificial Sequence
  Description of Artificial Sequence: Synthetic oligonucleotide
cuuacagagcugauuuuga

SEQ ID NO: 2791281 - RNA, 19 nt, Artificial Sequence
  Description of Artificial Sequence: Synthetic oligonucleotide
uuaucuucauuagcuuugu

SEQ ID NO: 2791282 - RNA, 19 nt, Artificial Sequence
  Description of Artificial Sequence: Synthetic oligonucleotide
ggauucuuagggucaauac

SEQ ID NO: 2791283 - RNA, 19 nt, Artificial Sequence
  Description of Artificial Sequence: Synthetic oligonucleotide
uuccuucuuccuagaauac

SEQ ID NO: 2791284 - RNA, 19 nt, Artificial Sequence
  Description of Artificial Sequence: Synthetic oligonucleotide
acucaagaugaggugagca

SEQ ID NO: 2791285 - RNA, 19 nt, Artificial Sequence
  Description of Artificial Sequence: Synthetic oligonucleotide
acaucuccaccauccuuuc

SEQ ID NO: 2791286 - RNA, 19 nt, Artificial Sequence
  Description of Artificial Sequence: Synthetic oligonucleotide
uugcuucuugccuuuuacu

SEQ ID NO: 2791287 - RNA, 19 nt, Artificial Sequence
  Description of Artificial Sequence: Synthetic oligonucleotide
aggcguuucaguuuaucuu

SEQ ID NO: 2791288 - RNA, 19 nt, Artificial Sequence
  Description of Artificial Sequence: Synthetic oligonucleotide
ggcguuucaguuuaucuuc

SEQ ID NO: 2791289 - RNA, 19 nt, Artificial Sequence
  Description of Artificial Sequence: Synthetic oligonucleotide
gucaauacuagugaauaua

SEQ ID NO: 2791290 - RNA, 19 nt, Artificial Sequence
  Description of Artificial Sequence: Synthetic oligonucleotide
uucuccugaaauucugcua

SEQ ID NO: 2791291 - RNA, 19 nt, Artificial Sequence
  Description of Artificial Sequence: Synthetic oligonucleotide
gaaaacauauaugggcucu

SEQ ID NO: 2791292 - RNA, 19 nt, Artificial Sequence
  Description of Artificial Sequence: Synthetic oligonucleotide
gagcugauuuugauagucc

SEQ ID NO: 2791293 - RNA, 19 nt, Artificial Sequence
  Description of Artificial Sequence: Synthetic oligonucleotide
ucuuccugacuuucuccug

SEQ ID NO: 2791294 - RNA, 19 nt, Artificial Sequence
  Description of Artificial Sequence: Synthetic oligonucleotide
aggcuuagggaaaacauau

SEQ ID NO: 2791295 - RNA, 19 nt, Artificial Sequence
  Description of Artificial Sequence: Synthetic oligonucleotide
auaugggcucucaggauuc

SEQ ID NO: 2791296 - RNA, 19 nt, Artificial Sequence
  Description of Artificial Sequence: Synthetic oligonucleotide
auuguuggucuuccugacu

SEQ ID NO: 2791297 - RNA, 19 nt, Artificial Sequence
  Description of Artificial Sequence: Synthetic oligonucleotide
auauaugggcucucaggau

SEQ ID NO: 2791298 - RNA, 19 nt, Artificial Sequence
  Description of Artificial Sequence: Synthetic oligonucleotide
cuugaguuucagagacagc

SEQ ID NO: 2791299 - RNA, 19 nt, Artificial Sequence
  Description of Artificial Sequence: Synthetic oligonucleotide
uguuagcaguggaaauggu

SEQ ID NO: 2791300 - RNA, 19 nt, Artificial Sequence
  Description of Artificial Sequence: Synthetic oligonucleotide
cuagaauacucuuccuuaa

SEQ ID NO: 2791301 - RNA, 19 nt, Artificial Sequence
  Description of Artificial Sequence: Synthetic oligonucleotide
auuuaggcuuagggaaaac

SEQ ID NO: 2791302 - RNA, 19 nt, Artificial Sequence
  Description of Artificial Sequence: Synthetic oligonucleotide
uccaguccaaggcaaucuc

SEQ ID NO: 2791303 - RNA, 19 nt, Artificial Sequence
  Description of Artificial Sequence: Synthetic oligonucleotide
gauuucugcaggcguuuca

SEQ ID NO: 2791304 - RNA, 19 nt, Artificial Sequence
  Description of Artificial Sequence: Synthetic oligonucleotide
uggucuuccugacuuucuc

SEQ ID NO: 2791305 - RNA, 19 nt, Artificial Sequence
  Description of Artificial Sequence: Synthetic oligonucleotide
auguccgcugauuucugca

SEQ ID NO: 2791306 - RNA, 19 nt, Artificial Sequence
  Description of Artificial Sequence: Synthetic oligonucleotide
uagcaguggaaaugguuuc

SEQ ID NO: 2791307 - RNA, 19 nt, Artificial Sequence
  Description of Artificial Sequence: Synthetic oligonucleotide
uccuuucuucuuccuugag

SEQ ID NO: 2791308 - RNA, 19 nt, Artificial Sequence
  Description of Artificial Sequence: Synthetic oligonucleotide
cucaggauucuuaggguca

SEQ ID NO: 2791309 - RNA, 19 nt, Artificial Sequence
  Description of Artificial Sequence: Synthetic oligonucleotide
ugaggugagcagucagaca

SEQ ID NO: 2791310 - RNA, 19 nt, Artificial Sequence
  Description of Artificial Sequence: Synthetic oligonucleotide
uuggucuuccugacuuucu

SEQ ID NO: 2791311 - RNA, 19 nt, Artificial Sequence
  Description of Artificial Sequence: Synthetic oligonucleotide
ucugcaggcguuucaguuu

SEQ ID NO: 2791312 - RNA, 19 nt, Artificial Sequence
  Description of Artificial Sequence: Synthetic oligonucleotide
cuccugaaauucugcuagg

SEQ ID NO: 2791313 - RNA, 19 nt, Artificial Sequence
  Description of Artificial Sequence: Synthetic oligonucleotide
uuccuaauuuccaguccaa

SEQ ID NO: 2791314 - RNA, 19 nt, Artificial Sequence
  Description of Artificial Sequence: Synthetic oligonucleotide
uuccaguccaaggcaaucu

SEQ ID NO: 2791315 - RNA, 19 nt, Artificial Sequence
  Description of Artificial Sequence: Synthetic oligonucleotide
cugauuuugauaguccaaa

SEQ ID NO: 2791316 - RNA, 19 nt, Artificial Sequence
  Description of Artificial Sequence: Synthetic oligonucleotide
uccuucuuccuagaauacu

SEQ ID NO: 2791317 - RNA, 19 nt, Artificial Sequence
  Description of Artificial Sequence: Synthetic oligonucleotide
aguccaaggcaaucucugu

SEQ ID NO: 2791318 - RNA, 19 nt, Artificial Sequence
  Description of Artificial Sequence: Synthetic oligonucleotide
uucuuccuagaauacucuu

SEQ ID NO: 2791319 - RNA, 19 nt, Artificial Sequence
  Description of Artificial Sequence: Synthetic oligonucleotide
gccuuuuacuucaucaacc

SEQ ID NO: 2791320 - RNA, 19 nt, Artificial Sequence
  Description of Artificial Sequence: Synthetic oligonucleotide
ugagcuuauucugcuuaca

SEQ ID NO: 2791321 - RNA, 19 nt, Artificial Sequence
  Description of Artificial Sequence: Synthetic oligonucleotide
gaugaggugagcagucaga

SEQ ID NO: 2791322 - RNA, 19 nt, Artificial Sequence
  Description of Artificial Sequence: Synthetic oligonucleotide
auauuugcuaucagcacuu

SEQ ID NO: 2791323 - RNA, 19 nt, Artificial Sequence
  Description of Artificial Sequence: Synthetic oligonucleotide
guccgcugauuucugcagg

SEQ ID NO: 2791324 - RNA, 19 nt, Artificial Sequence
  Description of Artificial Sequence: Synthetic oligonucleotide
guggaaaugguuuccuucu

SEQ ID NO: 2791325 - RNA, 19 nt, Artificial Sequence
  Description of Artificial Sequence: Synthetic oligonucleotide
cauguccgcugauuucugc

SEQ ID NO: 2791326 - RNA, 19 nt, Artificial Sequence
  Description of Artificial Sequence: Synthetic oligonucleotide
ugggcucucaggauucuua

SEQ ID NO: 2791327 - RNA, 19 nt, Artificial Sequence
  Description of Artificial Sequence: Synthetic oligonucleotide
caauuauaaaccguagcua

SEQ ID NO: 2791328 - RNA, 19 nt, Artificial Sequence
  Description of Artificial Sequence: Synthetic oligonucleotide
ucugcuuacagagcugauu

SEQ ID NO: 2791329 - RNA, 19 nt, Artificial Sequence
  Description of Artificial Sequence: Synthetic oligonucleotide
cuuccuugaguuucagaga

SEQ ID NO: 2791330 - RNA, 19 nt, Artificial Sequence
  Description of Artificial Sequence: Synthetic oligonucleotide
gcuuacagagcugauuuug

SEQ ID NO: 2791331 - RNA, 19 nt, Artificial Sequence
  Description of Artificial Sequence: Synthetic oligonucleotide
ccuugaguuucagagacag

SEQ ID NO: 2791332 - RNA, 19 nt, Artificial Sequence
  Description of Artificial Sequence: Synthetic oligonucleotide
uccuugaguuucagagaca

SEQ ID NO: 2791333 - RNA, 19 nt, Artificial Sequence
  Description of Artificial Sequence: Synthetic oligonucleotide
ggaaaacauauaugggcuc

SEQ ID NO: 2791334 - RNA, 19 nt, Artificial Sequence
  Description of Artificial Sequence: Synthetic oligonucleotide
guuuaucuucauuagcuuu

SEQ ID NO: 2791335 - RNA, 19 nt, Artificial Sequence
  Description of Artificial Sequence: Synthetic oligonucleotide
aucucuguacauguccgcu

SEQ ID NO: 2791336 - RNA, 19 nt, Artificial Sequence
  Description of Artificial Sequence: Synthetic oligonucleotide
caccauccuuucuucuucc

SEQ ID NO: 2791337 - RNA, 19 nt, Artificial Sequence
  Description of Artificial Sequence: Synthetic oligonucleotide
ucuccaccauccuuucuuc

SEQ ID NO: 2791338 - RNA, 19 nt, Artificial Sequence
  Description of Artificial Sequence: Synthetic oligonucleotide
agcagucagacacuucaua

SEQ ID NO: 2791339 - RNA, 19 nt, Artificial Sequence
  Description of Artificial Sequence: Synthetic oligonucleotide
cuuccugacuuucuccuga

SEQ ID NO: 2791340 - RNA, 19 nt, Artificial Sequence
  Description of Artificial Sequence: Synthetic oligonucleotide
agacacuucauaaucucua

SEQ ID NO: 2791341 - RNA, 19 nt, Artificial Sequence
  Description of Artificial Sequence: Synthetic oligonucleotide
uuucugcaggcguuucagu

SEQ ID NO: 2791342 - RNA, 19 nt, Artificial Sequence
  Description of Artificial Sequence: Synthetic oligonucleotide
caauacuagugaauauaaa

SEQ ID NO: 2791343 - RNA, 19 nt, Artificial Sequence
  Description of Artificial Sequence: Synthetic oligonucleotide
accaucuuuaacagguuau

SEQ ID NO: 2791344 - RNA, 19 nt, Artificial Sequence
  Description of Artificial Sequence: Synthetic oligonucleotide
accaggaaccuuccuaauu

SEQ ID NO: 2791345 - RNA, 19 nt, Artificial Sequence
  Description of Artificial Sequence: Synthetic oligonucleotide
guacauguccgcugauuuc

SEQ ID NO: 2791346 - RNA, 19 nt, Artificial Sequence
  Description of Artificial Sequence: Synthetic oligonucleotide
cacuuccaauucuugcuuc

SEQ ID NO: 2791347 - RNA, 19 nt, Artificial Sequence
  Description of Artificial Sequence: Synthetic oligonucleotide
ggaaaugguuuccuucuuc

SEQ ID NO: 2791348 - RNA, 19 nt, Artificial Sequence
  Description of Artificial Sequence: Synthetic oligonucleotide
uuuccaguccaaggcaauc

SEQ ID NO: 2791349 - RNA, 19 nt, Artificial Sequence
  Description of Artificial Sequence: Synthetic oligonucleotide
ccaauucuugcuucuugcc

SEQ ID NO: 2791350 - RNA, 19 nt, Artificial Sequence
  Description of Artificial Sequence: Synthetic oligonucleotide
ucuugccuuuuacuucauc

SEQ ID NO: 2791351 - RNA, 19 nt, Artificial Sequence
  Description of Artificial Sequence: Synthetic oligonucleotide
caggaaccuuccuaauuuc

SEQ ID NO: 2791352 - RNA, 19 nt, Artificial Sequence
  Description of Artificial Sequence: Synthetic oligonucleotide
cauuagcaagaaacgcuga

SEQ ID NO: 2791353 - RNA, 19 nt, Artificial Sequence
  Description of Artificial Sequence: Synthetic oligonucleotide
auuauaaaccguagcuaua

SEQ ID NO: 2791354 - RNA, 19 nt, Artificial Sequence
  Description of Artificial Sequence: Synthetic oligonucleotide
cuagcuucauuuaggcuua

SEQ ID NO: 2791355 - RNA, 19 nt, Artificial Sequence
  Description of Artificial Sequence: Synthetic oligonucleotide
ugcuaucagcacuuccaau

SEQ ID NO: 2791356 - RNA, 19 nt, Artificial Sequence
  Description of Artificial Sequence: Synthetic oligonucleotide
uggaaaugguuuccuucuu

SEQ ID NO: 2791357 - RNA, 19 nt, Artificial Sequence
  Description of Artificial Sequence: Synthetic oligonucleotide
uaaaagcuuuccgaacauu

SEQ ID NO: 2791358 - RNA, 19 nt, Artificial Sequence
  Description of Artificial Sequence: Synthetic oligonucleotide
ucaggauucuuagggucaa

SEQ ID NO: 2791359 - RNA, 19 nt, Artificial Sequence
  Description of Artificial Sequence: Synthetic oligonucleotide
gaguuucagagacagcuuu

SEQ ID NO: 2791360 - RNA, 19 nt, Artificial Sequence
  Description of Artificial Sequence: Synthetic oligonucleotide
cuuaagguccuugauauuu

SEQ ID NO: 2791361 - RNA, 19 nt, Artificial Sequence
  Description of Artificial Sequence: Synthetic oligonucleotide
cucuguacauguccgcuga

SEQ ID NO: 2791362 - RNA, 19 nt, Artificial Sequence
  Description of Artificial Sequence: Synthetic oligonucleotide
uuccgaacauuagcaagaa

SEQ ID NO: 2791363 - RNA, 19 nt, Artificial Sequence
  Description of Artificial Sequence: Synthetic oligonucleotide
gcuuagggaaaacauauau

SEQ ID NO: 2791364 - RNA, 19 nt, Artificial Sequence
  Description of Artificial Sequence: Synthetic oligonucleotide
guccuugauauuugcuauc

SEQ ID NO: 2791365 - RNA, 19 nt, Artificial Sequence
  Description of Artificial Sequence: Synthetic oligonucleotide
ccuuuuacuucaucaacca

SEQ ID NO: 2791366 - RNA, 19 nt, Artificial Sequence
  Description of Artificial Sequence: Synthetic oligonucleotide
guuuccuucuuccuagaau

SEQ ID NO: 2791367 - RNA, 19 nt, Artificial Sequence
  Description of Artificial Sequence: Synthetic oligonucleotide
agcuucauuuaggcuuagg

SEQ ID NO: 2791368 - RNA, 19 nt, Artificial Sequence
  Description of Artificial Sequence: Synthetic oligonucleotide
aggauucuuagggucaaua

SEQ ID NO: 2791369 - RNA, 19 nt, Artificial Sequence
  Description of Artificial Sequence: Synthetic oligonucleotide
ggcucucaggauucuuagg

SEQ ID NO: 2791370 - RNA, 19 nt, Artificial Sequence
  Description of Artificial Sequence: Synthetic oligonucleotide
caauucuugcuucuugccu

SEQ ID NO: 2791371 - RNA, 19 nt, Artificial Sequence
  Description of Artificial Sequence: Synthetic oligonucleotide
gggaaaacauauaugggcu

SEQ ID NO: 2791372 - RNA, 19 nt, Artificial Sequence
  Description of Artificial Sequence: Synthetic oligonucleotide
gggcucucaggauucuuag

SEQ ID NO: 2791373 - RNA, 19 nt, Artificial Sequence
  Description of Artificial Sequence: Synthetic oligonucleotide
accguagcuauaaaagcuu

SEQ ID NO: 2791374 - RNA, 19 nt, Artificial Sequence
  Description of Artificial Sequence: Synthetic oligonucleotide
guuggucuuccugacuuuc

SEQ ID NO: 2791375 - RNA, 19 nt, Artificial Sequence
  Description of Artificial Sequence: Synthetic oligonucleotide
ccuuccuaauuuccagucc

SEQ ID NO: 2791376 - RNA, 19 nt, Artificial Sequence
  Description of Artificial Sequence: Synthetic oligonucleotide
ugguuuccuucuuccuaga

SEQ ID NO: 2791377 - RNA, 19 nt, Artificial Sequence
  Description of Artificial Sequence: Synthetic oligonucleotide
ugcuuacagagcugauuuu

SEQ ID NO: 2791378 - RNA, 19 nt, Artificial Sequence
  Description of Artificial Sequence: Synthetic oligonucleotide
gucuuccugacuuucuccu

SEQ ID NO: 2791379 - RNA, 19 nt, Artificial Sequence
  Description of Artificial Sequence: Synthetic oligonucleotide
ggaaccuuccuaauuucca

SEQ ID NO: 2791380 - RNA, 19 nt, Artificial Sequence
  Description of Artificial Sequence: Synthetic oligonucleotide
cauuagcuuuguuagcagu

SEQ ID NO: 2791381 - RNA, 19 nt, Artificial Sequence
  Description of Artificial Sequence: Synthetic oligonucleotide
uuccugacuuucuccugaa

SEQ ID NO: 2791382 - RNA, 19 nt, Artificial Sequence
  Description of Artificial Sequence: Synthetic oligonucleotide
ucuguacauguccgcugau

SEQ ID NO: 2791383 - RNA, 19 nt, Artificial Sequence
  Description of Artificial Sequence: Synthetic oligonucleotide
cuuuguuagcaguggaaau

SEQ ID NO: 2791384 - RNA, 19 nt, Artificial Sequence
  Description of Artificial Sequence: Synthetic oligonucleotide
uguuggucuuccugacuuu

SEQ ID NO: 2791385 - RNA, 19 nt, Artificial Sequence
  Description of Artificial Sequence: Synthetic oligonucleotide
ccuagaauacucuuccuua

SEQ ID NO: 2791386 - RNA, 19 nt, Artificial Sequence
  Description of Artificial Sequence: Synthetic oligonucleotide
ggcacucaagaugagguga

SEQ ID NO: 2791387 - RNA, 19 nt, Artificial Sequence
  Description of Artificial Sequence: Synthetic oligonucleotide
gcuaucagcacuuccaauu

SEQ ID NO: 2791388 - RNA, 19 nt, Artificial Sequence
  Description of Artificial Sequence: Synthetic oligonucleotide
agcuuuguuagcaguggaa

SEQ ID NO: 2791389 - RNA, 19 nt, Artificial Sequence
  Description of Artificial Sequence: Synthetic oligonucleotide
uucugcuuacagagcugau

SEQ ID NO: 2791390 - RNA, 19 nt, Artificial Sequence
  Description of Artificial Sequence: Synthetic oligonucleotide
cugcuuacagagcugauuu

SEQ ID NO: 2791391 - RNA, 19 nt, Artificial Sequence
  Description of Artificial Sequence: Synthetic oligonucleotide
cuucuuccuagaauacucu

SEQ ID NO: 2791392 - RNA, 19 nt, Artificial Sequence
  Description of Artificial Sequence: Synthetic oligonucleotide
uccugacuuucuccugaaa

SEQ ID NO: 2791393 - RNA, 19 nt, Artificial Sequence
  Description of Artificial Sequence: Synthetic oligonucleotide
agggucaauacuagugaau

SEQ ID NO: 2791394 - RNA, 19 nt, Artificial Sequence
  Description of Artificial Sequence: Synthetic oligonucleotide
gggucaauacuagugaaua

SEQ ID NO: 2791395 - RNA, 19 nt, Artificial Sequence
  Description of Artificial Sequence: Synthetic oligonucleotide
ugauuucugcaggcguuuc

SEQ ID NO: 2791396 - RNA, 19 nt, Artificial Sequence
  Description of Artificial Sequence: Synthetic oligonucleotide
cuuuaacagguuaucuuuu

SEQ ID NO: 2791397 - RNA, 19 nt, Artificial Sequence
  Description of Artificial Sequence: Synthetic oligonucleotide
caucuuuaacagguuaucu

SEQ ID NO: 2791398 - RNA, 19 nt, Artificial Sequence
  Description of Artificial Sequence: Synthetic oligonucleotide
cacucaagaugaggugagc

SEQ ID NO: 2791399 - RNA, 19 nt, Artificial Sequence
  Description of Artificial Sequence: Synthetic oligonucleotide
gucagacacuucauaaucu

SEQ ID NO: 2791400 - RNA, 19 nt, Artificial Sequence
  Description of Artificial Sequence: Synthetic oligonucleotide
caggcguuucaguuuaucu

SEQ ID NO: 2791401 - RNA, 19 nt, Artificial Sequence
  Description of Artificial Sequence: Synthetic oligonucleotide
auucugcuaggcacucaag

SEQ ID NO: 2791402 - RNA, 19 nt, Artificial Sequence
  Description of Artificial Sequence: Synthetic oligonucleotide
aguuucagagacagcuuuu

SEQ ID NO: 2791403 - RNA, 19 nt, Artificial Sequence
  Description of Artificial Sequence: Synthetic oligonucleotide
cagacacuucauaaucucu

SEQ ID NO: 2791404 - RNA, 19 nt, Artificial Sequence
  Description of Artificial Sequence: Synthetic oligonucleotide
gcacucaagaugaggugag

SEQ ID NO: 2791405 - RNA, 19 nt, Artificial Sequence
  Description of Artificial Sequence: Synthetic oligonucleotide
cuucaucaaccaucuuuaa

SEQ ID NO: 2791406 - RNA, 19 nt, Artificial Sequence
  Description of Artificial Sequence: Synthetic oligonucleotide
gacuuucuccugaaauucu

SEQ ID NO: 2791407 - RNA, 19 nt, Artificial Sequence
  Description of Artificial Sequence: Synthetic oligonucleotide
cuucuuccuugaguuucag

SEQ ID NO: 2791408 - RNA, 19 nt, Artificial Sequence
  Description of Artificial Sequence: Synthetic oligonucleotide
cauuuaggcuuagggaaaa

SEQ ID NO: 2791409 - RNA, 19 nt, Artificial Sequence
  Description of Artificial Sequence: Synthetic oligonucleotide
ccugaaauucugcuaggca

SEQ ID NO: 2791410 - RNA, 19 nt, Artificial Sequence
  Description of Artificial Sequence: Synthetic oligonucleotide
uuucuugaaugagcuuauu

SEQ ID NO: 2791411 - RNA, 19 nt, Artificial Sequence
  Description of Artificial Sequence: Synthetic oligonucleotide
ccuugauauuugcuaucag

SEQ ID NO: 2791412 - RNA, 19 nt, Artificial Sequence
  Description of Artificial Sequence: Synthetic oligonucleotide
uaugggcucucaggauucu

SEQ ID NO: 2791413 - RNA, 19 nt, Artificial Sequence
  Description of Artificial Sequence: Synthetic oligonucleotide
gguccuugauauuugcuau

SEQ ID NO: 2791414 - RNA, 19 nt, Artificial Sequence
  Description of Artificial Sequence: Synthetic oligonucleotide
uuacuucaucaaccaucuu

SEQ ID NO: 2791415 - RNA, 19 nt, Artificial Sequence
  Description of Artificial Sequence: Synthetic oligonucleotide
guuagcaguggaaaugguu

SEQ ID NO: 2791416 - RNA, 19 nt, Artificial Sequence
  Description of Artificial Sequence: Synthetic oligonucleotide
ccaucuuuaacagguuauc

SEQ ID NO: 2791417 - RNA, 19 nt, Artificial Sequence
  Description of Artificial Sequence: Synthetic oligonucleotide
cucucaggauucuuagggu

SEQ ID NO: 2791418 - RNA, 19 nt, Artificial Sequence
  Description of Artificial Sequence: Synthetic oligonucleotide
gcuuuccgaacauuagcaa

SEQ ID NO: 2791419 - RNA, 19 nt, Artificial Sequence
  Description of Artificial Sequence: Synthetic oligonucleotide
uucuugccuuuuacuucau

SEQ ID NO: 2791420 - RNA, 19 nt, Artificial Sequence
  Description of Artificial Sequence: Synthetic oligonucleotide
cguagcuauaaaagcuuuc

SEQ ID NO: 2791421 - RNA, 19 nt, Artificial Sequence
  Description of Artificial Sequence: Synthetic oligonucleotide
cugcaggcguuucaguuua

SEQ ID NO: 2791422 - RNA, 19 nt, Artificial Sequence
  Description of Artificial Sequence: Synthetic oligonucleotide
acauguccgcugauuucug

SEQ ID NO: 2791423 - RNA, 19 nt, Artificial Sequence
  Description of Artificial Sequence: Synthetic oligonucleotide
ccaccauccuuucuucuuc

SEQ ID NO: 2791424 - RNA, 19 nt, Artificial Sequence
  Description of Artificial Sequence: Synthetic oligonucleotide
uagcuucauuuaggcuuag

SEQ ID NO: 2791425 - RNA, 19 nt, Artificial Sequence
  Description of Artificial Sequence: Synthetic oligonucleotide
cucuagcuucauuuaggcu

SEQ ID NO: 2791426 - RNA, 19 nt, Artificial Sequence
  Description of Artificial Sequence: Synthetic oligonucleotide
gcugauuuugauaguccaa

SEQ ID NO: 2791427 - RNA, 19 nt, Artificial Sequence
  Description of Artificial Sequence: Synthetic oligonucleotide
ggucaauacuagugaauau

SEQ ID NO: 2791428 - RNA, 19 nt, Artificial Sequence
  Description of Artificial Sequence: Synthetic oligonucleotide
cauaaucucuagcuucauu

SEQ ID NO: 2791429 - RNA, 19 nt, Artificial Sequence
  Description of Artificial Sequence: Synthetic oligonucleotide
gguuuccuucuuccuagaa

SEQ ID NO: 2791430 - RNA, 19 nt, Artificial Sequence
  Description of Artificial Sequence: Synthetic oligonucleotide
ccugacuuucuccugaaau

SEQ ID NO: 2791431 - RNA, 19 nt, Artificial Sequence
  Description of Artificial Sequence: Synthetic oligonucleotide
ugcaggcguuucaguuuau

SEQ ID NO: 2791432 - RNA, 19 nt, Artificial Sequence
  Description of Artificial Sequence: Synthetic oligonucleotide
ccaggaaccuuccuaauuu

SEQ ID NO: 2791433 - RNA, 19 nt, Artificial Sequence
  Description of Artificial Sequence: Synthetic oligonucleotide
gcguuucaguuuaucuuca

SEQ ID NO: 2791434 - RNA, 19 nt, Artificial Sequence
  Description of Artificial Sequence: Synthetic oligonucleotide
uucuugcuucuugccuuuu

SEQ ID NO: 2791435 - RNA, 19 nt, Artificial Sequence
  Description of Artificial Sequence: Synthetic oligonucleotide
gcuaggcacucaagaugag

SEQ ID NO: 2791436 - RNA, 19 nt, Artificial Sequence
  Description of Artificial Sequence: Synthetic oligonucleotide
cagagcugauuuugauagu

SEQ ID NO: 2791437 - RNA, 19 nt, Artificial Sequence
  Description of Artificial Sequence: Synthetic oligonucleotide
ccgcugauuucugcaggcg

SEQ ID NO: 2791438 - RNA, 19 nt, Artificial Sequence
  Description of Artificial Sequence: Synthetic oligonucleotide
cuccaccauccuuucuucu

SEQ ID NO: 2791439 - RNA, 19 nt, Artificial Sequence
  Description of Artificial Sequence: Synthetic oligonucleotide
gcaggcguuucaguuuauc

SEQ ID NO: 2791440 - RNA, 19 nt, Artificial Sequence
  Description of Artificial Sequence: Synthetic oligonucleotide
augggcucucaggauucuu

SEQ ID NO: 2791441 - RNA, 19 nt, Artificial Sequence
  Description of Artificial Sequence: Synthetic oligonucleotide
caaccaucuuuaacagguu

SEQ ID NO: 2791442 - RNA, 19 nt, Artificial Sequence
  Description of Artificial Sequence: Synthetic oligonucleotide
gcacuuccaauucuugcuu

SEQ ID NO: 2791443 - RNA, 19 nt, Artificial Sequence
  Description of Artificial Sequence: Synthetic oligonucleotide
ggcuuagggaaaacauaua

SEQ ID NO: 2791444 - RNA, 19 nt, Artificial Sequence
  Description of Artificial Sequence: Synthetic oligonucleotide
gcaguggaaaugguuuccu

SEQ ID NO: 2791445 - RNA, 19 nt, Artificial Sequence
  Description of Artificial Sequence: Synthetic oligonucleotide
caguggaaaugguuuccuu

SEQ ID NO: 2791446 - RNA, 19 nt, Artificial Sequence
  Description of Artificial Sequence: Synthetic oligonucleotide
ccaguccaaggcaaucucu

SEQ ID NO: 2791447 - RNA, 19 nt, Artificial Sequence
  Description of Artificial Sequence: Synthetic oligonucleotide
cuguacauguccgcugauu

SEQ ID NO: 2791448 - RNA, 19 nt, Artificial Sequence
  Description of Artificial Sequence: Synthetic oligonucleotide
caucuccaccauccuuucu

SEQ ID NO: 2791449 - RNA, 19 nt, Artificial Sequence
  Description of Artificial Sequence: Synthetic oligonucleotide
caccaggaaccuuccuaau

SEQ ID NO: 2791450 - RNA, 19 nt, Artificial Sequence
  Description of Artificial Sequence: Synthetic oligonucleotide
acucuuccuuaagguccuu

SEQ ID NO: 2791451 - RNA, 19 nt, Artificial Sequence
  Description of Artificial Sequence: Synthetic oligonucleotide
ccguagcuauaaaagcuuu

SEQ ID NO: 2791452 - RNA, 19 nt, Artificial Sequence
  Description of Artificial Sequence: Synthetic oligonucleotide
ccauccuuucuucuuccuu

SEQ ID NO: 2791453 - RNA, 19 nt, Artificial Sequence
  Description of Artificial Sequence: Synthetic oligonucleotide
cgcugauuucugcaggcgu

SEQ ID NO: 2791454 - RNA, 19 nt, Artificial Sequence
  Description of Artificial Sequence: Synthetic oligonucleotide
ccuuaagguccuugauauu

SEQ ID NO: 2791455 - RNA, 19 nt, Artificial Sequence
  Description of Artificial Sequence: Synthetic oligonucleotide
aauaauaagcaaaagucac

SEQ ID NO: 2791456 - RNA, 19 nt, Artificial Sequence
  Description of Artificial Sequence: Synthetic oligonucleotide
caaauaauaagcaaaaguc

SEQ ID NO: 2791457 - RNA, 19 nt, Artificial Sequence
  Description of Artificial Sequence: Synthetic oligonucleotide
ucaaauaauaagcaaaagu

SEQ ID NO: 2791458 - RNA, 19 nt, Artificial Sequence
  Description of Artificial Sequence: Synthetic oligonucleotide
auuaaaacagcuguuaccg

SEQ ID NO: 2791459 - RNA, 19 nt, Artificial Sequence
  Description of Artificial Sequence: Synthetic oligonucleotide
uucgcugccaucuuguugg

SEQ ID NO: 2791460 - RNA, 19 nt, Artificial Sequence
  Description of Artificial Sequence: Synthetic oligonucleotide
auauuaaaacagcuguuac

SEQ ID NO: 2791461 - RNA, 19 nt, Artificial Sequence
  Description of Artificial Sequence: Synthetic oligonucleotide
aaauaauaagcaaaaguca

SEQ ID NO: 2791462 - RNA, 19 nt, Artificial Sequence
  Description of Artificial Sequence: Synthetic oligonucleotide
aaaauauauuaaaacagcu

SEQ ID NO: 2791463 - RNA, 19 nt, Artificial Sequence
  Description of Artificial Sequence: Synthetic oligonucleotide
uauuaaaacagcuguuacc

SEQ ID NO: 2791464 - RNA, 19 nt, Artificial Sequence
  Description of Artificial Sequence: Synthetic oligonucleotide
aaauauauuaaaacagcug

SEQ ID NO: 2791465 - RNA, 19 nt, Artificial Sequence
  Description of Artificial Sequence: Synthetic oligonucleotide
uuggccuuggcuuugacag

SEQ ID NO: 2791466 - RNA, 19 nt, Artificial Sequence
  Description of Artificial Sequence: Synthetic oligonucleotide
auuaucacugucccaggcc

SEQ ID NO: 2791467 - RNA, 19 nt, Artificial Sequence
  Description of Artificial Sequence: Synthetic oligonucleotide
acaccucuaauccagcagc

SEQ ID NO: 2791468 - RNA, 19 nt, Artificial Sequence
  Description of Artificial Sequence: Synthetic oligonucleotide
agucuuuacagguuugacg

SEQ ID NO: 2791469 - RNA, 19 nt, Artificial Sequence
  Description of Artificial Sequence: Synthetic oligonucleotide
aacuccaguaggcuuaguc

SEQ ID NO: 2791470 - RNA, 19 nt, Artificial Sequence
  Description of Artificial Sequence: Synthetic oligonucleotide
ucucaaauaauaagcaaaa

SEQ ID NO: 2791471 - RNA, 19 nt, Artificial Sequence
  Description of Artificial Sequence: Synthetic oligonucleotide
aauggaaggcggcuaacag

SEQ ID NO: 2791472 - RNA, 19 nt, Artificial Sequence
  Description of Artificial Sequence: Synthetic oligonucleotide
uuguuggacacagugacgg

SEQ ID NO: 2791473 - RNA, 19 nt, Artificial Sequence
  Description of Artificial Sequence: Synthetic oligonucleotide
acugucccaggccauaucc

SEQ ID NO: 2791474 - RNA, 19 nt, Artificial Sequence
  Description of Artificial Sequence: Synthetic oligonucleotide
acuccaguaggcuuagucg

SEQ ID NO: 2791475 - RNA, 19 nt, Artificial Sequence
  Description of Artificial Sequence: Synthetic oligonucleotide
uuggcuuugacagucagug

SEQ ID NO: 2791476 - RNA, 19 nt, Artificial Sequence
  Description of Artificial Sequence: Synthetic oligonucleotide
agcuguuaccgucugcugc

SEQ ID NO: 2791477 - RNA, 19 nt, Artificial Sequence
  Description of Artificial Sequence: Synthetic oligonucleotide
uuugacgccaccgucgacg

SEQ ID NO: 2791478 - RNA, 19 nt, Artificial Sequence
  Description of Artificial Sequence: Synthetic oligonucleotide
uuaucacugucccaggcca

SEQ ID NO: 2791479 - RNA, 19 nt, Artificial Sequence
  Description of Artificial Sequence: Synthetic oligonucleotide
uauauuaaaacagcuguua

SEQ ID NO: 2791480 - RNA, 19 nt, Artificial Sequence
  Description of Artificial Sequence: Synthetic oligonucleotide
ucaggacuccagcauacgg

SEQ ID NO: 2791481 - RNA, 19 nt, Artificial Sequence
  Description of Artificial Sequence: Synthetic oligonucleotide
uagagugagauccugucuc

SEQ ID NO: 2791482 - RNA, 19 nt, Artificial Sequence
  Description of Artificial Sequence: Synthetic oligonucleotide
cuccaguaggcuuagucgg

SEQ ID NO: 2791483 - RNA, 19 nt, Artificial Sequence
  Description of Artificial Sequence: Synthetic oligonucleotide
uggaaggcggcuaacaguc

SEQ ID NO: 2791484 - RNA, 19 nt, Artificial Sequence
  Description of Artificial Sequence: Synthetic oligonucleotide
uuagucggcagccuuggca

SEQ ID NO: 2791485 - RNA, 19 nt, Artificial Sequence
  Description of Artificial Sequence: Synthetic oligonucleotide
uauagagugagauccuguc

SEQ ID NO: 2791486 - RNA, 19 nt, Artificial Sequence
  Description of Artificial Sequence: Synthetic oligonucleotide
ucauccaucucuggggugg

SEQ ID NO: 2791487 - RNA, 19 nt, Artificial Sequence
  Description of Artificial Sequence: Synthetic oligonucleotide
caucuuguuggacacagug

SEQ ID NO: 2791488 - RNA, 19 nt, Artificial Sequence
  Description of Artificial Sequence: Synthetic oligonucleotide
ugaaacuccaguaggcuua

SEQ ID NO: 2791489 - RNA, 19 nt, Artificial Sequence
  Description of Artificial Sequence: Synthetic oligonucleotide
aguaggcuuagucggcagc

SEQ ID NO: 2791490 - RNA, 19 nt, Artificial Sequence
  Description of Artificial Sequence: Synthetic oligonucleotide
cugucauuaucacuguccc

SEQ ID NO: 2791491 - RNA, 19 nt, Artificial Sequence
  Description of Artificial Sequence: Synthetic oligonucleotide
uccagcauacggcaggaca

SEQ ID NO: 2791492 - RNA, 19 nt, Artificial Sequence
  Description of Artificial Sequence: Synthetic oligonucleotide
aacagcuguuaccgucugc

SEQ ID NO: 2791493 - RNA, 19 nt, Artificial Sequence
  Description of Artificial Sequence: Synthetic oligonucleotide
ugucucaaauaauaagcaa

SEQ ID NO: 2791494 - RNA, 19 nt, Artificial Sequence
  Description of Artificial Sequence: Synthetic oligonucleotide
cucuaauccagcagccugg

SEQ ID NO: 2791495 - RNA, 19 nt, Artificial Sequence
  Description of Artificial Sequence: Synthetic oligonucleotide
gacuccagcauacggcagg

SEQ ID NO: 2791496 - RNA, 19 nt, Artificial Sequence
  Description of Artificial Sequence: Synthetic oligonucleotide
ucggggaggucauaggugc

SEQ ID NO: 2791497 - RNA, 19 nt, Artificial Sequence
  Description of Artificial Sequence: Synthetic oligonucleotide
gacacagugacggagaucu

SEQ ID NO: 2791498 - RNA, 19 nt, Artificial Sequence
  Description of Artificial Sequence: Synthetic oligonucleotide
aggagggucaggcaggaug

SEQ ID NO: 2791499 - RNA, 19 nt, Artificial Sequence
  Description of Artificial Sequence: Synthetic oligonucleotide
aaaacagcuguuaccgucu

SEQ ID NO: 2791500 - RNA, 19 nt, Artificial Sequence
  Description of Artificial Sequence: Synthetic oligonucleotide
uacagguuugacgccaccg

SEQ ID NO: 2791501 - RNA, 19 nt, Artificial Sequence
  Description of Artificial Sequence: Synthetic oligonucleotide
ucauuaucacugucccagg

SEQ ID NO: 2791502 - RNA, 19 nt, Artificial Sequence
  Description of Artificial Sequence: Synthetic oligonucleotide
ugacagucagugcuggcug

SEQ ID NO: 2791503 - RNA, 19 nt, Artificial Sequence
  Description of Artificial Sequence: Synthetic oligonucleotide
cuuccuagcuucuucagga

SEQ ID NO: 2791504 - RNA, 19 nt, Artificial Sequence
  Description of Artificial Sequence: Synthetic oligonucleotide
auaauaagcaaaagucaca

SEQ ID NO: 2791505 - RNA, 19 nt, Artificial Sequence
  Description of Artificial Sequence: Synthetic oligonucleotide
ucuauagagugagauccug

SEQ ID NO: 2791506 - RNA, 19 nt, Artificial Sequence
  Description of Artificial Sequence: Synthetic oligonucleotide
cuuguuggacacagugacg

SEQ ID NO: 2791507 - RNA, 19 nt, Artificial Sequence
  Description of Artificial Sequence: Synthetic oligonucleotide
caggacuccagcauacggc

SEQ ID NO: 2791508 - RNA, 19 nt, Artificial Sequence
  Description of Artificial Sequence: Synthetic oligonucleotide
auagagugagauccugucu

SEQ ID NO: 2791509 - RNA, 19 nt, Artificial Sequence
  Description of Artificial Sequence: Synthetic oligonucleotide
ugggguggccccuaagcgg

SEQ ID NO: 2791510 - RNA, 19 nt, Artificial Sequence
  Description of Artificial Sequence: Synthetic oligonucleotide
uaacagucuuuacagguuu

SEQ ID NO: 2791511 - RNA, 19 nt, Artificial Sequence
  Description of Artificial Sequence: Synthetic oligonucleotide
cugucucaaauaauaagca

SEQ ID NO: 2791512 - RNA, 19 nt, Artificial Sequence
  Description of Artificial Sequence: Synthetic oligonucleotide
uuggacacagugacggaga

SEQ ID NO: 2791513 - RNA, 19 nt, Artificial Sequence
  Description of Artificial Sequence: Synthetic oligonucleotide
cucaaauaauaagcaaaag

SEQ ID NO: 2791514 - RNA, 19 nt, Artificial Sequence
  Description of Artificial Sequence: Synthetic oligonucleotide
ucucggggaggucauaggu

SEQ ID NO: 2791515 - RNA, 19 nt, Artificial Sequence
  Description of Artificial Sequence: Synthetic oligonucleotide
gacgccaccgucgacgagg

SEQ ID NO: 2791516 - RNA, 19 nt, Artificial Sequence
  Description of Artificial Sequence: Synthetic oligonucleotide
gucucaaauaauaagcaaa

SEQ ID NO: 2791517 - RNA, 19 nt, Artificial Sequence
  Description of Artificial Sequence: Synthetic oligonucleotide
cauuaucacugucccaggc

SEQ ID NO: 2791518 - RNA, 19 nt, Artificial Sequence
  Description of Artificial Sequence: Synthetic oligonucleotide
uagucggcagccuuggcac

SEQ ID NO: 2791519 - RNA, 19 nt, Artificial Sequence
  Description of Artificial Sequence: Synthetic oligonucleotide
uuaaaacagcuguuaccgu

SEQ ID NO: 2791520 - RNA, 19 nt, Artificial Sequence
  Description of Artificial Sequence: Synthetic oligonucleotide
aggacuccagcauacggca

SEQ ID NO: 2791521 - RNA, 19 nt, Artificial Sequence
  Description of Artificial Sequence: Synthetic oligonucleotide
uucuucaggacuccagcau

SEQ ID NO: 2791522 - RNA, 19 nt, Artificial Sequence
  Description of Artificial Sequence: Synthetic oligonucleotide
acagugacggagaucuugg

SEQ ID NO: 2791523 - RNA, 19 nt, Artificial Sequence
  Description of Artificial Sequence: Synthetic oligonucleotide
gacagucagugcuggcugg

SEQ ID NO: 2791524 - RNA, 19 nt, Artificial Sequence
  Description of Artificial Sequence: Synthetic oligonucleotide
auggaaggcggcuaacagu

SEQ ID NO: 2791525 - RNA, 19 nt, Artificial Sequence
  Description of Artificial Sequence: Synthetic oligonucleotide
uaagcggcugaaacuccag

SEQ ID NO: 2791526 - RNA, 19 nt, Artificial Sequence
  Description of Artificial Sequence: Synthetic oligonucleotide
agucccuccagccugggaa

SEQ ID NO: 2791527 - RNA, 19 nt, Artificial Sequence
  Description of Artificial Sequence: Synthetic oligonucleotide
uccaguaggcuuagucggc

SEQ ID NO: 2791528 - RNA, 19 nt, Artificial Sequence
  Description of Artificial Sequence: Synthetic oligonucleotide
guuggacacagugacggag

SEQ ID NO: 2791529 - RNA, 19 nt, Artificial Sequence
  Description of Artificial Sequence: Synthetic oligonucleotide
aaacagcuguuaccgucug

SEQ ID NO: 2791530 - RNA, 19 nt, Artificial Sequence
  Description of Artificial Sequence: Synthetic oligonucleotide
cuuguggggcccuuccuag

SEQ ID NO: 2791531 - RNA, 19 nt, Artificial Sequence
  Description of Artificial Sequence: Synthetic oligonucleotide
accgucugcugccccaccc

SEQ ID NO: 2791532 - RNA, 19 nt, Artificial Sequence
  Description of Artificial Sequence: Synthetic oligonucleotide
acagguuugacgccaccgu

SEQ ID NO: 2791533 - RNA, 19 nt, Artificial Sequence
  Description of Artificial Sequence: Synthetic oligonucleotide
cacaccucuaauccagcag

SEQ ID NO: 2791534 - RNA, 19 nt, Artificial Sequence
  Description of Artificial Sequence: Synthetic oligonucleotide
cuuugacagucagugcugg

SEQ ID NO: 2791535 - RNA, 19 nt, Artificial Sequence
  Description of Artificial Sequence: Synthetic oligonucleotide
ugucauuaucacuguccca

SEQ ID NO: 2791536 - RNA, 19 nt, Artificial Sequence
  Description of Artificial Sequence: Synthetic oligonucleotide
gaggucauaggugcaggag

SEQ ID NO: 2791537 - RNA, 19 nt, Artificial Sequence
  Description of Artificial Sequence: Synthetic oligonucleotide
agccuuggcacucuucgcu

SEQ ID NO: 2791538 - RNA, 19 nt, Artificial Sequence
  Description of Artificial Sequence: Synthetic oligonucleotide
uguggggcccuuccuagcu

SEQ ID NO: 2791539 - RNA, 19 nt, Artificial Sequence
  Description of Artificial Sequence: Synthetic oligonucleotide
aaagacggccagggcaggg

SEQ ID NO: 2791540 - RNA, 19 nt, Artificial Sequence
  Description of Artificial Sequence: Synthetic oligonucleotide
cugggguggccccuaagcg

SEQ ID NO: 2791541 - RNA, 19 nt, Artificial Sequence
  Description of Artificial Sequence: Synthetic oligonucleotide
agguuugacgccaccgucg

SEQ ID NO: 2791542 - RNA, 19 nt, Artificial Sequence
  Description of Artificial Sequence: Synthetic oligonucleotide
cauacggcaggacagagcu

SEQ ID NO: 2791543 - RNA, 19 nt, Artificial Sequence
  Description of Artificial Sequence: Synthetic oligonucleotide
agggagucccuccagccug

SEQ ID NO: 2791544 - RNA, 19 nt, Artificial Sequence
  Description of Artificial Sequence: Synthetic oligonucleotide
uuugacagucagugcuggc

SEQ ID NO: 2791545 - RNA, 19 nt, Artificial Sequence
  Description of Artificial Sequence: Synthetic oligonucleotide
agagugagauccugucuca

SEQ ID NO: 2791546 - RNA, 19 nt, Artificial Sequence
  Description of Artificial Sequence: Synthetic oligonucleotide
ggucauaggugcaggaggg

SEQ ID NO: 2791547 - RNA, 19 nt, Artificial Sequence
  Description of Artificial Sequence: Synthetic oligonucleotide
gcugucauuaucacugucc

SEQ ID NO: 2791548 - RNA, 19 nt, Artificial Sequence
  Description of Artificial Sequence: Synthetic oligonucleotide
aacagucuuuacagguuug

SEQ ID NO: 2791549 - RNA, 19 nt, Artificial Sequence
  Description of Artificial Sequence: Synthetic oligonucleotide
aagcggcugaaacuccagu

SEQ ID NO: 2791550 - RNA, 19 nt, Artificial Sequence
  Description of Artificial Sequence: Synthetic oligonucleotide
aaaagacggccagggcagg

SEQ ID NO: 2791551 - RNA, 19 nt, Artificial Sequence
  Description of Artificial Sequence: Synthetic oligonucleotide
guaggcuuagucggcagcc

SEQ ID NO: 2791552 - RNA, 19 nt, Artificial Sequence
  Description of Artificial Sequence: Synthetic oligonucleotide
ucauaggugcaggaggguc

SEQ ID NO: 2791553 - RNA, 19 nt, Artificial Sequence
  Description of Artificial Sequence: Synthetic oligonucleotide
uucaggacuccagcauacg

SEQ ID NO: 2791554 - RNA, 19 nt, Artificial Sequence
  Description of Artificial Sequence: Synthetic oligonucleotide
gaaacuccaguaggcuuag

SEQ ID NO: 2791555 - RNA, 19 nt, Artificial Sequence
  Description of Artificial Sequence: Synthetic oligonucleotide
caccucuaauccagcagcc

SEQ ID NO: 2791556 - RNA, 19 nt, Artificial Sequence
  Description of Artificial Sequence: Synthetic oligonucleotide
auauccucauccaucucug

SEQ ID NO: 2791557 - RNA, 19 nt, Artificial Sequence
  Description of Artificial Sequence: Synthetic oligonucleotide
aggacagagcugcugcugu

SEQ ID NO: 2791558 - RNA, 19 nt, Artificial Sequence
  Description of Artificial Sequence: Synthetic oligonucleotide
cugcaggccaggaucuggg

SEQ ID NO: 2791559 - RNA, 19 nt, Artificial Sequence
  Description of Artificial Sequence: Synthetic oligonucleotide
ugcacaccucuaauccagc

SEQ ID NO: 2791560 - RNA, 19 nt, Artificial Sequence
  Description of Artificial Sequence: Synthetic oligonucleotide
cauauccucauccaucucu

SEQ ID NO: 2791561 - RNA, 19 nt, Artificial Sequence
  Description of Artificial Sequence: Synthetic oligonucleotide
uuacagguuugacgccacc

SEQ ID NO: 2791562 - RNA, 19 nt, Artificial Sequence
  Description of Artificial Sequence: Synthetic oligonucleotide
gaugcagcggacggucggg

SEQ ID NO: 2791563 - RNA, 19 nt, Artificial Sequence
  Description of Artificial Sequence: Synthetic oligonucleotide
cacagugacggagaucuug

SEQ ID NO: 2791564 - RNA, 19 nt, Artificial Sequence
  Description of Artificial Sequence: Synthetic oligonucleotide
cauaggugcaggaggguca

SEQ ID NO: 2791565 - RNA, 19 nt, Artificial Sequence
  Description of Artificial Sequence: Synthetic oligonucleotide
ugcugcugucauuaucacu

SEQ ID NO: 2791566 - RNA, 19 nt, Artificial Sequence
  Description of Artificial Sequence: Synthetic oligonucleotide
gcuguuaccgucugcugcc

SEQ ID NO: 2791567 - RNA, 19 nt, Artificial Sequence
  Description of Artificial Sequence: Synthetic oligonucleotide
gugcacaccucuaauccag

SEQ ID NO: 2791568 - RNA, 19 nt, Artificial Sequence
  Description of Artificial Sequence: Synthetic oligonucleotide
gaauggaaggcggcuaaca

SEQ ID NO: 2791569 - RNA, 19 nt, Artificial Sequence
  Description of Artificial Sequence: Synthetic oligonucleotide
ggucaggcaggaugcagcg

SEQ ID NO: 2791570 - RNA, 19 nt, Artificial Sequence
  Description of Artificial Sequence: Synthetic oligonucleotide
cuucgcugccaucuuguug

SEQ ID NO: 2791571 - RNA, 19 nt, Artificial Sequence
  Description of Artificial Sequence: Synthetic oligonucleotide
uccaucucugggguggccc

SEQ ID NO: 2791572 - RNA, 19 nt, Artificial Sequence
  Description of Artificial Sequence: Synthetic oligonucleotide
ggcuaacagucuuuacagg

SEQ ID NO: 2791573 - RNA, 19 nt, Artificial Sequence
  Description of Artificial Sequence: Synthetic oligonucleotide
ccagcauacggcaggacag

SEQ ID NO: 2791574 - RNA, 19 nt, Artificial Sequence
  Description of Artificial Sequence: Synthetic oligonucleotide
cugccaucuuguuggacac

SEQ ID NO: 2791575 - RNA, 19 nt, Artificial Sequence
  Description of Artificial Sequence: Synthetic oligonucleotide
ggcaggaugcagcggacgg

SEQ ID NO: 2791576 - RNA, 19 nt, Artificial Sequence
  Description of Artificial Sequence: Synthetic oligonucleotide
ugccccacccaccaaggaa

SEQ ID NO: 2791577 - RNA, 19 nt, Artificial Sequence
  Description of Artificial Sequence: Synthetic oligonucleotide
cuucuucaggacuccagca

SEQ ID NO: 2791578 - RNA, 19 nt, Artificial Sequence
  Description of Artificial Sequence: Synthetic oligonucleotide
uguuaccgucugcugcccc

SEQ ID NO: 2791579 - RNA, 19 nt, Artificial Sequence
  Description of Artificial Sequence: Synthetic oligonucleotide
ggcaggacagagcugcugc

SEQ ID NO: 2791580 - RNA, 19 nt, Artificial Sequence
  Description of Artificial Sequence: Synthetic oligonucleotide
acucuucgcugccaucuug

SEQ ID NO: 2791581 - RNA, 19 nt, Artificial Sequence
  Description of Artificial Sequence: Synthetic oligonucleotide
uguuggacacagugacgga

SEQ ID NO: 2791582 - RNA, 19 nt, Artificial Sequence
  Description of Artificial Sequence: Synthetic oligonucleotide
acagucuuuacagguuuga

SEQ ID NO: 2791583 - RNA, 19 nt, Artificial Sequence
  Description of Artificial Sequence: Synthetic oligonucleotide
gcuaacagucuuuacaggu

SEQ ID NO: 2791584 - RNA, 19 nt, Artificial Sequence
  Description of Artificial Sequence: Synthetic oligonucleotide
gcugccaucuuguuggaca

SEQ ID NO: 2791585 - RNA, 19 nt, Artificial Sequence
  Description of Artificial Sequence: Synthetic oligonucleotide
cuuggcacucuucgcugcc

SEQ ID NO: 2791586 - RNA, 19 nt, Artificial Sequence
  Description of Artificial Sequence: Synthetic oligonucleotide
agcggcugaaacuccagua

SEQ ID NO: 2791587 - RNA, 19 nt, Artificial Sequence
  Description of Artificial Sequence: Synthetic oligonucleotide
uugacgccaccgucgacga

SEQ ID NO: 2791588 - RNA, 19 nt, Artificial Sequence
  Description of Artificial Sequence: Synthetic oligonucleotide
gucagugcuggcuggggac

SEQ ID NO: 2791589 - RNA, 19 nt, Artificial Sequence
  Description of Artificial Sequence: Synthetic oligonucleotide
ccagccugggaauggaagg

SEQ ID NO: 2791590 - RNA, 19 nt, Artificial Sequence
  Description of Artificial Sequence: Synthetic oligonucleotide
auaggugcaggagggucag

SEQ ID NO: 2791591 - RNA, 19 nt, Artificial Sequence
  Description of Artificial Sequence: Synthetic oligonucleotide
ucuaauccagcagccuggu

SEQ ID NO: 2791592 - RNA, 19 nt, Artificial Sequence
  Description of Artificial Sequence: Synthetic oligonucleotide
gcggcugaaacuccaguag

SEQ ID NO: 2791593 - RNA, 19 nt, Artificial Sequence
  Description of Artificial Sequence: Synthetic oligonucleotide
uggcuuugacagucagugc

SEQ ID NO: 2791594 - RNA, 19 nt, Artificial Sequence
  Description of Artificial Sequence: Synthetic oligonucleotide
gcggcuaacagucuuuaca

SEQ ID NO: 2791595 - RNA, 19 nt, Artificial Sequence
  Description of Artificial Sequence: Synthetic oligonucleotide
cuagcuucuucaggacucc

SEQ ID NO: 2791596 - RNA, 19 nt, Artificial Sequence
  Description of Artificial Sequence: Synthetic oligonucleotide
agccugggaauggaaggcg

SEQ ID NO: 2791597 - RNA, 19 nt, Artificial Sequence
  Description of Artificial Sequence: Synthetic oligonucleotide
cuaagcggcugaaacucca

SEQ ID NO: 2791598 - RNA, 19 nt, Artificial Sequence
  Description of Artificial Sequence: Synthetic oligonucleotide
uggacacagugacggagau

SEQ ID NO: 2791599 - RNA, 19 nt, Artificial Sequence
  Description of Artificial Sequence: Synthetic oligonucleotide
gucucggggaggucauagg

SEQ ID NO: 2791600 - RNA, 19 nt, Artificial Sequence
  Description of Artificial Sequence: Synthetic oligonucleotide
ccuagcuucuucaggacuc

SEQ ID NO: 2791601 - RNA, 19 nt, Artificial Sequence
  Description of Artificial Sequence: Synthetic oligonucleotide
ggcuuugacagucagugcu

SEQ ID NO: 2791602 - RNA, 19 nt, Artificial Sequence
  Description of Artificial Sequence: Synthetic oligonucleotide
acagucagugcuggcuggg

SEQ ID NO: 2791603 - RNA, 19 nt, Artificial Sequence
  Description of Artificial Sequence: Synthetic oligonucleotide
agacggccagggcagggag

SEQ ID NO: 2791604 - RNA, 19 nt, Artificial Sequence
  Description of Artificial Sequence: Synthetic oligonucleotide
gaggugccccagcugcagg

SEQ ID NO: 2791605 - RNA, 19 nt, Artificial Sequence
  Description of Artificial Sequence: Synthetic oligonucleotide
agcauacggcaggacagag

SEQ ID NO: 2791606 - RNA, 19 nt, Artificial Sequence
  Description of Artificial Sequence: Synthetic oligonucleotide
cggcuaacagucuuuacag

SEQ ID NO: 2791607 - RNA, 19 nt, Artificial Sequence
  Description of Artificial Sequence: Synthetic oligonucleotide
cuuggccuuggcuuugaca

SEQ ID NO: 2791608 - RNA, 19 nt, Artificial Sequence
  Description of Artificial Sequence: Synthetic oligonucleotide
guuaccgucugcugcccca

SEQ ID NO: 2791609 - RNA, 19 nt, Artificial Sequence
  Description of Artificial Sequence: Synthetic oligonucleotide
agcuucuucaggacuccag

SEQ ID NO: 2791610 - RNA, 19 nt, Artificial Sequence
  Description of Artificial Sequence: Synthetic oligonucleotide
cagucuuuacagguuugac

SEQ ID NO: 2791611 - RNA, 19 nt, Artificial Sequence
  Description of Artificial Sequence: Synthetic oligonucleotide
ggagggucaggcaggaugc

SEQ ID NO: 2791612 - RNA, 19 nt, Artificial Sequence
  Description of Artificial Sequence: Synthetic oligonucleotide
ggagggagucccuccagcc

SEQ ID NO: 2791613 - RNA, 19 nt, Artificial Sequence
  Description of Artificial Sequence: Synthetic oligonucleotide
cagguuugacgccaccguc

SEQ ID NO: 2791614 - RNA, 19 nt, Artificial Sequence
  Description of Artificial Sequence: Synthetic oligonucleotide
ggaugcagcggacggucgg

SEQ ID NO: 2791615 - RNA, 19 nt, Artificial Sequence
  Description of Artificial Sequence: Synthetic oligonucleotide
ccucuaauccagcagccug

SEQ ID NO: 2791616 - RNA, 19 nt, Artificial Sequence
  Description of Artificial Sequence: Synthetic oligonucleotide
ccuuccuagcuucuucagg

SEQ ID NO: 2791617 - RNA, 19 nt, Artificial Sequence
  Description of Artificial Sequence: Synthetic oligonucleotide
aagacggccagggcaggga

SEQ ID NO: 2791618 - RNA, 19 nt, Artificial Sequence
  Description of Artificial Sequence: Synthetic oligonucleotide
cagccugggaauggaaggc

SEQ ID NO: 2791619 - RNA, 19 nt, Artificial Sequence
  Description of Artificial Sequence: Synthetic oligonucleotide
uaucacugucccaggccau

SEQ ID NO: 2791620 - RNA, 19 nt, Artificial Sequence
  Description of Artificial Sequence: Synthetic oligonucleotide
ugccccagcugcaggccag

SEQ ID NO: 2791621 - RNA, 19 nt, Artificial Sequence
  Description of Artificial Sequence: Synthetic oligonucleotide
uuguggggcccuuccuagc

SEQ ID NO: 2791622 - RNA, 19 nt, Artificial Sequence
  Description of Artificial Sequence: Synthetic oligonucleotide
ggcugaaacuccaguaggc

SEQ ID NO: 2791623 - RNA, 19 nt, Artificial Sequence
  Description of Artificial Sequence: Synthetic oligonucleotide
caguaggcuuagucggcag

SEQ ID NO: 2791624 - RNA, 19 nt, Artificial Sequence
  Description of Artificial Sequence: Synthetic oligonucleotide
gacagagcugcugcuguca

SEQ ID NO: 2791625 - RNA, 19 nt, Artificial Sequence
  Description of Artificial Sequence: Synthetic oligonucleotide
cuauagagugagauccugu

SEQ ID NO: 2791626 - RNA, 19 nt, Artificial Sequence
  Description of Artificial Sequence: Synthetic oligonucleotide
ucagugcuggcuggggacu

SEQ ID NO: 2791627 - RNA, 19 nt, Artificial Sequence
  Description of Artificial Sequence: Synthetic oligonucleotide
caggccauauccucaucca

SEQ ID NO: 2791628 - RNA, 19 nt, Artificial Sequence
  Description of Artificial Sequence: Synthetic oligonucleotide
ugcagcggacggucgggcc

SEQ ID NO: 2791629 - RNA, 19 nt, Artificial Sequence
  Description of Artificial Sequence: Synthetic oligonucleotide
ucgggccuuggccuuggcu

SEQ ID NO: 2791630 - RNA, 19 nt, Artificial Sequence
  Description of Artificial Sequence: Synthetic oligonucleotide
cucauccaucucuggggug

SEQ ID NO: 2791631 - RNA, 19 nt, Artificial Sequence
  Description of Artificial Sequence: Synthetic oligonucleotide
augcagcggacggucgggc

SEQ ID NO: 2791632 - RNA, 19 nt, Artificial Sequence
  Description of Artificial Sequence: Synthetic oligonucleotide
caggaugcagcggacgguc

SEQ ID NO: 2791633 - RNA, 19 nt, Artificial Sequence
  Description of Artificial Sequence: Synthetic oligonucleotide
acagagcugcugcugucau

SEQ ID NO: 2791634 - RNA, 19 nt, Artificial Sequence
  Description of Artificial Sequence: Synthetic oligonucleotide
agggucaggcaggaugcag

SEQ ID NO: 2791635 - RNA, 19 nt, Artificial Sequence
  Description of Artificial Sequence: Synthetic oligonucleotide
uggggcccuuccuagcuuc

SEQ ID NO: 2791636 - RNA, 19 nt, Artificial Sequence
  Description of Artificial Sequence: Synthetic oligonucleotide
ucccaggccauauccucau

SEQ ID NO: 2791637 - RNA, 19 nt, Artificial Sequence
  Description of Artificial Sequence: Synthetic oligonucleotide
cagccuuggcacucuucgc

SEQ ID NO: 2791638 - RNA, 19 nt, Artificial Sequence
  Description of Artificial Sequence: Synthetic oligonucleotide
cuuagucggcagccuuggc

SEQ ID NO: 2791639 - RNA, 19 nt, Artificial Sequence
  Description of Artificial Sequence: Synthetic oligonucleotide
gccccuaagcggcugaaac

SEQ ID NO: 2791640 - RNA, 19 nt, Artificial Sequence
  Description of Artificial Sequence: Synthetic oligonucleotide
gcuuagucggcagccuugg

SEQ ID NO: 2791641 - RNA, 19 nt, Artificial Sequence
  Description of Artificial Sequence: Synthetic oligonucleotide
cuaacagucuuuacagguu

SEQ ID NO: 2791642 - RNA, 19 nt, Artificial Sequence
  Description of Artificial Sequence: Synthetic oligonucleotide
ccagcagccuggucuauag

SEQ ID NO: 2791643 - RNA, 19 nt, Artificial Sequence
  Description of Artificial Sequence: Synthetic oligonucleotide
ggacggucgggccuuggcc

SEQ ID NO: 2791644 - RNA, 19 nt, Artificial Sequence
  Description of Artificial Sequence: Synthetic oligonucleotide
gacggucgggccuuggccu

SEQ ID NO: 2791645 - RNA, 19 nt, Artificial Sequence
  Description of Artificial Sequence: Synthetic oligonucleotide
auccaucucugggguggcc

SEQ ID NO: 2791646 - RNA, 19 nt, Artificial Sequence
  Description of Artificial Sequence: Synthetic oligonucleotide
uggcacucuucgcugccau

SEQ ID NO: 2791647 - RNA, 19 nt, Artificial Sequence
  Description of Artificial Sequence: Synthetic oligonucleotide
uaggcuuagucggcagccu

SEQ ID NO: 2791648 - RNA, 19 nt, Artificial Sequence
  Description of Artificial Sequence: Synthetic oligonucleotide
accucuaauccagcagccu

SEQ ID NO: 2791649 - RNA, 19 nt, Artificial Sequence
  Description of Artificial Sequence: Synthetic oligonucleotide
caggacagagcugcugcug

SEQ ID NO: 2791650 - RNA, 19 nt, Artificial Sequence
  Description of Artificial Sequence: Synthetic oligonucleotide
gggacuggccuuguggggc

SEQ ID NO: 2791651 - RNA, 19 nt, Artificial Sequence
  Description of Artificial Sequence: Synthetic oligonucleotide
cagcuguuaccgucugcug

SEQ ID NO: 2791652 - RNA, 19 nt, Artificial Sequence
  Description of Artificial Sequence: Synthetic oligonucleotide
gguuugacgccaccgucga

SEQ ID NO: 2791653 - RNA, 19 nt, Artificial Sequence
  Description of Artificial Sequence: Synthetic oligonucleotide
ccggaggugccccagcugc

SEQ ID NO: 2791654 - RNA, 19 nt, Artificial Sequence
  Description of Artificial Sequence: Synthetic oligonucleotide
uggccuuggcuuugacagu

SEQ ID NO: 2791655 - RNA, 19 nt, Artificial Sequence
  Description of Artificial Sequence: Synthetic oligonucleotide
gcuuugacagucagugcug

SEQ ID NO: 2791656 - RNA, 19 nt, Artificial Sequence
  Description of Artificial Sequence: Synthetic oligonucleotide
uuaccgucugcugccccac

SEQ ID NO: 2791657 - RNA, 19 nt, Artificial Sequence
  Description of Artificial Sequence: Synthetic oligonucleotide
ggggacuggccuugugggg

SEQ ID NO: 2791658 - RNA, 19 nt, Artificial Sequence
  Description of Artificial Sequence: Synthetic oligonucleotide
ggucucggggaggucauag

SEQ ID NO: 2791659 - RNA, 19 nt, Artificial Sequence
  Description of Artificial Sequence: Synthetic oligonucleotide
ucuucgcugccaucuuguu

SEQ ID NO: 2791660 - RNA, 19 nt, Artificial Sequence
  Description of Artificial Sequence: Synthetic oligonucleotide
acuccagcauacggcagga

SEQ ID NO: 2791661 - RNA, 19 nt, Artificial Sequence
  Description of Artificial Sequence: Synthetic oligonucleotide
ccugggaauggaaggcggc

SEQ ID NO: 2791662 - RNA, 19 nt, Artificial Sequence
  Description of Artificial Sequence: Synthetic oligonucleotide
ccuaagcggcugaaacucc

SEQ ID NO: 2791663 - RNA, 19 nt, Artificial Sequence
  Description of Artificial Sequence: Synthetic oligonucleotide
uuggcacucuucgcugcca

SEQ ID NO: 2791664 - RNA, 19 nt, Artificial Sequence
  Description of Artificial Sequence: Synthetic oligonucleotide
gccauauccucauccaucu

SEQ ID NO: 2791665 - RNA, 19 nt, Artificial Sequence
  Description of Artificial Sequence: Synthetic oligonucleotide
aaggcggcuaacagucuuu

SEQ ID NO: 2791666 - RNA, 19 nt, Artificial Sequence
  Description of Artificial Sequence: Synthetic oligonucleotide
ggccauauccucauccauc

SEQ ID NO: 2791667 - RNA, 19 nt, Artificial Sequence
  Description of Artificial Sequence: Synthetic oligonucleotide
gggaggucauaggugcagg

SEQ ID NO: 2791668 - RNA, 19 nt, Artificial Sequence
  Description of Artificial Sequence: Synthetic oligonucleotide
aggcuuagucggcagccuu

SEQ ID NO: 2791669 - RNA, 19 nt, Artificial Sequence
  Description of Artificial Sequence: Synthetic oligonucleotide
cagucagugcuggcugggg

SEQ ID NO: 2791670 - RNA, 19 nt, Artificial Sequence
  Description of Artificial Sequence: Synthetic oligonucleotide
cccuaagcggcugaaacuc

SEQ ID NO: 2791671 - RNA, 19 nt, Artificial Sequence
  Description of Artificial Sequence: Synthetic oligonucleotide
agccggaggugccccagcu

SEQ ID NO: 2791672 - RNA, 19 nt, Artificial Sequence
  Description of Artificial Sequence: Synthetic oligonucleotide
gucaggcaggaugcagcgg

SEQ ID NO: 2791673 - RNA, 19 nt, Artificial Sequence
  Description of Artificial Sequence: Synthetic oligonucleotide
aggaugcagcggacggucg

SEQ ID NO: 2791674 - RNA, 19 nt, Artificial Sequence
  Description of Artificial Sequence: Synthetic oligonucleotide
gaaggcggcuaacagucuu

SEQ ID NO: 2791675 - RNA, 19 nt, Artificial Sequence
  Description of Artificial Sequence: Synthetic oligonucleotide
ucacugucccaggccauau

SEQ ID NO: 2791676 - RNA, 19 nt, Artificial Sequence
  Description of Artificial Sequence: Synthetic oligonucleotide
cuaauccagcagccugguc

SEQ ID NO: 2791677 - RNA, 19 nt, Artificial Sequence
  Description of Artificial Sequence: Synthetic oligonucleotide
uagcuucuucaggacucca

SEQ ID NO: 2791678 - RNA, 19 nt, Artificial Sequence
  Description of Artificial Sequence: Synthetic oligonucleotide
gggagggagucccuccagc

SEQ ID NO: 2791679 - RNA, 19 nt, Artificial Sequence
  Description of Artificial Sequence: Synthetic oligonucleotide
uaccgucugcugccccacc

SEQ ID NO: 2791680 - RNA, 19 nt, Artificial Sequence
  Description of Artificial Sequence: Synthetic oligonucleotide
ugacgccaccgucgacgag

SEQ ID NO: 2791681 - RNA, 19 nt, Artificial Sequence
  Description of Artificial Sequence: Synthetic oligonucleotide
ggaggucauaggugcagga

SEQ ID NO: 2791682 - RNA, 19 nt, Artificial Sequence
  Description of Artificial Sequence: Synthetic oligonucleotide
cggcugaaacuccaguagg

SEQ ID NO: 2791683 - RNA, 19 nt, Artificial Sequence
  Description of Artificial Sequence: Synthetic oligonucleotide
agucggcagccuuggcacu

SEQ ID NO: 2791684 - RNA, 19 nt, Artificial Sequence
  Description of Artificial Sequence: Synthetic oligonucleotide
cugaaacuccaguaggcuu

SEQ ID NO: 2791685 - RNA, 19 nt, Artificial Sequence
  Description of Artificial Sequence: Synthetic oligonucleotide
gggguggccccuaagcggc

SEQ ID NO: 2791686 - RNA, 19 nt, Artificial Sequence
  Description of Artificial Sequence: Synthetic oligonucleotide
gagggagucccuccagccu

SEQ ID NO: 2791687 - RNA, 19 nt, Artificial Sequence
  Description of Artificial Sequence: Synthetic oligonucleotide
ggggaggucauaggugcag

SEQ ID NO: 2791688 - RNA, 19 nt, Artificial Sequence
  Description of Artificial Sequence: Synthetic oligonucleotide
cucuucgcugccaucuugu

SEQ ID NO: 2791689 - RNA, 19 nt, Artificial Sequence
  Description of Artificial Sequence: Synthetic oligonucleotide
cuuggcuuugacagucagu

SEQ ID NO: 2791690 - RNA, 19 nt, Artificial Sequence
  Description of Artificial Sequence: Synthetic oligonucleotide
cuguuaccgucugcugccc

SEQ ID NO: 2791691 - RNA, 19 nt, Artificial Sequence
  Description of Artificial Sequence: Synthetic oligonucleotide
cauccaucucugggguggc

SEQ ID NO: 2791692 - RNA, 19 nt, Artificial Sequence
  Description of Artificial Sequence: Synthetic oligonucleotide
gccugggaauggaaggcgg

SEQ ID NO: 2791693 - RNA, 19 nt, Artificial Sequence
  Description of Artificial Sequence: Synthetic oligonucleotide
ccuuggcuuugacagucag

SEQ ID NO: 2791694 - RNA, 19 nt, Artificial Sequence
  Description of Artificial Sequence: Synthetic oligonucleotide
ccuuggcacucuucgcugc

SEQ ID NO: 2791695 - RNA, 19 nt, Artificial Sequence
  Description of Artificial Sequence: Synthetic oligonucleotide
uggcuggggacuggccuug

SEQ ID NO: 2791696 - RNA, 19 nt, Artificial Sequence
  Description of Artificial Sequence: Synthetic oligonucleotide
ggcuuagucggcagccuug

SEQ ID NO: 2791697 - RNA, 19 nt, Artificial Sequence
  Description of Artificial Sequence: Synthetic oligonucleotide
ucccuccagccugggaaug

SEQ ID NO: 2791698 - RNA, 19 nt, Artificial Sequence
  Description of Artificial Sequence: Synthetic oligonucleotide
gacggccagggcagggagc

SEQ ID NO: 2791699 - RNA, 19 nt, Artificial Sequence
  Description of Artificial Sequence: Synthetic oligonucleotide
ggacuggccuuguggggcc

SEQ ID NO: 2791700 - RNA, 19 nt, Artificial Sequence
  Description of Artificial Sequence: Synthetic oligonucleotide
gagccggaggugccccagc

SEQ ID NO: 2791701 - RNA, 19 nt, Artificial Sequence
  Description of Artificial Sequence: Synthetic oligonucleotide
acgccaccgucgacgaggg

SEQ ID NO: 2791702 - RNA, 19 nt, Artificial Sequence
  Description of Artificial Sequence: Synthetic oligonucleotide
uaggugcaggagggucagg

SEQ ID NO: 2791703 - RNA, 19 nt, Artificial Sequence
  Description of Artificial Sequence: Synthetic oligonucleotide
ggccuuggcuuugacaguc

SEQ ID NO: 2791704 - RNA, 19 nt, Artificial Sequence
  Description of Artificial Sequence: Synthetic oligonucleotide
guuugacgccaccgucgac

SEQ ID NO: 2791705 - RNA, 19 nt, Artificial Sequence
  Description of Artificial Sequence: Synthetic oligonucleotide
ggugcaggagggucaggca

SEQ ID NO: 2791706 - RNA, 19 nt, Artificial Sequence
  Description of Artificial Sequence: Synthetic oligonucleotide
ccaucucugggguggcccc

SEQ ID NO: 2791707 - RNA, 19 nt, Artificial Sequence
  Description of Artificial Sequence: Synthetic oligonucleotide
cucugggguggccccuaag

SEQ ID NO: 2791708 - RNA, 19 nt, Artificial Sequence
  Description of Artificial Sequence: Synthetic oligonucleotide
aucacugucccaggccaua

SEQ ID NO: 2791709 - RNA, 19 nt, Artificial Sequence
  Description of Artificial Sequence: Synthetic oligonucleotide
uccagcagccuggucuaua

SEQ ID NO: 2791710 - RNA, 19 nt, Artificial Sequence
  Description of Artificial Sequence: Synthetic oligonucleotide
ggccuuguggggcccuucc

SEQ ID NO: 2791711 - RNA, 19 nt, Artificial Sequence
  Description of Artificial Sequence: Synthetic oligonucleotide
aaacuccaguaggcuuagu

SEQ ID NO: 2791712 - RNA, 19 nt, Artificial Sequence
  Description of Artificial Sequence: Synthetic oligonucleotide
gcauacggcaggacagagc

SEQ ID NO: 2791713 - RNA, 19 nt, Artificial Sequence
  Description of Artificial Sequence: Synthetic oligonucleotide
ucucugggguggccccuaa

SEQ ID NO: 2791714 - RNA, 19 nt, Artificial Sequence
  Description of Artificial Sequence: Synthetic oligonucleotide
cacugucccaggccauauc

SEQ ID NO: 2791715 - RNA, 19 nt, Artificial Sequence
  Description of Artificial Sequence: Synthetic oligonucleotide
gcacaccucuaauccagca

SEQ ID NO: 2791716 - RNA, 19 nt, Artificial Sequence
  Description of Artificial Sequence: Synthetic oligonucleotide
ucgcugccaucuuguugga

SEQ ID NO: 2791717 - RNA, 19 nt, Artificial Sequence
  Description of Artificial Sequence: Synthetic oligonucleotide
cagugacggagaucuugga

SEQ ID NO: 2791718 - RNA, 19 nt, Artificial Sequence
  Description of Artificial Sequence: Synthetic oligonucleotide
gcccuuccuagcuucuuca

SEQ ID NO: 2791719 - RNA, 19 nt, Artificial Sequence
  Description of Artificial Sequence: Synthetic oligonucleotide
gucugcugccccacccacc

SEQ ID NO: 2791720 - RNA, 19 nt, Artificial Sequence
  Description of Artificial Sequence: Synthetic oligonucleotide
ggaggugccccagcugcag

SEQ ID NO: 2791721 - RNA, 19 nt, Artificial Sequence
  Description of Artificial Sequence: Synthetic oligonucleotide
cccuuccuagcuucuucag

SEQ ID NO: 2791722 - RNA, 19 nt, Artificial Sequence
  Description of Artificial Sequence: Synthetic oligonucleotide
ggcccuuccuagcuucuuc

SEQ ID NO: 2791723 - RNA, 19 nt, Artificial Sequence
  Description of Artificial Sequence: Synthetic oligonucleotide
ucggcagccuuggcacucu

SEQ ID NO: 2791724 - RNA, 19 nt, Artificial Sequence
  Description of Artificial Sequence: Synthetic oligonucleotide
ggaauggaaggcggcuaac

SEQ ID NO: 2791725 - RNA, 19 nt, Artificial Sequence
  Description of Artificial Sequence: Synthetic oligonucleotide
gagucccuccagccuggga

SEQ ID NO: 2791726 - RNA, 19 nt, Artificial Sequence
  Description of Artificial Sequence: Synthetic oligonucleotide
auacggcaggacagagcug

SEQ ID NO: 2791727 - RNA, 19 nt, Artificial Sequence
  Description of Artificial Sequence: Synthetic oligonucleotide
gcugaaacuccaguaggcu

SEQ ID NO: 2791728 - RNA, 19 nt, Artificial Sequence
  Description of Artificial Sequence: Synthetic oligonucleotide
ggcggcuaacagucuuuac

SEQ ID NO: 2791729 - RNA, 19 nt, Artificial Sequence
  Description of Artificial Sequence: Synthetic oligonucleotide
ggacagagcugcugcuguc

SEQ ID NO: 2791730 - RNA, 19 nt, Artificial Sequence
  Description of Artificial Sequence: Synthetic oligonucleotide
gucggcagccuuggcacuc

SEQ ID NO: 2791731 - RNA, 19 nt, Artificial Sequence
  Description of Artificial Sequence: Synthetic oligonucleotide
cagcauacggcaggacaga

SEQ ID NO: 2791732 - RNA, 19 nt, Artificial Sequence
  Description of Artificial Sequence: Synthetic oligonucleotide
ggacuccagcauacggcag

SEQ ID NO: 2791733 - RNA, 19 nt, Artificial Sequence
  Description of Artificial Sequence: Synthetic oligonucleotide
aggcggcuaacagucuuua

SEQ ID NO: 2791734 - RNA, 19 nt, Artificial Sequence
  Description of Artificial Sequence: Synthetic oligonucleotide
cagugcuggcuggggacug

SEQ ID NO: 2791735 - RNA, 19 nt, Artificial Sequence
  Description of Artificial Sequence: Synthetic oligonucleotide
agcugcaggccaggaucug

SEQ ID NO: 2791736 - RNA, 19 nt, Artificial Sequence
  Description of Artificial Sequence: Synthetic oligonucleotide
gacuggccuuguggggccc

SEQ ID NO: 2791737 - RNA, 19 nt, Artificial Sequence
  Description of Artificial Sequence: Synthetic oligonucleotide
gugcuggcuggggacuggc

SEQ ID NO: 2791738 - RNA, 19 nt, Artificial Sequence
  Description of Artificial Sequence: Synthetic oligonucleotide
gagggucaggcaggaugca

SEQ ID NO: 2791739 - RNA, 19 nt, Artificial Sequence
  Description of Artificial Sequence: Synthetic oligonucleotide
cugucccaggccauauccu

SEQ ID NO: 2791740 - RNA, 19 nt, Artificial Sequence
  Description of Artificial Sequence: Synthetic oligonucleotide
acggucgggccuuggccuu

SEQ ID NO: 2791741 - RNA, 19 nt, Artificial Sequence
  Description of Artificial Sequence: Synthetic oligonucleotide
gugccccagcugcaggcca

SEQ ID NO: 2791742 - RNA, 19 nt, Artificial Sequence
  Description of Artificial Sequence: Synthetic oligonucleotide
guggccccuaagcggcuga

SEQ ID NO: 2791743 - RNA, 19 nt, Artificial Sequence
  Description of Artificial Sequence: Synthetic oligonucleotide
gcacucuucgcugccaucu

SEQ ID NO: 2791744 - RNA, 19 nt, Artificial Sequence
  Description of Artificial Sequence: Synthetic oligonucleotide
gcuggcuggggacuggccu

SEQ ID NO: 2791745 - RNA, 19 nt, Artificial Sequence
  Description of Artificial Sequence: Synthetic oligonucleotide
cuccagcauacggcaggac

SEQ ID NO: 2791746 - RNA, 19 nt, Artificial Sequence
  Description of Artificial Sequence: Synthetic oligonucleotide
gccccacccaccaaggaaa

SEQ ID NO: 2791747 - RNA, 19 nt, Artificial Sequence
  Description of Artificial Sequence: Synthetic oligonucleotide
cagcagccuggucuauaga

SEQ ID NO: 2791748 - RNA, 19 nt, Artificial Sequence
  Description of Artificial Sequence: Synthetic oligonucleotide
ggcacucuucgcugccauc

SEQ ID NO: 2791749 - RNA, 19 nt, Artificial Sequence
  Description of Artificial Sequence: Synthetic oligonucleotide
acuggccuuguggggcccu

SEQ ID NO: 2791750 - RNA, 19 nt, Artificial Sequence
  Description of Artificial Sequence: Synthetic oligonucleotide
ggagccggaggugccccag

SEQ ID NO: 2791751 - RNA, 19 nt, Artificial Sequence
  Description of Artificial Sequence: Synthetic oligonucleotide
uggccccuaagcggcugaa

SEQ ID NO: 2791752 - RNA, 19 nt, Artificial Sequence
  Description of Artificial Sequence: Synthetic oligonucleotide
ggacacagugacggagauc

SEQ ID NO: 2791753 - RNA, 19 nt, Artificial Sequence
  Description of Artificial Sequence: Synthetic oligonucleotide
gucauaggugcaggagggu

SEQ ID NO: 2791754 - RNA, 19 nt, Artificial Sequence
  Description of Artificial Sequence: Synthetic oligonucleotide
cugccccacccaccaagga

SEQ ID NO: 2791755 - RNA, 19 nt, Artificial Sequence
  Description of Artificial Sequence: Synthetic oligonucleotide
gcuggggacuggccuugug

SEQ ID NO: 2791756 - RNA, 19 nt, Artificial Sequence
  Description of Artificial Sequence: Synthetic oligonucleotide
ccauauccucauccaucuc

SEQ ID NO: 2791757 - RNA, 19 nt, Artificial Sequence
  Description of Artificial Sequence: Synthetic oligonucleotide
uggccuuguggggcccuuc

SEQ ID NO: 2791758 - RNA, 19 nt, Artificial Sequence
  Description of Artificial Sequence: Synthetic oligonucleotide
gucccuccagccugggaau

SEQ ID NO: 2791759 - RNA, 19 nt, Artificial Sequence
  Description of Artificial Sequence: Synthetic oligonucleotide
ggucgggccuuggccuugg

SEQ ID NO: 2791760 - RNA, 19 nt, Artificial Sequence
  Description of Artificial Sequence: Synthetic oligonucleotide
ccaguaggcuuagucggca

SEQ ID NO: 2791761 - RNA, 19 nt, Artificial Sequence
  Description of Artificial Sequence: Synthetic oligonucleotide
aucucugggguggccccua

SEQ ID NO: 2791762 - RNA, 19 nt, Artificial Sequence
  Description of Artificial Sequence: Synthetic oligonucleotide
ccuuguggggcccuuccua

SEQ ID NO: 2791763 - RNA, 19 nt, Artificial Sequence
  Description of Artificial Sequence: Synthetic oligonucleotide
ccucauccaucucuggggu

SEQ ID NO: 2791764 - RNA, 19 nt, Artificial Sequence
  Description of Artificial Sequence: Synthetic oligonucleotide
cuggcuggggacuggccuu

SEQ ID NO: 2791765 - RNA, 19 nt, Artificial Sequence
  Description of Artificial Sequence: Synthetic oligonucleotide
gcagcggacggucgggccu

SEQ ID NO: 2791766 - RNA, 19 nt, Artificial Sequence
  Description of Artificial Sequence: Synthetic oligonucleotide
gucgggccuuggccuuggc

SEQ ID NO: 2791767 - RNA, 19 nt, Artificial Sequence
  Description of Artificial Sequence: Synthetic oligonucleotide
ccccuaagcggcugaaacu

SEQ ID NO: 2791768 - RNA, 19 nt, Artificial Sequence
  Description of Artificial Sequence: Synthetic oligonucleotide
cgucugcugccccacccac

SEQ ID NO: 2791769 - RNA, 19 nt, Artificial Sequence
  Description of Artificial Sequence: Synthetic oligonucleotide
cggacggucgggccuuggc

SEQ ID NO: 2791770 - RNA, 19 nt, Artificial Sequence
  Description of Artificial Sequence: Synthetic oligonucleotide
auccagcagccuggucuau

SEQ ID NO: 2791771 - RNA, 19 nt, Artificial Sequence
  Description of Artificial Sequence: Synthetic oligonucleotide
gagcugcugcugucauuau

SEQ ID NO: 2791772 - RNA, 19 nt, Artificial Sequence
  Description of Artificial Sequence: Synthetic oligonucleotide
agcggacggucgggccuug

SEQ ID NO: 2791773 - RNA, 19 nt, Artificial Sequence
  Description of Artificial Sequence: Synthetic oligonucleotide
ccgucugcugccccaccca

SEQ ID NO: 2791774 - RNA, 19 nt, Artificial Sequence
  Description of Artificial Sequence: Synthetic oligonucleotide
gccuuggcuuugacaguca

SEQ ID NO: 2791775 - RNA, 19 nt, Artificial Sequence
  Description of Artificial Sequence: Synthetic oligonucleotide
gggagccggaggugcccca

SEQ ID NO: 2791776 - RNA, 19 nt, Artificial Sequence
  Description of Artificial Sequence: Synthetic oligonucleotide
cacucuucgcugccaucuu

SEQ ID NO: 2791777 - RNA, 19 nt, Artificial Sequence
  Description of Artificial Sequence: Synthetic oligonucleotide
guggggcccuuccuagcuu

SEQ ID NO: 2791778 - RNA, 19 nt, Artificial Sequence
  Description of Artificial Sequence: Synthetic oligonucleotide
ccuccagccugggaaugga

SEQ ID NO: 2791779 - RNA, 19 nt, Artificial Sequence
  Description of Artificial Sequence: Synthetic oligonucleotide
cccaggccauauccucauc

SEQ ID NO: 2791780 - RNA, 19 nt, Artificial Sequence
  Description of Artificial Sequence: Synthetic oligonucleotide
caucucugggguggccccu

SEQ ID NO: 2791781 - RNA, 19 nt, Artificial Sequence
  Description of Artificial Sequence: Synthetic oligonucleotide
ggaaggcggcuaacagucu

SEQ ID NO: 2791782 - RNA, 19 nt, Artificial Sequence
  Description of Artificial Sequence: Synthetic oligonucleotide
gccuuguggggcccuuccu

SEQ ID NO: 2791783 - RNA, 19 nt, Artificial Sequence
  Description of Artificial Sequence: Synthetic oligonucleotide
ccagggcagggagccggag

SEQ ID NO: 2791784 - RNA, 19 nt, Artificial Sequence
  Description of Artificial Sequence: Synthetic oligonucleotide
cgggccuuggccuuggcuu

SEQ ID NO: 2791785 - RNA, 19 nt, Artificial Sequence
  Description of Artificial Sequence: Synthetic oligonucleotide
gcggacggucgggccuugg

SEQ ID NO: 2791786 - RNA, 19 nt, Artificial Sequence
  Description of Artificial Sequence: Synthetic oligonucleotide
ccaucuuguuggacacagu

SEQ ID NO: 2791787 - RNA, 19 nt, Artificial Sequence
  Description of Artificial Sequence: Synthetic oligonucleotide
ccccacccaccaaggaaaa

SEQ ID NO: 2791788 - RNA, 19 nt, Artificial Sequence
  Description of Artificial Sequence: Synthetic oligonucleotide
ggccccuaagcggcugaaa

SEQ ID NO: 2791789 - RNA, 19 nt, Artificial Sequence
  Description of Artificial Sequence: Synthetic oligonucleotide
cggggaggucauaggugca

SEQ ID NO: 2791790 - RNA, 19 nt, Artificial Sequence
  Description of Artificial Sequence: Synthetic oligonucleotide
cggaggugccccagcugca

SEQ ID NO: 2791791 - RNA, 19 nt, Artificial Sequence
  Description of Artificial Sequence: Synthetic oligonucleotide
cgcugccaucuuguuggac

SEQ ID NO: 2791792 - RNA, 19 nt, Artificial Sequence
  Description of Artificial Sequence: Synthetic oligonucleotide
ggggucucggggaggucau

SEQ ID NO: 2791793 - RNA, 19 nt, Artificial Sequence
  Description of Artificial Sequence: Synthetic oligonucleotide
cccagcugcaggccaggau

SEQ ID NO: 2791794 - RNA, 19 nt, Artificial Sequence
  Description of Artificial Sequence: Synthetic oligonucleotide
ggggcccuuccuagcuucu

SEQ ID NO: 2791795 - RNA, 19 nt, Artificial Sequence
  Description of Artificial Sequence: Synthetic oligonucleotide
cagcggacggucgggccuu

SEQ ID NO: 2791796 - RNA, 19 nt, Artificial Sequence
  Description of Artificial Sequence: Synthetic oligonucleotide
gggucucggggaggucaua

SEQ ID NO: 2791797 - RNA, 19 nt, Artificial Sequence
  Description of Artificial Sequence: Synthetic oligonucleotide
cggucgggccuuggccuug

SEQ ID NO: 2791798 - RNA, 19 nt, Artificial Sequence
  Description of Artificial Sequence: Synthetic oligonucleotide
cuggccuuguggggcccuu

SEQ ID NO: 2791799 - RNA, 19 nt, Artificial Sequence
  Description of Artificial Sequence: Synthetic oligonucleotide
gggcccuuccuagcuucuu

SEQ ID NO: 2791800 - RNA, 19 nt, Artificial Sequence
  Description of Artificial Sequence: Synthetic oligonucleotide
ggguggccccuaagcggcu

SEQ ID NO: 2791801 - RNA, 19 nt, Artificial Sequence
  Description of Artificial Sequence: Synthetic oligonucleotide
ggcuggggacuggccuugu

SEQ ID NO: 2791802 - RNA, 19 nt, Artificial Sequence
  Description of Artificial Sequence: Synthetic oligonucleotide
cggcagccuuggcacucuu

SEQ ID NO: 2791803 - RNA, 19 nt, Artificial Sequence
  Description of Artificial Sequence: Synthetic oligonucleotide
aauccuuugccccagaaac

SEQ ID NO: 2791804 - RNA, 19 nt, Artificial Sequence
  Description of Artificial Sequence: Synthetic oligonucleotide
aaguggacaauccuuugcc

SEQ ID NO: 2791805 - RNA, 19 nt, Artificial Sequence
  Description of Artificial Sequence: Synthetic oligonucleotide
ucaggcaugguccaaacag

SEQ ID NO: 2791806 - RNA, 19 nt, Artificial Sequence
  Description of Artificial Sequence: Synthetic oligonucleotide
uuugucugcagcuugaaga

SEQ ID NO: 2791807 - RNA, 19 nt, Artificial Sequence
  Description of Artificial Sequence: Synthetic oligonucleotide
uggaugacaacagagaugc

SEQ ID NO: 2791808 - RNA, 19 nt, Artificial Sequence
  Description of Artificial Sequence: Synthetic oligonucleotide
ucugaccucuuucagaucc

SEQ ID NO: 2791809 - RNA, 19 nt, Artificial Sequence
  Description of Artificial Sequence: Synthetic oligonucleotide
agcacugucaccuuggucu

SEQ ID NO: 2791810 - RNA, 19 nt, Artificial Sequence
  Description of Artificial Sequence: Synthetic oligonucleotide
agcuugaagaauuccuccc

SEQ ID NO: 2791811 - RNA, 19 nt, Artificial Sequence
  Description of Artificial Sequence: Synthetic oligonucleotide
gaugacaacagagaugccc

SEQ ID NO: 2791812 - RNA, 19 nt, Artificial Sequence
  Description of Artificial Sequence: Synthetic oligonucleotide
aagaauuccucccugguuu

SEQ ID NO: 2791813 - RNA, 19 nt, Artificial Sequence
  Description of Artificial Sequence: Synthetic oligonucleotide
aaugucucccuccagcacu

SEQ ID NO: 2791814 - RNA, 19 nt, Artificial Sequence
  Description of Artificial Sequence: Synthetic oligonucleotide
guacccaagacgucaaugg

SEQ ID NO: 2791815 - RNA, 19 nt, Artificial Sequence
  Description of Artificial Sequence: Synthetic oligonucleotide
aaugguacccaagacguca

SEQ ID NO: 2791816 - RNA, 19 nt, Artificial Sequence
  Description of Artificial Sequence: Synthetic oligonucleotide
uguggaugacaacagagau

SEQ ID NO: 2791817 - RNA, 19 nt, Artificial Sequence
  Description of Artificial Sequence: Synthetic oligonucleotide
aguggacaauccuuugccc

SEQ ID NO: 2791818 - RNA, 19 nt, Artificial Sequence
  Description of Artificial Sequence: Synthetic oligonucleotide
acaacagagaugcccuggc

SEQ ID NO: 2791819 - RNA, 19 nt, Artificial Sequence
  Description of Artificial Sequence: Synthetic oligonucleotide
uugaagaauuccucccugg

SEQ ID NO: 2791820 - RNA, 19 nt, Artificial Sequence
  Description of Artificial Sequence: Synthetic oligonucleotide
aauggcagcagcagugugg

SEQ ID NO: 2791821 - RNA, 19 nt, Artificial Sequence
  Description of Artificial Sequence: Synthetic oligonucleotide
uggucugaugaucuugucc

SEQ ID NO: 2791822 - RNA, 19 nt, Artificial Sequence
  Description of Artificial Sequence: Synthetic oligonucleotide
ucagguacugggcauccag

SEQ ID NO: 2791823 - RNA, 19 nt, Artificial Sequence
  Description of Artificial Sequence: Synthetic oligonucleotide
gggaaugguacccaagacg

SEQ ID NO: 2791824 - RNA, 19 nt, Artificial Sequence
  Description of Artificial Sequence: Synthetic oligonucleotide
ucaccuuggucuuugucug

SEQ ID NO: 2791825 - RNA, 19 nt, Artificial Sequence
  Description of Artificial Sequence: Synthetic oligonucleotide
ugaagaauuccucccuggu

SEQ ID NO: 2791826 - RNA, 19 nt, Artificial Sequence
  Description of Artificial Sequence: Synthetic oligonucleotide
ucuggucugaugaucuugu

SEQ ID NO: 2791827 - RNA, 19 nt, Artificial Sequence
  Description of Artificial Sequence: Synthetic oligonucleotide
caugguccaaacaggaaac

SEQ ID NO: 2791828 - RNA, 19 nt, Artificial Sequence
  Description of Artificial Sequence: Synthetic oligonucleotide
aguguggaugacaacagag

SEQ ID NO: 2791829 - RNA, 19 nt, Artificial Sequence
  Description of Artificial Sequence: Synthetic oligonucleotide
agcagcuccacucaggcau

SEQ ID NO: 2791830 - RNA, 19 nt, Artificial Sequence
  Description of Artificial Sequence: Synthetic oligonucleotide
agcaguguggaugacaaca

SEQ ID NO: 2791831 - RNA, 19 nt, Artificial Sequence
  Description of Artificial Sequence: Synthetic oligonucleotide
ugggcauccagaaugucuc

SEQ ID NO: 2791832 - RNA, 19 nt, Artificial Sequence
  Description of Artificial Sequence: Synthetic oligonucleotide
accucuuucagauccuucu

SEQ ID NO: 2791833 - RNA, 19 nt, Artificial Sequence
  Description of Artificial Sequence: Synthetic oligonucleotide
cuccacucaggcauggucc

SEQ ID NO: 2791834 - RNA, 19 nt, Artificial Sequence
  Description of Artificial Sequence: Synthetic oligonucleotide
cagaaugucucccuccagc

SEQ ID NO: 2791835 - RNA, 19 nt, Artificial Sequence
  Description of Artificial Sequence: Synthetic oligonucleotide
acucugaccucuuucagau

SEQ ID NO: 2791836 - RNA, 19 nt, Artificial Sequence
  Description of Artificial Sequence: Synthetic oligonucleotide
ucaccaagcagcuccacuc

SEQ ID NO: 2791837 - RNA, 19 nt, Artificial Sequence
  Description of Artificial Sequence: Synthetic oligonucleotide
uucuccugcaccagcaagu

SEQ ID NO: 2791838 - RNA, 19 nt, Artificial Sequence
  Description of Artificial Sequence: Synthetic oligonucleotide
caaguggacaauccuuugc

SEQ ID NO: 2791839 - RNA, 19 nt, Artificial Sequence
  Description of Artificial Sequence: Synthetic oligonucleotide
ugcaccagcaaguggacaa

SEQ ID NO: 2791840 - RNA, 19 nt, Artificial Sequence
  Description of Artificial Sequence: Synthetic oligonucleotide
ucugggaaugguacccaag

SEQ ID NO: 2791841 - RNA, 19 nt, Artificial Sequence
  Description of Artificial Sequence: Synthetic oligonucleotide
guggacaauccuuugcccc

SEQ ID NO: 2791842 - RNA, 19 nt, Artificial Sequence
  Description of Artificial Sequence: Synthetic oligonucleotide
augaucuuguccaggacuc

SEQ ID NO: 2791843 - RNA, 19 nt, Artificial Sequence
  Description of Artificial Sequence: Synthetic oligonucleotide
uacccaagacgucaauggc

SEQ ID NO: 2791844 - RNA, 19 nt, Artificial Sequence
  Description of Artificial Sequence: Synthetic oligonucleotide
agaaugucucccuccagca

SEQ ID NO: 2791845 - RNA, 19 nt, Artificial Sequence
  Description of Artificial Sequence: Synthetic oligonucleotide
ucuccucagguacugggca

SEQ ID NO: 2791846 - RNA, 19 nt, Artificial Sequence
  Description of Artificial Sequence: Synthetic oligonucleotide
agaauuccucccugguuuc

SEQ ID NO: 2791847 - RNA, 19 nt, Artificial Sequence
  Description of Artificial Sequence: Synthetic oligonucleotide
cagcuugaagaauuccucc

SEQ ID NO: 2791848 - RNA, 19 nt, Artificial Sequence
  Description of Artificial Sequence: Synthetic oligonucleotide
ucugucugggaaugguacc

SEQ ID NO: 2791849 - RNA, 19 nt, Artificial Sequence
  Description of Artificial Sequence: Synthetic oligonucleotide
caagcagcuccacucaggc

SEQ ID NO: 2791850 - RNA, 19 nt, Artificial Sequence
  Description of Artificial Sequence: Synthetic oligonucleotide
cugguuucuggucugauga

SEQ ID NO: 2791851 - RNA, 19 nt, Artificial Sequence
  Description of Artificial Sequence: Synthetic oligonucleotide
uuggucuuugucugcagcu

SEQ ID NO: 2791852 - RNA, 19 nt, Artificial Sequence
  Description of Artificial Sequence: Synthetic oligonucleotide
ggucugaugaucuugucca

SEQ ID NO: 2791853 - RNA, 19 nt, Artificial Sequence
  Description of Artificial Sequence: Synthetic oligonucleotide
gacaacagagaugcccugg

SEQ ID NO: 2791854 - RNA, 19 nt, Artificial Sequence
  Description of Artificial Sequence: Synthetic oligonucleotide
agacgucaauggcagcagc

SEQ ID NO: 2791855 - RNA, 19 nt, Artificial Sequence
  Description of Artificial Sequence: Synthetic oligonucleotide
uggacaauccuuugcccca

SEQ ID NO: 2791856 - RNA, 19 nt, Artificial Sequence
  Description of Artificial Sequence: Synthetic oligonucleotide
caggcaugguccaaacagg

SEQ ID NO: 2791857 - RNA, 19 nt, Artificial Sequence
  Description of Artificial Sequence: Synthetic oligonucleotide
aggacucugaccucuuuca

SEQ ID NO: 2791858 - RNA, 19 nt, Artificial Sequence
  Description of Artificial Sequence: Synthetic oligonucleotide
cuuggucuuugucugcagc

SEQ ID NO: 2791859 - RNA, 19 nt, Artificial Sequence
  Description of Artificial Sequence: Synthetic oligonucleotide
uucagauccuucuccugca

SEQ ID NO: 2791860 - RNA, 19 nt, Artificial Sequence
  Description of Artificial Sequence: Synthetic oligonucleotide
accagcaaguggacaaucc

SEQ ID NO: 2791861 - RNA, 19 nt, Artificial Sequence
  Description of Artificial Sequence: Synthetic oligonucleotide
aagacgucaauggcagcag

SEQ ID NO: 2791862 - RNA, 19 nt, Artificial Sequence
  Description of Artificial Sequence: Synthetic oligonucleotide
aaacccuccugccccuguc

SEQ ID NO: 2791863 - RNA, 19 nt, Artificial Sequence
  Description of Artificial Sequence: Synthetic oligonucleotide
ugggaaugguacccaagac

SEQ ID NO: 2791864 - RNA, 19 nt, Artificial Sequence
  Description of Artificial Sequence: Synthetic oligonucleotide
auuccucccugguuucugg

SEQ ID NO: 2791865 - RNA, 19 nt, Artificial Sequence
  Description of Artificial Sequence: Synthetic oligonucleotide
acucaggcaugguccaaac

SEQ ID NO: 2791866 - RNA, 19 nt, Artificial Sequence
  Description of Artificial Sequence: Synthetic oligonucleotide
augacaacagagaugcccu

SEQ ID NO: 2791867 - RNA, 19 nt, Artificial Sequence
  Description of Artificial Sequence: Synthetic oligonucleotide
uuugccccagaaacccucc

SEQ ID NO: 2791868 - RNA, 19 nt, Artificial Sequence
  Description of Artificial Sequence: Synthetic oligonucleotide
auccuuugccccagaaacc

SEQ ID NO: 2791869 - RNA, 19 nt, Artificial Sequence
  Description of Artificial Sequence: Synthetic oligonucleotide
ugaugaucuuguccaggac

SEQ ID NO: 2791870 - RNA, 19 nt, Artificial Sequence
  Description of Artificial Sequence: Synthetic oligonucleotide
gacucugaccucuuucaga

SEQ ID NO: 2791871 - RNA, 19 nt, Artificial Sequence
  Description of Artificial Sequence: Synthetic oligonucleotide
cuuucagauccuucuccug

SEQ ID NO: 2791872 - RNA, 19 nt, Artificial Sequence
  Description of Artificial Sequence: Synthetic oligonucleotide
cugaugaucuuguccagga

SEQ ID NO: 2791873 - RNA, 19 nt, Artificial Sequence
  Description of Artificial Sequence: Synthetic oligonucleotide
gucaccuuggucuuugucu

SEQ ID NO: 2791874 - RNA, 19 nt, Artificial Sequence
  Description of Artificial Sequence: Synthetic oligonucleotide
cugucugggaaugguaccc

SEQ ID NO: 2791875 - RNA, 19 nt, Artificial Sequence
  Description of Artificial Sequence: Synthetic oligonucleotide
cucuccucagguacugggc

SEQ ID NO: 2791876 - RNA, 19 nt, Artificial Sequence
  Description of Artificial Sequence: Synthetic oligonucleotide
cuucuccugcaccagcaag

SEQ ID NO: 2791877 - RNA, 19 nt, Artificial Sequence
  Description of Artificial Sequence: Synthetic oligonucleotide
cuuugccccagaaacccuc

SEQ ID NO: 2791878 - RNA, 19 nt, Artificial Sequence
  Description of Artificial Sequence: Synthetic oligonucleotide
gaaugucucccuccagcac

SEQ ID NO: 2791879 - RNA, 19 nt, Artificial Sequence
  Description of Artificial Sequence: Synthetic oligonucleotide
uccacucaggcauggucca

SEQ ID NO: 2791880 - RNA, 19 nt, Artificial Sequence
  Description of Artificial Sequence: Synthetic oligonucleotide
guggaugacaacagagaug

SEQ ID NO: 2791881 - RNA, 19 nt, Artificial Sequence
  Description of Artificial Sequence: Synthetic oligonucleotide
cugggaaugguacccaaga

SEQ ID NO: 2791882 - RNA, 19 nt, Artificial Sequence
  Description of Artificial Sequence: Synthetic oligonucleotide
ugacaacagagaugcccug

SEQ ID NO: 2791883 - RNA, 19 nt, Artificial Sequence
  Description of Artificial Sequence: Synthetic oligonucleotide
cccaagacgucaauggcag

SEQ ID NO: 2791884 - RNA, 19 nt, Artificial Sequence
  Description of Artificial Sequence: Synthetic oligonucleotide
acgucaauggcagcagcag

SEQ ID NO: 2791885 - RNA, 19 nt, Artificial Sequence
  Description of Artificial Sequence: Synthetic oligonucleotide
caagacgucaauggcagca

SEQ ID NO: 2791886 - RNA, 19 nt, Artificial Sequence
  Description of Artificial Sequence: Synthetic oligonucleotide
ugccccagaaacccuccug

SEQ ID NO: 2791887 - RNA, 19 nt, Artificial Sequence
  Description of Artificial Sequence: Synthetic oligonucleotide
ucagauccuucuccugcac

SEQ ID NO: 2791888 - RNA, 19 nt, Artificial Sequence
  Description of Artificial Sequence: Synthetic oligonucleotide
ccagaaacccuccugcccc

SEQ ID NO: 2791889 - RNA, 19 nt, Artificial Sequence
  Description of Artificial Sequence: Synthetic oligonucleotide
ugccccugucaccaagcag

SEQ ID NO: 2791890 - RNA, 19 nt, Artificial Sequence
  Description of Artificial Sequence: Synthetic oligonucleotide
ucuccugcaccagcaagug

SEQ ID NO: 2791891 - RNA, 19 nt, Artificial Sequence
  Description of Artificial Sequence: Synthetic oligonucleotide
cagauccuucuccugcacc

SEQ ID NO: 2791892 - RNA, 19 nt, Artificial Sequence
  Description of Artificial Sequence: Synthetic oligonucleotide
ugucaccuuggucuuuguc

SEQ ID NO: 2791893 - RNA, 19 nt, Artificial Sequence
  Description of Artificial Sequence: Synthetic oligonucleotide
gucugucugggaaugguac

SEQ ID NO: 2791894 - RNA, 19 nt, Artificial Sequence
  Description of Artificial Sequence: Synthetic oligonucleotide
acugucaccuuggucuuug

SEQ ID NO: 2791895 - RNA, 19 nt, Artificial Sequence
  Description of Artificial Sequence: Synthetic oligonucleotide
gcaugguccaaacaggaaa

SEQ ID NO: 2791896 - RNA, 19 nt, Artificial Sequence
  Description of Artificial Sequence: Synthetic oligonucleotide
aagcagcuccacucaggca

SEQ ID NO: 2791897 - RNA, 19 nt, Artificial Sequence
  Description of Artificial Sequence: Synthetic oligonucleotide
aacccuccugccccuguca

SEQ ID NO: 2791898 - RNA, 19 nt, Artificial Sequence
  Description of Artificial Sequence: Synthetic oligonucleotide
gacgucaauggcagcagca

SEQ ID NO: 2791899 - RNA, 19 nt, Artificial Sequence
  Description of Artificial Sequence: Synthetic oligonucleotide
ggaaugguacccaagacgu

SEQ ID NO: 2791900 - RNA, 19 nt, Artificial Sequence
  Description of Artificial Sequence: Synthetic oligonucleotide
acccuccugccccugucac

SEQ ID NO: 2791901 - RNA, 19 nt, Artificial Sequence
  Description of Artificial Sequence: Synthetic oligonucleotide
gcucuccucagguacuggg

SEQ ID NO: 2791902 - RNA, 19 nt, Artificial Sequence
  Description of Artificial Sequence: Synthetic oligonucleotide
guguggaugacaacagaga

SEQ ID NO: 2791903 - RNA, 19 nt, Artificial Sequence
  Description of Artificial Sequence: Synthetic oligonucleotide
acccaagacgucaauggca

SEQ ID NO: 2791904 - RNA, 19 nt, Artificial Sequence
  Description of Artificial Sequence: Synthetic oligonucleotide
gccccugucaccaagcagc

SEQ ID NO: 2791905 - RNA, 19 nt, Artificial Sequence
  Description of Artificial Sequence: Synthetic oligonucleotide
ggcagcagcaguguggaug

SEQ ID NO: 2791906 - RNA, 19 nt, Artificial Sequence
  Description of Artificial Sequence: Synthetic oligonucleotide
auggcagcagcagugugga

SEQ ID NO: 2791907 - RNA, 19 nt, Artificial Sequence
  Description of Artificial Sequence: Synthetic oligonucleotide
caggacucugaccucuuuc

SEQ ID NO: 2791908 - RNA, 19 nt, Artificial Sequence
  Description of Artificial Sequence: Synthetic oligonucleotide
ggucuuugucugcagcuug

SEQ ID NO: 2791909 - RNA, 19 nt, Artificial Sequence
  Description of Artificial Sequence: Synthetic oligonucleotide
gauccuucuccugcaccag

SEQ ID NO: 2791910 - RNA, 19 nt, Artificial Sequence
  Description of Artificial Sequence: Synthetic oligonucleotide
agcaaguggacaauccuuu

SEQ ID NO: 2791911 - RNA, 19 nt, Artificial Sequence
  Description of Artificial Sequence: Synthetic oligonucleotide
ugcccuggcaggcucuccu

SEQ ID NO: 2791912 - RNA, 19 nt, Artificial Sequence
  Description of Artificial Sequence: Synthetic oligonucleotide
acaauccuuugccccagaa

SEQ ID NO: 2791913 - RNA, 19 nt, Artificial Sequence
  Description of Artificial Sequence: Synthetic oligonucleotide
ugucugggaaugguaccca

SEQ ID NO: 2791914 - RNA, 19 nt, Artificial Sequence
  Description of Artificial Sequence: Synthetic oligonucleotide
guuucuggucugaugaucu

SEQ ID NO: 2791915 - RNA, 19 nt, Artificial Sequence
  Description of Artificial Sequence: Synthetic oligonucleotide
gguacccaagacgucaaug

SEQ ID NO: 2791916 - RNA, 19 nt, Artificial Sequence
  Description of Artificial Sequence: Synthetic oligonucleotide
gcaggcucuccucagguac

SEQ ID NO: 2791917 - RNA, 19 nt, Artificial Sequence
  Description of Artificial Sequence: Synthetic oligonucleotide
gaagaauuccucccugguu

SEQ ID NO: 2791918 - RNA, 19 nt, Artificial Sequence
  Description of Artificial Sequence: Synthetic oligonucleotide
cagagaugcccuggcaggc

SEQ ID NO: 2791919 - RNA, 19 nt, Artificial Sequence
  Description of Artificial Sequence: Synthetic oligonucleotide
cuggcaggcucuccucagg

SEQ ID NO: 2791920 - RNA, 19 nt, Artificial Sequence
  Description of Artificial Sequence: Synthetic oligonucleotide
guccaaacaggaaacagau

SEQ ID NO: 2791921 - RNA, 19 nt, Artificial Sequence
  Description of Artificial Sequence: Synthetic oligonucleotide
ugguuucuggucugaugau

SEQ ID NO: 2791922 - RNA, 19 nt, Artificial Sequence
  Description of Artificial Sequence: Synthetic oligonucleotide
aggcaugguccaaacagga

SEQ ID NO: 2791923 - RNA, 19 nt, Artificial Sequence
  Description of Artificial Sequence: Synthetic oligonucleotide
agcagcaguguggaugaca

SEQ ID NO: 2791924 - RNA, 19 nt, Artificial Sequence
  Description of Artificial Sequence: Synthetic oligonucleotide
gagaugcccuggcaggcuc

SEQ ID NO: 2791925 - RNA, 19 nt, Artificial Sequence
  Description of Artificial Sequence: Synthetic oligonucleotide
ggacucugaccucuuucag

SEQ ID NO: 2791926 - RNA, 19 nt, Artificial Sequence
  Description of Artificial Sequence: Synthetic oligonucleotide
ugaucuuguccaggacucu

SEQ ID NO: 2791927 - RNA, 19 nt, Artificial Sequence
  Description of Artificial Sequence: Synthetic oligonucleotide
gcaguguggaugacaacag

SEQ ID NO: 2791928 - RNA, 19 nt, Artificial Sequence
  Description of Artificial Sequence: Synthetic oligonucleotide
augguccaaacaggaaaca

SEQ ID NO: 2791929 - RNA, 19 nt, Artificial Sequence
  Description of Artificial Sequence: Synthetic oligonucleotide
gcaaguggacaauccuuug

SEQ ID NO: 2791930 - RNA, 19 nt, Artificial Sequence
  Description of Artificial Sequence: Synthetic oligonucleotide
uuucuggucugaugaucuu

SEQ ID NO: 2791931 - RNA, 19 nt, Artificial Sequence
  Description of Artificial Sequence: Synthetic oligonucleotide
ccaagcagcuccacucagg

SEQ ID NO: 2791932 - RNA, 19 nt, Artificial Sequence
  Description of Artificial Sequence: Synthetic oligonucleotide
caccuuggucuuugucugc

SEQ ID NO: 2791933 - RNA, 19 nt, Artificial Sequence
  Description of Artificial Sequence: Synthetic oligonucleotide
caauccuuugccccagaaa

SEQ ID NO: 2791934 - RNA, 19 nt, Artificial Sequence
  Description of Artificial Sequence: Synthetic oligonucleotide
accuuggucuuugucugca

SEQ ID NO: 2791935 - RNA, 19 nt, Artificial Sequence
  Description of Artificial Sequence: Synthetic oligonucleotide
cugggcauccagaaugucu

SEQ ID NO: 2791936 - RNA, 19 nt, Artificial Sequence
  Description of Artificial Sequence: Synthetic oligonucleotide
uuccucccugguuucuggu

SEQ ID NO: 2791937 - RNA, 19 nt, Artificial Sequence
  Description of Artificial Sequence: Synthetic oligonucleotide
gcagcuugaagaauuccuc

SEQ ID NO: 2791938 - RNA, 19 nt, Artificial Sequence
  Description of Artificial Sequence: Synthetic oligonucleotide
gaaugguacccaagacguc

SEQ ID NO: 2791939 - RNA, 19 nt, Artificial Sequence
  Description of Artificial Sequence: Synthetic oligonucleotide
aucuuguccaggacucuga

SEQ ID NO: 2791940 - RNA, 19 nt, Artificial Sequence
  Description of Artificial Sequence: Synthetic oligonucleotide
uggucuuugucugcagcuu

SEQ ID NO: 2791941 - RNA, 19 nt, Artificial Sequence
  Description of Artificial Sequence: Synthetic oligonucleotide
uugccccagaaacccuccu

SEQ ID NO: 2791942 - RNA, 19 nt, Artificial Sequence
  Description of Artificial Sequence: Synthetic oligonucleotide
uccucagguacugggcauc

SEQ ID NO: 2791943 - RNA, 19 nt, Artificial Sequence
  Description of Artificial Sequence: Synthetic oligonucleotide
cagguacugggcauccaga

SEQ ID NO: 2791944 - RNA, 19 nt, Artificial Sequence
  Description of Artificial Sequence: Synthetic oligonucleotide
cccagaaacccuccugccc

SEQ ID NO: 2791945 - RNA, 19 nt, Artificial Sequence
  Description of Artificial Sequence: Synthetic oligonucleotide
gguuucuggucugaugauc

SEQ ID NO: 2791946 - RNA, 19 nt, Artificial Sequence
  Description of Artificial Sequence: Synthetic oligonucleotide
cuggucugaugaucuuguc

SEQ ID NO: 2791947 - RNA, 19 nt, Artificial Sequence
  Description of Artificial Sequence: Synthetic oligonucleotide
gaccucuuucagauccuuc

SEQ ID NO: 2791948 - RNA, 19 nt, Artificial Sequence
  Description of Artificial Sequence: Synthetic oligonucleotide
ggcauccagaaugucuccc

SEQ ID NO: 2791949 - RNA, 19 nt, Artificial Sequence
  Description of Artificial Sequence: Synthetic oligonucleotide
gucuuugucugcagcuuga

SEQ ID NO: 2791950 - RNA, 19 nt, Artificial Sequence
  Description of Artificial Sequence: Synthetic oligonucleotide
ugguacccaagacgucaau

SEQ ID NO: 2791951 - RNA, 19 nt, Artificial Sequence
  Description of Artificial Sequence: Synthetic oligonucleotide
cucccugguuucuggucug

SEQ ID NO: 2791952 - RNA, 19 nt, Artificial Sequence
  Description of Artificial Sequence: Synthetic oligonucleotide
caguguggaugacaacaga

SEQ ID NO: 2791953 - RNA, 19 nt, Artificial Sequence
  Description of Artificial Sequence: Synthetic oligonucleotide
ugucugcagcuugaagaau

SEQ ID NO: 2791954 - RNA, 19 nt, Artificial Sequence
  Description of Artificial Sequence: Synthetic oligonucleotide
ccugguuucuggucugaug

SEQ ID NO: 2791955 - RNA, 19 nt, Artificial Sequence
  Description of Artificial Sequence: Synthetic oligonucleotide
augucucccuccagcacug

SEQ ID NO: 2791956 - RNA, 19 nt, Artificial Sequence
  Description of Artificial Sequence: Synthetic oligonucleotide
caacagagaugcccuggca

SEQ ID NO: 2791957 - RNA, 19 nt, Artificial Sequence
  Description of Artificial Sequence: Synthetic oligonucleotide
caccaagcagcuccacuca

SEQ ID NO: 2791958 - RNA, 19 nt, Artificial Sequence
  Description of Artificial Sequence: Synthetic oligonucleotide
gcuccacucaggcaugguc

SEQ ID NO: 2791959 - RNA, 19 nt, Artificial Sequence
  Description of Artificial Sequence: Synthetic oligonucleotide
ugaccucuuucagauccuu

SEQ ID NO: 2791960 - RNA, 19 nt, Artificial Sequence
  Description of Artificial Sequence: Synthetic oligonucleotide
gacaauccuuugccccaga

SEQ ID NO: 2791961 - RNA, 19 nt, Artificial Sequence
  Description of Artificial Sequence: Synthetic oligonucleotide
gcagcaguguggaugacaa

SEQ ID NO: 2791962 - RNA, 19 nt, Artificial Sequence
  Description of Artificial Sequence: Synthetic oligonucleotide
cucaggcaugguccaaaca

SEQ ID NO: 2791963 - RNA, 19 nt, Artificial Sequence
  Description of Artificial Sequence: Synthetic oligonucleotide
gucaccaagcagcuccacu

SEQ ID NO: 2791964 - RNA, 19 nt, Artificial Sequence
  Description of Artificial Sequence: Synthetic oligonucleotide
cagcacugucaccuugguc

SEQ ID NO: 2791965 - RNA, 19 nt, Artificial Sequence
  Description of Artificial Sequence: Synthetic oligonucleotide
cucugaccucuuucagauc

SEQ ID NO: 2791966 - RNA, 19 nt, Artificial Sequence
  Description of Artificial Sequence: Synthetic oligonucleotide
agucugucugggaauggua

SEQ ID NO: 2791967 - RNA, 19 nt, Artificial Sequence
  Description of Artificial Sequence: Synthetic oligonucleotide
uccaggacucugaccucuu

SEQ ID NO: 2791968 - RNA, 19 nt, Artificial Sequence
  Description of Artificial Sequence: Synthetic oligonucleotide
caccagcaaguggacaauc

SEQ ID NO: 2791969 - RNA, 19 nt, Artificial Sequence
  Description of Artificial Sequence: Synthetic oligonucleotide
ggacaauccuuugccccag

SEQ ID NO: 2791970 - RNA, 19 nt, Artificial Sequence
  Description of Artificial Sequence: Synthetic oligonucleotide
cagcaguguggaugacaac

SEQ ID NO: 2791971 - RNA, 19 nt, Artificial Sequence
  Description of Artificial Sequence: Synthetic oligonucleotide
ugucaccaagcagcuccac

SEQ ID NO: 2791972 - RNA, 19 nt, Artificial Sequence
  Description of Artificial Sequence: Synthetic oligonucleotide
gucugggaaugguacccaa

SEQ ID NO: 2791973 - RNA, 19 nt, Artificial Sequence
  Description of Artificial Sequence: Synthetic oligonucleotide
augcccuggcaggcucucc

SEQ ID NO: 2791974 - RNA, 19 nt, Artificial Sequence
  Description of Artificial Sequence: Synthetic oligonucleotide
aggcucuccucagguacug

SEQ ID NO: 2791975 - RNA, 19 nt, Artificial Sequence
  Description of Artificial Sequence: Synthetic oligonucleotide
ccucuuucagauccuucuc

SEQ ID NO: 2791976 - RNA, 19 nt, Artificial Sequence
  Description of Artificial Sequence: Synthetic oligonucleotide
gucugcagcuugaagaauu

SEQ ID NO: 2791977 - RNA, 19 nt, Artificial Sequence
  Description of Artificial Sequence: Synthetic oligonucleotide
ccugccccugucaccaagc

SEQ ID NO: 2791978 - RNA, 19 nt, Artificial Sequence
  Description of Artificial Sequence: Synthetic oligonucleotide
augguacccaagacgucaa

SEQ ID NO: 2791979 - RNA, 19 nt, Artificial Sequence
  Description of Artificial Sequence: Synthetic oligonucleotide
cagcuccacucaggcaugg

SEQ ID NO: 2791980 - RNA, 19 nt, Artificial Sequence
  Description of Artificial Sequence: Synthetic oligonucleotide
agaaacccuccugccccug

SEQ ID NO: 2791981 - RNA, 19 nt, Artificial Sequence
  Description of Artificial Sequence: Synthetic oligonucleotide
cagcaaguggacaauccuu

SEQ ID NO: 2791982 - RNA, 19 nt, Artificial Sequence
  Description of Artificial Sequence: Synthetic oligonucleotide
ucccugguuucuggucuga

SEQ ID NO: 2791983 - RNA, 19 nt, Artificial Sequence
  Description of Artificial Sequence: Synthetic oligonucleotide
gaugcccuggcaggcucuc

SEQ ID NO: 2791984 - RNA, 19 nt, Artificial Sequence
  Description of Artificial Sequence: Synthetic oligonucleotide
gaaacccuccugccccugu

SEQ ID NO: 2791985 - RNA, 19 nt, Artificial Sequence
  Description of Artificial Sequence: Synthetic oligonucleotide
ccuuggucuuugucugcag

SEQ ID NO: 2791986 - RNA, 19 nt, Artificial Sequence
  Description of Artificial Sequence: Synthetic oligonucleotide
ccugcaccagcaaguggac

SEQ ID NO: 2791987 - RNA, 19 nt, Artificial Sequence
  Description of Artificial Sequence: Synthetic oligonucleotide
ccaagacgucaauggcagc

SEQ ID NO: 2791988 - RNA, 19 nt, Artificial Sequence
  Description of Artificial Sequence: Synthetic oligonucleotide
gaauuccucccugguuucu

SEQ ID NO: 2791989 - RNA, 19 nt, Artificial Sequence
  Description of Artificial Sequence: Synthetic oligonucleotide
agaugcccuggcaggcucu

SEQ ID NO: 2791990 - RNA, 19 nt, Artificial Sequence
  Description of Artificial Sequence: Synthetic oligonucleotide
gcauccagaaugucucccu

SEQ ID NO: 2791991 - RNA, 19 nt, Artificial Sequence
  Description of Artificial Sequence: Synthetic oligonucleotide
cacucaggcaugguccaaa

SEQ ID NO: 2791992 - RNA, 19 nt, Artificial Sequence
  Description of Artificial Sequence: Synthetic oligonucleotide
cugccccugucaccaagca

SEQ ID NO: 2791993 - RNA, 19 nt, Artificial Sequence
  Description of Artificial Sequence: Synthetic oligonucleotide
ccucagguacugggcaucc

SEQ ID NO: 2791994 - RNA, 19 nt, Artificial Sequence
  Description of Artificial Sequence: Synthetic oligonucleotide
guccaggacucugaccucu

SEQ ID NO: 2791995 - RNA, 19 nt, Artificial Sequence
  Description of Artificial Sequence: Synthetic oligonucleotide
cugaccucuuucagauccu

SEQ ID NO: 2791996 - RNA, 19 nt, Artificial Sequence
  Description of Artificial Sequence: Synthetic oligonucleotide
ugucucccuccagcacugu

SEQ ID NO: 2791997 - RNA, 19 nt, Artificial Sequence
  Description of Artificial Sequence: Synthetic oligonucleotide
ggaugacaacagagaugcc

SEQ ID NO: 2791998 - RNA, 19 nt, Artificial Sequence
  Description of Artificial Sequence: Synthetic oligonucleotide
ccagcaaguggacaauccu

SEQ ID NO: 2791999 - RNA, 19 nt, Artificial Sequence
  Description of Artificial Sequence: Synthetic oligonucleotide
ggcaugguccaaacaggaa

SEQ ID NO: 2792000 - RNA, 19 nt, Artificial Sequence
  Description of Artificial Sequence: Synthetic oligonucleotide
cugcaccagcaaguggaca

SEQ ID NO: 2792001 - RNA, 19 nt, Artificial Sequence
  Description of Artificial Sequence: Synthetic oligonucleotide
caggcucuccucagguacu

SEQ ID NO: 2792002 - RNA, 19 nt, Artificial Sequence
  Description of Artificial Sequence: Synthetic oligonucleotide
gcagcuccacucaggcaug

SEQ ID NO: 2792003 - RNA, 19 nt, Artificial Sequence
  Description of Artificial Sequence: Synthetic oligonucleotide
cagaaacccuccugccccu

SEQ ID NO: 2792004 - RNA, 19 nt, Artificial Sequence
  Description of Artificial Sequence: Synthetic oligonucleotide
cucagguacugggcaucca

SEQ ID NO: 2792005 - RNA, 19 nt, Artificial Sequence
  Description of Artificial Sequence: Synthetic oligonucleotide
uggcagcagcaguguggau

SEQ ID NO: 2792006 - RNA, 19 nt, Artificial Sequence
  Description of Artificial Sequence: Synthetic oligonucleotide
ccucccugguuucuggucu

SEQ ID NO: 2792007 - RNA, 19 nt, Artificial Sequence
  Description of Artificial Sequence: Synthetic oligonucleotide
ggcaggcucuccucaggua

SEQ ID NO: 2792008 - RNA, 19 nt, Artificial Sequence
  Description of Artificial Sequence: Synthetic oligonucleotide
gcccuggcaggcucuccuc

SEQ ID NO: 2792009 - RNA, 19 nt, Artificial Sequence
  Description of Artificial Sequence: Synthetic oligonucleotide
cugucaccuuggucuuugu

SEQ ID NO: 2792010 - RNA, 19 nt, Artificial Sequence
  Description of Artificial Sequence: Synthetic oligonucleotide
cccuggcaggcucuccuca

SEQ ID NO: 2792011 - RNA, 19 nt, Artificial Sequence
  Description of Artificial Sequence: Synthetic oligonucleotide
gcacugucaccuuggucuu

SEQ ID NO: 2792012 - RNA, 19 nt, Artificial Sequence
  Description of Artificial Sequence: Synthetic oligonucleotide
cuccugccccugucaccaa

SEQ ID NO: 2792013 - RNA, 19 nt, Artificial Sequence
  Description of Artificial Sequence: Synthetic oligonucleotide
ccccugucaccaagcagcu

SEQ ID NO: 2792014 - RNA, 19 nt, Artificial Sequence
  Description of Artificial Sequence: Synthetic oligonucleotide
cccugucaccaagcagcuc

SEQ ID NO: 2792015 - RNA, 19 nt, Artificial Sequence
  Description of Artificial Sequence: Synthetic oligonucleotide
cacugucaccuuggucuuu

SEQ ID NO: 2792016 - RNA, 19 nt, Artificial Sequence
  Description of Artificial Sequence: Synthetic oligonucleotide
ccacucaggcaugguccaa

SEQ ID NO: 2792017 - RNA, 19 nt, Artificial Sequence
  Description of Artificial Sequence: Synthetic oligonucleotide
ccaggacucugaccucuuu

SEQ ID NO: 2792018 - RNA, 19 nt, Artificial Sequence
  Description of Artificial Sequence: Synthetic oligonucleotide
ccuccagcacugucaccuu

SEQ ID NO: 2792019 - RNA, 19 nt, Artificial Sequence
  Description of Artificial Sequence: Synthetic oligonucleotide
cccugguuucuggucugau

SEQ ID NO: 2792020 - RNA, 19 nt, Artificial Sequence
  Description of Artificial Sequence: Synthetic oligonucleotide
ucugcauucacagugacgg

SEQ ID NO: 2792021 - RNA, 19 nt, Artificial Sequence
  Description of Artificial Sequence: Synthetic oligonucleotide
ucaaagaacaccugcgucg

SEQ ID NO: 2792022 - RNA, 19 nt, Artificial Sequence
  Description of Artificial Sequence: Synthetic oligonucleotide
aaguacuuaguuguggugc

SEQ ID NO: 2792023 - RNA, 19 nt, Artificial Sequence
  Description of Artificial Sequence: Synthetic oligonucleotide
agcuucuucagccaguagc

SEQ ID NO: 2792024 - RNA, 19 nt, Artificial Sequence
  Description of Artificial Sequence: Synthetic oligonucleotide
aaggacaucuguccgggcc

SEQ ID NO: 2792025 - RNA, 19 nt, Artificial Sequence
  Description of Artificial Sequence: Synthetic oligonucleotide
ucacaaaguacuuaguugu

SEQ ID NO: 2792026 - RNA, 19 nt, Artificial Sequence
  Description of Artificial Sequence: Synthetic oligonucleotide
uguggugccaucuucagca

SEQ ID NO: 2792027 - RNA, 19 nt, Artificial Sequence
  Description of Artificial Sequence: Synthetic oligonucleotide
aggugaaggacaucugucc

SEQ ID NO: 2792028 - RNA, 19 nt, Artificial Sequence
  Description of Artificial Sequence: Synthetic oligonucleotide
uucagcauggaccaccacc

SEQ ID NO: 2792029 - RNA, 19 nt, Artificial Sequence
  Description of Artificial Sequence: Synthetic oligonucleotide
accgucaaagaacaccugc

SEQ ID NO: 2792030 - RNA, 19 nt, Artificial Sequence
  Description of Artificial Sequence: Synthetic oligonucleotide
ugccggacaguucugaccg

SEQ ID NO: 2792031 - RNA, 19 nt, Artificial Sequence
  Description of Artificial Sequence: Synthetic oligonucleotide
gaugccaggaugccaaagg

SEQ ID NO: 2792032 - RNA, 19 nt, Artificial Sequence
  Description of Artificial Sequence: Synthetic oligonucleotide
uugacaccgucaaagaaca

SEQ ID NO: 2792033 - RNA, 19 nt, Artificial Sequence
  Description of Artificial Sequence: Synthetic oligonucleotide
aaaguacuuaguuguggug

SEQ ID NO: 2792034 - RNA, 19 nt, Artificial Sequence
  Description of Artificial Sequence: Synthetic oligonucleotide
ucagcauggaccaccacca

SEQ ID NO: 2792035 - RNA, 19 nt, Artificial Sequence
  Description of Artificial Sequence: Synthetic oligonucleotide
gacguugacaccgucaaag

SEQ ID NO: 2792036 - RNA, 19 nt, Artificial Sequence
  Description of Artificial Sequence: Synthetic oligonucleotide
cucacaaaguacuuaguug

SEQ ID NO: 2792037 - RNA, 19 nt, Artificial Sequence
  Description of Artificial Sequence: Synthetic oligonucleotide
ucaaugcagaucuggaucu

SEQ ID NO: 2792038 - RNA, 19 nt, Artificial Sequence
  Description of Artificial Sequence: Synthetic oligonucleotide
uguaggcacauccaccugc

SEQ ID NO: 2792039 - RNA, 19 nt, Artificial Sequence
  Description of Artificial Sequence: Synthetic oligonucleotide
aacaugggaugccaggaug

SEQ ID NO: 2792040 - RNA, 19 nt, Artificial Sequence
  Description of Artificial Sequence: Synthetic oligonucleotide
gaggagucugcauucacag

SEQ ID NO: 2792041 - RNA, 19 nt, Artificial Sequence
  Description of Artificial Sequence: Synthetic oligonucleotide
ugggugacagacaugcacc

SEQ ID NO: 2792042 - RNA, 19 nt, Artificial Sequence
  Description of Artificial Sequence: Synthetic oligonucleotide
uucaccagggccucauugg

SEQ ID NO: 2792043 - RNA, 19 nt, Artificial Sequence
  Description of Artificial Sequence: Synthetic oligonucleotide
uacuccagggccuucacca

SEQ ID NO: 2792044 - RNA, 19 nt, Artificial Sequence
  Description of Artificial Sequence: Synthetic oligonucleotide
aguguaggcacauccaccu

SEQ ID NO: 2792045 - RNA, 19 nt, Artificial Sequence
  Description of Artificial Sequence: Synthetic oligonucleotide
acaaaguacuuaguugugg

SEQ ID NO: 2792046 - RNA, 19 nt, Artificial Sequence
  Description of Artificial Sequence: Synthetic oligonucleotide
uggaccaccaccaggccag

SEQ ID NO: 2792047 - RNA, 19 nt, Artificial Sequence
  Description of Artificial Sequence: Synthetic oligonucleotide
aaggugaaggacaucuguc

SEQ ID NO: 2792048 - RNA, 19 nt, Artificial Sequence
  Description of Artificial Sequence: Synthetic oligonucleotide
cucaaugcagaucuggauc

SEQ ID NO: 2792049 - RNA, 19 nt, Artificial Sequence
  Description of Artificial Sequence: Synthetic oligonucleotide
aggacaucuguccgggccc

SEQ ID NO: 2792050 - RNA, 19 nt, Artificial Sequence
  Description of Artificial Sequence: Synthetic oligonucleotide
aucuucagcauggaccacc

SEQ ID NO: 2792051 - RNA, 19 nt, Artificial Sequence
  Description of Artificial Sequence: Synthetic oligonucleotide
ucaguguaggcacauccac

SEQ ID NO: 2792052 - RNA, 19 nt, Artificial Sequence
  Description of Artificial Sequence: Synthetic oligonucleotide
gacaccgucaaagaacacc

SEQ ID NO: 2792053 - RNA, 19 nt, Artificial Sequence
  Description of Artificial Sequence: Synthetic oligonucleotide
ucagccaguagcuguacug

SEQ ID NO: 2792054 - RNA, 19 nt, Artificial Sequence
  Description of Artificial Sequence: Synthetic oligonucleotide
ggagucugcauucacagug

SEQ ID NO: 2792055 - RNA, 19 nt, Artificial Sequence
  Description of Artificial Sequence: Synthetic oligonucleotide
cugcucacaaaguacuuag

SEQ ID NO: 2792056 - RNA, 19 nt, Artificial Sequence
  Description of Artificial Sequence: Synthetic oligonucleotide
uucacagugacggagccac

SEQ ID NO: 2792057 - RNA, 19 nt, Artificial Sequence
  Description of Artificial Sequence: Synthetic oligonucleotide
ugcauucacagugacggag

SEQ ID NO: 2792058 - RNA, 19 nt, Artificial Sequence
  Description of Artificial Sequence: Synthetic oligonucleotide
cugugggugacagacaugc

SEQ ID NO: 2792059 - RNA, 19 nt, Artificial Sequence
  Description of Artificial Sequence: Synthetic oligonucleotide
cucauuggccucaaugcag

SEQ ID NO: 2792060 - RNA, 19 nt, Artificial Sequence
  Description of Artificial Sequence: Synthetic oligonucleotide
ggagccacugcucacaaag

SEQ ID NO: 2792061 - RNA, 19 nt, Artificial Sequence
  Description of Artificial Sequence: Synthetic oligonucleotide
ugaggagucugcauucaca

SEQ ID NO: 2792062 - RNA, 19 nt, Artificial Sequence
  Description of Artificial Sequence: Synthetic oligonucleotide
acagacaugcaccgccuac

SEQ ID NO: 2792063 - RNA, 19 nt, Artificial Sequence
  Description of Artificial Sequence: Synthetic oligonucleotide
ucauuggccucaaugcaga

SEQ ID NO: 2792064 - RNA, 19 nt, Artificial Sequence
  Description of Artificial Sequence: Synthetic oligonucleotide
acagugacggagccacugc

SEQ ID NO: 2792065 - RNA, 19 nt, Artificial Sequence
  Description of Artificial Sequence: Synthetic oligonucleotide
guugacaccgucaaagaac

SEQ ID NO: 2792066 - RNA, 19 nt, Artificial Sequence
  Description of Artificial Sequence: Synthetic oligonucleotide
aguagcuguacugaggagu

SEQ ID NO: 2792067 - RNA, 19 nt, Artificial Sequence
  Description of Artificial Sequence: Synthetic oligonucleotide
ugcaccgccuacuccaggg

SEQ ID NO: 2792068 - RNA, 19 nt, Artificial Sequence
  Description of Artificial Sequence: Synthetic oligonucleotide
gugacagacaugcaccgcc

SEQ ID NO: 2792069 - RNA, 19 nt, Artificial Sequence
  Description of Artificial Sequence: Synthetic oligonucleotide
agugugggaacaugggaug

SEQ ID NO: 2792070 - RNA, 19 nt, Artificial Sequence
  Description of Artificial Sequence: Synthetic oligonucleotide
acaugggaugccaggaugc

SEQ ID NO: 2792071 - RNA, 19 nt, Artificial Sequence
  Description of Artificial Sequence: Synthetic oligonucleotide
aggcacauccaccugccgg

SEQ ID NO: 2792072 - RNA, 19 nt, Artificial Sequence
  Description of Artificial Sequence: Synthetic oligonucleotide
agcauggaccaccaccagg

SEQ ID NO: 2792073 - RNA, 19 nt, Artificial Sequence
  Description of Artificial Sequence: Synthetic oligonucleotide
uccagggccuucaccaggg

SEQ ID NO: 2792074 - RNA, 19 nt, Artificial Sequence
  Description of Artificial Sequence: Synthetic oligonucleotide
accugccggacguugacac

SEQ ID NO: 2792075 - RNA, 19 nt, Artificial Sequence
  Description of Artificial Sequence: Synthetic oligonucleotide
caaagaacaccugcgucgg

SEQ ID NO: 2792076 - RNA, 19 nt, Artificial Sequence
  Description of Artificial Sequence: Synthetic oligonucleotide
ucacagcuucuucagccag

SEQ ID NO: 2792077 - RNA, 19 nt, Artificial Sequence
  Description of Artificial Sequence: Synthetic oligonucleotide
cugcagugugggaacaugg

SEQ ID NO: 2792078 - RNA, 19 nt, Artificial Sequence
  Description of Artificial Sequence: Synthetic oligonucleotide
ggugaaggacaucuguccg

SEQ ID NO: 2792079 - RNA, 19 nt, Artificial Sequence
  Description of Artificial Sequence: Synthetic oligonucleotide
ucaguuucccuguggguga

SEQ ID NO: 2792080 - RNA, 19 nt, Artificial Sequence
  Description of Artificial Sequence: Synthetic oligonucleotide
uucccugugggugacagac

SEQ ID NO: 2792081 - RNA, 19 nt, Artificial Sequence
  Description of Artificial Sequence: Synthetic oligonucleotide
cucaguuucccugugggug

SEQ ID NO: 2792082 - RNA, 19 nt, Artificial Sequence
  Description of Artificial Sequence: Synthetic oligonucleotide
agucugcauucacagugac

SEQ ID NO: 2792083 - RNA, 19 nt, Artificial Sequence
  Description of Artificial Sequence: Synthetic oligonucleotide
aacaccugcgucggggagg

SEQ ID NO: 2792084 - RNA, 19 nt, Artificial Sequence
  Description of Artificial Sequence: Synthetic oligonucleotide
ugggaugccaggaugccaa

SEQ ID NO: 2792085 - RNA, 19 nt, Artificial Sequence
  Description of Artificial Sequence: Synthetic oligonucleotide
aaagaacaccugcgucggg

SEQ ID NO: 2792086 - RNA, 19 nt, Artificial Sequence
  Description of Artificial Sequence: Synthetic oligonucleotide
ucuucagcauggaccacca

SEQ ID NO: 2792087 - RNA, 19 nt, Artificial Sequence
  Description of Artificial Sequence: Synthetic oligonucleotide
gaugccaaaggcuccgguc

SEQ ID NO: 2792088 - RNA, 19 nt, Artificial Sequence
  Description of Artificial Sequence: Synthetic oligonucleotide
augccaaaggcuccgguca

SEQ ID NO: 2792089 - RNA, 19 nt, Artificial Sequence
  Description of Artificial Sequence: Synthetic oligonucleotide
agcauguccagggucacag

SEQ ID NO: 2792090 - RNA, 19 nt, Artificial Sequence
  Description of Artificial Sequence: Synthetic oligonucleotide
ucaccagggccucauuggc

SEQ ID NO: 2792091 - RNA, 19 nt, Artificial Sequence
  Description of Artificial Sequence: Synthetic oligonucleotide
aaugcagaucuggaucuca

SEQ ID NO: 2792092 - RNA, 19 nt, Artificial Sequence
  Description of Artificial Sequence: Synthetic oligonucleotide
gugggugacagacaugcac

SEQ ID NO: 2792093 - RNA, 19 nt, Artificial Sequence
  Description of Artificial Sequence: Synthetic oligonucleotide
agacaugcaccgccuacuc

SEQ ID NO: 2792094 - RNA, 19 nt, Artificial Sequence
  Description of Artificial Sequence: Synthetic oligonucleotide
agggucacagcuucuucag

SEQ ID NO: 2792095 - RNA, 19 nt, Artificial Sequence
  Description of Artificial Sequence: Synthetic oligonucleotide
ugccucauccguugugccg

SEQ ID NO: 2792096 - RNA, 19 nt, Artificial Sequence
  Description of Artificial Sequence: Synthetic oligonucleotide
caguguaggcacauccacc

SEQ ID NO: 2792097 - RNA, 19 nt, Artificial Sequence
  Description of Artificial Sequence: Synthetic oligonucleotide
guaggcacgcgccuggagc

SEQ ID NO: 2792098 - RNA, 19 nt, Artificial Sequence
  Description of Artificial Sequence: Synthetic oligonucleotide
gaagcagugcagcgggcag

SEQ ID NO: 2792099 - RNA, 19 nt, Artificial Sequence
  Description of Artificial Sequence: Synthetic oligonucleotide
uguacugaggagucugcau

SEQ ID NO: 2792100 - RNA, 19 nt, Artificial Sequence
  Description of Artificial Sequence: Synthetic oligonucleotide
ggugccaucuucagcaugg

SEQ ID NO: 2792101 - RNA, 19 nt, Artificial Sequence
  Description of Artificial Sequence: Synthetic oligonucleotide
ucauccguugugccggaca

SEQ ID NO: 2792102 - RNA, 19 nt, Artificial Sequence
  Description of Artificial Sequence: Synthetic oligonucleotide
cacaaaguacuuaguugug

SEQ ID NO: 2792103 - RNA, 19 nt, Artificial Sequence
  Description of Artificial Sequence: Synthetic oligonucleotide
acauccaccugccggacgu

SEQ ID NO: 2792104 - RNA, 19 nt, Artificial Sequence
  Description of Artificial Sequence: Synthetic oligonucleotide
acuuaguuguggugccauc

SEQ ID NO: 2792105 - RNA, 19 nt, Artificial Sequence
  Description of Artificial Sequence: Synthetic oligonucleotide
ucuucagccaguagcugua

SEQ ID NO: 2792106 - RNA, 19 nt, Artificial Sequence
  Description of Artificial Sequence: Synthetic oligonucleotide
cauucacagugacggagcc

SEQ ID NO: 2792107 - RNA, 19 nt, Artificial Sequence
  Description of Artificial Sequence: Synthetic oligonucleotide
uuguggugccaucuucagc

SEQ ID NO: 2792108 - RNA, 19 nt, Artificial Sequence
  Description of Artificial Sequence: Synthetic oligonucleotide
gaaggugaaggacaucugu

SEQ ID NO: 2792109 - RNA, 19 nt, Artificial Sequence
  Description of Artificial Sequence: Synthetic oligonucleotide
guuguggugccaucuucag

SEQ ID NO: 2792110 - RNA, 19 nt, Artificial Sequence
  Description of Artificial Sequence: Synthetic oligonucleotide
gccucauuggccucaaugc

SEQ ID NO: 2792111 - RNA, 19 nt, Artificial Sequence
  Description of Artificial Sequence: Synthetic oligonucleotide
uggaucucagcccgugcug

SEQ ID NO: 2792112 - RNA, 19 nt, Artificial Sequence
  Description of Artificial Sequence: Synthetic oligonucleotide
acaccgucaaagaacaccu

SEQ ID NO: 2792113 - RNA, 19 nt, Artificial Sequence
  Description of Artificial Sequence: Synthetic oligonucleotide
cauccguugugccggacag

SEQ ID NO: 2792114 - RNA, 19 nt, Artificial Sequence
  Description of Artificial Sequence: Synthetic oligonucleotide
cuucaccagggccucauug

SEQ ID NO: 2792115 - RNA, 19 nt, Artificial Sequence
  Description of Artificial Sequence: Synthetic oligonucleotide
acggcgaagcagugcagcg

SEQ ID NO: 2792116 - RNA, 19 nt, Artificial Sequence
  Description of Artificial Sequence: Synthetic oligonucleotide
gaggcgaaggugaaggaca

SEQ ID NO: 2792117 - RNA, 19 nt, Artificial Sequence
  Description of Artificial Sequence: Synthetic oligonucleotide
ugggaacaugggaugccag

SEQ ID NO: 2792118 - RNA, 19 nt, Artificial Sequence
  Description of Artificial Sequence: Synthetic oligonucleotide
ugacagacaugcaccgccu

SEQ ID NO: 2792119 - RNA, 19 nt, Artificial Sequence
  Description of Artificial Sequence: Synthetic oligonucleotide
ucuggaucucagcccgugc

SEQ ID NO: 2792120 - RNA, 19 nt, Artificial Sequence
  Description of Artificial Sequence: Synthetic oligonucleotide
uggagcaccaggcggcgca

SEQ ID NO: 2792121 - RNA, 19 nt, Artificial Sequence
  Description of Artificial Sequence: Synthetic oligonucleotide
auuggccucaaugcagauc

SEQ ID NO: 2792122 - RNA, 19 nt, Artificial Sequence
  Description of Artificial Sequence: Synthetic oligonucleotide
uaguuguggugccaucuuc

SEQ ID NO: 2792123 - RNA, 19 nt, Artificial Sequence
  Description of Artificial Sequence: Synthetic oligonucleotide
uuaguuguggugccaucuu

SEQ ID NO: 2792124 - RNA, 19 nt, Artificial Sequence
  Description of Artificial Sequence: Synthetic oligonucleotide
ucugaccgcgccuucucca

SEQ ID NO: 2792125 - RNA, 19 nt, Artificial Sequence
  Description of Artificial Sequence: Synthetic oligonucleotide
gggaacaugggaugccagg

SEQ ID NO: 2792126 - RNA, 19 nt, Artificial Sequence
  Description of Artificial Sequence: Synthetic oligonucleotide
cugccggacguugacaccg

SEQ ID NO: 2792127 - RNA, 19 nt, Artificial Sequence
  Description of Artificial Sequence: Synthetic oligonucleotide
ugcucacaaaguacuuagu

SEQ ID NO: 2792128 - RNA, 19 nt, Artificial Sequence
  Description of Artificial Sequence: Synthetic oligonucleotide
ugccaaaggcuccggucag

SEQ ID NO: 2792129 - RNA, 19 nt, Artificial Sequence
  Description of Artificial Sequence: Synthetic oligonucleotide
ggcgaagcagugcagcggg

SEQ ID NO: 2792130 - RNA, 19 nt, Artificial Sequence
  Description of Artificial Sequence: Synthetic oligonucleotide
ugugggaacaugggaugcc

SEQ ID NO: 2792131 - RNA, 19 nt, Artificial Sequence
  Description of Artificial Sequence: Synthetic oligonucleotide
uaggcacgcgccuggagca

SEQ ID NO: 2792132 - RNA, 19 nt, Artificial Sequence
  Description of Artificial Sequence: Synthetic oligonucleotide
gacaugcaccgccuacucc

SEQ ID NO: 2792133 - RNA, 19 nt, Artificial Sequence
  Description of Artificial Sequence: Synthetic oligonucleotide
agccaguagcuguacugag

SEQ ID NO: 2792134 - RNA, 19 nt, Artificial Sequence
  Description of Artificial Sequence: Synthetic oligonucleotide
agcuguacugaggagucug

SEQ ID NO: 2792135 - RNA, 19 nt, Artificial Sequence
  Description of Artificial Sequence: Synthetic oligonucleotide
uggaccugccucaguuucc

SEQ ID NO: 2792136 - RNA, 19 nt, Artificial Sequence
  Description of Artificial Sequence: Synthetic oligonucleotide
cuccggucaguguaggcac

SEQ ID NO: 2792137 - RNA, 19 nt, Artificial Sequence
  Description of Artificial Sequence: Synthetic oligonucleotide
uucugaccgcgccuucucc

SEQ ID NO: 2792138 - RNA, 19 nt, Artificial Sequence
  Description of Artificial Sequence: Synthetic oligonucleotide
acaccugcgucggggaggc

SEQ ID NO: 2792139 - RNA, 19 nt, Artificial Sequence
  Description of Artificial Sequence: Synthetic oligonucleotide
acguugacaccgucaaaga

SEQ ID NO: 2792140 - RNA, 19 nt, Artificial Sequence
  Description of Artificial Sequence: Synthetic oligonucleotide
caaaguacuuaguuguggu

SEQ ID NO: 2792141 - RNA, 19 nt, Artificial Sequence
  Description of Artificial Sequence: Synthetic oligonucleotide
aguuguggugccaucuuca

SEQ ID NO: 2792142 - RNA, 19 nt, Artificial Sequence
  Description of Artificial Sequence: Synthetic oligonucleotide
auggaccaccaccaggcca

SEQ ID NO: 2792143 - RNA, 19 nt, Artificial Sequence
  Description of Artificial Sequence: Synthetic oligonucleotide
uaggcacauccaccugccg

SEQ ID NO: 2792144 - RNA, 19 nt, Artificial Sequence
  Description of Artificial Sequence: Synthetic oligonucleotide
aucuguccgggcccggcgg

SEQ ID NO: 2792145 - RNA, 19 nt, Artificial Sequence
  Description of Artificial Sequence: Synthetic oligonucleotide
cucggcguaggcacgcgcc

SEQ ID NO: 2792146 - RNA, 19 nt, Artificial Sequence
  Description of Artificial Sequence: Synthetic oligonucleotide
guaggaccugcaguguggg

SEQ ID NO: 2792147 - RNA, 19 nt, Artificial Sequence
  Description of Artificial Sequence: Synthetic oligonucleotide
agaacaccugcgucgggga

SEQ ID NO: 2792148 - RNA, 19 nt, Artificial Sequence
  Description of Artificial Sequence: Synthetic oligonucleotide
ggggaggcgaaggugaagg

SEQ ID NO: 2792149 - RNA, 19 nt, Artificial Sequence
  Description of Artificial Sequence: Synthetic oligonucleotide
gggugacagacaugcaccg

SEQ ID NO: 2792150 - RNA, 19 nt, Artificial Sequence
  Description of Artificial Sequence: Synthetic oligonucleotide
uucagccaguagcuguacu

SEQ ID NO: 2792151 - RNA, 19 nt, Artificial Sequence
  Description of Artificial Sequence: Synthetic oligonucleotide
guagcuguacugaggaguc

SEQ ID NO: 2792152 - RNA, 19 nt, Artificial Sequence
  Description of Artificial Sequence: Synthetic oligonucleotide
cuggaccugccucaguuuc

SEQ ID NO: 2792153 - RNA, 19 nt, Artificial Sequence
  Description of Artificial Sequence: Synthetic oligonucleotide
gacggcgaagcagugcagc

SEQ ID NO: 2792154 - RNA, 19 nt, Artificial Sequence
  Description of Artificial Sequence: Synthetic oligonucleotide
uggugccaucuucagcaug

SEQ ID NO: 2792155 - RNA, 19 nt, Artificial Sequence
  Description of Artificial Sequence: Synthetic oligonucleotide
gcauggaccaccaccaggc

SEQ ID NO: 2792156 - RNA, 19 nt, Artificial Sequence
  Description of Artificial Sequence: Synthetic oligonucleotide
gaacaccugcgucggggag

SEQ ID NO: 2792157 - RNA, 19 nt, Artificial Sequence
  Description of Artificial Sequence: Synthetic oligonucleotide
gucugcauucacagugacg

SEQ ID NO: 2792158 - RNA, 19 nt, Artificial Sequence
  Description of Artificial Sequence: Synthetic oligonucleotide
gaucucagcccgugcugcc

SEQ ID NO: 2792159 - RNA, 19 nt, Artificial Sequence
  Description of Artificial Sequence: Synthetic oligonucleotide
ugugccggacaguucugac

SEQ ID NO: 2792160 - RNA, 19 nt, Artificial Sequence
  Description of Artificial Sequence: Synthetic oligonucleotide
gugccggacaguucugacc

SEQ ID NO: 2792161 - RNA, 19 nt, Artificial Sequence
  Description of Artificial Sequence: Synthetic oligonucleotide
aggaccugcagugugggaa

SEQ ID NO: 2792162 - RNA, 19 nt, Artificial Sequence
  Description of Artificial Sequence: Synthetic oligonucleotide
aaggcuccggucaguguag

SEQ ID NO: 2792163 - RNA, 19 nt, Artificial Sequence
  Description of Artificial Sequence: Synthetic oligonucleotide
agugacggagccacugcuc

SEQ ID NO: 2792164 - RNA, 19 nt, Artificial Sequence
  Description of Artificial Sequence: Synthetic oligonucleotide
ugccaucuucagcauggac

SEQ ID NO: 2792165 - RNA, 19 nt, Artificial Sequence
  Description of Artificial Sequence: Synthetic oligonucleotide
ugaccgcgccuucuccagg

SEQ ID NO: 2792166 - RNA, 19 nt, Artificial Sequence
  Description of Artificial Sequence: Synthetic oligonucleotide
agccacugcucacaaagua

SEQ ID NO: 2792167 - RNA, 19 nt, Artificial Sequence
  Description of Artificial Sequence: Synthetic oligonucleotide
ugcgucggggaggcgaagg

SEQ ID NO: 2792168 - RNA, 19 nt, Artificial Sequence
  Description of Artificial Sequence: Synthetic oligonucleotide
gugacggagccacugcuca

SEQ ID NO: 2792169 - RNA, 19 nt, Artificial Sequence
  Description of Artificial Sequence: Synthetic oligonucleotide
ggccguaggaccugcagug

SEQ ID NO: 2792170 - RNA, 19 nt, Artificial Sequence
  Description of Artificial Sequence: Synthetic oligonucleotide
ugcugccucauccguugug

SEQ ID NO: 2792171 - RNA, 19 nt, Artificial Sequence
  Description of Artificial Sequence: Synthetic oligonucleotide
uacuuaguuguggugccau

SEQ ID NO: 2792172 - RNA, 19 nt, Artificial Sequence
  Description of Artificial Sequence: Synthetic oligonucleotide
acaucuguccgggcccggc

SEQ ID NO: 2792173 - RNA, 19 nt, Artificial Sequence
  Description of Artificial Sequence: Synthetic oligonucleotide
aggccguaggaccugcagu

SEQ ID NO: 2792174 - RNA, 19 nt, Artificial Sequence
  Description of Artificial Sequence: Synthetic oligonucleotide
ugugggugacagacaugca

SEQ ID NO: 2792175 - RNA, 19 nt, Artificial Sequence
  Description of Artificial Sequence: Synthetic oligonucleotide
guaggcacauccaccugcc

SEQ ID NO: 2792176 - RNA, 19 nt, Artificial Sequence
  Description of Artificial Sequence: Synthetic oligonucleotide
cagggucacagcuucuuca

SEQ ID NO: 2792177 - RNA, 19 nt, Artificial Sequence
  Description of Artificial Sequence: Synthetic oligonucleotide
uccaccugccggacguuga

SEQ ID NO: 2792178 - RNA, 19 nt, Artificial Sequence
  Description of Artificial Sequence: Synthetic oligonucleotide
uccguugugccggacaguu

SEQ ID NO: 2792179 - RNA, 19 nt, Artificial Sequence
  Description of Artificial Sequence: Synthetic oligonucleotide
gucacagcuucuucagcca

SEQ ID NO: 2792180 - RNA, 19 nt, Artificial Sequence
  Description of Artificial Sequence: Synthetic oligonucleotide
caugggaugccaggaugcc

SEQ ID NO: 2792181 - RNA, 19 nt, Artificial Sequence
  Description of Artificial Sequence: Synthetic oligonucleotide
cacagugacggagccacug

SEQ ID NO: 2792182 - RNA, 19 nt, Artificial Sequence
  Description of Artificial Sequence: Synthetic oligonucleotide
augcagaucuggaucucag

SEQ ID NO: 2792183 - RNA, 19 nt, Artificial Sequence
  Description of Artificial Sequence: Synthetic oligonucleotide
caucuguccgggcccggcg

SEQ ID NO: 2792184 - RNA, 19 nt, Artificial Sequence
  Description of Artificial Sequence: Synthetic oligonucleotide
aggagucugcauucacagu

SEQ ID NO: 2792185 - RNA, 19 nt, Artificial Sequence
  Description of Artificial Sequence: Synthetic oligonucleotide
cugaggagucugcauucac

SEQ ID NO: 2792186 - RNA, 19 nt, Artificial Sequence
  Description of Artificial Sequence: Synthetic oligonucleotide
acugcucacaaaguacuua

SEQ ID NO: 2792187 - RNA, 19 nt, Artificial Sequence
  Description of Artificial Sequence: Synthetic oligonucleotide
cugaccgcgccuucuccag

SEQ ID NO: 2792188 - RNA, 19 nt, Artificial Sequence
  Description of Artificial Sequence: Synthetic oligonucleotide
gacccggacggcgaagcag

SEQ ID NO: 2792189 - RNA, 19 nt, Artificial Sequence
  Description of Artificial Sequence: Synthetic oligonucleotide
ucuguccgggcccggcggc

SEQ ID NO: 2792190 - RNA, 19 nt, Artificial Sequence
  Description of Artificial Sequence: Synthetic oligonucleotide
ggccucaaugcagaucugg

SEQ ID NO: 2792191 - RNA, 19 nt, Artificial Sequence
  Description of Artificial Sequence: Synthetic oligonucleotide
caccgccuacuccagggcc

SEQ ID NO: 2792192 - RNA, 19 nt, Artificial Sequence
  Description of Artificial Sequence: Synthetic oligonucleotide
gagucugcauucacaguga

SEQ ID NO: 2792193 - RNA, 19 nt, Artificial Sequence
  Description of Artificial Sequence: Synthetic oligonucleotide
gugugggaacaugggaugc

SEQ ID NO: 2792194 - RNA, 19 nt, Artificial Sequence
  Description of Artificial Sequence: Synthetic oligonucleotide
cauggaccaccaccaggcc

SEQ ID NO: 2792195 - RNA, 19 nt, Artificial Sequence
  Description of Artificial Sequence: Synthetic oligonucleotide
gccucauccguugugccgg

SEQ ID NO: 2792196 - RNA, 19 nt, Artificial Sequence
  Description of Artificial Sequence: Synthetic oligonucleotide
caguagcuguacugaggag

SEQ ID NO: 2792197 - RNA, 19 nt, Artificial Sequence
  Description of Artificial Sequence: Synthetic oligonucleotide
ucggcguaggcacgcgccu

SEQ ID NO: 2792198 - RNA, 19 nt, Artificial Sequence
  Description of Artificial Sequence: Synthetic oligonucleotide
uccggucaguguaggcaca

SEQ ID NO: 2792199 - RNA, 19 nt, Artificial Sequence
  Description of Artificial Sequence: Synthetic oligonucleotide
ucucagcccgugcugccuc

SEQ ID NO: 2792200 - RNA, 19 nt, Artificial Sequence
  Description of Artificial Sequence: Synthetic oligonucleotide
uucuccagguuggcccgcg

SEQ ID NO: 2792201 - RNA, 19 nt, Artificial Sequence
  Description of Artificial Sequence: Synthetic oligonucleotide
ggacaguucugaccgcgcc

SEQ ID NO: 2792202 - RNA, 19 nt, Artificial Sequence
  Description of Artificial Sequence: Synthetic oligonucleotide
gucaguguaggcacaucca

SEQ ID NO: 2792203 - RNA, 19 nt, Artificial Sequence
  Description of Artificial Sequence: Synthetic oligonucleotide
caggccguaggaccugcag

SEQ ID NO: 2792204 - RNA, 19 nt, Artificial Sequence
  Description of Artificial Sequence: Synthetic oligonucleotide
ccaguagcuguacugagga

SEQ ID NO: 2792205 - RNA, 19 nt, Artificial Sequence
  Description of Artificial Sequence: Synthetic oligonucleotide
uugugccggacaguucuga

SEQ ID NO: 2792206 - RNA, 19 nt, Artificial Sequence
  Description of Artificial Sequence: Synthetic oligonucleotide
aguucugaccgcgccuucu

SEQ ID NO: 2792207 - RNA, 19 nt, Artificial Sequence
  Description of Artificial Sequence: Synthetic oligonucleotide
ggaacaugggaugccagga

SEQ ID NO: 2792208 - RNA, 19 nt, Artificial Sequence
  Description of Artificial Sequence: Synthetic oligonucleotide
cauguccagggucacagcu

SEQ ID NO: 2792209 - RNA, 19 nt, Artificial Sequence
  Description of Artificial Sequence: Synthetic oligonucleotide
uuucccugugggugacaga

SEQ ID NO: 2792210 - RNA, 19 nt, Artificial Sequence
  Description of Artificial Sequence: Synthetic oligonucleotide
guacugaggagucugcauu

SEQ ID NO: 2792211 - RNA, 19 nt, Artificial Sequence
  Description of Artificial Sequence: Synthetic oligonucleotide
ugacaccgucaaagaacac

SEQ ID NO: 2792212 - RNA, 19 nt, Artificial Sequence
  Description of Artificial Sequence: Synthetic oligonucleotide
gacggagccacugcucaca

SEQ ID NO: 2792213 - RNA, 19 nt, Artificial Sequence
  Description of Artificial Sequence: Synthetic oligonucleotide
cuucuucagccaguagcug

SEQ ID NO: 2792214 - RNA, 19 nt, Artificial Sequence
  Description of Artificial Sequence: Synthetic oligonucleotide
cuuaguuguggugccaucu

SEQ ID NO: 2792215 - RNA, 19 nt, Artificial Sequence
  Description of Artificial Sequence: Synthetic oligonucleotide
gccaguagcuguacugagg

SEQ ID NO: 2792216 - RNA, 19 nt, Artificial Sequence
  Description of Artificial Sequence: Synthetic oligonucleotide
ucccugugggugacagaca

SEQ ID NO: 2792217 - RNA, 19 nt, Artificial Sequence
  Description of Artificial Sequence: Synthetic oligonucleotide
cagugugggaacaugggau

SEQ ID NO: 2792218 - RNA, 19 nt, Artificial Sequence
  Description of Artificial Sequence: Synthetic oligonucleotide
gucggggaggcgaagguga

SEQ ID NO: 2792219 - RNA, 19 nt, Artificial Sequence
  Description of Artificial Sequence: Synthetic oligonucleotide
ugacggagccacugcucac

SEQ ID NO: 2792220 - RNA, 19 nt, Artificial Sequence
  Description of Artificial Sequence: Synthetic oligonucleotide
auucacagugacggagcca

SEQ ID NO: 2792221 - RNA, 19 nt, Artificial Sequence
  Description of Artificial Sequence: Synthetic oligonucleotide
gccaggaugccaaaggcuc

SEQ ID NO: 2792222 - RNA, 19 nt, Artificial Sequence
  Description of Artificial Sequence: Synthetic oligonucleotide
gacaguucugaccgcgccu

SEQ ID NO: 2792223 - RNA, 19 nt, Artificial Sequence
  Description of Artificial Sequence: Synthetic oligonucleotide
guucugaccgcgccuucuc

SEQ ID NO: 2792224 - RNA, 19 nt, Artificial Sequence
  Description of Artificial Sequence: Synthetic oligonucleotide
acgcgccuggagcaccagg

SEQ ID NO: 2792225 - RNA, 19 nt, Artificial Sequence
  Description of Artificial Sequence: Synthetic oligonucleotide
cagacccggacggcgaagc

SEQ ID NO: 2792226 - RNA, 19 nt, Artificial Sequence
  Description of Artificial Sequence: Synthetic oligonucleotide
cguaggaccugcagugugg

SEQ ID NO: 2792227 - RNA, 19 nt, Artificial Sequence
  Description of Artificial Sequence: Synthetic oligonucleotide
guguaggcacauccaccug

SEQ ID NO: 2792228 - RNA, 19 nt, Artificial Sequence
  Description of Artificial Sequence: Synthetic oligonucleotide
caccgucaaagaacaccug

SEQ ID NO: 2792229 - RNA, 19 nt, Artificial Sequence
  Description of Artificial Sequence: Synthetic oligonucleotide
ucuccagguuggcccgcgc

SEQ ID NO: 2792230 - RNA, 19 nt, Artificial Sequence
  Description of Artificial Sequence: Synthetic oligonucleotide
ggaucucagcccgugcugc

SEQ ID NO: 2792231 - RNA, 19 nt, Artificial Sequence
  Description of Artificial Sequence: Synthetic oligonucleotide
gcugccucauccguugugc

SEQ ID NO: 2792232 - RNA, 19 nt, Artificial Sequence
  Description of Artificial Sequence: Synthetic oligonucleotide
ggcggcgcagacccggacg

SEQ ID NO: 2792233 - RNA, 19 nt, Artificial Sequence
  Description of Artificial Sequence: Synthetic oligonucleotide
gccacugcucacaaaguac

SEQ ID NO: 2792234 - RNA, 19 nt, Artificial Sequence
  Description of Artificial Sequence: Synthetic oligonucleotide
agguuggcccgcgcugccc

SEQ ID NO: 2792235 - RNA, 19 nt, Artificial Sequence
  Description of Artificial Sequence: Synthetic oligonucleotide
ccaggaugccaaaggcucc

SEQ ID NO: 2792236 - RNA, 19 nt, Artificial Sequence
  Description of Artificial Sequence: Synthetic oligonucleotide
ggcguaggcacgcgccugg

SEQ ID NO: 2792237 - RNA, 19 nt, Artificial Sequence
  Description of Artificial Sequence: Synthetic oligonucleotide
gaacaugggaugccaggau

SEQ ID NO: 2792238 - RNA, 19 nt, Artificial Sequence
  Description of Artificial Sequence: Synthetic oligonucleotide
augggaugccaggaugcca

SEQ ID NO: 2792239 - RNA, 19 nt, Artificial Sequence
  Description of Artificial Sequence: Synthetic oligonucleotide
accugcgucggggaggcga

SEQ ID NO: 2792240 - RNA, 19 nt, Artificial Sequence
  Description of Artificial Sequence: Synthetic oligonucleotide
ggaccugcagugugggaac

SEQ ID NO: 2792241 - RNA, 19 nt, Artificial Sequence
  Description of Artificial Sequence: Synthetic oligonucleotide
aggaugccaaaggcuccgg

SEQ ID NO: 2792242 - RNA, 19 nt, Artificial Sequence
  Description of Artificial Sequence: Synthetic oligonucleotide
ggaggcgaaggugaaggac

SEQ ID NO: 2792243 - RNA, 19 nt, Artificial Sequence
  Description of Artificial Sequence: Synthetic oligonucleotide
gugggaacaugggaugcca

SEQ ID NO: 2792244 - RNA, 19 nt, Artificial Sequence
  Description of Artificial Sequence: Synthetic oligonucleotide
ucggggaggcgaaggugaa

SEQ ID NO: 2792245 - RNA, 19 nt, Artificial Sequence
  Description of Artificial Sequence: Synthetic oligonucleotide
ucacagugacggagccacu

SEQ ID NO: 2792246 - RNA, 19 nt, Artificial Sequence
  Description of Artificial Sequence: Synthetic oligonucleotide
gcggcgcagacccggacgg

SEQ ID NO: 2792247 - RNA, 19 nt, Artificial Sequence
  Description of Artificial Sequence: Synthetic oligonucleotide
cagccaguagcuguacuga

SEQ ID NO: 2792248 - RNA, 19 nt, Artificial Sequence
  Description of Artificial Sequence: Synthetic oligonucleotide
gcgaaggugaaggacaucu

SEQ ID NO: 2792249 - RNA, 19 nt, Artificial Sequence
  Description of Artificial Sequence: Synthetic oligonucleotide
gcggccucggcguaggcac

SEQ ID NO: 2792250 - RNA, 19 nt, Artificial Sequence
  Description of Artificial Sequence: Synthetic oligonucleotide
cagcauggaccaccaccag

SEQ ID NO: 2792251 - RNA, 19 nt, Artificial Sequence
  Description of Artificial Sequence: Synthetic oligonucleotide
acccggacggcgaagcagu

SEQ ID NO: 2792252 - RNA, 19 nt, Artificial Sequence
  Description of Artificial Sequence: Synthetic oligonucleotide
gcucacaaaguacuuaguu

SEQ ID NO: 2792253 - RNA, 19 nt, Artificial Sequence
  Description of Artificial Sequence: Synthetic oligonucleotide
cuucagccaguagcuguac

SEQ ID NO: 2792254 - RNA, 19 nt, Artificial Sequence
  Description of Artificial Sequence: Synthetic oligonucleotide
ggaccugccucaguuuccc

SEQ ID NO: 2792255 - RNA, 19 nt, Artificial Sequence
  Description of Artificial Sequence: Synthetic oligonucleotide
gacagacaugcaccgccua

SEQ ID NO: 2792256 - RNA, 19 nt, Artificial Sequence
  Description of Artificial Sequence: Synthetic oligonucleotide
caaugcagaucuggaucuc

SEQ ID NO: 2792257 - RNA, 19 nt, Artificial Sequence
  Description of Artificial Sequence: Synthetic oligonucleotide
cuggaucucagcccgugcu

SEQ ID NO: 2792258 - RNA, 19 nt, Artificial Sequence
  Description of Artificial Sequence: Synthetic oligonucleotide
gacaucuguccgggcccgg

SEQ ID NO: 2792259 - RNA, 19 nt, Artificial Sequence
  Description of Artificial Sequence: Synthetic oligonucleotide
uguccgggcccggcggcgg

SEQ ID NO: 2792260 - RNA, 19 nt, Artificial Sequence
  Description of Artificial Sequence: Synthetic oligonucleotide
uagcuguacugaggagucu

SEQ ID NO: 2792261 - RNA, 19 nt, Artificial Sequence
  Description of Artificial Sequence: Synthetic oligonucleotide
ggcgcagacccggacggcg

SEQ ID NO: 2792262 - RNA, 19 nt, Artificial Sequence
  Description of Artificial Sequence: Synthetic oligonucleotide
aggcggcgcagacccggac

SEQ ID NO: 2792263 - RNA, 19 nt, Artificial Sequence
  Description of Artificial Sequence: Synthetic oligonucleotide
ggugacagacaugcaccgc

SEQ ID NO: 2792264 - RNA, 19 nt, Artificial Sequence
  Description of Artificial Sequence: Synthetic oligonucleotide
guacuuaguuguggugcca

SEQ ID NO: 2792265 - RNA, 19 nt, Artificial Sequence
  Description of Artificial Sequence: Synthetic oligonucleotide
cuguacugaggagucugca

SEQ ID NO: 2792266 - RNA, 19 nt, Artificial Sequence
  Description of Artificial Sequence: Synthetic oligonucleotide
gggucacagcuucuucagc

SEQ ID NO: 2792267 - RNA, 19 nt, Artificial Sequence
  Description of Artificial Sequence: Synthetic oligonucleotide
gguuggcccgcgcugcccc

SEQ ID NO: 2792268 - RNA, 19 nt, Artificial Sequence
  Description of Artificial Sequence: Synthetic oligonucleotide
ggaugccaggaugccaaag

SEQ ID NO: 2792269 - RNA, 19 nt, Artificial Sequence
  Description of Artificial Sequence: Synthetic oligonucleotide
acggagccacugcucacaa

SEQ ID NO: 2792270 - RNA, 19 nt, Artificial Sequence
  Description of Artificial Sequence: Synthetic oligonucleotide
ugccggacguugacaccgu

SEQ ID NO: 2792271 - RNA, 19 nt, Artificial Sequence
  Description of Artificial Sequence: Synthetic oligonucleotide
agacccggacggcgaagca

SEQ ID NO: 2792272 - RNA, 19 nt, Artificial Sequence
  Description of Artificial Sequence: Synthetic oligonucleotide
cuucagcauggaccaccac

SEQ ID NO: 2792273 - RNA, 19 nt, Artificial Sequence
  Description of Artificial Sequence: Synthetic oligonucleotide
guugugccggacaguucug

SEQ ID NO: 2792274 - RNA, 19 nt, Artificial Sequence
  Description of Artificial Sequence: Synthetic oligonucleotide
cagcuucuucagccaguag

SEQ ID NO: 2792275 - RNA, 19 nt, Artificial Sequence
  Description of Artificial Sequence: Synthetic oligonucleotide
ccucauuggccucaaugca

SEQ ID NO: 2792276 - RNA, 19 nt, Artificial Sequence
  Description of Artificial Sequence: Synthetic oligonucleotide
ggacaucuguccgggcccg

SEQ ID NO: 2792277 - RNA, 19 nt, Artificial Sequence
  Description of Artificial Sequence: Synthetic oligonucleotide
gcuccggucaguguaggca

SEQ ID NO: 2792278 - RNA, 19 nt, Artificial Sequence
  Description of Artificial Sequence: Synthetic oligonucleotide
accgccuacuccagggccu

SEQ ID NO: 2792279 - RNA, 19 nt, Artificial Sequence
  Description of Artificial Sequence: Synthetic oligonucleotide
gcuguacugaggagucugc

SEQ ID NO: 2792280 - RNA, 19 nt, Artificial Sequence
  Description of Artificial Sequence: Synthetic oligonucleotide
cagguuggcccgcgcugcc

SEQ ID NO: 2792281 - RNA, 19 nt, Artificial Sequence
  Description of Artificial Sequence: Synthetic oligonucleotide
aggcuccggucaguguagg

SEQ ID NO: 2792282 - RNA, 19 nt, Artificial Sequence
  Description of Artificial Sequence: Synthetic oligonucleotide
cugcauucacagugacgga

SEQ ID NO: 2792283 - RNA, 19 nt, Artificial Sequence
  Description of Artificial Sequence: Synthetic oligonucleotide
cgugcugccucauccguug

SEQ ID NO: 2792284 - RNA, 19 nt, Artificial Sequence
  Description of Artificial Sequence: Synthetic oligonucleotide
gcgccuggagcaccaggcg

SEQ ID NO: 2792285 - RNA, 19 nt, Artificial Sequence
  Description of Artificial Sequence: Synthetic oligonucleotide
ccggacaguucugaccgcg

SEQ ID NO: 2792286 - RNA, 19 nt, Artificial Sequence
  Description of Artificial Sequence: Synthetic oligonucleotide
aggcgaaggugaaggacau

SEQ ID NO: 2792287 - RNA, 19 nt, Artificial Sequence
  Description of Artificial Sequence: Synthetic oligonucleotide
ccaaaggcuccggucagug

SEQ ID NO: 2792288 - RNA, 19 nt, Artificial Sequence
  Description of Artificial Sequence: Synthetic oligonucleotide
aggcacgcgccuggagcac

SEQ ID NO: 2792289 - RNA, 19 nt, Artificial Sequence
  Description of Artificial Sequence: Synthetic oligonucleotide
cgcgccuggagcaccaggc

SEQ ID NO: 2792290 - RNA, 19 nt, Artificial Sequence
  Description of Artificial Sequence: Synthetic oligonucleotide
gaccgcgccuucuccaggu

SEQ ID NO: 2792291 - RNA, 19 nt, Artificial Sequence
  Description of Artificial Sequence: Synthetic oligonucleotide
aggccaggccguaggaccu

SEQ ID NO: 2792292 - RNA, 19 nt, Artificial Sequence
  Description of Artificial Sequence: Synthetic oligonucleotide
gccucaaugcagaucugga

SEQ ID NO: 2792293 - RNA, 19 nt, Artificial Sequence
  Description of Artificial Sequence: Synthetic oligonucleotide
ccguaggaccugcagugug

SEQ ID NO: 2792294 - RNA, 19 nt, Artificial Sequence
  Description of Artificial Sequence: Synthetic oligonucleotide
caguuucccugugggugac

SEQ ID NO: 2792295 - RNA, 19 nt, Artificial Sequence
  Description of Artificial Sequence: Synthetic oligonucleotide
gcauguccagggucacagc

SEQ ID NO: 2792296 - RNA, 19 nt, Artificial Sequence
  Description of Artificial Sequence: Synthetic oligonucleotide
gaccugcagugugggaaca

SEQ ID NO: 2792297 - RNA, 19 nt, Artificial Sequence
  Description of Artificial Sequence: Synthetic oligonucleotide
caucuucagcauggaccac

SEQ ID NO: 2792298 - RNA, 19 nt, Artificial Sequence
  Description of Artificial Sequence: Synthetic oligonucleotide
ccacugcucacaaaguacu

SEQ ID NO: 2792299 - RNA, 19 nt, Artificial Sequence
  Description of Artificial Sequence: Synthetic oligonucleotide
gaccaccaccaggccaggc

SEQ ID NO: 2792300 - RNA, 19 nt, Artificial Sequence
  Description of Artificial Sequence: Synthetic oligonucleotide
ccugcagugugggaacaug

SEQ ID NO: 2792301 - RNA, 19 nt, Artificial Sequence
  Description of Artificial Sequence: Synthetic oligonucleotide
cacagcuucuucagccagu

SEQ ID NO: 2792302 - RNA, 19 nt, Artificial Sequence
  Description of Artificial Sequence: Synthetic oligonucleotide
cgaaggugaaggacaucug

SEQ ID NO: 2792303 - RNA, 19 nt, Artificial Sequence
  Description of Artificial Sequence: Synthetic oligonucleotide
ggcuccggucaguguaggc

SEQ ID NO: 2792304 - RNA, 19 nt, Artificial Sequence
  Description of Artificial Sequence: Synthetic oligonucleotide
cagacaugcaccgccuacu

SEQ ID NO: 2792305 - RNA, 19 nt, Artificial Sequence
  Description of Artificial Sequence: Synthetic oligonucleotide
caguucugaccgcgccuuc

SEQ ID NO: 2792306 - RNA, 19 nt, Artificial Sequence
  Description of Artificial Sequence: Synthetic oligonucleotide
gcaccgccuacuccagggc

SEQ ID NO: 2792307 - RNA, 19 nt, Artificial Sequence
  Description of Artificial Sequence: Synthetic oligonucleotide
auccguugugccggacagu

SEQ ID NO: 2792308 - RNA, 19 nt, Artificial Sequence
  Description of Artificial Sequence: Synthetic oligonucleotide
ccugccggacguugacacc

SEQ ID NO: 2792309 - RNA, 19 nt, Artificial Sequence
  Description of Artificial Sequence: Synthetic oligonucleotide
cgccuggagcaccaggcgg

SEQ ID NO: 2792310 - RNA, 19 nt, Artificial Sequence
  Description of Artificial Sequence: Synthetic oligonucleotide
cagugacggagccacugcu

SEQ ID NO: 2792311 - RNA, 19 nt, Artificial Sequence
  Description of Artificial Sequence: Synthetic oligonucleotide
aguuucccugugggugaca

SEQ ID NO: 2792312 - RNA, 19 nt, Artificial Sequence
  Description of Artificial Sequence: Synthetic oligonucleotide
ccagguuggcccgcgcugc

SEQ ID NO: 2792313 - RNA, 19 nt, Artificial Sequence
  Description of Artificial Sequence: Synthetic oligonucleotide
accugcagugugggaacau

SEQ ID NO: 2792314 - RNA, 19 nt, Artificial Sequence
  Description of Artificial Sequence: Synthetic oligonucleotide
gggaggcgaaggugaagga

SEQ ID NO: 2792315 - RNA, 19 nt, Artificial Sequence
  Description of Artificial Sequence: Synthetic oligonucleotide
ccugugggugacagacaug

SEQ ID NO: 2792316 - RNA, 19 nt, Artificial Sequence
  Description of Artificial Sequence: Synthetic oligonucleotide
cuggagcaccaggcggcgc

SEQ ID NO: 2792317 - RNA, 19 nt, Artificial Sequence
  Description of Artificial Sequence: Synthetic oligonucleotide
caaaggcuccggucagugu

SEQ ID NO: 2792318 - RNA, 19 nt, Artificial Sequence
  Description of Artificial Sequence: Synthetic oligonucleotide
ccuacuccagggccuucac

SEQ ID NO: 2792319 - RNA, 19 nt, Artificial Sequence
  Description of Artificial Sequence: Synthetic oligonucleotide
cguugugccggacaguucu

SEQ ID NO: 2792320 - RNA, 19 nt, Artificial Sequence
  Description of Artificial Sequence: Synthetic oligonucleotide
cucagcccgugcugccuca

SEQ ID NO: 2792321 - RNA, 19 nt, Artificial Sequence
  Description of Artificial Sequence: Synthetic oligonucleotide
cggacggcgaagcagugca

SEQ ID NO: 2792322 - RNA, 19 nt, Artificial Sequence
  Description of Artificial Sequence: Synthetic oligonucleotide
ccuggagcaccaggcggcg

SEQ ID NO: 2792323 - RNA, 19 nt, Artificial Sequence
  Description of Artificial Sequence: Synthetic oligonucleotide
guccgggcccggcggcggg

SEQ ID NO: 2792324 - RNA, 19 nt, Artificial Sequence
  Description of Artificial Sequence: Synthetic oligonucleotide
ccggacguugacaccguca

SEQ ID NO: 2792325 - RNA, 19 nt, Artificial Sequence
  Description of Artificial Sequence: Synthetic oligonucleotide
cucauccguugugccggac

SEQ ID NO: 2792326 - RNA, 19 nt, Artificial Sequence
  Description of Artificial Sequence: Synthetic oligonucleotide
cguugacaccgucaaagaa

SEQ ID NO: 2792327 - RNA, 19 nt, Artificial Sequence
  Description of Artificial Sequence: Synthetic oligonucleotide
cggacaguucugaccgcgc

SEQ ID NO: 2792328 - RNA, 19 nt, Artificial Sequence
  Description of Artificial Sequence: Synthetic oligonucleotide
ggagcaccaggcggcgcag

SEQ ID NO: 2792329 - RNA, 19 nt, Artificial Sequence
  Description of Artificial Sequence: Synthetic oligonucleotide
ccaccugccggacguugac

SEQ ID NO: 2792330 - RNA, 19 nt, Artificial Sequence
  Description of Artificial Sequence: Synthetic oligonucleotide
cacugcucacaaaguacuu

SEQ ID NO: 2792331 - RNA, 19 nt, Artificial Sequence
  Description of Artificial Sequence: Synthetic oligonucleotide
cggacguugacaccgucaa

SEQ ID NO: 2792332 - RNA, 19 nt, Artificial Sequence
  Description of Artificial Sequence: Synthetic oligonucleotide
ggacggcgaagcagugcag

SEQ ID NO: 2792333 - RNA, 19 nt, Artificial Sequence
  Description of Artificial Sequence: Synthetic oligonucleotide
ggacguugacaccgucaaa

SEQ ID NO: 2792334 - RNA, 19 nt, Artificial Sequence
  Description of Artificial Sequence: Synthetic oligonucleotide
cuccagguuggcccgcgcu

SEQ ID NO: 2792335 - RNA, 19 nt, Artificial Sequence
  Description of Artificial Sequence: Synthetic oligonucleotide
ggaugccaaaggcuccggu

SEQ ID NO: 2792336 - RNA, 19 nt, Artificial Sequence
  Description of Artificial Sequence: Synthetic oligonucleotide
gaucuggaucucagcccgu

SEQ ID NO: 2792337 - RNA, 19 nt, Artificial Sequence
  Description of Artificial Sequence: Synthetic oligonucleotide
ggcacgcgccuggagcacc

SEQ ID NO: 2792338 - RNA, 19 nt, Artificial Sequence
  Description of Artificial Sequence: Synthetic oligonucleotide
ccucaaugcagaucuggau

SEQ ID NO: 2792339 - RNA, 19 nt, Artificial Sequence
  Description of Artificial Sequence: Synthetic oligonucleotide
gcaccaggcggcgcagacc

SEQ ID NO: 2792340 - RNA, 19 nt, Artificial Sequence
  Description of Artificial Sequence: Synthetic oligonucleotide
ccucggcguaggcacgcgc

SEQ ID NO: 2792341 - RNA, 19 nt, Artificial Sequence
  Description of Artificial Sequence: Synthetic oligonucleotide
cauuggccucaaugcagau

SEQ ID NO: 2792342 - RNA, 19 nt, Artificial Sequence
  Description of Artificial Sequence: Synthetic oligonucleotide
accgcgccuucuccagguu

SEQ ID NO: 2792343 - RNA, 19 nt, Artificial Sequence
  Description of Artificial Sequence: Synthetic oligonucleotide
ccgcgccuucuccagguug

SEQ ID NO: 2792344 - RNA, 19 nt, Artificial Sequence
  Description of Artificial Sequence: Synthetic oligonucleotide
caccugccggacguugaca

SEQ ID NO: 2792345 - RNA, 19 nt, Artificial Sequence
  Description of Artificial Sequence: Synthetic oligonucleotide
gccggacaguucugaccgc

SEQ ID NO: 2792346 - RNA, 19 nt, Artificial Sequence
  Description of Artificial Sequence: Synthetic oligonucleotide
gccuacuccagggccuuca

SEQ ID NO: 2792347 - RNA, 19 nt, Artificial Sequence
  Description of Artificial Sequence: Synthetic oligonucleotide
gcagacccggacggcgaag

SEQ ID NO: 2792348 - RNA, 19 nt, Artificial Sequence
  Description of Artificial Sequence: Synthetic oligonucleotide
cggcgaagcagugcagcgg

SEQ ID NO: 2792349 - RNA, 19 nt, Artificial Sequence
  Description of Artificial Sequence: Synthetic oligonucleotide
cgucaaagaacaccugcgu

SEQ ID NO: 2792350 - RNA, 19 nt, Artificial Sequence
  Description of Artificial Sequence: Synthetic oligonucleotide
gaccugccucaguuucccu

SEQ ID NO: 2792351 - RNA, 19 nt, Artificial Sequence
  Description of Artificial Sequence: Synthetic oligonucleotide
ggaccaccaccaggccagg

SEQ ID NO: 2792352 - RNA, 19 nt, Artificial Sequence
  Description of Artificial Sequence: Synthetic oligonucleotide
gccuggaccugccucaguu

SEQ ID NO: 2792353 - RNA, 19 nt, Artificial Sequence
  Description of Artificial Sequence: Synthetic oligonucleotide
ggccucggcguaggcacgc

SEQ ID NO: 2792354 - RNA, 19 nt, Artificial Sequence
  Description of Artificial Sequence: Synthetic oligonucleotide
guggugccaucuucagcau

SEQ ID NO: 2792355 - RNA, 19 nt, Artificial Sequence
  Description of Artificial Sequence: Synthetic oligonucleotide
ccggacggcgaagcagugc

SEQ ID NO: 2792356 - RNA, 19 nt, Artificial Sequence
  Description of Artificial Sequence: Synthetic oligonucleotide
cguaggcacgcgccuggag

SEQ ID NO: 2792357 - RNA, 19 nt, Artificial Sequence
  Description of Artificial Sequence: Synthetic oligonucleotide
cugcgucggggaggcgaag

SEQ ID NO: 2792358 - RNA, 19 nt, Artificial Sequence
  Description of Artificial Sequence: Synthetic oligonucleotide
agggccucauuggccucaa

SEQ ID NO: 2792359 - RNA, 19 nt, Artificial Sequence
  Description of Artificial Sequence: Synthetic oligonucleotide
caggcggcgcagacccgga

SEQ ID NO: 2792360 - RNA, 19 nt, Artificial Sequence
  Description of Artificial Sequence: Synthetic oligonucleotide
cacgcgccuggagcaccag

SEQ ID NO: 2792361 - RNA, 19 nt, Artificial Sequence
  Description of Artificial Sequence: Synthetic oligonucleotide
gcacauccaccugccggac

SEQ ID NO: 2792362 - RNA, 19 nt, Artificial Sequence
  Description of Artificial Sequence: Synthetic oligonucleotide
cccugugggugacagacau

SEQ ID NO: 2792363 - RNA, 19 nt, Artificial Sequence
  Description of Artificial Sequence: Synthetic oligonucleotide
gggaugccaggaugccaaa

SEQ ID NO: 2792364 - RNA, 19 nt, Artificial Sequence
  Description of Artificial Sequence: Synthetic oligonucleotide
gccaggccguaggaccugc

SEQ ID NO: 2792365 - RNA, 19 nt, Artificial Sequence
  Description of Artificial Sequence: Synthetic oligonucleotide
ccguugugccggacaguuc

SEQ ID NO: 2792366 - RNA, 19 nt, Artificial Sequence
  Description of Artificial Sequence: Synthetic oligonucleotide
gcgaagcagugcagcgggc

SEQ ID NO: 2792367 - RNA, 19 nt, Artificial Sequence
  Description of Artificial Sequence: Synthetic oligonucleotide
ggcggccucggcguaggca

SEQ ID NO: 2792368 - RNA, 19 nt, Artificial Sequence
  Description of Artificial Sequence: Synthetic oligonucleotide
ggcgaaggugaaggacauc

SEQ ID NO: 2792369 - RNA, 19 nt, Artificial Sequence
  Description of Artificial Sequence: Synthetic oligonucleotide
gcggcggccucggcguagg

SEQ ID NO: 2792370 - RNA, 19 nt, Artificial Sequence
  Description of Artificial Sequence: Synthetic oligonucleotide
gccucggcguaggcacgcg

SEQ ID NO: 2792371 - RNA, 19 nt, Artificial Sequence
  Description of Artificial Sequence: Synthetic oligonucleotide
gugcugccucauccguugu

SEQ ID NO: 2792372 - RNA, 19 nt, Artificial Sequence
  Description of Artificial Sequence: Synthetic oligonucleotide
ccucaguuucccugugggu

SEQ ID NO: 2792373 - RNA, 19 nt, Artificial Sequence
  Description of Artificial Sequence: Synthetic oligonucleotide
gccggacguugacaccguc

SEQ ID NO: 2792374 - RNA, 19 nt, Artificial Sequence
  Description of Artificial Sequence: Synthetic oligonucleotide
caccaccaggccaggccgu

SEQ ID NO: 2792375 - RNA, 19 nt, Artificial Sequence
  Description of Artificial Sequence: Synthetic oligonucleotide
ccugcgucggggaggcgaa

SEQ ID NO: 2792376 - RNA, 19 nt, Artificial Sequence
  Description of Artificial Sequence: Synthetic oligonucleotide
cgucggggaggcgaaggug

SEQ ID NO: 2792377 - RNA, 19 nt, Artificial Sequence
  Description of Artificial Sequence: Synthetic oligonucleotide
cccggacggcgaagcagug

SEQ ID NO: 2792378 - RNA, 19 nt, Artificial Sequence
  Description of Artificial Sequence: Synthetic oligonucleotide
ggccaggccguaggaccug

SEQ ID NO: 2792379 - RNA, 19 nt, Artificial Sequence
  Description of Artificial Sequence: Synthetic oligonucleotide
ggcggcggccucggcguag

SEQ ID NO: 2792380 - RNA, 19 nt, Artificial Sequence
  Description of Artificial Sequence: Synthetic oligonucleotide
gcgccuucuccagguuggc

SEQ ID NO: 2792381 - RNA, 19 nt, Artificial Sequence
  Description of Artificial Sequence: Synthetic oligonucleotide
ccaccaggccaggccguag

SEQ ID NO: 2792382 - RNA, 19 nt, Artificial Sequence
  Description of Artificial Sequence: Synthetic oligonucleotide
gcgucggggaggcgaaggu

SEQ ID NO: 2792383 - RNA, 19 nt, Artificial Sequence
  Description of Artificial Sequence: Synthetic oligonucleotide
gcgcagacccggacggcga

SEQ ID NO: 2792384 - RNA, 19 nt, Artificial Sequence
  Description of Artificial Sequence: Synthetic oligonucleotide
cggccucggcguaggcacg

SEQ ID NO: 2792385 - RNA, 19 nt, Artificial Sequence
  Description of Artificial Sequence: Synthetic oligonucleotide
ccucauccguugugccgga

SEQ ID NO: 2792386 - RNA, 19 nt, Artificial Sequence
  Description of Artificial Sequence: Synthetic oligonucleotide
gcacgcgccuggagcacca

SEQ ID NO: 2792387 - RNA, 19 nt, Artificial Sequence
  Description of Artificial Sequence: Synthetic oligonucleotide
caccugcgucggggaggcg

SEQ ID NO: 2792388 - RNA, 19 nt, Artificial Sequence
  Description of Artificial Sequence: Synthetic oligonucleotide
gccguaggaccugcagugu

SEQ ID NO: 2792389 - RNA, 19 nt, Artificial Sequence
  Description of Artificial Sequence: Synthetic oligonucleotide
cggggaggcgaaggugaag

SEQ ID NO: 2792390 - RNA, 19 nt, Artificial Sequence
  Description of Artificial Sequence: Synthetic oligonucleotide
ccaggccguaggaccugca

SEQ ID NO: 2792391 - RNA, 19 nt, Artificial Sequence
  Description of Artificial Sequence: Synthetic oligonucleotide
gccaaaggcuccggucagu

SEQ ID NO: 2792392 - RNA, 19 nt, Artificial Sequence
  Description of Artificial Sequence: Synthetic oligonucleotide
gcguaggcacgcgccugga

SEQ ID NO: 2792393 - RNA, 19 nt, Artificial Sequence
  Description of Artificial Sequence: Synthetic oligonucleotide
ccuggaccugccucaguuu

SEQ ID NO: 2792394 - RNA, 19 nt, Artificial Sequence
  Description of Artificial Sequence: Synthetic oligonucleotide
cggcguaggcacgcgccug

SEQ ID NO: 2792395 - RNA, 19 nt, Artificial Sequence
  Description of Artificial Sequence: Synthetic oligonucleotide
ggccuucaccagggccuca

SEQ ID NO: 2792396 - RNA, 19 nt, Artificial Sequence
  Description of Artificial Sequence: Synthetic oligonucleotide
cauccaccugccggacguu

SEQ ID NO: 2792397 - RNA, 19 nt, Artificial Sequence
  Description of Artificial Sequence: Synthetic oligonucleotide
cgcagacccggacggcgaa

SEQ ID NO: 2792398 - RNA, 19 nt, Artificial Sequence
  Description of Artificial Sequence: Synthetic oligonucleotide
ccgugcugccucauccguu

SEQ ID NO: 2792399 - RNA, 19 nt, Artificial Sequence
  Description of Artificial Sequence: Synthetic oligonucleotide
ccggucaguguaggcacau

SEQ ID NO: 2792400 - RNA, 19 nt, Artificial Sequence
  Description of Artificial Sequence: Synthetic oligonucleotide
cggagccacugcucacaaa

SEQ ID NO: 2792401 - RNA, 19 nt, Artificial Sequence
  Description of Artificial Sequence: Synthetic oligonucleotide
cggcgcagacccggacggc

SEQ ID NO: 2792402 - RNA, 19 nt, Artificial Sequence
  Description of Artificial Sequence: Synthetic oligonucleotide
gggcggcggccucggcgua

SEQ ID NO: 2792403 - RNA, 19 nt, Artificial Sequence
  Description of Artificial Sequence: Synthetic oligonucleotide
cggcggccucggcguaggc

SEQ ID NO: 2792404 - RNA, 19 nt, Artificial Sequence
  Description of Artificial Sequence: Synthetic oligonucleotide
cgccuacuccagggccuuc

SEQ ID NO: 2792405 - RNA, 19 nt, Artificial Sequence
  Description of Artificial Sequence: Synthetic oligonucleotide
gcagugcagcgggcagcau

SEQ ID NO: 2792406 - RNA, 19 nt, Artificial Sequence
  Description of Artificial Sequence: Synthetic oligonucleotide
ccgccuacuccagggccuu

SEQ ID NO: 2792407 - RNA, 19 nt, Artificial Sequence
  Description of Artificial Sequence: Synthetic oligonucleotide
auuuauaaaucauagaugg

SEQ ID NO: 2792408 - RNA, 19 nt, Artificial Sequence
  Description of Artificial Sequence: Synthetic oligonucleotide
uuauauuucauuaugaccu

SEQ ID NO: 2792409 - RNA, 19 nt, Artificial Sequence
  Description of Artificial Sequence: Synthetic oligonucleotide
aagaaaauacccaauaggc

SEQ ID NO: 2792410 - RNA, 19 nt, Artificial Sequence
  Description of Artificial Sequence: Synthetic oligonucleotide
ucauuuauaaaucauagau

SEQ ID NO: 2792411 - RNA, 19 nt, Artificial Sequence
  Description of Artificial Sequence: Synthetic oligonucleotide
gaagaaaauacccaauagg

SEQ ID NO: 2792412 - RNA, 19 nt, Artificial Sequence
  Description of Artificial Sequence: Synthetic oligonucleotide
uuaaaauuaguuaagcuua

SEQ ID NO: 2792413 - RNA, 19 nt, Artificial Sequence
  Description of Artificial Sequence: Synthetic oligonucleotide
aagaacagcagccauugac

SEQ ID NO: 2792414 - RNA, 19 nt, Artificial Sequence
  Description of Artificial Sequence: Synthetic oligonucleotide
aaucaaaacaaacaaacua

SEQ ID NO: 2792415 - RNA, 19 nt, Artificial Sequence
  Description of Artificial Sequence: Synthetic oligonucleotide
aaagguaugagccaccacu

SEQ ID NO: 2792416 - RNA, 19 nt, Artificial Sequence
  Description of Artificial Sequence: Synthetic oligonucleotide
agagaguagagacagagag

SEQ ID NO: 2792417 - RNA, 19 nt, Artificial Sequence
  Description of Artificial Sequence: Synthetic oligonucleotide
aaugauacuaagugcucac

SEQ ID NO: 2792418 - RNA, 19 nt, Artificial Sequence
  Description of Artificial Sequence: Synthetic oligonucleotide
uucaaugauacuaagugcu

SEQ ID NO: 2792419 - RNA, 19 nt, Artificial Sequence
  Description of Artificial Sequence: Synthetic oligonucleotide
uacuaaauaucuaugaguc

SEQ ID NO: 2792420 - RNA, 19 nt, Artificial Sequence
  Description of Artificial Sequence: Synthetic oligonucleotide
auucaaugauacuaagugc

SEQ ID NO: 2792421 - RNA, 19 nt, Artificial Sequence
  Description of Artificial Sequence: Synthetic oligonucleotide
gauucuuaaaauuaguuaa

SEQ ID NO: 2792422 - RNA, 19 nt, Artificial Sequence
  Description of Artificial Sequence: Synthetic oligonucleotide
cuuauauuucauuaugacc

SEQ ID NO: 2792423 - RNA, 19 nt, Artificial Sequence
  Description of Artificial Sequence: Synthetic oligonucleotide
aaaauacagucuucgcagc

SEQ ID NO: 2792424 - RNA, 19 nt, Artificial Sequence
  Description of Artificial Sequence: Synthetic oligonucleotide
cauucaaugauacuaagug

SEQ ID NO: 2792425 - RNA, 19 nt, Artificial Sequence
  Description of Artificial Sequence: Synthetic oligonucleotide
aaaaguacuuguguagccc

SEQ ID NO: 2792426 - RNA, 19 nt, Artificial Sequence
  Description of Artificial Sequence: Synthetic oligonucleotide
uguccuauuacucugucug

SEQ ID NO: 2792427 - RNA, 19 nt, Artificial Sequence
  Description of Artificial Sequence: Synthetic oligonucleotide
auacuaagugcucacacac

SEQ ID NO: 2792428 - RNA, 19 nt, Artificial Sequence
  Description of Artificial Sequence: Synthetic oligonucleotide
agaguagagacagagagac

SEQ ID NO: 2792429 - RNA, 19 nt, Artificial Sequence
  Description of Artificial Sequence: Synthetic oligonucleotide
auaucuaugagucauuuau

SEQ ID NO: 2792430 - RNA, 19 nt, Artificial Sequence
  Description of Artificial Sequence: Synthetic oligonucleotide
aaacuaaaaguacuugugu

SEQ ID NO: 2792431 - RNA, 19 nt, Artificial Sequence
  Description of Artificial Sequence: Synthetic oligonucleotide
gaacauaaugucuggaaag

SEQ ID NO: 2792432 - RNA, 19 nt, Artificial Sequence
  Description of Artificial Sequence: Synthetic oligonucleotide
uucauuaugaccuugcauu

SEQ ID NO: 2792433 - RNA, 19 nt, Artificial Sequence
  Description of Artificial Sequence: Synthetic oligonucleotide
acuaaaaguacuuguguag

SEQ ID NO: 2792434 - RNA, 19 nt, Artificial Sequence
  Description of Artificial Sequence: Synthetic oligonucleotide
uuacuaaauaucuaugagu

SEQ ID NO: 2792435 - RNA, 19 nt, Artificial Sequence
  Description of Artificial Sequence: Synthetic oligonucleotide
uuaugaaugagauucuuaa

SEQ ID NO: 2792436 - RNA, 19 nt, Artificial Sequence
  Description of Artificial Sequence: Synthetic oligonucleotide
aacauaaugucuggaaagg

SEQ ID NO: 2792437 - RNA, 19 nt, Artificial Sequence
  Description of Artificial Sequence: Synthetic oligonucleotide
cugguuaugaaugagauuc

SEQ ID NO: 2792438 - RNA, 19 nt, Artificial Sequence
  Description of Artificial Sequence: Synthetic oligonucleotide
cauuuauaaaucauagaug

SEQ ID NO: 2792439 - RNA, 19 nt, Artificial Sequence
  Description of Artificial Sequence: Synthetic oligonucleotide
aguagagacagagagacag

SEQ ID NO: 2792440 - RNA, 19 nt, Artificial Sequence
  Description of Artificial Sequence: Synthetic oligonucleotide
aagcuuauauuucauuaug

SEQ ID NO: 2792441 - RNA, 19 nt, Artificial Sequence
  Description of Artificial Sequence: Synthetic oligonucleotide
cuuacuaaauaucuaugag

SEQ ID NO: 2792442 - RNA, 19 nt, Artificial Sequence
  Description of Artificial Sequence: Synthetic oligonucleotide
uuaagcuuauauuucauua

SEQ ID NO: 2792443 - RNA, 19 nt, Artificial Sequence
  Description of Artificial Sequence: Synthetic oligonucleotide
aguucuggaaguccuuucc

SEQ ID NO: 2792444 - RNA, 19 nt, Artificial Sequence
  Description of Artificial Sequence: Synthetic oligonucleotide
ugucucacagcugaaaggg

SEQ ID NO: 2792445 - RNA, 19 nt, Artificial Sequence
  Description of Artificial Sequence: Synthetic oligonucleotide
aaucauagaugguuucaag

SEQ ID NO: 2792446 - RNA, 19 nt, Artificial Sequence
  Description of Artificial Sequence: Synthetic oligonucleotide
augaaugagauucuuaaaa

SEQ ID NO: 2792447 - RNA, 19 nt, Artificial Sequence
  Description of Artificial Sequence: Synthetic oligonucleotide
acuuacuaaauaucuauga

SEQ ID NO: 2792448 - RNA, 19 nt, Artificial Sequence
  Description of Artificial Sequence: Synthetic oligonucleotide
uuaguuaagcuuauauuuc

SEQ ID NO: 2792449 - RNA, 19 nt, Artificial Sequence
  Description of Artificial Sequence: Synthetic oligonucleotide
acaaacuaaaaguacuugu

SEQ ID NO: 2792450 - RNA, 19 nt, Artificial Sequence
  Description of Artificial Sequence: Synthetic oligonucleotide
uauuucauuaugaccuugc

SEQ ID NO: 2792451 - RNA, 19 nt, Artificial Sequence
  Description of Artificial Sequence: Synthetic oligonucleotide
uuauaaaucauagaugguu

SEQ ID NO: 2792452 - RNA, 19 nt, Artificial Sequence
  Description of Artificial Sequence: Synthetic oligonucleotide
auaaaucauagaugguuuc

SEQ ID NO: 2792453 - RNA, 19 nt, Artificial Sequence
  Description of Artificial Sequence: Synthetic oligonucleotide
gagagagagagagagagag

SEQ ID NO: 2792454 - RNA, 19 nt, Artificial Sequence
  Description of Artificial Sequence: Synthetic oligonucleotide
uaugagucauuuauaaauc

SEQ ID NO: 2792455 - RNA, 19 nt, Artificial Sequence
  Description of Artificial Sequence: Synthetic oligonucleotide
gaaaggacauucuuaacca

SEQ ID NO: 2792456 - RNA, 19 nt, Artificial Sequence
  Description of Artificial Sequence: Synthetic oligonucleotide
ugugucucacagcugaaag

SEQ ID NO: 2792457 - RNA, 19 nt, Artificial Sequence
  Description of Artificial Sequence: Synthetic oligonucleotide
aaugagauucuuaaaauua

SEQ ID NO: 2792458 - RNA, 19 nt, Artificial Sequence
  Description of Artificial Sequence: Synthetic oligonucleotide
uauaaaucauagaugguuu

SEQ ID NO: 2792459 - RNA, 19 nt, Artificial Sequence
  Description of Artificial Sequence: Synthetic oligonucleotide
ucauagaugguuucaagaa

SEQ ID NO: 2792460 - RNA, 19 nt, Artificial Sequence
  Description of Artificial Sequence: Synthetic oligonucleotide
aacuaaaaguacuugugua

SEQ ID NO: 2792461 - RNA, 19 nt, Artificial Sequence
  Description of Artificial Sequence: Synthetic oligonucleotide
ugaacauaaugucuggaaa

SEQ ID NO: 2792462 - RNA, 19 nt, Artificial Sequence
  Description of Artificial Sequence: Synthetic oligonucleotide
ugucuguagaccaggcugg

SEQ ID NO: 2792463 - RNA, 19 nt, Artificial Sequence
  Description of Artificial Sequence: Synthetic oligonucleotide
ggaaaggacauucuuaacc

SEQ ID NO: 2792464 - RNA, 19 nt, Artificial Sequence
  Description of Artificial Sequence: Synthetic oligonucleotide
auacuggccauucucauug

SEQ ID NO: 2792465 - RNA, 19 nt, Artificial Sequence
  Description of Artificial Sequence: Synthetic oligonucleotide
cuuugcgcgaagaaaauac

SEQ ID NO: 2792466 - RNA, 19 nt, Artificial Sequence
  Description of Artificial Sequence: Synthetic oligonucleotide
agucauuuauaaaucauag

SEQ ID NO: 2792467 - RNA, 19 nt, Artificial Sequence
  Description of Artificial Sequence: Synthetic oligonucleotide
agaacagcagccauugacc

SEQ ID NO: 2792468 - RNA, 19 nt, Artificial Sequence
  Description of Artificial Sequence: Synthetic oligonucleotide
uuuccauggagaucucucg

SEQ ID NO: 2792469 - RNA, 19 nt, Artificial Sequence
  Description of Artificial Sequence: Synthetic oligonucleotide
auuacucugucuguagacc

SEQ ID NO: 2792470 - RNA, 19 nt, Artificial Sequence
  Description of Artificial Sequence: Synthetic oligonucleotide
ugaaagggcaauacuggcc

SEQ ID NO: 2792471 - RNA, 19 nt, Artificial Sequence
  Description of Artificial Sequence: Synthetic oligonucleotide
ucugggcccaucaauuugg

SEQ ID NO: 2792472 - RNA, 19 nt, Artificial Sequence
  Description of Artificial Sequence: Synthetic oligonucleotide
gagaugaacauaaugucug

SEQ ID NO: 2792473 - RNA, 19 nt, Artificial Sequence
  Description of Artificial Sequence: Synthetic oligonucleotide
aaaguacuuguguagcccu

SEQ ID NO: 2792474 - RNA, 19 nt, Artificial Sequence
  Description of Artificial Sequence: Synthetic oligonucleotide
cauaaugucuggaaaggac

SEQ ID NO: 2792475 - RNA, 19 nt, Artificial Sequence
  Description of Artificial Sequence: Synthetic oligonucleotide
uaugaccuugcauucaaug

SEQ ID NO: 2792476 - RNA, 19 nt, Artificial Sequence
  Description of Artificial Sequence: Synthetic oligonucleotide
agagauuggggagagagag

SEQ ID NO: 2792477 - RNA, 19 nt, Artificial Sequence
  Description of Artificial Sequence: Synthetic oligonucleotide
ugaaugagauucuuaaaau

SEQ ID NO: 2792478 - RNA, 19 nt, Artificial Sequence
  Description of Artificial Sequence: Synthetic oligonucleotide
uucuuaaaauuaguuaagc

SEQ ID NO: 2792479 - RNA, 19 nt, Artificial Sequence
  Description of Artificial Sequence: Synthetic oligonucleotide
uaaaaguacuuguguagcc

SEQ ID NO: 2792480 - RNA, 19 nt, Artificial Sequence
  Description of Artificial Sequence: Synthetic oligonucleotide
aauacaacuuugcgcgaag

SEQ ID NO: 2792481 - RNA, 19 nt, Artificial Sequence
  Description of Artificial Sequence: Synthetic oligonucleotide
aacaaacuaaaaguacuug

SEQ ID NO: 2792482 - RNA, 19 nt, Artificial Sequence
  Description of Artificial Sequence: Synthetic oligonucleotide
ucucgagaugaacauaaug

SEQ ID NO: 2792483 - RNA, 19 nt, Artificial Sequence
  Description of Artificial Sequence: Synthetic oligonucleotide
acuuguguagcccuggcug

SEQ ID NO: 2792484 - RNA, 19 nt, Artificial Sequence
  Description of Artificial Sequence: Synthetic oligonucleotide
agauucuuaaaauuaguua

SEQ ID NO: 2792485 - RNA, 19 nt, Artificial Sequence
  Description of Artificial Sequence: Synthetic oligonucleotide
auuggggagagagagagag

SEQ ID NO: 2792486 - RNA, 19 nt, Artificial Sequence
  Description of Artificial Sequence: Synthetic oligonucleotide
ugauacuaagugcucacac

SEQ ID NO: 2792487 - RNA, 19 nt, Artificial Sequence
  Description of Artificial Sequence: Synthetic oligonucleotide
aucauagaugguuucaaga

SEQ ID NO: 2792488 - RNA, 19 nt, Artificial Sequence
  Description of Artificial Sequence: Synthetic oligonucleotide
uaagugcucacacacuuac

SEQ ID NO: 2792489 - RNA, 19 nt, Artificial Sequence
  Description of Artificial Sequence: Synthetic oligonucleotide
aaaucaaaacaaacaaacu

SEQ ID NO: 2792490 - RNA, 19 nt, Artificial Sequence
  Description of Artificial Sequence: Synthetic oligonucleotide
uaguuaagcuuauauuuca

SEQ ID NO: 2792491 - RNA, 19 nt, Artificial Sequence
  Description of Artificial Sequence: Synthetic oligonucleotide
ugagauucuuaaaauuagu

SEQ ID NO: 2792492 - RNA, 19 nt, Artificial Sequence
  Description of Artificial Sequence: Synthetic oligonucleotide
uuuauaaaucauagauggu

SEQ ID NO: 2792493 - RNA, 19 nt, Artificial Sequence
  Description of Artificial Sequence: Synthetic oligonucleotide
agagagauuggggagagag

SEQ ID NO: 2792494 - RNA, 19 nt, Artificial Sequence
  Description of Artificial Sequence: Synthetic oligonucleotide
acacuuacuaaauaucuau

SEQ ID NO: 2792495 - RNA, 19 nt, Artificial Sequence
  Description of Artificial Sequence: Synthetic oligonucleotide
cuaaaaguacuuguguagc

SEQ ID NO: 2792496 - RNA, 19 nt, Artificial Sequence
  Description of Artificial Sequence: Synthetic oligonucleotide
ucucucgagaugaacauaa

SEQ ID NO: 2792497 - RNA, 19 nt, Artificial Sequence
  Description of Artificial Sequence: Synthetic oligonucleotide
gagacagagagauugggga

SEQ ID NO: 2792498 - RNA, 19 nt, Artificial Sequence
  Description of Artificial Sequence: Synthetic oligonucleotide
agagagaguagagacagag

SEQ ID NO: 2792499 - RNA, 19 nt, Artificial Sequence
  Description of Artificial Sequence: Synthetic oligonucleotide
aaauacagucuucgcagca

SEQ ID NO: 2792500 - RNA, 19 nt, Artificial Sequence
  Description of Artificial Sequence: Synthetic oligonucleotide
gaaagggcaauacuggcca

SEQ ID NO: 2792501 - RNA, 19 nt, Artificial Sequence
  Description of Artificial Sequence: Synthetic oligonucleotide
ucaagaacagcagccauug

SEQ ID NO: 2792502 - RNA, 19 nt, Artificial Sequence
  Description of Artificial Sequence: Synthetic oligonucleotide
ucucacagcugaaagggca

SEQ ID NO: 2792503 - RNA, 19 nt, Artificial Sequence
  Description of Artificial Sequence: Synthetic oligonucleotide
aucuaugagucauuuauaa

SEQ ID NO: 2792504 - RNA, 19 nt, Artificial Sequence
  Description of Artificial Sequence: Synthetic oligonucleotide
agaugaacauaaugucugg

SEQ ID NO: 2792505 - RNA, 19 nt, Artificial Sequence
  Description of Artificial Sequence: Synthetic oligonucleotide
uggggagagagagagagag

SEQ ID NO: 2792506 - RNA, 19 nt, Artificial Sequence
  Description of Artificial Sequence: Synthetic oligonucleotide
ucacacacuuacuaaauau

SEQ ID NO: 2792507 - RNA, 19 nt, Artificial Sequence
  Description of Artificial Sequence: Synthetic oligonucleotide
uaagcuuauauuucauuau

SEQ ID NO: 2792508 - RNA, 19 nt, Artificial Sequence
  Description of Artificial Sequence: Synthetic oligonucleotide
agauuggggagagagagag

SEQ ID NO: 2792509 - RNA, 19 nt, Artificial Sequence
  Description of Artificial Sequence: Synthetic oligonucleotide
cagagagacagagagauug

SEQ ID NO: 2792510 - RNA, 19 nt, Artificial Sequence
  Description of Artificial Sequence: Synthetic oligonucleotide
uuugcgcgaagaaaauacc

SEQ ID NO: 2792511 - RNA, 19 nt, Artificial Sequence
  Description of Artificial Sequence: Synthetic oligonucleotide
ugagucauuuauaaaucau

SEQ ID NO: 2792512 - RNA, 19 nt, Artificial Sequence
  Description of Artificial Sequence: Synthetic oligonucleotide
uauuacucugucuguagac

SEQ ID NO: 2792513 - RNA, 19 nt, Artificial Sequence
  Description of Artificial Sequence: Synthetic oligonucleotide
uugcgcgaagaaaauaccc

SEQ ID NO: 2792514 - RNA, 19 nt, Artificial Sequence
  Description of Artificial Sequence: Synthetic oligonucleotide
ucgagaugaacauaauguc

SEQ ID NO: 2792515 - RNA, 19 nt, Artificial Sequence
  Description of Artificial Sequence: Synthetic oligonucleotide
ugcgcgaagaaaauaccca

SEQ ID NO: 2792516 - RNA, 19 nt, Artificial Sequence
  Description of Artificial Sequence: Synthetic oligonucleotide
uaaaucauagaugguuuca

SEQ ID NO: 2792517 - RNA, 19 nt, Artificial Sequence
  Description of Artificial Sequence: Synthetic oligonucleotide
augucuggaaaggacauuc

SEQ ID NO: 2792518 - RNA, 19 nt, Artificial Sequence
  Description of Artificial Sequence: Synthetic oligonucleotide
ugaccuugcauucaaugau

SEQ ID NO: 2792519 - RNA, 19 nt, Artificial Sequence
  Description of Artificial Sequence: Synthetic oligonucleotide
cagccauugaccaugcuug

SEQ ID NO: 2792520 - RNA, 19 nt, Artificial Sequence
  Description of Artificial Sequence: Synthetic oligonucleotide
gauacuaagugcucacaca

SEQ ID NO: 2792521 - RNA, 19 nt, Artificial Sequence
  Description of Artificial Sequence: Synthetic oligonucleotide
uaaaauuaguuaagcuuau

SEQ ID NO: 2792522 - RNA, 19 nt, Artificial Sequence
  Description of Artificial Sequence: Synthetic oligonucleotide
augcuugugucucacagcu

SEQ ID NO: 2792523 - RNA, 19 nt, Artificial Sequence
  Description of Artificial Sequence: Synthetic oligonucleotide
auagaugguuucaagaaca

SEQ ID NO: 2792524 - RNA, 19 nt, Artificial Sequence
  Description of Artificial Sequence: Synthetic oligonucleotide
uagaugguuucaagaacag

SEQ ID NO: 2792525 - RNA, 19 nt, Artificial Sequence
  Description of Artificial Sequence: Synthetic oligonucleotide
ugguuucaagaacagcagc

SEQ ID NO: 2792526 - RNA, 19 nt, Artificial Sequence
  Description of Artificial Sequence: Synthetic oligonucleotide
cugucuguagaccaggcug

SEQ ID NO: 2792527 - RNA, 19 nt, Artificial Sequence
  Description of Artificial Sequence: Synthetic oligonucleotide
auucuuaaaauuaguuaag

SEQ ID NO: 2792528 - RNA, 19 nt, Artificial Sequence
  Description of Artificial Sequence: Synthetic oligonucleotide
uuacucugucuguagacca

SEQ ID NO: 2792529 - RNA, 19 nt, Artificial Sequence
  Description of Artificial Sequence: Synthetic oligonucleotide
auuggugaguucuggaagu

SEQ ID NO: 2792530 - RNA, 19 nt, Artificial Sequence
  Description of Artificial Sequence: Synthetic oligonucleotide
augagauucuuaaaauuag

SEQ ID NO: 2792531 - RNA, 19 nt, Artificial Sequence
  Description of Artificial Sequence: Synthetic oligonucleotide
augaccuugcauucaauga

SEQ ID NO: 2792532 - RNA, 19 nt, Artificial Sequence
  Description of Artificial Sequence: Synthetic oligonucleotide
uggccauucucauugguga

SEQ ID NO: 2792533 - RNA, 19 nt, Artificial Sequence
  Description of Artificial Sequence: Synthetic oligonucleotide
uugcauucaaugauacuaa

SEQ ID NO: 2792534 - RNA, 19 nt, Artificial Sequence
  Description of Artificial Sequence: Synthetic oligonucleotide
cuaugagucauuuauaaau

SEQ ID NO: 2792535 - RNA, 19 nt, Artificial Sequence
  Description of Artificial Sequence: Synthetic oligonucleotide
augaacauaaugucuggaa

SEQ ID NO: 2792536 - RNA, 19 nt, Artificial Sequence
  Description of Artificial Sequence: Synthetic oligonucleotide
cauuggugaguucuggaag

SEQ ID NO: 2792537 - RNA, 19 nt, Artificial Sequence
  Description of Artificial Sequence: Synthetic oligonucleotide
aaaauacaacuuugcgcga

SEQ ID NO: 2792538 - RNA, 19 nt, Artificial Sequence
  Description of Artificial Sequence: Synthetic oligonucleotide
acagcugaaagggcaauac

SEQ ID NO: 2792539 - RNA, 19 nt, Artificial Sequence
  Description of Artificial Sequence: Synthetic oligonucleotide
cucgagaugaacauaaugu

SEQ ID NO: 2792540 - RNA, 19 nt, Artificial Sequence
  Description of Artificial Sequence: Synthetic oligonucleotide
uaugaaugagauucuuaaa

SEQ ID NO: 2792541 - RNA, 19 nt, Artificial Sequence
  Description of Artificial Sequence: Synthetic oligonucleotide
agacagagagauuggggag

SEQ ID NO: 2792542 - RNA, 19 nt, Artificial Sequence
  Description of Artificial Sequence: Synthetic oligonucleotide
uggagaucucucgagauga

SEQ ID NO: 2792543 - RNA, 19 nt, Artificial Sequence
  Description of Artificial Sequence: Synthetic oligonucleotide
ucuggaaguccuuuccaug

SEQ ID NO: 2792544 - RNA, 19 nt, Artificial Sequence
  Description of Artificial Sequence: Synthetic oligonucleotide
ucuaugagucauuuauaaa

SEQ ID NO: 2792545 - RNA, 19 nt, Artificial Sequence
  Description of Artificial Sequence: Synthetic oligonucleotide
ucauuaugaccuugcauuc

SEQ ID NO: 2792546 - RNA, 19 nt, Artificial Sequence
  Description of Artificial Sequence: Synthetic oligonucleotide
auucucauuggugaguucu

SEQ ID NO: 2792547 - RNA, 19 nt, Artificial Sequence
  Description of Artificial Sequence: Synthetic oligonucleotide
cuucgcagcagucucuggg

SEQ ID NO: 2792548 - RNA, 19 nt, Artificial Sequence
  Description of Artificial Sequence: Synthetic oligonucleotide
aaauaucuaugagucauuu

SEQ ID NO: 2792549 - RNA, 19 nt, Artificial Sequence
  Description of Artificial Sequence: Synthetic oligonucleotide
cuugcauucaaugauacua

SEQ ID NO: 2792550 - RNA, 19 nt, Artificial Sequence
  Description of Artificial Sequence: Synthetic oligonucleotide
aaguccuuuccauggagau

SEQ ID NO: 2792551 - RNA, 19 nt, Artificial Sequence
  Description of Artificial Sequence: Synthetic oligonucleotide
uccauggagaucucucgag

SEQ ID NO: 2792552 - RNA, 19 nt, Artificial Sequence
  Description of Artificial Sequence: Synthetic oligonucleotide
cacuuacuaaauaucuaug

SEQ ID NO: 2792553 - RNA, 19 nt, Artificial Sequence
  Description of Artificial Sequence: Synthetic oligonucleotide
cugaaagggcaauacuggc

SEQ ID NO: 2792554 - RNA, 19 nt, Artificial Sequence
  Description of Artificial Sequence: Synthetic oligonucleotide
cacacacuuacuaaauauc

SEQ ID NO: 2792555 - RNA, 19 nt, Artificial Sequence
  Description of Artificial Sequence: Synthetic oligonucleotide
acuaagugcucacacacuu

SEQ ID NO: 2792556 - RNA, 19 nt, Artificial Sequence
  Description of Artificial Sequence: Synthetic oligonucleotide
gagagagagagagagaaaa

SEQ ID NO: 2792557 - RNA, 19 nt, Artificial Sequence
  Description of Artificial Sequence: Synthetic oligonucleotide
agaugguuucaagaacagc

SEQ ID NO: 2792558 - RNA, 19 nt, Artificial Sequence
  Description of Artificial Sequence: Synthetic oligonucleotide
ucauuggugaguucuggaa

SEQ ID NO: 2792559 - RNA, 19 nt, Artificial Sequence
  Description of Artificial Sequence: Synthetic oligonucleotide
aaacaaacuaaaaguacuu

SEQ ID NO: 2792560 - RNA, 19 nt, Artificial Sequence
  Description of Artificial Sequence: Synthetic oligonucleotide
gagagagagagagagagaa

SEQ ID NO: 2792561 - RNA, 19 nt, Artificial Sequence
  Description of Artificial Sequence: Synthetic oligonucleotide
gugucucacagcugaaagg

SEQ ID NO: 2792562 - RNA, 19 nt, Artificial Sequence
  Description of Artificial Sequence: Synthetic oligonucleotide
agguaugagccaccacugc

SEQ ID NO: 2792563 - RNA, 19 nt, Artificial Sequence
  Description of Artificial Sequence: Synthetic oligonucleotide
agcugaaagggcaauacug

SEQ ID NO: 2792564 - RNA, 19 nt, Artificial Sequence
  Description of Artificial Sequence: Synthetic oligonucleotide
agugcucacacacuuacua

SEQ ID NO: 2792565 - RNA, 19 nt, Artificial Sequence
  Description of Artificial Sequence: Synthetic oligonucleotide
cuuuccauggagaucucuc

SEQ ID NO: 2792566 - RNA, 19 nt, Artificial Sequence
  Description of Artificial Sequence: Synthetic oligonucleotide
acacacuuacuaaauaucu

SEQ ID NO: 2792567 - RNA, 19 nt, Artificial Sequence
  Description of Artificial Sequence: Synthetic oligonucleotide
aaaggacauucuuaaccaa

SEQ ID NO: 2792568 - RNA, 19 nt, Artificial Sequence
  Description of Artificial Sequence: Synthetic oligonucleotide
auuucauuaugaccuugca

SEQ ID NO: 2792569 - RNA, 19 nt, Artificial Sequence
  Description of Artificial Sequence: Synthetic oligonucleotide
aauacuggccauucucauu

SEQ ID NO: 2792570 - RNA, 19 nt, Artificial Sequence
  Description of Artificial Sequence: Synthetic oligonucleotide
uaucuaugagucauuuaua

SEQ ID NO: 2792571 - RNA, 19 nt, Artificial Sequence
  Description of Artificial Sequence: Synthetic oligonucleotide
gcuuauauuucauuaugac

SEQ ID NO: 2792572 - RNA, 19 nt, Artificial Sequence
  Description of Artificial Sequence: Synthetic oligonucleotide
agagacagagagauugggg

SEQ ID NO: 2792573 - RNA, 19 nt, Artificial Sequence
  Description of Artificial Sequence: Synthetic oligonucleotide
ucucauuggugaguucugg

SEQ ID NO: 2792574 - RNA, 19 nt, Artificial Sequence
  Description of Artificial Sequence: Synthetic oligonucleotide
uuucaagaacagcagccau

SEQ ID NO: 2792575 - RNA, 19 nt, Artificial Sequence
  Description of Artificial Sequence: Synthetic oligonucleotide
gagagacagagagauuggg

SEQ ID NO: 2792576 - RNA, 19 nt, Artificial Sequence
  Description of Artificial Sequence: Synthetic oligonucleotide
ugcucacacacuuacuaaa

SEQ ID NO: 2792577 - RNA, 19 nt, Artificial Sequence
  Description of Artificial Sequence: Synthetic oligonucleotide
uacaacuuugcgcgaagaa

SEQ ID NO: 2792578 - RNA, 19 nt, Artificial Sequence
  Description of Artificial Sequence: Synthetic oligonucleotide
gucauuuauaaaucauaga

SEQ ID NO: 2792579 - RNA, 19 nt, Artificial Sequence
  Description of Artificial Sequence: Synthetic oligonucleotide
aagguaugagccaccacug

SEQ ID NO: 2792580 - RNA, 19 nt, Artificial Sequence
  Description of Artificial Sequence: Synthetic oligonucleotide
aaauacaacuuugcgcgaa

SEQ ID NO: 2792581 - RNA, 19 nt, Artificial Sequence
  Description of Artificial Sequence: Synthetic oligonucleotide
ugccugguuaugaaugaga

SEQ ID NO: 2792582 - RNA, 19 nt, Artificial Sequence
  Description of Artificial Sequence: Synthetic oligonucleotide
uacucugucuguagaccag

SEQ ID NO: 2792583 - RNA, 19 nt, Artificial Sequence
  Description of Artificial Sequence: Synthetic oligonucleotide
cacugccugguuaugaaug

SEQ ID NO: 2792584 - RNA, 19 nt, Artificial Sequence
  Description of Artificial Sequence: Synthetic oligonucleotide
gggagagagagagagagag

SEQ ID NO: 2792585 - RNA, 19 nt, Artificial Sequence
  Description of Artificial Sequence: Synthetic oligonucleotide
caacuuugcgcgaagaaaa

SEQ ID NO: 2792586 - RNA, 19 nt, Artificial Sequence
  Description of Artificial Sequence: Synthetic oligonucleotide
agaucucucgagaugaaca

SEQ ID NO: 2792587 - RNA, 19 nt, Artificial Sequence
  Description of Artificial Sequence: Synthetic oligonucleotide
uuccauggagaucucucga

SEQ ID NO: 2792588 - RNA, 19 nt, Artificial Sequence
  Description of Artificial Sequence: Synthetic oligonucleotide
gguuucaagaacagcagcc

SEQ ID NO: 2792589 - RNA, 19 nt, Artificial Sequence
  Description of Artificial Sequence: Synthetic oligonucleotide
uaaauaucuaugagucauu

SEQ ID NO: 2792590 - RNA, 19 nt, Artificial Sequence
  Description of Artificial Sequence: Synthetic oligonucleotide
uaugagccaccacugccug

SEQ ID NO: 2792591 - RNA, 19 nt, Artificial Sequence
  Description of Artificial Sequence: Synthetic oligonucleotide
uucaagaacagcagccauu

SEQ ID NO: 2792592 - RNA, 19 nt, Artificial Sequence
  Description of Artificial Sequence: Synthetic oligonucleotide
caugcuugugucucacagc

SEQ ID NO: 2792593 - RNA, 19 nt, Artificial Sequence
  Description of Artificial Sequence: Synthetic oligonucleotide
cuggaaaggacauucuuaa

SEQ ID NO: 2792594 - RNA, 19 nt, Artificial Sequence
  Description of Artificial Sequence: Synthetic oligonucleotide
uauauuucauuaugaccuu

SEQ ID NO: 2792595 - RNA, 19 nt, Artificial Sequence
  Description of Artificial Sequence: Synthetic oligonucleotide
uucucauuggugaguucug

SEQ ID NO: 2792596 - RNA, 19 nt, Artificial Sequence
  Description of Artificial Sequence: Synthetic oligonucleotide
gaacagcagccauugacca

SEQ ID NO: 2792597 - RNA, 19 nt, Artificial Sequence
  Description of Artificial Sequence: Synthetic oligonucleotide
acagcagccauugaccaug

SEQ ID NO: 2792598 - RNA, 19 nt, Artificial Sequence
  Description of Artificial Sequence: Synthetic oligonucleotide
uucgcagcagucucugggc

SEQ ID NO: 2792599 - RNA, 19 nt, Artificial Sequence
  Description of Artificial Sequence: Synthetic oligonucleotide
aguacuuguguagcccugg

SEQ ID NO: 2792600 - RNA, 19 nt, Artificial Sequence
  Description of Artificial Sequence: Synthetic oligonucleotide
ucugucuguagaccaggcu

SEQ ID NO: 2792601 - RNA, 19 nt, Artificial Sequence
  Description of Artificial Sequence: Synthetic oligonucleotide
gcugaaagggcaauacugg

SEQ ID NO: 2792602 - RNA, 19 nt, Artificial Sequence
  Description of Artificial Sequence: Synthetic oligonucleotide
auggagaucucucgagaug

SEQ ID NO: 2792603 - RNA, 19 nt, Artificial Sequence
  Description of Artificial Sequence: Synthetic oligonucleotide
uacuaagugcucacacacu

SEQ ID NO: 2792604 - RNA, 19 nt, Artificial Sequence
  Description of Artificial Sequence: Synthetic oligonucleotide
agcuuauauuucauuauga

SEQ ID NO: 2792605 - RNA, 19 nt, Artificial Sequence
  Description of Artificial Sequence: Synthetic oligonucleotide
ugguuaugaaugagauucu

SEQ ID NO: 2792606 - RNA, 19 nt, Artificial Sequence
  Description of Artificial Sequence: Synthetic oligonucleotide
uugaccaugcuugugucuc

SEQ ID NO: 2792607 - RNA, 19 nt, Artificial Sequence
  Description of Artificial Sequence: Synthetic oligonucleotide
gguaugagccaccacugcc

SEQ ID NO: 2792608 - RNA, 19 nt, Artificial Sequence
  Description of Artificial Sequence: Synthetic oligonucleotide
gaaugagauucuuaaaauu

SEQ ID NO: 2792609 - RNA, 19 nt, Artificial Sequence
  Description of Artificial Sequence: Synthetic oligonucleotide
cuggccauucucauuggug

SEQ ID NO: 2792610 - RNA, 19 nt, Artificial Sequence
  Description of Artificial Sequence: Synthetic oligonucleotide
cuaaauaucuaugagucau

SEQ ID NO: 2792611 - RNA, 19 nt, Artificial Sequence
  Description of Artificial Sequence: Synthetic oligonucleotide
accuugcauucaaugauac

SEQ ID NO: 2792612 - RNA, 19 nt, Artificial Sequence
  Description of Artificial Sequence: Synthetic oligonucleotide
acaacuuugcgcgaagaaa

SEQ ID NO: 2792613 - RNA, 19 nt, Artificial Sequence
  Description of Artificial Sequence: Synthetic oligonucleotide
gagucauuuauaaaucaua

SEQ ID NO: 2792614 - RNA, 19 nt, Artificial Sequence
  Description of Artificial Sequence: Synthetic oligonucleotide
auacagucuucgcagcagu

SEQ ID NO: 2792615 - RNA, 19 nt, Artificial Sequence
  Description of Artificial Sequence: Synthetic oligonucleotide
uucuggaaguccuuuccau

SEQ ID NO: 2792616 - RNA, 19 nt, Artificial Sequence
  Description of Artificial Sequence: Synthetic oligonucleotide
auauuucauuaugaccuug

SEQ ID NO: 2792617 - RNA, 19 nt, Artificial Sequence
  Description of Artificial Sequence: Synthetic oligonucleotide
uggcuguccuauuacucug

SEQ ID NO: 2792618 - RNA, 19 nt, Artificial Sequence
  Description of Artificial Sequence: Synthetic oligonucleotide
uggaaguccuuuccaugga

SEQ ID NO: 2792619 - RNA, 19 nt, Artificial Sequence
  Description of Artificial Sequence: Synthetic oligonucleotide
uacuuguguagcccuggcu

SEQ ID NO: 2792620 - RNA, 19 nt, Artificial Sequence
  Description of Artificial Sequence: Synthetic oligonucleotide
auugaccaugcuugugucu

SEQ ID NO: 2792621 - RNA, 19 nt, Artificial Sequence
  Description of Artificial Sequence: Synthetic oligonucleotide
agggcaauacuggccauuc

SEQ ID NO: 2792622 - RNA, 19 nt, Artificial Sequence
  Description of Artificial Sequence: Synthetic oligonucleotide
acauaaugucuggaaagga

SEQ ID NO: 2792623 - RNA, 19 nt, Artificial Sequence
  Description of Artificial Sequence: Synthetic oligonucleotide
guuucaagaacagcagcca

SEQ ID NO: 2792624 - RNA, 19 nt, Artificial Sequence
  Description of Artificial Sequence: Synthetic oligonucleotide
aacagcagccauugaccau

SEQ ID NO: 2792625 - RNA, 19 nt, Artificial Sequence
  Description of Artificial Sequence: Synthetic oligonucleotide
acucugucuguagaccagg

SEQ ID NO: 2792626 - RNA, 19 nt, Artificial Sequence
  Description of Artificial Sequence: Synthetic oligonucleotide
ugagccaccacugccuggu

SEQ ID NO: 2792627 - RNA, 19 nt, Artificial Sequence
  Description of Artificial Sequence: Synthetic oligonucleotide
cauugaccaugcuuguguc

SEQ ID NO: 2792628 - RNA, 19 nt, Artificial Sequence
  Description of Artificial Sequence: Synthetic oligonucleotide
cuauuacucugucuguaga

SEQ ID NO: 2792629 - RNA, 19 nt, Artificial Sequence
  Description of Artificial Sequence: Synthetic oligonucleotide
aguccuuuccauggagauc

SEQ ID NO: 2792630 - RNA, 19 nt, Artificial Sequence
  Description of Artificial Sequence: Synthetic oligonucleotide
gcuugugucucacagcuga

SEQ ID NO: 2792631 - RNA, 19 nt, Artificial Sequence
  Description of Artificial Sequence: Synthetic oligonucleotide
gacagagagauuggggaga

SEQ ID NO: 2792632 - RNA, 19 nt, Artificial Sequence
  Description of Artificial Sequence: Synthetic oligonucleotide
cgaagaaaauacccaauag

SEQ ID NO: 2792633 - RNA, 19 nt, Artificial Sequence
  Description of Artificial Sequence: Synthetic oligonucleotide
ucgcagcagucucugggcc

SEQ ID NO: 2792634 - RNA, 19 nt, Artificial Sequence
  Description of Artificial Sequence: Synthetic oligonucleotide
uggugaguucuggaagucc

SEQ ID NO: 2792635 - RNA, 19 nt, Artificial Sequence
  Description of Artificial Sequence: Synthetic oligonucleotide
cucugucuguagaccaggc

SEQ ID NO: 2792636 - RNA, 19 nt, Artificial Sequence
  Description of Artificial Sequence: Synthetic oligonucleotide
ggaaguccuuuccauggag

SEQ ID NO: 2792637 - RNA, 19 nt, Artificial Sequence
  Description of Artificial Sequence: Synthetic oligonucleotide
caaugauacuaagugcuca

SEQ ID NO: 2792638 - RNA, 19 nt, Artificial Sequence
  Description of Artificial Sequence: Synthetic oligonucleotide
gggcccaucaauuuggaaa

SEQ ID NO: 2792639 - RNA, 19 nt, Artificial Sequence
  Description of Artificial Sequence: Synthetic oligonucleotide
ucuucgcagcagucucugg

SEQ ID NO: 2792640 - RNA, 19 nt, Artificial Sequence
  Description of Artificial Sequence: Synthetic oligonucleotide
gaaguccuuuccauggaga

SEQ ID NO: 2792641 - RNA, 19 nt, Artificial Sequence
  Description of Artificial Sequence: Synthetic oligonucleotide
gagaguagagacagagaga

SEQ ID NO: 2792642 - RNA, 19 nt, Artificial Sequence
  Description of Artificial Sequence: Synthetic oligonucleotide
gaguucuggaaguccuuuc

SEQ ID NO: 2792643 - RNA, 19 nt, Artificial Sequence
  Description of Artificial Sequence: Synthetic oligonucleotide
gagauucuuaaaauuaguu

SEQ ID NO: 2792644 - RNA, 19 nt, Artificial Sequence
  Description of Artificial Sequence: Synthetic oligonucleotide
ccuauuacucugucuguag

SEQ ID NO: 2792645 - RNA, 19 nt, Artificial Sequence
  Description of Artificial Sequence: Synthetic oligonucleotide
uacagucuucgcagcaguc

SEQ ID NO: 2792646 - RNA, 19 nt, Artificial Sequence
  Description of Artificial Sequence: Synthetic oligonucleotide
aaguacuuguguagcccug

SEQ ID NO: 2792647 - RNA, 19 nt, Artificial Sequence
  Description of Artificial Sequence: Synthetic oligonucleotide
uccuauuacucugucugua

SEQ ID NO: 2792648 - RNA, 19 nt, Artificial Sequence
  Description of Artificial Sequence: Synthetic oligonucleotide
acagucuucgcagcagucu

SEQ ID NO: 2792649 - RNA, 19 nt, Artificial Sequence
  Description of Artificial Sequence: Synthetic oligonucleotide
uuaugaccuugcauucaau

SEQ ID NO: 2792650 - RNA, 19 nt, Artificial Sequence
  Description of Artificial Sequence: Synthetic oligonucleotide
guucuggaaguccuuucca

SEQ ID NO: 2792651 - RNA, 19 nt, Artificial Sequence
  Description of Artificial Sequence: Synthetic oligonucleotide
aaagggcaauacuggccau

SEQ ID NO: 2792652 - RNA, 19 nt, Artificial Sequence
  Description of Artificial Sequence: Synthetic oligonucleotide
aggacauucuuaaccaaaa

SEQ ID NO: 2792653 - RNA, 19 nt, Artificial Sequence
  Description of Artificial Sequence: Synthetic oligonucleotide
guuaugaaugagauucuua

SEQ ID NO: 2792654 - RNA, 19 nt, Artificial Sequence
  Description of Artificial Sequence: Synthetic oligonucleotide
gagaucucucgagaugaac

SEQ ID NO: 2792655 - RNA, 19 nt, Artificial Sequence
  Description of Artificial Sequence: Synthetic oligonucleotide
cagucuucgcagcagucuc

SEQ ID NO: 2792656 - RNA, 19 nt, Artificial Sequence
  Description of Artificial Sequence: Synthetic oligonucleotide
ccaugcuugugucucacag

SEQ ID NO: 2792657 - RNA, 19 nt, Artificial Sequence
  Description of Artificial Sequence: Synthetic oligonucleotide
uuggggagagagagagaga

SEQ ID NO: 2792658 - RNA, 19 nt, Artificial Sequence
  Description of Artificial Sequence: Synthetic oligonucleotide
aacuuugcgcgaagaaaau

SEQ ID NO: 2792659 - RNA, 19 nt, Artificial Sequence
  Description of Artificial Sequence: Synthetic oligonucleotide
aaugucuggaaaggacauu

SEQ ID NO: 2792660 - RNA, 19 nt, Artificial Sequence
  Description of Artificial Sequence: Synthetic oligonucleotide
gaucucucgagaugaacau

SEQ ID NO: 2792661 - RNA, 19 nt, Artificial Sequence
  Description of Artificial Sequence: Synthetic oligonucleotide
augauacuaagugcucaca

SEQ ID NO: 2792662 - RNA, 19 nt, Artificial Sequence
  Description of Artificial Sequence: Synthetic oligonucleotide
aguuaagcuuauauuucau

SEQ ID NO: 2792663 - RNA, 19 nt, Artificial Sequence
  Description of Artificial Sequence: Synthetic oligonucleotide
cacacuuacuaaauaucua

SEQ ID NO: 2792664 - RNA, 19 nt, Artificial Sequence
  Description of Artificial Sequence: Synthetic oligonucleotide
guacuuguguagcccuggc

SEQ ID NO: 2792665 - RNA, 19 nt, Artificial Sequence
  Description of Artificial Sequence: Synthetic oligonucleotide
cucauuggugaguucugga

SEQ ID NO: 2792666 - RNA, 19 nt, Artificial Sequence
  Description of Artificial Sequence: Synthetic oligonucleotide
ugcuugugucucacagcug

SEQ ID NO: 2792667 - RNA, 19 nt, Artificial Sequence
  Description of Artificial Sequence: Synthetic oligonucleotide
ugaguucuggaaguccuuu

SEQ ID NO: 2792668 - RNA, 19 nt, Artificial Sequence
  Description of Artificial Sequence: Synthetic oligonucleotide
augagccaccacugccugg

SEQ ID NO: 2792669 - RNA, 19 nt, Artificial Sequence
  Description of Artificial Sequence: Synthetic oligonucleotide
guuaagcuuauauuucauu

SEQ ID NO: 2792670 - RNA, 19 nt, Artificial Sequence
  Description of Artificial Sequence: Synthetic oligonucleotide
gagagaguagagacagaga

SEQ ID NO: 2792671 - RNA, 19 nt, Artificial Sequence
  Description of Artificial Sequence: Synthetic oligonucleotide
uugugucucacagcugaaa

SEQ ID NO: 2792672 - RNA, 19 nt, Artificial Sequence
  Description of Artificial Sequence: Synthetic oligonucleotide
ggcccaucaauuuggaaaa

SEQ ID NO: 2792673 - RNA, 19 nt, Artificial Sequence
  Description of Artificial Sequence: Synthetic oligonucleotide
auacaacuuugcgcgaaga

SEQ ID NO: 2792674 - RNA, 19 nt, Artificial Sequence
  Description of Artificial Sequence: Synthetic oligonucleotide
agccauugaccaugcuugu

SEQ ID NO: 2792675 - RNA, 19 nt, Artificial Sequence
  Description of Artificial Sequence: Synthetic oligonucleotide
gcgaagaaaauacccaaua

SEQ ID NO: 2792676 - RNA, 19 nt, Artificial Sequence
  Description of Artificial Sequence: Synthetic oligonucleotide
cauuaugaccuugcauuca

SEQ ID NO: 2792677 - RNA, 19 nt, Artificial Sequence
  Description of Artificial Sequence: Synthetic oligonucleotide
gagagauuggggagagaga

SEQ ID NO: 2792678 - RNA, 19 nt, Artificial Sequence
  Description of Artificial Sequence: Synthetic oligonucleotide
aagugcucacacacuuacu

SEQ ID NO: 2792679 - RNA, 19 nt, Artificial Sequence
  Description of Artificial Sequence: Synthetic oligonucleotide
uuggugaguucuggaaguc

SEQ ID NO: 2792680 - RNA, 19 nt, Artificial Sequence
  Description of Artificial Sequence: Synthetic oligonucleotide
gugcucacacacuuacuaa

SEQ ID NO: 2792681 - RNA, 19 nt, Artificial Sequence
  Description of Artificial Sequence: Synthetic oligonucleotide
ggccauucucauuggugag

SEQ ID NO: 2792682 - RNA, 19 nt, Artificial Sequence
  Description of Artificial Sequence: Synthetic oligonucleotide
cucacacacuuacuaaaua

SEQ ID NO: 2792683 - RNA, 19 nt, Artificial Sequence
  Description of Artificial Sequence: Synthetic oligonucleotide
gaccuugcauucaaugaua

SEQ ID NO: 2792684 - RNA, 19 nt, Artificial Sequence
  Description of Artificial Sequence: Synthetic oligonucleotide
cuggcuguccuauuacucu

SEQ ID NO: 2792685 - RNA, 19 nt, Artificial Sequence
  Description of Artificial Sequence: Synthetic oligonucleotide
acuuugcgcgaagaaaaua

SEQ ID NO: 2792686 - RNA, 19 nt, Artificial Sequence
  Description of Artificial Sequence: Synthetic oligonucleotide
cucacagcugaaagggcaa

SEQ ID NO: 2792687 - RNA, 19 nt, Artificial Sequence
  Description of Artificial Sequence: Synthetic oligonucleotide
agagagagagagagagaga

SEQ ID NO: 2792688 - RNA, 19 nt, Artificial Sequence
  Description of Artificial Sequence: Synthetic oligonucleotide
gucuucgcagcagucucug

SEQ ID NO: 2792689 - RNA, 19 nt, Artificial Sequence
  Description of Artificial Sequence: Synthetic oligonucleotide
cauucucauuggugaguuc

SEQ ID NO: 2792690 - RNA, 19 nt, Artificial Sequence
  Description of Artificial Sequence: Synthetic oligonucleotide
cugccugguuaugaaugag

SEQ ID NO: 2792691 - RNA, 19 nt, Artificial Sequence
  Description of Artificial Sequence: Synthetic oligonucleotide
cuaagugcucacacacuua

SEQ ID NO: 2792692 - RNA, 19 nt, Artificial Sequence
  Description of Artificial Sequence: Synthetic oligonucleotide
guagagacagagagacaga

SEQ ID NO: 2792693 - RNA, 19 nt, Artificial Sequence
  Description of Artificial Sequence: Synthetic oligonucleotide
gaccaugcuugugucucac

SEQ ID NO: 2792694 - RNA, 19 nt, Artificial Sequence
  Description of Artificial Sequence: Synthetic oligonucleotide
gagauuggggagagagaga

SEQ ID NO: 2792695 - RNA, 19 nt, Artificial Sequence
  Description of Artificial Sequence: Synthetic oligonucleotide
guaugagccaccacugccu

SEQ ID NO: 2792696 - RNA, 19 nt, Artificial Sequence
  Description of Artificial Sequence: Synthetic oligonucleotide
cauggagaucucucgagau

SEQ ID NO: 2792697 - RNA, 19 nt, Artificial Sequence
  Description of Artificial Sequence: Synthetic oligonucleotide
accaugcuugugucucaca

SEQ ID NO: 2792698 - RNA, 19 nt, Artificial Sequence
  Description of Artificial Sequence: Synthetic oligonucleotide
cagcagccauugaccaugc

SEQ ID NO: 2792699 - RNA, 19 nt, Artificial Sequence
  Description of Artificial Sequence: Synthetic oligonucleotide
cuuguguagcccuggcugu

SEQ ID NO: 2792700 - RNA, 19 nt, Artificial Sequence
  Description of Artificial Sequence: Synthetic oligonucleotide
ugggcccaucaauuuggaa

SEQ ID NO: 2792701 - RNA, 19 nt, Artificial Sequence
  Description of Artificial Sequence: Synthetic oligonucleotide
ucacagcugaaagggcaau

SEQ ID NO: 2792702 - RNA, 19 nt, Artificial Sequence
  Description of Artificial Sequence: Synthetic oligonucleotide
agcccuggcuguccuauua

SEQ ID NO: 2792703 - RNA, 19 nt, Artificial Sequence
  Description of Artificial Sequence: Synthetic oligonucleotide
agagagagagagagagaaa

SEQ ID NO: 2792704 - RNA, 19 nt, Artificial Sequence
  Description of Artificial Sequence: Synthetic oligonucleotide
gaguagagacagagagaca

SEQ ID NO: 2792705 - RNA, 19 nt, Artificial Sequence
  Description of Artificial Sequence: Synthetic oligonucleotide
gcgcgaagaaaauacccaa

SEQ ID NO: 2792706 - RNA, 19 nt, Artificial Sequence
  Description of Artificial Sequence: Synthetic oligonucleotide
gauuggggagagagagaga

SEQ ID NO: 2792707 - RNA, 19 nt, Artificial Sequence
  Description of Artificial Sequence: Synthetic oligonucleotide
agucuucgcagcagucucu

SEQ ID NO: 2792708 - RNA, 19 nt, Artificial Sequence
  Description of Artificial Sequence: Synthetic oligonucleotide
aucucucgagaugaacaua

SEQ ID NO: 2792709 - RNA, 19 nt, Artificial Sequence
  Description of Artificial Sequence: Synthetic oligonucleotide
cuugugucucacagcugaa

SEQ ID NO: 2792710 - RNA, 19 nt, Artificial Sequence
  Description of Artificial Sequence: Synthetic oligonucleotide
guccuauuacucugucugu

SEQ ID NO: 2792711 - RNA, 19 nt, Artificial Sequence
  Description of Artificial Sequence: Synthetic oligonucleotide
caauacuggccauucucau

SEQ ID NO: 2792712 - RNA, 19 nt, Artificial Sequence
  Description of Artificial Sequence: Synthetic oligonucleotide
gcauucaaugauacuaagu

SEQ ID NO: 2792713 - RNA, 19 nt, Artificial Sequence
  Description of Artificial Sequence: Synthetic oligonucleotide
uccuuuccauggagaucuc

SEQ ID NO: 2792714 - RNA, 19 nt, Artificial Sequence
  Description of Artificial Sequence: Synthetic oligonucleotide
cgagaugaacauaaugucu

SEQ ID NO: 2792715 - RNA, 19 nt, Artificial Sequence
  Description of Artificial Sequence: Synthetic oligonucleotide
cuguccuauuacucugucu

SEQ ID NO: 2792716 - RNA, 19 nt, Artificial Sequence
  Description of Artificial Sequence: Synthetic oligonucleotide
gcuguccuauuacucuguc

SEQ ID NO: 2792717 - RNA, 19 nt, Artificial Sequence
  Description of Artificial Sequence: Synthetic oligonucleotide
caagaacagcagccauuga

SEQ ID NO: 2792718 - RNA, 19 nt, Artificial Sequence
  Description of Artificial Sequence: Synthetic oligonucleotide
ccauugaccaugcuugugu

SEQ ID NO: 2792719 - RNA, 19 nt, Artificial Sequence
  Description of Artificial Sequence: Synthetic oligonucleotide
gcagccauugaccaugcuu

SEQ ID NO: 2792720 - RNA, 19 nt, Artificial Sequence
  Description of Artificial Sequence: Synthetic oligonucleotide
gaucugccugccuuugcuu

SEQ ID NO: 2792721 - RNA, 19 nt, Artificial Sequence
  Description of Artificial Sequence: Synthetic oligonucleotide
agcagccauugaccaugcu

SEQ ID NO: 2792722 - RNA, 19 nt, Artificial Sequence
  Description of Artificial Sequence: Synthetic oligonucleotide
ccauggagaucucucgaga

SEQ ID NO: 2792723 - RNA, 19 nt, Artificial Sequence
  Description of Artificial Sequence: Synthetic oligonucleotide
cugggcccaucaauuugga

SEQ ID NO: 2792724 - RNA, 19 nt, Artificial Sequence
  Description of Artificial Sequence: Synthetic oligonucleotide
cagcugaaagggcaauacu

SEQ ID NO: 2792725 - RNA, 19 nt, Artificial Sequence
  Description of Artificial Sequence: Synthetic oligonucleotide
ggagagagagagagagaga

SEQ ID NO: 2792726 - RNA, 19 nt, Artificial Sequence
  Description of Artificial Sequence: Synthetic oligonucleotide
gccauugaccaugcuugug

SEQ ID NO: 2792727 - RNA, 19 nt, Artificial Sequence
  Description of Artificial Sequence: Synthetic oligonucleotide
cacagcugaaagggcaaua

SEQ ID NO: 2792728 - RNA, 19 nt, Artificial Sequence
  Description of Artificial Sequence: Synthetic oligonucleotide
gcccuggcuguccuauuac

SEQ ID NO: 2792729 - RNA, 19 nt, Artificial Sequence
  Description of Artificial Sequence: Synthetic oligonucleotide
gguuaugaaugagauucuu

SEQ ID NO: 2792730 - RNA, 19 nt, Artificial Sequence
  Description of Artificial Sequence: Synthetic oligonucleotide
gccugguuaugaaugagau

SEQ ID NO: 2792731 - RNA, 19 nt, Artificial Sequence
  Description of Artificial Sequence: Synthetic oligonucleotide
cgcagcagucucugggccc

SEQ ID NO: 2792732 - RNA, 19 nt, Artificial Sequence
  Description of Artificial Sequence: Synthetic oligonucleotide
gcuuccugagugcugggau

SEQ ID NO: 2792733 - RNA, 19 nt, Artificial Sequence
  Description of Artificial Sequence: Synthetic oligonucleotide
cagucucugggcccaucaa

SEQ ID NO: 2792734 - RNA, 19 nt, Artificial Sequence
  Description of Artificial Sequence: Synthetic oligonucleotide
uagcccuggcuguccuauu

SEQ ID NO: 2792735 - RNA, 19 nt, Artificial Sequence
  Description of Artificial Sequence: Synthetic oligonucleotide
cucucgagaugaacauaau

SEQ ID NO: 2792736 - RNA, 19 nt, Artificial Sequence
  Description of Artificial Sequence: Synthetic oligonucleotide
gcucacacacuuacuaaau

SEQ ID NO: 2792737 - RNA, 19 nt, Artificial Sequence
  Description of Artificial Sequence: Synthetic oligonucleotide
ggggagagagagagagaga

SEQ ID NO: 2792738 - RNA, 19 nt, Artificial Sequence
  Description of Artificial Sequence: Synthetic oligonucleotide
gccauucucauuggugagu

SEQ ID NO: 2792739 - RNA, 19 nt, Artificial Sequence
  Description of Artificial Sequence: Synthetic oligonucleotide
ggagaucucucgagaugaa

SEQ ID NO: 2792740 - RNA, 19 nt, Artificial Sequence
  Description of Artificial Sequence: Synthetic oligonucleotide
ccuugcauucaaugauacu

SEQ ID NO: 2792741 - RNA, 19 nt, Artificial Sequence
  Description of Artificial Sequence: Synthetic oligonucleotide
cagagagauuggggagaga

SEQ ID NO: 2792742 - RNA, 19 nt, Artificial Sequence
  Description of Artificial Sequence: Synthetic oligonucleotide
gugaguucuggaaguccuu

SEQ ID NO: 2792743 - RNA, 19 nt, Artificial Sequence
  Description of Artificial Sequence: Synthetic oligonucleotide
ggcuguccuauuacucugu

SEQ ID NO: 2792744 - RNA, 19 nt, Artificial Sequence
  Description of Artificial Sequence: Synthetic oligonucleotide
gggcaauacuggccauucu

SEQ ID NO: 2792745 - RNA, 19 nt, Artificial Sequence
  Description of Artificial Sequence: Synthetic oligonucleotide
ccugguuaugaaugagauu

SEQ ID NO: 2792746 - RNA, 19 nt, Artificial Sequence
  Description of Artificial Sequence: Synthetic oligonucleotide
ccauucucauuggugaguu

SEQ ID NO: 2792747 - RNA, 19 nt, Artificial Sequence
  Description of Artificial Sequence: Synthetic oligonucleotide
cgcgaagaaaauacccaau

SEQ ID NO: 2792748 - RNA, 19 nt, Artificial Sequence
  Description of Artificial Sequence: Synthetic oligonucleotide
gagccaccacugccugguu

SEQ ID NO: 2792749 - RNA, 19 nt, Artificial Sequence
  Description of Artificial Sequence: Synthetic oligonucleotide
aauaaagggaggcaggggc

SEQ ID NO: 2792750 - RNA, 19 nt, Artificial Sequence
  Description of Artificial Sequence: Synthetic oligonucleotide
ugaaauuuagcaaauaaaa

SEQ ID NO: 2792751 - RNA, 19 nt, Artificial Sequence
  Description of Artificial Sequence: Synthetic oligonucleotide
uccaacaaaaccuuaaagc

SEQ ID NO: 2792752 - RNA, 19 nt, Artificial Sequence
  Description of Artificial Sequence: Synthetic oligonucleotide
aaauuagucuuuccuauuc

SEQ ID NO: 2792753 - RNA, 19 nt, Artificial Sequence
  Description of Artificial Sequence: Synthetic oligonucleotide
aauuagucuuuccuauucc

SEQ ID NO: 2792754 - RNA, 19 nt, Artificial Sequence
  Description of Artificial Sequence: Synthetic oligonucleotide
aauacagggaacuggacug

SEQ ID NO: 2792755 - RNA, 19 nt, Artificial Sequence
  Description of Artificial Sequence: Synthetic oligonucleotide
guuuguacagaucacagag

SEQ ID NO: 2792756 - RNA, 19 nt, Artificial Sequence
  Description of Artificial Sequence: Synthetic oligonucleotide
ucuuccaacaauaaaggga

SEQ ID NO: 2792757 - RNA, 19 nt, Artificial Sequence
  Description of Artificial Sequence: Synthetic oligonucleotide
aacaacuagguuuucaagu

SEQ ID NO: 2792758 - RNA, 19 nt, Artificial Sequence
  Description of Artificial Sequence: Synthetic oligonucleotide
ugagaugccagccuuagcc

SEQ ID NO: 2792759 - RNA, 19 nt, Artificial Sequence
  Description of Artificial Sequence: Synthetic oligonucleotide
cuuccaacaauaaagggag

SEQ ID NO: 2792760 - RNA, 19 nt, Artificial Sequence
  Description of Artificial Sequence: Synthetic oligonucleotide
uuugguuuuacugaggccc

SEQ ID NO: 2792761 - RNA, 19 nt, Artificial Sequence
  Description of Artificial Sequence: Synthetic oligonucleotide
uuaaagccaagccagcagg

SEQ ID NO: 2792762 - RNA, 19 nt, Artificial Sequence
  Description of Artificial Sequence: Synthetic oligonucleotide
aaagggcagcauuagauag

SEQ ID NO: 2792763 - RNA, 19 nt, Artificial Sequence
  Description of Artificial Sequence: Synthetic oligonucleotide
aaaccuuaaagccaagcca

SEQ ID NO: 2792764 - RNA, 19 nt, Artificial Sequence
  Description of Artificial Sequence: Synthetic oligonucleotide
auuagucuuuccuauuccc

SEQ ID NO: 2792765 - RNA, 19 nt, Artificial Sequence
  Description of Artificial Sequence: Synthetic oligonucleotide
uauauuaauacagggaacu

SEQ ID NO: 2792766 - RNA, 19 nt, Artificial Sequence
  Description of Artificial Sequence: Synthetic oligonucleotide
cucagcaucauucaucugg

SEQ ID NO: 2792767 - RNA, 19 nt, Artificial Sequence
  Description of Artificial Sequence: Synthetic oligonucleotide
uucaucuggcuucauaggg

SEQ ID NO: 2792768 - RNA, 19 nt, Artificial Sequence
  Description of Artificial Sequence: Synthetic oligonucleotide
uauuaauacagggaacugg

SEQ ID NO: 2792769 - RNA, 19 nt, Artificial Sequence
  Description of Artificial Sequence: Synthetic oligonucleotide
guuauauuaauacagggaa

SEQ ID NO: 2792770 - RNA, 19 nt, Artificial Sequence
  Description of Artificial Sequence: Synthetic oligonucleotide
aagauucuguccucugugc

SEQ ID NO: 2792771 - RNA, 19 nt, Artificial Sequence
  Description of Artificial Sequence: Synthetic oligonucleotide
ugagcaggcaccaucacag

SEQ ID NO: 2792772 - RNA, 19 nt, Artificial Sequence
  Description of Artificial Sequence: Synthetic oligonucleotide
agaucacagagccaggggc

SEQ ID NO: 2792773 - RNA, 19 nt, Artificial Sequence
  Description of Artificial Sequence: Synthetic oligonucleotide
uuuccuauuccccugcucc

SEQ ID NO: 2792774 - RNA, 19 nt, Artificial Sequence
  Description of Artificial Sequence: Synthetic oligonucleotide
uugaaauuuagcaaauaaa

SEQ ID NO: 2792775 - RNA, 19 nt, Artificial Sequence
  Description of Artificial Sequence: Synthetic oligonucleotide
aucaucacacgagagagcc

SEQ ID NO: 2792776 - RNA, 19 nt, Artificial Sequence
  Description of Artificial Sequence: Synthetic oligonucleotide
agguuauauuaauacaggg

SEQ ID NO: 2792777 - RNA, 19 nt, Artificial Sequence
  Description of Artificial Sequence: Synthetic oligonucleotide
aaaacaacuagguuuucaa

SEQ ID NO: 2792778 - RNA, 19 nt, Artificial Sequence
  Description of Artificial Sequence: Synthetic oligonucleotide
auugaaauuuagcaaauaa

SEQ ID NO: 2792779 - RNA, 19 nt, Artificial Sequence
  Description of Artificial Sequence: Synthetic oligonucleotide
uucauagggagaagcaggg

SEQ ID NO: 2792780 - RNA, 19 nt, Artificial Sequence
  Description of Artificial Sequence: Synthetic oligonucleotide
ugaaucaucacacgagaga

SEQ ID NO: 2792781 - RNA, 19 nt, Artificial Sequence
  Description of Artificial Sequence: Synthetic oligonucleotide
gaaucaucacacgagagag

SEQ ID NO: 2792782 - RNA, 19 nt, Artificial Sequence
  Description of Artificial Sequence: Synthetic oligonucleotide
agggauuucuccucugucc

SEQ ID NO: 2792783 - RNA, 19 nt, Artificial Sequence
  Description of Artificial Sequence: Synthetic oligonucleotide
uagaguguggcuauccucc

SEQ ID NO: 2792784 - RNA, 19 nt, Artificial Sequence
  Description of Artificial Sequence: Synthetic oligonucleotide
cuucauagggagaagcagg

SEQ ID NO: 2792785 - RNA, 19 nt, Artificial Sequence
  Description of Artificial Sequence: Synthetic oligonucleotide
acagguuauauuaauacag

SEQ ID NO: 2792786 - RNA, 19 nt, Artificial Sequence
  Description of Artificial Sequence: Synthetic oligonucleotide
uaauacagggaacuggacu

SEQ ID NO: 2792787 - RNA, 19 nt, Artificial Sequence
  Description of Artificial Sequence: Synthetic oligonucleotide
uuggcagccaaucucagca

SEQ ID NO: 2792788 - RNA, 19 nt, Artificial Sequence
  Description of Artificial Sequence: Synthetic oligonucleotide
aaccuuaaagccaagccag

SEQ ID NO: 2792789 - RNA, 19 nt, Artificial Sequence
  Description of Artificial Sequence: Synthetic oligonucleotide
uuauauuaauacagggaac

SEQ ID NO: 2792790 - RNA, 19 nt, Artificial Sequence
  Description of Artificial Sequence: Synthetic oligonucleotide
uuacaggaaggugagaugc

SEQ ID NO: 2792791 - RNA, 19 nt, Artificial Sequence
  Description of Artificial Sequence: Synthetic oligonucleotide
uuuacugaggcccagucuu

SEQ ID NO: 2792792 - RNA, 19 nt, Artificial Sequence
  Description of Artificial Sequence: Synthetic oligonucleotide
aaucucagcaucauucauc

SEQ ID NO: 2792793 - RNA, 19 nt, Artificial Sequence
  Description of Artificial Sequence: Synthetic oligonucleotide
cagguuauauuaauacagg

SEQ ID NO: 2792794 - RNA, 19 nt, Artificial Sequence
  Description of Artificial Sequence: Synthetic oligonucleotide
uuagucuuuccuauucccc

SEQ ID NO: 2792795 - RNA, 19 nt, Artificial Sequence
  Description of Artificial Sequence: Synthetic oligonucleotide
aacaauaaagggaggcagg

SEQ ID NO: 2792796 - RNA, 19 nt, Artificial Sequence
  Description of Artificial Sequence: Synthetic oligonucleotide
agugccugaaucaucacac

SEQ ID NO: 2792797 - RNA, 19 nt, Artificial Sequence
  Description of Artificial Sequence: Synthetic oligonucleotide
guacagaucacagagccag

SEQ ID NO: 2792798 - RNA, 19 nt, Artificial Sequence
  Description of Artificial Sequence: Synthetic oligonucleotide
aacuagguuuucaaguuag

SEQ ID NO: 2792799 - RNA, 19 nt, Artificial Sequence
  Description of Artificial Sequence: Synthetic oligonucleotide
agguuuucaaguuaguuuu

SEQ ID NO: 2792800 - RNA, 19 nt, Artificial Sequence
  Description of Artificial Sequence: Synthetic oligonucleotide
uuuguacagaucacagagc

SEQ ID NO: 2792801 - RNA, 19 nt, Artificial Sequence
  Description of Artificial Sequence: Synthetic oligonucleotide
uccucugugccacagguga

SEQ ID NO: 2792802 - RNA, 19 nt, Artificial Sequence
  Description of Artificial Sequence: Synthetic oligonucleotide
gagagagccagccugacuc

SEQ ID NO: 2792803 - RNA, 19 nt, Artificial Sequence
  Description of Artificial Sequence: Synthetic oligonucleotide
aacaaaaccuuaaagccaa

SEQ ID NO: 2792804 - RNA, 19 nt, Artificial Sequence
  Description of Artificial Sequence: Synthetic oligonucleotide
uccaacaauaaagggaggc

SEQ ID NO: 2792805 - RNA, 19 nt, Artificial Sequence
  Description of Artificial Sequence: Synthetic oligonucleotide
ucagcaucauucaucuggc

SEQ ID NO: 2792806 - RNA, 19 nt, Artificial Sequence
  Description of Artificial Sequence: Synthetic oligonucleotide
cauuagauagguguguuug

SEQ ID NO: 2792807 - RNA, 19 nt, Artificial Sequence
  Description of Artificial Sequence: Synthetic oligonucleotide
aggggcagaggacugaagg

SEQ ID NO: 2792808 - RNA, 19 nt, Artificial Sequence
  Description of Artificial Sequence: Synthetic oligonucleotide
aggaaggugagaugccagc

SEQ ID NO: 2792809 - RNA, 19 nt, Artificial Sequence
  Description of Artificial Sequence: Synthetic oligonucleotide
uuauugaaauuuagcaaau

SEQ ID NO: 2792810 - RNA, 19 nt, Artificial Sequence
  Description of Artificial Sequence: Synthetic oligonucleotide
uagguuuucaaguuaguuu

SEQ ID NO: 2792811 - RNA, 19 nt, Artificial Sequence
  Description of Artificial Sequence: Synthetic oligonucleotide
acaauaaagggaggcaggg

SEQ ID NO: 2792812 - RNA, 19 nt, Artificial Sequence
  Description of Artificial Sequence: Synthetic oligonucleotide
aucucagcaucauucaucu

SEQ ID NO: 2792813 - RNA, 19 nt, Artificial Sequence
  Description of Artificial Sequence: Synthetic oligonucleotide
ggacugaaggucuagagug

SEQ ID NO: 2792814 - RNA, 19 nt, Artificial Sequence
  Description of Artificial Sequence: Synthetic oligonucleotide
agacuuugguuuuacugag

SEQ ID NO: 2792815 - RNA, 19 nt, Artificial Sequence
  Description of Artificial Sequence: Synthetic oligonucleotide
aggcacagcacccaugcgg

SEQ ID NO: 2792816 - RNA, 19 nt, Artificial Sequence
  Description of Artificial Sequence: Synthetic oligonucleotide
agcaggacagguuauauua

SEQ ID NO: 2792817 - RNA, 19 nt, Artificial Sequence
  Description of Artificial Sequence: Synthetic oligonucleotide
auucaucuggcuucauagg

SEQ ID NO: 2792818 - RNA, 19 nt, Artificial Sequence
  Description of Artificial Sequence: Synthetic oligonucleotide
aaucaucacacgagagagc

SEQ ID NO: 2792819 - RNA, 19 nt, Artificial Sequence
  Description of Artificial Sequence: Synthetic oligonucleotide
uguguuuguacagaucaca

SEQ ID NO: 2792820 - RNA, 19 nt, Artificial Sequence
  Description of Artificial Sequence: Synthetic oligonucleotide
agcaggcaccaucacaggc

SEQ ID NO: 2792821 - RNA, 19 nt, Artificial Sequence
  Description of Artificial Sequence: Synthetic oligonucleotide
agauagguguguuuguaca

SEQ ID NO: 2792822 - RNA, 19 nt, Artificial Sequence
  Description of Artificial Sequence: Synthetic oligonucleotide
gacagguuauauuaauaca

SEQ ID NO: 2792823 - RNA, 19 nt, Artificial Sequence
  Description of Artificial Sequence: Synthetic oligonucleotide
aaaauuagucuuuccuauu

SEQ ID NO: 2792824 - RNA, 19 nt, Artificial Sequence
  Description of Artificial Sequence: Synthetic oligonucleotide
gguguguuuguacagauca

SEQ ID NO: 2792825 - RNA, 19 nt, Artificial Sequence
  Description of Artificial Sequence: Synthetic oligonucleotide
uguuuguacagaucacaga

SEQ ID NO: 2792826 - RNA, 19 nt, Artificial Sequence
  Description of Artificial Sequence: Synthetic oligonucleotide
cugacuggcagucuccucc

SEQ ID NO: 2792827 - RNA, 19 nt, Artificial Sequence
  Description of Artificial Sequence: Synthetic oligonucleotide
ucaucuggcuucauaggga

SEQ ID NO: 2792828 - RNA, 19 nt, Artificial Sequence
  Description of Artificial Sequence: Synthetic oligonucleotide
aaagccaagccagcaggac

SEQ ID NO: 2792829 - RNA, 19 nt, Artificial Sequence
  Description of Artificial Sequence: Synthetic oligonucleotide
ugcggcucagggaagaaga

SEQ ID NO: 2792830 - RNA, 19 nt, Artificial Sequence
  Description of Artificial Sequence: Synthetic oligonucleotide
uuuuacugaggcccagucu

SEQ ID NO: 2792831 - RNA, 19 nt, Artificial Sequence
  Description of Artificial Sequence: Synthetic oligonucleotide
ugaaggucuagaguguggc

SEQ ID NO: 2792832 - RNA, 19 nt, Artificial Sequence
  Description of Artificial Sequence: Synthetic oligonucleotide
caacaauaaagggaggcag

SEQ ID NO: 2792833 - RNA, 19 nt, Artificial Sequence
  Description of Artificial Sequence: Synthetic oligonucleotide
aaugagugccugaaucauc

SEQ ID NO: 2792834 - RNA, 19 nt, Artificial Sequence
  Description of Artificial Sequence: Synthetic oligonucleotide
cuccaacaaaaccuuaaag

SEQ ID NO: 2792835 - RNA, 19 nt, Artificial Sequence
  Description of Artificial Sequence: Synthetic oligonucleotide
ggacagguuauauuaauac

SEQ ID NO: 2792836 - RNA, 19 nt, Artificial Sequence
  Description of Artificial Sequence: Synthetic oligonucleotide
acaacuagguuuucaaguu

SEQ ID NO: 2792837 - RNA, 19 nt, Artificial Sequence
  Description of Artificial Sequence: Synthetic oligonucleotide
uagucuuuccuauuccccu

SEQ ID NO: 2792838 - RNA, 19 nt, Artificial Sequence
  Description of Artificial Sequence: Synthetic oligonucleotide
ugccugaaucaucacacga

SEQ ID NO: 2792839 - RNA, 19 nt, Artificial Sequence
  Description of Artificial Sequence: Synthetic oligonucleotide
cagacuuugguuuuacuga

SEQ ID NO: 2792840 - RNA, 19 nt, Artificial Sequence
  Description of Artificial Sequence: Synthetic oligonucleotide
uccuuggcagccaaucuca

SEQ ID NO: 2792841 - RNA, 19 nt, Artificial Sequence
  Description of Artificial Sequence: Synthetic oligonucleotide
agccuuagccaaugagugc

SEQ ID NO: 2792842 - RNA, 19 nt, Artificial Sequence
  Description of Artificial Sequence: Synthetic oligonucleotide
aagccaagccagcaggaca

SEQ ID NO: 2792843 - RNA, 19 nt, Artificial Sequence
  Description of Artificial Sequence: Synthetic oligonucleotide
acucugagcaggcaccauc

SEQ ID NO: 2792844 - RNA, 19 nt, Artificial Sequence
  Description of Artificial Sequence: Synthetic oligonucleotide
acacgagagagccagccug

SEQ ID NO: 2792845 - RNA, 19 nt, Artificial Sequence
  Description of Artificial Sequence: Synthetic oligonucleotide
uuaauacagggaacuggac

SEQ ID NO: 2792846 - RNA, 19 nt, Artificial Sequence
  Description of Artificial Sequence: Synthetic oligonucleotide
uguccucugugccacaggu

SEQ ID NO: 2792847 - RNA, 19 nt, Artificial Sequence
  Description of Artificial Sequence: Synthetic oligonucleotide
cagccuuagccaaugagug

SEQ ID NO: 2792848 - RNA, 19 nt, Artificial Sequence
  Description of Artificial Sequence: Synthetic oligonucleotide
auuagauagguguguuugu

SEQ ID NO: 2792849 - RNA, 19 nt, Artificial Sequence
  Description of Artificial Sequence: Synthetic oligonucleotide
caucacacgagagagccag

SEQ ID NO: 2792850 - RNA, 19 nt, Artificial Sequence
  Description of Artificial Sequence: Synthetic oligonucleotide
caagauucuguccucugug

SEQ ID NO: 2792851 - RNA, 19 nt, Artificial Sequence
  Description of Artificial Sequence: Synthetic oligonucleotide
gaccuuuacaggaagguga

SEQ ID NO: 2792852 - RNA, 19 nt, Artificial Sequence
  Description of Artificial Sequence: Synthetic oligonucleotide
cugaaucaucacacgagag

SEQ ID NO: 2792853 - RNA, 19 nt, Artificial Sequence
  Description of Artificial Sequence: Synthetic oligonucleotide
ucuagaguguggcuauccu

SEQ ID NO: 2792854 - RNA, 19 nt, Artificial Sequence
  Description of Artificial Sequence: Synthetic oligonucleotide
caucuggcuucauagggag

SEQ ID NO: 2792855 - RNA, 19 nt, Artificial Sequence
  Description of Artificial Sequence: Synthetic oligonucleotide
uagauagguguguuuguac

SEQ ID NO: 2792856 - RNA, 19 nt, Artificial Sequence
  Description of Artificial Sequence: Synthetic oligonucleotide
uaaagccaagccagcagga

SEQ ID NO: 2792857 - RNA, 19 nt, Artificial Sequence
  Description of Artificial Sequence: Synthetic oligonucleotide
ucuccucugucccagacuu

SEQ ID NO: 2792858 - RNA, 19 nt, Artificial Sequence
  Description of Artificial Sequence: Synthetic oligonucleotide
uccuccagaguccuuggca

SEQ ID NO: 2792859 - RNA, 19 nt, Artificial Sequence
  Description of Artificial Sequence: Synthetic oligonucleotide
uauccucccaagauucugu

SEQ ID NO: 2792860 - RNA, 19 nt, Artificial Sequence
  Description of Artificial Sequence: Synthetic oligonucleotide
ucuggcuucauagggagaa

SEQ ID NO: 2792861 - RNA, 19 nt, Artificial Sequence
  Description of Artificial Sequence: Synthetic oligonucleotide
gagaagcagggauuucucc

SEQ ID NO: 2792862 - RNA, 19 nt, Artificial Sequence
  Description of Artificial Sequence: Synthetic oligonucleotide
uggacugggaaggcaaagg

SEQ ID NO: 2792863 - RNA, 19 nt, Artificial Sequence
  Description of Artificial Sequence: Synthetic oligonucleotide
agaguguggcuauccuccc

SEQ ID NO: 2792864 - RNA, 19 nt, Artificial Sequence
  Description of Artificial Sequence: Synthetic oligonucleotide
cuuugguuuuacugaggcc

SEQ ID NO: 2792865 - RNA, 19 nt, Artificial Sequence
  Description of Artificial Sequence: Synthetic oligonucleotide
acagaucacagagccaggg

SEQ ID NO: 2792866 - RNA, 19 nt, Artificial Sequence
  Description of Artificial Sequence: Synthetic oligonucleotide
acugggaaggcaaagggca

SEQ ID NO: 2792867 - RNA, 19 nt, Artificial Sequence
  Description of Artificial Sequence: Synthetic oligonucleotide
cugacucugagcaggcacc

SEQ ID NO: 2792868 - RNA, 19 nt, Artificial Sequence
  Description of Artificial Sequence: Synthetic oligonucleotide
auauuaauacagggaacug

SEQ ID NO: 2792869 - RNA, 19 nt, Artificial Sequence
  Description of Artificial Sequence: Synthetic oligonucleotide
cuggcagucuccuccagag

SEQ ID NO: 2792870 - RNA, 19 nt, Artificial Sequence
  Description of Artificial Sequence: Synthetic oligonucleotide
uuccaacaauaaagggagg

SEQ ID NO: 2792871 - RNA, 19 nt, Artificial Sequence
  Description of Artificial Sequence: Synthetic oligonucleotide
uguggcuauccucccaaga

SEQ ID NO: 2792872 - RNA, 19 nt, Artificial Sequence
  Description of Artificial Sequence: Synthetic oligonucleotide
gauuucuccucugucccag

SEQ ID NO: 2792873 - RNA, 19 nt, Artificial Sequence
  Description of Artificial Sequence: Synthetic oligonucleotide
gauucuguccucugugcca

SEQ ID NO: 2792874 - RNA, 19 nt, Artificial Sequence
  Description of Artificial Sequence: Synthetic oligonucleotide
guguuuguacagaucacag

SEQ ID NO: 2792875 - RNA, 19 nt, Artificial Sequence
  Description of Artificial Sequence: Synthetic oligonucleotide
uacagaucacagagccagg

SEQ ID NO: 2792876 - RNA, 19 nt, Artificial Sequence
  Description of Artificial Sequence: Synthetic oligonucleotide
uugguuuuacugaggccca

SEQ ID NO: 2792877 - RNA, 19 nt, Artificial Sequence
  Description of Artificial Sequence: Synthetic oligonucleotide
gguuauauuaauacaggga

SEQ ID NO: 2792878 - RNA, 19 nt, Artificial Sequence
  Description of Artificial Sequence: Synthetic oligonucleotide
agcaucauucaucuggcuu

SEQ ID NO: 2792879 - RNA, 19 nt, Artificial Sequence
  Description of Artificial Sequence: Synthetic oligonucleotide
uacaggaaggugagaugcc

SEQ ID NO: 2792880 - RNA, 19 nt, Artificial Sequence
  Description of Artificial Sequence: Synthetic oligonucleotide
uuccccugcuccaacaaaa

SEQ ID NO: 2792881 - RNA, 19 nt, Artificial Sequence
  Description of Artificial Sequence: Synthetic oligonucleotide
ugaccuuuacaggaaggug

SEQ ID NO: 2792882 - RNA, 19 nt, Artificial Sequence
  Description of Artificial Sequence: Synthetic oligonucleotide
cugaaggucuagagugugg

SEQ ID NO: 2792883 - RNA, 19 nt, Artificial Sequence
  Description of Artificial Sequence: Synthetic oligonucleotide
aaggucuagaguguggcua

SEQ ID NO: 2792884 - RNA, 19 nt, Artificial Sequence
  Description of Artificial Sequence: Synthetic oligonucleotide
uuagccaaugagugccuga

SEQ ID NO: 2792885 - RNA, 19 nt, Artificial Sequence
  Description of Artificial Sequence: Synthetic oligonucleotide
ggacugggaaggcaaaggg

SEQ ID NO: 2792886 - RNA, 19 nt, Artificial Sequence
  Description of Artificial Sequence: Synthetic oligonucleotide
cuagaguguggcuauccuc

SEQ ID NO: 2792887 - RNA, 19 nt, Artificial Sequence
  Description of Artificial Sequence: Synthetic oligonucleotide
agucuuuccuauuccccug

SEQ ID NO: 2792888 - RNA, 19 nt, Artificial Sequence
  Description of Artificial Sequence: Synthetic oligonucleotide
uuagauagguguguuugua

SEQ ID NO: 2792889 - RNA, 19 nt, Artificial Sequence
  Description of Artificial Sequence: Synthetic oligonucleotide
augagugccugaaucauca

SEQ ID NO: 2792890 - RNA, 19 nt, Artificial Sequence
  Description of Artificial Sequence: Synthetic oligonucleotide
ccagacuuugguuuuacug

SEQ ID NO: 2792891 - RNA, 19 nt, Artificial Sequence
  Description of Artificial Sequence: Synthetic oligonucleotide
ucacugacuggcagucucc

SEQ ID NO: 2792892 - RNA, 19 nt, Artificial Sequence
  Description of Artificial Sequence: Synthetic oligonucleotide
uaaagggaggcaggggcag

SEQ ID NO: 2792893 - RNA, 19 nt, Artificial Sequence
  Description of Artificial Sequence: Synthetic oligonucleotide
ucacacgagagagccagcc

SEQ ID NO: 2792894 - RNA, 19 nt, Artificial Sequence
  Description of Artificial Sequence: Synthetic oligonucleotide
uauugaaauuuagcaaaua

SEQ ID NO: 2792895 - RNA, 19 nt, Artificial Sequence
  Description of Artificial Sequence: Synthetic oligonucleotide
cagaucacagagccagggg

SEQ ID NO: 2792896 - RNA, 19 nt, Artificial Sequence
  Description of Artificial Sequence: Synthetic oligonucleotide
caauaaagggaggcagggg

SEQ ID NO: 2792897 - RNA, 19 nt, Artificial Sequence
  Description of Artificial Sequence: Synthetic oligonucleotide
gagugccugaaucaucaca

SEQ ID NO: 2792898 - RNA, 19 nt, Artificial Sequence
  Description of Artificial Sequence: Synthetic oligonucleotide
gacuuugguuuuacugagg

SEQ ID NO: 2792899 - RNA, 19 nt, Artificial Sequence
  Description of Artificial Sequence: Synthetic oligonucleotide
acccaugcggcucagggaa

SEQ ID NO: 2792900 - RNA, 19 nt, Artificial Sequence
  Description of Artificial Sequence: Synthetic oligonucleotide
gcaucauucaucuggcuuc

SEQ ID NO: 2792901 - RNA, 19 nt, Artificial Sequence
  Description of Artificial Sequence: Synthetic oligonucleotide
auccucccaagauucuguc

SEQ ID NO: 2792902 - RNA, 19 nt, Artificial Sequence
  Description of Artificial Sequence: Synthetic oligonucleotide
uuucuccucugucccagac

SEQ ID NO: 2792903 - RNA, 19 nt, Artificial Sequence
  Description of Artificial Sequence: Synthetic oligonucleotide
guuuuacugaggcccaguc

SEQ ID NO: 2792904 - RNA, 19 nt, Artificial Sequence
  Description of Artificial Sequence: Synthetic oligonucleotide
ggcagcauuagauaggugu

SEQ ID NO: 2792905 - RNA, 19 nt, Artificial Sequence
  Description of Artificial Sequence: Synthetic oligonucleotide
ucuccuccagaguccuugg

SEQ ID NO: 2792906 - RNA, 19 nt, Artificial Sequence
  Description of Artificial Sequence: Synthetic oligonucleotide
gggauuucuccucuguccc

SEQ ID NO: 2792907 - RNA, 19 nt, Artificial Sequence
  Description of Artificial Sequence: Synthetic oligonucleotide
cuuggcagccaaucucagc

SEQ ID NO: 2792908 - RNA, 19 nt, Artificial Sequence
  Description of Artificial Sequence: Synthetic oligonucleotide
aaggcaaagggcagcauua

SEQ ID NO: 2792909 - RNA, 19 nt, Artificial Sequence
  Description of Artificial Sequence: Synthetic oligonucleotide
accaucacaggcacagcac

SEQ ID NO: 2792910 - RNA, 19 nt, Artificial Sequence
  Description of Artificial Sequence: Synthetic oligonucleotide
uccagaguccuuggcagcc

SEQ ID NO: 2792911 - RNA, 19 nt, Artificial Sequence
  Description of Artificial Sequence: Synthetic oligonucleotide
uagguguguuuguacagau

SEQ ID NO: 2792912 - RNA, 19 nt, Artificial Sequence
  Description of Artificial Sequence: Synthetic oligonucleotide
uauuccccugcuccaacaa

SEQ ID NO: 2792913 - RNA, 19 nt, Artificial Sequence
  Description of Artificial Sequence: Synthetic oligonucleotide
auagguguguuuguacaga

SEQ ID NO: 2792914 - RNA, 19 nt, Artificial Sequence
  Description of Artificial Sequence: Synthetic oligonucleotide
aggugaccuuuacaggaag

SEQ ID NO: 2792915 - RNA, 19 nt, Artificial Sequence
  Description of Artificial Sequence: Synthetic oligonucleotide
aguguggcuauccucccaa

SEQ ID NO: 2792916 - RNA, 19 nt, Artificial Sequence
  Description of Artificial Sequence: Synthetic oligonucleotide
uacagggaacuggacuggg

SEQ ID NO: 2792917 - RNA, 19 nt, Artificial Sequence
  Description of Artificial Sequence: Synthetic oligonucleotide
accuuaaagccaagccagc

SEQ ID NO: 2792918 - RNA, 19 nt, Artificial Sequence
  Description of Artificial Sequence: Synthetic oligonucleotide
accuuuacaggaaggugag

SEQ ID NO: 2792919 - RNA, 19 nt, Artificial Sequence
  Description of Artificial Sequence: Synthetic oligonucleotide
gagaugccagccuuagcca

SEQ ID NO: 2792920 - RNA, 19 nt, Artificial Sequence
  Description of Artificial Sequence: Synthetic oligonucleotide
uuccuauuccccugcucca

SEQ ID NO: 2792921 - RNA, 19 nt, Artificial Sequence
  Description of Artificial Sequence: Synthetic oligonucleotide
acugaaggucuagagugug

SEQ ID NO: 2792922 - RNA, 19 nt, Artificial Sequence
  Description of Artificial Sequence: Synthetic oligonucleotide
uccucccaagauucugucc

SEQ ID NO: 2792923 - RNA, 19 nt, Artificial Sequence
  Description of Artificial Sequence: Synthetic oligonucleotide
agccaagccagcaggacag

SEQ ID NO: 2792924 - RNA, 19 nt, Artificial Sequence
  Description of Artificial Sequence: Synthetic oligonucleotide
ugugccacaggugaccuuu

SEQ ID NO: 2792925 - RNA, 19 nt, Artificial Sequence
  Description of Artificial Sequence: Synthetic oligonucleotide
uucuccucugucccagacu

SEQ ID NO: 2792926 - RNA, 19 nt, Artificial Sequence
  Description of Artificial Sequence: Synthetic oligonucleotide
aguccuuggcagccaaucu

SEQ ID NO: 2792927 - RNA, 19 nt, Artificial Sequence
  Description of Artificial Sequence: Synthetic oligonucleotide
aacuggacugggaaggcaa

SEQ ID NO: 2792928 - RNA, 19 nt, Artificial Sequence
  Description of Artificial Sequence: Synthetic oligonucleotide
gugccugaaucaucacacg

SEQ ID NO: 2792929 - RNA, 19 nt, Artificial Sequence
  Description of Artificial Sequence: Synthetic oligonucleotide
cagccugacucugagcagg

SEQ ID NO: 2792930 - RNA, 19 nt, Artificial Sequence
  Description of Artificial Sequence: Synthetic oligonucleotide
gccaaugagugccugaauc

SEQ ID NO: 2792931 - RNA, 19 nt, Artificial Sequence
  Description of Artificial Sequence: Synthetic oligonucleotide
cugggaaggcaaagggcag

SEQ ID NO: 2792932 - RNA, 19 nt, Artificial Sequence
  Description of Artificial Sequence: Synthetic oligonucleotide
uggcuauccucccaagauu

SEQ ID NO: 2792933 - RNA, 19 nt, Artificial Sequence
  Description of Artificial Sequence: Synthetic oligonucleotide
gucuuuccuauuccccugc

SEQ ID NO: 2792934 - RNA, 19 nt, Artificial Sequence
  Description of Artificial Sequence: Synthetic oligonucleotide
ucuuuccuauuccccugcu

SEQ ID NO: 2792935 - RNA, 19 nt, Artificial Sequence
  Description of Artificial Sequence: Synthetic oligonucleotide
gccaaucucagcaucauuc

SEQ ID NO: 2792936 - RNA, 19 nt, Artificial Sequence
  Description of Artificial Sequence: Synthetic oligonucleotide
ucuguccucugugccacag

SEQ ID NO: 2792937 - RNA, 19 nt, Artificial Sequence
  Description of Artificial Sequence: Synthetic oligonucleotide
ucaucacacgagagagcca

SEQ ID NO: 2792938 - RNA, 19 nt, Artificial Sequence
  Description of Artificial Sequence: Synthetic oligonucleotide
agggcagcauuagauaggu

SEQ ID NO: 2792939 - RNA, 19 nt, Artificial Sequence
  Description of Artificial Sequence: Synthetic oligonucleotide
gccuuagccaaugagugcc

SEQ ID NO: 2792940 - RNA, 19 nt, Artificial Sequence
  Description of Artificial Sequence: Synthetic oligonucleotide
ggcagucuccuccagaguc

SEQ ID NO: 2792941 - RNA, 19 nt, Artificial Sequence
  Description of Artificial Sequence: Synthetic oligonucleotide
ucugucccagacuuugguu

SEQ ID NO: 2792942 - RNA, 19 nt, Artificial Sequence
  Description of Artificial Sequence: Synthetic oligonucleotide
cuauccucccaagauucug

SEQ ID NO: 2792943 - RNA, 19 nt, Artificial Sequence
  Description of Artificial Sequence: Synthetic oligonucleotide
uuacugaggcccagucuuc

SEQ ID NO: 2792944 - RNA, 19 nt, Artificial Sequence
  Description of Artificial Sequence: Synthetic oligonucleotide
acaggaaggugagaugcca

SEQ ID NO: 2792945 - RNA, 19 nt, Artificial Sequence
  Description of Artificial Sequence: Synthetic oligonucleotide
agaugccagccuuagccaa

SEQ ID NO: 2792946 - RNA, 19 nt, Artificial Sequence
  Description of Artificial Sequence: Synthetic oligonucleotide
aggucuagaguguggcuau

SEQ ID NO: 2792947 - RNA, 19 nt, Artificial Sequence
  Description of Artificial Sequence: Synthetic oligonucleotide
auaaagggaggcaggggca

SEQ ID NO: 2792948 - RNA, 19 nt, Artificial Sequence
  Description of Artificial Sequence: Synthetic oligonucleotide
ugaggcccagucuuccaac

SEQ ID NO: 2792949 - RNA, 19 nt, Artificial Sequence
  Description of Artificial Sequence: Synthetic oligonucleotide
gagccagccugacucugag

SEQ ID NO: 2792950 - RNA, 19 nt, Artificial Sequence
  Description of Artificial Sequence: Synthetic oligonucleotide
uccccugcuccaacaaaac

SEQ ID NO: 2792951 - RNA, 19 nt, Artificial Sequence
  Description of Artificial Sequence: Synthetic oligonucleotide
gcuucauagggagaagcag

SEQ ID NO: 2792952 - RNA, 19 nt, Artificial Sequence
  Description of Artificial Sequence: Synthetic oligonucleotide
ugacuggcagucuccucca

SEQ ID NO: 2792953 - RNA, 19 nt, Artificial Sequence
  Description of Artificial Sequence: Synthetic oligonucleotide
guccuuggcagccaaucuc

SEQ ID NO: 2792954 - RNA, 19 nt, Artificial Sequence
  Description of Artificial Sequence: Synthetic oligonucleotide
uagccaaugagugccugaa

SEQ ID NO: 2792955 - RNA, 19 nt, Artificial Sequence
  Description of Artificial Sequence: Synthetic oligonucleotide
gcacccaugcggcucaggg

SEQ ID NO: 2792956 - RNA, 19 nt, Artificial Sequence
  Description of Artificial Sequence: Synthetic oligonucleotide
uacugaggcccagucuucc

SEQ ID NO: 2792957 - RNA, 19 nt, Artificial Sequence
  Description of Artificial Sequence: Synthetic oligonucleotide
caaagggcagcauuagaua

SEQ ID NO: 2792958 - RNA, 19 nt, Artificial Sequence
  Description of Artificial Sequence: Synthetic oligonucleotide
cucugugccacaggugacc

SEQ ID NO: 2792959 - RNA, 19 nt, Artificial Sequence
  Description of Artificial Sequence: Synthetic oligonucleotide
ucugagcaggcaccaucac

SEQ ID NO: 2792960 - RNA, 19 nt, Artificial Sequence
  Description of Artificial Sequence: Synthetic oligonucleotide
gucuccuccagaguccuug

SEQ ID NO: 2792961 - RNA, 19 nt, Artificial Sequence
  Description of Artificial Sequence: Synthetic oligonucleotide
acuggcagucuccuccaga

SEQ ID NO: 2792962 - RNA, 19 nt, Artificial Sequence
  Description of Artificial Sequence: Synthetic oligonucleotide
gucuagaguguggcuaucc

SEQ ID NO: 2792963 - RNA, 19 nt, Artificial Sequence
  Description of Artificial Sequence: Synthetic oligonucleotide
gaguccuuggcagccaauc

SEQ ID NO: 2792964 - RNA, 19 nt, Artificial Sequence
  Description of Artificial Sequence: Synthetic oligonucleotide
ggugaccuuuacaggaagg

SEQ ID NO: 2792965 - RNA, 19 nt, Artificial Sequence
  Description of Artificial Sequence: Synthetic oligonucleotide
cuuuccuauuccccugcuc

SEQ ID NO: 2792966 - RNA, 19 nt, Artificial Sequence
  Description of Artificial Sequence: Synthetic oligonucleotide
acagcacccaugcggcuca

SEQ ID NO: 2792967 - RNA, 19 nt, Artificial Sequence
  Description of Artificial Sequence: Synthetic oligonucleotide
ugucccagacuuugguuuu

SEQ ID NO: 2792968 - RNA, 19 nt, Artificial Sequence
  Description of Artificial Sequence: Synthetic oligonucleotide
ucugugccacaggugaccu

SEQ ID NO: 2792969 - RNA, 19 nt, Artificial Sequence
  Description of Artificial Sequence: Synthetic oligonucleotide
cuccagaguccuuggcagc

SEQ ID NO: 2792970 - RNA, 19 nt, Artificial Sequence
  Description of Artificial Sequence: Synthetic oligonucleotide
gaaggugagaugccagccu

SEQ ID NO: 2792971 - RNA, 19 nt, Artificial Sequence
  Description of Artificial Sequence: Synthetic oligonucleotide
ucauagggagaagcaggga

SEQ ID NO: 2792972 - RNA, 19 nt, Artificial Sequence
  Description of Artificial Sequence: Synthetic oligonucleotide
agagagccagccugacucu

SEQ ID NO: 2792973 - RNA, 19 nt, Artificial Sequence
  Description of Artificial Sequence: Synthetic oligonucleotide
gccugaaucaucacacgag

SEQ ID NO: 2792974 - RNA, 19 nt, Artificial Sequence
  Description of Artificial Sequence: Synthetic oligonucleotide
uagggagaagcagggauuu

SEQ ID NO: 2792975 - RNA, 19 nt, Artificial Sequence
  Description of Artificial Sequence: Synthetic oligonucleotide
ugacucugagcaggcacca

SEQ ID NO: 2792976 - RNA, 19 nt, Artificial Sequence
  Description of Artificial Sequence: Synthetic oligonucleotide
gcagcauuagauaggugug

SEQ ID NO: 2792977 - RNA, 19 nt, Artificial Sequence
  Description of Artificial Sequence: Synthetic oligonucleotide
cauagggagaagcagggau

SEQ ID NO: 2792978 - RNA, 19 nt, Artificial Sequence
  Description of Artificial Sequence: Synthetic oligonucleotide
ccaucacaggcacagcacc

SEQ ID NO: 2792979 - RNA, 19 nt, Artificial Sequence
  Description of Artificial Sequence: Synthetic oligonucleotide
gaaggcaaagggcagcauu

SEQ ID NO: 2792980 - RNA, 19 nt, Artificial Sequence
  Description of Artificial Sequence: Synthetic oligonucleotide
ggaaggugagaugccagcc

SEQ ID NO: 2792981 - RNA, 19 nt, Artificial Sequence
  Description of Artificial Sequence: Synthetic oligonucleotide
agguguguuuguacagauc

SEQ ID NO: 2792982 - RNA, 19 nt, Artificial Sequence
  Description of Artificial Sequence: Synthetic oligonucleotide
agcauuagauagguguguu

SEQ ID NO: 2792983 - RNA, 19 nt, Artificial Sequence
  Description of Artificial Sequence: Synthetic oligonucleotide
cagggauuucuccucuguc

SEQ ID NO: 2792984 - RNA, 19 nt, Artificial Sequence
  Description of Artificial Sequence: Synthetic oligonucleotide
aucacaggcacagcaccca

SEQ ID NO: 2792985 - RNA, 19 nt, Artificial Sequence
  Description of Artificial Sequence: Synthetic oligonucleotide
agaggacugaaggucuaga

SEQ ID NO: 2792986 - RNA, 19 nt, Artificial Sequence
  Description of Artificial Sequence: Synthetic oligonucleotide
ugguuuuacugaggcccag

SEQ ID NO: 2792987 - RNA, 19 nt, Artificial Sequence
  Description of Artificial Sequence: Synthetic oligonucleotide
aggcaaagggcagcauuag

SEQ ID NO: 2792988 - RNA, 19 nt, Artificial Sequence
  Description of Artificial Sequence: Synthetic oligonucleotide
auagggagaagcagggauu

SEQ ID NO: 2792989 - RNA, 19 nt, Artificial Sequence
  Description of Artificial Sequence: Synthetic oligonucleotide
ggugagaugccagccuuag

SEQ ID NO: 2792990 - RNA, 19 nt, Artificial Sequence
  Description of Artificial Sequence: Synthetic oligonucleotide
cugagcaggcaccaucaca

SEQ ID NO: 2792991 - RNA, 19 nt, Artificial Sequence
  Description of Artificial Sequence: Synthetic oligonucleotide
ugccacaggugaccuuuac

SEQ ID NO: 2792992 - RNA, 19 nt, Artificial Sequence
  Description of Artificial Sequence: Synthetic oligonucleotide
auuccccugcuccaacaaa

SEQ ID NO: 2792993 - RNA, 19 nt, Artificial Sequence
  Description of Artificial Sequence: Synthetic oligonucleotide
gaggcccagucuuccaaca

SEQ ID NO: 2792994 - RNA, 19 nt, Artificial Sequence
  Description of Artificial Sequence: Synthetic oligonucleotide
agcagggauuucuccucug

SEQ ID NO: 2792995 - RNA, 19 nt, Artificial Sequence
  Description of Artificial Sequence: Synthetic oligonucleotide
cuuagccaaugagugccug

SEQ ID NO: 2792996 - RNA, 19 nt, Artificial Sequence
  Description of Artificial Sequence: Synthetic oligonucleotide
ccaaugagugccugaauca

SEQ ID NO: 2792997 - RNA, 19 nt, Artificial Sequence
  Description of Artificial Sequence: Synthetic oligonucleotide
ucucagcaucauucaucug

SEQ ID NO: 2792998 - RNA, 19 nt, Artificial Sequence
  Description of Artificial Sequence: Synthetic oligonucleotide
aggacagguuauauuaaua

SEQ ID NO: 2792999 - RNA, 19 nt, Artificial Sequence
  Description of Artificial Sequence: Synthetic oligonucleotide
cuggacugggaaggcaaag

SEQ ID NO: 2793000 - RNA, 19 nt, Artificial Sequence
  Description of Artificial Sequence: Synthetic oligonucleotide
agccugacucugagcaggc

SEQ ID NO: 2793001 - RNA, 19 nt, Artificial Sequence
  Description of Artificial Sequence: Synthetic oligonucleotide
ggcuauccucccaagauuc

SEQ ID NO: 2793002 - RNA, 19 nt, Artificial Sequence
  Description of Artificial Sequence: Synthetic oligonucleotide
cagggaacuggacugggaa

SEQ ID NO: 2793003 - RNA, 19 nt, Artificial Sequence
  Description of Artificial Sequence: Synthetic oligonucleotide
ccugacucugagcaggcac

SEQ ID NO: 2793004 - RNA, 19 nt, Artificial Sequence
  Description of Artificial Sequence: Synthetic oligonucleotide
cuauuccccugcuccaaca

SEQ ID NO: 2793005 - RNA, 19 nt, Artificial Sequence
  Description of Artificial Sequence: Synthetic oligonucleotide
acuagguuuucaaguuagu

SEQ ID NO: 2793006 - RNA, 19 nt, Artificial Sequence
  Description of Artificial Sequence: Synthetic oligonucleotide
gccagccuuagccaaugag

SEQ ID NO: 2793007 - RNA, 19 nt, Artificial Sequence
  Description of Artificial Sequence: Synthetic oligonucleotide
ggcacagcacccaugcggc

SEQ ID NO: 2793008 - RNA, 19 nt, Artificial Sequence
  Description of Artificial Sequence: Synthetic oligonucleotide
aaagggaggcaggggcaga

SEQ ID NO: 2793009 - RNA, 19 nt, Artificial Sequence
  Description of Artificial Sequence: Synthetic oligonucleotide
cuguccucugugccacagg

SEQ ID NO: 2793010 - RNA, 19 nt, Artificial Sequence
  Description of Artificial Sequence: Synthetic oligonucleotide
acgagagagccagccugac

SEQ ID NO: 2793011 - RNA, 19 nt, Artificial Sequence
  Description of Artificial Sequence: Synthetic oligonucleotide
aucacacgagagagccagc

SEQ ID NO: 2793012 - RNA, 19 nt, Artificial Sequence
  Description of Artificial Sequence: Synthetic oligonucleotide
aucacagagccaggggccu

SEQ ID NO: 2793013 - RNA, 19 nt, Artificial Sequence
  Description of Artificial Sequence: Synthetic oligonucleotide
ccugaaucaucacacgaga

SEQ ID NO: 2793014 - RNA, 19 nt, Artificial Sequence
  Description of Artificial Sequence: Synthetic oligonucleotide
gugagaugccagccuuagc

SEQ ID NO: 2793015 - RNA, 19 nt, Artificial Sequence
  Description of Artificial Sequence: Synthetic oligonucleotide
gaaggucuagaguguggcu

SEQ ID NO: 2793016 - RNA, 19 nt, Artificial Sequence
  Description of Artificial Sequence: Synthetic oligonucleotide
guguguuuguacagaucac

SEQ ID NO: 2793017 - RNA, 19 nt, Artificial Sequence
  Description of Artificial Sequence: Synthetic oligonucleotide
uggcagucuccuccagagu

SEQ ID NO: 2793018 - RNA, 19 nt, Artificial Sequence
  Description of Artificial Sequence: Synthetic oligonucleotide
uccuauuccccugcuccaa

SEQ ID NO: 2793019 - RNA, 19 nt, Artificial Sequence
  Description of Artificial Sequence: Synthetic oligonucleotide
gaguguggcuauccuccca

SEQ ID NO: 2793020 - RNA, 19 nt, Artificial Sequence
  Description of Artificial Sequence: Synthetic oligonucleotide
cagaggacugaaggucuag

SEQ ID NO: 2793021 - RNA, 19 nt, Artificial Sequence
  Description of Artificial Sequence: Synthetic oligonucleotide
gaacuggacugggaaggca

SEQ ID NO: 2793022 - RNA, 19 nt, Artificial Sequence
  Description of Artificial Sequence: Synthetic oligonucleotide
cacgagagagccagccuga

SEQ ID NO: 2793023 - RNA, 19 nt, Artificial Sequence
  Description of Artificial Sequence: Synthetic oligonucleotide
gagagccagccugacucug

SEQ ID NO: 2793024 - RNA, 19 nt, Artificial Sequence
  Description of Artificial Sequence: Synthetic oligonucleotide
cucccaagauucuguccuc

SEQ ID NO: 2793025 - RNA, 19 nt, Artificial Sequence
  Description of Artificial Sequence: Synthetic oligonucleotide
gugaccuuuacaggaaggu

SEQ ID NO: 2793026 - RNA, 19 nt, Artificial Sequence
  Description of Artificial Sequence: Synthetic oligonucleotide
augcggcucagggaagaag

SEQ ID NO: 2793027 - RNA, 19 nt, Artificial Sequence
  Description of Artificial Sequence: Synthetic oligonucleotide
ccaggggccucacugacug

SEQ ID NO: 2793028 - RNA, 19 nt, Artificial Sequence
  Description of Artificial Sequence: Synthetic oligonucleotide
guguggcuauccucccaag

SEQ ID NO: 2793029 - RNA, 19 nt, Artificial Sequence
  Description of Artificial Sequence: Synthetic oligonucleotide
cuccuccagaguccuuggc

SEQ ID NO: 2793030 - RNA, 19 nt, Artificial Sequence
  Description of Artificial Sequence: Synthetic oligonucleotide
agggagaagcagggauuuc

SEQ ID NO: 2793031 - RNA, 19 nt, Artificial Sequence
  Description of Artificial Sequence: Synthetic oligonucleotide
gaggcaggggcagaggacu

SEQ ID NO: 2793032 - RNA, 19 nt, Artificial Sequence
  Description of Artificial Sequence: Synthetic oligonucleotide
caucauucaucuggcuuca

SEQ ID NO: 2793033 - RNA, 19 nt, Artificial Sequence
  Description of Artificial Sequence: Synthetic oligonucleotide
cucagggaagaagaagaaa

SEQ ID NO: 2793034 - RNA, 19 nt, Artificial Sequence
  Description of Artificial Sequence: Synthetic oligonucleotide
gcuccaacaaaaccuuaaa

SEQ ID NO: 2793035 - RNA, 19 nt, Artificial Sequence
  Description of Artificial Sequence: Synthetic oligonucleotide
agccaaucucagcaucauu

SEQ ID NO: 2793036 - RNA, 19 nt, Artificial Sequence
  Description of Artificial Sequence: Synthetic oligonucleotide
uggcagccaaucucagcau

SEQ ID NO: 2793037 - RNA, 19 nt, Artificial Sequence
  Description of Artificial Sequence: Synthetic oligonucleotide
ugccagccuuagccaauga

SEQ ID NO: 2793038 - RNA, 19 nt, Artificial Sequence
  Description of Artificial Sequence: Synthetic oligonucleotide
cuggcuucauagggagaag

SEQ ID NO: 2793039 - RNA, 19 nt, Artificial Sequence
  Description of Artificial Sequence: Synthetic oligonucleotide
cugucccagacuuugguuu

SEQ ID NO: 2793040 - RNA, 19 nt, Artificial Sequence
  Description of Artificial Sequence: Synthetic oligonucleotide
ggaacuggacugggaaggc

SEQ ID NO: 2793041 - RNA, 19 nt, Artificial Sequence
  Description of Artificial Sequence: Synthetic oligonucleotide
cuagguuuucaaguuaguu

SEQ ID NO: 2793042 - RNA, 19 nt, Artificial Sequence
  Description of Artificial Sequence: Synthetic oligonucleotide
ccaacaauaaagggaggca

SEQ ID NO: 2793043 - RNA, 19 nt, Artificial Sequence
  Description of Artificial Sequence: Synthetic oligonucleotide
aggcccagucuuccaacaa

SEQ ID NO: 2793044 - RNA, 19 nt, Artificial Sequence
  Description of Artificial Sequence: Synthetic oligonucleotide
gacugaaggucuagagugu

SEQ ID NO: 2793045 - RNA, 19 nt, Artificial Sequence
  Description of Artificial Sequence: Synthetic oligonucleotide
ggcuucauagggagaagca

SEQ ID NO: 2793046 - RNA, 19 nt, Artificial Sequence
  Description of Artificial Sequence: Synthetic oligonucleotide
ggcagccaaucucagcauc

SEQ ID NO: 2793047 - RNA, 19 nt, Artificial Sequence
  Description of Artificial Sequence: Synthetic oligonucleotide
ggagaagcagggauuucuc

SEQ ID NO: 2793048 - RNA, 19 nt, Artificial Sequence
  Description of Artificial Sequence: Synthetic oligonucleotide
gcaaagggcagcauuagau

SEQ ID NO: 2793049 - RNA, 19 nt, Artificial Sequence
  Description of Artificial Sequence: Synthetic oligonucleotide
gcaggcaccaucacaggca

SEQ ID NO: 2793050 - RNA, 19 nt, Artificial Sequence
  Description of Artificial Sequence: Synthetic oligonucleotide
caggacagguuauauuaau

SEQ ID NO: 2793051 - RNA, 19 nt, Artificial Sequence
  Description of Artificial Sequence: Synthetic oligonucleotide
cccugcuccaacaaaaccu

SEQ ID NO: 2793052 - RNA, 19 nt, Artificial Sequence
  Description of Artificial Sequence: Synthetic oligonucleotide
ggauuucuccucuguccca

SEQ ID NO: 2793053 - RNA, 19 nt, Artificial Sequence
  Description of Artificial Sequence: Synthetic oligonucleotide
ccagccuuagccaaugagu

SEQ ID NO: 2793054 - RNA, 19 nt, Artificial Sequence
  Description of Artificial Sequence: Synthetic oligonucleotide
gggccucacugacuggcag

SEQ ID NO: 2793055 - RNA, 19 nt, Artificial Sequence
  Description of Artificial Sequence: Synthetic oligonucleotide
uucuguccucugugccaca

SEQ ID NO: 2793056 - RNA, 19 nt, Artificial Sequence
  Description of Artificial Sequence: Synthetic oligonucleotide
ccccugcuccaacaaaacc

SEQ ID NO: 2793057 - RNA, 19 nt, Artificial Sequence
  Description of Artificial Sequence: Synthetic oligonucleotide
agagccagccugacucuga

SEQ ID NO: 2793058 - RNA, 19 nt, Artificial Sequence
  Description of Artificial Sequence: Synthetic oligonucleotide
gccacaggugaccuuuaca

SEQ ID NO: 2793059 - RNA, 19 nt, Artificial Sequence
  Description of Artificial Sequence: Synthetic oligonucleotide
cugaggcccagucuuccaa

SEQ ID NO: 2793060 - RNA, 19 nt, Artificial Sequence
  Description of Artificial Sequence: Synthetic oligonucleotide
cacccaugcggcucaggga

SEQ ID NO: 2793061 - RNA, 19 nt, Artificial Sequence
  Description of Artificial Sequence: Synthetic oligonucleotide
gcagccaaucucagcauca

SEQ ID NO: 2793062 - RNA, 19 nt, Artificial Sequence
  Description of Artificial Sequence: Synthetic oligonucleotide
ccucugucccagacuuugg

SEQ ID NO: 2793063 - RNA, 19 nt, Artificial Sequence
  Description of Artificial Sequence: Synthetic oligonucleotide
acagagccaggggccucac

SEQ ID NO: 2793064 - RNA, 19 nt, Artificial Sequence
  Description of Artificial Sequence: Synthetic oligonucleotide
guccucugugccacaggug

SEQ ID NO: 2793065 - RNA, 19 nt, Artificial Sequence
  Description of Artificial Sequence: Synthetic oligonucleotide
caaucucagcaucauucau

SEQ ID NO: 2793066 - RNA, 19 nt, Artificial Sequence
  Description of Artificial Sequence: Synthetic oligonucleotide
ccucccaagauucuguccu

SEQ ID NO: 2793067 - RNA, 19 nt, Artificial Sequence
  Description of Artificial Sequence: Synthetic oligonucleotide
acuggacugggaaggcaaa

SEQ ID NO: 2793068 - RNA, 19 nt, Artificial Sequence
  Description of Artificial Sequence: Synthetic oligonucleotide
gggagaagcagggauuucu

SEQ ID NO: 2793069 - RNA, 19 nt, Artificial Sequence
  Description of Artificial Sequence: Synthetic oligonucleotide
ccagucuuccaacaauaaa

SEQ ID NO: 2793070 - RNA, 19 nt, Artificial Sequence
  Description of Artificial Sequence: Synthetic oligonucleotide
caggggccucacugacugg

SEQ ID NO: 2793071 - RNA, 19 nt, Artificial Sequence
  Description of Artificial Sequence: Synthetic oligonucleotide
cucugucccagacuuuggu

SEQ ID NO: 2793072 - RNA, 19 nt, Artificial Sequence
  Description of Artificial Sequence: Synthetic oligonucleotide
caaugagugccugaaucau

SEQ ID NO: 2793073 - RNA, 19 nt, Artificial Sequence
  Description of Artificial Sequence: Synthetic oligonucleotide
ccuuaaagccaagccagca

SEQ ID NO: 2793074 - RNA, 19 nt, Artificial Sequence
  Description of Artificial Sequence: Synthetic oligonucleotide
ccuauuccccugcuccaac

SEQ ID NO: 2793075 - RNA, 19 nt, Artificial Sequence
  Description of Artificial Sequence: Synthetic oligonucleotide
gggaaggcaaagggcagca

SEQ ID NO: 2793076 - RNA, 19 nt, Artificial Sequence
  Description of Artificial Sequence: Synthetic oligonucleotide
ccagccugacucugagcag

SEQ ID NO: 2793077 - RNA, 19 nt, Artificial Sequence
  Description of Artificial Sequence: Synthetic oligonucleotide
ucacagagccaggggccuc

SEQ ID NO: 2793078 - RNA, 19 nt, Artificial Sequence
  Description of Artificial Sequence: Synthetic oligonucleotide
aucuggcuucauagggaga

SEQ ID NO: 2793079 - RNA, 19 nt, Artificial Sequence
  Description of Artificial Sequence: Synthetic oligonucleotide
ggggcagaggacugaaggu

SEQ ID NO: 2793080 - RNA, 19 nt, Artificial Sequence
  Description of Artificial Sequence: Synthetic oligonucleotide
cagcauuagauaggugugu

SEQ ID NO: 2793081 - RNA, 19 nt, Artificial Sequence
  Description of Artificial Sequence: Synthetic oligonucleotide
caagccagcaggacagguu

SEQ ID NO: 2793082 - RNA, 19 nt, Artificial Sequence
  Description of Artificial Sequence: Synthetic oligonucleotide
gaugccagccuuagccaau

SEQ ID NO: 2793083 - RNA, 19 nt, Artificial Sequence
  Description of Artificial Sequence: Synthetic oligonucleotide
cagaguccuuggcagccaa

SEQ ID NO: 2793084 - RNA, 19 nt, Artificial Sequence
  Description of Artificial Sequence: Synthetic oligonucleotide
gccucacugacuggcaguc

SEQ ID NO: 2793085 - RNA, 19 nt, Artificial Sequence
  Description of Artificial Sequence: Synthetic oligonucleotide
gcaggacagguuauauuaa

SEQ ID NO: 2793086 - RNA, 19 nt, Artificial Sequence
  Description of Artificial Sequence: Synthetic oligonucleotide
ggcagaggacugaaggucu

SEQ ID NO: 2793087 - RNA, 19 nt, Artificial Sequence
  Description of Artificial Sequence: Synthetic oligonucleotide
ccucugugccacaggugac

SEQ ID NO: 2793088 - RNA, 19 nt, Artificial Sequence
  Description of Artificial Sequence: Synthetic oligonucleotide
cacacgagagagccagccu

SEQ ID NO: 2793089 - RNA, 19 nt, Artificial Sequence
  Description of Artificial Sequence: Synthetic oligonucleotide
gcagggauuucuccucugu

SEQ ID NO: 2793090 - RNA, 19 nt, Artificial Sequence
  Description of Artificial Sequence: Synthetic oligonucleotide
aggugagaugccagccuua

SEQ ID NO: 2793091 - RNA, 19 nt, Artificial Sequence
  Description of Artificial Sequence: Synthetic oligonucleotide
agaguccuuggcagccaau

SEQ ID NO: 2793092 - RNA, 19 nt, Artificial Sequence
  Description of Artificial Sequence: Synthetic oligonucleotide
cccagucuuccaacaauaa

SEQ ID NO: 2793093 - RNA, 19 nt, Artificial Sequence
  Description of Artificial Sequence: Synthetic oligonucleotide
aucauucaucuggcuucau

SEQ ID NO: 2793094 - RNA, 19 nt, Artificial Sequence
  Description of Artificial Sequence: Synthetic oligonucleotide
ccaagauucuguccucugu

SEQ ID NO: 2793095 - RNA, 19 nt, Artificial Sequence
  Description of Artificial Sequence: Synthetic oligonucleotide
cagcaggacagguuauauu

SEQ ID NO: 2793096 - RNA, 19 nt, Artificial Sequence
  Description of Artificial Sequence: Synthetic oligonucleotide
gcauuagauagguguguuu

SEQ ID NO: 2793097 - RNA, 19 nt, Artificial Sequence
  Description of Artificial Sequence: Synthetic oligonucleotide
gcccagucuuccaacaaua

SEQ ID NO: 2793098 - RNA, 19 nt, Artificial Sequence
  Description of Artificial Sequence: Synthetic oligonucleotide
agccagcaggacagguuau

SEQ ID NO: 2793099 - RNA, 19 nt, Artificial Sequence
  Description of Artificial Sequence: Synthetic oligonucleotide
gguuuuacugaggcccagu

SEQ ID NO: 2793100 - RNA, 19 nt, Artificial Sequence
  Description of Artificial Sequence: Synthetic oligonucleotide
gccaagccagcaggacagg

SEQ ID NO: 2793101 - RNA, 19 nt, Artificial Sequence
  Description of Artificial Sequence: Synthetic oligonucleotide
ggcccagucuuccaacaau

SEQ ID NO: 2793102 - RNA, 19 nt, Artificial Sequence
  Description of Artificial Sequence: Synthetic oligonucleotide
cggcucagggaagaagaag

SEQ ID NO: 2793103 - RNA, 19 nt, Artificial Sequence
  Description of Artificial Sequence: Synthetic oligonucleotide
cccaugcggcucagggaag

SEQ ID NO: 2793104 - RNA, 19 nt, Artificial Sequence
  Description of Artificial Sequence: Synthetic oligonucleotide
cagcaucauucaucuggcu

SEQ ID NO: 2793105 - RNA, 19 nt, Artificial Sequence
  Description of Artificial Sequence: Synthetic oligonucleotide
ggucuagaguguggcuauc

SEQ ID NO: 2793106 - RNA, 19 nt, Artificial Sequence
  Description of Artificial Sequence: Synthetic oligonucleotide
caugcggcucagggaagaa

SEQ ID NO: 2793107 - RNA, 19 nt, Artificial Sequence
  Description of Artificial Sequence: Synthetic oligonucleotide
ggccucacugacuggcagu

SEQ ID NO: 2793108 - RNA, 19 nt, Artificial Sequence
  Description of Artificial Sequence: Synthetic oligonucleotide
cacugacuggcagucuccu

SEQ ID NO: 2793109 - RNA, 19 nt, Artificial Sequence
  Description of Artificial Sequence: Synthetic oligonucleotide
gcaccaucacaggcacagc

SEQ ID NO: 2793110 - RNA, 19 nt, Artificial Sequence
  Description of Artificial Sequence: Synthetic oligonucleotide
cagucuccuccagaguccu

SEQ ID NO: 2793111 - RNA, 19 nt, Artificial Sequence
  Description of Artificial Sequence: Synthetic oligonucleotide
aggcaccaucacaggcaca

SEQ ID NO: 2793112 - RNA, 19 nt, Artificial Sequence
  Description of Artificial Sequence: Synthetic oligonucleotide
gggcagcauuagauaggug

SEQ ID NO: 2793113 - RNA, 19 nt, Artificial Sequence
  Description of Artificial Sequence: Synthetic oligonucleotide
gcaggggcagaggacugaa

SEQ ID NO: 2793114 - RNA, 19 nt, Artificial Sequence
  Description of Artificial Sequence: Synthetic oligonucleotide
gcuauccucccaagauucu

SEQ ID NO: 2793115 - RNA, 19 nt, Artificial Sequence
  Description of Artificial Sequence: Synthetic oligonucleotide
gacucugagcaggcaccau

SEQ ID NO: 2793116 - RNA, 19 nt, Artificial Sequence
  Description of Artificial Sequence: Synthetic oligonucleotide
cagccaaucucagcaucau

SEQ ID NO: 2793117 - RNA, 19 nt, Artificial Sequence
  Description of Artificial Sequence: Synthetic oligonucleotide
gcagaggacugaaggucua

SEQ ID NO: 2793118 - RNA, 19 nt, Artificial Sequence
  Description of Artificial Sequence: Synthetic oligonucleotide
ccaugcggcucagggaaga

SEQ ID NO: 2793119 - RNA, 19 nt, Artificial Sequence
  Description of Artificial Sequence: Synthetic oligonucleotide
ggggccucacugacuggca

SEQ ID NO: 2793120 - RNA, 19 nt, Artificial Sequence
  Description of Artificial Sequence: Synthetic oligonucleotide
ccuuuacaggaaggugaga

SEQ ID NO: 2793121 - RNA, 19 nt, Artificial Sequence
  Description of Artificial Sequence: Synthetic oligonucleotide
gcggcucagggaagaagaa

SEQ ID NO: 2793122 - RNA, 19 nt, Artificial Sequence
  Description of Artificial Sequence: Synthetic oligonucleotide
ccuuagccaaugagugccu

SEQ ID NO: 2793123 - RNA, 19 nt, Artificial Sequence
  Description of Artificial Sequence: Synthetic oligonucleotide
agucuccuccagaguccuu

SEQ ID NO: 2793124 - RNA, 19 nt, Artificial Sequence
  Description of Artificial Sequence: Synthetic oligonucleotide
ccagaguccuuggcagcca

SEQ ID NO: 2793125 - RNA, 19 nt, Artificial Sequence
  Description of Artificial Sequence: Synthetic oligonucleotide
gccugacucugagcaggca

SEQ ID NO: 2793126 - RNA, 19 nt, Artificial Sequence
  Description of Artificial Sequence: Synthetic oligonucleotide
cccagacuuugguuuuacu

SEQ ID NO: 2793127 - RNA, 19 nt, Artificial Sequence
  Description of Artificial Sequence: Synthetic oligonucleotide
ccagcaggacagguuauau

SEQ ID NO: 2793128 - RNA, 19 nt, Artificial Sequence
  Description of Artificial Sequence: Synthetic oligonucleotide
cagagccaggggccucacu

SEQ ID NO: 2793129 - RNA, 19 nt, Artificial Sequence
  Description of Artificial Sequence: Synthetic oligonucleotide
ggaaggcaaagggcagcau

SEQ ID NO: 2793130 - RNA, 19 nt, Artificial Sequence
  Description of Artificial Sequence: Synthetic oligonucleotide
cugugccacaggugaccuu

SEQ ID NO: 2793131 - RNA, 19 nt, Artificial Sequence
  Description of Artificial Sequence: Synthetic oligonucleotide
ccucacugacuggcagucu

SEQ ID NO: 2793132 - RNA, 19 nt, Artificial Sequence
  Description of Artificial Sequence: Synthetic oligonucleotide
aauucuuggaauuuauucc

SEQ ID NO: 2793133 - RNA, 19 nt, Artificial Sequence
  Description of Artificial Sequence: Synthetic oligonucleotide
aaaauacugaguaagcucc

SEQ ID NO: 2793134 - RNA, 19 nt, Artificial Sequence
  Description of Artificial Sequence: Synthetic oligonucleotide
uguucuguaaucuugacgc

SEQ ID NO: 2793135 - RNA, 19 nt, Artificial Sequence
  Description of Artificial Sequence: Synthetic oligonucleotide
uguaaggcuacauauaucc

SEQ ID NO: 2793136 - RNA, 19 nt, Artificial Sequence
  Description of Artificial Sequence: Synthetic oligonucleotide
ucuucuuugcuucaaaccc

SEQ ID NO: 2793137 - RNA, 19 nt, Artificial Sequence
  Description of Artificial Sequence: Synthetic oligonucleotide
cagucuaucauaaacgucc

SEQ ID NO: 2793138 - RNA, 19 nt, Artificial Sequence
  Description of Artificial Sequence: Synthetic oligonucleotide
uuuucauucuucaacuugc

SEQ ID NO: 2793139 - RNA, 19 nt, Artificial Sequence
  Description of Artificial Sequence: Synthetic oligonucleotide
uggaauuuauuccacaugu

SEQ ID NO: 2793140 - RNA, 19 nt, Artificial Sequence
  Description of Artificial Sequence: Synthetic oligonucleotide
aucauaaacguccugaaga

SEQ ID NO: 2793141 - RNA, 19 nt, Artificial Sequence
  Description of Artificial Sequence: Synthetic oligonucleotide
uuucguagcagcuugugag

SEQ ID NO: 2793142 - RNA, 19 nt, Artificial Sequence
  Description of Artificial Sequence: Synthetic oligonucleotide
uuggcuuuaacaaacuugu

SEQ ID NO: 2793143 - RNA, 19 nt, Artificial Sequence
  Description of Artificial Sequence: Synthetic oligonucleotide
uuuuaugcaauucuuggaa

SEQ ID NO: 2793144 - RNA, 19 nt, Artificial Sequence
  Description of Artificial Sequence: Synthetic oligonucleotide
agcuugugaguuuucagcc

SEQ ID NO: 2793145 - RNA, 19 nt, Artificial Sequence
  Description of Artificial Sequence: Synthetic oligonucleotide
auggcagucuaucauaaac

SEQ ID NO: 2793146 - RNA, 19 nt, Artificial Sequence
  Description of Artificial Sequence: Synthetic oligonucleotide
uuauuccacauguucaggg

SEQ ID NO: 2793147 - RNA, 19 nt, Artificial Sequence
  Description of Artificial Sequence: Synthetic oligonucleotide
uucaaaucuaucauuggcu

SEQ ID NO: 2793148 - RNA, 19 nt, Artificial Sequence
  Description of Artificial Sequence: Synthetic oligonucleotide
uuuaacaaacuuguggcag

SEQ ID NO: 2793149 - RNA, 19 nt, Artificial Sequence
  Description of Artificial Sequence: Synthetic oligonucleotide
uccugaagaacucuguaag

SEQ ID NO: 2793150 - RNA, 19 nt, Artificial Sequence
  Description of Artificial Sequence: Synthetic oligonucleotide
uuuucugucuuaacagggg

SEQ ID NO: 2793151 - RNA, 19 nt, Artificial Sequence
  Description of Artificial Sequence: Synthetic oligonucleotide
aauuuauuccacauguuca

SEQ ID NO: 2793152 - RNA, 19 nt, Artificial Sequence
  Description of Artificial Sequence: Synthetic oligonucleotide
auuuauuccacauguucag

SEQ ID NO: 2793153 - RNA, 19 nt, Artificial Sequence
  Description of Artificial Sequence: Synthetic oligonucleotide
uuaacaaacuuguggcagg

SEQ ID NO: 2793154 - RNA, 19 nt, Artificial Sequence
  Description of Artificial Sequence: Synthetic oligonucleotide
uggcagucuaucauaaacg

SEQ ID NO: 2793155 - RNA, 19 nt, Artificial Sequence
  Description of Artificial Sequence: Synthetic oligonucleotide
uuguucuguaaucuugacg

SEQ ID NO: 2793156 - RNA, 19 nt, Artificial Sequence
  Description of Artificial Sequence: Synthetic oligonucleotide
uacauauaucccauguugc

SEQ ID NO: 2793157 - RNA, 19 nt, Artificial Sequence
  Description of Artificial Sequence: Synthetic oligonucleotide
ucuaucauaaacguccuga

SEQ ID NO: 2793158 - RNA, 19 nt, Artificial Sequence
  Description of Artificial Sequence: Synthetic oligonucleotide
caauucuuggaauuuauuc

SEQ ID NO: 2793159 - RNA, 19 nt, Artificial Sequence
  Description of Artificial Sequence: Synthetic oligonucleotide
cuacauauaucccauguug

SEQ ID NO: 2793160 - RNA, 19 nt, Artificial Sequence
  Description of Artificial Sequence: Synthetic oligonucleotide
uucaacuugccuuuucugc

SEQ ID NO: 2793161 - RNA, 19 nt, Artificial Sequence
  Description of Artificial Sequence: Synthetic oligonucleotide
uaaggcuacauauauccca

SEQ ID NO: 2793162 - RNA, 19 nt, Artificial Sequence
  Description of Artificial Sequence: Synthetic oligonucleotide
ucuguaaggcuacauauau

SEQ ID NO: 2793163 - RNA, 19 nt, Artificial Sequence
  Description of Artificial Sequence: Synthetic oligonucleotide
guucaaaucuaucauuggc

SEQ ID NO: 2793164 - RNA, 19 nt, Artificial Sequence
  Description of Artificial Sequence: Synthetic oligonucleotide
aucauuggcuccaaaauac

SEQ ID NO: 2793165 - RNA, 19 nt, Artificial Sequence
  Description of Artificial Sequence: Synthetic oligonucleotide
cucucgaguagcuagcugg

SEQ ID NO: 2793166 - RNA, 19 nt, Artificial Sequence
  Description of Artificial Sequence: Synthetic oligonucleotide
ggcuuuaacaaacuugugg

SEQ ID NO: 2793167 - RNA, 19 nt, Artificial Sequence
  Description of Artificial Sequence: Synthetic oligonucleotide
caaaauacugaguaagcuc

SEQ ID NO: 2793168 - RNA, 19 nt, Artificial Sequence
  Description of Artificial Sequence: Synthetic oligonucleotide
auucuuggaauuuauucca

SEQ ID NO: 2793169 - RNA, 19 nt, Artificial Sequence
  Description of Artificial Sequence: Synthetic oligonucleotide
uccaaaauacugaguaagc

SEQ ID NO: 2793170 - RNA, 19 nt, Artificial Sequence
  Description of Artificial Sequence: Synthetic oligonucleotide
uuaguuucccaucucuucu

SEQ ID NO: 2793171 - RNA, 19 nt, Artificial Sequence
  Description of Artificial Sequence: Synthetic oligonucleotide
uauuccacauguucagggg

SEQ ID NO: 2793172 - RNA, 19 nt, Artificial Sequence
  Description of Artificial Sequence: Synthetic oligonucleotide
aaaucuaucauuggcucca

SEQ ID NO: 2793173 - RNA, 19 nt, Artificial Sequence
  Description of Artificial Sequence: Synthetic oligonucleotide
gcuuuaacaaacuuguggc

SEQ ID NO: 2793174 - RNA, 19 nt, Artificial Sequence
  Description of Artificial Sequence: Synthetic oligonucleotide
uaucauaaacguccugaag

SEQ ID NO: 2793175 - RNA, 19 nt, Artificial Sequence
  Description of Artificial Sequence: Synthetic oligonucleotide
uuucuguucagaauguuuu

SEQ ID NO: 2793176 - RNA, 19 nt, Artificial Sequence
  Description of Artificial Sequence: Synthetic oligonucleotide
ucuaucauuggcuccaaaa

SEQ ID NO: 2793177 - RNA, 19 nt, Artificial Sequence
  Description of Artificial Sequence: Synthetic oligonucleotide
guugcugagcucuucagcc

SEQ ID NO: 2793178 - RNA, 19 nt, Artificial Sequence
  Description of Artificial Sequence: Synthetic oligonucleotide
ucaaaucuaucauuggcuc

SEQ ID NO: 2793179 - RNA, 19 nt, Artificial Sequence
  Description of Artificial Sequence: Synthetic oligonucleotide
uucagccuuuucaacaucc

SEQ ID NO: 2793180 - RNA, 19 nt, Artificial Sequence
  Description of Artificial Sequence: Synthetic oligonucleotide
uuggaauuuauuccacaug

SEQ ID NO: 2793181 - RNA, 19 nt, Artificial Sequence
  Description of Artificial Sequence: Synthetic oligonucleotide
ucuguaaucuugacgcuga

SEQ ID NO: 2793182 - RNA, 19 nt, Artificial Sequence
  Description of Artificial Sequence: Synthetic oligonucleotide
ucaacuugccuuuucugca

SEQ ID NO: 2793183 - RNA, 19 nt, Artificial Sequence
  Description of Artificial Sequence: Synthetic oligonucleotide
uuuuacaccgagcucucga

SEQ ID NO: 2793184 - RNA, 19 nt, Artificial Sequence
  Description of Artificial Sequence: Synthetic oligonucleotide
uuggcuccaaaauacugag

SEQ ID NO: 2793185 - RNA, 19 nt, Artificial Sequence
  Description of Artificial Sequence: Synthetic oligonucleotide
uaucccauguugcuuuuag

SEQ ID NO: 2793186 - RNA, 19 nt, Artificial Sequence
  Description of Artificial Sequence: Synthetic oligonucleotide
uuuaguuucccaucucuuc

SEQ ID NO: 2793187 - RNA, 19 nt, Artificial Sequence
  Description of Artificial Sequence: Synthetic oligonucleotide
cucuucuuugcuucaaacc

SEQ ID NO: 2793188 - RNA, 19 nt, Artificial Sequence
  Description of Artificial Sequence: Synthetic oligonucleotide
ugaagaacucuguaaggcu

SEQ ID NO: 2793189 - RNA, 19 nt, Artificial Sequence
  Description of Artificial Sequence: Synthetic oligonucleotide
guaagcuccuuccauuggg

SEQ ID NO: 2793190 - RNA, 19 nt, Artificial Sequence
  Description of Artificial Sequence: Synthetic oligonucleotide
uuucccaucucuucuuugc

SEQ ID NO: 2793191 - RNA, 19 nt, Artificial Sequence
  Description of Artificial Sequence: Synthetic oligonucleotide
uaucauuggcuccaaaaua

SEQ ID NO: 2793192 - RNA, 19 nt, Artificial Sequence
  Description of Artificial Sequence: Synthetic oligonucleotide
auaaacguccugaagaacu

SEQ ID NO: 2793193 - RNA, 19 nt, Artificial Sequence
  Description of Artificial Sequence: Synthetic oligonucleotide
ucauaaacguccugaagaa

SEQ ID NO: 2793194 - RNA, 19 nt, Artificial Sequence
  Description of Artificial Sequence: Synthetic oligonucleotide
ucgaguagcuagcugguug

SEQ ID NO: 2793195 - RNA, 19 nt, Artificial Sequence
  Description of Artificial Sequence: Synthetic oligonucleotide
uacugaguaagcuccuucc

SEQ ID NO: 2793196 - RNA, 19 nt, Artificial Sequence
  Description of Artificial Sequence: Synthetic oligonucleotide
uuuacaccgagcucucgag

SEQ ID NO: 2793197 - RNA, 19 nt, Artificial Sequence
  Description of Artificial Sequence: Synthetic oligonucleotide
acauguucaggggaauucc

SEQ ID NO: 2793198 - RNA, 19 nt, Artificial Sequence
  Description of Artificial Sequence: Synthetic oligonucleotide
cuccaaaauacugaguaag

SEQ ID NO: 2793199 - RNA, 19 nt, Artificial Sequence
  Description of Artificial Sequence: Synthetic oligonucleotide
ugcuuuuaguuucccaucu

SEQ ID NO: 2793200 - RNA, 19 nt, Artificial Sequence
  Description of Artificial Sequence: Synthetic oligonucleotide
uuuauuccacauguucagg

SEQ ID NO: 2793201 - RNA, 19 nt, Artificial Sequence
  Description of Artificial Sequence: Synthetic oligonucleotide
cuucuuugcuucaaacccc

SEQ ID NO: 2793202 - RNA, 19 nt, Artificial Sequence
  Description of Artificial Sequence: Synthetic oligonucleotide
acucuguaaggcuacauau

SEQ ID NO: 2793203 - RNA, 19 nt, Artificial Sequence
  Description of Artificial Sequence: Synthetic oligonucleotide
aagaacucuguaaggcuac

SEQ ID NO: 2793204 - RNA, 19 nt, Artificial Sequence
  Description of Artificial Sequence: Synthetic oligonucleotide
acugcucacugugagauuc

SEQ ID NO: 2793205 - RNA, 19 nt, Artificial Sequence
  Description of Artificial Sequence: Synthetic oligonucleotide
aucccauucuuccacagcu

SEQ ID NO: 2793206 - RNA, 19 nt, Artificial Sequence
  Description of Artificial Sequence: Synthetic oligonucleotide
auacugaguaagcuccuuc

SEQ ID NO: 2793207 - RNA, 19 nt, Artificial Sequence
  Description of Artificial Sequence: Synthetic oligonucleotide
uguggcaggcaauugcuug

SEQ ID NO: 2793208 - RNA, 19 nt, Artificial Sequence
  Description of Artificial Sequence: Synthetic oligonucleotide
uauccucuuuucaaggccu

SEQ ID NO: 2793209 - RNA, 19 nt, Artificial Sequence
  Description of Artificial Sequence: Synthetic oligonucleotide
acauauaucccauguugcu

SEQ ID NO: 2793210 - RNA, 19 nt, Artificial Sequence
  Description of Artificial Sequence: Synthetic oligonucleotide
caaaucuaucauuggcucc

SEQ ID NO: 2793211 - RNA, 19 nt, Artificial Sequence
  Description of Artificial Sequence: Synthetic oligonucleotide
uuuucuguucagaauguuu

SEQ ID NO: 2793212 - RNA, 19 nt, Artificial Sequence
  Description of Artificial Sequence: Synthetic oligonucleotide
auugggugucacuugagga

SEQ ID NO: 2793213 - RNA, 19 nt, Artificial Sequence
  Description of Artificial Sequence: Synthetic oligonucleotide
ucuuuucaaggccugacuu

SEQ ID NO: 2793214 - RNA, 19 nt, Artificial Sequence
  Description of Artificial Sequence: Synthetic oligonucleotide
uuuucaaggccugacuucu

SEQ ID NO: 2793215 - RNA, 19 nt, Artificial Sequence
  Description of Artificial Sequence: Synthetic oligonucleotide
cagcuugugaguuuucagc

SEQ ID NO: 2793216 - RNA, 19 nt, Artificial Sequence
  Description of Artificial Sequence: Synthetic oligonucleotide
aaugaagcauggcagucua

SEQ ID NO: 2793217 - RNA, 19 nt, Artificial Sequence
  Description of Artificial Sequence: Synthetic oligonucleotide
cuauccucuuuucaaggcc

SEQ ID NO: 2793218 - RNA, 19 nt, Artificial Sequence
  Description of Artificial Sequence: Synthetic oligonucleotide
uuuaugcaauucuuggaau

SEQ ID NO: 2793219 - RNA, 19 nt, Artificial Sequence
  Description of Artificial Sequence: Synthetic oligonucleotide
aaaugaagcauggcagucu

SEQ ID NO: 2793220 - RNA, 19 nt, Artificial Sequence
  Description of Artificial Sequence: Synthetic oligonucleotide
ucuuggaauuuauuccaca

SEQ ID NO: 2793221 - RNA, 19 nt, Artificial Sequence
  Description of Artificial Sequence: Synthetic oligonucleotide
uugggugucacuugaggac

SEQ ID NO: 2793222 - RNA, 19 nt, Artificial Sequence
  Description of Artificial Sequence: Synthetic oligonucleotide
aacucuguaaggcuacaua

SEQ ID NO: 2793223 - RNA, 19 nt, Artificial Sequence
  Description of Artificial Sequence: Synthetic oligonucleotide
ucaacaucccauucuucca

SEQ ID NO: 2793224 - RNA, 19 nt, Artificial Sequence
  Description of Artificial Sequence: Synthetic oligonucleotide
uccauugggugucacuuga

SEQ ID NO: 2793225 - RNA, 19 nt, Artificial Sequence
  Description of Artificial Sequence: Synthetic oligonucleotide
gaguaagcuccuuccauug

SEQ ID NO: 2793226 - RNA, 19 nt, Artificial Sequence
  Description of Artificial Sequence: Synthetic oligonucleotide
aguaagcuccuuccauugg

SEQ ID NO: 2793227 - RNA, 19 nt, Artificial Sequence
  Description of Artificial Sequence: Synthetic oligonucleotide
uuaugcaauucuuggaauu

SEQ ID NO: 2793228 - RNA, 19 nt, Artificial Sequence
  Description of Artificial Sequence: Synthetic oligonucleotide
cauugggugucacuugagg

SEQ ID NO: 2793229 - RNA, 19 nt, Artificial Sequence
  Description of Artificial Sequence: Synthetic oligonucleotide
acaaacuuguggcaggcaa

SEQ ID NO: 2793230 - RNA, 19 nt, Artificial Sequence
  Description of Artificial Sequence: Synthetic oligonucleotide
aaucuugacgcugaauuuu

SEQ ID NO: 2793231 - RNA, 19 nt, Artificial Sequence
  Description of Artificial Sequence: Synthetic oligonucleotide
uuuuaguuucccaucucuu

SEQ ID NO: 2793232 - RNA, 19 nt, Artificial Sequence
  Description of Artificial Sequence: Synthetic oligonucleotide
ucucuucuuugcuucaaac

SEQ ID NO: 2793233 - RNA, 19 nt, Artificial Sequence
  Description of Artificial Sequence: Synthetic oligonucleotide
cuucuuucguagcagcuug

SEQ ID NO: 2793234 - RNA, 19 nt, Artificial Sequence
  Description of Artificial Sequence: Synthetic oligonucleotide
ucccauguugcuuuuaguu

SEQ ID NO: 2793235 - RNA, 19 nt, Artificial Sequence
  Description of Artificial Sequence: Synthetic oligonucleotide
uaaacguccugaagaacuc

SEQ ID NO: 2793236 - RNA, 19 nt, Artificial Sequence
  Description of Artificial Sequence: Synthetic oligonucleotide
cauuggcuccaaaauacug

SEQ ID NO: 2793237 - RNA, 19 nt, Artificial Sequence
  Description of Artificial Sequence: Synthetic oligonucleotide
aagcauggcagucuaucau

SEQ ID NO: 2793238 - RNA, 19 nt, Artificial Sequence
  Description of Artificial Sequence: Synthetic oligonucleotide
uucuguaaucuugacgcug

SEQ ID NO: 2793239 - RNA, 19 nt, Artificial Sequence
  Description of Artificial Sequence: Synthetic oligonucleotide
ugcaauucuuggaauuuau

SEQ ID NO: 2793240 - RNA, 19 nt, Artificial Sequence
  Description of Artificial Sequence: Synthetic oligonucleotide
guaaucuugacgcugaauu

SEQ ID NO: 2793241 - RNA, 19 nt, Artificial Sequence
  Description of Artificial Sequence: Synthetic oligonucleotide
gaggacugcucacugugag

SEQ ID NO: 2793242 - RNA, 19 nt, Artificial Sequence
  Description of Artificial Sequence: Synthetic oligonucleotide
uuucuucuucuuucguagc

SEQ ID NO: 2793243 - RNA, 19 nt, Artificial Sequence
  Description of Artificial Sequence: Synthetic oligonucleotide
ucauuggcuccaaaauacu

SEQ ID NO: 2793244 - RNA, 19 nt, Artificial Sequence
  Description of Artificial Sequence: Synthetic oligonucleotide
gguucaaaucuaucauugg

SEQ ID NO: 2793245 - RNA, 19 nt, Artificial Sequence
  Description of Artificial Sequence: Synthetic oligonucleotide
cuuuucaaggccugacuuc

SEQ ID NO: 2793246 - RNA, 19 nt, Artificial Sequence
  Description of Artificial Sequence: Synthetic oligonucleotide
auuccacauguucagggga

SEQ ID NO: 2793247 - RNA, 19 nt, Artificial Sequence
  Description of Artificial Sequence: Synthetic oligonucleotide
cauguugcuuuuaguuucc

SEQ ID NO: 2793248 - RNA, 19 nt, Artificial Sequence
  Description of Artificial Sequence: Synthetic oligonucleotide
uucuuggaauuuauuccac

SEQ ID NO: 2793249 - RNA, 19 nt, Artificial Sequence
  Description of Artificial Sequence: Synthetic oligonucleotide
uucuucuuucguagcagcu

SEQ ID NO: 2793250 - RNA, 19 nt, Artificial Sequence
  Description of Artificial Sequence: Synthetic oligonucleotide
aacaucccauucuuccaca

SEQ ID NO: 2793251 - RNA, 19 nt, Artificial Sequence
  Description of Artificial Sequence: Synthetic oligonucleotide
cuugugaguuuucagccuc

SEQ ID NO: 2793252 - RNA, 19 nt, Artificial Sequence
  Description of Artificial Sequence: Synthetic oligonucleotide
uguugcuuuuaguuuccca

SEQ ID NO: 2793253 - RNA, 19 nt, Artificial Sequence
  Description of Artificial Sequence: Synthetic oligonucleotide
uuuguucuguaaucuugac

SEQ ID NO: 2793254 - RNA, 19 nt, Artificial Sequence
  Description of Artificial Sequence: Synthetic oligonucleotide
cacagcuuggucuauccuc

SEQ ID NO: 2793255 - RNA, 19 nt, Artificial Sequence
  Description of Artificial Sequence: Synthetic oligonucleotide
ugaagcauggcagucuauc

SEQ ID NO: 2793256 - RNA, 19 nt, Artificial Sequence
  Description of Artificial Sequence: Synthetic oligonucleotide
gagcucuucagccuuuuca

SEQ ID NO: 2793257 - RNA, 19 nt, Artificial Sequence
  Description of Artificial Sequence: Synthetic oligonucleotide
guggcaggcaauugcuugg

SEQ ID NO: 2793258 - RNA, 19 nt, Artificial Sequence
  Description of Artificial Sequence: Synthetic oligonucleotide
uuuuggcuuuaacaaacuu

SEQ ID NO: 2793259 - RNA, 19 nt, Artificial Sequence
  Description of Artificial Sequence: Synthetic oligonucleotide
gaagcauggcagucuauca

SEQ ID NO: 2793260 - RNA, 19 nt, Artificial Sequence
  Description of Artificial Sequence: Synthetic oligonucleotide
auuggcuccaaaauacuga

SEQ ID NO: 2793261 - RNA, 19 nt, Artificial Sequence
  Description of Artificial Sequence: Synthetic oligonucleotide
uaaucuugacgcugaauuu

SEQ ID NO: 2793262 - RNA, 19 nt, Artificial Sequence
  Description of Artificial Sequence: Synthetic oligonucleotide
aguuucuucuucuuucgua

SEQ ID NO: 2793263 - RNA, 19 nt, Artificial Sequence
  Description of Artificial Sequence: Synthetic oligonucleotide
ugaguaagcuccuuccauu

SEQ ID NO: 2793264 - RNA, 19 nt, Artificial Sequence
  Description of Artificial Sequence: Synthetic oligonucleotide
uaagcuccuuccauugggu

SEQ ID NO: 2793265 - RNA, 19 nt, Artificial Sequence
  Description of Artificial Sequence: Synthetic oligonucleotide
guagcuagcugguugcuga

SEQ ID NO: 2793266 - RNA, 19 nt, Artificial Sequence
  Description of Artificial Sequence: Synthetic oligonucleotide
cuucaacuugccuuuucug

SEQ ID NO: 2793267 - RNA, 19 nt, Artificial Sequence
  Description of Artificial Sequence: Synthetic oligonucleotide
aagcuccuuccauugggug

SEQ ID NO: 2793268 - RNA, 19 nt, Artificial Sequence
  Description of Artificial Sequence: Synthetic oligonucleotide
uaacaaacuuguggcaggc

SEQ ID NO: 2793269 - RNA, 19 nt, Artificial Sequence
  Description of Artificial Sequence: Synthetic oligonucleotide
uugccuuuucugcagucgu

SEQ ID NO: 2793270 - RNA, 19 nt, Artificial Sequence
  Description of Artificial Sequence: Synthetic oligonucleotide
ucuuccacagcuuggucua

SEQ ID NO: 2793271 - RNA, 19 nt, Artificial Sequence
  Description of Artificial Sequence: Synthetic oligonucleotide
agcucuucagccuuuucaa

SEQ ID NO: 2793272 - RNA, 19 nt, Artificial Sequence
  Description of Artificial Sequence: Synthetic oligonucleotide
acugaguaagcuccuucca

SEQ ID NO: 2793273 - RNA, 19 nt, Artificial Sequence
  Description of Artificial Sequence: Synthetic oligonucleotide
acuugaggacugcucacug

SEQ ID NO: 2793274 - RNA, 19 nt, Artificial Sequence
  Description of Artificial Sequence: Synthetic oligonucleotide
uugcuuuuaguuucccauc

SEQ ID NO: 2793275 - RNA, 19 nt, Artificial Sequence
  Description of Artificial Sequence: Synthetic oligonucleotide
cuugccuuuucugcagucg

SEQ ID NO: 2793276 - RNA, 19 nt, Artificial Sequence
  Description of Artificial Sequence: Synthetic oligonucleotide
uugugaguuuucagccucc

SEQ ID NO: 2793277 - RNA, 19 nt, Artificial Sequence
  Description of Artificial Sequence: Synthetic oligonucleotide
uuccacauguucaggggaa

SEQ ID NO: 2793278 - RNA, 19 nt, Artificial Sequence
  Description of Artificial Sequence: Synthetic oligonucleotide
uucguagcagcuugugagu

SEQ ID NO: 2793279 - RNA, 19 nt, Artificial Sequence
  Description of Artificial Sequence: Synthetic oligonucleotide
guugcuuuuaguuucccau

SEQ ID NO: 2793280 - RNA, 19 nt, Artificial Sequence
  Description of Artificial Sequence: Synthetic oligonucleotide
caacuugccuuuucugcag

SEQ ID NO: 2793281 - RNA, 19 nt, Artificial Sequence
  Description of Artificial Sequence: Synthetic oligonucleotide
ucucgaguagcuagcuggu

SEQ ID NO: 2793282 - RNA, 19 nt, Artificial Sequence
  Description of Artificial Sequence: Synthetic oligonucleotide
acuugccuuuucugcaguc

SEQ ID NO: 2793283 - RNA, 19 nt, Artificial Sequence
  Description of Artificial Sequence: Synthetic oligonucleotide
aacuugccuuuucugcagu

SEQ ID NO: 2793284 - RNA, 19 nt, Artificial Sequence
  Description of Artificial Sequence: Synthetic oligonucleotide
uacaccgagcucucgagua

SEQ ID NO: 2793285 - RNA, 19 nt, Artificial Sequence
  Description of Artificial Sequence: Synthetic oligonucleotide
agcuccuuccauugggugu

SEQ ID NO: 2793286 - RNA, 19 nt, Artificial Sequence
  Description of Artificial Sequence: Synthetic oligonucleotide
ggguucaaaucuaucauug

SEQ ID NO: 2793287 - RNA, 19 nt, Artificial Sequence
  Description of Artificial Sequence: Synthetic oligonucleotide
aaacuuguggcaggcaauu

SEQ ID NO: 2793288 - RNA, 19 nt, Artificial Sequence
  Description of Artificial Sequence: Synthetic oligonucleotide
aaauacugaguaagcuccu

SEQ ID NO: 2793289 - RNA, 19 nt, Artificial Sequence
  Description of Artificial Sequence: Synthetic oligonucleotide
acaucccauucuuccacag

SEQ ID NO: 2793290 - RNA, 19 nt, Artificial Sequence
  Description of Artificial Sequence: Synthetic oligonucleotide
uucccaucucuucuuugcu

SEQ ID NO: 2793291 - RNA, 19 nt, Artificial Sequence
  Description of Artificial Sequence: Synthetic oligonucleotide
uuacaccgagcucucgagu

SEQ ID NO: 2793292 - RNA, 19 nt, Artificial Sequence
  Description of Artificial Sequence: Synthetic oligonucleotide
ggcuccaaaauacugagua

SEQ ID NO: 2793293 - RNA, 19 nt, Artificial Sequence
  Description of Artificial Sequence: Synthetic oligonucleotide
uggcuuuaacaaacuugug

SEQ ID NO: 2793294 - RNA, 19 nt, Artificial Sequence
  Description of Artificial Sequence: Synthetic oligonucleotide
ugaggacugcucacuguga

SEQ ID NO: 2793295 - RNA, 19 nt, Artificial Sequence
  Description of Artificial Sequence: Synthetic oligonucleotide
ucuuucguagcagcuugug

SEQ ID NO: 2793296 - RNA, 19 nt, Artificial Sequence
  Description of Artificial Sequence: Synthetic oligonucleotide
uuccauugggugucacuug

SEQ ID NO: 2793297 - RNA, 19 nt, Artificial Sequence
  Description of Artificial Sequence: Synthetic oligonucleotide
gaagaacucuguaaggcua

SEQ ID NO: 2793298 - RNA, 19 nt, Artificial Sequence
  Description of Artificial Sequence: Synthetic oligonucleotide
ccugaagaacucuguaagg

SEQ ID NO: 2793299 - RNA, 19 nt, Artificial Sequence
  Description of Artificial Sequence: Synthetic oligonucleotide
ugguugcugagcucuucag

SEQ ID NO: 2793300 - RNA, 19 nt, Artificial Sequence
  Description of Artificial Sequence: Synthetic oligonucleotide
agcauggcagucuaucaua

SEQ ID NO: 2793301 - RNA, 19 nt, Artificial Sequence
  Description of Artificial Sequence: Synthetic oligonucleotide
cuaucauaaacguccugaa

SEQ ID NO: 2793302 - RNA, 19 nt, Artificial Sequence
  Description of Artificial Sequence: Synthetic oligonucleotide
cuuggucuauccucuuuuc

SEQ ID NO: 2793303 - RNA, 19 nt, Artificial Sequence
  Description of Artificial Sequence: Synthetic oligonucleotide
ugggugucacuugaggacu

SEQ ID NO: 2793304 - RNA, 19 nt, Artificial Sequence
  Description of Artificial Sequence: Synthetic oligonucleotide
ucacuugaggacugcucac

SEQ ID NO: 2793305 - RNA, 19 nt, Artificial Sequence
  Description of Artificial Sequence: Synthetic oligonucleotide
cuguaaggcuacauauauc

SEQ ID NO: 2793306 - RNA, 19 nt, Artificial Sequence
  Description of Artificial Sequence: Synthetic oligonucleotide
guaaggcuacauauauccc

SEQ ID NO: 2793307 - RNA, 19 nt, Artificial Sequence
  Description of Artificial Sequence: Synthetic oligonucleotide
ccauguugcuuuuaguuuc

SEQ ID NO: 2793308 - RNA, 19 nt, Artificial Sequence
  Description of Artificial Sequence: Synthetic oligonucleotide
ccaguuucuucuucuuucg

SEQ ID NO: 2793309 - RNA, 19 nt, Artificial Sequence
  Description of Artificial Sequence: Synthetic oligonucleotide
aggccugacuucucuaacu

SEQ ID NO: 2793310 - RNA, 19 nt, Artificial Sequence
  Description of Artificial Sequence: Synthetic oligonucleotide
acaccgagcucucgaguag

SEQ ID NO: 2793311 - RNA, 19 nt, Artificial Sequence
  Description of Artificial Sequence: Synthetic oligonucleotide
aauacugaguaagcuccuu

SEQ ID NO: 2793312 - RNA, 19 nt, Artificial Sequence
  Description of Artificial Sequence: Synthetic oligonucleotide
acagcuuggucuauccucu

SEQ ID NO: 2793313 - RNA, 19 nt, Artificial Sequence
  Description of Artificial Sequence: Synthetic oligonucleotide
cuuuuaguuucccaucucu

SEQ ID NO: 2793314 - RNA, 19 nt, Artificial Sequence
  Description of Artificial Sequence: Synthetic oligonucleotide
caucccauucuuccacagc

SEQ ID NO: 2793315 - RNA, 19 nt, Artificial Sequence
  Description of Artificial Sequence: Synthetic oligonucleotide
cauaaacguccugaagaac

SEQ ID NO: 2793316 - RNA, 19 nt, Artificial Sequence
  Description of Artificial Sequence: Synthetic oligonucleotide
ucuucuuucguagcagcuu

SEQ ID NO: 2793317 - RNA, 19 nt, Artificial Sequence
  Description of Artificial Sequence: Synthetic oligonucleotide
cacauguucaggggaauuc

SEQ ID NO: 2793318 - RNA, 19 nt, Artificial Sequence
  Description of Artificial Sequence: Synthetic oligonucleotide
aacuuguggcaggcaauug

SEQ ID NO: 2793319 - RNA, 19 nt, Artificial Sequence
  Description of Artificial Sequence: Synthetic oligonucleotide
uucuuucguagcagcuugu

SEQ ID NO: 2793320 - RNA, 19 nt, Artificial Sequence
  Description of Artificial Sequence: Synthetic oligonucleotide
auguugcuuuuaguuuccc

SEQ ID NO: 2793321 - RNA, 19 nt, Artificial Sequence
  Description of Artificial Sequence: Synthetic oligonucleotide
uguaaucuugacgcugaau

SEQ ID NO: 2793322 - RNA, 19 nt, Artificial Sequence
  Description of Artificial Sequence: Synthetic oligonucleotide
auguucaggggaauuccag

SEQ ID NO: 2793323 - RNA, 19 nt, Artificial Sequence
  Description of Artificial Sequence: Synthetic oligonucleotide
gguugcugagcucuucagc

SEQ ID NO: 2793324 - RNA, 19 nt, Artificial Sequence
  Description of Artificial Sequence: Synthetic oligonucleotide
agccuuuucaacaucccau

SEQ ID NO: 2793325 - RNA, 19 nt, Artificial Sequence
  Description of Artificial Sequence: Synthetic oligonucleotide
cuuggaauuuauuccacau

SEQ ID NO: 2793326 - RNA, 19 nt, Artificial Sequence
  Description of Artificial Sequence: Synthetic oligonucleotide
uggcaggcaauugcuuggg

SEQ ID NO: 2793327 - RNA, 19 nt, Artificial Sequence
  Description of Artificial Sequence: Synthetic oligonucleotide
aacaaacuuguggcaggca

SEQ ID NO: 2793328 - RNA, 19 nt, Artificial Sequence
  Description of Artificial Sequence: Synthetic oligonucleotide
cuaucauuggcuccaaaau

SEQ ID NO: 2793329 - RNA, 19 nt, Artificial Sequence
  Description of Artificial Sequence: Synthetic oligonucleotide
agcuagcugguugcugagc

SEQ ID NO: 2793330 - RNA, 19 nt, Artificial Sequence
  Description of Artificial Sequence: Synthetic oligonucleotide
uagcuagcugguugcugag

SEQ ID NO: 2793331 - RNA, 19 nt, Artificial Sequence
  Description of Artificial Sequence: Synthetic oligonucleotide
ugcugagcucuucagccuu

SEQ ID NO: 2793332 - RNA, 19 nt, Artificial Sequence
  Description of Artificial Sequence: Synthetic oligonucleotide
caggcaauugcuugggcaa

SEQ ID NO: 2793333 - RNA, 19 nt, Artificial Sequence
  Description of Artificial Sequence: Synthetic oligonucleotide
cuuucguagcagcuuguga

SEQ ID NO: 2793334 - RNA, 19 nt, Artificial Sequence
  Description of Artificial Sequence: Synthetic oligonucleotide
aguagcuagcugguugcug

SEQ ID NO: 2793335 - RNA, 19 nt, Artificial Sequence
  Description of Artificial Sequence: Synthetic oligonucleotide
gcagcuugugaguuuucag

SEQ ID NO: 2793336 - RNA, 19 nt, Artificial Sequence
  Description of Artificial Sequence: Synthetic oligonucleotide
ugugaguuuucagccuccu

SEQ ID NO: 2793337 - RNA, 19 nt, Artificial Sequence
  Description of Artificial Sequence: Synthetic oligonucleotide
aucccauguugcuuuuagu

SEQ ID NO: 2793338 - RNA, 19 nt, Artificial Sequence
  Description of Artificial Sequence: Synthetic oligonucleotide
gucuaucauaaacguccug

SEQ ID NO: 2793339 - RNA, 19 nt, Artificial Sequence
  Description of Artificial Sequence: Synthetic oligonucleotide
aucucuucuuugcuucaaa

SEQ ID NO: 2793340 - RNA, 19 nt, Artificial Sequence
  Description of Artificial Sequence: Synthetic oligonucleotide
uggcuccaaaauacugagu

SEQ ID NO: 2793341 - RNA, 19 nt, Artificial Sequence
  Description of Artificial Sequence: Synthetic oligonucleotide
uaguuucccaucucuucuu

SEQ ID NO: 2793342 - RNA, 19 nt, Artificial Sequence
  Description of Artificial Sequence: Synthetic oligonucleotide
agucuaucauaaacguccu

SEQ ID NO: 2793343 - RNA, 19 nt, Artificial Sequence
  Description of Artificial Sequence: Synthetic oligonucleotide
aggacugcucacugugaga

SEQ ID NO: 2793344 - RNA, 19 nt, Artificial Sequence
  Description of Artificial Sequence: Synthetic oligonucleotide
ucaaggccugacuucucua

SEQ ID NO: 2793345 - RNA, 19 nt, Artificial Sequence
  Description of Artificial Sequence: Synthetic oligonucleotide
uuucaaggccugacuucuc

SEQ ID NO: 2793346 - RNA, 19 nt, Artificial Sequence
  Description of Artificial Sequence: Synthetic oligonucleotide
aguuucccaucucuucuuu

SEQ ID NO: 2793347 - RNA, 19 nt, Artificial Sequence
  Description of Artificial Sequence: Synthetic oligonucleotide
cuuguggcaggcaauugcu

SEQ ID NO: 2793348 - RNA, 19 nt, Artificial Sequence
  Description of Artificial Sequence: Synthetic oligonucleotide
ccauucuuccacagcuugg

SEQ ID NO: 2793349 - RNA, 19 nt, Artificial Sequence
  Description of Artificial Sequence: Synthetic oligonucleotide
uauaucccauguugcuuuu

SEQ ID NO: 2793350 - RNA, 19 nt, Artificial Sequence
  Description of Artificial Sequence: Synthetic oligonucleotide
ucccaucucuucuuugcuu

SEQ ID NO: 2793351 - RNA, 19 nt, Artificial Sequence
  Description of Artificial Sequence: Synthetic oligonucleotide
cucuguaaggcuacauaua

SEQ ID NO: 2793352 - RNA, 19 nt, Artificial Sequence
  Description of Artificial Sequence: Synthetic oligonucleotide
cauucuucaacuugccuuu

SEQ ID NO: 2793353 - RNA, 19 nt, Artificial Sequence
  Description of Artificial Sequence: Synthetic oligonucleotide
gagcucucgaguagcuagc

SEQ ID NO: 2793354 - RNA, 19 nt, Artificial Sequence
  Description of Artificial Sequence: Synthetic oligonucleotide
cgagcucucgaguagcuag

SEQ ID NO: 2793355 - RNA, 19 nt, Artificial Sequence
  Description of Artificial Sequence: Synthetic oligonucleotide
gcaggcaauugcuugggca

SEQ ID NO: 2793356 - RNA, 19 nt, Artificial Sequence
  Description of Artificial Sequence: Synthetic oligonucleotide
ggcagucuaucauaaacgu

SEQ ID NO: 2793357 - RNA, 19 nt, Artificial Sequence
  Description of Artificial Sequence: Synthetic oligonucleotide
uuguggcaggcaauugcuu

SEQ ID NO: 2793358 - RNA, 19 nt, Artificial Sequence
  Description of Artificial Sequence: Synthetic oligonucleotide
uccucuuuucaaggccuga

SEQ ID NO: 2793359 - RNA, 19 nt, Artificial Sequence
  Description of Artificial Sequence: Synthetic oligonucleotide
aaucuaucauuggcuccaa

SEQ ID NO: 2793360 - RNA, 19 nt, Artificial Sequence
  Description of Artificial Sequence: Synthetic oligonucleotide
cuucagccuuuucaacauc

SEQ ID NO: 2793361 - RNA, 19 nt, Artificial Sequence
  Description of Artificial Sequence: Synthetic oligonucleotide
cagccuuuucaacauccca

SEQ ID NO: 2793362 - RNA, 19 nt, Artificial Sequence
  Description of Artificial Sequence: Synthetic oligonucleotide
caaggccugacuucucuaa

SEQ ID NO: 2793363 - RNA, 19 nt, Artificial Sequence
  Description of Artificial Sequence: Synthetic oligonucleotide
cccaucucuucuuugcuuc

SEQ ID NO: 2793364 - RNA, 19 nt, Artificial Sequence
  Description of Artificial Sequence: Synthetic oligonucleotide
ucccauucuuccacagcuu

SEQ ID NO: 2793365 - RNA, 19 nt, Artificial Sequence
  Description of Artificial Sequence: Synthetic oligonucleotide
ggcuacauauaucccaugu

SEQ ID NO: 2793366 - RNA, 19 nt, Artificial Sequence
  Description of Artificial Sequence: Synthetic oligonucleotide
ugccuuuucugcagucguu

SEQ ID NO: 2793367 - RNA, 19 nt, Artificial Sequence
  Description of Artificial Sequence: Synthetic oligonucleotide
cgaguagcuagcugguugc

SEQ ID NO: 2793368 - RNA, 19 nt, Artificial Sequence
  Description of Artificial Sequence: Synthetic oligonucleotide
cccauucuuccacagcuug

SEQ ID NO: 2793369 - RNA, 19 nt, Artificial Sequence
  Description of Artificial Sequence: Synthetic oligonucleotide
agcuuggucuauccucuuu

SEQ ID NO: 2793370 - RNA, 19 nt, Artificial Sequence
  Description of Artificial Sequence: Synthetic oligonucleotide
agaacucuguaaggcuaca

SEQ ID NO: 2793371 - RNA, 19 nt, Artificial Sequence
  Description of Artificial Sequence: Synthetic oligonucleotide
ucguagcagcuugugaguu

SEQ ID NO: 2793372 - RNA, 19 nt, Artificial Sequence
  Description of Artificial Sequence: Synthetic oligonucleotide
caccgagcucucgaguagc

SEQ ID NO: 2793373 - RNA, 19 nt, Artificial Sequence
  Description of Artificial Sequence: Synthetic oligonucleotide
aucuaucauuggcuccaaa

SEQ ID NO: 2793374 - RNA, 19 nt, Artificial Sequence
  Description of Artificial Sequence: Synthetic oligonucleotide
uccacauguucaggggaau

SEQ ID NO: 2793375 - RNA, 19 nt, Artificial Sequence
  Description of Artificial Sequence: Synthetic oligonucleotide
ccuuuucaacaucccauuc

SEQ ID NO: 2793376 - RNA, 19 nt, Artificial Sequence
  Description of Artificial Sequence: Synthetic oligonucleotide
cauucuuccacagcuuggu

SEQ ID NO: 2793377 - RNA, 19 nt, Artificial Sequence
  Description of Artificial Sequence: Synthetic oligonucleotide
cucuuuucaaggccugacu

SEQ ID NO: 2793378 - RNA, 19 nt, Artificial Sequence
  Description of Artificial Sequence: Synthetic oligonucleotide
agcucucgaguagcuagcu

SEQ ID NO: 2793379 - RNA, 19 nt, Artificial Sequence
  Description of Artificial Sequence: Synthetic oligonucleotide
acguccugaagaacucugu

SEQ ID NO: 2793380 - RNA, 19 nt, Artificial Sequence
  Description of Artificial Sequence: Synthetic oligonucleotide
gcucuucagccuuuucaac

SEQ ID NO: 2793381 - RNA, 19 nt, Artificial Sequence
  Description of Artificial Sequence: Synthetic oligonucleotide
gcuuuuaguuucccaucuc

SEQ ID NO: 2793382 - RNA, 19 nt, Artificial Sequence
  Description of Artificial Sequence: Synthetic oligonucleotide
guucuguaaucuugacgcu

SEQ ID NO: 2793383 - RNA, 19 nt, Artificial Sequence
  Description of Artificial Sequence: Synthetic oligonucleotide
auccucuuuucaaggccug

SEQ ID NO: 2793384 - RNA, 19 nt, Artificial Sequence
  Description of Artificial Sequence: Synthetic oligonucleotide
gcuccaaaauacugaguaa

SEQ ID NO: 2793385 - RNA, 19 nt, Artificial Sequence
  Description of Artificial Sequence: Synthetic oligonucleotide
uuccacagcuuggucuauc

SEQ ID NO: 2793386 - RNA, 19 nt, Artificial Sequence
  Description of Artificial Sequence: Synthetic oligonucleotide
caaacuuguggcaggcaau

SEQ ID NO: 2793387 - RNA, 19 nt, Artificial Sequence
  Description of Artificial Sequence: Synthetic oligonucleotide
cuuccauugggugucacuu

SEQ ID NO: 2793388 - RNA, 19 nt, Artificial Sequence
  Description of Artificial Sequence: Synthetic oligonucleotide
cuugaggacugcucacugu

SEQ ID NO: 2793389 - RNA, 19 nt, Artificial Sequence
  Description of Artificial Sequence: Synthetic oligonucleotide
gcagucuaucauaaacguc

SEQ ID NO: 2793390 - RNA, 19 nt, Artificial Sequence
  Description of Artificial Sequence: Synthetic oligonucleotide
cauggcagucuaucauaaa

SEQ ID NO: 2793391 - RNA, 19 nt, Artificial Sequence
  Description of Artificial Sequence: Synthetic oligonucleotide
cauauaucccauguugcuu

SEQ ID NO: 2793392 - RNA, 19 nt, Artificial Sequence
  Description of Artificial Sequence: Synthetic oligonucleotide
ugcucacugugagauucuu

SEQ ID NO: 2793393 - RNA, 19 nt, Artificial Sequence
  Description of Artificial Sequence: Synthetic oligonucleotide
cacgccaguuucuucuucu

SEQ ID NO: 2793394 - RNA, 19 nt, Artificial Sequence
  Description of Artificial Sequence: Synthetic oligonucleotide
acgccaguuucuucuucuu

SEQ ID NO: 2793395 - RNA, 19 nt, Artificial Sequence
  Description of Artificial Sequence: Synthetic oligonucleotide
gcuccuuccauuggguguc

SEQ ID NO: 2793396 - RNA, 19 nt, Artificial Sequence
  Description of Artificial Sequence: Synthetic oligonucleotide
aggcaauugcuugggcaau

SEQ ID NO: 2793397 - RNA, 19 nt, Artificial Sequence
  Description of Artificial Sequence: Synthetic oligonucleotide
ccaaaauacugaguaagcu

SEQ ID NO: 2793398 - RNA, 19 nt, Artificial Sequence
  Description of Artificial Sequence: Synthetic oligonucleotide
ccauugggugucacuugag

SEQ ID NO: 2793399 - RNA, 19 nt, Artificial Sequence
  Description of Artificial Sequence: Synthetic oligonucleotide
gcucucgaguagcuagcug

SEQ ID NO: 2793400 - RNA, 19 nt, Artificial Sequence
  Description of Artificial Sequence: Synthetic oligonucleotide
guagcagcuugugaguuuu

SEQ ID NO: 2793401 - RNA, 19 nt, Artificial Sequence
  Description of Artificial Sequence: Synthetic oligonucleotide
ggcaggcaauugcuugggc

SEQ ID NO: 2793402 - RNA, 19 nt, Artificial Sequence
  Description of Artificial Sequence: Synthetic oligonucleotide
ggacugcucacugugagau

SEQ ID NO: 2793403 - RNA, 19 nt, Artificial Sequence
  Description of Artificial Sequence: Synthetic oligonucleotide
gcuacauauaucccauguu

SEQ ID NO: 2793404 - RNA, 19 nt, Artificial Sequence
  Description of Artificial Sequence: Synthetic oligonucleotide
gaacucuguaaggcuacau

SEQ ID NO: 2793405 - RNA, 19 nt, Artificial Sequence
  Description of Artificial Sequence: Synthetic oligonucleotide
gggguucaaaucuaucauu

SEQ ID NO: 2793406 - RNA, 19 nt, Artificial Sequence
  Description of Artificial Sequence: Synthetic oligonucleotide
gcuugugaguuuucagccu

SEQ ID NO: 2793407 - RNA, 19 nt, Artificial Sequence
  Description of Artificial Sequence: Synthetic oligonucleotide
uccuuccauugggugucac

SEQ ID NO: 2793408 - RNA, 19 nt, Artificial Sequence
  Description of Artificial Sequence: Synthetic oligonucleotide
ccugacuucucuaacuuuu

SEQ ID NO: 2793409 - RNA, 19 nt, Artificial Sequence
  Description of Artificial Sequence: Synthetic oligonucleotide
accgagcucucgaguagcu

SEQ ID NO: 2793410 - RNA, 19 nt, Artificial Sequence
  Description of Artificial Sequence: Synthetic oligonucleotide
cuguaaucuugacgcugaa

SEQ ID NO: 2793411 - RNA, 19 nt, Artificial Sequence
  Description of Artificial Sequence: Synthetic oligonucleotide
caucucuucuuugcuucaa

SEQ ID NO: 2793412 - RNA, 19 nt, Artificial Sequence
  Description of Artificial Sequence: Synthetic oligonucleotide
gcauggcagucuaucauaa

SEQ ID NO: 2793413 - RNA, 19 nt, Artificial Sequence
  Description of Artificial Sequence: Synthetic oligonucleotide
gcuuggucuauccucuuuu

SEQ ID NO: 2793414 - RNA, 19 nt, Artificial Sequence
  Description of Artificial Sequence: Synthetic oligonucleotide
augaagcauggcagucuau

SEQ ID NO: 2793415 - RNA, 19 nt, Artificial Sequence
  Description of Artificial Sequence: Synthetic oligonucleotide
cacuugaggacugcucacu

SEQ ID NO: 2793416 - RNA, 19 nt, Artificial Sequence
  Description of Artificial Sequence: Synthetic oligonucleotide
gaguagcuagcugguugcu

SEQ ID NO: 2793417 - RNA, 19 nt, Artificial Sequence
  Description of Artificial Sequence: Synthetic oligonucleotide
ggaauuuauuccacauguu

SEQ ID NO: 2793418 - RNA, 19 nt, Artificial Sequence
  Description of Artificial Sequence: Synthetic oligonucleotide
caauugcuugggcaauuuu

SEQ ID NO: 2793419 - RNA, 19 nt, Artificial Sequence
  Description of Artificial Sequence: Synthetic oligonucleotide
ggccugacuucucuaacuu

SEQ ID NO: 2793420 - RNA, 19 nt, Artificial Sequence
  Description of Artificial Sequence: Synthetic oligonucleotide
cccauguugcuuuuaguuu

SEQ ID NO: 2793421 - RNA, 19 nt, Artificial Sequence
  Description of Artificial Sequence: Synthetic oligonucleotide
cugcucacugugagauucu

SEQ ID NO: 2793422 - RNA, 19 nt, Artificial Sequence
  Description of Artificial Sequence: Synthetic oligonucleotide
gugaguuuucagccuccuu

SEQ ID NO: 2793423 - RNA, 19 nt, Artificial Sequence
  Description of Artificial Sequence: Synthetic oligonucleotide
gcaauucuuggaauuuauu

SEQ ID NO: 2793424 - RNA, 19 nt, Artificial Sequence
  Description of Artificial Sequence: Synthetic oligonucleotide
ccacgccaguuucuucuuc

SEQ ID NO: 2793425 - RNA, 19 nt, Artificial Sequence
  Description of Artificial Sequence: Synthetic oligonucleotide
cguccugaagaacucugua

SEQ ID NO: 2793426 - RNA, 19 nt, Artificial Sequence
  Description of Artificial Sequence: Synthetic oligonucleotide
ccuuccauugggugucacu

SEQ ID NO: 2793427 - RNA, 19 nt, Artificial Sequence
  Description of Artificial Sequence: Synthetic oligonucleotide
agcugguugcugagcucuu

SEQ ID NO: 2793428 - RNA, 19 nt, Artificial Sequence
  Description of Artificial Sequence: Synthetic oligonucleotide
gccuuuucugcagucguuu

SEQ ID NO: 2793429 - RNA, 19 nt, Artificial Sequence
  Description of Artificial Sequence: Synthetic oligonucleotide
cuccuuccauuggguguca

SEQ ID NO: 2793430 - RNA, 19 nt, Artificial Sequence
  Description of Artificial Sequence: Synthetic oligonucleotide
gccugacuucucuaacuuu

SEQ ID NO: 2793431 - RNA, 19 nt, Artificial Sequence
  Description of Artificial Sequence: Synthetic oligonucleotide
gcaauugcuugggcaauuu

SEQ ID NO: 2793432 - RNA, 19 nt, Artificial Sequence
  Description of Artificial Sequence: Synthetic oligonucleotide
ggcaauugcuugggcaauu

SEQ ID NO: 2793433 - RNA, 19 nt, Artificial Sequence
  Description of Artificial Sequence: Synthetic oligonucleotide
ccuuuucugcagucguuuu

SEQ ID NO: 2793434 - RNA, 19 nt, Artificial Sequence
  Description of Artificial Sequence: Synthetic oligonucleotide
cucgaguagcuagcugguu

SEQ ID NO: 2793435 - RNA, 19 nt, Artificial Sequence
  Description of Artificial Sequence: Synthetic oligonucleotide
ccacagcuuggucuauccu

SEQ ID NO: 2793436 - RNA, 19 nt, Artificial Sequence
  Description of Artificial Sequence: Synthetic oligonucleotide
gcucacugugagauucuuu

SEQ ID NO: 2793437 - RNA, 19 nt, Artificial Sequence
  Description of Artificial Sequence: Synthetic oligonucleotide
cagcuuggucuauccucuu

SEQ ID NO: 2793438 - RNA, 19 nt, Artificial Sequence
  Description of Artificial Sequence: Synthetic oligonucleotide
cuuccacagcuuggucuau

SEQ ID NO: 2793439 - RNA, 19 nt, Artificial Sequence
  Description of Artificial Sequence: Synthetic oligonucleotide
cguagcagcuugugaguuu

SEQ ID NO: 2793440 - RNA, 19 nt, Artificial Sequence
  Description of Artificial Sequence: Synthetic oligonucleotide
ccacauguucaggggaauu

SEQ ID NO: 2793441 - RNA, 19 nt, Artificial Sequence
  Description of Artificial Sequence: Synthetic oligonucleotide
ccgagcucucgaguagcua

SEQ ID NO: 2793442 - RNA, 19 nt, Artificial Sequence
  Description of Artificial Sequence: Synthetic oligonucleotide
cccacgccaguuucuucuu

SEQ ID NO: 2793443 - RNA, 19 nt, Artificial Sequence
  Description of Artificial Sequence: Synthetic oligonucleotide
gauacugagagucaggaag

SEQ ID NO: 2793444 - RNA, 19 nt, Artificial Sequence
  Description of Artificial Sequence: Synthetic oligonucleotide
uuugucaaugacccgaacg

SEQ ID NO: 2793445 - RNA, 19 nt, Artificial Sequence
  Description of Artificial Sequence: Synthetic oligonucleotide
uauaguaaagugcuggccc

SEQ ID NO: 2793446 - RNA, 19 nt, Artificial Sequence
  Description of Artificial Sequence: Synthetic oligonucleotide
ucucacgugagauaguugg

SEQ ID NO: 2793447 - RNA, 19 nt, Artificial Sequence
  Description of Artificial Sequence: Synthetic oligonucleotide
caucuuauaaagcugcacg

SEQ ID NO: 2793448 - RNA, 19 nt, Artificial Sequence
  Description of Artificial Sequence: Synthetic oligonucleotide
aagugcuggcccuucaugc

SEQ ID NO: 2793449 - RNA, 19 nt, Artificial Sequence
  Description of Artificial Sequence: Synthetic oligonucleotide
uguaguaucggucaaggau

SEQ ID NO: 2793450 - RNA, 19 nt, Artificial Sequence
  Description of Artificial Sequence: Synthetic oligonucleotide
agcucauccagacacuucc

SEQ ID NO: 2793451 - RNA, 19 nt, Artificial Sequence
  Description of Artificial Sequence: Synthetic oligonucleotide
uugucaaugacccgaacgc

SEQ ID NO: 2793452 - RNA, 19 nt, Artificial Sequence
  Description of Artificial Sequence: Synthetic oligonucleotide
aggacgagauguuaggagc

SEQ ID NO: 2793453 - RNA, 19 nt, Artificial Sequence
  Description of Artificial Sequence: Synthetic oligonucleotide
gacgugugaaauuagcugc

SEQ ID NO: 2793454 - RNA, 19 nt, Artificial Sequence
  Description of Artificial Sequence: Synthetic oligonucleotide
augaauaggaggaaggacg

SEQ ID NO: 2793455 - RNA, 19 nt, Artificial Sequence
  Description of Artificial Sequence: Synthetic oligonucleotide
aguccauauaguaaagugc

SEQ ID NO: 2793456 - RNA, 19 nt, Artificial Sequence
  Description of Artificial Sequence: Synthetic oligonucleotide
aauuaaggagccuaucaaa

SEQ ID NO: 2793457 - RNA, 19 nt, Artificial Sequence
  Description of Artificial Sequence: Synthetic oligonucleotide
uuaggagcccuucuuagag

SEQ ID NO: 2793458 - RNA, 19 nt, Artificial Sequence
  Description of Artificial Sequence: Synthetic oligonucleotide
uccguagacagucagccag

SEQ ID NO: 2793459 - RNA, 19 nt, Artificial Sequence
  Description of Artificial Sequence: Synthetic oligonucleotide
uaguccauauaguaaagug

SEQ ID NO: 2793460 - RNA, 19 nt, Artificial Sequence
  Description of Artificial Sequence: Synthetic oligonucleotide
gaaggugauguuuuccagg

SEQ ID NO: 2793461 - RNA, 19 nt, Artificial Sequence
  Description of Artificial Sequence: Synthetic oligonucleotide
agaauuaaggagccuauca

SEQ ID NO: 2793462 - RNA, 19 nt, Artificial Sequence
  Description of Artificial Sequence: Synthetic oligonucleotide
uuuuccagguuauggaugc

SEQ ID NO: 2793463 - RNA, 19 nt, Artificial Sequence
  Description of Artificial Sequence: Synthetic oligonucleotide
ugccagguaguccauauag

SEQ ID NO: 2793464 - RNA, 19 nt, Artificial Sequence
  Description of Artificial Sequence: Synthetic oligonucleotide
aaggacgagauguuaggag

SEQ ID NO: 2793465 - RNA, 19 nt, Artificial Sequence
  Description of Artificial Sequence: Synthetic oligonucleotide
uacccugaugaauaggagg

SEQ ID NO: 2793466 - RNA, 19 nt, Artificial Sequence
  Description of Artificial Sequence: Synthetic oligonucleotide
uagacagucagccagguuu

SEQ ID NO: 2793467 - RNA, 19 nt, Artificial Sequence
  Description of Artificial Sequence: Synthetic oligonucleotide
cauuccgcaucuuauaaag

SEQ ID NO: 2793468 - RNA, 19 nt, Artificial Sequence
  Description of Artificial Sequence: Synthetic oligonucleotide
aaaagaauuaaggagccua

SEQ ID NO: 2793469 - RNA, 19 nt, Artificial Sequence
  Description of Artificial Sequence: Synthetic oligonucleotide
uacucugcaaacuguacag

SEQ ID NO: 2793470 - RNA, 19 nt, Artificial Sequence
  Description of Artificial Sequence: Synthetic oligonucleotide
acaauucguauccauuccg

SEQ ID NO: 2793471 - RNA, 19 nt, Artificial Sequence
  Description of Artificial Sequence: Synthetic oligonucleotide
ugaaauuagcugcugcugu

SEQ ID NO: 2793472 - RNA, 19 nt, Artificial Sequence
  Description of Artificial Sequence: Synthetic oligonucleotide
aauuagcugcugcuguggg

SEQ ID NO: 2793473 - RNA, 19 nt, Artificial Sequence
  Description of Artificial Sequence: Synthetic oligonucleotide
ucuggauauacucugcaaa

SEQ ID NO: 2793474 - RNA, 19 nt, Artificial Sequence
  Description of Artificial Sequence: Synthetic oligonucleotide
auauaguaaagugcuggcc

SEQ ID NO: 2793475 - RNA, 19 nt, Artificial Sequence
  Description of Artificial Sequence: Synthetic oligonucleotide
auaguugguguguaguauc

SEQ ID NO: 2793476 - RNA, 19 nt, Artificial Sequence
  Description of Artificial Sequence: Synthetic oligonucleotide
aaggcugccagguagucca

SEQ ID NO: 2793477 - RNA, 19 nt, Artificial Sequence
  Description of Artificial Sequence: Synthetic oligonucleotide
aaggugauguuuuccaggu

SEQ ID NO: 2793478 - RNA, 19 nt, Artificial Sequence
  Description of Artificial Sequence: Synthetic oligonucleotide
cugaugaauaggaggaagg

SEQ ID NO: 2793479 - RNA, 19 nt, Artificial Sequence
  Description of Artificial Sequence: Synthetic oligonucleotide
gaugaagcgcuucuggagc

SEQ ID NO: 2793480 - RNA, 19 nt, Artificial Sequence
  Description of Artificial Sequence: Synthetic oligonucleotide
aagguaggcagguucaaga

SEQ ID NO: 2793481 - RNA, 19 nt, Artificial Sequence
  Description of Artificial Sequence: Synthetic oligonucleotide
uuauaaagcugcacguucu

SEQ ID NO: 2793482 - RNA, 19 nt, Artificial Sequence
  Description of Artificial Sequence: Synthetic oligonucleotide
acuccguagacagucagcc

SEQ ID NO: 2793483 - RNA, 19 nt, Artificial Sequence
  Description of Artificial Sequence: Synthetic oligonucleotide
augauaugggguccgacuc

SEQ ID NO: 2793484 - RNA, 19 nt, Artificial Sequence
  Description of Artificial Sequence: Synthetic oligonucleotide
ugugaaauuagcugcugcu

SEQ ID NO: 2793485 - RNA, 19 nt, Artificial Sequence
  Description of Artificial Sequence: Synthetic oligonucleotide
uguguaguaucggucaagg

SEQ ID NO: 2793486 - RNA, 19 nt, Artificial Sequence
  Description of Artificial Sequence: Synthetic oligonucleotide
aaaguacccugaugaauag

SEQ ID NO: 2793487 - RNA, 19 nt, Artificial Sequence
  Description of Artificial Sequence: Synthetic oligonucleotide
cuucaugcucaucauagcc

SEQ ID NO: 2793488 - RNA, 19 nt, Artificial Sequence
  Description of Artificial Sequence: Synthetic oligonucleotide
uaguugguguguaguaucg

SEQ ID NO: 2793489 - RNA, 19 nt, Artificial Sequence
  Description of Artificial Sequence: Synthetic oligonucleotide
ugaauaggaggaaggacga

SEQ ID NO: 2793490 - RNA, 19 nt, Artificial Sequence
  Description of Artificial Sequence: Synthetic oligonucleotide
cauauaguaaagugcuggc

SEQ ID NO: 2793491 - RNA, 19 nt, Artificial Sequence
  Description of Artificial Sequence: Synthetic oligonucleotide
aaaaguacccugaugaaua

SEQ ID NO: 2793492 - RNA, 19 nt, Artificial Sequence
  Description of Artificial Sequence: Synthetic oligonucleotide
uucaugcucaucauagcca

SEQ ID NO: 2793493 - RNA, 19 nt, Artificial Sequence
  Description of Artificial Sequence: Synthetic oligonucleotide
aaauuagcugcugcugugg

SEQ ID NO: 2793494 - RNA, 19 nt, Artificial Sequence
  Description of Artificial Sequence: Synthetic oligonucleotide
aacacauaggaguaagauu

SEQ ID NO: 2793495 - RNA, 19 nt, Artificial Sequence
  Description of Artificial Sequence: Synthetic oligonucleotide
aauucguauccauuccgca

SEQ ID NO: 2793496 - RNA, 19 nt, Artificial Sequence
  Description of Artificial Sequence: Synthetic oligonucleotide
uuccgcaucuuauaaagcu

SEQ ID NO: 2793497 - RNA, 19 nt, Artificial Sequence
  Description of Artificial Sequence: Synthetic oligonucleotide
agguucacaugauaugggg

SEQ ID NO: 2793498 - RNA, 19 nt, Artificial Sequence
  Description of Artificial Sequence: Synthetic oligonucleotide
aauaggaggaaggacgaga

SEQ ID NO: 2793499 - RNA, 19 nt, Artificial Sequence
  Description of Artificial Sequence: Synthetic oligonucleotide
uucuucuggauauacucug

SEQ ID NO: 2793500 - RNA, 19 nt, Artificial Sequence
  Description of Artificial Sequence: Synthetic oligonucleotide
cugagagucaggaaggcac

SEQ ID NO: 2793501 - RNA, 19 nt, Artificial Sequence
  Description of Artificial Sequence: Synthetic oligonucleotide
uucuuagagaaggugaugu

SEQ ID NO: 2793502 - RNA, 19 nt, Artificial Sequence
  Description of Artificial Sequence: Synthetic oligonucleotide
cuuauaaagcugcacguuc

SEQ ID NO: 2793503 - RNA, 19 nt, Artificial Sequence
  Description of Artificial Sequence: Synthetic oligonucleotide
aagaugaagcgcuucugga

SEQ ID NO: 2793504 - RNA, 19 nt, Artificial Sequence
  Description of Artificial Sequence: Synthetic oligonucleotide
augcucaucauagccagcc

SEQ ID NO: 2793505 - RNA, 19 nt, Artificial Sequence
  Description of Artificial Sequence: Synthetic oligonucleotide
gaacgcugaagguaggcag

SEQ ID NO: 2793506 - RNA, 19 nt, Artificial Sequence
  Description of Artificial Sequence: Synthetic oligonucleotide
uuagagaaggugauguuuu

SEQ ID NO: 2793507 - RNA, 19 nt, Artificial Sequence
  Description of Artificial Sequence: Synthetic oligonucleotide
auagccaugagcugcaaaa

SEQ ID NO: 2793508 - RNA, 19 nt, Artificial Sequence
  Description of Artificial Sequence: Synthetic oligonucleotide
augacccgaacgcugaagg

SEQ ID NO: 2793509 - RNA, 19 nt, Artificial Sequence
  Description of Artificial Sequence: Synthetic oligonucleotide
uucaagaugaagcgcuucu

SEQ ID NO: 2793510 - RNA, 19 nt, Artificial Sequence
  Description of Artificial Sequence: Synthetic oligonucleotide
acacauaggaguaagauuu

SEQ ID NO: 2793511 - RNA, 19 nt, Artificial Sequence
  Description of Artificial Sequence: Synthetic oligonucleotide
caagaugaagcgcuucugg

SEQ ID NO: 2793512 - RNA, 19 nt, Artificial Sequence
  Description of Artificial Sequence: Synthetic oligonucleotide
aucuuauaaagcugcacgu

SEQ ID NO: 2793513 - RNA, 19 nt, Artificial Sequence
  Description of Artificial Sequence: Synthetic oligonucleotide
agaugaagcgcuucuggag

SEQ ID NO: 2793514 - RNA, 19 nt, Artificial Sequence
  Description of Artificial Sequence: Synthetic oligonucleotide
gacaauucguauccauucc

SEQ ID NO: 2793515 - RNA, 19 nt, Artificial Sequence
  Description of Artificial Sequence: Synthetic oligonucleotide
agagaaggugauguuuucc

SEQ ID NO: 2793516 - RNA, 19 nt, Artificial Sequence
  Description of Artificial Sequence: Synthetic oligonucleotide
ucugcaaacuguacagugu

SEQ ID NO: 2793517 - RNA, 19 nt, Artificial Sequence
  Description of Artificial Sequence: Synthetic oligonucleotide
aagaauuaaggagccuauc

SEQ ID NO: 2793518 - RNA, 19 nt, Artificial Sequence
  Description of Artificial Sequence: Synthetic oligonucleotide
cuggauauacucugcaaac

SEQ ID NO: 2793519 - RNA, 19 nt, Artificial Sequence
  Description of Artificial Sequence: Synthetic oligonucleotide
aaagugcuggcccuucaug

SEQ ID NO: 2793520 - RNA, 19 nt, Artificial Sequence
  Description of Artificial Sequence: Synthetic oligonucleotide
gaaauuagcugcugcugug

SEQ ID NO: 2793521 - RNA, 19 nt, Artificial Sequence
  Description of Artificial Sequence: Synthetic oligonucleotide
uggcccuucaugcucauca

SEQ ID NO: 2793522 - RNA, 19 nt, Artificial Sequence
  Description of Artificial Sequence: Synthetic oligonucleotide
uucgacgugugaaauuagc

SEQ ID NO: 2793523 - RNA, 19 nt, Artificial Sequence
  Description of Artificial Sequence: Synthetic oligonucleotide
cuggagcucauccagacac

SEQ ID NO: 2793524 - RNA, 19 nt, Artificial Sequence
  Description of Artificial Sequence: Synthetic oligonucleotide
agguaguccauauaguaaa

SEQ ID NO: 2793525 - RNA, 19 nt, Artificial Sequence
  Description of Artificial Sequence: Synthetic oligonucleotide
caugagcugcaaaaggagc

SEQ ID NO: 2793526 - RNA, 19 nt, Artificial Sequence
  Description of Artificial Sequence: Synthetic oligonucleotide
uguacagugucuccagccu

SEQ ID NO: 2793527 - RNA, 19 nt, Artificial Sequence
  Description of Artificial Sequence: Synthetic oligonucleotide
gaauuaaggagccuaucaa

SEQ ID NO: 2793528 - RNA, 19 nt, Artificial Sequence
  Description of Artificial Sequence: Synthetic oligonucleotide
ucaaugacccgaacgcuga

SEQ ID NO: 2793529 - RNA, 19 nt, Artificial Sequence
  Description of Artificial Sequence: Synthetic oligonucleotide
auacucugcaaacuguaca

SEQ ID NO: 2793530 - RNA, 19 nt, Artificial Sequence
  Description of Artificial Sequence: Synthetic oligonucleotide
uauacucugcaaacuguac

SEQ ID NO: 2793531 - RNA, 19 nt, Artificial Sequence
  Description of Artificial Sequence: Synthetic oligonucleotide
ucgacgugugaaauuagcu

SEQ ID NO: 2793532 - RNA, 19 nt, Artificial Sequence
  Description of Artificial Sequence: Synthetic oligonucleotide
ugguguguaguaucgguca

SEQ ID NO: 2793533 - RNA, 19 nt, Artificial Sequence
  Description of Artificial Sequence: Synthetic oligonucleotide
agccaugagcugcaaaagg

SEQ ID NO: 2793534 - RNA, 19 nt, Artificial Sequence
  Description of Artificial Sequence: Synthetic oligonucleotide
caauucguauccauuccgc

SEQ ID NO: 2793535 - RNA, 19 nt, Artificial Sequence
  Description of Artificial Sequence: Synthetic oligonucleotide
guucacaugauaugggguc

SEQ ID NO: 2793536 - RNA, 19 nt, Artificial Sequence
  Description of Artificial Sequence: Synthetic oligonucleotide
uccgcaucuuauaaagcug

SEQ ID NO: 2793537 - RNA, 19 nt, Artificial Sequence
  Description of Artificial Sequence: Synthetic oligonucleotide
uucguauccauuccgcauc

SEQ ID NO: 2793538 - RNA, 19 nt, Artificial Sequence
  Description of Artificial Sequence: Synthetic oligonucleotide
aggaggaaggacgagaugu

SEQ ID NO: 2793539 - RNA, 19 nt, Artificial Sequence
  Description of Artificial Sequence: Synthetic oligonucleotide
uuccugagaagcuccagug

SEQ ID NO: 2793540 - RNA, 19 nt, Artificial Sequence
  Description of Artificial Sequence: Synthetic oligonucleotide
gucaaggauacugagaguc

SEQ ID NO: 2793541 - RNA, 19 nt, Artificial Sequence
  Description of Artificial Sequence: Synthetic oligonucleotide
auguuuuccagguuaugga

SEQ ID NO: 2793542 - RNA, 19 nt, Artificial Sequence
  Description of Artificial Sequence: Synthetic oligonucleotide
ucuucuggauauacucugc

SEQ ID NO: 2793543 - RNA, 19 nt, Artificial Sequence
  Description of Artificial Sequence: Synthetic oligonucleotide
guaucggucaaggauacug

SEQ ID NO: 2793544 - RNA, 19 nt, Artificial Sequence
  Description of Artificial Sequence: Synthetic oligonucleotide
gaugaauaggaggaaggac

SEQ ID NO: 2793545 - RNA, 19 nt, Artificial Sequence
  Description of Artificial Sequence: Synthetic oligonucleotide
acuguacagugucuccagc

SEQ ID NO: 2793546 - RNA, 19 nt, Artificial Sequence
  Description of Artificial Sequence: Synthetic oligonucleotide
ucaaggauacugagaguca

SEQ ID NO: 2793547 - RNA, 19 nt, Artificial Sequence
  Description of Artificial Sequence: Synthetic oligonucleotide
ggagguucacaugauaugg

SEQ ID NO: 2793548 - RNA, 19 nt, Artificial Sequence
  Description of Artificial Sequence: Synthetic oligonucleotide
uaucggucaaggauacuga

SEQ ID NO: 2793549 - RNA, 19 nt, Artificial Sequence
  Description of Artificial Sequence: Synthetic oligonucleotide
uguuuuccagguuauggau

SEQ ID NO: 2793550 - RNA, 19 nt, Artificial Sequence
  Description of Artificial Sequence: Synthetic oligonucleotide
ugaugaauaggaggaagga

SEQ ID NO: 2793551 - RNA, 19 nt, Artificial Sequence
  Description of Artificial Sequence: Synthetic oligonucleotide
ugagagucaggaaggcacc

SEQ ID NO: 2793552 - RNA, 19 nt, Artificial Sequence
  Description of Artificial Sequence: Synthetic oligonucleotide
uccaacacauaggaguaag

SEQ ID NO: 2793553 - RNA, 19 nt, Artificial Sequence
  Description of Artificial Sequence: Synthetic oligonucleotide
aaacuguacagugucucca

SEQ ID NO: 2793554 - RNA, 19 nt, Artificial Sequence
  Description of Artificial Sequence: Synthetic oligonucleotide
auacugagagucaggaagg

SEQ ID NO: 2793555 - RNA, 19 nt, Artificial Sequence
  Description of Artificial Sequence: Synthetic oligonucleotide
auaguaaagugcuggcccu

SEQ ID NO: 2793556 - RNA, 19 nt, Artificial Sequence
  Description of Artificial Sequence: Synthetic oligonucleotide
ugcacguucuucuggauau

SEQ ID NO: 2793557 - RNA, 19 nt, Artificial Sequence
  Description of Artificial Sequence: Synthetic oligonucleotide
ugauaugggguccgacucc

SEQ ID NO: 2793558 - RNA, 19 nt, Artificial Sequence
  Description of Artificial Sequence: Synthetic oligonucleotide
gauaugggguccgacuccg

SEQ ID NO: 2793559 - RNA, 19 nt, Artificial Sequence
  Description of Artificial Sequence: Synthetic oligonucleotide
uauccauuccgcaucuuau

SEQ ID NO: 2793560 - RNA, 19 nt, Artificial Sequence
  Description of Artificial Sequence: Synthetic oligonucleotide
ugagauaguugguguguag

SEQ ID NO: 2793561 - RNA, 19 nt, Artificial Sequence
  Description of Artificial Sequence: Synthetic oligonucleotide
caaacuguacagugucucc

SEQ ID NO: 2793562 - RNA, 19 nt, Artificial Sequence
  Description of Artificial Sequence: Synthetic oligonucleotide
cuguacagugucuccagcc

SEQ ID NO: 2793563 - RNA, 19 nt, Artificial Sequence
  Description of Artificial Sequence: Synthetic oligonucleotide
ggauauacucugcaaacug

SEQ ID NO: 2793564 - RNA, 19 nt, Artificial Sequence
  Description of Artificial Sequence: Synthetic oligonucleotide
uccauuccgcaucuuauaa

SEQ ID NO: 2793565 - RNA, 19 nt, Artificial Sequence
  Description of Artificial Sequence: Synthetic oligonucleotide
auuagcugcugcugugggg

SEQ ID NO: 2793566 - RNA, 19 nt, Artificial Sequence
  Description of Artificial Sequence: Synthetic oligonucleotide
agugucuccagccucucca

SEQ ID NO: 2793567 - RNA, 19 nt, Artificial Sequence
  Description of Artificial Sequence: Synthetic oligonucleotide
cauccagacacuuccugag

SEQ ID NO: 2793568 - RNA, 19 nt, Artificial Sequence
  Description of Artificial Sequence: Synthetic oligonucleotide
aacgcugaagguaggcagg

SEQ ID NO: 2793569 - RNA, 19 nt, Artificial Sequence
  Description of Artificial Sequence: Synthetic oligonucleotide
uccauauaguaaagugcug

SEQ ID NO: 2793570 - RNA, 19 nt, Artificial Sequence
  Description of Artificial Sequence: Synthetic oligonucleotide
aaagaauuaaggagccuau

SEQ ID NO: 2793571 - RNA, 19 nt, Artificial Sequence
  Description of Artificial Sequence: Synthetic oligonucleotide
aguacccugaugaauagga

SEQ ID NO: 2793572 - RNA, 19 nt, Artificial Sequence
  Description of Artificial Sequence: Synthetic oligonucleotide
agucagccagguuucgacg

SEQ ID NO: 2793573 - RNA, 19 nt, Artificial Sequence
  Description of Artificial Sequence: Synthetic oligonucleotide
guaggcagguucaagauga

SEQ ID NO: 2793574 - RNA, 19 nt, Artificial Sequence
  Description of Artificial Sequence: Synthetic oligonucleotide
uccagacacuuccugagaa

SEQ ID NO: 2793575 - RNA, 19 nt, Artificial Sequence
  Description of Artificial Sequence: Synthetic oligonucleotide
aggagguucacaugauaug

SEQ ID NO: 2793576 - RNA, 19 nt, Artificial Sequence
  Description of Artificial Sequence: Synthetic oligonucleotide
aggcaccauagccaugagc

SEQ ID NO: 2793577 - RNA, 19 nt, Artificial Sequence
  Description of Artificial Sequence: Synthetic oligonucleotide
uccugagaagcuccagugc

SEQ ID NO: 2793578 - RNA, 19 nt, Artificial Sequence
  Description of Artificial Sequence: Synthetic oligonucleotide
auuaaggagccuaucaaaa

SEQ ID NO: 2793579 - RNA, 19 nt, Artificial Sequence
  Description of Artificial Sequence: Synthetic oligonucleotide
uugguguguaguaucgguc

SEQ ID NO: 2793580 - RNA, 19 nt, Artificial Sequence
  Description of Artificial Sequence: Synthetic oligonucleotide
aaggauacugagagucagg

SEQ ID NO: 2793581 - RNA, 19 nt, Artificial Sequence
  Description of Artificial Sequence: Synthetic oligonucleotide
gagguucacaugauauggg

SEQ ID NO: 2793582 - RNA, 19 nt, Artificial Sequence
  Description of Artificial Sequence: Synthetic oligonucleotide
ccauauaguaaagugcugg

SEQ ID NO: 2793583 - RNA, 19 nt, Artificial Sequence
  Description of Artificial Sequence: Synthetic oligonucleotide
aucggucaaggauacugag

SEQ ID NO: 2793584 - RNA, 19 nt, Artificial Sequence
  Description of Artificial Sequence: Synthetic oligonucleotide
ggaaggacgagauguuagg

SEQ ID NO: 2793585 - RNA, 19 nt, Artificial Sequence
  Description of Artificial Sequence: Synthetic oligonucleotide
ucacgugagauaguuggug

SEQ ID NO: 2793586 - RNA, 19 nt, Artificial Sequence
  Description of Artificial Sequence: Synthetic oligonucleotide
uucacaugauauggggucc

SEQ ID NO: 2793587 - RNA, 19 nt, Artificial Sequence
  Description of Artificial Sequence: Synthetic oligonucleotide
aaguacccugaugaauagg

SEQ ID NO: 2793588 - RNA, 19 nt, Artificial Sequence
  Description of Artificial Sequence: Synthetic oligonucleotide
cagacacuuccugagaagc

SEQ ID NO: 2793589 - RNA, 19 nt, Artificial Sequence
  Description of Artificial Sequence: Synthetic oligonucleotide
gaaggcaccauagccauga

SEQ ID NO: 2793590 - RNA, 19 nt, Artificial Sequence
  Description of Artificial Sequence: Synthetic oligonucleotide
uacagugucuccagccucu

SEQ ID NO: 2793591 - RNA, 19 nt, Artificial Sequence
  Description of Artificial Sequence: Synthetic oligonucleotide
aaugacccgaacgcugaag

SEQ ID NO: 2793592 - RNA, 19 nt, Artificial Sequence
  Description of Artificial Sequence: Synthetic oligonucleotide
agcuccagugcccucucac

SEQ ID NO: 2793593 - RNA, 19 nt, Artificial Sequence
  Description of Artificial Sequence: Synthetic oligonucleotide
ucggucaaggauacugaga

SEQ ID NO: 2793594 - RNA, 19 nt, Artificial Sequence
  Description of Artificial Sequence: Synthetic oligonucleotide
uuucgacgugugaaauuag

SEQ ID NO: 2793595 - RNA, 19 nt, Artificial Sequence
  Description of Artificial Sequence: Synthetic oligonucleotide
uaguaucggucaaggauac

SEQ ID NO: 2793596 - RNA, 19 nt, Artificial Sequence
  Description of Artificial Sequence: Synthetic oligonucleotide
auucguauccauuccgcau

SEQ ID NO: 2793597 - RNA, 19 nt, Artificial Sequence
  Description of Artificial Sequence: Synthetic oligonucleotide
uggauauacucugcaaacu

SEQ ID NO: 2793598 - RNA, 19 nt, Artificial Sequence
  Description of Artificial Sequence: Synthetic oligonucleotide
gugugaaauuagcugcugc

SEQ ID NO: 2793599 - RNA, 19 nt, Artificial Sequence
  Description of Artificial Sequence: Synthetic oligonucleotide
ucacaugauaugggguccg

SEQ ID NO: 2793600 - RNA, 19 nt, Artificial Sequence
  Description of Artificial Sequence: Synthetic oligonucleotide
auuccgcaucuuauaaagc

SEQ ID NO: 2793601 - RNA, 19 nt, Artificial Sequence
  Description of Artificial Sequence: Synthetic oligonucleotide
cugcaaacuguacaguguc

SEQ ID NO: 2793602 - RNA, 19 nt, Artificial Sequence
  Description of Artificial Sequence: Synthetic oligonucleotide
acacuuccugagaagcucc

SEQ ID NO: 2793603 - RNA, 19 nt, Artificial Sequence
  Description of Artificial Sequence: Synthetic oligonucleotide
auaaagcugcacguucuuc

SEQ ID NO: 2793604 - RNA, 19 nt, Artificial Sequence
  Description of Artificial Sequence: Synthetic oligonucleotide
ucuccagccucuccaacac

SEQ ID NO: 2793605 - RNA, 19 nt, Artificial Sequence
  Description of Artificial Sequence: Synthetic oligonucleotide
uucuggagcucauccagac

SEQ ID NO: 2793606 - RNA, 19 nt, Artificial Sequence
  Description of Artificial Sequence: Synthetic oligonucleotide
caaggauacugagagucag

SEQ ID NO: 2793607 - RNA, 19 nt, Artificial Sequence
  Description of Artificial Sequence: Synthetic oligonucleotide
gguccgacuccguagacag

SEQ ID NO: 2793608 - RNA, 19 nt, Artificial Sequence
  Description of Artificial Sequence: Synthetic oligonucleotide
agguucaagaugaagcgcu

SEQ ID NO: 2793609 - RNA, 19 nt, Artificial Sequence
  Description of Artificial Sequence: Synthetic oligonucleotide
ucaagaugaagcgcuucug

SEQ ID NO: 2793610 - RNA, 19 nt, Artificial Sequence
  Description of Artificial Sequence: Synthetic oligonucleotide
ggacaauucguauccauuc

SEQ ID NO: 2793611 - RNA, 19 nt, Artificial Sequence
  Description of Artificial Sequence: Synthetic oligonucleotide
ugcaaacuguacagugucu

SEQ ID NO: 2793612 - RNA, 19 nt, Artificial Sequence
  Description of Artificial Sequence: Synthetic oligonucleotide
agauaguugguguguagua

SEQ ID NO: 2793613 - RNA, 19 nt, Artificial Sequence
  Description of Artificial Sequence: Synthetic oligonucleotide
aggauacugagagucagga

SEQ ID NO: 2793614 - RNA, 19 nt, Artificial Sequence
  Description of Artificial Sequence: Synthetic oligonucleotide
cugagaagcuccagugccc

SEQ ID NO: 2793615 - RNA, 19 nt, Artificial Sequence
  Description of Artificial Sequence: Synthetic oligonucleotide
gugaaauuagcugcugcug

SEQ ID NO: 2793616 - RNA, 19 nt, Artificial Sequence
  Description of Artificial Sequence: Synthetic oligonucleotide
ucuuauaaagcugcacguu

SEQ ID NO: 2793617 - RNA, 19 nt, Artificial Sequence
  Description of Artificial Sequence: Synthetic oligonucleotide
guuuuccagguuauggaug

SEQ ID NO: 2793618 - RNA, 19 nt, Artificial Sequence
  Description of Artificial Sequence: Synthetic oligonucleotide
uauaaagcugcacguucuu

SEQ ID NO: 2793619 - RNA, 19 nt, Artificial Sequence
  Description of Artificial Sequence: Synthetic oligonucleotide
cagccucuccaacacauag

SEQ ID NO: 2793620 - RNA, 19 nt, Artificial Sequence
  Description of Artificial Sequence: Synthetic oligonucleotide
aggaaggacgagauguuag

SEQ ID NO: 2793621 - RNA, 19 nt, Artificial Sequence
  Description of Artificial Sequence: Synthetic oligonucleotide
acccugaugaauaggagga

SEQ ID NO: 2793622 - RNA, 19 nt, Artificial Sequence
  Description of Artificial Sequence: Synthetic oligonucleotide
agauguuaggagcccuucu

SEQ ID NO: 2793623 - RNA, 19 nt, Artificial Sequence
  Description of Artificial Sequence: Synthetic oligonucleotide
cccuucaugcucaucauag

SEQ ID NO: 2793624 - RNA, 19 nt, Artificial Sequence
  Description of Artificial Sequence: Synthetic oligonucleotide
acgugagauaguuggugug

SEQ ID NO: 2793625 - RNA, 19 nt, Artificial Sequence
  Description of Artificial Sequence: Synthetic oligonucleotide
guaguaucggucaaggaua

SEQ ID NO: 2793626 - RNA, 19 nt, Artificial Sequence
  Description of Artificial Sequence: Synthetic oligonucleotide
augggguccgacuccguag

SEQ ID NO: 2793627 - RNA, 19 nt, Artificial Sequence
  Description of Artificial Sequence: Synthetic oligonucleotide
caggaggagguucacauga

SEQ ID NO: 2793628 - RNA, 19 nt, Artificial Sequence
  Description of Artificial Sequence: Synthetic oligonucleotide
gaagguaggcagguucaag

SEQ ID NO: 2793629 - RNA, 19 nt, Artificial Sequence
  Description of Artificial Sequence: Synthetic oligonucleotide
uagccaugagcugcaaaag

SEQ ID NO: 2793630 - RNA, 19 nt, Artificial Sequence
  Description of Artificial Sequence: Synthetic oligonucleotide
aguaaagugcuggcccuuc

SEQ ID NO: 2793631 - RNA, 19 nt, Artificial Sequence
  Description of Artificial Sequence: Synthetic oligonucleotide
uuuugucaaugacccgaac

SEQ ID NO: 2793632 - RNA, 19 nt, Artificial Sequence
  Description of Artificial Sequence: Synthetic oligonucleotide
uaaagugcuggcccuucau

SEQ ID NO: 2793633 - RNA, 19 nt, Artificial Sequence
  Description of Artificial Sequence: Synthetic oligonucleotide
gucaaugacccgaacgcug

SEQ ID NO: 2793634 - RNA, 19 nt, Artificial Sequence
  Description of Artificial Sequence: Synthetic oligonucleotide
ucuggagcucauccagaca

SEQ ID NO: 2793635 - RNA, 19 nt, Artificial Sequence
  Description of Artificial Sequence: Synthetic oligonucleotide
aggagcccuucuuagagaa

SEQ ID NO: 2793636 - RNA, 19 nt, Artificial Sequence
  Description of Artificial Sequence: Synthetic oligonucleotide
guccauauaguaaagugcu

SEQ ID NO: 2793637 - RNA, 19 nt, Artificial Sequence
  Description of Artificial Sequence: Synthetic oligonucleotide
ccugagaagcuccagugcc

SEQ ID NO: 2793638 - RNA, 19 nt, Artificial Sequence
  Description of Artificial Sequence: Synthetic oligonucleotide
cagucagccagguuucgac

SEQ ID NO: 2793639 - RNA, 19 nt, Artificial Sequence
  Description of Artificial Sequence: Synthetic oligonucleotide
caggaaggcaccauagcca

SEQ ID NO: 2793640 - RNA, 19 nt, Artificial Sequence
  Description of Artificial Sequence: Synthetic oligonucleotide
agucaggaaggcaccauag

SEQ ID NO: 2793641 - RNA, 19 nt, Artificial Sequence
  Description of Artificial Sequence: Synthetic oligonucleotide
uccagguuauggaugccau

SEQ ID NO: 2793642 - RNA, 19 nt, Artificial Sequence
  Description of Artificial Sequence: Synthetic oligonucleotide
gacacuuccugagaagcuc

SEQ ID NO: 2793643 - RNA, 19 nt, Artificial Sequence
  Description of Artificial Sequence: Synthetic oligonucleotide
uuccagguuauggaugcca

SEQ ID NO: 2793644 - RNA, 19 nt, Artificial Sequence
  Description of Artificial Sequence: Synthetic oligonucleotide
gucaggaaggcaccauagc

SEQ ID NO: 2793645 - RNA, 19 nt, Artificial Sequence
  Description of Artificial Sequence: Synthetic oligonucleotide
ucguauccauuccgcaucu

SEQ ID NO: 2793646 - RNA, 19 nt, Artificial Sequence
  Description of Artificial Sequence: Synthetic oligonucleotide
ugucaaugacccgaacgcu

SEQ ID NO: 2793647 - RNA, 19 nt, Artificial Sequence
  Description of Artificial Sequence: Synthetic oligonucleotide
ugagcugcaaaaggagccu

SEQ ID NO: 2793648 - RNA, 19 nt, Artificial Sequence
  Description of Artificial Sequence: Synthetic oligonucleotide
acaugauaugggguccgac

SEQ ID NO: 2793649 - RNA, 19 nt, Artificial Sequence
  Description of Artificial Sequence: Synthetic oligonucleotide
aguugguguguaguaucgg

SEQ ID NO: 2793650 - RNA, 19 nt, Artificial Sequence
  Description of Artificial Sequence: Synthetic oligonucleotide
ucagccagguuucgacgug

SEQ ID NO: 2793651 - RNA, 19 nt, Artificial Sequence
  Description of Artificial Sequence: Synthetic oligonucleotide
cucauccagacacuuccug

SEQ ID NO: 2793652 - RNA, 19 nt, Artificial Sequence
  Description of Artificial Sequence: Synthetic oligonucleotide
ucuuagagaaggugauguu

SEQ ID NO: 2793653 - RNA, 19 nt, Artificial Sequence
  Description of Artificial Sequence: Synthetic oligonucleotide
guuucgacgugugaaauua

SEQ ID NO: 2793654 - RNA, 19 nt, Artificial Sequence
  Description of Artificial Sequence: Synthetic oligonucleotide
agacagucagccagguuuc

SEQ ID NO: 2793655 - RNA, 19 nt, Artificial Sequence
  Description of Artificial Sequence: Synthetic oligonucleotide
agugcuggcccuucaugcu

SEQ ID NO: 2793656 - RNA, 19 nt, Artificial Sequence
  Description of Artificial Sequence: Synthetic oligonucleotide
cggucaaggauacugagag

SEQ ID NO: 2793657 - RNA, 19 nt, Artificial Sequence
  Description of Artificial Sequence: Synthetic oligonucleotide
uaggaggaaggacgagaug

SEQ ID NO: 2793658 - RNA, 19 nt, Artificial Sequence
  Description of Artificial Sequence: Synthetic oligonucleotide
gauauacucugcaaacugu

SEQ ID NO: 2793659 - RNA, 19 nt, Artificial Sequence
  Description of Artificial Sequence: Synthetic oligonucleotide
ugagaagcuccagugcccu

SEQ ID NO: 2793660 - RNA, 19 nt, Artificial Sequence
  Description of Artificial Sequence: Synthetic oligonucleotide
uagagaaggugauguuuuc

SEQ ID NO: 2793661 - RNA, 19 nt, Artificial Sequence
  Description of Artificial Sequence: Synthetic oligonucleotide
ugggguccgacuccguaga

SEQ ID NO: 2793662 - RNA, 19 nt, Artificial Sequence
  Description of Artificial Sequence: Synthetic oligonucleotide
cugaagguaggcagguuca

SEQ ID NO: 2793663 - RNA, 19 nt, Artificial Sequence
  Description of Artificial Sequence: Synthetic oligonucleotide
gaaggacgagauguuagga

SEQ ID NO: 2793664 - RNA, 19 nt, Artificial Sequence
  Description of Artificial Sequence: Synthetic oligonucleotide
gaauaggaggaaggacgag

SEQ ID NO: 2793665 - RNA, 19 nt, Artificial Sequence
  Description of Artificial Sequence: Synthetic oligonucleotide
uccagugcccucucacgug

SEQ ID NO: 2793666 - RNA, 19 nt, Artificial Sequence
  Description of Artificial Sequence: Synthetic oligonucleotide
agguaggcagguucaagau

SEQ ID NO: 2793667 - RNA, 19 nt, Artificial Sequence
  Description of Artificial Sequence: Synthetic oligonucleotide
cagguucaagaugaagcgc

SEQ ID NO: 2793668 - RNA, 19 nt, Artificial Sequence
  Description of Artificial Sequence: Synthetic oligonucleotide
uaugggguccgacuccgua

SEQ ID NO: 2793669 - RNA, 19 nt, Artificial Sequence
  Description of Artificial Sequence: Synthetic oligonucleotide
ugcucaucauagccagcca

SEQ ID NO: 2793670 - RNA, 19 nt, Artificial Sequence
  Description of Artificial Sequence: Synthetic oligonucleotide
auguuaggagcccuucuua

SEQ ID NO: 2793671 - RNA, 19 nt, Artificial Sequence
  Description of Artificial Sequence: Synthetic oligonucleotide
ccgcaucuuauaaagcugc

SEQ ID NO: 2793672 - RNA, 19 nt, Artificial Sequence
  Description of Artificial Sequence: Synthetic oligonucleotide
gacgagauguuaggagccc

SEQ ID NO: 2793673 - RNA, 19 nt, Artificial Sequence
  Description of Artificial Sequence: Synthetic oligonucleotide
auauacucugcaaacugua

SEQ ID NO: 2793674 - RNA, 19 nt, Artificial Sequence
  Description of Artificial Sequence: Synthetic oligonucleotide
ugcuggcccuucaugcuca

SEQ ID NO: 2793675 - RNA, 19 nt, Artificial Sequence
  Description of Artificial Sequence: Synthetic oligonucleotide
gguaggcagguucaagaug

SEQ ID NO: 2793676 - RNA, 19 nt, Artificial Sequence
  Description of Artificial Sequence: Synthetic oligonucleotide
agaagcuccagugcccucu

SEQ ID NO: 2793677 - RNA, 19 nt, Artificial Sequence
  Description of Artificial Sequence: Synthetic oligonucleotide
cagguaguccauauaguaa

SEQ ID NO: 2793678 - RNA, 19 nt, Artificial Sequence
  Description of Artificial Sequence: Synthetic oligonucleotide
auaggaggaaggacgagau

SEQ ID NO: 2793679 - RNA, 19 nt, Artificial Sequence
  Description of Artificial Sequence: Synthetic oligonucleotide
cuucuggauauacucugca

SEQ ID NO: 2793680 - RNA, 19 nt, Artificial Sequence
  Description of Artificial Sequence: Synthetic oligonucleotide
cguucuucuggauauacuc

SEQ ID NO: 2793681 - RNA, 19 nt, Artificial Sequence
  Description of Artificial Sequence: Synthetic oligonucleotide
ccaugagcugcaaaaggag

SEQ ID NO: 2793682 - RNA, 19 nt, Artificial Sequence
  Description of Artificial Sequence: Synthetic oligonucleotide
gcugaagguaggcagguuc

SEQ ID NO: 2793683 - RNA, 19 nt, Artificial Sequence
  Description of Artificial Sequence: Synthetic oligonucleotide
acccgaacgcugaagguag

SEQ ID NO: 2793684 - RNA, 19 nt, Artificial Sequence
  Description of Artificial Sequence: Synthetic oligonucleotide
cuucuuagagaaggugaug

SEQ ID NO: 2793685 - RNA, 19 nt, Artificial Sequence
  Description of Artificial Sequence: Synthetic oligonucleotide
ggcaccauagccaugagcu

SEQ ID NO: 2793686 - RNA, 19 nt, Artificial Sequence
  Description of Artificial Sequence: Synthetic oligonucleotide
guauccauuccgcaucuua

SEQ ID NO: 2793687 - RNA, 19 nt, Artificial Sequence
  Description of Artificial Sequence: Synthetic oligonucleotide
caugauaugggguccgacu

SEQ ID NO: 2793688 - RNA, 19 nt, Artificial Sequence
  Description of Artificial Sequence: Synthetic oligonucleotide
aaggcaccauagccaugag

SEQ ID NO: 2793689 - RNA, 19 nt, Artificial Sequence
  Description of Artificial Sequence: Synthetic oligonucleotide
ugacccgaacgcugaaggu

SEQ ID NO: 2793690 - RNA, 19 nt, Artificial Sequence
  Description of Artificial Sequence: Synthetic oligonucleotide
guugguguguaguaucggu

SEQ ID NO: 2793691 - RNA, 19 nt, Artificial Sequence
  Description of Artificial Sequence: Synthetic oligonucleotide
aggagccuuggccaaggcu

SEQ ID NO: 2793692 - RNA, 19 nt, Artificial Sequence
  Description of Artificial Sequence: Synthetic oligonucleotide
uggagcucauccagacacu

SEQ ID NO: 2793693 - RNA, 19 nt, Artificial Sequence
  Description of Artificial Sequence: Synthetic oligonucleotide
guacccugaugaauaggag

SEQ ID NO: 2793694 - RNA, 19 nt, Artificial Sequence
  Description of Artificial Sequence: Synthetic oligonucleotide
auccagacacuuccugaga

SEQ ID NO: 2793695 - RNA, 19 nt, Artificial Sequence
  Description of Artificial Sequence: Synthetic oligonucleotide
agccucuccaacacauagg

SEQ ID NO: 2793696 - RNA, 19 nt, Artificial Sequence
  Description of Artificial Sequence: Synthetic oligonucleotide
gucuccagccucuccaaca

SEQ ID NO: 2793697 - RNA, 19 nt, Artificial Sequence
  Description of Artificial Sequence: Synthetic oligonucleotide
gagauaguugguguguagu

SEQ ID NO: 2793698 - RNA, 19 nt, Artificial Sequence
  Description of Artificial Sequence: Synthetic oligonucleotide
gauguuaggagcccuucuu

SEQ ID NO: 2793699 - RNA, 19 nt, Artificial Sequence
  Description of Artificial Sequence: Synthetic oligonucleotide
gacuccguagacagucagc

SEQ ID NO: 2793700 - RNA, 19 nt, Artificial Sequence
  Description of Artificial Sequence: Synthetic oligonucleotide
auccauuccgcaucuuaua

SEQ ID NO: 2793701 - RNA, 19 nt, Artificial Sequence
  Description of Artificial Sequence: Synthetic oligonucleotide
cacguucuucuggauauac

SEQ ID NO: 2793702 - RNA, 19 nt, Artificial Sequence
  Description of Artificial Sequence: Synthetic oligonucleotide
caugcucaucauagccagc

SEQ ID NO: 2793703 - RNA, 19 nt, Artificial Sequence
  Description of Artificial Sequence: Synthetic oligonucleotide
guacagugucuccagccuc

SEQ ID NO: 2793704 - RNA, 19 nt, Artificial Sequence
  Description of Artificial Sequence: Synthetic oligonucleotide
gccucuccaacacauagga

SEQ ID NO: 2793705 - RNA, 19 nt, Artificial Sequence
  Description of Artificial Sequence: Synthetic oligonucleotide
ggccaaggcugccagguag

SEQ ID NO: 2793706 - RNA, 19 nt, Artificial Sequence
  Description of Artificial Sequence: Synthetic oligonucleotide
cuuggccaaggcugccagg

SEQ ID NO: 2793707 - RNA, 19 nt, Artificial Sequence
  Description of Artificial Sequence: Synthetic oligonucleotide
acugagagucaggaaggca

SEQ ID NO: 2793708 - RNA, 19 nt, Artificial Sequence
  Description of Artificial Sequence: Synthetic oligonucleotide
guguguaguaucggucaag

SEQ ID NO: 2793709 - RNA, 19 nt, Artificial Sequence
  Description of Artificial Sequence: Synthetic oligonucleotide
gacagucagccagguuucg

SEQ ID NO: 2793710 - RNA, 19 nt, Artificial Sequence
  Description of Artificial Sequence: Synthetic oligonucleotide
gauaguugguguguaguau

SEQ ID NO: 2793711 - RNA, 19 nt, Artificial Sequence
  Description of Artificial Sequence: Synthetic oligonucleotide
gagauguuaggagcccuuc

SEQ ID NO: 2793712 - RNA, 19 nt, Artificial Sequence
  Description of Artificial Sequence: Synthetic oligonucleotide
gaggagguucacaugauau

SEQ ID NO: 2793713 - RNA, 19 nt, Artificial Sequence
  Description of Artificial Sequence: Synthetic oligonucleotide
cucucacgugagauaguug

SEQ ID NO: 2793714 - RNA, 19 nt, Artificial Sequence
  Description of Artificial Sequence: Synthetic oligonucleotide
gagucaggaaggcaccaua

SEQ ID NO: 2793715 - RNA, 19 nt, Artificial Sequence
  Description of Artificial Sequence: Synthetic oligonucleotide
cgacgugugaaauuagcug

SEQ ID NO: 2793716 - RNA, 19 nt, Artificial Sequence
  Description of Artificial Sequence: Synthetic oligonucleotide
ggacgagauguuaggagcc

SEQ ID NO: 2793717 - RNA, 19 nt, Artificial Sequence
  Description of Artificial Sequence: Synthetic oligonucleotide
agguuauggaugccauuuu

SEQ ID NO: 2793718 - RNA, 19 nt, Artificial Sequence
  Description of Artificial Sequence: Synthetic oligonucleotide
gcuccagugcccucucacg

SEQ ID NO: 2793719 - RNA, 19 nt, Artificial Sequence
  Description of Artificial Sequence: Synthetic oligonucleotide
gcaaacuguacagugucuc

SEQ ID NO: 2793720 - RNA, 19 nt, Artificial Sequence
  Description of Artificial Sequence: Synthetic oligonucleotide
acucugcaaacuguacagu

SEQ ID NO: 2793721 - RNA, 19 nt, Artificial Sequence
  Description of Artificial Sequence: Synthetic oligonucleotide
acgugugaaauuagcugcu

SEQ ID NO: 2793722 - RNA, 19 nt, Artificial Sequence
  Description of Artificial Sequence: Synthetic oligonucleotide
uuuccagguuauggaugcc

SEQ ID NO: 2793723 - RNA, 19 nt, Artificial Sequence
  Description of Artificial Sequence: Synthetic oligonucleotide
agacacuuccugagaagcu

SEQ ID NO: 2793724 - RNA, 19 nt, Artificial Sequence
  Description of Artificial Sequence: Synthetic oligonucleotide
guucaagaugaagcgcuuc

SEQ ID NO: 2793725 - RNA, 19 nt, Artificial Sequence
  Description of Artificial Sequence: Synthetic oligonucleotide
cccuucuuagagaagguga

SEQ ID NO: 2793726 - RNA, 19 nt, Artificial Sequence
  Description of Artificial Sequence: Synthetic oligonucleotide
cuucuggagcucauccaga

SEQ ID NO: 2793727 - RNA, 19 nt, Artificial Sequence
  Description of Artificial Sequence: Synthetic oligonucleotide
guguaguaucggucaagga

SEQ ID NO: 2793728 - RNA, 19 nt, Artificial Sequence
  Description of Artificial Sequence: Synthetic oligonucleotide
cagguuucgacgugugaaa

SEQ ID NO: 2793729 - RNA, 19 nt, Artificial Sequence
  Description of Artificial Sequence: Synthetic oligonucleotide
gcccucucacgugagauag

SEQ ID NO: 2793730 - RNA, 19 nt, Artificial Sequence
  Description of Artificial Sequence: Synthetic oligonucleotide
gacccgaacgcugaaggua

SEQ ID NO: 2793731 - RNA, 19 nt, Artificial Sequence
  Description of Artificial Sequence: Synthetic oligonucleotide
agugcccucucacgugaga

SEQ ID NO: 2793732 - RNA, 19 nt, Artificial Sequence
  Description of Artificial Sequence: Synthetic oligonucleotide
guucuucuggauauacucu

SEQ ID NO: 2793733 - RNA, 19 nt, Artificial Sequence
  Description of Artificial Sequence: Synthetic oligonucleotide
gaagcgcuucuggagcuca

SEQ ID NO: 2793734 - RNA, 19 nt, Artificial Sequence
  Description of Artificial Sequence: Synthetic oligonucleotide
caacacauaggaguaagau

SEQ ID NO: 2793735 - RNA, 19 nt, Artificial Sequence
  Description of Artificial Sequence: Synthetic oligonucleotide
gcaucuuauaaagcugcac

SEQ ID NO: 2793736 - RNA, 19 nt, Artificial Sequence
  Description of Artificial Sequence: Synthetic oligonucleotide
acgagauguuaggagcccu

SEQ ID NO: 2793737 - RNA, 19 nt, Artificial Sequence
  Description of Artificial Sequence: Synthetic oligonucleotide
agguuucgacgugugaaau

SEQ ID NO: 2793738 - RNA, 19 nt, Artificial Sequence
  Description of Artificial Sequence: Synthetic oligonucleotide
cuuagagaaggugauguuu

SEQ ID NO: 2793739 - RNA, 19 nt, Artificial Sequence
  Description of Artificial Sequence: Synthetic oligonucleotide
ccagacacuuccugagaag

SEQ ID NO: 2793740 - RNA, 19 nt, Artificial Sequence
  Description of Artificial Sequence: Synthetic oligonucleotide
guaguccauauaguaaagu

SEQ ID NO: 2793741 - RNA, 19 nt, Artificial Sequence
  Description of Artificial Sequence: Synthetic oligonucleotide
accauagccaugagcugca

SEQ ID NO: 2793742 - RNA, 19 nt, Artificial Sequence
  Description of Artificial Sequence: Synthetic oligonucleotide
gagagucaggaaggcacca

SEQ ID NO: 2793743 - RNA, 19 nt, Artificial Sequence
  Description of Artificial Sequence: Synthetic oligonucleotide
gaagcuccagugcccucuc

SEQ ID NO: 2793744 - RNA, 19 nt, Artificial Sequence
  Description of Artificial Sequence: Synthetic oligonucleotide
cacgugagauaguuggugu

SEQ ID NO: 2793745 - RNA, 19 nt, Artificial Sequence
  Description of Artificial Sequence: Synthetic oligonucleotide
acagugucuccagccucuc

SEQ ID NO: 2793746 - RNA, 19 nt, Artificial Sequence
  Description of Artificial Sequence: Synthetic oligonucleotide
cuuccugagaagcuccagu

SEQ ID NO: 2793747 - RNA, 19 nt, Artificial Sequence
  Description of Artificial Sequence: Synthetic oligonucleotide
ccagguaguccauauagua

SEQ ID NO: 2793748 - RNA, 19 nt, Artificial Sequence
  Description of Artificial Sequence: Synthetic oligonucleotide
aagcuccagugcccucuca

SEQ ID NO: 2793749 - RNA, 19 nt, Artificial Sequence
  Description of Artificial Sequence: Synthetic oligonucleotide
acagucagccagguuucga

SEQ ID NO: 2793750 - RNA, 19 nt, Artificial Sequence
  Description of Artificial Sequence: Synthetic oligonucleotide
ugcccucucacgugagaua

SEQ ID NO: 2793751 - RNA, 19 nt, Artificial Sequence
  Description of Artificial Sequence: Synthetic oligonucleotide
ccguagacagucagccagg

SEQ ID NO: 2793752 - RNA, 19 nt, Artificial Sequence
  Description of Artificial Sequence: Synthetic oligonucleotide
gugcuggcccuucaugcuc

SEQ ID NO: 2793753 - RNA, 19 nt, Artificial Sequence
  Description of Artificial Sequence: Synthetic oligonucleotide
cagugucuccagccucucc

SEQ ID NO: 2793754 - RNA, 19 nt, Artificial Sequence
  Description of Artificial Sequence: Synthetic oligonucleotide
agagucaggaaggcaccau

SEQ ID NO: 2793755 - RNA, 19 nt, Artificial Sequence
  Description of Artificial Sequence: Synthetic oligonucleotide
uaguaaagugcuggcccuu

SEQ ID NO: 2793756 - RNA, 19 nt, Artificial Sequence
  Description of Artificial Sequence: Synthetic oligonucleotide
acgcugaagguaggcaggu

SEQ ID NO: 2793757 - RNA, 19 nt, Artificial Sequence
  Description of Artificial Sequence: Synthetic oligonucleotide
cauagccaugagcugcaaa

SEQ ID NO: 2793758 - RNA, 19 nt, Artificial Sequence
  Description of Artificial Sequence: Synthetic oligonucleotide
aggugauguuuuccagguu

SEQ ID NO: 2793759 - RNA, 19 nt, Artificial Sequence
  Description of Artificial Sequence: Synthetic oligonucleotide
cagguuauggaugccauuu

SEQ ID NO: 2793760 - RNA, 19 nt, Artificial Sequence
  Description of Artificial Sequence: Synthetic oligonucleotide
gagaagcuccagugcccuc

SEQ ID NO: 2793761 - RNA, 19 nt, Artificial Sequence
  Description of Artificial Sequence: Synthetic oligonucleotide
cacuuccugagaagcucca

SEQ ID NO: 2793762 - RNA, 19 nt, Artificial Sequence
  Description of Artificial Sequence: Synthetic oligonucleotide
ggauacugagagucaggaa

SEQ ID NO: 2793763 - RNA, 19 nt, Artificial Sequence
  Description of Artificial Sequence: Synthetic oligonucleotide
aguaucggucaaggauacu

SEQ ID NO: 2793764 - RNA, 19 nt, Artificial Sequence
  Description of Artificial Sequence: Synthetic oligonucleotide
gugagauaguuggugugua

SEQ ID NO: 2793765 - RNA, 19 nt, Artificial Sequence
  Description of Artificial Sequence: Synthetic oligonucleotide
gguguguaguaucggucaa

SEQ ID NO: 2793766 - RNA, 19 nt, Artificial Sequence
  Description of Artificial Sequence: Synthetic oligonucleotide
cugcacguucuucuggaua

SEQ ID NO: 2793767 - RNA, 19 nt, Artificial Sequence
  Description of Artificial Sequence: Synthetic oligonucleotide
cuccguagacagucagcca

SEQ ID NO: 2793768 - RNA, 19 nt, Artificial Sequence
  Description of Artificial Sequence: Synthetic oligonucleotide
cagugcccucucacgugag

SEQ ID NO: 2793769 - RNA, 19 nt, Artificial Sequence
  Description of Artificial Sequence: Synthetic oligonucleotide
gcccuucuuagagaaggug

SEQ ID NO: 2793770 - RNA, 19 nt, Artificial Sequence
  Description of Artificial Sequence: Synthetic oligonucleotide
gguucacaugauauggggu

SEQ ID NO: 2793771 - RNA, 19 nt, Artificial Sequence
  Description of Artificial Sequence: Synthetic oligonucleotide
cucacgugagauaguuggu

SEQ ID NO: 2793772 - RNA, 19 nt, Artificial Sequence
  Description of Artificial Sequence: Synthetic oligonucleotide
ggaggagguucacaugaua

SEQ ID NO: 2793773 - RNA, 19 nt, Artificial Sequence
  Description of Artificial Sequence: Synthetic oligonucleotide
gugucuccagccucuccaa

SEQ ID NO: 2793774 - RNA, 19 nt, Artificial Sequence
  Description of Artificial Sequence: Synthetic oligonucleotide
ccaacacauaggaguaaga

SEQ ID NO: 2793775 - RNA, 19 nt, Artificial Sequence
  Description of Artificial Sequence: Synthetic oligonucleotide
ccaggaggagguucacaug

SEQ ID NO: 2793776 - RNA, 19 nt, Artificial Sequence
  Description of Artificial Sequence: Synthetic oligonucleotide
cuccagugcccucucacgu

SEQ ID NO: 2793777 - RNA, 19 nt, Artificial Sequence
  Description of Artificial Sequence: Synthetic oligonucleotide
ccagguuucgacgugugaa

SEQ ID NO: 2793778 - RNA, 19 nt, Artificial Sequence
  Description of Artificial Sequence: Synthetic oligonucleotide
agccaggaggagguucaca

SEQ ID NO: 2793779 - RNA, 19 nt, Artificial Sequence
  Description of Artificial Sequence: Synthetic oligonucleotide
gccaggaggagguucacau

SEQ ID NO: 2793780 - RNA, 19 nt, Artificial Sequence
  Description of Artificial Sequence: Synthetic oligonucleotide
agccagguuucgacgugug

SEQ ID NO: 2793781 - RNA, 19 nt, Artificial Sequence
  Description of Artificial Sequence: Synthetic oligonucleotide
aggaggagguucacaugau

SEQ ID NO: 2793782 - RNA, 19 nt, Artificial Sequence
  Description of Artificial Sequence: Synthetic oligonucleotide
cacaugauaugggguccga

SEQ ID NO: 2793783 - RNA, 19 nt, Artificial Sequence
  Description of Artificial Sequence: Synthetic oligonucleotide
ggagcccuucuuagagaag

SEQ ID NO: 2793784 - RNA, 19 nt, Artificial Sequence
  Description of Artificial Sequence: Synthetic oligonucleotide
ccgaacgcugaagguaggc

SEQ ID NO: 2793785 - RNA, 19 nt, Artificial Sequence
  Description of Artificial Sequence: Synthetic oligonucleotide
cacauaggaguaagauuuu

SEQ ID NO: 2793786 - RNA, 19 nt, Artificial Sequence
  Description of Artificial Sequence: Synthetic oligonucleotide
ccauuccgcaucuuauaaa

SEQ ID NO: 2793787 - RNA, 19 nt, Artificial Sequence
  Description of Artificial Sequence: Synthetic oligonucleotide
caaugacccgaacgcugaa

SEQ ID NO: 2793788 - RNA, 19 nt, Artificial Sequence
  Description of Artificial Sequence: Synthetic oligonucleotide
gguuucgacgugugaaauu

SEQ ID NO: 2793789 - RNA, 19 nt, Artificial Sequence
  Description of Artificial Sequence: Synthetic oligonucleotide
cgacuccguagacagucag

SEQ ID NO: 2793790 - RNA, 19 nt, Artificial Sequence
  Description of Artificial Sequence: Synthetic oligonucleotide
cuccagccucuccaacaca

SEQ ID NO: 2793791 - RNA, 19 nt, Artificial Sequence
  Description of Artificial Sequence: Synthetic oligonucleotide
cuccaacacauaggaguaa

SEQ ID NO: 2793792 - RNA, 19 nt, Artificial Sequence
  Description of Artificial Sequence: Synthetic oligonucleotide
cccgaacgcugaagguagg

SEQ ID NO: 2793793 - RNA, 19 nt, Artificial Sequence
  Description of Artificial Sequence: Synthetic oligonucleotide
ggggacaauucguauccau

SEQ ID NO: 2793794 - RNA, 19 nt, Artificial Sequence
  Description of Artificial Sequence: Synthetic oligonucleotide
ggucaaggauacugagagu

SEQ ID NO: 2793795 - RNA, 19 nt, Artificial Sequence
  Description of Artificial Sequence: Synthetic oligonucleotide
ccagugcccucucacguga

SEQ ID NO: 2793796 - RNA, 19 nt, Artificial Sequence
  Description of Artificial Sequence: Synthetic oligonucleotide
gcugccagguaguccauau

SEQ ID NO: 2793797 - RNA, 19 nt, Artificial Sequence
  Description of Artificial Sequence: Synthetic oligonucleotide
gccagguuucgacguguga

SEQ ID NO: 2793798 - RNA, 19 nt, Artificial Sequence
  Description of Artificial Sequence: Synthetic oligonucleotide
auaugggguccgacuccgu

SEQ ID NO: 2793799 - RNA, 19 nt, Artificial Sequence
  Description of Artificial Sequence: Synthetic oligonucleotide
ggguccgacuccguagaca

SEQ ID NO: 2793800 - RNA, 19 nt, Artificial Sequence
  Description of Artificial Sequence: Synthetic oligonucleotide
ggaaggcaccauagccaug

SEQ ID NO: 2793801 - RNA, 19 nt, Artificial Sequence
  Description of Artificial Sequence: Synthetic oligonucleotide
gggacaauucguauccauu

SEQ ID NO: 2793802 - RNA, 19 nt, Artificial Sequence
  Description of Artificial Sequence: Synthetic oligonucleotide
guagacagucagccagguu

SEQ ID NO: 2793803 - RNA, 19 nt, Artificial Sequence
  Description of Artificial Sequence: Synthetic oligonucleotide
gugcccucucacgugagau

SEQ ID NO: 2793804 - RNA, 19 nt, Artificial Sequence
  Description of Artificial Sequence: Synthetic oligonucleotide
gccagccaggaggagguuc

SEQ ID NO: 2793805 - RNA, 19 nt, Artificial Sequence
  Description of Artificial Sequence: Synthetic oligonucleotide
cgcaucuuauaaagcugca

SEQ ID NO: 2793806 - RNA, 19 nt, Artificial Sequence
  Description of Artificial Sequence: Synthetic oligonucleotide
gggguccgacuccguagac

SEQ ID NO: 2793807 - RNA, 19 nt, Artificial Sequence
  Description of Artificial Sequence: Synthetic oligonucleotide
gcccuucaugcucaucaua

SEQ ID NO: 2793808 - RNA, 19 nt, Artificial Sequence
  Description of Artificial Sequence: Synthetic oligonucleotide
gccagguaguccauauagu

SEQ ID NO: 2793809 - RNA, 19 nt, Artificial Sequence
  Description of Artificial Sequence: Synthetic oligonucleotide
cgaacgcugaagguaggca

SEQ ID NO: 2793810 - RNA, 19 nt, Artificial Sequence
  Description of Artificial Sequence: Synthetic oligonucleotide
ccaaggcugccagguaguc

SEQ ID NO: 2793811 - RNA, 19 nt, Artificial Sequence
  Description of Artificial Sequence: Synthetic oligonucleotide
cagccagguuucgacgugu

SEQ ID NO: 2793812 - RNA, 19 nt, Artificial Sequence
  Description of Artificial Sequence: Synthetic oligonucleotide
ggaggaaggacgagauguu

SEQ ID NO: 2793813 - RNA, 19 nt, Artificial Sequence
  Description of Artificial Sequence: Synthetic oligonucleotide
ccgacuccguagacaguca

SEQ ID NO: 2793814 - RNA, 19 nt, Artificial Sequence
  Description of Artificial Sequence: Synthetic oligonucleotide
gguucaagaugaagcgcuu

SEQ ID NO: 2793815 - RNA, 19 nt, Artificial Sequence
  Description of Artificial Sequence: Synthetic oligonucleotide
gccuuggccaaggcugcca

SEQ ID NO: 2793816 - RNA, 19 nt, Artificial Sequence
  Description of Artificial Sequence: Synthetic oligonucleotide
cgugagauaguuggugugu

SEQ ID NO: 2793817 - RNA, 19 nt, Artificial Sequence
  Description of Artificial Sequence: Synthetic oligonucleotide
gccaaggcugccagguagu

SEQ ID NO: 2793818 - RNA, 19 nt, Artificial Sequence
  Description of Artificial Sequence: Synthetic oligonucleotide
gcucauccagacacuuccu

SEQ ID NO: 2793819 - RNA, 19 nt, Artificial Sequence
  Description of Artificial Sequence: Synthetic oligonucleotide
ccucucacgugagauaguu

SEQ ID NO: 2793820 - RNA, 19 nt, Artificial Sequence
  Description of Artificial Sequence: Synthetic oligonucleotide
cccugaugaauaggaggaa

SEQ ID NO: 2793821 - RNA, 19 nt, Artificial Sequence
  Description of Artificial Sequence: Synthetic oligonucleotide
gcugcacguucuucuggau

SEQ ID NO: 2793822 - RNA, 19 nt, Artificial Sequence
  Description of Artificial Sequence: Synthetic oligonucleotide
ccagccucuccaacacaua

SEQ ID NO: 2793823 - RNA, 19 nt, Artificial Sequence
  Description of Artificial Sequence: Synthetic oligonucleotide
gcacguucuucuggauaua

SEQ ID NO: 2793824 - RNA, 19 nt, Artificial Sequence
  Description of Artificial Sequence: Synthetic oligonucleotide
ccagguuauggaugccauu

SEQ ID NO: 2793825 - RNA, 19 nt, Artificial Sequence
  Description of Artificial Sequence: Synthetic oligonucleotide
guccgacuccguagacagu

SEQ ID NO: 2793826 - RNA, 19 nt, Artificial Sequence
  Description of Artificial Sequence: Synthetic oligonucleotide
ggcugccagguaguccaua

SEQ ID NO: 2793827 - RNA, 19 nt, Artificial Sequence
  Description of Artificial Sequence: Synthetic oligonucleotide
cgagauguuaggagcccuu

SEQ ID NO: 2793828 - RNA, 19 nt, Artificial Sequence
  Description of Artificial Sequence: Synthetic oligonucleotide
cccucucacgugagauagu

SEQ ID NO: 2793829 - RNA, 19 nt, Artificial Sequence
  Description of Artificial Sequence: Synthetic oligonucleotide
ccauagccaugagcugcaa

SEQ ID NO: 2793830 - RNA, 19 nt, Artificial Sequence
  Description of Artificial Sequence: Synthetic oligonucleotide
gcuggcccuucaugcucau

SEQ ID NO: 2793831 - RNA, 19 nt, Artificial Sequence
  Description of Artificial Sequence: Synthetic oligonucleotide
cguauccauuccgcaucuu

SEQ ID NO: 2793832 - RNA, 19 nt, Artificial Sequence
  Description of Artificial Sequence: Synthetic oligonucleotide
cgcugaagguaggcagguu

SEQ ID NO: 2793833 - RNA, 19 nt, Artificial Sequence
  Description of Artificial Sequence: Synthetic oligonucleotide
uccaauuauaauuucauag

SEQ ID NO: 2793834 - RNA, 19 nt, Artificial Sequence
  Description of Artificial Sequence: Synthetic oligonucleotide
ucaucugagagccagaagc

SEQ ID NO: 2793835 - RNA, 19 nt, Artificial Sequence
  Description of Artificial Sequence: Synthetic oligonucleotide
uuagcauucaccuuuaauc

SEQ ID NO: 2793836 - RNA, 19 nt, Artificial Sequence
  Description of Artificial Sequence: Synthetic oligonucleotide
aaugacacaauuugcacca

SEQ ID NO: 2793837 - RNA, 19 nt, Artificial Sequence
  Description of Artificial Sequence: Synthetic oligonucleotide
aaccucauauccuugcccc

SEQ ID NO: 2793838 - RNA, 19 nt, Artificial Sequence
  Description of Artificial Sequence: Synthetic oligonucleotide
uuugguuuagcauucaccu

SEQ ID NO: 2793839 - RNA, 19 nt, Artificial Sequence
  Description of Artificial Sequence: Synthetic oligonucleotide
ugggcuauggcacugacag

SEQ ID NO: 2793840 - RNA, 19 nt, Artificial Sequence
  Description of Artificial Sequence: Synthetic oligonucleotide
aauuugcaccacuaugccc

SEQ ID NO: 2793841 - RNA, 19 nt, Artificial Sequence
  Description of Artificial Sequence: Synthetic oligonucleotide
acaauuugcaccacuaugc

SEQ ID NO: 2793842 - RNA, 19 nt, Artificial Sequence
  Description of Artificial Sequence: Synthetic oligonucleotide
aauguagguguugaugagc

SEQ ID NO: 2793843 - RNA, 19 nt, Artificial Sequence
  Description of Artificial Sequence: Synthetic oligonucleotide
ugcgcuguaaccuuggcag

SEQ ID NO: 2793844 - RNA, 19 nt, Artificial Sequence
  Description of Artificial Sequence: Synthetic oligonucleotide
aacuucugauccuucuccc

SEQ ID NO: 2793845 - RNA, 19 nt, Artificial Sequence
  Description of Artificial Sequence: Synthetic oligonucleotide
uuuugguuuagcauucacc

SEQ ID NO: 2793846 - RNA, 19 nt, Artificial Sequence
  Description of Artificial Sequence: Synthetic oligonucleotide
aaacccagggcacuccacc

SEQ ID NO: 2793847 - RNA, 19 nt, Artificial Sequence
  Description of Artificial Sequence: Synthetic oligonucleotide
ucuugaacuugcuauguag

SEQ ID NO: 2793848 - RNA, 19 nt, Artificial Sequence
  Description of Artificial Sequence: Synthetic oligonucleotide
uauaauuucauaggugccc

SEQ ID NO: 2793849 - RNA, 19 nt, Artificial Sequence
  Description of Artificial Sequence: Synthetic oligonucleotide
uggaaugacacaauuugca

SEQ ID NO: 2793850 - RNA, 19 nt, Artificial Sequence
  Description of Artificial Sequence: Synthetic oligonucleotide
gaaugacacaauuugcacc

SEQ ID NO: 2793851 - RNA, 19 nt, Artificial Sequence
  Description of Artificial Sequence: Synthetic oligonucleotide
uagcauucaccuuuaaucc

SEQ ID NO: 2793852 - RNA, 19 nt, Artificial Sequence
  Description of Artificial Sequence: Synthetic oligonucleotide
uuauaauuucauaggugcc

SEQ ID NO: 2793853 - RNA, 19 nt, Artificial Sequence
  Description of Artificial Sequence: Synthetic oligonucleotide
aaaaucaaacccagggcac

SEQ ID NO: 2793854 - RNA, 19 nt, Artificial Sequence
  Description of Artificial Sequence: Synthetic oligonucleotide
aguguggaccccuugugcc

SEQ ID NO: 2793855 - RNA, 19 nt, Artificial Sequence
  Description of Artificial Sequence: Synthetic oligonucleotide
uugggcaccgaaauguagg

SEQ ID NO: 2793856 - RNA, 19 nt, Artificial Sequence
  Description of Artificial Sequence: Synthetic oligonucleotide
cuaugcccaauuuaugugg

SEQ ID NO: 2793857 - RNA, 19 nt, Artificial Sequence
  Description of Artificial Sequence: Synthetic oligonucleotide
ucugagagccagaagcuag

SEQ ID NO: 2793858 - RNA, 19 nt, Artificial Sequence
  Description of Artificial Sequence: Synthetic oligonucleotide
agcauucaccuuuaauccc

SEQ ID NO: 2793859 - RNA, 19 nt, Artificial Sequence
  Description of Artificial Sequence: Synthetic oligonucleotide
aagcuggcacaguugagcg

SEQ ID NO: 2793860 - RNA, 19 nt, Artificial Sequence
  Description of Artificial Sequence: Synthetic oligonucleotide
ccaauuauaauuucauagg

SEQ ID NO: 2793861 - RNA, 19 nt, Artificial Sequence
  Description of Artificial Sequence: Synthetic oligonucleotide
ucauaggugcccuaucucc

SEQ ID NO: 2793862 - RNA, 19 nt, Artificial Sequence
  Description of Artificial Sequence: Synthetic oligonucleotide
uguaguggaggauuggccu

SEQ ID NO: 2793863 - RNA, 19 nt, Artificial Sequence
  Description of Artificial Sequence: Synthetic oligonucleotide
uuucauaggugcccuaucu

SEQ ID NO: 2793864 - RNA, 19 nt, Artificial Sequence
  Description of Artificial Sequence: Synthetic oligonucleotide
cuuaaccucauauccuugc

SEQ ID NO: 2793865 - RNA, 19 nt, Artificial Sequence
  Description of Artificial Sequence: Synthetic oligonucleotide
uugaacuugcuauguagug

SEQ ID NO: 2793866 - RNA, 19 nt, Artificial Sequence
  Description of Artificial Sequence: Synthetic oligonucleotide
ugguuuagcauucaccuuu

SEQ ID NO: 2793867 - RNA, 19 nt, Artificial Sequence
  Description of Artificial Sequence: Synthetic oligonucleotide
acaaugcccgccgugaagc

SEQ ID NO: 2793868 - RNA, 19 nt, Artificial Sequence
  Description of Artificial Sequence: Synthetic oligonucleotide
uuaaccucauauccuugcc

SEQ ID NO: 2793869 - RNA, 19 nt, Artificial Sequence
  Description of Artificial Sequence: Synthetic oligonucleotide
acuucugauccuucucccc

SEQ ID NO: 2793870 - RNA, 19 nt, Artificial Sequence
  Description of Artificial Sequence: Synthetic oligonucleotide
uuuagcauucaccuuuaau

SEQ ID NO: 2793871 - RNA, 19 nt, Artificial Sequence
  Description of Artificial Sequence: Synthetic oligonucleotide
gcuggaaugacacaauuug

SEQ ID NO: 2793872 - RNA, 19 nt, Artificial Sequence
  Description of Artificial Sequence: Synthetic oligonucleotide
aguauacccaacccuccac

SEQ ID NO: 2793873 - RNA, 19 nt, Artificial Sequence
  Description of Artificial Sequence: Synthetic oligonucleotide
acuaugcccaauuuaugug

SEQ ID NO: 2793874 - RNA, 19 nt, Artificial Sequence
  Description of Artificial Sequence: Synthetic oligonucleotide
gaacuugcuauguagugga

SEQ ID NO: 2793875 - RNA, 19 nt, Artificial Sequence
  Description of Artificial Sequence: Synthetic oligonucleotide
uaaccucauauccuugccc

SEQ ID NO: 2793876 - RNA, 19 nt, Artificial Sequence
  Description of Artificial Sequence: Synthetic oligonucleotide
ugauccuucuccccuaacu

SEQ ID NO: 2793877 - RNA, 19 nt, Artificial Sequence
  Description of Artificial Sequence: Synthetic oligonucleotide
auuugcaccacuaugccca

SEQ ID NO: 2793878 - RNA, 19 nt, Artificial Sequence
  Description of Artificial Sequence: Synthetic oligonucleotide
uccuucuccccuaacuucc

SEQ ID NO: 2793879 - RNA, 19 nt, Artificial Sequence
  Description of Artificial Sequence: Synthetic oligonucleotide
uccccuaacuuccuugugc

SEQ ID NO: 2793880 - RNA, 19 nt, Artificial Sequence
  Description of Artificial Sequence: Synthetic oligonucleotide
cuaucuccccaguauaccc

SEQ ID NO: 2793881 - RNA, 19 nt, Artificial Sequence
  Description of Artificial Sequence: Synthetic oligonucleotide
auaggugcccuaucucccc

SEQ ID NO: 2793882 - RNA, 19 nt, Artificial Sequence
  Description of Artificial Sequence: Synthetic oligonucleotide
uaugcccaauuuauguggc

SEQ ID NO: 2793883 - RNA, 19 nt, Artificial Sequence
  Description of Artificial Sequence: Synthetic oligonucleotide
acuuccuugugcuggaaug

SEQ ID NO: 2793884 - RNA, 19 nt, Artificial Sequence
  Description of Artificial Sequence: Synthetic oligonucleotide
cacaauuugcaccacuaug

SEQ ID NO: 2793885 - RNA, 19 nt, Artificial Sequence
  Description of Artificial Sequence: Synthetic oligonucleotide
cuggaaugacacaauuugc

SEQ ID NO: 2793886 - RNA, 19 nt, Artificial Sequence
  Description of Artificial Sequence: Synthetic oligonucleotide
uauguaguggaggauuggc

SEQ ID NO: 2793887 - RNA, 19 nt, Artificial Sequence
  Description of Artificial Sequence: Synthetic oligonucleotide
acagccuccacaaugcccg

SEQ ID NO: 2793888 - RNA, 19 nt, Artificial Sequence
  Description of Artificial Sequence: Synthetic oligonucleotide
uguaaccuuggcagggaag

SEQ ID NO: 2793889 - RNA, 19 nt, Artificial Sequence
  Description of Artificial Sequence: Synthetic oligonucleotide
gaagcuggcacaguugagc

SEQ ID NO: 2793890 - RNA, 19 nt, Artificial Sequence
  Description of Artificial Sequence: Synthetic oligonucleotide
ggcacugacaguuugccag

SEQ ID NO: 2793891 - RNA, 19 nt, Artificial Sequence
  Description of Artificial Sequence: Synthetic oligonucleotide
auguagguguugaugagcg

SEQ ID NO: 2793892 - RNA, 19 nt, Artificial Sequence
  Description of Artificial Sequence: Synthetic oligonucleotide
gaccccuugugccagugcg

SEQ ID NO: 2793893 - RNA, 19 nt, Artificial Sequence
  Description of Artificial Sequence: Synthetic oligonucleotide
uauggcacugacaguuugc

SEQ ID NO: 2793894 - RNA, 19 nt, Artificial Sequence
  Description of Artificial Sequence: Synthetic oligonucleotide
cuugcuauguaguggagga

SEQ ID NO: 2793895 - RNA, 19 nt, Artificial Sequence
  Description of Artificial Sequence: Synthetic oligonucleotide
caauuugcaccacuaugcc

SEQ ID NO: 2793896 - RNA, 19 nt, Artificial Sequence
  Description of Artificial Sequence: Synthetic oligonucleotide
aaucaaacccagggcacuc

SEQ ID NO: 2793897 - RNA, 19 nt, Artificial Sequence
  Description of Artificial Sequence: Synthetic oligonucleotide
auuucauaggugcccuauc

SEQ ID NO: 2793898 - RNA, 19 nt, Artificial Sequence
  Description of Artificial Sequence: Synthetic oligonucleotide
acucaggagguagugcucc

SEQ ID NO: 2793899 - RNA, 19 nt, Artificial Sequence
  Description of Artificial Sequence: Synthetic oligonucleotide
aaccuuggcagggaagccg

SEQ ID NO: 2793900 - RNA, 19 nt, Artificial Sequence
  Description of Artificial Sequence: Synthetic oligonucleotide
uauacccaacccuccaccc

SEQ ID NO: 2793901 - RNA, 19 nt, Artificial Sequence
  Description of Artificial Sequence: Synthetic oligonucleotide
uggaggauuggccuugaac

SEQ ID NO: 2793902 - RNA, 19 nt, Artificial Sequence
  Description of Artificial Sequence: Synthetic oligonucleotide
agcacagccuccacaaugc

SEQ ID NO: 2793903 - RNA, 19 nt, Artificial Sequence
  Description of Artificial Sequence: Synthetic oligonucleotide
ucuuaaccucauauccuug

SEQ ID NO: 2793904 - RNA, 19 nt, Artificial Sequence
  Description of Artificial Sequence: Synthetic oligonucleotide
accaacugggcuauggcac

SEQ ID NO: 2793905 - RNA, 19 nt, Artificial Sequence
  Description of Artificial Sequence: Synthetic oligonucleotide
guuugccaggccuuggucc

SEQ ID NO: 2793906 - RNA, 19 nt, Artificial Sequence
  Description of Artificial Sequence: Synthetic oligonucleotide
guaaccuuggcagggaagc

SEQ ID NO: 2793907 - RNA, 19 nt, Artificial Sequence
  Description of Artificial Sequence: Synthetic oligonucleotide
auggcacugacaguuugcc

SEQ ID NO: 2793908 - RNA, 19 nt, Artificial Sequence
  Description of Artificial Sequence: Synthetic oligonucleotide
cauaggugcccuaucuccc

SEQ ID NO: 2793909 - RNA, 19 nt, Artificial Sequence
  Description of Artificial Sequence: Synthetic oligonucleotide
ugugcgugagcacagccuc

SEQ ID NO: 2793910 - RNA, 19 nt, Artificial Sequence
  Description of Artificial Sequence: Synthetic oligonucleotide
auguaguggaggauuggcc

SEQ ID NO: 2793911 - RNA, 19 nt, Artificial Sequence
  Description of Artificial Sequence: Synthetic oligonucleotide
aauuucauaggugcccuau

SEQ ID NO: 2793912 - RNA, 19 nt, Artificial Sequence
  Description of Artificial Sequence: Synthetic oligonucleotide
gagcacagccuccacaaug

SEQ ID NO: 2793913 - RNA, 19 nt, Artificial Sequence
  Description of Artificial Sequence: Synthetic oligonucleotide
uggucuugaacuugcuaug

SEQ ID NO: 2793914 - RNA, 19 nt, Artificial Sequence
  Description of Artificial Sequence: Synthetic oligonucleotide
ugaguguggaccccuugug

SEQ ID NO: 2793915 - RNA, 19 nt, Artificial Sequence
  Description of Artificial Sequence: Synthetic oligonucleotide
acugacaguuugccaggcc

SEQ ID NO: 2793916 - RNA, 19 nt, Artificial Sequence
  Description of Artificial Sequence: Synthetic oligonucleotide
aaaucaaacccagggcacu

SEQ ID NO: 2793917 - RNA, 19 nt, Artificial Sequence
  Description of Artificial Sequence: Synthetic oligonucleotide
ucuccuugggcaccgaaau

SEQ ID NO: 2793918 - RNA, 19 nt, Artificial Sequence
  Description of Artificial Sequence: Synthetic oligonucleotide
uccuugggcaccgaaaugu

SEQ ID NO: 2793919 - RNA, 19 nt, Artificial Sequence
  Description of Artificial Sequence: Synthetic oligonucleotide
ugugccagugcgcuguaac

SEQ ID NO: 2793920 - RNA, 19 nt, Artificial Sequence
  Description of Artificial Sequence: Synthetic oligonucleotide
auaauuucauaggugcccu

SEQ ID NO: 2793921 - RNA, 19 nt, Artificial Sequence
  Description of Artificial Sequence: Synthetic oligonucleotide
guauacccaacccuccacc

SEQ ID NO: 2793922 - RNA, 19 nt, Artificial Sequence
  Description of Artificial Sequence: Synthetic oligonucleotide
uaucuccccaguauaccca

SEQ ID NO: 2793923 - RNA, 19 nt, Artificial Sequence
  Description of Artificial Sequence: Synthetic oligonucleotide
uugugcuggaaugacacaa

SEQ ID NO: 2793924 - RNA, 19 nt, Artificial Sequence
  Description of Artificial Sequence: Synthetic oligonucleotide
caauuauaauuucauaggu

SEQ ID NO: 2793925 - RNA, 19 nt, Artificial Sequence
  Description of Artificial Sequence: Synthetic oligonucleotide
agacuggucuugaacuugc

SEQ ID NO: 2793926 - RNA, 19 nt, Artificial Sequence
  Description of Artificial Sequence: Synthetic oligonucleotide
uucauaggugcccuaucuc

SEQ ID NO: 2793927 - RNA, 19 nt, Artificial Sequence
  Description of Artificial Sequence: Synthetic oligonucleotide
uccccaguauacccaaccc

SEQ ID NO: 2793928 - RNA, 19 nt, Artificial Sequence
  Description of Artificial Sequence: Synthetic oligonucleotide
aguuugccaggccuugguc

SEQ ID NO: 2793929 - RNA, 19 nt, Artificial Sequence
  Description of Artificial Sequence: Synthetic oligonucleotide
auucaccuuuaaucccagc

SEQ ID NO: 2793930 - RNA, 19 nt, Artificial Sequence
  Description of Artificial Sequence: Synthetic oligonucleotide
cugagagccagaagcuagg

SEQ ID NO: 2793931 - RNA, 19 nt, Artificial Sequence
  Description of Artificial Sequence: Synthetic oligonucleotide
ugcucccagagacuggucu

SEQ ID NO: 2793932 - RNA, 19 nt, Artificial Sequence
  Description of Artificial Sequence: Synthetic oligonucleotide
uccaccaacugggcuaugg

SEQ ID NO: 2793933 - RNA, 19 nt, Artificial Sequence
  Description of Artificial Sequence: Synthetic oligonucleotide
aggucagccgaucaugagu

SEQ ID NO: 2793934 - RNA, 19 nt, Artificial Sequence
  Description of Artificial Sequence: Synthetic oligonucleotide
cccucuuaaccucauaucc

SEQ ID NO: 2793935 - RNA, 19 nt, Artificial Sequence
  Description of Artificial Sequence: Synthetic oligonucleotide
ugacacaauuugcaccacu

SEQ ID NO: 2793936 - RNA, 19 nt, Artificial Sequence
  Description of Artificial Sequence: Synthetic oligonucleotide
agggcacuccaccaacugg

SEQ ID NO: 2793937 - RNA, 19 nt, Artificial Sequence
  Description of Artificial Sequence: Synthetic oligonucleotide
gaguguggaccccuugugc

SEQ ID NO: 2793938 - RNA, 19 nt, Artificial Sequence
  Description of Artificial Sequence: Synthetic oligonucleotide
ggaaugacacaauuugcac

SEQ ID NO: 2793939 - RNA, 19 nt, Artificial Sequence
  Description of Artificial Sequence: Synthetic oligonucleotide
caccucuccagccugcagg

SEQ ID NO: 2793940 - RNA, 19 nt, Artificial Sequence
  Description of Artificial Sequence: Synthetic oligonucleotide
cagccgaucaugagugugg

SEQ ID NO: 2793941 - RNA, 19 nt, Artificial Sequence
  Description of Artificial Sequence: Synthetic oligonucleotide
accacuaugcccaauuuau

SEQ ID NO: 2793942 - RNA, 19 nt, Artificial Sequence
  Description of Artificial Sequence: Synthetic oligonucleotide
ggaggauuggccuugaacu

SEQ ID NO: 2793943 - RNA, 19 nt, Artificial Sequence
  Description of Artificial Sequence: Synthetic oligonucleotide
ucaaacccagggcacucca

SEQ ID NO: 2793944 - RNA, 19 nt, Artificial Sequence
  Description of Artificial Sequence: Synthetic oligonucleotide
augaguguggaccccuugu

SEQ ID NO: 2793945 - RNA, 19 nt, Artificial Sequence
  Description of Artificial Sequence: Synthetic oligonucleotide
aggauuggccuugaacuuc

SEQ ID NO: 2793946 - RNA, 19 nt, Artificial Sequence
  Description of Artificial Sequence: Synthetic oligonucleotide
uccacccucaucugagagc

SEQ ID NO: 2793947 - RNA, 19 nt, Artificial Sequence
  Description of Artificial Sequence: Synthetic oligonucleotide
agugcgcuguaaccuuggc

SEQ ID NO: 2793948 - RNA, 19 nt, Artificial Sequence
  Description of Artificial Sequence: Synthetic oligonucleotide
ggagguagugcucccagag

SEQ ID NO: 2793949 - RNA, 19 nt, Artificial Sequence
  Description of Artificial Sequence: Synthetic oligonucleotide
cuugggcaccgaaauguag

SEQ ID NO: 2793950 - RNA, 19 nt, Artificial Sequence
  Description of Artificial Sequence: Synthetic oligonucleotide
ugcuggaaugacacaauuu

SEQ ID NO: 2793951 - RNA, 19 nt, Artificial Sequence
  Description of Artificial Sequence: Synthetic oligonucleotide
guagugcucccagagacug

SEQ ID NO: 2793952 - RNA, 19 nt, Artificial Sequence
  Description of Artificial Sequence: Synthetic oligonucleotide
ugcaccacuaugcccaauu

SEQ ID NO: 2793953 - RNA, 19 nt, Artificial Sequence
  Description of Artificial Sequence: Synthetic oligonucleotide
cuccccaguauacccaacc

SEQ ID NO: 2793954 - RNA, 19 nt, Artificial Sequence
  Description of Artificial Sequence: Synthetic oligonucleotide
aacuuccuugugcuggaau

SEQ ID NO: 2793955 - RNA, 19 nt, Artificial Sequence
  Description of Artificial Sequence: Synthetic oligonucleotide
aucaaacccagggcacucc

SEQ ID NO: 2793956 - RNA, 19 nt, Artificial Sequence
  Description of Artificial Sequence: Synthetic oligonucleotide
cacagccuccacaaugccc

SEQ ID NO: 2793957 - RNA, 19 nt, Artificial Sequence
  Description of Artificial Sequence: Synthetic oligonucleotide
uccuugugcuggaaugaca

SEQ ID NO: 2793958 - RNA, 19 nt, Artificial Sequence
  Description of Artificial Sequence: Synthetic oligonucleotide
aagcuaggucagccgauca

SEQ ID NO: 2793959 - RNA, 19 nt, Artificial Sequence
  Description of Artificial Sequence: Synthetic oligonucleotide
ucuccccuaacuuccuugu

SEQ ID NO: 2793960 - RNA, 19 nt, Artificial Sequence
  Description of Artificial Sequence: Synthetic oligonucleotide
ugugcuggaaugacacaau

SEQ ID NO: 2793961 - RNA, 19 nt, Artificial Sequence
  Description of Artificial Sequence: Synthetic oligonucleotide
ucagccgaucaugagugug

SEQ ID NO: 2793962 - RNA, 19 nt, Artificial Sequence
  Description of Artificial Sequence: Synthetic oligonucleotide
aacccagggcacuccacca

SEQ ID NO: 2793963 - RNA, 19 nt, Artificial Sequence
  Description of Artificial Sequence: Synthetic oligonucleotide
aguugagcgugcuguucuc

SEQ ID NO: 2793964 - RNA, 19 nt, Artificial Sequence
  Description of Artificial Sequence: Synthetic oligonucleotide
ugcuauguaguggaggauu

SEQ ID NO: 2793965 - RNA, 19 nt, Artificial Sequence
  Description of Artificial Sequence: Synthetic oligonucleotide
uucuccuugggcaccgaaa

SEQ ID NO: 2793966 - RNA, 19 nt, Artificial Sequence
  Description of Artificial Sequence: Synthetic oligonucleotide
ugcccuaucuccccaguau

SEQ ID NO: 2793967 - RNA, 19 nt, Artificial Sequence
  Description of Artificial Sequence: Synthetic oligonucleotide
ucccucuuaaccucauauc

SEQ ID NO: 2793968 - RNA, 19 nt, Artificial Sequence
  Description of Artificial Sequence: Synthetic oligonucleotide
uccacaaugcccgccguga

SEQ ID NO: 2793969 - RNA, 19 nt, Artificial Sequence
  Description of Artificial Sequence: Synthetic oligonucleotide
accgaaauguagguguuga

SEQ ID NO: 2793970 - RNA, 19 nt, Artificial Sequence
  Description of Artificial Sequence: Synthetic oligonucleotide
uuggcagggaagccgcugu

SEQ ID NO: 2793971 - RNA, 19 nt, Artificial Sequence
  Description of Artificial Sequence: Synthetic oligonucleotide
gagacuggucuugaacuug

SEQ ID NO: 2793972 - RNA, 19 nt, Artificial Sequence
  Description of Artificial Sequence: Synthetic oligonucleotide
uacccaacccuccacccuc

SEQ ID NO: 2793973 - RNA, 19 nt, Artificial Sequence
  Description of Artificial Sequence: Synthetic oligonucleotide
ccgaucaugaguguggacc

SEQ ID NO: 2793974 - RNA, 19 nt, Artificial Sequence
  Description of Artificial Sequence: Synthetic oligonucleotide
cuauguaguggaggauugg

SEQ ID NO: 2793975 - RNA, 19 nt, Artificial Sequence
  Description of Artificial Sequence: Synthetic oligonucleotide
ccuugugcuggaaugacac

SEQ ID NO: 2793976 - RNA, 19 nt, Artificial Sequence
  Description of Artificial Sequence: Synthetic oligonucleotide
accuuggcagggaagccgc

SEQ ID NO: 2793977 - RNA, 19 nt, Artificial Sequence
  Description of Artificial Sequence: Synthetic oligonucleotide
ugggcaccgaaauguaggu

SEQ ID NO: 2793978 - RNA, 19 nt, Artificial Sequence
  Description of Artificial Sequence: Synthetic oligonucleotide
cauucaccuuuaaucccag

SEQ ID NO: 2793979 - RNA, 19 nt, Artificial Sequence
  Description of Artificial Sequence: Synthetic oligonucleotide
cuauggcacugacaguuug

SEQ ID NO: 2793980 - RNA, 19 nt, Artificial Sequence
  Description of Artificial Sequence: Synthetic oligonucleotide
aggcuccaauuauaauuuc

SEQ ID NO: 2793981 - RNA, 19 nt, Artificial Sequence
  Description of Artificial Sequence: Synthetic oligonucleotide
uaggucagccgaucaugag

SEQ ID NO: 2793982 - RNA, 19 nt, Artificial Sequence
  Description of Artificial Sequence: Synthetic oligonucleotide
acacaauuugcaccacuau

SEQ ID NO: 2793983 - RNA, 19 nt, Artificial Sequence
  Description of Artificial Sequence: Synthetic oligonucleotide
gagcgugcuguucuccuug

SEQ ID NO: 2793984 - RNA, 19 nt, Artificial Sequence
  Description of Artificial Sequence: Synthetic oligonucleotide
uugagcgugcuguucuccu

SEQ ID NO: 2793985 - RNA, 19 nt, Artificial Sequence
  Description of Artificial Sequence: Synthetic oligonucleotide
ugcuguucuccuugggcac

SEQ ID NO: 2793986 - RNA, 19 nt, Artificial Sequence
  Description of Artificial Sequence: Synthetic oligonucleotide
uuggucccucuuaaccuca

SEQ ID NO: 2793987 - RNA, 19 nt, Artificial Sequence
  Description of Artificial Sequence: Synthetic oligonucleotide
uagugcucccagagacugg

SEQ ID NO: 2793988 - RNA, 19 nt, Artificial Sequence
  Description of Artificial Sequence: Synthetic oligonucleotide
acaguugagcgugcuguuc

SEQ ID NO: 2793989 - RNA, 19 nt, Artificial Sequence
  Description of Artificial Sequence: Synthetic oligonucleotide
cuugaacuugcuauguagu

SEQ ID NO: 2793990 - RNA, 19 nt, Artificial Sequence
  Description of Artificial Sequence: Synthetic oligonucleotide
agagacuggucuugaacuu

SEQ ID NO: 2793991 - RNA, 19 nt, Artificial Sequence
  Description of Artificial Sequence: Synthetic oligonucleotide
ugcccaauuuauguggcau

SEQ ID NO: 2793992 - RNA, 19 nt, Artificial Sequence
  Description of Artificial Sequence: Synthetic oligonucleotide
gacacaauuugcaccacua

SEQ ID NO: 2793993 - RNA, 19 nt, Artificial Sequence
  Description of Artificial Sequence: Synthetic oligonucleotide
acccucaucugagagccag

SEQ ID NO: 2793994 - RNA, 19 nt, Artificial Sequence
  Description of Artificial Sequence: Synthetic oligonucleotide
ugccagugcgcuguaaccu

SEQ ID NO: 2793995 - RNA, 19 nt, Artificial Sequence
  Description of Artificial Sequence: Synthetic oligonucleotide
cuggucuugaacuugcuau

SEQ ID NO: 2793996 - RNA, 19 nt, Artificial Sequence
  Description of Artificial Sequence: Synthetic oligonucleotide
agggaagccgcugugcgug

SEQ ID NO: 2793997 - RNA, 19 nt, Artificial Sequence
  Description of Artificial Sequence: Synthetic oligonucleotide
uguggaccccuugugccag

SEQ ID NO: 2793998 - RNA, 19 nt, Artificial Sequence
  Description of Artificial Sequence: Synthetic oligonucleotide
cuaggucagccgaucauga

SEQ ID NO: 2793999 - RNA, 19 nt, Artificial Sequence
  Description of Artificial Sequence: Synthetic oligonucleotide
gccuuggucccucuuaacc

SEQ ID NO: 2794000 - RNA, 19 nt, Artificial Sequence
  Description of Artificial Sequence: Synthetic oligonucleotide
ggucagccgaucaugagug

SEQ ID NO: 2794001 - RNA, 19 nt, Artificial Sequence
  Description of Artificial Sequence: Synthetic oligonucleotide
auacccaacccuccacccu

SEQ ID NO: 2794002 - RNA, 19 nt, Artificial Sequence
  Description of Artificial Sequence: Synthetic oligonucleotide
ugacaguuugccaggccuu

SEQ ID NO: 2794003 - RNA, 19 nt, Artificial Sequence
  Description of Artificial Sequence: Synthetic oligonucleotide
agugcucccagagacuggu

SEQ ID NO: 2794004 - RNA, 19 nt, Artificial Sequence
  Description of Artificial Sequence: Synthetic oligonucleotide
gacaguuugccaggccuug

SEQ ID NO: 2794005 - RNA, 19 nt, Artificial Sequence
  Description of Artificial Sequence: Synthetic oligonucleotide
agcgugcuguucuccuugg

SEQ ID NO: 2794006 - RNA, 19 nt, Artificial Sequence
  Description of Artificial Sequence: Synthetic oligonucleotide
ucugauccuucuccccuaa

SEQ ID NO: 2794007 - RNA, 19 nt, Artificial Sequence
  Description of Artificial Sequence: Synthetic oligonucleotide
cucaucugagagccagaag

SEQ ID NO: 2794008 - RNA, 19 nt, Artificial Sequence
  Description of Artificial Sequence: Synthetic oligonucleotide
gagccagaagcuaggucag

SEQ ID NO: 2794009 - RNA, 19 nt, Artificial Sequence
  Description of Artificial Sequence: Synthetic oligonucleotide
uugguuuagcauucaccuu

SEQ ID NO: 2794010 - RNA, 19 nt, Artificial Sequence
  Description of Artificial Sequence: Synthetic oligonucleotide
gugccagugcgcuguaacc

SEQ ID NO: 2794011 - RNA, 19 nt, Artificial Sequence
  Description of Artificial Sequence: Synthetic oligonucleotide
cuccacccucaucugagag

SEQ ID NO: 2794012 - RNA, 19 nt, Artificial Sequence
  Description of Artificial Sequence: Synthetic oligonucleotide
gggcacuccaccaacuggg

SEQ ID NO: 2794013 - RNA, 19 nt, Artificial Sequence
  Description of Artificial Sequence: Synthetic oligonucleotide
cacaaugcccgccgugaag

SEQ ID NO: 2794014 - RNA, 19 nt, Artificial Sequence
  Description of Artificial Sequence: Synthetic oligonucleotide
uaguggaggauuggccuug

SEQ ID NO: 2794015 - RNA, 19 nt, Artificial Sequence
  Description of Artificial Sequence: Synthetic oligonucleotide
caggagguagugcucccag

SEQ ID NO: 2794016 - RNA, 19 nt, Artificial Sequence
  Description of Artificial Sequence: Synthetic oligonucleotide
aacuugcuauguaguggag

SEQ ID NO: 2794017 - RNA, 19 nt, Artificial Sequence
  Description of Artificial Sequence: Synthetic oligonucleotide
gagagccagaagcuagguc

SEQ ID NO: 2794018 - RNA, 19 nt, Artificial Sequence
  Description of Artificial Sequence: Synthetic oligonucleotide
acuggucuugaacuugcua

SEQ ID NO: 2794019 - RNA, 19 nt, Artificial Sequence
  Description of Artificial Sequence: Synthetic oligonucleotide
aacccuccacccucaucug

SEQ ID NO: 2794020 - RNA, 19 nt, Artificial Sequence
  Description of Artificial Sequence: Synthetic oligonucleotide
cuaacuuccuugugcugga

SEQ ID NO: 2794021 - RNA, 19 nt, Artificial Sequence
  Description of Artificial Sequence: Synthetic oligonucleotide
cccaguauacccaacccuc

SEQ ID NO: 2794022 - RNA, 19 nt, Artificial Sequence
  Description of Artificial Sequence: Synthetic oligonucleotide
cagaagcuaggucagccga

SEQ ID NO: 2794023 - RNA, 19 nt, Artificial Sequence
  Description of Artificial Sequence: Synthetic oligonucleotide
gaagcuaggucagccgauc

SEQ ID NO: 2794024 - RNA, 19 nt, Artificial Sequence
  Description of Artificial Sequence: Synthetic oligonucleotide
gaucaugaguguggacccc

SEQ ID NO: 2794025 - RNA, 19 nt, Artificial Sequence
  Description of Artificial Sequence: Synthetic oligonucleotide
uuccuugugcuggaaugac

SEQ ID NO: 2794026 - RNA, 19 nt, Artificial Sequence
  Description of Artificial Sequence: Synthetic oligonucleotide
cagugcgcuguaaccuugg

SEQ ID NO: 2794027 - RNA, 19 nt, Artificial Sequence
  Description of Artificial Sequence: Synthetic oligonucleotide
gagguagugcucccagaga

SEQ ID NO: 2794028 - RNA, 19 nt, Artificial Sequence
  Description of Artificial Sequence: Synthetic oligonucleotide
acaguuugccaggccuugg

SEQ ID NO: 2794029 - RNA, 19 nt, Artificial Sequence
  Description of Artificial Sequence: Synthetic oligonucleotide
ggcaccgaaauguaggugu

SEQ ID NO: 2794030 - RNA, 19 nt, Artificial Sequence
  Description of Artificial Sequence: Synthetic oligonucleotide
uggcacugacaguuugcca

SEQ ID NO: 2794031 - RNA, 19 nt, Artificial Sequence
  Description of Artificial Sequence: Synthetic oligonucleotide
caugaguguggaccccuug

SEQ ID NO: 2794032 - RNA, 19 nt, Artificial Sequence
  Description of Artificial Sequence: Synthetic oligonucleotide
uaggugcccuaucucccca

SEQ ID NO: 2794033 - RNA, 19 nt, Artificial Sequence
  Description of Artificial Sequence: Synthetic oligonucleotide
gaagccgcugugcgugagc

SEQ ID NO: 2794034 - RNA, 19 nt, Artificial Sequence
  Description of Artificial Sequence: Synthetic oligonucleotide
gcacugacaguuugccagg

SEQ ID NO: 2794035 - RNA, 19 nt, Artificial Sequence
  Description of Artificial Sequence: Synthetic oligonucleotide
gauccuucuccccuaacuu

SEQ ID NO: 2794036 - RNA, 19 nt, Artificial Sequence
  Description of Artificial Sequence: Synthetic oligonucleotide
uaauuucauaggugcccua

SEQ ID NO: 2794037 - RNA, 19 nt, Artificial Sequence
  Description of Artificial Sequence: Synthetic oligonucleotide
cuccaauuauaauuucaua

SEQ ID NO: 2794038 - RNA, 19 nt, Artificial Sequence
  Description of Artificial Sequence: Synthetic oligonucleotide
aucaugaguguggaccccu

SEQ ID NO: 2794039 - RNA, 19 nt, Artificial Sequence
  Description of Artificial Sequence: Synthetic oligonucleotide
gcuggcacaguugagcgug

SEQ ID NO: 2794040 - RNA, 19 nt, Artificial Sequence
  Description of Artificial Sequence: Synthetic oligonucleotide
ugcgugagcacagccucca

SEQ ID NO: 2794041 - RNA, 19 nt, Artificial Sequence
  Description of Artificial Sequence: Synthetic oligonucleotide
caccaacugggcuauggca

SEQ ID NO: 2794042 - RNA, 19 nt, Artificial Sequence
  Description of Artificial Sequence: Synthetic oligonucleotide
ugagagccagaagcuaggu

SEQ ID NO: 2794043 - RNA, 19 nt, Artificial Sequence
  Description of Artificial Sequence: Synthetic oligonucleotide
augacacaauuugcaccac

SEQ ID NO: 2794044 - RNA, 19 nt, Artificial Sequence
  Description of Artificial Sequence: Synthetic oligonucleotide
ccagaagcuaggucagccg

SEQ ID NO: 2794045 - RNA, 19 nt, Artificial Sequence
  Description of Artificial Sequence: Synthetic oligonucleotide
agcuaggucagccgaucau

SEQ ID NO: 2794046 - RNA, 19 nt, Artificial Sequence
  Description of Artificial Sequence: Synthetic oligonucleotide
ugcaggcuccaauuauaau

SEQ ID NO: 2794047 - RNA, 19 nt, Artificial Sequence
  Description of Artificial Sequence: Synthetic oligonucleotide
cucaggagguagugcuccc

SEQ ID NO: 2794048 - RNA, 19 nt, Artificial Sequence
  Description of Artificial Sequence: Synthetic oligonucleotide
uucugauccuucuccccua

SEQ ID NO: 2794049 - RNA, 19 nt, Artificial Sequence
  Description of Artificial Sequence: Synthetic oligonucleotide
ccaguauacccaacccucc

SEQ ID NO: 2794050 - RNA, 19 nt, Artificial Sequence
  Description of Artificial Sequence: Synthetic oligonucleotide
aucuccccaguauacccaa

SEQ ID NO: 2794051 - RNA, 19 nt, Artificial Sequence
  Description of Artificial Sequence: Synthetic oligonucleotide
ucaggagguagugcuccca

SEQ ID NO: 2794052 - RNA, 19 nt, Artificial Sequence
  Description of Artificial Sequence: Synthetic oligonucleotide
gcuauguaguggaggauug

SEQ ID NO: 2794053 - RNA, 19 nt, Artificial Sequence
  Description of Artificial Sequence: Synthetic oligonucleotide
ccagagacuggucuugaac

SEQ ID NO: 2794054 - RNA, 19 nt, Artificial Sequence
  Description of Artificial Sequence: Synthetic oligonucleotide
cugacaguuugccaggccu

SEQ ID NO: 2794055 - RNA, 19 nt, Artificial Sequence
  Description of Artificial Sequence: Synthetic oligonucleotide
caaacccagggcacuccac

SEQ ID NO: 2794056 - RNA, 19 nt, Artificial Sequence
  Description of Artificial Sequence: Synthetic oligonucleotide
cacuccaccaacugggcua

SEQ ID NO: 2794057 - RNA, 19 nt, Artificial Sequence
  Description of Artificial Sequence: Synthetic oligonucleotide
cgaucaugaguguggaccc

SEQ ID NO: 2794058 - RNA, 19 nt, Artificial Sequence
  Description of Artificial Sequence: Synthetic oligonucleotide
gcaggcuccaauuauaauu

SEQ ID NO: 2794059 - RNA, 19 nt, Artificial Sequence
  Description of Artificial Sequence: Synthetic oligonucleotide
agccagaagcuaggucagc

SEQ ID NO: 2794060 - RNA, 19 nt, Artificial Sequence
  Description of Artificial Sequence: Synthetic oligonucleotide
cgaaauguagguguugaug

SEQ ID NO: 2794061 - RNA, 19 nt, Artificial Sequence
  Description of Artificial Sequence: Synthetic oligonucleotide
uuugcaccacuaugcccaa

SEQ ID NO: 2794062 - RNA, 19 nt, Artificial Sequence
  Description of Artificial Sequence: Synthetic oligonucleotide
gcuaggucagccgaucaug

SEQ ID NO: 2794063 - RNA, 19 nt, Artificial Sequence
  Description of Artificial Sequence: Synthetic oligonucleotide
cuuccuugugcuggaauga

SEQ ID NO: 2794064 - RNA, 19 nt, Artificial Sequence
  Description of Artificial Sequence: Synthetic oligonucleotide
gccuccacaaugcccgccg

SEQ ID NO: 2794065 - RNA, 19 nt, Artificial Sequence
  Description of Artificial Sequence: Synthetic oligonucleotide
aggagguagugcucccaga

SEQ ID NO: 2794066 - RNA, 19 nt, Artificial Sequence
  Description of Artificial Sequence: Synthetic oligonucleotide
cagggcacuccaccaacug

SEQ ID NO: 2794067 - RNA, 19 nt, Artificial Sequence
  Description of Artificial Sequence: Synthetic oligonucleotide
accccuugugccagugcgc

SEQ ID NO: 2794068 - RNA, 19 nt, Artificial Sequence
  Description of Artificial Sequence: Synthetic oligonucleotide
aggccuuggucccucuuaa

SEQ ID NO: 2794069 - RNA, 19 nt, Artificial Sequence
  Description of Artificial Sequence: Synthetic oligonucleotide
uggcagggaagccgcugug

SEQ ID NO: 2794070 - RNA, 19 nt, Artificial Sequence
  Description of Artificial Sequence: Synthetic oligonucleotide
gucccucuuaaccucauau

SEQ ID NO: 2794071 - RNA, 19 nt, Artificial Sequence
  Description of Artificial Sequence: Synthetic oligonucleotide
caggcuccaauuauaauuu

SEQ ID NO: 2794072 - RNA, 19 nt, Artificial Sequence
  Description of Artificial Sequence: Synthetic oligonucleotide
cuguucuccuugggcaccg

SEQ ID NO: 2794073 - RNA, 19 nt, Artificial Sequence
  Description of Artificial Sequence: Synthetic oligonucleotide
caguauacccaacccucca

SEQ ID NO: 2794074 - RNA, 19 nt, Artificial Sequence
  Description of Artificial Sequence: Synthetic oligonucleotide
caucugagagccagaagcu

SEQ ID NO: 2794075 - RNA, 19 nt, Artificial Sequence
  Description of Artificial Sequence: Synthetic oligonucleotide
ugagcacagccuccacaau

SEQ ID NO: 2794076 - RNA, 19 nt, Artificial Sequence
  Description of Artificial Sequence: Synthetic oligonucleotide
agccuccacaaugcccgcc

SEQ ID NO: 2794077 - RNA, 19 nt, Artificial Sequence
  Description of Artificial Sequence: Synthetic oligonucleotide
aacugggcuauggcacuga

SEQ ID NO: 2794078 - RNA, 19 nt, Artificial Sequence
  Description of Artificial Sequence: Synthetic oligonucleotide
gugcgcuguaaccuuggca

SEQ ID NO: 2794079 - RNA, 19 nt, Artificial Sequence
  Description of Artificial Sequence: Synthetic oligonucleotide
gcauucaccuuuaauccca

SEQ ID NO: 2794080 - RNA, 19 nt, Artificial Sequence
  Description of Artificial Sequence: Synthetic oligonucleotide
cacucaggagguagugcuc

SEQ ID NO: 2794081 - RNA, 19 nt, Artificial Sequence
  Description of Artificial Sequence: Synthetic oligonucleotide
cuugugcuggaaugacaca

SEQ ID NO: 2794082 - RNA, 19 nt, Artificial Sequence
  Description of Artificial Sequence: Synthetic oligonucleotide
cuccuugggcaccgaaaug

SEQ ID NO: 2794083 - RNA, 19 nt, Artificial Sequence
  Description of Artificial Sequence: Synthetic oligonucleotide
ggcuccaauuauaauuuca

SEQ ID NO: 2794084 - RNA, 19 nt, Artificial Sequence
  Description of Artificial Sequence: Synthetic oligonucleotide
cuucugauccuucuccccu

SEQ ID NO: 2794085 - RNA, 19 nt, Artificial Sequence
  Description of Artificial Sequence: Synthetic oligonucleotide
cucuuaaccucauauccuu

SEQ ID NO: 2794086 - RNA, 19 nt, Artificial Sequence
  Description of Artificial Sequence: Synthetic oligonucleotide
ucaugaguguggaccccuu

SEQ ID NO: 2794087 - RNA, 19 nt, Artificial Sequence
  Description of Artificial Sequence: Synthetic oligonucleotide
aggugcccuaucuccccag

SEQ ID NO: 2794088 - RNA, 19 nt, Artificial Sequence
  Description of Artificial Sequence: Synthetic oligonucleotide
cuuggcagggaagccgcug

SEQ ID NO: 2794089 - RNA, 19 nt, Artificial Sequence
  Description of Artificial Sequence: Synthetic oligonucleotide
agcuggcacaguugagcgu

SEQ ID NO: 2794090 - RNA, 19 nt, Artificial Sequence
  Description of Artificial Sequence: Synthetic oligonucleotide
ucuccccaguauacccaac

SEQ ID NO: 2794091 - RNA, 19 nt, Artificial Sequence
  Description of Artificial Sequence: Synthetic oligonucleotide
gaggauuggccuugaacuu

SEQ ID NO: 2794092 - RNA, 19 nt, Artificial Sequence
  Description of Artificial Sequence: Synthetic oligonucleotide
guguggaccccuugugcca

SEQ ID NO: 2794093 - RNA, 19 nt, Artificial Sequence
  Description of Artificial Sequence: Synthetic oligonucleotide
ccuaucuccccaguauacc

SEQ ID NO: 2794094 - RNA, 19 nt, Artificial Sequence
  Description of Artificial Sequence: Synthetic oligonucleotide
cucccagagacuggucuug

SEQ ID NO: 2794095 - RNA, 19 nt, Artificial Sequence
  Description of Artificial Sequence: Synthetic oligonucleotide
ugagcgugcuguucuccuu

SEQ ID NO: 2794096 - RNA, 19 nt, Artificial Sequence
  Description of Artificial Sequence: Synthetic oligonucleotide
gucuugaacuugcuaugua

SEQ ID NO: 2794097 - RNA, 19 nt, Artificial Sequence
  Description of Artificial Sequence: Synthetic oligonucleotide
gcugugcgugagcacagcc

SEQ ID NO: 2794098 - RNA, 19 nt, Artificial Sequence
  Description of Artificial Sequence: Synthetic oligonucleotide
cacugacaguuugccaggc

SEQ ID NO: 2794099 - RNA, 19 nt, Artificial Sequence
  Description of Artificial Sequence: Synthetic oligonucleotide
agccgcugugcgugagcac

SEQ ID NO: 2794100 - RNA, 19 nt, Artificial Sequence
  Description of Artificial Sequence: Synthetic oligonucleotide
acccuccacccucaucuga

SEQ ID NO: 2794101 - RNA, 19 nt, Artificial Sequence
  Description of Artificial Sequence: Synthetic oligonucleotide
cuggcacaguugagcgugc

SEQ ID NO: 2794102 - RNA, 19 nt, Artificial Sequence
  Description of Artificial Sequence: Synthetic oligonucleotide
uugcuauguaguggaggau

SEQ ID NO: 2794103 - RNA, 19 nt, Artificial Sequence
  Description of Artificial Sequence: Synthetic oligonucleotide
ucccagagacuggucuuga

SEQ ID NO: 2794104 - RNA, 19 nt, Artificial Sequence
  Description of Artificial Sequence: Synthetic oligonucleotide
aucugagagccagaagcua

SEQ ID NO: 2794105 - RNA, 19 nt, Artificial Sequence
  Description of Artificial Sequence: Synthetic oligonucleotide
ccacuaugcccaauuuaug

SEQ ID NO: 2794106 - RNA, 19 nt, Artificial Sequence
  Description of Artificial Sequence: Synthetic oligonucleotide
cccuaucuccccaguauac

SEQ ID NO: 2794107 - RNA, 19 nt, Artificial Sequence
  Description of Artificial Sequence: Synthetic oligonucleotide
agccgaucaugagugugga

SEQ ID NO: 2794108 - RNA, 19 nt, Artificial Sequence
  Description of Artificial Sequence: Synthetic oligonucleotide
agaagcuaggucagccgau

SEQ ID NO: 2794109 - RNA, 19 nt, Artificial Sequence
  Description of Artificial Sequence: Synthetic oligonucleotide
cuccccuaacuuccuugug

SEQ ID NO: 2794110 - RNA, 19 nt, Artificial Sequence
  Description of Artificial Sequence: Synthetic oligonucleotide
caccgaaauguagguguug

SEQ ID NO: 2794111 - RNA, 19 nt, Artificial Sequence
  Description of Artificial Sequence: Synthetic oligonucleotide
caccacuaugcccaauuua

SEQ ID NO: 2794112 - RNA, 19 nt, Artificial Sequence
  Description of Artificial Sequence: Synthetic oligonucleotide
cccuccacccucaucugag

SEQ ID NO: 2794113 - RNA, 19 nt, Artificial Sequence
  Description of Artificial Sequence: Synthetic oligonucleotide
gcacucaggagguagugcu

SEQ ID NO: 2794114 - RNA, 19 nt, Artificial Sequence
  Description of Artificial Sequence: Synthetic oligonucleotide
gcgcuguaaccuuggcagg

SEQ ID NO: 2794115 - RNA, 19 nt, Artificial Sequence
  Description of Artificial Sequence: Synthetic oligonucleotide
ggcacaguugagcgugcug

SEQ ID NO: 2794116 - RNA, 19 nt, Artificial Sequence
  Description of Artificial Sequence: Synthetic oligonucleotide
caguugagcgugcuguucu

SEQ ID NO: 2794117 - RNA, 19 nt, Artificial Sequence
  Description of Artificial Sequence: Synthetic oligonucleotide
acuccaccaacugggcuau

SEQ ID NO: 2794118 - RNA, 19 nt, Artificial Sequence
  Description of Artificial Sequence: Synthetic oligonucleotide
cugggcuauggcacugaca

SEQ ID NO: 2794119 - RNA, 19 nt, Artificial Sequence
  Description of Artificial Sequence: Synthetic oligonucleotide
cugauccuucuccccuaac

SEQ ID NO: 2794120 - RNA, 19 nt, Artificial Sequence
  Description of Artificial Sequence: Synthetic oligonucleotide
ccaccaacugggcuauggc

SEQ ID NO: 2794121 - RNA, 19 nt, Artificial Sequence
  Description of Artificial Sequence: Synthetic oligonucleotide
guuuagcauucaccuuuaa

SEQ ID NO: 2794122 - RNA, 19 nt, Artificial Sequence
  Description of Artificial Sequence: Synthetic oligonucleotide
cccgccgugaagcuggcac

SEQ ID NO: 2794123 - RNA, 19 nt, Artificial Sequence
  Description of Artificial Sequence: Synthetic oligonucleotide
agccugcaggcuccaauua

SEQ ID NO: 2794124 - RNA, 19 nt, Artificial Sequence
  Description of Artificial Sequence: Synthetic oligonucleotide
uggaccccuugugccagug

SEQ ID NO: 2794125 - RNA, 19 nt, Artificial Sequence
  Description of Artificial Sequence: Synthetic oligonucleotide
acccagggcacuccaccaa

SEQ ID NO: 2794126 - RNA, 19 nt, Artificial Sequence
  Description of Artificial Sequence: Synthetic oligonucleotide
uggucccucuuaaccucau

SEQ ID NO: 2794127 - RNA, 19 nt, Artificial Sequence
  Description of Artificial Sequence: Synthetic oligonucleotide
caacugggcuauggcacug

SEQ ID NO: 2794128 - RNA, 19 nt, Artificial Sequence
  Description of Artificial Sequence: Synthetic oligonucleotide
gauuggccuugaacuucug

SEQ ID NO: 2794129 - RNA, 19 nt, Artificial Sequence
  Description of Artificial Sequence: Synthetic oligonucleotide
ggcuauggcacugacaguu

SEQ ID NO: 2794130 - RNA, 19 nt, Artificial Sequence
  Description of Artificial Sequence: Synthetic oligonucleotide
cgugaagcuggcacaguug

SEQ ID NO: 2794131 - RNA, 19 nt, Artificial Sequence
  Description of Artificial Sequence: Synthetic oligonucleotide
uaacuuccuugugcuggaa

SEQ ID NO: 2794132 - RNA, 19 nt, Artificial Sequence
  Description of Artificial Sequence: Synthetic oligonucleotide
cugugcgugagcacagccu

SEQ ID NO: 2794133 - RNA, 19 nt, Artificial Sequence
  Description of Artificial Sequence: Synthetic oligonucleotide
gcuccaauuauaauuucau

SEQ ID NO: 2794134 - RNA, 19 nt, Artificial Sequence
  Description of Artificial Sequence: Synthetic oligonucleotide
cuguaaccuuggcagggaa

SEQ ID NO: 2794135 - RNA, 19 nt, Artificial Sequence
  Description of Artificial Sequence: Synthetic oligonucleotide
guaguggaggauuggccuu

SEQ ID NO: 2794136 - RNA, 19 nt, Artificial Sequence
  Description of Artificial Sequence: Synthetic oligonucleotide
uggcacaguugagcgugcu

SEQ ID NO: 2794137 - RNA, 19 nt, Artificial Sequence
  Description of Artificial Sequence: Synthetic oligonucleotide
aguggaggauuggccuuga

SEQ ID NO: 2794138 - RNA, 19 nt, Artificial Sequence
  Description of Artificial Sequence: Synthetic oligonucleotide
guucuccuugggcaccgaa

SEQ ID NO: 2794139 - RNA, 19 nt, Artificial Sequence
  Description of Artificial Sequence: Synthetic oligonucleotide
gugcgugagcacagccucc

SEQ ID NO: 2794140 - RNA, 19 nt, Artificial Sequence
  Description of Artificial Sequence: Synthetic oligonucleotide
ccagugcgcuguaaccuug

SEQ ID NO: 2794141 - RNA, 19 nt, Artificial Sequence
  Description of Artificial Sequence: Synthetic oligonucleotide
cgcuguaaccuuggcaggg

SEQ ID NO: 2794142 - RNA, 19 nt, Artificial Sequence
  Description of Artificial Sequence: Synthetic oligonucleotide
gcacagccuccacaaugcc

SEQ ID NO: 2794143 - RNA, 19 nt, Artificial Sequence
  Description of Artificial Sequence: Synthetic oligonucleotide
ccucuuaaccucauauccu

SEQ ID NO: 2794144 - RNA, 19 nt, Artificial Sequence
  Description of Artificial Sequence: Synthetic oligonucleotide
gugcuggaaugacacaauu

SEQ ID NO: 2794145 - RNA, 19 nt, Artificial Sequence
  Description of Artificial Sequence: Synthetic oligonucleotide
ccuuggucccucuuaaccu

SEQ ID NO: 2794146 - RNA, 19 nt, Artificial Sequence
  Description of Artificial Sequence: Synthetic oligonucleotide
gccgcugugcgugagcaca

SEQ ID NO: 2794147 - RNA, 19 nt, Artificial Sequence
  Description of Artificial Sequence: Synthetic oligonucleotide
caggccuuggucccucuua

SEQ ID NO: 2794148 - RNA, 19 nt, Artificial Sequence
  Description of Artificial Sequence: Synthetic oligonucleotide
cccaauuuauguggcauaa

SEQ ID NO: 2794149 - RNA, 19 nt, Artificial Sequence
  Description of Artificial Sequence: Synthetic oligonucleotide
gcgugcuguucuccuuggg

SEQ ID NO: 2794150 - RNA, 19 nt, Artificial Sequence
  Description of Artificial Sequence: Synthetic oligonucleotide
ggcacuccaccaacugggc

SEQ ID NO: 2794151 - RNA, 19 nt, Artificial Sequence
  Description of Artificial Sequence: Synthetic oligonucleotide
ggucuugaacuugcuaugu

SEQ ID NO: 2794152 - RNA, 19 nt, Artificial Sequence
  Description of Artificial Sequence: Synthetic oligonucleotide
gguuuagcauucaccuuua

SEQ ID NO: 2794153 - RNA, 19 nt, Artificial Sequence
  Description of Artificial Sequence: Synthetic oligonucleotide
gcccaauuuauguggcaua

SEQ ID NO: 2794154 - RNA, 19 nt, Artificial Sequence
  Description of Artificial Sequence: Synthetic oligonucleotide
cccagggcacuccaccaac

SEQ ID NO: 2794155 - RNA, 19 nt, Artificial Sequence
  Description of Artificial Sequence: Synthetic oligonucleotide
gggcaccgaaauguaggug

SEQ ID NO: 2794156 - RNA, 19 nt, Artificial Sequence
  Description of Artificial Sequence: Synthetic oligonucleotide
ggaccccuugugccagugc

SEQ ID NO: 2794157 - RNA, 19 nt, Artificial Sequence
  Description of Artificial Sequence: Synthetic oligonucleotide
caguuugccaggccuuggu

SEQ ID NO: 2794158 - RNA, 19 nt, Artificial Sequence
  Description of Artificial Sequence: Synthetic oligonucleotide
uugccaggccuuggucccu

SEQ ID NO: 2794159 - RNA, 19 nt, Artificial Sequence
  Description of Artificial Sequence: Synthetic oligonucleotide
gugcccuaucuccccagua

SEQ ID NO: 2794160 - RNA, 19 nt, Artificial Sequence
  Description of Artificial Sequence: Synthetic oligonucleotide
gcuguaaccuuggcaggga

SEQ ID NO: 2794161 - RNA, 19 nt, Artificial Sequence
  Description of Artificial Sequence: Synthetic oligonucleotide
cccuaacuuccuugugcug

SEQ ID NO: 2794162 - RNA, 19 nt, Artificial Sequence
  Description of Artificial Sequence: Synthetic oligonucleotide
uugugccagugcgcuguaa

SEQ ID NO: 2794163 - RNA, 19 nt, Artificial Sequence
  Description of Artificial Sequence: Synthetic oligonucleotide
ggauuggccuugaacuucu

SEQ ID NO: 2794164 - RNA, 19 nt, Artificial Sequence
  Description of Artificial Sequence: Synthetic oligonucleotide
gcccuaucuccccaguaua

SEQ ID NO: 2794165 - RNA, 19 nt, Artificial Sequence
  Description of Artificial Sequence: Synthetic oligonucleotide
ggccuuggucccucuuaac

SEQ ID NO: 2794166 - RNA, 19 nt, Artificial Sequence
  Description of Artificial Sequence: Synthetic oligonucleotide
ggaagccgcugugcgugag

SEQ ID NO: 2794167 - RNA, 19 nt, Artificial Sequence
  Description of Artificial Sequence: Synthetic oligonucleotide
ugccaggccuuggucccuc

SEQ ID NO: 2794168 - RNA, 19 nt, Artificial Sequence
  Description of Artificial Sequence: Synthetic oligonucleotide
gccgaucaugaguguggac

SEQ ID NO: 2794169 - RNA, 19 nt, Artificial Sequence
  Description of Artificial Sequence: Synthetic oligonucleotide
cagccugcaggcuccaauu

SEQ ID NO: 2794170 - RNA, 19 nt, Artificial Sequence
  Description of Artificial Sequence: Synthetic oligonucleotide
ccccuaacuuccuugugcu

SEQ ID NO: 2794171 - RNA, 19 nt, Artificial Sequence
  Description of Artificial Sequence: Synthetic oligonucleotide
ccgcugugcgugagcacag

SEQ ID NO: 2794172 - RNA, 19 nt, Artificial Sequence
  Description of Artificial Sequence: Synthetic oligonucleotide
gucagccgaucaugagugu

SEQ ID NO: 2794173 - RNA, 19 nt, Artificial Sequence
  Description of Artificial Sequence: Synthetic oligonucleotide
gguagugcucccagagacu

SEQ ID NO: 2794174 - RNA, 19 nt, Artificial Sequence
  Description of Artificial Sequence: Synthetic oligonucleotide
cagggaagccgcugugcgu

SEQ ID NO: 2794175 - RNA, 19 nt, Artificial Sequence
  Description of Artificial Sequence: Synthetic oligonucleotide
guggaggauuggccuugaa

SEQ ID NO: 2794176 - RNA, 19 nt, Artificial Sequence
  Description of Artificial Sequence: Synthetic oligonucleotide
cacaguugagcgugcuguu

SEQ ID NO: 2794177 - RNA, 19 nt, Artificial Sequence
  Description of Artificial Sequence: Synthetic oligonucleotide
ccucaucugagagccagaa

SEQ ID NO: 2794178 - RNA, 19 nt, Artificial Sequence
  Description of Artificial Sequence: Synthetic oligonucleotide
caaugcccgccgugaagcu

SEQ ID NO: 2794179 - RNA, 19 nt, Artificial Sequence
  Description of Artificial Sequence: Synthetic oligonucleotide
ccaacccuccacccucauc

SEQ ID NO: 2794180 - RNA, 19 nt, Artificial Sequence
  Description of Artificial Sequence: Synthetic oligonucleotide
ccaccucuccagccugcag

SEQ ID NO: 2794181 - RNA, 19 nt, Artificial Sequence
  Description of Artificial Sequence: Synthetic oligonucleotide
uccagccugcaggcuccaa

SEQ ID NO: 2794182 - RNA, 19 nt, Artificial Sequence
  Description of Artificial Sequence: Synthetic oligonucleotide
ccaauuuauguggcauaaa

SEQ ID NO: 2794183 - RNA, 19 nt, Artificial Sequence
  Description of Artificial Sequence: Synthetic oligonucleotide
ccaacugggcuauggcacu

SEQ ID NO: 2794184 - RNA, 19 nt, Artificial Sequence
  Description of Artificial Sequence: Synthetic oligonucleotide
ccccaguauacccaacccu

SEQ ID NO: 2794185 - RNA, 19 nt, Artificial Sequence
  Description of Artificial Sequence: Synthetic oligonucleotide
gccugcaggcuccaauuau

SEQ ID NO: 2794186 - RNA, 19 nt, Artificial Sequence
  Description of Artificial Sequence: Synthetic oligonucleotide
cuugugccagugcgcugua

SEQ ID NO: 2794187 - RNA, 19 nt, Artificial Sequence
  Description of Artificial Sequence: Synthetic oligonucleotide
ccuugggcaccgaaaugua

SEQ ID NO: 2794188 - RNA, 19 nt, Artificial Sequence
  Description of Artificial Sequence: Synthetic oligonucleotide
ccccaccucuccagccugc

SEQ ID NO: 2794189 - RNA, 19 nt, Artificial Sequence
  Description of Artificial Sequence: Synthetic oligonucleotide
cacccucaucugagagcca

SEQ ID NO: 2794190 - RNA, 19 nt, Artificial Sequence
  Description of Artificial Sequence: Synthetic oligonucleotide
gggaagccgcugugcguga

SEQ ID NO: 2794191 - RNA, 19 nt, Artificial Sequence
  Description of Artificial Sequence: Synthetic oligonucleotide
ggucccucuuaaccucaua

SEQ ID NO: 2794192 - RNA, 19 nt, Artificial Sequence
  Description of Artificial Sequence: Synthetic oligonucleotide
ggugcccuaucuccccagu

SEQ ID NO: 2794193 - RNA, 19 nt, Artificial Sequence
  Description of Artificial Sequence: Synthetic oligonucleotide
cgccgugaagcuggcacag

SEQ ID NO: 2794194 - RNA, 19 nt, Artificial Sequence
  Description of Artificial Sequence: Synthetic oligonucleotide
ccgccgugaagcuggcaca

SEQ ID NO: 2794195 - RNA, 19 nt, Artificial Sequence
  Description of Artificial Sequence: Synthetic oligonucleotide
cccuugugccagugcgcug

SEQ ID NO: 2794196 - RNA, 19 nt, Artificial Sequence
  Description of Artificial Sequence: Synthetic oligonucleotide
gcgugagcacagccuccac

SEQ ID NO: 2794197 - RNA, 19 nt, Artificial Sequence
  Description of Artificial Sequence: Synthetic oligonucleotide
gugcucccagagacugguc

SEQ ID NO: 2794198 - RNA, 19 nt, Artificial Sequence
  Description of Artificial Sequence: Synthetic oligonucleotide
gccagugcgcuguaaccuu

SEQ ID NO: 2794199 - RNA, 19 nt, Artificial Sequence
  Description of Artificial Sequence: Synthetic oligonucleotide
cuucuccccuaacuuccuu

SEQ ID NO: 2794200 - RNA, 19 nt, Artificial Sequence
  Description of Artificial Sequence: Synthetic oligonucleotide
gcaccacuaugcccaauuu

SEQ ID NO: 2794201 - RNA, 19 nt, Artificial Sequence
  Description of Artificial Sequence: Synthetic oligonucleotide
cccucaucugagagccaga

SEQ ID NO: 2794202 - RNA, 19 nt, Artificial Sequence
  Description of Artificial Sequence: Synthetic oligonucleotide
cuccaccaacugggcuaug

SEQ ID NO: 2794203 - RNA, 19 nt, Artificial Sequence
  Description of Artificial Sequence: Synthetic oligonucleotide
cccagagacuggucuugaa

SEQ ID NO: 2794204 - RNA, 19 nt, Artificial Sequence
  Description of Artificial Sequence: Synthetic oligonucleotide
ccacaaugcccgccgugaa

SEQ ID NO: 2794205 - RNA, 19 nt, Artificial Sequence
  Description of Artificial Sequence: Synthetic oligonucleotide
gggcuauggcacugacagu

SEQ ID NO: 2794206 - RNA, 19 nt, Artificial Sequence
  Description of Artificial Sequence: Synthetic oligonucleotide
ccgaaauguagguguugau

SEQ ID NO: 2794207 - RNA, 19 nt, Artificial Sequence
  Description of Artificial Sequence: Synthetic oligonucleotide
guggaccccuugugccagu

SEQ ID NO: 2794208 - RNA, 19 nt, Artificial Sequence
  Description of Artificial Sequence: Synthetic oligonucleotide
ccgugaagcuggcacaguu

SEQ ID NO: 2794209 - RNA, 19 nt, Artificial Sequence
  Description of Artificial Sequence: Synthetic oligonucleotide
ccagggcacuccaccaacu

SEQ ID NO: 2794210 - RNA, 19 nt, Artificial Sequence
  Description of Artificial Sequence: Synthetic oligonucleotide
ccuucuccccuaacuuccu

SEQ ID NO: 2794211 - RNA, 19 nt, Artificial Sequence
  Description of Artificial Sequence: Synthetic oligonucleotide
ccagccugcaggcuccaau

SEQ ID NO: 2794212 - RNA, 19 nt, Artificial Sequence
  Description of Artificial Sequence: Synthetic oligonucleotide
gcuauggcacugacaguuu

SEQ ID NO: 2794213 - RNA, 19 nt, Artificial Sequence
  Description of Artificial Sequence: Synthetic oligonucleotide
gcaccgaaauguagguguu

SEQ ID NO: 2794214 - RNA, 19 nt, Artificial Sequence
  Description of Artificial Sequence: Synthetic oligonucleotide
cgcugugcgugagcacagc

SEQ ID NO: 2794215 - RNA, 19 nt, Artificial Sequence
  Description of Artificial Sequence: Synthetic oligonucleotide
ccccuugugccagugcgcu

SEQ ID NO: 2794216 - RNA, 19 nt, Artificial Sequence
  Description of Artificial Sequence: Synthetic oligonucleotide
ccuuggcagggaagccgcu

SEQ ID NO: 2794217 - RNA, 19 nt, Artificial Sequence
  Description of Artificial Sequence: Synthetic oligonucleotide
gccgugaagcuggcacagu

SEQ ID NO: 2794218 - RNA, 19 nt, Artificial Sequence
  Description of Artificial Sequence: Synthetic oligonucleotide
ccuccacaaugcccgccgu

SEQ ID NO: 2794219 - RNA, 19 nt, Artificial Sequence
  Description of Artificial Sequence: Synthetic oligonucleotide
gccaggccuuggucccucu

SEQ ID NO: 2794220 - RNA, 19 nt, Artificial Sequence
  Description of Artificial Sequence: Synthetic oligonucleotide
gcccgccgugaagcuggca

SEQ ID NO: 2794221 - RNA, 19 nt, Artificial Sequence
  Description of Artificial Sequence: Synthetic oligonucleotide
ccaggccuuggucccucuu

SEQ ID NO: 2794222 - RNA, 19 nt, Artificial Sequence
  Description of Artificial Sequence: Synthetic oligonucleotide
cccaacccuccacccucau

SEQ ID NO: 2794223 - RNA, 19 nt, Artificial Sequence
  Description of Artificial Sequence: Synthetic oligonucleotide
aaaagcuaaagccagagcc

SEQ ID NO: 2794224 - RNA, 19 nt, Artificial Sequence
  Description of Artificial Sequence: Synthetic oligonucleotide
ucuauuaugaugcugcuac

SEQ ID NO: 2794225 - RNA, 19 nt, Artificial Sequence
  Description of Artificial Sequence: Synthetic oligonucleotide
auacauacauagcagaagg

SEQ ID NO: 2794226 - RNA, 19 nt, Artificial Sequence
  Description of Artificial Sequence: Synthetic oligonucleotide
aagaguugaaauuuauuug

SEQ ID NO: 2794227 - RNA, 19 nt, Artificial Sequence
  Description of Artificial Sequence: Synthetic oligonucleotide
aaugcuugguucccguucc

SEQ ID NO: 2794228 - RNA, 19 nt, Artificial Sequence
  Description of Artificial Sequence: Synthetic oligonucleotide
augaggauaaauuugagau

SEQ ID NO: 2794229 - RNA, 19 nt, Artificial Sequence
  Description of Artificial Sequence: Synthetic oligonucleotide
uuggcauacauacauagca

SEQ ID NO: 2794230 - RNA, 19 nt, Artificial Sequence
  Description of Artificial Sequence: Synthetic oligonucleotide
caucacucuauuaugaugc

SEQ ID NO: 2794231 - RNA, 19 nt, Artificial Sequence
  Description of Artificial Sequence: Synthetic oligonucleotide
aguaaggugucucuagggc

SEQ ID NO: 2794232 - RNA, 19 nt, Artificial Sequence
  Description of Artificial Sequence: Synthetic oligonucleotide
aaagccagagcccaccuuc

SEQ ID NO: 2794233 - RNA, 19 nt, Artificial Sequence
  Description of Artificial Sequence: Synthetic oligonucleotide
auaaauuugagauugucuu

SEQ ID NO: 2794234 - RNA, 19 nt, Artificial Sequence
  Description of Artificial Sequence: Synthetic oligonucleotide
aaagcuaaagccagagccc

SEQ ID NO: 2794235 - RNA, 19 nt, Artificial Sequence
  Description of Artificial Sequence: Synthetic oligonucleotide
agaguugaaauuuauuugu

SEQ ID NO: 2794236 - RNA, 19 nt, Artificial Sequence
  Description of Artificial Sequence: Synthetic oligonucleotide
gauugucuucauuaaaugc

SEQ ID NO: 2794237 - RNA, 19 nt, Artificial Sequence
  Description of Artificial Sequence: Synthetic oligonucleotide
uuugagauugucuucauua

SEQ ID NO: 2794238 - RNA, 19 nt, Artificial Sequence
  Description of Artificial Sequence: Synthetic oligonucleotide
ucguuauucagcagcaggg

SEQ ID NO: 2794239 - RNA, 19 nt, Artificial Sequence
  Description of Artificial Sequence: Synthetic oligonucleotide
gaggauaaauuugagauug

SEQ ID NO: 2794240 - RNA, 19 nt, Artificial Sequence
  Description of Artificial Sequence: Synthetic oligonucleotide
uucauuaaaugcuugguuc

SEQ ID NO: 2794241 - RNA, 19 nt, Artificial Sequence
  Description of Artificial Sequence: Synthetic oligonucleotide
aaaugcuugguucccguuc

SEQ ID NO: 2794242 - RNA, 19 nt, Artificial Sequence
  Description of Artificial Sequence: Synthetic oligonucleotide
uuaugaugcugcuacuugg

SEQ ID NO: 2794243 - RNA, 19 nt, Artificial Sequence
  Description of Artificial Sequence: Synthetic oligonucleotide
cacucuauuaugaugcugc

SEQ ID NO: 2794244 - RNA, 19 nt, Artificial Sequence
  Description of Artificial Sequence: Synthetic oligonucleotide
ucauuaaaugcuugguucc

SEQ ID NO: 2794245 - RNA, 19 nt, Artificial Sequence
  Description of Artificial Sequence: Synthetic oligonucleotide
aaauuugagauugucuuca

SEQ ID NO: 2794246 - RNA, 19 nt, Artificial Sequence
  Description of Artificial Sequence: Synthetic oligonucleotide
uaugaugcugcuacuuggg

SEQ ID NO: 2794247 - RNA, 19 nt, Artificial Sequence
  Description of Artificial Sequence: Synthetic oligonucleotide
aagccuacagucuccuugg

SEQ ID NO: 2794248 - RNA, 19 nt, Artificial Sequence
  Description of Artificial Sequence: Synthetic oligonucleotide
cauacauagcagaagguug

SEQ ID NO: 2794249 - RNA, 19 nt, Artificial Sequence
  Description of Artificial Sequence: Synthetic oligonucleotide
ugggcuuuggccuucagca

SEQ ID NO: 2794250 - RNA, 19 nt, Artificial Sequence
  Description of Artificial Sequence: Synthetic oligonucleotide
ucguaggcagcccagaugu

SEQ ID NO: 2794251 - RNA, 19 nt, Artificial Sequence
  Description of Artificial Sequence: Synthetic oligonucleotide
gaagccuacagucuccuug

SEQ ID NO: 2794252 - RNA, 19 nt, Artificial Sequence
  Description of Artificial Sequence: Synthetic oligonucleotide
auuaugaugcugcuacuug

SEQ ID NO: 2794253 - RNA, 19 nt, Artificial Sequence
  Description of Artificial Sequence: Synthetic oligonucleotide
gucuccuuggcauacauac

SEQ ID NO: 2794254 - RNA, 19 nt, Artificial Sequence
  Description of Artificial Sequence: Synthetic oligonucleotide
gauguuacuggcgauggcc

SEQ ID NO: 2794255 - RNA, 19 nt, Artificial Sequence
  Description of Artificial Sequence: Synthetic oligonucleotide
auugucuucauuaaaugcu

SEQ ID NO: 2794256 - RNA, 19 nt, Artificial Sequence
  Description of Artificial Sequence: Synthetic oligonucleotide
uaaggugucucuagggccc

SEQ ID NO: 2794257 - RNA, 19 nt, Artificial Sequence
  Description of Artificial Sequence: Synthetic oligonucleotide
aauggcuacacggcccucc

SEQ ID NO: 2794258 - RNA, 19 nt, Artificial Sequence
  Description of Artificial Sequence: Synthetic oligonucleotide
uguaaccaguccaguaagg

SEQ ID NO: 2794259 - RNA, 19 nt, Artificial Sequence
  Description of Artificial Sequence: Synthetic oligonucleotide
agauugucuucauuaaaug

SEQ ID NO: 2794260 - RNA, 19 nt, Artificial Sequence
  Description of Artificial Sequence: Synthetic oligonucleotide
auagcagaagguuggccac

SEQ ID NO: 2794261 - RNA, 19 nt, Artificial Sequence
  Description of Artificial Sequence: Synthetic oligonucleotide
aaagccuugggacgcagca

SEQ ID NO: 2794262 - RNA, 19 nt, Artificial Sequence
  Description of Artificial Sequence: Synthetic oligonucleotide
gucuucauuaaaugcuugg

SEQ ID NO: 2794263 - RNA, 19 nt, Artificial Sequence
  Description of Artificial Sequence: Synthetic oligonucleotide
uggcauacauacauagcag

SEQ ID NO: 2794264 - RNA, 19 nt, Artificial Sequence
  Description of Artificial Sequence: Synthetic oligonucleotide
cauuccgaagccuacaguc

SEQ ID NO: 2794265 - RNA, 19 nt, Artificial Sequence
  Description of Artificial Sequence: Synthetic oligonucleotide
uuuugucaagaguugaaau

SEQ ID NO: 2794266 - RNA, 19 nt, Artificial Sequence
  Description of Artificial Sequence: Synthetic oligonucleotide
cucguuauucagcagcagg

SEQ ID NO: 2794267 - RNA, 19 nt, Artificial Sequence
  Description of Artificial Sequence: Synthetic oligonucleotide
ugcgucaaagccuugggac

SEQ ID NO: 2794268 - RNA, 19 nt, Artificial Sequence
  Description of Artificial Sequence: Synthetic oligonucleotide
gaugcugcuacuuggguga

SEQ ID NO: 2794269 - RNA, 19 nt, Artificial Sequence
  Description of Artificial Sequence: Synthetic oligonucleotide
aguaauggcuacacggccc

SEQ ID NO: 2794270 - RNA, 19 nt, Artificial Sequence
  Description of Artificial Sequence: Synthetic oligonucleotide
aaccaguccaguaaggugu

SEQ ID NO: 2794271 - RNA, 19 nt, Artificial Sequence
  Description of Artificial Sequence: Synthetic oligonucleotide
auacauagcagaagguugg

SEQ ID NO: 2794272 - RNA, 19 nt, Artificial Sequence
  Description of Artificial Sequence: Synthetic oligonucleotide
ucccucguuauucagcagc

SEQ ID NO: 2794273 - RNA, 19 nt, Artificial Sequence
  Description of Artificial Sequence: Synthetic oligonucleotide
aaggccugggcuuuggccu

SEQ ID NO: 2794274 - RNA, 19 nt, Artificial Sequence
  Description of Artificial Sequence: Synthetic oligonucleotide
uuccaucacucuauuauga

SEQ ID NO: 2794275 - RNA, 19 nt, Artificial Sequence
  Description of Artificial Sequence: Synthetic oligonucleotide
uugguucccguuccggucg

SEQ ID NO: 2794276 - RNA, 19 nt, Artificial Sequence
  Description of Artificial Sequence: Synthetic oligonucleotide
guaaggugucucuagggcc

SEQ ID NO: 2794277 - RNA, 19 nt, Artificial Sequence
  Description of Artificial Sequence: Synthetic oligonucleotide
aguugaaauuuauuuguaa

SEQ ID NO: 2794278 - RNA, 19 nt, Artificial Sequence
  Description of Artificial Sequence: Synthetic oligonucleotide
uccaguaaggugucucuag

SEQ ID NO: 2794279 - RNA, 19 nt, Artificial Sequence
  Description of Artificial Sequence: Synthetic oligonucleotide
uaaccaguccaguaaggug

SEQ ID NO: 2794280 - RNA, 19 nt, Artificial Sequence
  Description of Artificial Sequence: Synthetic oligonucleotide
ugaugcugcuacuugggug

SEQ ID NO: 2794281 - RNA, 19 nt, Artificial Sequence
  Description of Artificial Sequence: Synthetic oligonucleotide
ucugacuccagcuuccauc

SEQ ID NO: 2794282 - RNA, 19 nt, Artificial Sequence
  Description of Artificial Sequence: Synthetic oligonucleotide
augccugcgucuccuaacc

SEQ ID NO: 2794283 - RNA, 19 nt, Artificial Sequence
  Description of Artificial Sequence: Synthetic oligonucleotide
cauacauacauagcagaag

SEQ ID NO: 2794284 - RNA, 19 nt, Artificial Sequence
  Description of Artificial Sequence: Synthetic oligonucleotide
ugagauugucuucauuaaa

SEQ ID NO: 2794285 - RNA, 19 nt, Artificial Sequence
  Description of Artificial Sequence: Synthetic oligonucleotide
uuggccacccgaguaaugg

SEQ ID NO: 2794286 - RNA, 19 nt, Artificial Sequence
  Description of Artificial Sequence: Synthetic oligonucleotide
gaguaauggcuacacggcc

SEQ ID NO: 2794287 - RNA, 19 nt, Artificial Sequence
  Description of Artificial Sequence: Synthetic oligonucleotide
aguccaugaggauaaauuu

SEQ ID NO: 2794288 - RNA, 19 nt, Artificial Sequence
  Description of Artificial Sequence: Synthetic oligonucleotide
auuaaaugcuugguucccg

SEQ ID NO: 2794289 - RNA, 19 nt, Artificial Sequence
  Description of Artificial Sequence: Synthetic oligonucleotide
cuuggcauacauacauagc

SEQ ID NO: 2794290 - RNA, 19 nt, Artificial Sequence
  Description of Artificial Sequence: Synthetic oligonucleotide
ucuucauuaaaugcuuggu

SEQ ID NO: 2794291 - RNA, 19 nt, Artificial Sequence
  Description of Artificial Sequence: Synthetic oligonucleotide
aguaggccagcaaggaucc

SEQ ID NO: 2794292 - RNA, 19 nt, Artificial Sequence
  Description of Artificial Sequence: Synthetic oligonucleotide
cuuccuguaaccaguccag

SEQ ID NO: 2794293 - RNA, 19 nt, Artificial Sequence
  Description of Artificial Sequence: Synthetic oligonucleotide
uacacggcccuccaugcag

SEQ ID NO: 2794294 - RNA, 19 nt, Artificial Sequence
  Description of Artificial Sequence: Synthetic oligonucleotide
cauagcagaagguuggcca

SEQ ID NO: 2794295 - RNA, 19 nt, Artificial Sequence
  Description of Artificial Sequence: Synthetic oligonucleotide
agcagggugcuuuggacuc

SEQ ID NO: 2794296 - RNA, 19 nt, Artificial Sequence
  Description of Artificial Sequence: Synthetic oligonucleotide
cuuagcaccugcgucaaag

SEQ ID NO: 2794297 - RNA, 19 nt, Artificial Sequence
  Description of Artificial Sequence: Synthetic oligonucleotide
uugucaagaguugaaauuu

SEQ ID NO: 2794298 - RNA, 19 nt, Artificial Sequence
  Description of Artificial Sequence: Synthetic oligonucleotide
ucaagaguugaaauuuauu

SEQ ID NO: 2794299 - RNA, 19 nt, Artificial Sequence
  Description of Artificial Sequence: Synthetic oligonucleotide
accggaguaggccagcaag

SEQ ID NO: 2794300 - RNA, 19 nt, Artificial Sequence
  Description of Artificial Sequence: Synthetic oligonucleotide
uacauacauagcagaaggu

SEQ ID NO: 2794301 - RNA, 19 nt, Artificial Sequence
  Description of Artificial Sequence: Synthetic oligonucleotide
uuaaaugcuugguucccgu

SEQ ID NO: 2794302 - RNA, 19 nt, Artificial Sequence
  Description of Artificial Sequence: Synthetic oligonucleotide
gauaaauuugagauugucu

SEQ ID NO: 2794303 - RNA, 19 nt, Artificial Sequence
  Description of Artificial Sequence: Synthetic oligonucleotide
ccgaguaauggcuacacgg

SEQ ID NO: 2794304 - RNA, 19 nt, Artificial Sequence
  Description of Artificial Sequence: Synthetic oligonucleotide
gaucccucguuauucagca

SEQ ID NO: 2794305 - RNA, 19 nt, Artificial Sequence
  Description of Artificial Sequence: Synthetic oligonucleotide
uugagauugucuucauuaa

SEQ ID NO: 2794306 - RNA, 19 nt, Artificial Sequence
  Description of Artificial Sequence: Synthetic oligonucleotide
caguaaggugucucuaggg

SEQ ID NO: 2794307 - RNA, 19 nt, Artificial Sequence
  Description of Artificial Sequence: Synthetic oligonucleotide
uuuggccuucagcauuccg

SEQ ID NO: 2794308 - RNA, 19 nt, Artificial Sequence
  Description of Artificial Sequence: Synthetic oligonucleotide
caucuguguccccauaacc

SEQ ID NO: 2794309 - RNA, 19 nt, Artificial Sequence
  Description of Artificial Sequence: Synthetic oligonucleotide
uugucuucauuaaaugcuu

SEQ ID NO: 2794310 - RNA, 19 nt, Artificial Sequence
  Description of Artificial Sequence: Synthetic oligonucleotide
ucuccuaacccugaccggc

SEQ ID NO: 2794311 - RNA, 19 nt, Artificial Sequence
  Description of Artificial Sequence: Synthetic oligonucleotide
caugaggauaaauuugaga

SEQ ID NO: 2794312 - RNA, 19 nt, Artificial Sequence
  Description of Artificial Sequence: Synthetic oligonucleotide
agauguuacuggcgauggc

SEQ ID NO: 2794313 - RNA, 19 nt, Artificial Sequence
  Description of Artificial Sequence: Synthetic oligonucleotide
uguguccccauaaccggag

SEQ ID NO: 2794314 - RNA, 19 nt, Artificial Sequence
  Description of Artificial Sequence: Synthetic oligonucleotide
uggcuuagcaccugcguca

SEQ ID NO: 2794315 - RNA, 19 nt, Artificial Sequence
  Description of Artificial Sequence: Synthetic oligonucleotide
ugaggauaaauuugagauu

SEQ ID NO: 2794316 - RNA, 19 nt, Artificial Sequence
  Description of Artificial Sequence: Synthetic oligonucleotide
acauagcagaagguuggcc

SEQ ID NO: 2794317 - RNA, 19 nt, Artificial Sequence
  Description of Artificial Sequence: Synthetic oligonucleotide
aaggaucccucguuauuca

SEQ ID NO: 2794318 - RNA, 19 nt, Artificial Sequence
  Description of Artificial Sequence: Synthetic oligonucleotide
uuggcuuagcaccugcguc

SEQ ID NO: 2794319 - RNA, 19 nt, Artificial Sequence
  Description of Artificial Sequence: Synthetic oligonucleotide
ucuagggcccugauccucc

SEQ ID NO: 2794320 - RNA, 19 nt, Artificial Sequence
  Description of Artificial Sequence: Synthetic oligonucleotide
cuguaaccaguccaguaag

SEQ ID NO: 2794321 - RNA, 19 nt, Artificial Sequence
  Description of Artificial Sequence: Synthetic oligonucleotide
acugcaccaaggccugggc

SEQ ID NO: 2794322 - RNA, 19 nt, Artificial Sequence
  Description of Artificial Sequence: Synthetic oligonucleotide
cauuaaaugcuugguuccc

SEQ ID NO: 2794323 - RNA, 19 nt, Artificial Sequence
  Description of Artificial Sequence: Synthetic oligonucleotide
cagauguuacuggcgaugg

SEQ ID NO: 2794324 - RNA, 19 nt, Artificial Sequence
  Description of Artificial Sequence: Synthetic oligonucleotide
acauacauagcagaagguu

SEQ ID NO: 2794325 - RNA, 19 nt, Artificial Sequence
  Description of Artificial Sequence: Synthetic oligonucleotide
uugggacgcagcaugccug

SEQ ID NO: 2794326 - RNA, 19 nt, Artificial Sequence
  Description of Artificial Sequence: Synthetic oligonucleotide
gauccucccauccaccauc

SEQ ID NO: 2794327 - RNA, 19 nt, Artificial Sequence
  Description of Artificial Sequence: Synthetic oligonucleotide
uauuaugaugcugcuacuu

SEQ ID NO: 2794328 - RNA, 19 nt, Artificial Sequence
  Description of Artificial Sequence: Synthetic oligonucleotide
uuggcuuggcuuagcaccu

SEQ ID NO: 2794329 - RNA, 19 nt, Artificial Sequence
  Description of Artificial Sequence: Synthetic oligonucleotide
accauccguccucugacuc

SEQ ID NO: 2794330 - RNA, 19 nt, Artificial Sequence
  Description of Artificial Sequence: Synthetic oligonucleotide
uaggcagcccagauguuac

SEQ ID NO: 2794331 - RNA, 19 nt, Artificial Sequence
  Description of Artificial Sequence: Synthetic oligonucleotide
aagguuggccacccgagua

SEQ ID NO: 2794332 - RNA, 19 nt, Artificial Sequence
  Description of Artificial Sequence: Synthetic oligonucleotide
cauaaccggaguaggccag

SEQ ID NO: 2794333 - RNA, 19 nt, Artificial Sequence
  Description of Artificial Sequence: Synthetic oligonucleotide
uuccgaagccuacagucuc

SEQ ID NO: 2794334 - RNA, 19 nt, Artificial Sequence
  Description of Artificial Sequence: Synthetic oligonucleotide
auguuacuggcgauggccg

SEQ ID NO: 2794335 - RNA, 19 nt, Artificial Sequence
  Description of Artificial Sequence: Synthetic oligonucleotide
agcagaagguuggccaccc

SEQ ID NO: 2794336 - RNA, 19 nt, Artificial Sequence
  Description of Artificial Sequence: Synthetic oligonucleotide
aagccagagcccaccuucc

SEQ ID NO: 2794337 - RNA, 19 nt, Artificial Sequence
  Description of Artificial Sequence: Synthetic oligonucleotide
ccuuggcauacauacauag

SEQ ID NO: 2794338 - RNA, 19 nt, Artificial Sequence
  Description of Artificial Sequence: Synthetic oligonucleotide
uccagcuuccaucacucua

SEQ ID NO: 2794339 - RNA, 19 nt, Artificial Sequence
  Description of Artificial Sequence: Synthetic oligonucleotide
accuuccuguaaccagucc

SEQ ID NO: 2794340 - RNA, 19 nt, Artificial Sequence
  Description of Artificial Sequence: Synthetic oligonucleotide
aguccaguaaggugucucu

SEQ ID NO: 2794341 - RNA, 19 nt, Artificial Sequence
  Description of Artificial Sequence: Synthetic oligonucleotide
caaggccugggcuuuggcc

SEQ ID NO: 2794342 - RNA, 19 nt, Artificial Sequence
  Description of Artificial Sequence: Synthetic oligonucleotide
ucccguuccggucguaggc

SEQ ID NO: 2794343 - RNA, 19 nt, Artificial Sequence
  Description of Artificial Sequence: Synthetic oligonucleotide
ucuccuuggcauacauaca

SEQ ID NO: 2794344 - RNA, 19 nt, Artificial Sequence
  Description of Artificial Sequence: Synthetic oligonucleotide
uccaucacucuauuaugau

SEQ ID NO: 2794345 - RNA, 19 nt, Artificial Sequence
  Description of Artificial Sequence: Synthetic oligonucleotide
uccgaagccuacagucucc

SEQ ID NO: 2794346 - RNA, 19 nt, Artificial Sequence
  Description of Artificial Sequence: Synthetic oligonucleotide
cucccauccaccauccguc

SEQ ID NO: 2794347 - RNA, 19 nt, Artificial Sequence
  Description of Artificial Sequence: Synthetic oligonucleotide
uccccauaaccggaguagg

SEQ ID NO: 2794348 - RNA, 19 nt, Artificial Sequence
  Description of Artificial Sequence: Synthetic oligonucleotide
uguuacuggcgauggccgc

SEQ ID NO: 2794349 - RNA, 19 nt, Artificial Sequence
  Description of Artificial Sequence: Synthetic oligonucleotide
gccuucagcauuccgaagc

SEQ ID NO: 2794350 - RNA, 19 nt, Artificial Sequence
  Description of Artificial Sequence: Synthetic oligonucleotide
caaggaucccucguuauuc

SEQ ID NO: 2794351 - RNA, 19 nt, Artificial Sequence
  Description of Artificial Sequence: Synthetic oligonucleotide
ucacucuauuaugaugcug

SEQ ID NO: 2794352 - RNA, 19 nt, Artificial Sequence
  Description of Artificial Sequence: Synthetic oligonucleotide
uguuggcuuggcuuagcac

SEQ ID NO: 2794353 - RNA, 19 nt, Artificial Sequence
  Description of Artificial Sequence: Synthetic oligonucleotide
acuccagcuuccaucacuc

SEQ ID NO: 2794354 - RNA, 19 nt, Artificial Sequence
  Description of Artificial Sequence: Synthetic oligonucleotide
guuacuggcgauggccgcg

SEQ ID NO: 2794355 - RNA, 19 nt, Artificial Sequence
  Description of Artificial Sequence: Synthetic oligonucleotide
acucuauuaugaugcugcu

SEQ ID NO: 2794356 - RNA, 19 nt, Artificial Sequence
  Description of Artificial Sequence: Synthetic oligonucleotide
auaaccggaguaggccagc

SEQ ID NO: 2794357 - RNA, 19 nt, Artificial Sequence
  Description of Artificial Sequence: Synthetic oligonucleotide
gagauugucuucauuaaau

SEQ ID NO: 2794358 - RNA, 19 nt, Artificial Sequence
  Description of Artificial Sequence: Synthetic oligonucleotide
uucccguuccggucguagg

SEQ ID NO: 2794359 - RNA, 19 nt, Artificial Sequence
  Description of Artificial Sequence: Synthetic oligonucleotide
uacugcaccaaggccuggg

SEQ ID NO: 2794360 - RNA, 19 nt, Artificial Sequence
  Description of Artificial Sequence: Synthetic oligonucleotide
gcugcuacuugggugaggg

SEQ ID NO: 2794361 - RNA, 19 nt, Artificial Sequence
  Description of Artificial Sequence: Synthetic oligonucleotide
gagcccaccuuccuguaac

SEQ ID NO: 2794362 - RNA, 19 nt, Artificial Sequence
  Description of Artificial Sequence: Synthetic oligonucleotide
agcccaccuuccuguaacc

SEQ ID NO: 2794363 - RNA, 19 nt, Artificial Sequence
  Description of Artificial Sequence: Synthetic oligonucleotide
agaagguuggccacccgag

SEQ ID NO: 2794364 - RNA, 19 nt, Artificial Sequence
  Description of Artificial Sequence: Synthetic oligonucleotide
ggcauacauacauagcaga

SEQ ID NO: 2794365 - RNA, 19 nt, Artificial Sequence
  Description of Artificial Sequence: Synthetic oligonucleotide
cagcccagauguuacuggc

SEQ ID NO: 2794366 - RNA, 19 nt, Artificial Sequence
  Description of Artificial Sequence: Synthetic oligonucleotide
cuugguucccguuccgguc

SEQ ID NO: 2794367 - RNA, 19 nt, Artificial Sequence
  Description of Artificial Sequence: Synthetic oligonucleotide
uccuguaaccaguccagua

SEQ ID NO: 2794368 - RNA, 19 nt, Artificial Sequence
  Description of Artificial Sequence: Synthetic oligonucleotide
aucacucuauuaugaugcu

SEQ ID NO: 2794369 - RNA, 19 nt, Artificial Sequence
  Description of Artificial Sequence: Synthetic oligonucleotide
ucagcagcagggugcuuug

SEQ ID NO: 2794370 - RNA, 19 nt, Artificial Sequence
  Description of Artificial Sequence: Synthetic oligonucleotide
acccgaguaauggcuacac

SEQ ID NO: 2794371 - RNA, 19 nt, Artificial Sequence
  Description of Artificial Sequence: Synthetic oligonucleotide
gcgucaaagccuugggacg

SEQ ID NO: 2794372 - RNA, 19 nt, Artificial Sequence
  Description of Artificial Sequence: Synthetic oligonucleotide
gacccgggcaucugugucc

SEQ ID NO: 2794373 - RNA, 19 nt, Artificial Sequence
  Description of Artificial Sequence: Synthetic oligonucleotide
aggaucccucguuauucag

SEQ ID NO: 2794374 - RNA, 19 nt, Artificial Sequence
  Description of Artificial Sequence: Synthetic oligonucleotide
ugcuugguucccguuccgg

SEQ ID NO: 2794375 - RNA, 19 nt, Artificial Sequence
  Description of Artificial Sequence: Synthetic oligonucleotide
guccccauaaccggaguag

SEQ ID NO: 2794376 - RNA, 19 nt, Artificial Sequence
  Description of Artificial Sequence: Synthetic oligonucleotide
augaugcugcuacuugggu

SEQ ID NO: 2794377 - RNA, 19 nt, Artificial Sequence
  Description of Artificial Sequence: Synthetic oligonucleotide
uuacuggcgauggccgcgg

SEQ ID NO: 2794378 - RNA, 19 nt, Artificial Sequence
  Description of Artificial Sequence: Synthetic oligonucleotide
caugccugcgucuccuaac

SEQ ID NO: 2794379 - RNA, 19 nt, Artificial Sequence
  Description of Artificial Sequence: Synthetic oligonucleotide
gacgcagcaugccugcguc

SEQ ID NO: 2794380 - RNA, 19 nt, Artificial Sequence
  Description of Artificial Sequence: Synthetic oligonucleotide
cgucuccuaacccugaccg

SEQ ID NO: 2794381 - RNA, 19 nt, Artificial Sequence
  Description of Artificial Sequence: Synthetic oligonucleotide
uguccccauaaccggagua

SEQ ID NO: 2794382 - RNA, 19 nt, Artificial Sequence
  Description of Artificial Sequence: Synthetic oligonucleotide
ugucucuagggcccugauc

SEQ ID NO: 2794383 - RNA, 19 nt, Artificial Sequence
  Description of Artificial Sequence: Synthetic oligonucleotide
accugcgucaaagccuugg

SEQ ID NO: 2794384 - RNA, 19 nt, Artificial Sequence
  Description of Artificial Sequence: Synthetic oligonucleotide
uacagucuccuuggcauac

SEQ ID NO: 2794385 - RNA, 19 nt, Artificial Sequence
  Description of Artificial Sequence: Synthetic oligonucleotide
uucagcagcagggugcuuu

SEQ ID NO: 2794386 - RNA, 19 nt, Artificial Sequence
  Description of Artificial Sequence: Synthetic oligonucleotide
ugggacgcagcaugccugc

SEQ ID NO: 2794387 - RNA, 19 nt, Artificial Sequence
  Description of Artificial Sequence: Synthetic oligonucleotide
uccggucguaggcagccca

SEQ ID NO: 2794388 - RNA, 19 nt, Artificial Sequence
  Description of Artificial Sequence: Synthetic oligonucleotide
gucguaggcagcccagaug

SEQ ID NO: 2794389 - RNA, 19 nt, Artificial Sequence
  Description of Artificial Sequence: Synthetic oligonucleotide
agccuacagucuccuuggc

SEQ ID NO: 2794390 - RNA, 19 nt, Artificial Sequence
  Description of Artificial Sequence: Synthetic oligonucleotide
ggauaaauuugagauuguc

SEQ ID NO: 2794391 - RNA, 19 nt, Artificial Sequence
  Description of Artificial Sequence: Synthetic oligonucleotide
agcaaggaucccucguuau

SEQ ID NO: 2794392 - RNA, 19 nt, Artificial Sequence
  Description of Artificial Sequence: Synthetic oligonucleotide
ccaguaaggugucucuagg

SEQ ID NO: 2794393 - RNA, 19 nt, Artificial Sequence
  Description of Artificial Sequence: Synthetic oligonucleotide
ccaucacucuauuaugaug

SEQ ID NO: 2794394 - RNA, 19 nt, Artificial Sequence
  Description of Artificial Sequence: Synthetic oligonucleotide
gcagcccagauguuacugg

SEQ ID NO: 2794395 - RNA, 19 nt, Artificial Sequence
  Description of Artificial Sequence: Synthetic oligonucleotide
uccuuggcauacauacaua

SEQ ID NO: 2794396 - RNA, 19 nt, Artificial Sequence
  Description of Artificial Sequence: Synthetic oligonucleotide
cgaguaauggcuacacggc

SEQ ID NO: 2794397 - RNA, 19 nt, Artificial Sequence
  Description of Artificial Sequence: Synthetic oligonucleotide
caaagccuugggacgcagc

SEQ ID NO: 2794398 - RNA, 19 nt, Artificial Sequence
  Description of Artificial Sequence: Synthetic oligonucleotide
ugacccgggcaucuguguc

SEQ ID NO: 2794399 - RNA, 19 nt, Artificial Sequence
  Description of Artificial Sequence: Synthetic oligonucleotide
auuccgaagccuacagucu

SEQ ID NO: 2794400 - RNA, 19 nt, Artificial Sequence
  Description of Artificial Sequence: Synthetic oligonucleotide
auccucccauccaccaucc

SEQ ID NO: 2794401 - RNA, 19 nt, Artificial Sequence
  Description of Artificial Sequence: Synthetic oligonucleotide
ugauccucccauccaccau

SEQ ID NO: 2794402 - RNA, 19 nt, Artificial Sequence
  Description of Artificial Sequence: Synthetic oligonucleotide
gaguugaaauuuauuugua

SEQ ID NO: 2794403 - RNA, 19 nt, Artificial Sequence
  Description of Artificial Sequence: Synthetic oligonucleotide
ucaaagccuugggacgcag

SEQ ID NO: 2794404 - RNA, 19 nt, Artificial Sequence
  Description of Artificial Sequence: Synthetic oligonucleotide
ucccauccaccauccgucc

SEQ ID NO: 2794405 - RNA, 19 nt, Artificial Sequence
  Description of Artificial Sequence: Synthetic oligonucleotide
gauggccgcggugacccgg

SEQ ID NO: 2794406 - RNA, 19 nt, Artificial Sequence
  Description of Artificial Sequence: Synthetic oligonucleotide
uggccacccgaguaauggc

SEQ ID NO: 2794407 - RNA, 19 nt, Artificial Sequence
  Description of Artificial Sequence: Synthetic oligonucleotide
ugggugaggggcuccucca

SEQ ID NO: 2794408 - RNA, 19 nt, Artificial Sequence
  Description of Artificial Sequence: Synthetic oligonucleotide
cuccagguacugcaccaag

SEQ ID NO: 2794409 - RNA, 19 nt, Artificial Sequence
  Description of Artificial Sequence: Synthetic oligonucleotide
ggcuacacggcccuccaug

SEQ ID NO: 2794410 - RNA, 19 nt, Artificial Sequence
  Description of Artificial Sequence: Synthetic oligonucleotide
caugcaguccaugaggaua

SEQ ID NO: 2794411 - RNA, 19 nt, Artificial Sequence
  Description of Artificial Sequence: Synthetic oligonucleotide
guuccggucguaggcagcc

SEQ ID NO: 2794412 - RNA, 19 nt, Artificial Sequence
  Description of Artificial Sequence: Synthetic oligonucleotide
uaaagccagagcccaccuu

SEQ ID NO: 2794413 - RNA, 19 nt, Artificial Sequence
  Description of Artificial Sequence: Synthetic oligonucleotide
ugcgucuccuaacccugac

SEQ ID NO: 2794414 - RNA, 19 nt, Artificial Sequence
  Description of Artificial Sequence: Synthetic oligonucleotide
augcuugguucccguuccg

SEQ ID NO: 2794415 - RNA, 19 nt, Artificial Sequence
  Description of Artificial Sequence: Synthetic oligonucleotide
uccuaacccugaccggcac

SEQ ID NO: 2794416 - RNA, 19 nt, Artificial Sequence
  Description of Artificial Sequence: Synthetic oligonucleotide
agguuggccacccgaguaa

SEQ ID NO: 2794417 - RNA, 19 nt, Artificial Sequence
  Description of Artificial Sequence: Synthetic oligonucleotide
ggugaggggcuccuccagg

SEQ ID NO: 2794418 - RNA, 19 nt, Artificial Sequence
  Description of Artificial Sequence: Synthetic oligonucleotide
cagaagguuggccacccga

SEQ ID NO: 2794419 - RNA, 19 nt, Artificial Sequence
  Description of Artificial Sequence: Synthetic oligonucleotide
augcaguccaugaggauaa

SEQ ID NO: 2794420 - RNA, 19 nt, Artificial Sequence
  Description of Artificial Sequence: Synthetic oligonucleotide
cuucauuaaaugcuugguu

SEQ ID NO: 2794421 - RNA, 19 nt, Artificial Sequence
  Description of Artificial Sequence: Synthetic oligonucleotide
ugccugcgucuccuaaccc

SEQ ID NO: 2794422 - RNA, 19 nt, Artificial Sequence
  Description of Artificial Sequence: Synthetic oligonucleotide
agcccagauguuacuggcg

SEQ ID NO: 2794423 - RNA, 19 nt, Artificial Sequence
  Description of Artificial Sequence: Synthetic oligonucleotide
caguccaugaggauaaauu

SEQ ID NO: 2794424 - RNA, 19 nt, Artificial Sequence
  Description of Artificial Sequence: Synthetic oligonucleotide
ucucuagggcccugauccu

SEQ ID NO: 2794425 - RNA, 19 nt, Artificial Sequence
  Description of Artificial Sequence: Synthetic oligonucleotide
gcuacacggcccuccaugc

SEQ ID NO: 2794426 - RNA, 19 nt, Artificial Sequence
  Description of Artificial Sequence: Synthetic oligonucleotide
aaccggaguaggccagcaa

SEQ ID NO: 2794427 - RNA, 19 nt, Artificial Sequence
  Description of Artificial Sequence: Synthetic oligonucleotide
ccuucagcauuccgaagcc

SEQ ID NO: 2794428 - RNA, 19 nt, Artificial Sequence
  Description of Artificial Sequence: Synthetic oligonucleotide
cugauccucccauccacca

SEQ ID NO: 2794429 - RNA, 19 nt, Artificial Sequence
  Description of Artificial Sequence: Synthetic oligonucleotide
uccucccauccaccauccg

SEQ ID NO: 2794430 - RNA, 19 nt, Artificial Sequence
  Description of Artificial Sequence: Synthetic oligonucleotide
cccauaaccggaguaggcc

SEQ ID NO: 2794431 - RNA, 19 nt, Artificial Sequence
  Description of Artificial Sequence: Synthetic oligonucleotide
ccaugaggauaaauuugag

SEQ ID NO: 2794432 - RNA, 19 nt, Artificial Sequence
  Description of Artificial Sequence: Synthetic oligonucleotide
cuccuuggcauacauacau

SEQ ID NO: 2794433 - RNA, 19 nt, Artificial Sequence
  Description of Artificial Sequence: Synthetic oligonucleotide
ccggaguaggccagcaagg

SEQ ID NO: 2794434 - RNA, 19 nt, Artificial Sequence
  Description of Artificial Sequence: Synthetic oligonucleotide
auggcuacacggcccucca

SEQ ID NO: 2794435 - RNA, 19 nt, Artificial Sequence
  Description of Artificial Sequence: Synthetic oligonucleotide
agcuaaagccagagcccac

SEQ ID NO: 2794436 - RNA, 19 nt, Artificial Sequence
  Description of Artificial Sequence: Synthetic oligonucleotide
caguccaguaaggugucuc

SEQ ID NO: 2794437 - RNA, 19 nt, Artificial Sequence
  Description of Artificial Sequence: Synthetic oligonucleotide
uuccuguaaccaguccagu

SEQ ID NO: 2794438 - RNA, 19 nt, Artificial Sequence
  Description of Artificial Sequence: Synthetic oligonucleotide
aggccagcaaggaucccuc

SEQ ID NO: 2794439 - RNA, 19 nt, Artificial Sequence
  Description of Artificial Sequence: Synthetic oligonucleotide
ggaucccucguuauucagc

SEQ ID NO: 2794440 - RNA, 19 nt, Artificial Sequence
  Description of Artificial Sequence: Synthetic oligonucleotide
guucccguuccggucguag

SEQ ID NO: 2794441 - RNA, 19 nt, Artificial Sequence
  Description of Artificial Sequence: Synthetic oligonucleotide
aucccucguuauucagcag

SEQ ID NO: 2794442 - RNA, 19 nt, Artificial Sequence
  Description of Artificial Sequence: Synthetic oligonucleotide
aggauaaauuugagauugu

SEQ ID NO: 2794443 - RNA, 19 nt, Artificial Sequence
  Description of Artificial Sequence: Synthetic oligonucleotide
uaaccggaguaggccagca

SEQ ID NO: 2794444 - RNA, 19 nt, Artificial Sequence
  Description of Artificial Sequence: Synthetic oligonucleotide
guguuggcuuggcuuagca

SEQ ID NO: 2794445 - RNA, 19 nt, Artificial Sequence
  Description of Artificial Sequence: Synthetic oligonucleotide
acuggcgauggccgcggug

SEQ ID NO: 2794446 - RNA, 19 nt, Artificial Sequence
  Description of Artificial Sequence: Synthetic oligonucleotide
gguacugcaccaaggccug

SEQ ID NO: 2794447 - RNA, 19 nt, Artificial Sequence
  Description of Artificial Sequence: Synthetic oligonucleotide
agggcccugauccucccau

SEQ ID NO: 2794448 - RNA, 19 nt, Artificial Sequence
  Description of Artificial Sequence: Synthetic oligonucleotide
ccuuccuguaaccagucca

SEQ ID NO: 2794449 - RNA, 19 nt, Artificial Sequence
  Description of Artificial Sequence: Synthetic oligonucleotide
ugcugcuacuugggugagg

SEQ ID NO: 2794450 - RNA, 19 nt, Artificial Sequence
  Description of Artificial Sequence: Synthetic oligonucleotide
acggcccuccaugcagucc

SEQ ID NO: 2794451 - RNA, 19 nt, Artificial Sequence
  Description of Artificial Sequence: Synthetic oligonucleotide
caccuuccuguaaccaguc

SEQ ID NO: 2794452 - RNA, 19 nt, Artificial Sequence
  Description of Artificial Sequence: Synthetic oligonucleotide
cugcuacuugggugagggg

SEQ ID NO: 2794453 - RNA, 19 nt, Artificial Sequence
  Description of Artificial Sequence: Synthetic oligonucleotide
ccugcgucaaagccuuggg

SEQ ID NO: 2794454 - RNA, 19 nt, Artificial Sequence
  Description of Artificial Sequence: Synthetic oligonucleotide
ggcccugauccucccaucc

SEQ ID NO: 2794455 - RNA, 19 nt, Artificial Sequence
  Description of Artificial Sequence: Synthetic oligonucleotide
gcaucuguguccccauaac

SEQ ID NO: 2794456 - RNA, 19 nt, Artificial Sequence
  Description of Artificial Sequence: Synthetic oligonucleotide
aaggugucucuagggcccu

SEQ ID NO: 2794457 - RNA, 19 nt, Artificial Sequence
  Description of Artificial Sequence: Synthetic oligonucleotide
cuguguccccauaaccgga

SEQ ID NO: 2794458 - RNA, 19 nt, Artificial Sequence
  Description of Artificial Sequence: Synthetic oligonucleotide
gcauacauacauagcagaa

SEQ ID NO: 2794459 - RNA, 19 nt, Artificial Sequence
  Description of Artificial Sequence: Synthetic oligonucleotide
cuagggcccugauccuccc

SEQ ID NO: 2794460 - RNA, 19 nt, Artificial Sequence
  Description of Artificial Sequence: Synthetic oligonucleotide
ccuguaaccaguccaguaa

SEQ ID NO: 2794461 - RNA, 19 nt, Artificial Sequence
  Description of Artificial Sequence: Synthetic oligonucleotide
cuggcgauggccgcgguga

SEQ ID NO: 2794462 - RNA, 19 nt, Artificial Sequence
  Description of Artificial Sequence: Synthetic oligonucleotide
gcagcagggugcuuuggac

SEQ ID NO: 2794463 - RNA, 19 nt, Artificial Sequence
  Description of Artificial Sequence: Synthetic oligonucleotide
aagccuugggacgcagcau

SEQ ID NO: 2794464 - RNA, 19 nt, Artificial Sequence
  Description of Artificial Sequence: Synthetic oligonucleotide
gaagguuggccacccgagu

SEQ ID NO: 2794465 - RNA, 19 nt, Artificial Sequence
  Description of Artificial Sequence: Synthetic oligonucleotide
ugaggggcuccuccaggua

SEQ ID NO: 2794466 - RNA, 19 nt, Artificial Sequence
  Description of Artificial Sequence: Synthetic oligonucleotide
guaggcagcccagauguua

SEQ ID NO: 2794467 - RNA, 19 nt, Artificial Sequence
  Description of Artificial Sequence: Synthetic oligonucleotide
ugacuccagcuuccaucac

SEQ ID NO: 2794468 - RNA, 19 nt, Artificial Sequence
  Description of Artificial Sequence: Synthetic oligonucleotide
cugcgucaaagccuuggga

SEQ ID NO: 2794469 - RNA, 19 nt, Artificial Sequence
  Description of Artificial Sequence: Synthetic oligonucleotide
ccagauguuacuggcgaug

SEQ ID NO: 2794470 - RNA, 19 nt, Artificial Sequence
  Description of Artificial Sequence: Synthetic oligonucleotide
agcuuccaucacucuauua

SEQ ID NO: 2794471 - RNA, 19 nt, Artificial Sequence
  Description of Artificial Sequence: Synthetic oligonucleotide
accaaggccugggcuuugg

SEQ ID NO: 2794472 - RNA, 19 nt, Artificial Sequence
  Description of Artificial Sequence: Synthetic oligonucleotide
gcccagauguuacuggcga

SEQ ID NO: 2794473 - RNA, 19 nt, Artificial Sequence
  Description of Artificial Sequence: Synthetic oligonucleotide
uacuugggugaggggcucc

SEQ ID NO: 2794474 - RNA, 19 nt, Artificial Sequence
  Description of Artificial Sequence: Synthetic oligonucleotide
agagcccaccuuccuguaa

SEQ ID NO: 2794475 - RNA, 19 nt, Artificial Sequence
  Description of Artificial Sequence: Synthetic oligonucleotide
ccugcgucuccuaacccug

SEQ ID NO: 2794476 - RNA, 19 nt, Artificial Sequence
  Description of Artificial Sequence: Synthetic oligonucleotide
gcgauggccgcggugaccc

SEQ ID NO: 2794477 - RNA, 19 nt, Artificial Sequence
  Description of Artificial Sequence: Synthetic oligonucleotide
ccauccguccucugacucc

SEQ ID NO: 2794478 - RNA, 19 nt, Artificial Sequence
  Description of Artificial Sequence: Synthetic oligonucleotide
cuuggcuuagcaccugcgu

SEQ ID NO: 2794479 - RNA, 19 nt, Artificial Sequence
  Description of Artificial Sequence: Synthetic oligonucleotide
agccagagcccaccuuccu

SEQ ID NO: 2794480 - RNA, 19 nt, Artificial Sequence
  Description of Artificial Sequence: Synthetic oligonucleotide
ccauaaccggaguaggcca

SEQ ID NO: 2794481 - RNA, 19 nt, Artificial Sequence
  Description of Artificial Sequence: Synthetic oligonucleotide
cuauuaugaugcugcuacu

SEQ ID NO: 2794482 - RNA, 19 nt, Artificial Sequence
  Description of Artificial Sequence: Synthetic oligonucleotide
ccccauaaccggaguaggc

SEQ ID NO: 2794483 - RNA, 19 nt, Artificial Sequence
  Description of Artificial Sequence: Synthetic oligonucleotide
cauccguccucugacucca

SEQ ID NO: 2794484 - RNA, 19 nt, Artificial Sequence
  Description of Artificial Sequence: Synthetic oligonucleotide
cuugggacgcagcaugccu

SEQ ID NO: 2794485 - RNA, 19 nt, Artificial Sequence
  Description of Artificial Sequence: Synthetic oligonucleotide
cucuagggcccugauccuc

SEQ ID NO: 2794486 - RNA, 19 nt, Artificial Sequence
  Description of Artificial Sequence: Synthetic oligonucleotide
ccaccauccguccucugac

SEQ ID NO: 2794487 - RNA, 19 nt, Artificial Sequence
  Description of Artificial Sequence: Synthetic oligonucleotide
uagggcccugauccuccca

SEQ ID NO: 2794488 - RNA, 19 nt, Artificial Sequence
  Description of Artificial Sequence: Synthetic oligonucleotide
cuccuaacccugaccggca

SEQ ID NO: 2794489 - RNA, 19 nt, Artificial Sequence
  Description of Artificial Sequence: Synthetic oligonucleotide
ggcuuggcuuagcaccugc

SEQ ID NO: 2794490 - RNA, 19 nt, Artificial Sequence
  Description of Artificial Sequence: Synthetic oligonucleotide
ggcaucuguguccccauaa

SEQ ID NO: 2794491 - RNA, 19 nt, Artificial Sequence
  Description of Artificial Sequence: Synthetic oligonucleotide
ggcagcccagauguuacug

SEQ ID NO: 2794492 - RNA, 19 nt, Artificial Sequence
  Description of Artificial Sequence: Synthetic oligonucleotide
aggcagcccagauguuacu

SEQ ID NO: 2794493 - RNA, 19 nt, Artificial Sequence
  Description of Artificial Sequence: Synthetic oligonucleotide
gcuuggcuuagcaccugcg

SEQ ID NO: 2794494 - RNA, 19 nt, Artificial Sequence
  Description of Artificial Sequence: Synthetic oligonucleotide
ccuacagucuccuuggcau

SEQ ID NO: 2794495 - RNA, 19 nt, Artificial Sequence
  Description of Artificial Sequence: Synthetic oligonucleotide
cuuuggccuucagcauucc

SEQ ID NO: 2794496 - RNA, 19 nt, Artificial Sequence
  Description of Artificial Sequence: Synthetic oligonucleotide
acuugggugaggggcuccu

SEQ ID NO: 2794497 - RNA, 19 nt, Artificial Sequence
  Description of Artificial Sequence: Synthetic oligonucleotide
ugguucccguuccggucgu

SEQ ID NO: 2794498 - RNA, 19 nt, Artificial Sequence
  Description of Artificial Sequence: Synthetic oligonucleotide
gccagagcccaccuuccug

SEQ ID NO: 2794499 - RNA, 19 nt, Artificial Sequence
  Description of Artificial Sequence: Synthetic oligonucleotide
cccgaguaauggcuacacg

SEQ ID NO: 2794500 - RNA, 19 nt, Artificial Sequence
  Description of Artificial Sequence: Synthetic oligonucleotide
guuggccacccgaguaaug

SEQ ID NO: 2794501 - RNA, 19 nt, Artificial Sequence
  Description of Artificial Sequence: Synthetic oligonucleotide
cuacagucuccuuggcaua

SEQ ID NO: 2794502 - RNA, 19 nt, Artificial Sequence
  Description of Artificial Sequence: Synthetic oligonucleotide
cucuauuaugaugcugcua

SEQ ID NO: 2794503 - RNA, 19 nt, Artificial Sequence
  Description of Artificial Sequence: Synthetic oligonucleotide
cccugauccucccauccac

SEQ ID NO: 2794504 - RNA, 19 nt, Artificial Sequence
  Description of Artificial Sequence: Synthetic oligonucleotide
gcgucuccuaacccugacc

SEQ ID NO: 2794505 - RNA, 19 nt, Artificial Sequence
  Description of Artificial Sequence: Synthetic oligonucleotide
cuaaagccagagcccaccu

SEQ ID NO: 2794506 - RNA, 19 nt, Artificial Sequence
  Description of Artificial Sequence: Synthetic oligonucleotide
acagucuccuuggcauaca

SEQ ID NO: 2794507 - RNA, 19 nt, Artificial Sequence
  Description of Artificial Sequence: Synthetic oligonucleotide
ggccagcaaggaucccucg

SEQ ID NO: 2794508 - RNA, 19 nt, Artificial Sequence
  Description of Artificial Sequence: Synthetic oligonucleotide
uggcgauggccgcggugac

SEQ ID NO: 2794509 - RNA, 19 nt, Artificial Sequence
  Description of Artificial Sequence: Synthetic oligonucleotide
cagcagggugcuuuggacu

SEQ ID NO: 2794510 - RNA, 19 nt, Artificial Sequence
  Description of Artificial Sequence: Synthetic oligonucleotide
gccuacagucuccuuggca

SEQ ID NO: 2794511 - RNA, 19 nt, Artificial Sequence
  Description of Artificial Sequence: Synthetic oligonucleotide
acgcagcaugccugcgucu

SEQ ID NO: 2794512 - RNA, 19 nt, Artificial Sequence
  Description of Artificial Sequence: Synthetic oligonucleotide
cuacuugggugaggggcuc

SEQ ID NO: 2794513 - RNA, 19 nt, Artificial Sequence
  Description of Artificial Sequence: Synthetic oligonucleotide
auggccgcggugacccggg

SEQ ID NO: 2794514 - RNA, 19 nt, Artificial Sequence
  Description of Artificial Sequence: Synthetic oligonucleotide
ggugacccgggcaucugug

SEQ ID NO: 2794515 - RNA, 19 nt, Artificial Sequence
  Description of Artificial Sequence: Synthetic oligonucleotide
cgucaaagccuugggacgc

SEQ ID NO: 2794516 - RNA, 19 nt, Artificial Sequence
  Description of Artificial Sequence: Synthetic oligonucleotide
gcagaagguuggccacccg

SEQ ID NO: 2794517 - RNA, 19 nt, Artificial Sequence
  Description of Artificial Sequence: Synthetic oligonucleotide
gggugaggggcuccuccag

SEQ ID NO: 2794518 - RNA, 19 nt, Artificial Sequence
  Description of Artificial Sequence: Synthetic oligonucleotide
gugaggggcuccuccaggu

SEQ ID NO: 2794519 - RNA, 19 nt, Artificial Sequence
  Description of Artificial Sequence: Synthetic oligonucleotide
gcuuuggccuucagcauuc

SEQ ID NO: 2794520 - RNA, 19 nt, Artificial Sequence
  Description of Artificial Sequence: Synthetic oligonucleotide
uggcuuggcuuagcaccug

SEQ ID NO: 2794521 - RNA, 19 nt, Artificial Sequence
  Description of Artificial Sequence: Synthetic oligonucleotide
cuacacggcccuccaugca

SEQ ID NO: 2794522 - RNA, 19 nt, Artificial Sequence
  Description of Artificial Sequence: Synthetic oligonucleotide
augcugcuacuugggugag

SEQ ID NO: 2794523 - RNA, 19 nt, Artificial Sequence
  Description of Artificial Sequence: Synthetic oligonucleotide
guacugcaccaaggccugg

SEQ ID NO: 2794524 - RNA, 19 nt, Artificial Sequence
  Description of Artificial Sequence: Synthetic oligonucleotide
cagcaaggaucccucguua

SEQ ID NO: 2794525 - RNA, 19 nt, Artificial Sequence
  Description of Artificial Sequence: Synthetic oligonucleotide
agggugcuuuggacucccc

SEQ ID NO: 2794526 - RNA, 19 nt, Artificial Sequence
  Description of Artificial Sequence: Synthetic oligonucleotide
uuccggucguaggcagccc

SEQ ID NO: 2794527 - RNA, 19 nt, Artificial Sequence
  Description of Artificial Sequence: Synthetic oligonucleotide
gcagcaugccugcgucucc

SEQ ID NO: 2794528 - RNA, 19 nt, Artificial Sequence
  Description of Artificial Sequence: Synthetic oligonucleotide
uggcuacacggcccuccau

SEQ ID NO: 2794529 - RNA, 19 nt, Artificial Sequence
  Description of Artificial Sequence: Synthetic oligonucleotide
cccuccaugcaguccauga

SEQ ID NO: 2794530 - RNA, 19 nt, Artificial Sequence
  Description of Artificial Sequence: Synthetic oligonucleotide
cagcagcagggugcuuugg

SEQ ID NO: 2794531 - RNA, 19 nt, Artificial Sequence
  Description of Artificial Sequence: Synthetic oligonucleotide
cccucguuauucagcagca

SEQ ID NO: 2794532 - RNA, 19 nt, Artificial Sequence
  Description of Artificial Sequence: Synthetic oligonucleotide
acacggcccuccaugcagu

SEQ ID NO: 2794533 - RNA, 19 nt, Artificial Sequence
  Description of Artificial Sequence: Synthetic oligonucleotide
uacuggcgauggccgcggu

SEQ ID NO: 2794534 - RNA, 19 nt, Artificial Sequence
  Description of Artificial Sequence: Synthetic oligonucleotide
gucaaagccuugggacgca

SEQ ID NO: 2794535 - RNA, 19 nt, Artificial Sequence
  Description of Artificial Sequence: Synthetic oligonucleotide
agucuccuuggcauacaua

SEQ ID NO: 2794536 - RNA, 19 nt, Artificial Sequence
  Description of Artificial Sequence: Synthetic oligonucleotide
auccaccauccguccucug

SEQ ID NO: 2794537 - RNA, 19 nt, Artificial Sequence
  Description of Artificial Sequence: Synthetic oligonucleotide
cacggcccuccaugcaguc

SEQ ID NO: 2794538 - RNA, 19 nt, Artificial Sequence
  Description of Artificial Sequence: Synthetic oligonucleotide
ccacccgaguaauggcuac

SEQ ID NO: 2794539 - RNA, 19 nt, Artificial Sequence
  Description of Artificial Sequence: Synthetic oligonucleotide
guccaguaaggugucucua

SEQ ID NO: 2794540 - RNA, 19 nt, Artificial Sequence
  Description of Artificial Sequence: Synthetic oligonucleotide
ugcaguccaugaggauaaa

SEQ ID NO: 2794541 - RNA, 19 nt, Artificial Sequence
  Description of Artificial Sequence: Synthetic oligonucleotide
cugcgucuccuaacccuga

SEQ ID NO: 2794542 - RNA, 19 nt, Artificial Sequence
  Description of Artificial Sequence: Synthetic oligonucleotide
cuugggugaggggcuccuc

SEQ ID NO: 2794543 - RNA, 19 nt, Artificial Sequence
  Description of Artificial Sequence: Synthetic oligonucleotide
ccguuccggucguaggcag

SEQ ID NO: 2794544 - RNA, 19 nt, Artificial Sequence
  Description of Artificial Sequence: Synthetic oligonucleotide
gcuugguucccguuccggu

SEQ ID NO: 2794545 - RNA, 19 nt, Artificial Sequence
  Description of Artificial Sequence: Synthetic oligonucleotide
ccagcuuccaucacucuau

SEQ ID NO: 2794546 - RNA, 19 nt, Artificial Sequence
  Description of Artificial Sequence: Synthetic oligonucleotide
agcaugccugcgucuccua

SEQ ID NO: 2794547 - RNA, 19 nt, Artificial Sequence
  Description of Artificial Sequence: Synthetic oligonucleotide
gugacccgggcaucugugu

SEQ ID NO: 2794548 - RNA, 19 nt, Artificial Sequence
  Description of Artificial Sequence: Synthetic oligonucleotide
ccuugggacgcagcaugcc

SEQ ID NO: 2794549 - RNA, 19 nt, Artificial Sequence
  Description of Artificial Sequence: Synthetic oligonucleotide
guaggccagcaaggauccc

SEQ ID NO: 2794550 - RNA, 19 nt, Artificial Sequence
  Description of Artificial Sequence: Synthetic oligonucleotide
ggcuuuggccuucagcauu

SEQ ID NO: 2794551 - RNA, 19 nt, Artificial Sequence
  Description of Artificial Sequence: Synthetic oligonucleotide
ggugucucuagggcccuga

SEQ ID NO: 2794552 - RNA, 19 nt, Artificial Sequence
  Description of Artificial Sequence: Synthetic oligonucleotide
gccugcgucuccuaacccu

SEQ ID NO: 2794553 - RNA, 19 nt, Artificial Sequence
  Description of Artificial Sequence: Synthetic oligonucleotide
cacccgaguaauggcuaca

SEQ ID NO: 2794554 - RNA, 19 nt, Artificial Sequence
  Description of Artificial Sequence: Synthetic oligonucleotide
ccucguuauucagcagcag

SEQ ID NO: 2794555 - RNA, 19 nt, Artificial Sequence
  Description of Artificial Sequence: Synthetic oligonucleotide
ccggucguaggcagcccag

SEQ ID NO: 2794556 - RNA, 19 nt, Artificial Sequence
  Description of Artificial Sequence: Synthetic oligonucleotide
cugcaccaaggccugggcu

SEQ ID NO: 2794557 - RNA, 19 nt, Artificial Sequence
  Description of Artificial Sequence: Synthetic oligonucleotide
gccuugggacgcagcaugc

SEQ ID NO: 2794558 - RNA, 19 nt, Artificial Sequence
  Description of Artificial Sequence: Synthetic oligonucleotide
uggccgcggugacccgggc

SEQ ID NO: 2794559 - RNA, 19 nt, Artificial Sequence
  Description of Artificial Sequence: Synthetic oligonucleotide
ccaccuuccuguaaccagu

SEQ ID NO: 2794560 - RNA, 19 nt, Artificial Sequence
  Description of Artificial Sequence: Synthetic oligonucleotide
gcagggugcuuuggacucc

SEQ ID NO: 2794561 - RNA, 19 nt, Artificial Sequence
  Description of Artificial Sequence: Synthetic oligonucleotide
gcccugauccucccaucca

SEQ ID NO: 2794562 - RNA, 19 nt, Artificial Sequence
  Description of Artificial Sequence: Synthetic oligonucleotide
gcauuccgaagccuacagu

SEQ ID NO: 2794563 - RNA, 19 nt, Artificial Sequence
  Description of Artificial Sequence: Synthetic oligonucleotide
gggacgcagcaugccugcg

SEQ ID NO: 2794564 - RNA, 19 nt, Artificial Sequence
  Description of Artificial Sequence: Synthetic oligonucleotide
gcaugccugcgucuccuaa

SEQ ID NO: 2794565 - RNA, 19 nt, Artificial Sequence
  Description of Artificial Sequence: Synthetic oligonucleotide
aggugucucuagggcccug

SEQ ID NO: 2794566 - RNA, 19 nt, Artificial Sequence
  Description of Artificial Sequence: Synthetic oligonucleotide
ccgguguuggcuuggcuua

SEQ ID NO: 2794567 - RNA, 19 nt, Artificial Sequence
  Description of Artificial Sequence: Synthetic oligonucleotide
ggcgauggccgcggugacc

SEQ ID NO: 2794568 - RNA, 19 nt, Artificial Sequence
  Description of Artificial Sequence: Synthetic oligonucleotide
gccagcaaggaucccucgu

SEQ ID NO: 2794569 - RNA, 19 nt, Artificial Sequence
  Description of Artificial Sequence: Synthetic oligonucleotide
cguuccggucguaggcagc

SEQ ID NO: 2794570 - RNA, 19 nt, Artificial Sequence
  Description of Artificial Sequence: Synthetic oligonucleotide
gcaaggaucccucguuauu

SEQ ID NO: 2794571 - RNA, 19 nt, Artificial Sequence
  Description of Artificial Sequence: Synthetic oligonucleotide
caccauccguccucugacu

SEQ ID NO: 2794572 - RNA, 19 nt, Artificial Sequence
  Description of Artificial Sequence: Synthetic oligonucleotide
caccugcgucaaagccuug

SEQ ID NO: 2794573 - RNA, 19 nt, Artificial Sequence
  Description of Artificial Sequence: Synthetic oligonucleotide
ggucguaggcagcccagau

SEQ ID NO: 2794574 - RNA, 19 nt, Artificial Sequence
  Description of Artificial Sequence: Synthetic oligonucleotide
ccucccauccaccauccgu

SEQ ID NO: 2794575 - RNA, 19 nt, Artificial Sequence
  Description of Artificial Sequence: Synthetic oligonucleotide
ggacgcagcaugccugcgu

SEQ ID NO: 2794576 - RNA, 19 nt, Artificial Sequence
  Description of Artificial Sequence: Synthetic oligonucleotide
cauccaccauccguccucu

SEQ ID NO: 2794577 - RNA, 19 nt, Artificial Sequence
  Description of Artificial Sequence: Synthetic oligonucleotide
cagagcccaccuuccugua

SEQ ID NO: 2794578 - RNA, 19 nt, Artificial Sequence
  Description of Artificial Sequence: Synthetic oligonucleotide
auccguccucugacuccag

SEQ ID NO: 2794579 - RNA, 19 nt, Artificial Sequence
  Description of Artificial Sequence: Synthetic oligonucleotide
ggccacccgaguaauggcu

SEQ ID NO: 2794580 - RNA, 19 nt, Artificial Sequence
  Description of Artificial Sequence: Synthetic oligonucleotide
cuccagcuuccaucacucu

SEQ ID NO: 2794581 - RNA, 19 nt, Artificial Sequence
  Description of Artificial Sequence: Synthetic oligonucleotide
gcccaccuuccuguaacca

SEQ ID NO: 2794582 - RNA, 19 nt, Artificial Sequence
  Description of Artificial Sequence: Synthetic oligonucleotide
gggcccugauccucccauc

SEQ ID NO: 2794583 - RNA, 19 nt, Artificial Sequence
  Description of Artificial Sequence: Synthetic oligonucleotide
gugucucuagggcccugau

SEQ ID NO: 2794584 - RNA, 19 nt, Artificial Sequence
  Description of Artificial Sequence: Synthetic oligonucleotide
ggggcuccuccagguacug

SEQ ID NO: 2794585 - RNA, 19 nt, Artificial Sequence
  Description of Artificial Sequence: Synthetic oligonucleotide
cggcccuccaugcagucca

SEQ ID NO: 2794586 - RNA, 19 nt, Artificial Sequence
  Description of Artificial Sequence: Synthetic oligonucleotide
cagcaugccugcgucuccu

SEQ ID NO: 2794587 - RNA, 19 nt, Artificial Sequence
  Description of Artificial Sequence: Synthetic oligonucleotide
cgcagcaugccugcgucuc

SEQ ID NO: 2794588 - RNA, 19 nt, Artificial Sequence
  Description of Artificial Sequence: Synthetic oligonucleotide
cucugacuccagcuuccau

SEQ ID NO: 2794589 - RNA, 19 nt, Artificial Sequence
  Description of Artificial Sequence: Synthetic oligonucleotide
gccgcggugacccgggcau

SEQ ID NO: 2794590 - RNA, 19 nt, Artificial Sequence
  Description of Artificial Sequence: Synthetic oligonucleotide
gcaccugcgucaaagccuu

SEQ ID NO: 2794591 - RNA, 19 nt, Artificial Sequence
  Description of Artificial Sequence: Synthetic oligonucleotide
gccacccgaguaauggcua

SEQ ID NO: 2794592 - RNA, 19 nt, Artificial Sequence
  Description of Artificial Sequence: Synthetic oligonucleotide
cccgguguuggcuuggcuu

SEQ ID NO: 2794593 - RNA, 19 nt, Artificial Sequence
  Description of Artificial Sequence: Synthetic oligonucleotide
ggccgcggugacccgggca

SEQ ID NO: 2794594 - RNA, 19 nt, Artificial Sequence
  Description of Artificial Sequence: Synthetic oligonucleotide
gggcuuuggccuucagcau

SEQ ID NO: 2794595 - RNA, 19 nt, Artificial Sequence
  Description of Artificial Sequence: Synthetic oligonucleotide
auucagcagcagggugcuu

SEQ ID NO: 2794596 - RNA, 19 nt, Artificial Sequence
  Description of Artificial Sequence: Synthetic oligonucleotide
ccagcaaggaucccucguu

SEQ ID NO: 2794597 - RNA, 19 nt, Artificial Sequence
  Description of Artificial Sequence: Synthetic oligonucleotide
gcaguccaugaggauaaau

SEQ ID NO: 2794598 - RNA, 19 nt, Artificial Sequence
  Description of Artificial Sequence: Synthetic oligonucleotide
gguuggccacccgaguaau

SEQ ID NO: 2794599 - RNA, 19 nt, Artificial Sequence
  Description of Artificial Sequence: Synthetic oligonucleotide
cccguuccggucguaggca

SEQ ID NO: 2794600 - RNA, 19 nt, Artificial Sequence
  Description of Artificial Sequence: Synthetic oligonucleotide
cagcuuccaucacucuauu

SEQ ID NO: 2794601 - RNA, 19 nt, Artificial Sequence
  Description of Artificial Sequence: Synthetic oligonucleotide
gggcaucuguguccccaua

SEQ ID NO: 2794602 - RNA, 19 nt, Artificial Sequence
  Description of Artificial Sequence: Synthetic oligonucleotide
cgguguuggcuuggcuuag

SEQ ID NO: 2794603 - RNA, 19 nt, Artificial Sequence
  Description of Artificial Sequence: Synthetic oligonucleotide
gcuuagcaccugcgucaaa

SEQ ID NO: 2794604 - RNA, 19 nt, Artificial Sequence
  Description of Artificial Sequence: Synthetic oligonucleotide
gcggugacccgggcaucug

SEQ ID NO: 2794605 - RNA, 19 nt, Artificial Sequence
  Description of Artificial Sequence: Synthetic oligonucleotide
ccucugacuccagcuucca

SEQ ID NO: 2794606 - RNA, 19 nt, Artificial Sequence
  Description of Artificial Sequence: Synthetic oligonucleotide
ccuccagguacugcaccaa

SEQ ID NO: 2794607 - RNA, 19 nt, Artificial Sequence
  Description of Artificial Sequence: Synthetic oligonucleotide
cccagauguuacuggcgau

SEQ ID NO: 2794608 - RNA, 19 nt, Artificial Sequence
  Description of Artificial Sequence: Synthetic oligonucleotide
cgauggccgcggugacccg

SEQ ID NO: 2794609 - RNA, 19 nt, Artificial Sequence
  Description of Artificial Sequence: Synthetic oligonucleotide
cccgggcaucugugucccc

SEQ ID NO: 2794610 - RNA, 19 nt, Artificial Sequence
  Description of Artificial Sequence: Synthetic oligonucleotide
ccgaagccuacagucuccu

SEQ ID NO: 2794611 - RNA, 19 nt, Artificial Sequence
  Description of Artificial Sequence: Synthetic oligonucleotide
cccauccaccauccguccu

SEQ ID NO: 2794612 - RNA, 19 nt, Artificial Sequence
  Description of Artificial Sequence: Synthetic oligonucleotide
cggucguaggcagcccaga

SEQ ID NO: 2794613 - RNA, 19 nt, Artificial Sequence
  Description of Artificial Sequence: Synthetic oligonucleotide
gguucccguuccggucgua

SEQ ID NO: 2794614 - RNA, 19 nt, Artificial Sequence
  Description of Artificial Sequence: Synthetic oligonucleotide
ccaguccaguaaggugucu

SEQ ID NO: 2794615 - RNA, 19 nt, Artificial Sequence
  Description of Artificial Sequence: Synthetic oligonucleotide
ccgcggugacccgggcauc

SEQ ID NO: 2794616 - RNA, 19 nt, Artificial Sequence
  Description of Artificial Sequence: Synthetic oligonucleotide
cggugacccgggcaucugu

SEQ ID NO: 2794617 - RNA, 19 nt, Artificial Sequence
  Description of Artificial Sequence: Synthetic oligonucleotide
cgggcaucuguguccccau

SEQ ID NO: 2794618 - RNA, 19 nt, Artificial Sequence
  Description of Artificial Sequence: Synthetic oligonucleotide
ccccgguguuggcuuggcu

SEQ ID NO: 2794619 - RNA, 19 nt, Artificial Sequence
  Description of Artificial Sequence: Synthetic oligonucleotide
cgcggugacccgggcaucu

SEQ ID NO: 2794620 - RNA, 19 nt, Artificial Sequence
  Description of Artificial Sequence: Synthetic oligonucleotide
cgaagccuacagucuccuu

SEQ ID NO: 2794621 - RNA, 19 nt, Artificial Sequence
  Description of Artificial Sequence: Synthetic oligonucleotide
ggcccuccaugcaguccau

SEQ ID NO: 2794622 - RNA, 19 nt, Artificial Sequence
  Description of Artificial Sequence: Synthetic oligonucleotide
acuuauuuuaaauaaacac

SEQ ID NO: 2794623 - RNA, 19 nt, Artificial Sequence
  Description of Artificial Sequence: Synthetic oligonucleotide
uaaauaaacaccaauuuug

SEQ ID NO: 2794624 - RNA, 19 nt, Artificial Sequence
  Description of Artificial Sequence: Synthetic oligonucleotide
uuuaauaguaaaauuacca

SEQ ID NO: 2794625 - RNA, 19 nt, Artificial Sequence
  Description of Artificial Sequence: Synthetic oligonucleotide
aaacaaucaacuuugaaaa

SEQ ID NO: 2794626 - RNA, 19 nt, Artificial Sequence
  Description of Artificial Sequence: Synthetic oligonucleotide
aauuuugaaaacaaucaac

SEQ ID NO: 2794627 - RNA, 19 nt, Artificial Sequence
  Description of Artificial Sequence: Synthetic oligonucleotide
uauuuauucacugugguag

SEQ ID NO: 2794628 - RNA, 19 nt, Artificial Sequence
  Description of Artificial Sequence: Synthetic oligonucleotide
aaugacucugcuuucuuac

SEQ ID NO: 2794629 - RNA, 19 nt, Artificial Sequence
  Description of Artificial Sequence: Synthetic oligonucleotide
uauagaacgacagugaagc

SEQ ID NO: 2794630 - RNA, 19 nt, Artificial Sequence
  Description of Artificial Sequence: Synthetic oligonucleotide
accccuguaauauagaacg

SEQ ID NO: 2794631 - RNA, 19 nt, Artificial Sequence
  Description of Artificial Sequence: Synthetic oligonucleotide
ucuuuaauaguaaaauuac

SEQ ID NO: 2794632 - RNA, 19 nt, Artificial Sequence
  Description of Artificial Sequence: Synthetic oligonucleotide
aaggucuuucuccaguucc

SEQ ID NO: 2794633 - RNA, 19 nt, Artificial Sequence
  Description of Artificial Sequence: Synthetic oligonucleotide
uacugaaucauuaucauaa

SEQ ID NO: 2794634 - RNA, 19 nt, Artificial Sequence
  Description of Artificial Sequence: Synthetic oligonucleotide
aguaaaauuaccauuacug

SEQ ID NO: 2794635 - RNA, 19 nt, Artificial Sequence
  Description of Artificial Sequence: Synthetic oligonucleotide
aaaacuaagccuuucacuu

SEQ ID NO: 2794636 - RNA, 19 nt, Artificial Sequence
  Description of Artificial Sequence: Synthetic oligonucleotide
aaauuaccauuacugaauc

SEQ ID NO: 2794637 - RNA, 19 nt, Artificial Sequence
  Description of Artificial Sequence: Synthetic oligonucleotide
acaaucaacuuugaaaacc

SEQ ID NO: 2794638 - RNA, 19 nt, Artificial Sequence
  Description of Artificial Sequence: Synthetic oligonucleotide
uuugaaaacaaucaacuuu

SEQ ID NO: 2794639 - RNA, 19 nt, Artificial Sequence
  Description of Artificial Sequence: Synthetic oligonucleotide
uuuaaauaaacaccaauuu

SEQ ID NO: 2794640 - RNA, 19 nt, Artificial Sequence
  Description of Artificial Sequence: Synthetic oligonucleotide
caugcuaacaaaacuaagc

SEQ ID NO: 2794641 - RNA, 19 nt, Artificial Sequence
  Description of Artificial Sequence: Synthetic oligonucleotide
aaagcugcuggucaggaag

SEQ ID NO: 2794642 - RNA, 19 nt, Artificial Sequence
  Description of Artificial Sequence: Synthetic oligonucleotide
uuucuauuuauucacugug

SEQ ID NO: 2794643 - RNA, 19 nt, Artificial Sequence
  Description of Artificial Sequence: Synthetic oligonucleotide
gaaacugccacuuaauuuc

SEQ ID NO: 2794644 - RNA, 19 nt, Artificial Sequence
  Description of Artificial Sequence: Synthetic oligonucleotide
ucuaaugcuuucaaaagcu

SEQ ID NO: 2794645 - RNA, 19 nt, Artificial Sequence
  Description of Artificial Sequence: Synthetic oligonucleotide
uaaacaccaauuuugaaaa

SEQ ID NO: 2794646 - RNA, 19 nt, Artificial Sequence
  Description of Artificial Sequence: Synthetic oligonucleotide
uacauuaccacuuauuuua

SEQ ID NO: 2794647 - RNA, 19 nt, Artificial Sequence
  Description of Artificial Sequence: Synthetic oligonucleotide
aaaaugugugcuugucagc

SEQ ID NO: 2794648 - RNA, 19 nt, Artificial Sequence
  Description of Artificial Sequence: Synthetic oligonucleotide
uucuauuuauucacugugg

SEQ ID NO: 2794649 - RNA, 19 nt, Artificial Sequence
  Description of Artificial Sequence: Synthetic oligonucleotide
auaaacaccaauuuugaaa

SEQ ID NO: 2794650 - RNA, 19 nt, Artificial Sequence
  Description of Artificial Sequence: Synthetic oligonucleotide
aauaguaaaauuaccauua

SEQ ID NO: 2794651 - RNA, 19 nt, Artificial Sequence
  Description of Artificial Sequence: Synthetic oligonucleotide
uucacuuucuuuaauagua

SEQ ID NO: 2794652 - RNA, 19 nt, Artificial Sequence
  Description of Artificial Sequence: Synthetic oligonucleotide
aacaaucaacuuugaaaac

SEQ ID NO: 2794653 - RNA, 19 nt, Artificial Sequence
  Description of Artificial Sequence: Synthetic oligonucleotide
aaaaccugcauuaaguugu

SEQ ID NO: 2794654 - RNA, 19 nt, Artificial Sequence
  Description of Artificial Sequence: Synthetic oligonucleotide
aacuaagccuuucacuuuc

SEQ ID NO: 2794655 - RNA, 19 nt, Artificial Sequence
  Description of Artificial Sequence: Synthetic oligonucleotide
uuaaauaaacaccaauuuu

SEQ ID NO: 2794656 - RNA, 19 nt, Artificial Sequence
  Description of Artificial Sequence: Synthetic oligonucleotide
uuaauaguaaaauuaccau

SEQ ID NO: 2794657 - RNA, 19 nt, Artificial Sequence
  Description of Artificial Sequence: Synthetic oligonucleotide
aaaacaaaacaaaacaaaa

SEQ ID NO: 2794658 - RNA, 19 nt, Artificial Sequence
  Description of Artificial Sequence: Synthetic oligonucleotide
guaauauagaacgacagug

SEQ ID NO: 2794659 - RNA, 19 nt, Artificial Sequence
  Description of Artificial Sequence: Synthetic oligonucleotide
uacauuucuauuuauucac

SEQ ID NO: 2794660 - RNA, 19 nt, Artificial Sequence
  Description of Artificial Sequence: Synthetic oligonucleotide
cuuacgaaggucuuucucc

SEQ ID NO: 2794661 - RNA, 19 nt, Artificial Sequence
  Description of Artificial Sequence: Synthetic oligonucleotide
uugaaaaccugcauuaagu

SEQ ID NO: 2794662 - RNA, 19 nt, Artificial Sequence
  Description of Artificial Sequence: Synthetic oligonucleotide
cuuuaauaguaaaauuacc

SEQ ID NO: 2794663 - RNA, 19 nt, Artificial Sequence
  Description of Artificial Sequence: Synthetic oligonucleotide
ucaacuuugaaaaccugca

SEQ ID NO: 2794664 - RNA, 19 nt, Artificial Sequence
  Description of Artificial Sequence: Synthetic oligonucleotide
uuacauuucuauuuauuca

SEQ ID NO: 2794665 - RNA, 19 nt, Artificial Sequence
  Description of Artificial Sequence: Synthetic oligonucleotide
uaauauagaacgacaguga

SEQ ID NO: 2794666 - RNA, 19 nt, Artificial Sequence
  Description of Artificial Sequence: Synthetic oligonucleotide
uaaaauuaccauuacugaa

SEQ ID NO: 2794667 - RNA, 19 nt, Artificial Sequence
  Description of Artificial Sequence: Synthetic oligonucleotide
aauauagaacgacagugaa

SEQ ID NO: 2794668 - RNA, 19 nt, Artificial Sequence
  Description of Artificial Sequence: Synthetic oligonucleotide
agugcauucaaguacauua

SEQ ID NO: 2794669 - RNA, 19 nt, Artificial Sequence
  Description of Artificial Sequence: Synthetic oligonucleotide
cuuguuuuguucuaugaac

SEQ ID NO: 2794670 - RNA, 19 nt, Artificial Sequence
  Description of Artificial Sequence: Synthetic oligonucleotide
uaaugcuuucaaaagcugc

SEQ ID NO: 2794671 - RNA, 19 nt, Artificial Sequence
  Description of Artificial Sequence: Synthetic oligonucleotide
uuuagaaacugccacuuaa

SEQ ID NO: 2794672 - RNA, 19 nt, Artificial Sequence
  Description of Artificial Sequence: Synthetic oligonucleotide
ucuaugaacaucucuugug

SEQ ID NO: 2794673 - RNA, 19 nt, Artificial Sequence
  Description of Artificial Sequence: Synthetic oligonucleotide
uuuuaaaucccugauuaca

SEQ ID NO: 2794674 - RNA, 19 nt, Artificial Sequence
  Description of Artificial Sequence: Synthetic oligonucleotide
accaauuuugaaaacaauc

SEQ ID NO: 2794675 - RNA, 19 nt, Artificial Sequence
  Description of Artificial Sequence: Synthetic oligonucleotide
uguucuaugaacaucucuu

SEQ ID NO: 2794676 - RNA, 19 nt, Artificial Sequence
  Description of Artificial Sequence: Synthetic oligonucleotide
auuuugaaaacaaucaacu

SEQ ID NO: 2794677 - RNA, 19 nt, Artificial Sequence
  Description of Artificial Sequence: Synthetic oligonucleotide
uguaauauagaacgacagu

SEQ ID NO: 2794678 - RNA, 19 nt, Artificial Sequence
  Description of Artificial Sequence: Synthetic oligonucleotide
ucuauuuauucacuguggu

SEQ ID NO: 2794679 - RNA, 19 nt, Artificial Sequence
  Description of Artificial Sequence: Synthetic oligonucleotide
auaguaaaauuaccauuac

SEQ ID NO: 2794680 - RNA, 19 nt, Artificial Sequence
  Description of Artificial Sequence: Synthetic oligonucleotide
uuuaaaucccugauuacau

SEQ ID NO: 2794681 - RNA, 19 nt, Artificial Sequence
  Description of Artificial Sequence: Synthetic oligonucleotide
uugaguucucgucuaaugc

SEQ ID NO: 2794682 - RNA, 19 nt, Artificial Sequence
  Description of Artificial Sequence: Synthetic oligonucleotide
aaaauuaccauuacugaau

SEQ ID NO: 2794683 - RNA, 19 nt, Artificial Sequence
  Description of Artificial Sequence: Synthetic oligonucleotide
aacaaaacuaagccuuuca

SEQ ID NO: 2794684 - RNA, 19 nt, Artificial Sequence
  Description of Artificial Sequence: Synthetic oligonucleotide
aucaacuuugaaaaccugc

SEQ ID NO: 2794685 - RNA, 19 nt, Artificial Sequence
  Description of Artificial Sequence: Synthetic oligonucleotide
cuuaauuuccucuagggaa

SEQ ID NO: 2794686 - RNA, 19 nt, Artificial Sequence
  Description of Artificial Sequence: Synthetic oligonucleotide
cuguaauauagaacgacag

SEQ ID NO: 2794687 - RNA, 19 nt, Artificial Sequence
  Description of Artificial Sequence: Synthetic oligonucleotide
auuaccacuuauuuuaaau

SEQ ID NO: 2794688 - RNA, 19 nt, Artificial Sequence
  Description of Artificial Sequence: Synthetic oligonucleotide
uaauaguaaaauuaccauu

SEQ ID NO: 2794689 - RNA, 19 nt, Artificial Sequence
  Description of Artificial Sequence: Synthetic oligonucleotide
cauuacugaaucauuauca

SEQ ID NO: 2794690 - RNA, 19 nt, Artificial Sequence
  Description of Artificial Sequence: Synthetic oligonucleotide
ugcuuucaaaagcugcugg

SEQ ID NO: 2794691 - RNA, 19 nt, Artificial Sequence
  Description of Artificial Sequence: Synthetic oligonucleotide
ugugcuugucagcagcugg

SEQ ID NO: 2794692 - RNA, 19 nt, Artificial Sequence
  Description of Artificial Sequence: Synthetic oligonucleotide
cuaugaacaucucuugugc

SEQ ID NO: 2794693 - RNA, 19 nt, Artificial Sequence
  Description of Artificial Sequence: Synthetic oligonucleotide
cacuuaauuuccucuaggg

SEQ ID NO: 2794694 - RNA, 19 nt, Artificial Sequence
  Description of Artificial Sequence: Synthetic oligonucleotide
aacuuugaaaaccugcauu

SEQ ID NO: 2794695 - RNA, 19 nt, Artificial Sequence
  Description of Artificial Sequence: Synthetic oligonucleotide
aguacauuaccacuuauuu

SEQ ID NO: 2794696 - RNA, 19 nt, Artificial Sequence
  Description of Artificial Sequence: Synthetic oligonucleotide
aaauaaacaccaauuuuga

SEQ ID NO: 2794697 - RNA, 19 nt, Artificial Sequence
  Description of Artificial Sequence: Synthetic oligonucleotide
aaaagugcauucaaguaca

SEQ ID NO: 2794698 - RNA, 19 nt, Artificial Sequence
  Description of Artificial Sequence: Synthetic oligonucleotide
uuaauuuccucuagggaaa

SEQ ID NO: 2794699 - RNA, 19 nt, Artificial Sequence
  Description of Artificial Sequence: Synthetic oligonucleotide
aaacaccaauuuugaaaac

SEQ ID NO: 2794700 - RNA, 19 nt, Artificial Sequence
  Description of Artificial Sequence: Synthetic oligonucleotide
ucucuugugcaaaugacuc

SEQ ID NO: 2794701 - RNA, 19 nt, Artificial Sequence
  Description of Artificial Sequence: Synthetic oligonucleotide
aacaccaauuuugaaaaca

SEQ ID NO: 2794702 - RNA, 19 nt, Artificial Sequence
  Description of Artificial Sequence: Synthetic oligonucleotide
guaaaauuaccauuacuga

SEQ ID NO: 2794703 - RNA, 19 nt, Artificial Sequence
  Description of Artificial Sequence: Synthetic oligonucleotide
ucgucuaaugcuuucaaaa

SEQ ID NO: 2794704 - RNA, 19 nt, Artificial Sequence
  Description of Artificial Sequence: Synthetic oligonucleotide
cauucaaguacauuaccac

SEQ ID NO: 2794705 - RNA, 19 nt, Artificial Sequence
  Description of Artificial Sequence: Synthetic oligonucleotide
uaccacuuauuuuaaauaa

SEQ ID NO: 2794706 - RNA, 19 nt, Artificial Sequence
  Description of Artificial Sequence: Synthetic oligonucleotide
ugcuuucuuacgaaggucu

SEQ ID NO: 2794707 - RNA, 19 nt, Artificial Sequence
  Description of Artificial Sequence: Synthetic oligonucleotide
auuucuauuuauucacugu

SEQ ID NO: 2794708 - RNA, 19 nt, Artificial Sequence
  Description of Artificial Sequence: Synthetic oligonucleotide
aaagaccccuguaauauag

SEQ ID NO: 2794709 - RNA, 19 nt, Artificial Sequence
  Description of Artificial Sequence: Synthetic oligonucleotide
aauaaacaccaauuuugaa

SEQ ID NO: 2794710 - RNA, 19 nt, Artificial Sequence
  Description of Artificial Sequence: Synthetic oligonucleotide
uaguaaaauuaccauuacu

SEQ ID NO: 2794711 - RNA, 19 nt, Artificial Sequence
  Description of Artificial Sequence: Synthetic oligonucleotide
gucuaaugcuuucaaaagc

SEQ ID NO: 2794712 - RNA, 19 nt, Artificial Sequence
  Description of Artificial Sequence: Synthetic oligonucleotide
ucaugcuaacaaaacuaag

SEQ ID NO: 2794713 - RNA, 19 nt, Artificial Sequence
  Description of Artificial Sequence: Synthetic oligonucleotide
augugugcuugucagcagc

SEQ ID NO: 2794714 - RNA, 19 nt, Artificial Sequence
  Description of Artificial Sequence: Synthetic oligonucleotide
gacagcuacaugcugaguc

SEQ ID NO: 2794715 - RNA, 19 nt, Artificial Sequence
  Description of Artificial Sequence: Synthetic oligonucleotide
ugagucaugcuaacaaaac

SEQ ID NO: 2794716 - RNA, 19 nt, Artificial Sequence
  Description of Artificial Sequence: Synthetic oligonucleotide
aaugcuuucaaaagcugcu

SEQ ID NO: 2794717 - RNA, 19 nt, Artificial Sequence
  Description of Artificial Sequence: Synthetic oligonucleotide
aggaagggcgcucugcagc

SEQ ID NO: 2794718 - RNA, 19 nt, Artificial Sequence
  Description of Artificial Sequence: Synthetic oligonucleotide
auucaaguacauuaccacu

SEQ ID NO: 2794719 - RNA, 19 nt, Artificial Sequence
  Description of Artificial Sequence: Synthetic oligonucleotide
uucaaguacauuaccacuu

SEQ ID NO: 2794720 - RNA, 19 nt, Artificial Sequence
  Description of Artificial Sequence: Synthetic oligonucleotide
ugcauucaaguacauuacc

SEQ ID NO: 2794721 - RNA, 19 nt, Artificial Sequence
  Description of Artificial Sequence: Synthetic oligonucleotide
ugaguuuugaguucucguc

SEQ ID NO: 2794722 - RNA, 19 nt, Artificial Sequence
  Description of Artificial Sequence: Synthetic oligonucleotide
ucugcuuucuuacgaaggu

SEQ ID NO: 2794723 - RNA, 19 nt, Artificial Sequence
  Description of Artificial Sequence: Synthetic oligonucleotide
acuuaauuuccucuaggga

SEQ ID NO: 2794724 - RNA, 19 nt, Artificial Sequence
  Description of Artificial Sequence: Synthetic oligonucleotide
cauuucuauuuauucacug

SEQ ID NO: 2794725 - RNA, 19 nt, Artificial Sequence
  Description of Artificial Sequence: Synthetic oligonucleotide
auuaccauuacugaaucau

SEQ ID NO: 2794726 - RNA, 19 nt, Artificial Sequence
  Description of Artificial Sequence: Synthetic oligonucleotide
ugaguucucgucuaaugcu

SEQ ID NO: 2794727 - RNA, 19 nt, Artificial Sequence
  Description of Artificial Sequence: Synthetic oligonucleotide
uucaaaagcugcuggucag

SEQ ID NO: 2794728 - RNA, 19 nt, Artificial Sequence
  Description of Artificial Sequence: Synthetic oligonucleotide
ugcuaacaaaacuaagccu

SEQ ID NO: 2794729 - RNA, 19 nt, Artificial Sequence
  Description of Artificial Sequence: Synthetic oligonucleotide
uuucacuuucuuuaauagu

SEQ ID NO: 2794730 - RNA, 19 nt, Artificial Sequence
  Description of Artificial Sequence: Synthetic oligonucleotide
aaucccugauuacauuucu

SEQ ID NO: 2794731 - RNA, 19 nt, Artificial Sequence
  Description of Artificial Sequence: Synthetic oligonucleotide
uuaccacuuauuuuaaaua

SEQ ID NO: 2794732 - RNA, 19 nt, Artificial Sequence
  Description of Artificial Sequence: Synthetic oligonucleotide
aauuaccauuacugaauca

SEQ ID NO: 2794733 - RNA, 19 nt, Artificial Sequence
  Description of Artificial Sequence: Synthetic oligonucleotide
ugucucuucagcuuguuuu

SEQ ID NO: 2794734 - RNA, 19 nt, Artificial Sequence
  Description of Artificial Sequence: Synthetic oligonucleotide
auuacugaaucauuaucau

SEQ ID NO: 2794735 - RNA, 19 nt, Artificial Sequence
  Description of Artificial Sequence: Synthetic oligonucleotide
gaugaguuuugaguucucg

SEQ ID NO: 2794736 - RNA, 19 nt, Artificial Sequence
  Description of Artificial Sequence: Synthetic oligonucleotide
uccagguucaccugcagcu

SEQ ID NO: 2794737 - RNA, 19 nt, Artificial Sequence
  Description of Artificial Sequence: Synthetic oligonucleotide
uucuaugaacaucucuugu

SEQ ID NO: 2794738 - RNA, 19 nt, Artificial Sequence
  Description of Artificial Sequence: Synthetic oligonucleotide
aaacugccacuuaauuucc

SEQ ID NO: 2794739 - RNA, 19 nt, Artificial Sequence
  Description of Artificial Sequence: Synthetic oligonucleotide
ugcugagucaugcuaacaa

SEQ ID NO: 2794740 - RNA, 19 nt, Artificial Sequence
  Description of Artificial Sequence: Synthetic oligonucleotide
uaaaucccugauuacauuu

SEQ ID NO: 2794741 - RNA, 19 nt, Artificial Sequence
  Description of Artificial Sequence: Synthetic oligonucleotide
aaaucccugauuacauuuc

SEQ ID NO: 2794742 - RNA, 19 nt, Artificial Sequence
  Description of Artificial Sequence: Synthetic oligonucleotide
uuuugaaaacaaucaacuu

SEQ ID NO: 2794743 - RNA, 19 nt, Artificial Sequence
  Description of Artificial Sequence: Synthetic oligonucleotide
cuugucagcagcuggauga

SEQ ID NO: 2794744 - RNA, 19 nt, Artificial Sequence
  Description of Artificial Sequence: Synthetic oligonucleotide
agaaacugccacuuaauuu

SEQ ID NO: 2794745 - RNA, 19 nt, Artificial Sequence
  Description of Artificial Sequence: Synthetic oligonucleotide
cugcuggucaggaagggcg

SEQ ID NO: 2794746 - RNA, 19 nt, Artificial Sequence
  Description of Artificial Sequence: Synthetic oligonucleotide
cucugcuuucuuacgaagg

SEQ ID NO: 2794747 - RNA, 19 nt, Artificial Sequence
  Description of Artificial Sequence: Synthetic oligonucleotide
uauucacugugguagucug

SEQ ID NO: 2794748 - RNA, 19 nt, Artificial Sequence
  Description of Artificial Sequence: Synthetic oligonucleotide
agaacgacagugaagcaag

SEQ ID NO: 2794749 - RNA, 19 nt, Artificial Sequence
  Description of Artificial Sequence: Synthetic oligonucleotide
uaccauuacugaaucauua

SEQ ID NO: 2794750 - RNA, 19 nt, Artificial Sequence
  Description of Artificial Sequence: Synthetic oligonucleotide
gcaccugacagcuacaugc

SEQ ID NO: 2794751 - RNA, 19 nt, Artificial Sequence
  Description of Artificial Sequence: Synthetic oligonucleotide
uuagaaacugccacuuaau

SEQ ID NO: 2794752 - RNA, 19 nt, Artificial Sequence
  Description of Artificial Sequence: Synthetic oligonucleotide
acugccacuuaauuuccuc

SEQ ID NO: 2794753 - RNA, 19 nt, Artificial Sequence
  Description of Artificial Sequence: Synthetic oligonucleotide
acaucucuugugcaaauga

SEQ ID NO: 2794754 - RNA, 19 nt, Artificial Sequence
  Description of Artificial Sequence: Synthetic oligonucleotide
cacugugguagucugaaac

SEQ ID NO: 2794755 - RNA, 19 nt, Artificial Sequence
  Description of Artificial Sequence: Synthetic oligonucleotide
uuacgaaggucuuucucca

SEQ ID NO: 2794756 - RNA, 19 nt, Artificial Sequence
  Description of Artificial Sequence: Synthetic oligonucleotide
ugaaaaccugcauuaaguu

SEQ ID NO: 2794757 - RNA, 19 nt, Artificial Sequence
  Description of Artificial Sequence: Synthetic oligonucleotide
ugacucugcuuucuuacga

SEQ ID NO: 2794758 - RNA, 19 nt, Artificial Sequence
  Description of Artificial Sequence: Synthetic oligonucleotide
acugugguagucugaaaca

SEQ ID NO: 2794759 - RNA, 19 nt, Artificial Sequence
  Description of Artificial Sequence: Synthetic oligonucleotide
guucuaugaacaucucuug

SEQ ID NO: 2794760 - RNA, 19 nt, Artificial Sequence
  Description of Artificial Sequence: Synthetic oligonucleotide
ugaggugcagagcaccuga

SEQ ID NO: 2794761 - RNA, 19 nt, Artificial Sequence
  Description of Artificial Sequence: Synthetic oligonucleotide
ugaaaacaaucaacuuuga

SEQ ID NO: 2794762 - RNA, 19 nt, Artificial Sequence
  Description of Artificial Sequence: Synthetic oligonucleotide
cagaagguggcuuugucuc

SEQ ID NO: 2794763 - RNA, 19 nt, Artificial Sequence
  Description of Artificial Sequence: Synthetic oligonucleotide
ucacuuucuuuaauaguaa

SEQ ID NO: 2794764 - RNA, 19 nt, Artificial Sequence
  Description of Artificial Sequence: Synthetic oligonucleotide
uuucuuacgaaggucuuuc

SEQ ID NO: 2794765 - RNA, 19 nt, Artificial Sequence
  Description of Artificial Sequence: Synthetic oligonucleotide
ccaauuuugaaaacaauca

SEQ ID NO: 2794766 - RNA, 19 nt, Artificial Sequence
  Description of Artificial Sequence: Synthetic oligonucleotide
ucuuacgaaggucuuucuc

SEQ ID NO: 2794767 - RNA, 19 nt, Artificial Sequence
  Description of Artificial Sequence: Synthetic oligonucleotide
cacuuauuuuaaauaaaca

SEQ ID NO: 2794768 - RNA, 19 nt, Artificial Sequence
  Description of Artificial Sequence: Synthetic oligonucleotide
cuaaugcuuucaaaagcug

SEQ ID NO: 2794769 - RNA, 19 nt, Artificial Sequence
  Description of Artificial Sequence: Synthetic oligonucleotide
gaaaacaaucaacuuugaa

SEQ ID NO: 2794770 - RNA, 19 nt, Artificial Sequence
  Description of Artificial Sequence: Synthetic oligonucleotide
augaguuuugaguucucgu

SEQ ID NO: 2794771 - RNA, 19 nt, Artificial Sequence
  Description of Artificial Sequence: Synthetic oligonucleotide
gugguagucugaaacauug

SEQ ID NO: 2794772 - RNA, 19 nt, Artificial Sequence
  Description of Artificial Sequence: Synthetic oligonucleotide
ucuucagcuuguuuuguuc

SEQ ID NO: 2794773 - RNA, 19 nt, Artificial Sequence
  Description of Artificial Sequence: Synthetic oligonucleotide
augacucugcuuucuuacg

SEQ ID NO: 2794774 - RNA, 19 nt, Artificial Sequence
  Description of Artificial Sequence: Synthetic oligonucleotide
uacaugcugagucaugcua

SEQ ID NO: 2794775 - RNA, 19 nt, Artificial Sequence
  Description of Artificial Sequence: Synthetic oligonucleotide
uguuuuguucuaugaacau

SEQ ID NO: 2794776 - RNA, 19 nt, Artificial Sequence
  Description of Artificial Sequence: Synthetic oligonucleotide
auuuauucacugugguagu

SEQ ID NO: 2794777 - RNA, 19 nt, Artificial Sequence
  Description of Artificial Sequence: Synthetic oligonucleotide
aaaugacucugcuuucuua

SEQ ID NO: 2794778 - RNA, 19 nt, Artificial Sequence
  Description of Artificial Sequence: Synthetic oligonucleotide
ucaaguacauuaccacuua

SEQ ID NO: 2794779 - RNA, 19 nt, Artificial Sequence
  Description of Artificial Sequence: Synthetic oligonucleotide
ggugcagagcaccugacag

SEQ ID NO: 2794780 - RNA, 19 nt, Artificial Sequence
  Description of Artificial Sequence: Synthetic oligonucleotide
ucaggaagggcgcucugca

SEQ ID NO: 2794781 - RNA, 19 nt, Artificial Sequence
  Description of Artificial Sequence: Synthetic oligonucleotide
ccacuuauuuuaaauaaac

SEQ ID NO: 2794782 - RNA, 19 nt, Artificial Sequence
  Description of Artificial Sequence: Synthetic oligonucleotide
uagaaacugccacuuaauu

SEQ ID NO: 2794783 - RNA, 19 nt, Artificial Sequence
  Description of Artificial Sequence: Synthetic oligonucleotide
auauagaacgacagugaag

SEQ ID NO: 2794784 - RNA, 19 nt, Artificial Sequence
  Description of Artificial Sequence: Synthetic oligonucleotide
ucaaaagcugcuggucagg

SEQ ID NO: 2794785 - RNA, 19 nt, Artificial Sequence
  Description of Artificial Sequence: Synthetic oligonucleotide
caucucuugugcaaaugac

SEQ ID NO: 2794786 - RNA, 19 nt, Artificial Sequence
  Description of Artificial Sequence: Synthetic oligonucleotide
caauuuugaaaacaaucaa

SEQ ID NO: 2794787 - RNA, 19 nt, Artificial Sequence
  Description of Artificial Sequence: Synthetic oligonucleotide
uagaacgacagugaagcaa

SEQ ID NO: 2794788 - RNA, 19 nt, Artificial Sequence
  Description of Artificial Sequence: Synthetic oligonucleotide
uuacugaaucauuaucaua

SEQ ID NO: 2794789 - RNA, 19 nt, Artificial Sequence
  Description of Artificial Sequence: Synthetic oligonucleotide
guggcuuugucucuucagc

SEQ ID NO: 2794790 - RNA, 19 nt, Artificial Sequence
  Description of Artificial Sequence: Synthetic oligonucleotide
acagcuacaugcugaguca

SEQ ID NO: 2794791 - RNA, 19 nt, Artificial Sequence
  Description of Artificial Sequence: Synthetic oligonucleotide
aaacuaagccuuucacuuu

SEQ ID NO: 2794792 - RNA, 19 nt, Artificial Sequence
  Description of Artificial Sequence: Synthetic oligonucleotide
augaacaucucuugugcaa

SEQ ID NO: 2794793 - RNA, 19 nt, Artificial Sequence
  Description of Artificial Sequence: Synthetic oligonucleotide
agucaugcuaacaaaacua

SEQ ID NO: 2794794 - RNA, 19 nt, Artificial Sequence
  Description of Artificial Sequence: Synthetic oligonucleotide
accugcauuaaguuguuuu

SEQ ID NO: 2794795 - RNA, 19 nt, Artificial Sequence
  Description of Artificial Sequence: Synthetic oligonucleotide
uuaccauuacugaaucauu

SEQ ID NO: 2794796 - RNA, 19 nt, Artificial Sequence
  Description of Artificial Sequence: Synthetic oligonucleotide
uugugcaaaugacucugcu

SEQ ID NO: 2794797 - RNA, 19 nt, Artificial Sequence
  Description of Artificial Sequence: Synthetic oligonucleotide
acucugcuuucuuacgaag

SEQ ID NO: 2794798 - RNA, 19 nt, Artificial Sequence
  Description of Artificial Sequence: Synthetic oligonucleotide
ugcagagcaccugacagcu

SEQ ID NO: 2794799 - RNA, 19 nt, Artificial Sequence
  Description of Artificial Sequence: Synthetic oligonucleotide
uggaugaguuuugaguucu

SEQ ID NO: 2794800 - RNA, 19 nt, Artificial Sequence
  Description of Artificial Sequence: Synthetic oligonucleotide
aaaagaccccuguaauaua

SEQ ID NO: 2794801 - RNA, 19 nt, Artificial Sequence
  Description of Artificial Sequence: Synthetic oligonucleotide
cagagcaccugacagcuac

SEQ ID NO: 2794802 - RNA, 19 nt, Artificial Sequence
  Description of Artificial Sequence: Synthetic oligonucleotide
ugauuacauuucuauuuau

SEQ ID NO: 2794803 - RNA, 19 nt, Artificial Sequence
  Description of Artificial Sequence: Synthetic oligonucleotide
ugugcaaaugacucugcuu

SEQ ID NO: 2794804 - RNA, 19 nt, Artificial Sequence
  Description of Artificial Sequence: Synthetic oligonucleotide
aaucaacuuugaaaaccug

SEQ ID NO: 2794805 - RNA, 19 nt, Artificial Sequence
  Description of Artificial Sequence: Synthetic oligonucleotide
cugacagcuacaugcugag

SEQ ID NO: 2794806 - RNA, 19 nt, Artificial Sequence
  Description of Artificial Sequence: Synthetic oligonucleotide
uuaaaucccugauuacauu

SEQ ID NO: 2794807 - RNA, 19 nt, Artificial Sequence
  Description of Artificial Sequence: Synthetic oligonucleotide
agcagaagguggcuuuguc

SEQ ID NO: 2794808 - RNA, 19 nt, Artificial Sequence
  Description of Artificial Sequence: Synthetic oligonucleotide
uggcuuugucucuucagcu

SEQ ID NO: 2794809 - RNA, 19 nt, Artificial Sequence
  Description of Artificial Sequence: Synthetic oligonucleotide
ugaacaucucuugugcaaa

SEQ ID NO: 2794810 - RNA, 19 nt, Artificial Sequence
  Description of Artificial Sequence: Synthetic oligonucleotide
uuuuagaaacugccacuua

SEQ ID NO: 2794811 - RNA, 19 nt, Artificial Sequence
  Description of Artificial Sequence: Synthetic oligonucleotide
uucacugugguagucugaa

SEQ ID NO: 2794812 - RNA, 19 nt, Artificial Sequence
  Description of Artificial Sequence: Synthetic oligonucleotide
uucuccaguuccagguuca

SEQ ID NO: 2794813 - RNA, 19 nt, Artificial Sequence
  Description of Artificial Sequence: Synthetic oligonucleotide
ugugugcuugucagcagcu

SEQ ID NO: 2794814 - RNA, 19 nt, Artificial Sequence
  Description of Artificial Sequence: Synthetic oligonucleotide
agucugaaacauuguauuu

SEQ ID NO: 2794815 - RNA, 19 nt, Artificial Sequence
  Description of Artificial Sequence: Synthetic oligonucleotide
aaguacauuaccacuuauu

SEQ ID NO: 2794816 - RNA, 19 nt, Artificial Sequence
  Description of Artificial Sequence: Synthetic oligonucleotide
uuuguucuaugaacaucuc

SEQ ID NO: 2794817 - RNA, 19 nt, Artificial Sequence
  Description of Artificial Sequence: Synthetic oligonucleotide
ucucgucuaaugcuuucaa

SEQ ID NO: 2794818 - RNA, 19 nt, Artificial Sequence
  Description of Artificial Sequence: Synthetic oligonucleotide
gagucaugcuaacaaaacu

SEQ ID NO: 2794819 - RNA, 19 nt, Artificial Sequence
  Description of Artificial Sequence: Synthetic oligonucleotide
aagguggcuuugucucuuc

SEQ ID NO: 2794820 - RNA, 19 nt, Artificial Sequence
  Description of Artificial Sequence: Synthetic oligonucleotide
gaguuuugaguucucgucu

SEQ ID NO: 2794821 - RNA, 19 nt, Artificial Sequence
  Description of Artificial Sequence: Synthetic oligonucleotide
aaaagcugcuggucaggaa

SEQ ID NO: 2794822 - RNA, 19 nt, Artificial Sequence
  Description of Artificial Sequence: Synthetic oligonucleotide
acugaaucauuaucauaaa

SEQ ID NO: 2794823 - RNA, 19 nt, Artificial Sequence
  Description of Artificial Sequence: Synthetic oligonucleotide
acgaaggucuuucuccagu

SEQ ID NO: 2794824 - RNA, 19 nt, Artificial Sequence
  Description of Artificial Sequence: Synthetic oligonucleotide
guuuuguucuaugaacauc

SEQ ID NO: 2794825 - RNA, 19 nt, Artificial Sequence
  Description of Artificial Sequence: Synthetic oligonucleotide
agaccccuguaauauagaa

SEQ ID NO: 2794826 - RNA, 19 nt, Artificial Sequence
  Description of Artificial Sequence: Synthetic oligonucleotide
ugugguagucugaaacauu

SEQ ID NO: 2794827 - RNA, 19 nt, Artificial Sequence
  Description of Artificial Sequence: Synthetic oligonucleotide
caaucaacuuugaaaaccu

SEQ ID NO: 2794828 - RNA, 19 nt, Artificial Sequence
  Description of Artificial Sequence: Synthetic oligonucleotide
uuuauucacugugguaguc

SEQ ID NO: 2794829 - RNA, 19 nt, Artificial Sequence
  Description of Artificial Sequence: Synthetic oligonucleotide
aguuuugaguucucgucua

SEQ ID NO: 2794830 - RNA, 19 nt, Artificial Sequence
  Description of Artificial Sequence: Synthetic oligonucleotide
cugagucaugcuaacaaaa

SEQ ID NO: 2794831 - RNA, 19 nt, Artificial Sequence
  Description of Artificial Sequence: Synthetic oligonucleotide
ggcgcucugcagcagaagg

SEQ ID NO: 2794832 - RNA, 19 nt, Artificial Sequence
  Description of Artificial Sequence: Synthetic oligonucleotide
ugguagucugaaacauugu

SEQ ID NO: 2794833 - RNA, 19 nt, Artificial Sequence
  Description of Artificial Sequence: Synthetic oligonucleotide
cugauuacauuucuauuua

SEQ ID NO: 2794834 - RNA, 19 nt, Artificial Sequence
  Description of Artificial Sequence: Synthetic oligonucleotide
acaccaauuuugaaaacaa

SEQ ID NO: 2794835 - RNA, 19 nt, Artificial Sequence
  Description of Artificial Sequence: Synthetic oligonucleotide
uacgaaggucuuucuccag

SEQ ID NO: 2794836 - RNA, 19 nt, Artificial Sequence
  Description of Artificial Sequence: Synthetic oligonucleotide
ugcuggucaggaagggcgc

SEQ ID NO: 2794837 - RNA, 19 nt, Artificial Sequence
  Description of Artificial Sequence: Synthetic oligonucleotide
caugcugagucaugcuaac

SEQ ID NO: 2794838 - RNA, 19 nt, Artificial Sequence
  Description of Artificial Sequence: Synthetic oligonucleotide
uucucgucuaaugcuuuca

SEQ ID NO: 2794839 - RNA, 19 nt, Artificial Sequence
  Description of Artificial Sequence: Synthetic oligonucleotide
ugcaaaugacucugcuuuc

SEQ ID NO: 2794840 - RNA, 19 nt, Artificial Sequence
  Description of Artificial Sequence: Synthetic oligonucleotide
aacgacagugaagcaagaa

SEQ ID NO: 2794841 - RNA, 19 nt, Artificial Sequence
  Description of Artificial Sequence: Synthetic oligonucleotide
cugaaucauuaucauaaaa

SEQ ID NO: 2794842 - RNA, 19 nt, Artificial Sequence
  Description of Artificial Sequence: Synthetic oligonucleotide
ugccacuuaauuuccucua

SEQ ID NO: 2794843 - RNA, 19 nt, Artificial Sequence
  Description of Artificial Sequence: Synthetic oligonucleotide
cuggaugaguuuugaguuc

SEQ ID NO: 2794844 - RNA, 19 nt, Artificial Sequence
  Description of Artificial Sequence: Synthetic oligonucleotide
uaacaaaacuaagccuuuc

SEQ ID NO: 2794845 - RNA, 19 nt, Artificial Sequence
  Description of Artificial Sequence: Synthetic oligonucleotide
gcuuugucucuucagcuug

SEQ ID NO: 2794846 - RNA, 19 nt, Artificial Sequence
  Description of Artificial Sequence: Synthetic oligonucleotide
cuauuuauucacuguggua

SEQ ID NO: 2794847 - RNA, 19 nt, Artificial Sequence
  Description of Artificial Sequence: Synthetic oligonucleotide
acauuucuauuuauucacu

SEQ ID NO: 2794848 - RNA, 19 nt, Artificial Sequence
  Description of Artificial Sequence: Synthetic oligonucleotide
auagaacgacagugaagca

SEQ ID NO: 2794849 - RNA, 19 nt, Artificial Sequence
  Description of Artificial Sequence: Synthetic oligonucleotide
gaccccuguaauauagaac

SEQ ID NO: 2794850 - RNA, 19 nt, Artificial Sequence
  Description of Artificial Sequence: Synthetic oligonucleotide
cagguucaccugcagcucc

SEQ ID NO: 2794851 - RNA, 19 nt, Artificial Sequence
  Description of Artificial Sequence: Synthetic oligonucleotide
gcuacaugcugagucaugc

SEQ ID NO: 2794852 - RNA, 19 nt, Artificial Sequence
  Description of Artificial Sequence: Synthetic oligonucleotide
caguuccagguucaccugc

SEQ ID NO: 2794853 - RNA, 19 nt, Artificial Sequence
  Description of Artificial Sequence: Synthetic oligonucleotide
uuuugaguucucgucuaau

SEQ ID NO: 2794854 - RNA, 19 nt, Artificial Sequence
  Description of Artificial Sequence: Synthetic oligonucleotide
uucuuacgaaggucuuucu

SEQ ID NO: 2794855 - RNA, 19 nt, Artificial Sequence
  Description of Artificial Sequence: Synthetic oligonucleotide
aagggcgcucugcagcaga

SEQ ID NO: 2794856 - RNA, 19 nt, Artificial Sequence
  Description of Artificial Sequence: Synthetic oligonucleotide
gucaugcuaacaaaacuaa

SEQ ID NO: 2794857 - RNA, 19 nt, Artificial Sequence
  Description of Artificial Sequence: Synthetic oligonucleotide
gugcagagcaccugacagc

SEQ ID NO: 2794858 - RNA, 19 nt, Artificial Sequence
  Description of Artificial Sequence: Synthetic oligonucleotide
gugcauucaaguacauuac

SEQ ID NO: 2794859 - RNA, 19 nt, Artificial Sequence
  Description of Artificial Sequence: Synthetic oligonucleotide
uucagcuuguuuuguucua

SEQ ID NO: 2794860 - RNA, 19 nt, Artificial Sequence
  Description of Artificial Sequence: Synthetic oligonucleotide
accacuuauuuuaaauaaa

SEQ ID NO: 2794861 - RNA, 19 nt, Artificial Sequence
  Description of Artificial Sequence: Synthetic oligonucleotide
augcuuucaaaagcugcug

SEQ ID NO: 2794862 - RNA, 19 nt, Artificial Sequence
  Description of Artificial Sequence: Synthetic oligonucleotide
gguagucugaaacauugua

SEQ ID NO: 2794863 - RNA, 19 nt, Artificial Sequence
  Description of Artificial Sequence: Synthetic oligonucleotide
cgucuaaugcuuucaaaag

SEQ ID NO: 2794864 - RNA, 19 nt, Artificial Sequence
  Description of Artificial Sequence: Synthetic oligonucleotide
uugucagcagcuggaugag

SEQ ID NO: 2794865 - RNA, 19 nt, Artificial Sequence
  Description of Artificial Sequence: Synthetic oligonucleotide
gacucugcuuucuuacgaa

SEQ ID NO: 2794866 - RNA, 19 nt, Artificial Sequence
  Description of Artificial Sequence: Synthetic oligonucleotide
ccuguaauauagaacgaca

SEQ ID NO: 2794867 - RNA, 19 nt, Artificial Sequence
  Description of Artificial Sequence: Synthetic oligonucleotide
ucagcuuguuuuguucuau

SEQ ID NO: 2794868 - RNA, 19 nt, Artificial Sequence
  Description of Artificial Sequence: Synthetic oligonucleotide
ccacuuaauuuccucuagg

SEQ ID NO: 2794869 - RNA, 19 nt, Artificial Sequence
  Description of Artificial Sequence: Synthetic oligonucleotide
gguggcuuugucucuucag

SEQ ID NO: 2794870 - RNA, 19 nt, Artificial Sequence
  Description of Artificial Sequence: Synthetic oligonucleotide
ugcagcagaagguggcuuu

SEQ ID NO: 2794871 - RNA, 19 nt, Artificial Sequence
  Description of Artificial Sequence: Synthetic oligonucleotide
ccauuacugaaucauuauc

SEQ ID NO: 2794872 - RNA, 19 nt, Artificial Sequence
  Description of Artificial Sequence: Synthetic oligonucleotide
gccacuuaauuuccucuag

SEQ ID NO: 2794873 - RNA, 19 nt, Artificial Sequence
  Description of Artificial Sequence: Synthetic oligonucleotide
cacuuucuuuaauaguaaa

SEQ ID NO: 2794874 - RNA, 19 nt, Artificial Sequence
  Description of Artificial Sequence: Synthetic oligonucleotide
agcaccugacagcuacaug

SEQ ID NO: 2794875 - RNA, 19 nt, Artificial Sequence
  Description of Artificial Sequence: Synthetic oligonucleotide
uaauuuccucuagggaaaa

SEQ ID NO: 2794876 - RNA, 19 nt, Artificial Sequence
  Description of Artificial Sequence: Synthetic oligonucleotide
acaugcugagucaugcuaa

SEQ ID NO: 2794877 - RNA, 19 nt, Artificial Sequence
  Description of Artificial Sequence: Synthetic oligonucleotide
accugacagcuacaugcug

SEQ ID NO: 2794878 - RNA, 19 nt, Artificial Sequence
  Description of Artificial Sequence: Synthetic oligonucleotide
gcuaacaaaacuaagccuu

SEQ ID NO: 2794879 - RNA, 19 nt, Artificial Sequence
  Description of Artificial Sequence: Synthetic oligonucleotide
aggugcagagcaccugaca

SEQ ID NO: 2794880 - RNA, 19 nt, Artificial Sequence
  Description of Artificial Sequence: Synthetic oligonucleotide
aagaccccuguaauauaga

SEQ ID NO: 2794881 - RNA, 19 nt, Artificial Sequence
  Description of Artificial Sequence: Synthetic oligonucleotide
aagugcauucaaguacauu

SEQ ID NO: 2794882 - RNA, 19 nt, Artificial Sequence
  Description of Artificial Sequence: Synthetic oligonucleotide
agccuuucacuuucuuuaa

SEQ ID NO: 2794883 - RNA, 19 nt, Artificial Sequence
  Description of Artificial Sequence: Synthetic oligonucleotide
gcuuguuuuguucuaugaa

SEQ ID NO: 2794884 - RNA, 19 nt, Artificial Sequence
  Description of Artificial Sequence: Synthetic oligonucleotide
guagucugaaacauuguau

SEQ ID NO: 2794885 - RNA, 19 nt, Artificial Sequence
  Description of Artificial Sequence: Synthetic oligonucleotide
uugucucuucagcuuguuu

SEQ ID NO: 2794886 - RNA, 19 nt, Artificial Sequence
  Description of Artificial Sequence: Synthetic oligonucleotide
guucucgucuaaugcuuuc

SEQ ID NO: 2794887 - RNA, 19 nt, Artificial Sequence
  Description of Artificial Sequence: Synthetic oligonucleotide
cuucagcuuguuuuguucu

SEQ ID NO: 2794888 - RNA, 19 nt, Artificial Sequence
  Description of Artificial Sequence: Synthetic oligonucleotide
guacauuaccacuuauuuu

SEQ ID NO: 2794889 - RNA, 19 nt, Artificial Sequence
  Description of Artificial Sequence: Synthetic oligonucleotide
aaagugcauucaaguacau

SEQ ID NO: 2794890 - RNA, 19 nt, Artificial Sequence
  Description of Artificial Sequence: Synthetic oligonucleotide
cauuaccacuuauuuuaaa

SEQ ID NO: 2794891 - RNA, 19 nt, Artificial Sequence
  Description of Artificial Sequence: Synthetic oligonucleotide
gucaggaagggcgcucugc

SEQ ID NO: 2794892 - RNA, 19 nt, Artificial Sequence
  Description of Artificial Sequence: Synthetic oligonucleotide
aacugccacuuaauuuccu

SEQ ID NO: 2794893 - RNA, 19 nt, Artificial Sequence
  Description of Artificial Sequence: Synthetic oligonucleotide
guuuugaguucucgucuaa

SEQ ID NO: 2794894 - RNA, 19 nt, Artificial Sequence
  Description of Artificial Sequence: Synthetic oligonucleotide
cugcuuucuuacgaagguc

SEQ ID NO: 2794895 - RNA, 19 nt, Artificial Sequence
  Description of Artificial Sequence: Synthetic oligonucleotide
cucgucuaaugcuuucaaa

SEQ ID NO: 2794896 - RNA, 19 nt, Artificial Sequence
  Description of Artificial Sequence: Synthetic oligonucleotide
cccuguaauauagaacgac

SEQ ID NO: 2794897 - RNA, 19 nt, Artificial Sequence
  Description of Artificial Sequence: Synthetic oligonucleotide
gcuggaugaguuuugaguu

SEQ ID NO: 2794898 - RNA, 19 nt, Artificial Sequence
  Description of Artificial Sequence: Synthetic oligonucleotide
ccugauuacauuucuauuu

SEQ ID NO: 2794899 - RNA, 19 nt, Artificial Sequence
  Description of Artificial Sequence: Synthetic oligonucleotide
acauuaccacuuauuuuaa

SEQ ID NO: 2794900 - RNA, 19 nt, Artificial Sequence
  Description of Artificial Sequence: Synthetic oligonucleotide
aggucuuucuccaguucca

SEQ ID NO: 2794901 - RNA, 19 nt, Artificial Sequence
  Description of Artificial Sequence: Synthetic oligonucleotide
aguuccagguucaccugca

SEQ ID NO: 2794902 - RNA, 19 nt, Artificial Sequence
  Description of Artificial Sequence: Synthetic oligonucleotide
gucugaaacauuguauuuu

SEQ ID NO: 2794903 - RNA, 19 nt, Artificial Sequence
  Description of Artificial Sequence: Synthetic oligonucleotide
caaaagcugcuggucagga

SEQ ID NO: 2794904 - RNA, 19 nt, Artificial Sequence
  Description of Artificial Sequence: Synthetic oligonucleotide
aaaccugcauuaaguuguu

SEQ ID NO: 2794905 - RNA, 19 nt, Artificial Sequence
  Description of Artificial Sequence: Synthetic oligonucleotide
agguggcuuugucucuuca

SEQ ID NO: 2794906 - RNA, 19 nt, Artificial Sequence
  Description of Artificial Sequence: Synthetic oligonucleotide
cgacagugaagcaagaaaa

SEQ ID NO: 2794907 - RNA, 19 nt, Artificial Sequence
  Description of Artificial Sequence: Synthetic oligonucleotide
gcugagucaugcuaacaaa

SEQ ID NO: 2794908 - RNA, 19 nt, Artificial Sequence
  Description of Artificial Sequence: Synthetic oligonucleotide
ggucuuucuccaguuccag

SEQ ID NO: 2794909 - RNA, 19 nt, Artificial Sequence
  Description of Artificial Sequence: Synthetic oligonucleotide
agcagcuggaugaguuuug

SEQ ID NO: 2794910 - RNA, 19 nt, Artificial Sequence
  Description of Artificial Sequence: Synthetic oligonucleotide
gaacaucucuugugcaaau

SEQ ID NO: 2794911 - RNA, 19 nt, Artificial Sequence
  Description of Artificial Sequence: Synthetic oligonucleotide
cugccacuuaauuuccucu

SEQ ID NO: 2794912 - RNA, 19 nt, Artificial Sequence
  Description of Artificial Sequence: Synthetic oligonucleotide
auucacugugguagucuga

SEQ ID NO: 2794913 - RNA, 19 nt, Artificial Sequence
  Description of Artificial Sequence: Synthetic oligonucleotide
uuugucucuucagcuuguu

SEQ ID NO: 2794914 - RNA, 19 nt, Artificial Sequence
  Description of Artificial Sequence: Synthetic oligonucleotide
gcuugucagcagcuggaug

SEQ ID NO: 2794915 - RNA, 19 nt, Artificial Sequence
  Description of Artificial Sequence: Synthetic oligonucleotide
ggaagggcgcucugcagca

SEQ ID NO: 2794916 - RNA, 19 nt, Artificial Sequence
  Description of Artificial Sequence: Synthetic oligonucleotide
augcugagucaugcuaaca

SEQ ID NO: 2794917 - RNA, 19 nt, Artificial Sequence
  Description of Artificial Sequence: Synthetic oligonucleotide
agcuacaugcugagucaug

SEQ ID NO: 2794918 - RNA, 19 nt, Artificial Sequence
  Description of Artificial Sequence: Synthetic oligonucleotide
acuaagccuuucacuuucu

SEQ ID NO: 2794919 - RNA, 19 nt, Artificial Sequence
  Description of Artificial Sequence: Synthetic oligonucleotide
gugcuugucagcagcugga

SEQ ID NO: 2794920 - RNA, 19 nt, Artificial Sequence
  Description of Artificial Sequence: Synthetic oligonucleotide
gcuuucaaaagcugcuggu

SEQ ID NO: 2794921 - RNA, 19 nt, Artificial Sequence
  Description of Artificial Sequence: Synthetic oligonucleotide
ugacagcuacaugcugagu

SEQ ID NO: 2794922 - RNA, 19 nt, Artificial Sequence
  Description of Artificial Sequence: Synthetic oligonucleotide
gaggugcagagcaccugac

SEQ ID NO: 2794923 - RNA, 19 nt, Artificial Sequence
  Description of Artificial Sequence: Synthetic oligonucleotide
aguucucgucuaaugcuuu

SEQ ID NO: 2794924 - RNA, 19 nt, Artificial Sequence
  Description of Artificial Sequence: Synthetic oligonucleotide
gugugcuugucagcagcug

SEQ ID NO: 2794925 - RNA, 19 nt, Artificial Sequence
  Description of Artificial Sequence: Synthetic oligonucleotide
gaacgacagugaagcaaga

SEQ ID NO: 2794926 - RNA, 19 nt, Artificial Sequence
  Description of Artificial Sequence: Synthetic oligonucleotide
caacuuugaaaaccugcau

SEQ ID NO: 2794927 - RNA, 19 nt, Artificial Sequence
  Description of Artificial Sequence: Synthetic oligonucleotide
gcagaagguggcuuugucu

SEQ ID NO: 2794928 - RNA, 19 nt, Artificial Sequence
  Description of Artificial Sequence: Synthetic oligonucleotide
gaguucucgucuaaugcuu

SEQ ID NO: 2794929 - RNA, 19 nt, Artificial Sequence
  Description of Artificial Sequence: Synthetic oligonucleotide
gaagggcgcucugcagcag

SEQ ID NO: 2794930 - RNA, 19 nt, Artificial Sequence
  Description of Artificial Sequence: Synthetic oligonucleotide
caccaauuuugaaaacaau

SEQ ID NO: 2794931 - RNA, 19 nt, Artificial Sequence
  Description of Artificial Sequence: Synthetic oligonucleotide
cuuugucucuucagcuugu

SEQ ID NO: 2794932 - RNA, 19 nt, Artificial Sequence
  Description of Artificial Sequence: Synthetic oligonucleotide
aaccugcauuaaguuguuu

SEQ ID NO: 2794933 - RNA, 19 nt, Artificial Sequence
  Description of Artificial Sequence: Synthetic oligonucleotide
cuacaugcugagucaugcu

SEQ ID NO: 2794934 - RNA, 19 nt, Artificial Sequence
  Description of Artificial Sequence: Synthetic oligonucleotide
caaguacauuaccacuuau

SEQ ID NO: 2794935 - RNA, 19 nt, Artificial Sequence
  Description of Artificial Sequence: Synthetic oligonucleotide
cuggucaggaagggcgcuc

SEQ ID NO: 2794936 - RNA, 19 nt, Artificial Sequence
  Description of Artificial Sequence: Synthetic oligonucleotide
gucagcagcuggaugaguu

SEQ ID NO: 2794937 - RNA, 19 nt, Artificial Sequence
  Description of Artificial Sequence: Synthetic oligonucleotide
caccugacagcuacaugcu

SEQ ID NO: 2794938 - RNA, 19 nt, Artificial Sequence
  Description of Artificial Sequence: Synthetic oligonucleotide
agagcaccugacagcuaca

SEQ ID NO: 2794939 - RNA, 19 nt, Artificial Sequence
  Description of Artificial Sequence: Synthetic oligonucleotide
gcugcuggucaggaagggc

SEQ ID NO: 2794940 - RNA, 19 nt, Artificial Sequence
  Description of Artificial Sequence: Synthetic oligonucleotide
cugugguagucugaaacau

SEQ ID NO: 2794941 - RNA, 19 nt, Artificial Sequence
  Description of Artificial Sequence: Synthetic oligonucleotide
cccugaggugcagagcacc

SEQ ID NO: 2794942 - RNA, 19 nt, Artificial Sequence
  Description of Artificial Sequence: Synthetic oligonucleotide
caaaugacucugcuuucuu

SEQ ID NO: 2794943 - RNA, 19 nt, Artificial Sequence
  Description of Artificial Sequence: Synthetic oligonucleotide
gaagguggcuuugucucuu

SEQ ID NO: 2794944 - RNA, 19 nt, Artificial Sequence
  Description of Artificial Sequence: Synthetic oligonucleotide
gcaaaugacucugcuuucu

SEQ ID NO: 2794945 - RNA, 19 nt, Artificial Sequence
  Description of Artificial Sequence: Synthetic oligonucleotide
cuuucuuacgaaggucuuu

SEQ ID NO: 2794946 - RNA, 19 nt, Artificial Sequence
  Description of Artificial Sequence: Synthetic oligonucleotide
cucuucagcuuguuuuguu

SEQ ID NO: 2794947 - RNA, 19 nt, Artificial Sequence
  Description of Artificial Sequence: Synthetic oligonucleotide
ggucaggaagggcgcucug

SEQ ID NO: 2794948 - RNA, 19 nt, Artificial Sequence
  Description of Artificial Sequence: Synthetic oligonucleotide
gagcaccugacagcuacau

SEQ ID NO: 2794949 - RNA, 19 nt, Artificial Sequence
  Description of Artificial Sequence: Synthetic oligonucleotide
cgcucugcagcagaaggug

SEQ ID NO: 2794950 - RNA, 19 nt, Artificial Sequence
  Description of Artificial Sequence: Synthetic oligonucleotide
ggcuuugucucuucagcuu

SEQ ID NO: 2794951 - RNA, 19 nt, Artificial Sequence
  Description of Artificial Sequence: Synthetic oligonucleotide
cuaagccuuucacuuucuu

SEQ ID NO: 2794952 - RNA, 19 nt, Artificial Sequence
  Description of Artificial Sequence: Synthetic oligonucleotide
ggaugaguuuugaguucuc

SEQ ID NO: 2794953 - RNA, 19 nt, Artificial Sequence
  Description of Artificial Sequence: Synthetic oligonucleotide
ccccuguaauauagaacga

SEQ ID NO: 2794954 - RNA, 19 nt, Artificial Sequence
  Description of Artificial Sequence: Synthetic oligonucleotide
ccagguucaccugcagcuc

SEQ ID NO: 2794955 - RNA, 19 nt, Artificial Sequence
  Description of Artificial Sequence: Synthetic oligonucleotide
gggcgcucugcagcagaag

SEQ ID NO: 2794956 - RNA, 19 nt, Artificial Sequence
  Description of Artificial Sequence: Synthetic oligonucleotide
cccugauuacauuucuauu

SEQ ID NO: 2794957 - RNA, 19 nt, Artificial Sequence
  Description of Artificial Sequence: Synthetic oligonucleotide
gccuuucacuuucuuuaau

SEQ ID NO: 2794958 - RNA, 19 nt, Artificial Sequence
  Description of Artificial Sequence: Synthetic oligonucleotide
cagcagcuggaugaguuuu

SEQ ID NO: 2794959 - RNA, 19 nt, Artificial Sequence
  Description of Artificial Sequence: Synthetic oligonucleotide
cagcuacaugcugagucau

SEQ ID NO: 2794960 - RNA, 19 nt, Artificial Sequence
  Description of Artificial Sequence: Synthetic oligonucleotide
gcuuucuuacgaaggucuu

SEQ ID NO: 2794961 - RNA, 19 nt, Artificial Sequence
  Description of Artificial Sequence: Synthetic oligonucleotide
gcgcucugcagcagaaggu

SEQ ID NO: 2794962 - RNA, 19 nt, Artificial Sequence
  Description of Artificial Sequence: Synthetic oligonucleotide
cgaaggucuuucuccaguu

SEQ ID NO: 2794963 - RNA, 19 nt, Artificial Sequence
  Description of Artificial Sequence: Synthetic oligonucleotide
gcuggucaggaagggcgcu

SEQ ID NO: 2794964 - RNA, 19 nt, Artificial Sequence
  Description of Artificial Sequence: Synthetic oligonucleotide
gcagagcaccugacagcua

SEQ ID NO: 2794965 - RNA, 19 nt, Artificial Sequence
  Description of Artificial Sequence: Synthetic oligonucleotide
uaaccaauaaucaagcuac

SEQ ID NO: 2794966 - RNA, 19 nt, Artificial Sequence
  Description of Artificial Sequence: Synthetic oligonucleotide
aaacagaagagccccaugg

SEQ ID NO: 2794967 - RNA, 19 nt, Artificial Sequence
  Description of Artificial Sequence: Synthetic oligonucleotide
aaucuccccagcuuuagcc

SEQ ID NO: 2794968 - RNA, 19 nt, Artificial Sequence
  Description of Artificial Sequence: Synthetic oligonucleotide
aauggcauaggagaagagc

SEQ ID NO: 2794969 - RNA, 19 nt, Artificial Sequence
  Description of Artificial Sequence: Synthetic oligonucleotide
ucuggucuacucaagaggg

SEQ ID NO: 2794970 - RNA, 19 nt, Artificial Sequence
  Description of Artificial Sequence: Synthetic oligonucleotide
aggaaggcuguuuagaugg

SEQ ID NO: 2794971 - RNA, 19 nt, Artificial Sequence
  Description of Artificial Sequence: Synthetic oligonucleotide
uaaucaagcuaccaaauac

SEQ ID NO: 2794972 - RNA, 19 nt, Artificial Sequence
  Description of Artificial Sequence: Synthetic oligonucleotide
uuagcccuugcucucagcg

SEQ ID NO: 2794973 - RNA, 19 nt, Artificial Sequence
  Description of Artificial Sequence: Synthetic oligonucleotide
acaaaggccugauuagacc

SEQ ID NO: 2794974 - RNA, 19 nt, Artificial Sequence
  Description of Artificial Sequence: Synthetic oligonucleotide
accaucaaacagaagagcc

SEQ ID NO: 2794975 - RNA, 19 nt, Artificial Sequence
  Description of Artificial Sequence: Synthetic oligonucleotide
agaacuggacguuaacgac

SEQ ID NO: 2794976 - RNA, 19 nt, Artificial Sequence
  Description of Artificial Sequence: Synthetic oligonucleotide
agcuaccaaauacuguucc

SEQ ID NO: 2794977 - RNA, 19 nt, Artificial Sequence
  Description of Artificial Sequence: Synthetic oligonucleotide
ucaagagggaggcagacaa

SEQ ID NO: 2794978 - RNA, 19 nt, Artificial Sequence
  Description of Artificial Sequence: Synthetic oligonucleotide
ucagacagggcaaagccca

SEQ ID NO: 2794979 - RNA, 19 nt, Artificial Sequence
  Description of Artificial Sequence: Synthetic oligonucleotide
auaaccaauaaucaagcua

SEQ ID NO: 2794980 - RNA, 19 nt, Artificial Sequence
  Description of Artificial Sequence: Synthetic oligonucleotide
ucagaacuggacguuaacg

SEQ ID NO: 2794981 - RNA, 19 nt, Artificial Sequence
  Description of Artificial Sequence: Synthetic oligonucleotide
caaaggccugauuagaccc

SEQ ID NO: 2794982 - RNA, 19 nt, Artificial Sequence
  Description of Artificial Sequence: Synthetic oligonucleotide
acaggagcggaucagaacu

SEQ ID NO: 2794983 - RNA, 19 nt, Artificial Sequence
  Description of Artificial Sequence: Synthetic oligonucleotide
gaaggcgaccaucaaacag

SEQ ID NO: 2794984 - RNA, 19 nt, Artificial Sequence
  Description of Artificial Sequence: Synthetic oligonucleotide
aaggcuguuuagauggggc

SEQ ID NO: 2794985 - RNA, 19 nt, Artificial Sequence
  Description of Artificial Sequence: Synthetic oligonucleotide
agcggaucagaacuggacg

SEQ ID NO: 2794986 - RNA, 19 nt, Artificial Sequence
  Description of Artificial Sequence: Synthetic oligonucleotide
aaucaagcuaccaaauacu

SEQ ID NO: 2794987 - RNA, 19 nt, Artificial Sequence
  Description of Artificial Sequence: Synthetic oligonucleotide
acggguuccuggcauaacc

SEQ ID NO: 2794988 - RNA, 19 nt, Artificial Sequence
  Description of Artificial Sequence: Synthetic oligonucleotide
aagagggaggcagacaaag

SEQ ID NO: 2794989 - RNA, 19 nt, Artificial Sequence
  Description of Artificial Sequence: Synthetic oligonucleotide
aggaaggcgaccaucaaac

SEQ ID NO: 2794990 - RNA, 19 nt, Artificial Sequence
  Description of Artificial Sequence: Synthetic oligonucleotide
gagggaggcagacaaaggc

SEQ ID NO: 2794991 - RNA, 19 nt, Artificial Sequence
  Description of Artificial Sequence: Synthetic oligonucleotide
uugagagacggguuccugg

SEQ ID NO: 2794992 - RNA, 19 nt, Artificial Sequence
  Description of Artificial Sequence: Synthetic oligonucleotide
aacuggacguuaacgaccg

SEQ ID NO: 2794993 - RNA, 19 nt, Artificial Sequence
  Description of Artificial Sequence: Synthetic oligonucleotide
gacguuaacgaccgcagug

SEQ ID NO: 2794994 - RNA, 19 nt, Artificial Sequence
  Description of Artificial Sequence: Synthetic oligonucleotide
uuuagauggggccucuggu

SEQ ID NO: 2794995 - RNA, 19 nt, Artificial Sequence
  Description of Artificial Sequence: Synthetic oligonucleotide
accaaauacuguuccaaug

SEQ ID NO: 2794996 - RNA, 19 nt, Artificial Sequence
  Description of Artificial Sequence: Synthetic oligonucleotide
aauaaucaagcuaccaaau

SEQ ID NO: 2794997 - RNA, 19 nt, Artificial Sequence
  Description of Artificial Sequence: Synthetic oligonucleotide
cucuggucuacucaagagg

SEQ ID NO: 2794998 - RNA, 19 nt, Artificial Sequence
  Description of Artificial Sequence: Synthetic oligonucleotide
aggcuguuuagauggggcc

SEQ ID NO: 2794999 - RNA, 19 nt, Artificial Sequence
  Description of Artificial Sequence: Synthetic oligonucleotide
gauccagccacaccaacug

SEQ ID NO: 2795000 - RNA, 19 nt, Artificial Sequence
  Description of Artificial Sequence: Synthetic oligonucleotide
caaauacuguuccaaugcc

SEQ ID NO: 2795001 - RNA, 19 nt, Artificial Sequence
  Description of Artificial Sequence: Synthetic oligonucleotide
aacuguggcagccccagca

SEQ ID NO: 2795002 - RNA, 19 nt, Artificial Sequence
  Description of Artificial Sequence: Synthetic oligonucleotide
gaccgcagugccuuggugg

SEQ ID NO: 2795003 - RNA, 19 nt, Artificial Sequence
  Description of Artificial Sequence: Synthetic oligonucleotide
uggacguuaacgaccgcag

SEQ ID NO: 2795004 - RNA, 19 nt, Artificial Sequence
  Description of Artificial Sequence: Synthetic oligonucleotide
aucuccccagcuuuagccc

SEQ ID NO: 2795005 - RNA, 19 nt, Artificial Sequence
  Description of Artificial Sequence: Synthetic oligonucleotide
acguuaacgaccgcagugc

SEQ ID NO: 2795006 - RNA, 19 nt, Artificial Sequence
  Description of Artificial Sequence: Synthetic oligonucleotide
ucaagcuaccaaauacugu

SEQ ID NO: 2795007 - RNA, 19 nt, Artificial Sequence
  Description of Artificial Sequence: Synthetic oligonucleotide
guuuagauggggccucugg

SEQ ID NO: 2795008 - RNA, 19 nt, Artificial Sequence
  Description of Artificial Sequence: Synthetic oligonucleotide
aaaggccugauuagacccc

SEQ ID NO: 2795009 - RNA, 19 nt, Artificial Sequence
  Description of Artificial Sequence: Synthetic oligonucleotide
gcgaccaucaaacagaaga

SEQ ID NO: 2795010 - RNA, 19 nt, Artificial Sequence
  Description of Artificial Sequence: Synthetic oligonucleotide
aaggcgaccaucaaacaga

SEQ ID NO: 2795011 - RNA, 19 nt, Artificial Sequence
  Description of Artificial Sequence: Synthetic oligonucleotide
caauaaucaagcuaccaaa

SEQ ID NO: 2795012 - RNA, 19 nt, Artificial Sequence
  Description of Artificial Sequence: Synthetic oligonucleotide
uuucaaucuccccagcuuu

SEQ ID NO: 2795013 - RNA, 19 nt, Artificial Sequence
  Description of Artificial Sequence: Synthetic oligonucleotide
uuuucaaucuccccagcuu

SEQ ID NO: 2795014 - RNA, 19 nt, Artificial Sequence
  Description of Artificial Sequence: Synthetic oligonucleotide
aaauacuguuccaaugcca

SEQ ID NO: 2795015 - RNA, 19 nt, Artificial Sequence
  Description of Artificial Sequence: Synthetic oligonucleotide
cagacaaaggccugauuag

SEQ ID NO: 2795016 - RNA, 19 nt, Artificial Sequence
  Description of Artificial Sequence: Synthetic oligonucleotide
aaccaauaaucaagcuacc

SEQ ID NO: 2795017 - RNA, 19 nt, Artificial Sequence
  Description of Artificial Sequence: Synthetic oligonucleotide
uguugcuugagagacgggu

SEQ ID NO: 2795018 - RNA, 19 nt, Artificial Sequence
  Description of Artificial Sequence: Synthetic oligonucleotide
uggucuacucaagagggag

SEQ ID NO: 2795019 - RNA, 19 nt, Artificial Sequence
  Description of Artificial Sequence: Synthetic oligonucleotide
gauuagaccccugguacag

SEQ ID NO: 2795020 - RNA, 19 nt, Artificial Sequence
  Description of Artificial Sequence: Synthetic oligonucleotide
aucagaacuggacguuaac

SEQ ID NO: 2795021 - RNA, 19 nt, Artificial Sequence
  Description of Artificial Sequence: Synthetic oligonucleotide
ugagagacggguuccuggc

SEQ ID NO: 2795022 - RNA, 19 nt, Artificial Sequence
  Description of Artificial Sequence: Synthetic oligonucleotide
gaacuggacguuaacgacc

SEQ ID NO: 2795023 - RNA, 19 nt, Artificial Sequence
  Description of Artificial Sequence: Synthetic oligonucleotide
ugauccagccacaccaacu

SEQ ID NO: 2795024 - RNA, 19 nt, Artificial Sequence
  Description of Artificial Sequence: Synthetic oligonucleotide
auaaucaagcuaccaaaua

SEQ ID NO: 2795025 - RNA, 19 nt, Artificial Sequence
  Description of Artificial Sequence: Synthetic oligonucleotide
uucccgucuggccaccugg

SEQ ID NO: 2795026 - RNA, 19 nt, Artificial Sequence
  Description of Artificial Sequence: Synthetic oligonucleotide
agggaggcagacaaaggcc

SEQ ID NO: 2795027 - RNA, 19 nt, Artificial Sequence
  Description of Artificial Sequence: Synthetic oligonucleotide
ugauuagaccccugguaca

SEQ ID NO: 2795028 - RNA, 19 nt, Artificial Sequence
  Description of Artificial Sequence: Synthetic oligonucleotide
cuacucaagagggaggcag

SEQ ID NO: 2795029 - RNA, 19 nt, Artificial Sequence
  Description of Artificial Sequence: Synthetic oligonucleotide
uuagaccccugguacagga

SEQ ID NO: 2795030 - RNA, 19 nt, Artificial Sequence
  Description of Artificial Sequence: Synthetic oligonucleotide
caaugccagccccugaucc

SEQ ID NO: 2795031 - RNA, 19 nt, Artificial Sequence
  Description of Artificial Sequence: Synthetic oligonucleotide
agaagagccccauggccuc

SEQ ID NO: 2795032 - RNA, 19 nt, Artificial Sequence
  Description of Artificial Sequence: Synthetic oligonucleotide
cucagacagggcaaagccc

SEQ ID NO: 2795033 - RNA, 19 nt, Artificial Sequence
  Description of Artificial Sequence: Synthetic oligonucleotide
cagaacuggacguuaacga

SEQ ID NO: 2795034 - RNA, 19 nt, Artificial Sequence
  Description of Artificial Sequence: Synthetic oligonucleotide
acuguggcagccccagcac

SEQ ID NO: 2795035 - RNA, 19 nt, Artificial Sequence
  Description of Artificial Sequence: Synthetic oligonucleotide
aucaagcuaccaaauacug

SEQ ID NO: 2795036 - RNA, 19 nt, Artificial Sequence
  Description of Artificial Sequence: Synthetic oligonucleotide
aagcuaccaaauacuguuc

SEQ ID NO: 2795037 - RNA, 19 nt, Artificial Sequence
  Description of Artificial Sequence: Synthetic oligonucleotide
agcuuuagcccuugcucuc

SEQ ID NO: 2795038 - RNA, 19 nt, Artificial Sequence
  Description of Artificial Sequence: Synthetic oligonucleotide
uuaacgaccgcagugccuu

SEQ ID NO: 2795039 - RNA, 19 nt, Artificial Sequence
  Description of Artificial Sequence: Synthetic oligonucleotide
uugcuugagagacggguuc

SEQ ID NO: 2795040 - RNA, 19 nt, Artificial Sequence
  Description of Artificial Sequence: Synthetic oligonucleotide
gacaaaggccugauuagac

SEQ ID NO: 2795041 - RNA, 19 nt, Artificial Sequence
  Description of Artificial Sequence: Synthetic oligonucleotide
uguuccaaugccagccccu

SEQ ID NO: 2795042 - RNA, 19 nt, Artificial Sequence
  Description of Artificial Sequence: Synthetic oligonucleotide
ucuggccaccuggagaggg

SEQ ID NO: 2795043 - RNA, 19 nt, Artificial Sequence
  Description of Artificial Sequence: Synthetic oligonucleotide
uccaaugccagccccugau

SEQ ID NO: 2795044 - RNA, 19 nt, Artificial Sequence
  Description of Artificial Sequence: Synthetic oligonucleotide
uaccaaauacuguuccaau

SEQ ID NO: 2795045 - RNA, 19 nt, Artificial Sequence
  Description of Artificial Sequence: Synthetic oligonucleotide
ugcaggaaggcuguuuaga

SEQ ID NO: 2795046 - RNA, 19 nt, Artificial Sequence
  Description of Artificial Sequence: Synthetic oligonucleotide
gucuacucaagagggaggc

SEQ ID NO: 2795047 - RNA, 19 nt, Artificial Sequence
  Description of Artificial Sequence: Synthetic oligonucleotide
ucaaucuccccagcuuuag

SEQ ID NO: 2795048 - RNA, 19 nt, Artificial Sequence
  Description of Artificial Sequence: Synthetic oligonucleotide
agaggggagcugcugcagg

SEQ ID NO: 2795049 - RNA, 19 nt, Artificial Sequence
  Description of Artificial Sequence: Synthetic oligonucleotide
cauaggagaagagcuguug

SEQ ID NO: 2795050 - RNA, 19 nt, Artificial Sequence
  Description of Artificial Sequence: Synthetic oligonucleotide
uacaggagcggaucagaac

SEQ ID NO: 2795051 - RNA, 19 nt, Artificial Sequence
  Description of Artificial Sequence: Synthetic oligonucleotide
uacucaagagggaggcaga

SEQ ID NO: 2795052 - RNA, 19 nt, Artificial Sequence
  Description of Artificial Sequence: Synthetic oligonucleotide
accaauaaucaagcuacca

SEQ ID NO: 2795053 - RNA, 19 nt, Artificial Sequence
  Description of Artificial Sequence: Synthetic oligonucleotide
acucaagagggaggcagac

SEQ ID NO: 2795054 - RNA, 19 nt, Artificial Sequence
  Description of Artificial Sequence: Synthetic oligonucleotide
agccacaccaacuguggca

SEQ ID NO: 2795055 - RNA, 19 nt, Artificial Sequence
  Description of Artificial Sequence: Synthetic oligonucleotide
agcccuugcucucagcgcu

SEQ ID NO: 2795056 - RNA, 19 nt, Artificial Sequence
  Description of Artificial Sequence: Synthetic oligonucleotide
caagcuaccaaauacuguu

SEQ ID NO: 2795057 - RNA, 19 nt, Artificial Sequence
  Description of Artificial Sequence: Synthetic oligonucleotide
caggaaggcuguuuagaug

SEQ ID NO: 2795058 - RNA, 19 nt, Artificial Sequence
  Description of Artificial Sequence: Synthetic oligonucleotide
gcagacaaaggccugauua

SEQ ID NO: 2795059 - RNA, 19 nt, Artificial Sequence
  Description of Artificial Sequence: Synthetic oligonucleotide
aggaugaggaaggcgacca

SEQ ID NO: 2795060 - RNA, 19 nt, Artificial Sequence
  Description of Artificial Sequence: Synthetic oligonucleotide
gaugaggaaggcgaccauc

SEQ ID NO: 2795061 - RNA, 19 nt, Artificial Sequence
  Description of Artificial Sequence: Synthetic oligonucleotide
agacaaaggccugauuaga

SEQ ID NO: 2795062 - RNA, 19 nt, Artificial Sequence
  Description of Artificial Sequence: Synthetic oligonucleotide
aacgaccgcagugccuugg

SEQ ID NO: 2795063 - RNA, 19 nt, Artificial Sequence
  Description of Artificial Sequence: Synthetic oligonucleotide
uucaaucuccccagcuuua

SEQ ID NO: 2795064 - RNA, 19 nt, Artificial Sequence
  Description of Artificial Sequence: Synthetic oligonucleotide
ucaaacagaagagccccau

SEQ ID NO: 2795065 - RNA, 19 nt, Artificial Sequence
  Description of Artificial Sequence: Synthetic oligonucleotide
gaccccugguacaggagcg

SEQ ID NO: 2795066 - RNA, 19 nt, Artificial Sequence
  Description of Artificial Sequence: Synthetic oligonucleotide
uugcucucagcgcucggcu

SEQ ID NO: 2795067 - RNA, 19 nt, Artificial Sequence
  Description of Artificial Sequence: Synthetic oligonucleotide
ugcuugagagacggguucc

SEQ ID NO: 2795068 - RNA, 19 nt, Artificial Sequence
  Description of Artificial Sequence: Synthetic oligonucleotide
ucuccccagcuuuagcccu

SEQ ID NO: 2795069 - RNA, 19 nt, Artificial Sequence
  Description of Artificial Sequence: Synthetic oligonucleotide
caaacagaagagccccaug

SEQ ID NO: 2795070 - RNA, 19 nt, Artificial Sequence
  Description of Artificial Sequence: Synthetic oligonucleotide
agagacggguuccuggcau

SEQ ID NO: 2795071 - RNA, 19 nt, Artificial Sequence
  Description of Artificial Sequence: Synthetic oligonucleotide
gaggaaggcgaccaucaaa

SEQ ID NO: 2795072 - RNA, 19 nt, Artificial Sequence
  Description of Artificial Sequence: Synthetic oligonucleotide
gaauggcauaggagaagag

SEQ ID NO: 2795073 - RNA, 19 nt, Artificial Sequence
  Description of Artificial Sequence: Synthetic oligonucleotide
ccagcaccaaugaacuugg

SEQ ID NO: 2795074 - RNA, 19 nt, Artificial Sequence
  Description of Artificial Sequence: Synthetic oligonucleotide
cuugcucucagcgcucggc

SEQ ID NO: 2795075 - RNA, 19 nt, Artificial Sequence
  Description of Artificial Sequence: Synthetic oligonucleotide
aggagcggaucagaacugg

SEQ ID NO: 2795076 - RNA, 19 nt, Artificial Sequence
  Description of Artificial Sequence: Synthetic oligonucleotide
auuagaccccugguacagg

SEQ ID NO: 2795077 - RNA, 19 nt, Artificial Sequence
  Description of Artificial Sequence: Synthetic oligonucleotide
uuuagcccuugcucucagc

SEQ ID NO: 2795078 - RNA, 19 nt, Artificial Sequence
  Description of Artificial Sequence: Synthetic oligonucleotide
gagcggaucagaacuggac

SEQ ID NO: 2795079 - RNA, 19 nt, Artificial Sequence
  Description of Artificial Sequence: Synthetic oligonucleotide
uagcccuugcucucagcgc

SEQ ID NO: 2795080 - RNA, 19 nt, Artificial Sequence
  Description of Artificial Sequence: Synthetic oligonucleotide
aaggccugauuagaccccu

SEQ ID NO: 2795081 - RNA, 19 nt, Artificial Sequence
  Description of Artificial Sequence: Synthetic oligonucleotide
ugguacaggagcggaucag

SEQ ID NO: 2795082 - RNA, 19 nt, Artificial Sequence
  Description of Artificial Sequence: Synthetic oligonucleotide
caaucuccccagcuuuagc

SEQ ID NO: 2795083 - RNA, 19 nt, Artificial Sequence
  Description of Artificial Sequence: Synthetic oligonucleotide
ugaggaaggcgaccaucaa

SEQ ID NO: 2795084 - RNA, 19 nt, Artificial Sequence
  Description of Artificial Sequence: Synthetic oligonucleotide
accgcagugccuugguggu

SEQ ID NO: 2795085 - RNA, 19 nt, Artificial Sequence
  Description of Artificial Sequence: Synthetic oligonucleotide
ggccugauuagaccccugg

SEQ ID NO: 2795086 - RNA, 19 nt, Artificial Sequence
  Description of Artificial Sequence: Synthetic oligonucleotide
ccagcuuuagcccuugcuc

SEQ ID NO: 2795087 - RNA, 19 nt, Artificial Sequence
  Description of Artificial Sequence: Synthetic oligonucleotide
cuaccaaauacuguuccaa

SEQ ID NO: 2795088 - RNA, 19 nt, Artificial Sequence
  Description of Artificial Sequence: Synthetic oligonucleotide
ccaauaaucaagcuaccaa

SEQ ID NO: 2795089 - RNA, 19 nt, Artificial Sequence
  Description of Artificial Sequence: Synthetic oligonucleotide
cuuuagcccuugcucucag

SEQ ID NO: 2795090 - RNA, 19 nt, Artificial Sequence
  Description of Artificial Sequence: Synthetic oligonucleotide
ucuacucaagagggaggca

SEQ ID NO: 2795091 - RNA, 19 nt, Artificial Sequence
  Description of Artificial Sequence: Synthetic oligonucleotide
acuggacguuaacgaccgc

SEQ ID NO: 2795092 - RNA, 19 nt, Artificial Sequence
  Description of Artificial Sequence: Synthetic oligonucleotide
cgaccaucaaacagaagag

SEQ ID NO: 2795093 - RNA, 19 nt, Artificial Sequence
  Description of Artificial Sequence: Synthetic oligonucleotide
ccagccacaccaacugugg

SEQ ID NO: 2795094 - RNA, 19 nt, Artificial Sequence
  Description of Artificial Sequence: Synthetic oligonucleotide
ggucuacucaagagggagg

SEQ ID NO: 2795095 - RNA, 19 nt, Artificial Sequence
  Description of Artificial Sequence: Synthetic oligonucleotide
caggagcggaucagaacug

SEQ ID NO: 2795096 - RNA, 19 nt, Artificial Sequence
  Description of Artificial Sequence: Synthetic oligonucleotide
caccaacuguggcagcccc

SEQ ID NO: 2795097 - RNA, 19 nt, Artificial Sequence
  Description of Artificial Sequence: Synthetic oligonucleotide
cuguggcagccccagcacc

SEQ ID NO: 2795098 - RNA, 19 nt, Artificial Sequence
  Description of Artificial Sequence: Synthetic oligonucleotide
cuggccaccuggagagggg

SEQ ID NO: 2795099 - RNA, 19 nt, Artificial Sequence
  Description of Artificial Sequence: Synthetic oligonucleotide
uuccaaugccagccccuga

SEQ ID NO: 2795100 - RNA, 19 nt, Artificial Sequence
  Description of Artificial Sequence: Synthetic oligonucleotide
ugccuugguggucugcauu

SEQ ID NO: 2795101 - RNA, 19 nt, Artificial Sequence
  Description of Artificial Sequence: Synthetic oligonucleotide
gaggggagcugcugcagga

SEQ ID NO: 2795102 - RNA, 19 nt, Artificial Sequence
  Description of Artificial Sequence: Synthetic oligonucleotide
cauaaccaauaaucaagcu

SEQ ID NO: 2795103 - RNA, 19 nt, Artificial Sequence
  Description of Artificial Sequence: Synthetic oligonucleotide
cugauccagccacaccaac

SEQ ID NO: 2795104 - RNA, 19 nt, Artificial Sequence
  Description of Artificial Sequence: Synthetic oligonucleotide
cagaagagccccauggccu

SEQ ID NO: 2795105 - RNA, 19 nt, Artificial Sequence
  Description of Artificial Sequence: Synthetic oligonucleotide
cuggacguuaacgaccgca

SEQ ID NO: 2795106 - RNA, 19 nt, Artificial Sequence
  Description of Artificial Sequence: Synthetic oligonucleotide
uguuuagauggggccucug

SEQ ID NO: 2795107 - RNA, 19 nt, Artificial Sequence
  Description of Artificial Sequence: Synthetic oligonucleotide
gaucagaacuggacguuaa

SEQ ID NO: 2795108 - RNA, 19 nt, Artificial Sequence
  Description of Artificial Sequence: Synthetic oligonucleotide
gccacaccaacuguggcag

SEQ ID NO: 2795109 - RNA, 19 nt, Artificial Sequence
  Description of Artificial Sequence: Synthetic oligonucleotide
ccucuggucuacucaagag

SEQ ID NO: 2795110 - RNA, 19 nt, Artificial Sequence
  Description of Artificial Sequence: Synthetic oligonucleotide
guuccaaugccagccccug

SEQ ID NO: 2795111 - RNA, 19 nt, Artificial Sequence
  Description of Artificial Sequence: Synthetic oligonucleotide
cuugagagacggguuccug

SEQ ID NO: 2795112 - RNA, 19 nt, Artificial Sequence
  Description of Artificial Sequence: Synthetic oligonucleotide
augccagccccugauccag

SEQ ID NO: 2795113 - RNA, 19 nt, Artificial Sequence
  Description of Artificial Sequence: Synthetic oligonucleotide
gcuaccaaauacuguucca

SEQ ID NO: 2795114 - RNA, 19 nt, Artificial Sequence
  Description of Artificial Sequence: Synthetic oligonucleotide
auccagccacaccaacugu

SEQ ID NO: 2795115 - RNA, 19 nt, Artificial Sequence
  Description of Artificial Sequence: Synthetic oligonucleotide
cgucuggccaccuggagag

SEQ ID NO: 2795116 - RNA, 19 nt, Artificial Sequence
  Description of Artificial Sequence: Synthetic oligonucleotide
cagacagggcaaagcccag

SEQ ID NO: 2795117 - RNA, 19 nt, Artificial Sequence
  Description of Artificial Sequence: Synthetic oligonucleotide
gaggcagacaaaggccuga

SEQ ID NO: 2795118 - RNA, 19 nt, Artificial Sequence
  Description of Artificial Sequence: Synthetic oligonucleotide
cagcuuuagcccuugcucu

SEQ ID NO: 2795119 - RNA, 19 nt, Artificial Sequence
  Description of Artificial Sequence: Synthetic oligonucleotide
cccugauccagccacacca

SEQ ID NO: 2795120 - RNA, 19 nt, Artificial Sequence
  Description of Artificial Sequence: Synthetic oligonucleotide
ucccgucuggccaccugga

SEQ ID NO: 2795121 - RNA, 19 nt, Artificial Sequence
  Description of Artificial Sequence: Synthetic oligonucleotide
gagagacggguuccuggca

SEQ ID NO: 2795122 - RNA, 19 nt, Artificial Sequence
  Description of Artificial Sequence: Synthetic oligonucleotide
auucccgucuggccaccug

SEQ ID NO: 2795123 - RNA, 19 nt, Artificial Sequence
  Description of Artificial Sequence: Synthetic oligonucleotide
acagggcaaagcccagaau

SEQ ID NO: 2795124 - RNA, 19 nt, Artificial Sequence
  Description of Artificial Sequence: Synthetic oligonucleotide
ugcucucagcgcucggcuc

SEQ ID NO: 2795125 - RNA, 19 nt, Artificial Sequence
  Description of Artificial Sequence: Synthetic oligonucleotide
cugguacaggagcggauca

SEQ ID NO: 2795126 - RNA, 19 nt, Artificial Sequence
  Description of Artificial Sequence: Synthetic oligonucleotide
aucaaacagaagagcccca

SEQ ID NO: 2795127 - RNA, 19 nt, Artificial Sequence
  Description of Artificial Sequence: Synthetic oligonucleotide
gauggggccucuggucuac

SEQ ID NO: 2795128 - RNA, 19 nt, Artificial Sequence
  Description of Artificial Sequence: Synthetic oligonucleotide
cuggucuacucaagaggga

SEQ ID NO: 2795129 - RNA, 19 nt, Artificial Sequence
  Description of Artificial Sequence: Synthetic oligonucleotide
accccugguacaggagcgg

SEQ ID NO: 2795130 - RNA, 19 nt, Artificial Sequence
  Description of Artificial Sequence: Synthetic oligonucleotide
ggggagcugcugcaggaag

SEQ ID NO: 2795131 - RNA, 19 nt, Artificial Sequence
  Description of Artificial Sequence: Synthetic oligonucleotide
aauucccgucuggccaccu

SEQ ID NO: 2795132 - RNA, 19 nt, Artificial Sequence
  Description of Artificial Sequence: Synthetic oligonucleotide
uaacgaccgcagugccuug

SEQ ID NO: 2795133 - RNA, 19 nt, Artificial Sequence
  Description of Artificial Sequence: Synthetic oligonucleotide
gaauucccgucuggccacc

SEQ ID NO: 2795134 - RNA, 19 nt, Artificial Sequence
  Description of Artificial Sequence: Synthetic oligonucleotide
acgaccgcagugccuuggu

SEQ ID NO: 2795135 - RNA, 19 nt, Artificial Sequence
  Description of Artificial Sequence: Synthetic oligonucleotide
ggaaggcuguuuagauggg

SEQ ID NO: 2795136 - RNA, 19 nt, Artificial Sequence
  Description of Artificial Sequence: Synthetic oligonucleotide
gguacaggagcggaucaga

SEQ ID NO: 2795137 - RNA, 19 nt, Artificial Sequence
  Description of Artificial Sequence: Synthetic oligonucleotide
agacagggcaaagcccaga

SEQ ID NO: 2795138 - RNA, 19 nt, Artificial Sequence
  Description of Artificial Sequence: Synthetic oligonucleotide
guacaggagcggaucagaa

SEQ ID NO: 2795139 - RNA, 19 nt, Artificial Sequence
  Description of Artificial Sequence: Synthetic oligonucleotide
ccagaauggcauaggagaa

SEQ ID NO: 2795140 - RNA, 19 nt, Artificial Sequence
  Description of Artificial Sequence: Synthetic oligonucleotide
cuggagaggggagcugcug

SEQ ID NO: 2795141 - RNA, 19 nt, Artificial Sequence
  Description of Artificial Sequence: Synthetic oligonucleotide
ugcugcaggaaggcuguuu

SEQ ID NO: 2795142 - RNA, 19 nt, Artificial Sequence
  Description of Artificial Sequence: Synthetic oligonucleotide
agauggggccucuggucua

SEQ ID NO: 2795143 - RNA, 19 nt, Artificial Sequence
  Description of Artificial Sequence: Synthetic oligonucleotide
auggccucagacagggcaa

SEQ ID NO: 2795144 - RNA, 19 nt, Artificial Sequence
  Description of Artificial Sequence: Synthetic oligonucleotide
ggaaggcgaccaucaaaca

SEQ ID NO: 2795145 - RNA, 19 nt, Artificial Sequence
  Description of Artificial Sequence: Synthetic oligonucleotide
ccaacuguggcagccccag

SEQ ID NO: 2795146 - RNA, 19 nt, Artificial Sequence
  Description of Artificial Sequence: Synthetic oligonucleotide
caacuguggcagccccagc

SEQ ID NO: 2795147 - RNA, 19 nt, Artificial Sequence
  Description of Artificial Sequence: Synthetic oligonucleotide
cucaagagggaggcagaca

SEQ ID NO: 2795148 - RNA, 19 nt, Artificial Sequence
  Description of Artificial Sequence: Synthetic oligonucleotide
gccucagacagggcaaagc

SEQ ID NO: 2795149 - RNA, 19 nt, Artificial Sequence
  Description of Artificial Sequence: Synthetic oligonucleotide
uggggccucuggucuacuc

SEQ ID NO: 2795150 - RNA, 19 nt, Artificial Sequence
  Description of Artificial Sequence: Synthetic oligonucleotide
gagacggguuccuggcaua

SEQ ID NO: 2795151 - RNA, 19 nt, Artificial Sequence
  Description of Artificial Sequence: Synthetic oligonucleotide
gccucuggucuacucaaga

SEQ ID NO: 2795152 - RNA, 19 nt, Artificial Sequence
  Description of Artificial Sequence: Synthetic oligonucleotide
gcuguuuagauggggccuc

SEQ ID NO: 2795153 - RNA, 19 nt, Artificial Sequence
  Description of Artificial Sequence: Synthetic oligonucleotide
agacggguuccuggcauaa

SEQ ID NO: 2795154 - RNA, 19 nt, Artificial Sequence
  Description of Artificial Sequence: Synthetic oligonucleotide
caagagggaggcagacaaa

SEQ ID NO: 2795155 - RNA, 19 nt, Artificial Sequence
  Description of Artificial Sequence: Synthetic oligonucleotide
cguuaacgaccgcagugcc

SEQ ID NO: 2795156 - RNA, 19 nt, Artificial Sequence
  Description of Artificial Sequence: Synthetic oligonucleotide
ggggccucuggucuacuca

SEQ ID NO: 2795157 - RNA, 19 nt, Artificial Sequence
  Description of Artificial Sequence: Synthetic oligonucleotide
ggcauaggagaagagcugu

SEQ ID NO: 2795158 - RNA, 19 nt, Artificial Sequence
  Description of Artificial Sequence: Synthetic oligonucleotide
gcggaucagaacuggacgu

SEQ ID NO: 2795159 - RNA, 19 nt, Artificial Sequence
  Description of Artificial Sequence: Synthetic oligonucleotide
gacggguuccuggcauaac

SEQ ID NO: 2795160 - RNA, 19 nt, Artificial Sequence
  Description of Artificial Sequence: Synthetic oligonucleotide
uggccucagacagggcaaa

SEQ ID NO: 2795161 - RNA, 19 nt, Artificial Sequence
  Description of Artificial Sequence: Synthetic oligonucleotide
guuaacgaccgcagugccu

SEQ ID NO: 2795162 - RNA, 19 nt, Artificial Sequence
  Description of Artificial Sequence: Synthetic oligonucleotide
gcaggaaggcuguuuagau

SEQ ID NO: 2795163 - RNA, 19 nt, Artificial Sequence
  Description of Artificial Sequence: Synthetic oligonucleotide
uccccagcuuuagcccuug

SEQ ID NO: 2795164 - RNA, 19 nt, Artificial Sequence
  Description of Artificial Sequence: Synthetic oligonucleotide
aggcagacaaaggccugau

SEQ ID NO: 2795165 - RNA, 19 nt, Artificial Sequence
  Description of Artificial Sequence: Synthetic oligonucleotide
guugcuugagagacggguu

SEQ ID NO: 2795166 - RNA, 19 nt, Artificial Sequence
  Description of Artificial Sequence: Synthetic oligonucleotide
gccaccuggagaggggagc

SEQ ID NO: 2795167 - RNA, 19 nt, Artificial Sequence
  Description of Artificial Sequence: Synthetic oligonucleotide
gggccucuggucuacucaa

SEQ ID NO: 2795168 - RNA, 19 nt, Artificial Sequence
  Description of Artificial Sequence: Synthetic oligonucleotide
ggaucagaacuggacguua

SEQ ID NO: 2795169 - RNA, 19 nt, Artificial Sequence
  Description of Artificial Sequence: Synthetic oligonucleotide
gggaggcagacaaaggccu

SEQ ID NO: 2795170 - RNA, 19 nt, Artificial Sequence
  Description of Artificial Sequence: Synthetic oligonucleotide
gucuggccaccuggagagg

SEQ ID NO: 2795171 - RNA, 19 nt, Artificial Sequence
  Description of Artificial Sequence: Synthetic oligonucleotide
aggggagcugcugcaggaa

SEQ ID NO: 2795172 - RNA, 19 nt, Artificial Sequence
  Description of Artificial Sequence: Synthetic oligonucleotide
gcuuuagcccuugcucuca

SEQ ID NO: 2795173 - RNA, 19 nt, Artificial Sequence
  Description of Artificial Sequence: Synthetic oligonucleotide
cagugccuugguggucugc

SEQ ID NO: 2795174 - RNA, 19 nt, Artificial Sequence
  Description of Artificial Sequence: Synthetic oligonucleotide
gcaaagcccagaauggcau

SEQ ID NO: 2795175 - RNA, 19 nt, Artificial Sequence
  Description of Artificial Sequence: Synthetic oligonucleotide
ggcuguuuagauggggccu

SEQ ID NO: 2795176 - RNA, 19 nt, Artificial Sequence
  Description of Artificial Sequence: Synthetic oligonucleotide
ggagcggaucagaacugga

SEQ ID NO: 2795177 - RNA, 19 nt, Artificial Sequence
  Description of Artificial Sequence: Synthetic oligonucleotide
ccaaugccagccccugauc

SEQ ID NO: 2795178 - RNA, 19 nt, Artificial Sequence
  Description of Artificial Sequence: Synthetic oligonucleotide
caccuggagaggggagcug

SEQ ID NO: 2795179 - RNA, 19 nt, Artificial Sequence
  Description of Artificial Sequence: Synthetic oligonucleotide
ggacguuaacgaccgcagu

SEQ ID NO: 2795180 - RNA, 19 nt, Artificial Sequence
  Description of Artificial Sequence: Synthetic oligonucleotide
ccgucuggccaccuggaga

SEQ ID NO: 2795181 - RNA, 19 nt, Artificial Sequence
  Description of Artificial Sequence: Synthetic oligonucleotide
aggccugauuagaccccug

SEQ ID NO: 2795182 - RNA, 19 nt, Artificial Sequence
  Description of Artificial Sequence: Synthetic oligonucleotide
gccugauuagaccccuggu

SEQ ID NO: 2795183 - RNA, 19 nt, Artificial Sequence
  Description of Artificial Sequence: Synthetic oligonucleotide
gccccagcaccaaugaacu

SEQ ID NO: 2795184 - RNA, 19 nt, Artificial Sequence
  Description of Artificial Sequence: Synthetic oligonucleotide
ccccugauccagccacacc

SEQ ID NO: 2795185 - RNA, 19 nt, Artificial Sequence
  Description of Artificial Sequence: Synthetic oligonucleotide
cccuugcucucagcgcucg

SEQ ID NO: 2795186 - RNA, 19 nt, Artificial Sequence
  Description of Artificial Sequence: Synthetic oligonucleotide
ggcgaccaucaaacagaag

SEQ ID NO: 2795187 - RNA, 19 nt, Artificial Sequence
  Description of Artificial Sequence: Synthetic oligonucleotide
ccuugcucucagcgcucgg

SEQ ID NO: 2795188 - RNA, 19 nt, Artificial Sequence
  Description of Artificial Sequence: Synthetic oligonucleotide
gccuugguggucugcauuu

SEQ ID NO: 2795189 - RNA, 19 nt, Artificial Sequence
  Description of Artificial Sequence: Synthetic oligonucleotide
ccugauccagccacaccaa

SEQ ID NO: 2795190 - RNA, 19 nt, Artificial Sequence
  Description of Artificial Sequence: Synthetic oligonucleotide
ggccaccuggagaggggag

SEQ ID NO: 2795191 - RNA, 19 nt, Artificial Sequence
  Description of Artificial Sequence: Synthetic oligonucleotide
ccacaccaacuguggcagc

SEQ ID NO: 2795192 - RNA, 19 nt, Artificial Sequence
  Description of Artificial Sequence: Synthetic oligonucleotide
agccccugauccagccaca

SEQ ID NO: 2795193 - RNA, 19 nt, Artificial Sequence
  Description of Artificial Sequence: Synthetic oligonucleotide
cccgucuggccaccuggag

SEQ ID NO: 2795194 - RNA, 19 nt, Artificial Sequence
  Description of Artificial Sequence: Synthetic oligonucleotide
gcagugccuugguggucug

SEQ ID NO: 2795195 - RNA, 19 nt, Artificial Sequence
  Description of Artificial Sequence: Synthetic oligonucleotide
cuguuuagauggggccucu

SEQ ID NO: 2795196 - RNA, 19 nt, Artificial Sequence
  Description of Artificial Sequence: Synthetic oligonucleotide
auggggccucuggucuacu

SEQ ID NO: 2795197 - RNA, 19 nt, Artificial Sequence
  Description of Artificial Sequence: Synthetic oligonucleotide
gccccugauccagccacac

SEQ ID NO: 2795198 - RNA, 19 nt, Artificial Sequence
  Description of Artificial Sequence: Synthetic oligonucleotide
gugccuugguggucugcau

SEQ ID NO: 2795199 - RNA, 19 nt, Artificial Sequence
  Description of Artificial Sequence: Synthetic oligonucleotide
ggaugaggaaggcgaccau

SEQ ID NO: 2795200 - RNA, 19 nt, Artificial Sequence
  Description of Artificial Sequence: Synthetic oligonucleotide
cccagcuuuagcccuugcu

SEQ ID NO: 2795201 - RNA, 19 nt, Artificial Sequence
  Description of Artificial Sequence: Synthetic oligonucleotide
gcuugagagacggguuccu

SEQ ID NO: 2795202 - RNA, 19 nt, Artificial Sequence
  Description of Artificial Sequence: Synthetic oligonucleotide
ggcagacaaaggccugauu

SEQ ID NO: 2795203 - RNA, 19 nt, Artificial Sequence
  Description of Artificial Sequence: Synthetic oligonucleotide
cgaccgcagugccuuggug

SEQ ID NO: 2795204 - RNA, 19 nt, Artificial Sequence
  Description of Artificial Sequence: Synthetic oligonucleotide
ccccagcuuuagcccuugc

SEQ ID NO: 2795205 - RNA, 19 nt, Artificial Sequence
  Description of Artificial Sequence: Synthetic oligonucleotide
ccccugguacaggagcgga

SEQ ID NO: 2795206 - RNA, 19 nt, Artificial Sequence
  Description of Artificial Sequence: Synthetic oligonucleotide
gcccuugcucucagcgcuc

SEQ ID NO: 2795207 - RNA, 19 nt, Artificial Sequence
  Description of Artificial Sequence: Synthetic oligonucleotide
ccaccuggagaggggagcu

SEQ ID NO: 2795208 - RNA, 19 nt, Artificial Sequence
  Description of Artificial Sequence: Synthetic oligonucleotide
cgcagugccuugguggucu

SEQ ID NO: 2795209 - RNA, 19 nt, Artificial Sequence
  Description of Artificial Sequence: Synthetic oligonucleotide
cccugguacaggagcggau

SEQ ID NO: 2795210 - RNA, 19 nt, Artificial Sequence
  Description of Artificial Sequence: Synthetic oligonucleotide
ccgcagugccuuggugguc

SEQ ID NO: 2795211 - RNA, 19 nt, Artificial Sequence
  Description of Artificial Sequence: Synthetic oligonucleotide
cggaucagaacuggacguu

SEQ ID NO: 2795212 - RNA, 19 nt, Artificial Sequence
  Description of Artificial Sequence: Synthetic oligonucleotide
ccuugguggucugcauuuu

SEQ ID NO: 2795213 - RNA, 19 nt, Artificial Sequence
  Description of Artificial Sequence: Synthetic oligonucleotide
ccccagcaccaaugaacuu

SEQ ID NO: 2795214 - RNA, 19 nt, Artificial Sequence
  Description of Artificial Sequence: Synthetic oligonucleotide
cugcugcaggaaggcuguu

SEQ ID NO: 2795215 - RNA, 19 nt, Artificial Sequence
  Description of Artificial Sequence: Synthetic oligonucleotide
auauaagugaucuuguagg

SEQ ID NO: 2795216 - RNA, 19 nt, Artificial Sequence
  Description of Artificial Sequence: Synthetic oligonucleotide
aaagaugagaaucauuaug

SEQ ID NO: 2795217 - RNA, 19 nt, Artificial Sequence
  Description of Artificial Sequence: Synthetic oligonucleotide
uaaaagaugagaaucauua

SEQ ID NO: 2795218 - RNA, 19 nt, Artificial Sequence
  Description of Artificial Sequence: Synthetic oligonucleotide
auuaugaggucgcagaugg

SEQ ID NO: 2795219 - RNA, 19 nt, Artificial Sequence
  Description of Artificial Sequence: Synthetic oligonucleotide
gaugagaaucauuaugagg

SEQ ID NO: 2795220 - RNA, 19 nt, Artificial Sequence
  Description of Artificial Sequence: Synthetic oligonucleotide
augagaaucauuaugaggu

SEQ ID NO: 2795221 - RNA, 19 nt, Artificial Sequence
  Description of Artificial Sequence: Synthetic oligonucleotide
uuguaggacagccacaagc

SEQ ID NO: 2795222 - RNA, 19 nt, Artificial Sequence
  Description of Artificial Sequence: Synthetic oligonucleotide
uaagugaucuuguaggaca

SEQ ID NO: 2795223 - RNA, 19 nt, Artificial Sequence
  Description of Artificial Sequence: Synthetic oligonucleotide
aaugagccccgauccaugc

SEQ ID NO: 2795224 - RNA, 19 nt, Artificial Sequence
  Description of Artificial Sequence: Synthetic oligonucleotide
aagcuugccaggcagagga

SEQ ID NO: 2795225 - RNA, 19 nt, Artificial Sequence
  Description of Artificial Sequence: Synthetic oligonucleotide
gugacuaccucaaagaagc

SEQ ID NO: 2795226 - RNA, 19 nt, Artificial Sequence
  Description of Artificial Sequence: Synthetic oligonucleotide
agauggaccagguaaaaga

SEQ ID NO: 2795227 - RNA, 19 nt, Artificial Sequence
  Description of Artificial Sequence: Synthetic oligonucleotide
uguaggacagccacaagcu

SEQ ID NO: 2795228 - RNA, 19 nt, Artificial Sequence
  Description of Artificial Sequence: Synthetic oligonucleotide
uccgaaugagccccgaucc

SEQ ID NO: 2795229 - RNA, 19 nt, Artificial Sequence
  Description of Artificial Sequence: Synthetic oligonucleotide
aucauuaugaggucgcaga

SEQ ID NO: 2795230 - RNA, 19 nt, Artificial Sequence
  Description of Artificial Sequence: Synthetic oligonucleotide
ugguuguaacucuuggagg

SEQ ID NO: 2795231 - RNA, 19 nt, Artificial Sequence
  Description of Artificial Sequence: Synthetic oligonucleotide
agaaucauuaugaggucgc

SEQ ID NO: 2795232 - RNA, 19 nt, Artificial Sequence
  Description of Artificial Sequence: Synthetic oligonucleotide
gguuauauaagugaucuug

SEQ ID NO: 2795233 - RNA, 19 nt, Artificial Sequence
  Description of Artificial Sequence: Synthetic oligonucleotide
uucugguuguaacucuugg

SEQ ID NO: 2795234 - RNA, 19 nt, Artificial Sequence
  Description of Artificial Sequence: Synthetic oligonucleotide
cagggugccgauuacauag

SEQ ID NO: 2795235 - RNA, 19 nt, Artificial Sequence
  Description of Artificial Sequence: Synthetic oligonucleotide
acagaugaaggcaaucagc

SEQ ID NO: 2795236 - RNA, 19 nt, Artificial Sequence
  Description of Artificial Sequence: Synthetic oligonucleotide
gaucuuguaggacagccac

SEQ ID NO: 2795237 - RNA, 19 nt, Artificial Sequence
  Description of Artificial Sequence: Synthetic oligonucleotide
aaaagaugagaaucauuau

SEQ ID NO: 2795238 - RNA, 19 nt, Artificial Sequence
  Description of Artificial Sequence: Synthetic oligonucleotide
cuucgcacacagaugaagg

SEQ ID NO: 2795239 - RNA, 19 nt, Artificial Sequence
  Description of Artificial Sequence: Synthetic oligonucleotide
uugccaggaacccaaagac

SEQ ID NO: 2795240 - RNA, 19 nt, Artificial Sequence
  Description of Artificial Sequence: Synthetic oligonucleotide
ucuggguuauauaagugau

SEQ ID NO: 2795241 - RNA, 19 nt, Artificial Sequence
  Description of Artificial Sequence: Synthetic oligonucleotide
aagcggaagagauggacca

SEQ ID NO: 2795242 - RNA, 19 nt, Artificial Sequence
  Description of Artificial Sequence: Synthetic oligonucleotide
ugagcacacgguagaagcg

SEQ ID NO: 2795243 - RNA, 19 nt, Artificial Sequence
  Description of Artificial Sequence: Synthetic oligonucleotide
gauuacauagugcaggagu

SEQ ID NO: 2795244 - RNA, 19 nt, Artificial Sequence
  Description of Artificial Sequence: Synthetic oligonucleotide
auccaugcgacaucgcggg

SEQ ID NO: 2795245 - RNA, 19 nt, Artificial Sequence
  Description of Artificial Sequence: Synthetic oligonucleotide
uaugaggucgcagauggug

SEQ ID NO: 2795246 - RNA, 19 nt, Artificial Sequence
  Description of Artificial Sequence: Synthetic oligonucleotide
aaucauuaugaggucgcag

SEQ ID NO: 2795247 - RNA, 19 nt, Artificial Sequence
  Description of Artificial Sequence: Synthetic oligonucleotide
gugagcacacgguagaagc

SEQ ID NO: 2795248 - RNA, 19 nt, Artificial Sequence
  Description of Artificial Sequence: Synthetic oligonucleotide
cucaaagaagcuguaggcg

SEQ ID NO: 2795249 - RNA, 19 nt, Artificial Sequence
  Description of Artificial Sequence: Synthetic oligonucleotide
gaggaaacuugccaggaac

SEQ ID NO: 2795250 - RNA, 19 nt, Artificial Sequence
  Description of Artificial Sequence: Synthetic oligonucleotide
gaagcuguaggcgccauag

SEQ ID NO: 2795251 - RNA, 19 nt, Artificial Sequence
  Description of Artificial Sequence: Synthetic oligonucleotide
auaagugaucuuguaggac

SEQ ID NO: 2795252 - RNA, 19 nt, Artificial Sequence
  Description of Artificial Sequence: Synthetic oligonucleotide
gaugaaggcaaucagcagu

SEQ ID NO: 2795253 - RNA, 19 nt, Artificial Sequence
  Description of Artificial Sequence: Synthetic oligonucleotide
augagcagaagcagggugc

SEQ ID NO: 2795254 - RNA, 19 nt, Artificial Sequence
  Description of Artificial Sequence: Synthetic oligonucleotide
auggugacuaccucaaaga

SEQ ID NO: 2795255 - RNA, 19 nt, Artificial Sequence
  Description of Artificial Sequence: Synthetic oligonucleotide
cacgugguccgaaugagcc

SEQ ID NO: 2795256 - RNA, 19 nt, Artificial Sequence
  Description of Artificial Sequence: Synthetic oligonucleotide
agaagcggaagagauggac

SEQ ID NO: 2795257 - RNA, 19 nt, Artificial Sequence
  Description of Artificial Sequence: Synthetic oligonucleotide
aggaaacuugccaggaacc

SEQ ID NO: 2795258 - RNA, 19 nt, Artificial Sequence
  Description of Artificial Sequence: Synthetic oligonucleotide
aaggcaaucagcaguguga

SEQ ID NO: 2795259 - RNA, 19 nt, Artificial Sequence
  Description of Artificial Sequence: Synthetic oligonucleotide
gauccaugcgacaucgcgg

SEQ ID NO: 2795260 - RNA, 19 nt, Artificial Sequence
  Description of Artificial Sequence: Synthetic oligonucleotide
aacccaaagaccgcucccg

SEQ ID NO: 2795261 - RNA, 19 nt, Artificial Sequence
  Description of Artificial Sequence: Synthetic oligonucleotide
ugcaggaguuccgacaggg

SEQ ID NO: 2795262 - RNA, 19 nt, Artificial Sequence
  Description of Artificial Sequence: Synthetic oligonucleotide
ugucuggguuauauaagug

SEQ ID NO: 2795263 - RNA, 19 nt, Artificial Sequence
  Description of Artificial Sequence: Synthetic oligonucleotide
caaagaagcuguaggcgcc

SEQ ID NO: 2795264 - RNA, 19 nt, Artificial Sequence
  Description of Artificial Sequence: Synthetic oligonucleotide
gagcuucgcacacagauga

SEQ ID NO: 2795265 - RNA, 19 nt, Artificial Sequence
  Description of Artificial Sequence: Synthetic oligonucleotide
uccgacaggggccagcuga

SEQ ID NO: 2795266 - RNA, 19 nt, Artificial Sequence
  Description of Artificial Sequence: Synthetic oligonucleotide
gaaggcaaucagcagugug

SEQ ID NO: 2795267 - RNA, 19 nt, Artificial Sequence
  Description of Artificial Sequence: Synthetic oligonucleotide
ucugguuguaacucuugga

SEQ ID NO: 2795268 - RNA, 19 nt, Artificial Sequence
  Description of Artificial Sequence: Synthetic oligonucleotide
ggccuugucaggcagaugc

SEQ ID NO: 2795269 - RNA, 19 nt, Artificial Sequence
  Description of Artificial Sequence: Synthetic oligonucleotide
aaagaccgcucccgcuacc

SEQ ID NO: 2795270 - RNA, 19 nt, Artificial Sequence
  Description of Artificial Sequence: Synthetic oligonucleotide
uucgcacacagaugaaggc

SEQ ID NO: 2795271 - RNA, 19 nt, Artificial Sequence
  Description of Artificial Sequence: Synthetic oligonucleotide
ucuuguaggacagccacaa

SEQ ID NO: 2795272 - RNA, 19 nt, Artificial Sequence
  Description of Artificial Sequence: Synthetic oligonucleotide
ucauuaugaggucgcagau

SEQ ID NO: 2795273 - RNA, 19 nt, Artificial Sequence
  Description of Artificial Sequence: Synthetic oligonucleotide
uguaacucuuggaggcugc

SEQ ID NO: 2795274 - RNA, 19 nt, Artificial Sequence
  Description of Artificial Sequence: Synthetic oligonucleotide
agaugaaggcaaucagcag

SEQ ID NO: 2795275 - RNA, 19 nt, Artificial Sequence
  Description of Artificial Sequence: Synthetic oligonucleotide
gucuggguuauauaaguga

SEQ ID NO: 2795276 - RNA, 19 nt, Artificial Sequence
  Description of Artificial Sequence: Synthetic oligonucleotide
cacagaugaaggcaaucag

SEQ ID NO: 2795277 - RNA, 19 nt, Artificial Sequence
  Description of Artificial Sequence: Synthetic oligonucleotide
auagugcaggaguuccgac

SEQ ID NO: 2795278 - RNA, 19 nt, Artificial Sequence
  Description of Artificial Sequence: Synthetic oligonucleotide
ugagccccgauccaugcga

SEQ ID NO: 2795279 - RNA, 19 nt, Artificial Sequence
  Description of Artificial Sequence: Synthetic oligonucleotide
uggugacuaccucaaagaa

SEQ ID NO: 2795280 - RNA, 19 nt, Artificial Sequence
  Description of Artificial Sequence: Synthetic oligonucleotide
agaugcaucugucuggguu

SEQ ID NO: 2795281 - RNA, 19 nt, Artificial Sequence
  Description of Artificial Sequence: Synthetic oligonucleotide
aggacagccacaagcuugc

SEQ ID NO: 2795282 - RNA, 19 nt, Artificial Sequence
  Description of Artificial Sequence: Synthetic oligonucleotide
gagcacacgguagaagcgg

SEQ ID NO: 2795283 - RNA, 19 nt, Artificial Sequence
  Description of Artificial Sequence: Synthetic oligonucleotide
gccaggaacccaaagaccg

SEQ ID NO: 2795284 - RNA, 19 nt, Artificial Sequence
  Description of Artificial Sequence: Synthetic oligonucleotide
gugaucuuguaggacagcc

SEQ ID NO: 2795285 - RNA, 19 nt, Artificial Sequence
  Description of Artificial Sequence: Synthetic oligonucleotide
aggcaaucagcagugugac

SEQ ID NO: 2795286 - RNA, 19 nt, Artificial Sequence
  Description of Artificial Sequence: Synthetic oligonucleotide
ugagaaucauuaugagguc

SEQ ID NO: 2795287 - RNA, 19 nt, Artificial Sequence
  Description of Artificial Sequence: Synthetic oligonucleotide
gacuaccucaaagaagcug

SEQ ID NO: 2795288 - RNA, 19 nt, Artificial Sequence
  Description of Artificial Sequence: Synthetic oligonucleotide
ugcgccacuuugagcaggg

SEQ ID NO: 2795289 - RNA, 19 nt, Artificial Sequence
  Description of Artificial Sequence: Synthetic oligonucleotide
acgugguccgaaugagccc

SEQ ID NO: 2795290 - RNA, 19 nt, Artificial Sequence
  Description of Artificial Sequence: Synthetic oligonucleotide
cuugccaggaacccaaaga

SEQ ID NO: 2795291 - RNA, 19 nt, Artificial Sequence
  Description of Artificial Sequence: Synthetic oligonucleotide
ucgcagauggugacuaccu

SEQ ID NO: 2795292 - RNA, 19 nt, Artificial Sequence
  Description of Artificial Sequence: Synthetic oligonucleotide
uagucgaugggaggggcgg

SEQ ID NO: 2795293 - RNA, 19 nt, Artificial Sequence
  Description of Artificial Sequence: Synthetic oligonucleotide
uugagcagggcgcccuggg

SEQ ID NO: 2795294 - RNA, 19 nt, Artificial Sequence
  Description of Artificial Sequence: Synthetic oligonucleotide
cagugugaccaucugcgcc

SEQ ID NO: 2795295 - RNA, 19 nt, Artificial Sequence
  Description of Artificial Sequence: Synthetic oligonucleotide
uaggcgccauagucgaugg

SEQ ID NO: 2795296 - RNA, 19 nt, Artificial Sequence
  Description of Artificial Sequence: Synthetic oligonucleotide
aaacuugccaggaacccaa

SEQ ID NO: 2795297 - RNA, 19 nt, Artificial Sequence
  Description of Artificial Sequence: Synthetic oligonucleotide
acccaaagaccgcucccgc

SEQ ID NO: 2795298 - RNA, 19 nt, Artificial Sequence
  Description of Artificial Sequence: Synthetic oligonucleotide
accagguaaaagaugagaa

SEQ ID NO: 2795299 - RNA, 19 nt, Artificial Sequence
  Description of Artificial Sequence: Synthetic oligonucleotide
augaaggcaaucagcagug

SEQ ID NO: 2795300 - RNA, 19 nt, Artificial Sequence
  Description of Artificial Sequence: Synthetic oligonucleotide
cuugccaggcagaggaaac

SEQ ID NO: 2795301 - RNA, 19 nt, Artificial Sequence
  Description of Artificial Sequence: Synthetic oligonucleotide
gagauggaccagguaaaag

SEQ ID NO: 2795302 - RNA, 19 nt, Artificial Sequence
  Description of Artificial Sequence: Synthetic oligonucleotide
aggcagaggaaacuugcca

SEQ ID NO: 2795303 - RNA, 19 nt, Artificial Sequence
  Description of Artificial Sequence: Synthetic oligonucleotide
gaacccaaagaccgcuccc

SEQ ID NO: 2795304 - RNA, 19 nt, Artificial Sequence
  Description of Artificial Sequence: Synthetic oligonucleotide
agaagcagggugccgauua

SEQ ID NO: 2795305 - RNA, 19 nt, Artificial Sequence
  Description of Artificial Sequence: Synthetic oligonucleotide
gaugcaucugucuggguua

SEQ ID NO: 2795306 - RNA, 19 nt, Artificial Sequence
  Description of Artificial Sequence: Synthetic oligonucleotide
ugccgauuacauagugcag

SEQ ID NO: 2795307 - RNA, 19 nt, Artificial Sequence
  Description of Artificial Sequence: Synthetic oligonucleotide
gccgauuacauagugcagg

SEQ ID NO: 2795308 - RNA, 19 nt, Artificial Sequence
  Description of Artificial Sequence: Synthetic oligonucleotide
ugggugcgcggguacaccg

SEQ ID NO: 2795309 - RNA, 19 nt, Artificial Sequence
  Description of Artificial Sequence: Synthetic oligonucleotide
aagagauggaccagguaaa

SEQ ID NO: 2795310 - RNA, 19 nt, Artificial Sequence
  Description of Artificial Sequence: Synthetic oligonucleotide
ucgcacacagaugaaggca

SEQ ID NO: 2795311 - RNA, 19 nt, Artificial Sequence
  Description of Artificial Sequence: Synthetic oligonucleotide
agugaucuuguaggacagc

SEQ ID NO: 2795312 - RNA, 19 nt, Artificial Sequence
  Description of Artificial Sequence: Synthetic oligonucleotide
ucaggcagaugcaucuguc

SEQ ID NO: 2795313 - RNA, 19 nt, Artificial Sequence
  Description of Artificial Sequence: Synthetic oligonucleotide
uuguaacucuuggaggcug

SEQ ID NO: 2795314 - RNA, 19 nt, Artificial Sequence
  Description of Artificial Sequence: Synthetic oligonucleotide
auuacauagugcaggaguu

SEQ ID NO: 2795315 - RNA, 19 nt, Artificial Sequence
  Description of Artificial Sequence: Synthetic oligonucleotide
gaccagguaaaagaugaga

SEQ ID NO: 2795316 - RNA, 19 nt, Artificial Sequence
  Description of Artificial Sequence: Synthetic oligonucleotide
ggaggcgaugagcagaagc

SEQ ID NO: 2795317 - RNA, 19 nt, Artificial Sequence
  Description of Artificial Sequence: Synthetic oligonucleotide
ggugacuaccucaaagaag

SEQ ID NO: 2795318 - RNA, 19 nt, Artificial Sequence
  Description of Artificial Sequence: Synthetic oligonucleotide
cuggguuauauaagugauc

SEQ ID NO: 2795319 - RNA, 19 nt, Artificial Sequence
  Description of Artificial Sequence: Synthetic oligonucleotide
cuuggaggcugccacgaug

SEQ ID NO: 2795320 - RNA, 19 nt, Artificial Sequence
  Description of Artificial Sequence: Synthetic oligonucleotide
cacgguagaagcggaagag

SEQ ID NO: 2795321 - RNA, 19 nt, Artificial Sequence
  Description of Artificial Sequence: Synthetic oligonucleotide
gaccaucugcgccacuuug

SEQ ID NO: 2795322 - RNA, 19 nt, Artificial Sequence
  Description of Artificial Sequence: Synthetic oligonucleotide
acaagcuugccaggcagag

SEQ ID NO: 2795323 - RNA, 19 nt, Artificial Sequence
  Description of Artificial Sequence: Synthetic oligonucleotide
ugcacgugguccgaaugag

SEQ ID NO: 2795324 - RNA, 19 nt, Artificial Sequence
  Description of Artificial Sequence: Synthetic oligonucleotide
gccauagucgaugggaggg

SEQ ID NO: 2795325 - RNA, 19 nt, Artificial Sequence
  Description of Artificial Sequence: Synthetic oligonucleotide
gaaacuugccaggaaccca

SEQ ID NO: 2795326 - RNA, 19 nt, Artificial Sequence
  Description of Artificial Sequence: Synthetic oligonucleotide
cauuaugaggucgcagaug

SEQ ID NO: 2795327 - RNA, 19 nt, Artificial Sequence
  Description of Artificial Sequence: Synthetic oligonucleotide
acgauggaggcgaugagca

SEQ ID NO: 2795328 - RNA, 19 nt, Artificial Sequence
  Description of Artificial Sequence: Synthetic oligonucleotide
cacgauggaggcgaugagc

SEQ ID NO: 2795329 - RNA, 19 nt, Artificial Sequence
  Description of Artificial Sequence: Synthetic oligonucleotide
uacaccgcguccagcaguc

SEQ ID NO: 2795330 - RNA, 19 nt, Artificial Sequence
  Description of Artificial Sequence: Synthetic oligonucleotide
guuauauaagugaucuugu

SEQ ID NO: 2795331 - RNA, 19 nt, Artificial Sequence
  Description of Artificial Sequence: Synthetic oligonucleotide
gagcagggcgcccugggug

SEQ ID NO: 2795332 - RNA, 19 nt, Artificial Sequence
  Description of Artificial Sequence: Synthetic oligonucleotide
uuacauagugcaggaguuc

SEQ ID NO: 2795333 - RNA, 19 nt, Artificial Sequence
  Description of Artificial Sequence: Synthetic oligonucleotide
accgcucccgcuaccaggc

SEQ ID NO: 2795334 - RNA, 19 nt, Artificial Sequence
  Description of Artificial Sequence: Synthetic oligonucleotide
guaggcgccauagucgaug

SEQ ID NO: 2795335 - RNA, 19 nt, Artificial Sequence
  Description of Artificial Sequence: Synthetic oligonucleotide
uccgagggcuggcauggcc

SEQ ID NO: 2795336 - RNA, 19 nt, Artificial Sequence
  Description of Artificial Sequence: Synthetic oligonucleotide
augagccccgauccaugcg

SEQ ID NO: 2795337 - RNA, 19 nt, Artificial Sequence
  Description of Artificial Sequence: Synthetic oligonucleotide
gaaugagccccgauccaug

SEQ ID NO: 2795338 - RNA, 19 nt, Artificial Sequence
  Description of Artificial Sequence: Synthetic oligonucleotide
aguuccgacaggggccagc

SEQ ID NO: 2795339 - RNA, 19 nt, Artificial Sequence
  Description of Artificial Sequence: Synthetic oligonucleotide
cauagucgaugggaggggc

SEQ ID NO: 2795340 - RNA, 19 nt, Artificial Sequence
  Description of Artificial Sequence: Synthetic oligonucleotide
cacacgguagaagcggaag

SEQ ID NO: 2795341 - RNA, 19 nt, Artificial Sequence
  Description of Artificial Sequence: Synthetic oligonucleotide
augggaggggcggagcuuc

SEQ ID NO: 2795342 - RNA, 19 nt, Artificial Sequence
  Description of Artificial Sequence: Synthetic oligonucleotide
auagucgaugggaggggcg

SEQ ID NO: 2795343 - RNA, 19 nt, Artificial Sequence
  Description of Artificial Sequence: Synthetic oligonucleotide
ccaggcagaggaaacuugc

SEQ ID NO: 2795344 - RNA, 19 nt, Artificial Sequence
  Description of Artificial Sequence: Synthetic oligonucleotide
agaggaaacuugccaggaa

SEQ ID NO: 2795345 - RNA, 19 nt, Artificial Sequence
  Description of Artificial Sequence: Synthetic oligonucleotide
ugacuaccucaaagaagcu

SEQ ID NO: 2795346 - RNA, 19 nt, Artificial Sequence
  Description of Artificial Sequence: Synthetic oligonucleotide
gcgaugagcagaagcaggg

SEQ ID NO: 2795347 - RNA, 19 nt, Artificial Sequence
  Description of Artificial Sequence: Synthetic oligonucleotide
guccgaaugagccccgauc

SEQ ID NO: 2795348 - RNA, 19 nt, Artificial Sequence
  Description of Artificial Sequence: Synthetic oligonucleotide
gcagauggugacuaccuca

SEQ ID NO: 2795349 - RNA, 19 nt, Artificial Sequence
  Description of Artificial Sequence: Synthetic oligonucleotide
cuguaggcgccauagucga

SEQ ID NO: 2795350 - RNA, 19 nt, Artificial Sequence
  Description of Artificial Sequence: Synthetic oligonucleotide
ucugcgccacuuugagcag

SEQ ID NO: 2795351 - RNA, 19 nt, Artificial Sequence
  Description of Artificial Sequence: Synthetic oligonucleotide
ggcgaugagcagaagcagg

SEQ ID NO: 2795352 - RNA, 19 nt, Artificial Sequence
  Description of Artificial Sequence: Synthetic oligonucleotide
gaaucauuaugaggucgca

SEQ ID NO: 2795353 - RNA, 19 nt, Artificial Sequence
  Description of Artificial Sequence: Synthetic oligonucleotide
uuaugaggucgcagauggu

SEQ ID NO: 2795354 - RNA, 19 nt, Artificial Sequence
  Description of Artificial Sequence: Synthetic oligonucleotide
gaagcagggugccgauuac

SEQ ID NO: 2795355 - RNA, 19 nt, Artificial Sequence
  Description of Artificial Sequence: Synthetic oligonucleotide
gccacuuugagcagggcgc

SEQ ID NO: 2795356 - RNA, 19 nt, Artificial Sequence
  Description of Artificial Sequence: Synthetic oligonucleotide
gcagaugcaucugucuggg

SEQ ID NO: 2795357 - RNA, 19 nt, Artificial Sequence
  Description of Artificial Sequence: Synthetic oligonucleotide
aagaccgcucccgcuacca

SEQ ID NO: 2795358 - RNA, 19 nt, Artificial Sequence
  Description of Artificial Sequence: Synthetic oligonucleotide
caucugcgccacuuugagc

SEQ ID NO: 2795359 - RNA, 19 nt, Artificial Sequence
  Description of Artificial Sequence: Synthetic oligonucleotide
gagggcgauggccuuguca

SEQ ID NO: 2795360 - RNA, 19 nt, Artificial Sequence
  Description of Artificial Sequence: Synthetic oligonucleotide
gauggaccagguaaaagau

SEQ ID NO: 2795361 - RNA, 19 nt, Artificial Sequence
  Description of Artificial Sequence: Synthetic oligonucleotide
uaacucuuggaggcugcca

SEQ ID NO: 2795362 - RNA, 19 nt, Artificial Sequence
  Description of Artificial Sequence: Synthetic oligonucleotide
aagcagggugccgauuaca

SEQ ID NO: 2795363 - RNA, 19 nt, Artificial Sequence
  Description of Artificial Sequence: Synthetic oligonucleotide
aggcgaugagcagaagcag

SEQ ID NO: 2795364 - RNA, 19 nt, Artificial Sequence
  Description of Artificial Sequence: Synthetic oligonucleotide
cuuguaggacagccacaag

SEQ ID NO: 2795365 - RNA, 19 nt, Artificial Sequence
  Description of Artificial Sequence: Synthetic oligonucleotide
gcuggcauggccccggcgc

SEQ ID NO: 2795366 - RNA, 19 nt, Artificial Sequence
  Description of Artificial Sequence: Synthetic oligonucleotide
auggaccagguaaaagaug

SEQ ID NO: 2795367 - RNA, 19 nt, Artificial Sequence
  Description of Artificial Sequence: Synthetic oligonucleotide
caaagaccgcucccgcuac

SEQ ID NO: 2795368 - RNA, 19 nt, Artificial Sequence
  Description of Artificial Sequence: Synthetic oligonucleotide
augaggucgcagaugguga

SEQ ID NO: 2795369 - RNA, 19 nt, Artificial Sequence
  Description of Artificial Sequence: Synthetic oligonucleotide
cuggcauggccccggcgcg

SEQ ID NO: 2795370 - RNA, 19 nt, Artificial Sequence
  Description of Artificial Sequence: Synthetic oligonucleotide
gguagaagcggaagagaug

SEQ ID NO: 2795371 - RNA, 19 nt, Artificial Sequence
  Description of Artificial Sequence: Synthetic oligonucleotide
cauagugcaggaguuccga

SEQ ID NO: 2795372 - RNA, 19 nt, Artificial Sequence
  Description of Artificial Sequence: Synthetic oligonucleotide
cgauccaugcgacaucgcg

SEQ ID NO: 2795373 - RNA, 19 nt, Artificial Sequence
  Description of Artificial Sequence: Synthetic oligonucleotide
gaggggcggagcuucgcac

SEQ ID NO: 2795374 - RNA, 19 nt, Artificial Sequence
  Description of Artificial Sequence: Synthetic oligonucleotide
caagcuugccaggcagagg

SEQ ID NO: 2795375 - RNA, 19 nt, Artificial Sequence
  Description of Artificial Sequence: Synthetic oligonucleotide
ggugccgauuacauagugc

SEQ ID NO: 2795376 - RNA, 19 nt, Artificial Sequence
  Description of Artificial Sequence: Synthetic oligonucleotide
caccgcguccagcaguccc

SEQ ID NO: 2795377 - RNA, 19 nt, Artificial Sequence
  Description of Artificial Sequence: Synthetic oligonucleotide
gcuucgcacacagaugaag

SEQ ID NO: 2795378 - RNA, 19 nt, Artificial Sequence
  Description of Artificial Sequence: Synthetic oligonucleotide
guaacucuuggaggcugcc

SEQ ID NO: 2795379 - RNA, 19 nt, Artificial Sequence
  Description of Artificial Sequence: Synthetic oligonucleotide
ggcggagcuucgcacacag

SEQ ID NO: 2795380 - RNA, 19 nt, Artificial Sequence
  Description of Artificial Sequence: Synthetic oligonucleotide
ugcgcggguacaccgcguc

SEQ ID NO: 2795381 - RNA, 19 nt, Artificial Sequence
  Description of Artificial Sequence: Synthetic oligonucleotide
agagauggaccagguaaaa

SEQ ID NO: 2795382 - RNA, 19 nt, Artificial Sequence
  Description of Artificial Sequence: Synthetic oligonucleotide
ugggaggggcggagcuucg

SEQ ID NO: 2795383 - RNA, 19 nt, Artificial Sequence
  Description of Artificial Sequence: Synthetic oligonucleotide
aggggcggagcuucgcaca

SEQ ID NO: 2795384 - RNA, 19 nt, Artificial Sequence
  Description of Artificial Sequence: Synthetic oligonucleotide
caggugagcacacgguaga

SEQ ID NO: 2795385 - RNA, 19 nt, Artificial Sequence
  Description of Artificial Sequence: Synthetic oligonucleotide
ggugcgcggguacaccgcg

SEQ ID NO: 2795386 - RNA, 19 nt, Artificial Sequence
  Description of Artificial Sequence: Synthetic oligonucleotide
cagccacaagcuugccagg

SEQ ID NO: 2795387 - RNA, 19 nt, Artificial Sequence
  Description of Artificial Sequence: Synthetic oligonucleotide
ggugagcacacgguagaag

SEQ ID NO: 2795388 - RNA, 19 nt, Artificial Sequence
  Description of Artificial Sequence: Synthetic oligonucleotide
ugaccaucugcgccacuuu

SEQ ID NO: 2795389 - RNA, 19 nt, Artificial Sequence
  Description of Artificial Sequence: Synthetic oligonucleotide
ggcgauggccuugucaggc

SEQ ID NO: 2795390 - RNA, 19 nt, Artificial Sequence
  Description of Artificial Sequence: Synthetic oligonucleotide
agucccuccgagggcuggc

SEQ ID NO: 2795391 - RNA, 19 nt, Artificial Sequence
  Description of Artificial Sequence: Synthetic oligonucleotide
aggaacccaaagaccgcuc

SEQ ID NO: 2795392 - RNA, 19 nt, Artificial Sequence
  Description of Artificial Sequence: Synthetic oligonucleotide
ggguacaccgcguccagca

SEQ ID NO: 2795393 - RNA, 19 nt, Artificial Sequence
  Description of Artificial Sequence: Synthetic oligonucleotide
ugaaggcaaucagcagugu

SEQ ID NO: 2795394 - RNA, 19 nt, Artificial Sequence
  Description of Artificial Sequence: Synthetic oligonucleotide
agaccgcucccgcuaccag

SEQ ID NO: 2795395 - RNA, 19 nt, Artificial Sequence
  Description of Artificial Sequence: Synthetic oligonucleotide
ccacaagcuugccaggcag

SEQ ID NO: 2795396 - RNA, 19 nt, Artificial Sequence
  Description of Artificial Sequence: Synthetic oligonucleotide
gcugccacgauggaggcga

SEQ ID NO: 2795397 - RNA, 19 nt, Artificial Sequence
  Description of Artificial Sequence: Synthetic oligonucleotide
agcagggugccgauuacau

SEQ ID NO: 2795398 - RNA, 19 nt, Artificial Sequence
  Description of Artificial Sequence: Synthetic oligonucleotide
ccaucugcgccacuuugag

SEQ ID NO: 2795399 - RNA, 19 nt, Artificial Sequence
  Description of Artificial Sequence: Synthetic oligonucleotide
cuuugagcagggcgcccug

SEQ ID NO: 2795400 - RNA, 19 nt, Artificial Sequence
  Description of Artificial Sequence: Synthetic oligonucleotide
accaucugcgccacuuuga

SEQ ID NO: 2795401 - RNA, 19 nt, Artificial Sequence
  Description of Artificial Sequence: Synthetic oligonucleotide
gugcaggaguuccgacagg

SEQ ID NO: 2795402 - RNA, 19 nt, Artificial Sequence
  Description of Artificial Sequence: Synthetic oligonucleotide
ggcgccauagucgauggga

SEQ ID NO: 2795403 - RNA, 19 nt, Artificial Sequence
  Description of Artificial Sequence: Synthetic oligonucleotide
cagaggaaacuugccagga

SEQ ID NO: 2795404 - RNA, 19 nt, Artificial Sequence
  Description of Artificial Sequence: Synthetic oligonucleotide
aucuuguaggacagccaca

SEQ ID NO: 2795405 - RNA, 19 nt, Artificial Sequence
  Description of Artificial Sequence: Synthetic oligonucleotide
cccgauccaugcgacaucg

SEQ ID NO: 2795406 - RNA, 19 nt, Artificial Sequence
  Description of Artificial Sequence: Synthetic oligonucleotide
ggagcuucgcacacagaug

SEQ ID NO: 2795407 - RNA, 19 nt, Artificial Sequence
  Description of Artificial Sequence: Synthetic oligonucleotide
ucgaugggaggggcggagc

SEQ ID NO: 2795408 - RNA, 19 nt, Artificial Sequence
  Description of Artificial Sequence: Synthetic oligonucleotide
ugccaggcagaggaaacuu

SEQ ID NO: 2795409 - RNA, 19 nt, Artificial Sequence
  Description of Artificial Sequence: Synthetic oligonucleotide
gguacaccgcguccagcag

SEQ ID NO: 2795410 - RNA, 19 nt, Artificial Sequence
  Description of Artificial Sequence: Synthetic oligonucleotide
cacaagcuugccaggcaga

SEQ ID NO: 2795411 - RNA, 19 nt, Artificial Sequence
  Description of Artificial Sequence: Synthetic oligonucleotide
ggccagcugaugcagguga

SEQ ID NO: 2795412 - RNA, 19 nt, Artificial Sequence
  Description of Artificial Sequence: Synthetic oligonucleotide
agggcuggcauggccccgg

SEQ ID NO: 2795413 - RNA, 19 nt, Artificial Sequence
  Description of Artificial Sequence: Synthetic oligonucleotide
gcugcacgugguccgaaug

SEQ ID NO: 2795414 - RNA, 19 nt, Artificial Sequence
  Description of Artificial Sequence: Synthetic oligonucleotide
uguaggcgccauagucgau

SEQ ID NO: 2795415 - RNA, 19 nt, Artificial Sequence
  Description of Artificial Sequence: Synthetic oligonucleotide
gcagugugaccaucugcgc

SEQ ID NO: 2795416 - RNA, 19 nt, Artificial Sequence
  Description of Artificial Sequence: Synthetic oligonucleotide
cugcgccacuuugagcagg

SEQ ID NO: 2795417 - RNA, 19 nt, Artificial Sequence
  Description of Artificial Sequence: Synthetic oligonucleotide
auggaggcgaugagcagaa

SEQ ID NO: 2795418 - RNA, 19 nt, Artificial Sequence
  Description of Artificial Sequence: Synthetic oligonucleotide
gauggccuugucaggcaga

SEQ ID NO: 2795419 - RNA, 19 nt, Artificial Sequence
  Description of Artificial Sequence: Synthetic oligonucleotide
ggcccagaccggcuggccg

SEQ ID NO: 2795420 - RNA, 19 nt, Artificial Sequence
  Description of Artificial Sequence: Synthetic oligonucleotide
aggcgccauagucgauggg

SEQ ID NO: 2795421 - RNA, 19 nt, Artificial Sequence
  Description of Artificial Sequence: Synthetic oligonucleotide
gucgaugggaggggcggag

SEQ ID NO: 2795422 - RNA, 19 nt, Artificial Sequence
  Description of Artificial Sequence: Synthetic oligonucleotide
agaagcuguaggcgccaua

SEQ ID NO: 2795423 - RNA, 19 nt, Artificial Sequence
  Description of Artificial Sequence: Synthetic oligonucleotide
ugcugcacgugguccgaau

SEQ ID NO: 2795424 - RNA, 19 nt, Artificial Sequence
  Description of Artificial Sequence: Synthetic oligonucleotide
cgccacuuugagcagggcg

SEQ ID NO: 2795425 - RNA, 19 nt, Artificial Sequence
  Description of Artificial Sequence: Synthetic oligonucleotide
aagaagcuguaggcgccau

SEQ ID NO: 2795426 - RNA, 19 nt, Artificial Sequence
  Description of Artificial Sequence: Synthetic oligonucleotide
ccaggaacccaaagaccgc

SEQ ID NO: 2795427 - RNA, 19 nt, Artificial Sequence
  Description of Artificial Sequence: Synthetic oligonucleotide
ccgagggcuggcauggccc

SEQ ID NO: 2795428 - RNA, 19 nt, Artificial Sequence
  Description of Artificial Sequence: Synthetic oligonucleotide
gggugccgauuacauagug

SEQ ID NO: 2795429 - RNA, 19 nt, Artificial Sequence
  Description of Artificial Sequence: Synthetic oligonucleotide
auggccccggcgcgccgcc

SEQ ID NO: 2795430 - RNA, 19 nt, Artificial Sequence
  Description of Artificial Sequence: Synthetic oligonucleotide
agcacacgguagaagcgga

SEQ ID NO: 2795431 - RNA, 19 nt, Artificial Sequence
  Description of Artificial Sequence: Synthetic oligonucleotide
caggggccagcugaugcag

SEQ ID NO: 2795432 - RNA, 19 nt, Artificial Sequence
  Description of Artificial Sequence: Synthetic oligonucleotide
ggcaaucagcagugugacc

SEQ ID NO: 2795433 - RNA, 19 nt, Artificial Sequence
  Description of Artificial Sequence: Synthetic oligonucleotide
aggucgcagauggugacua

SEQ ID NO: 2795434 - RNA, 19 nt, Artificial Sequence
  Description of Artificial Sequence: Synthetic oligonucleotide
cagcagucccuccgagggc

SEQ ID NO: 2795435 - RNA, 19 nt, Artificial Sequence
  Description of Artificial Sequence: Synthetic oligonucleotide
ggaccagguaaaagaugag

SEQ ID NO: 2795436 - RNA, 19 nt, Artificial Sequence
  Description of Artificial Sequence: Synthetic oligonucleotide
ccgauuacauagugcagga

SEQ ID NO: 2795437 - RNA, 19 nt, Artificial Sequence
  Description of Artificial Sequence: Synthetic oligonucleotide
uuccgacaggggccagcug

SEQ ID NO: 2795438 - RNA, 19 nt, Artificial Sequence
  Description of Artificial Sequence: Synthetic oligonucleotide
cgugguccgaaugagcccc

SEQ ID NO: 2795439 - RNA, 19 nt, Artificial Sequence
  Description of Artificial Sequence: Synthetic oligonucleotide
cucuuggaggcugccacga

SEQ ID NO: 2795440 - RNA, 19 nt, Artificial Sequence
  Description of Artificial Sequence: Synthetic oligonucleotide
caucugucuggguuauaua

SEQ ID NO: 2795441 - RNA, 19 nt, Artificial Sequence
  Description of Artificial Sequence: Synthetic oligonucleotide
ccauagucgaugggagggg

SEQ ID NO: 2795442 - RNA, 19 nt, Artificial Sequence
  Description of Artificial Sequence: Synthetic oligonucleotide
ccuccgagggcuggcaugg

SEQ ID NO: 2795443 - RNA, 19 nt, Artificial Sequence
  Description of Artificial Sequence: Synthetic oligonucleotide
cauucugguuguaacucuu

SEQ ID NO: 2795444 - RNA, 19 nt, Artificial Sequence
  Description of Artificial Sequence: Synthetic oligonucleotide
gagggcuggcauggccccg

SEQ ID NO: 2795445 - RNA, 19 nt, Artificial Sequence
  Description of Artificial Sequence: Synthetic oligonucleotide
cugggugcgcggguacacc

SEQ ID NO: 2795446 - RNA, 19 nt, Artificial Sequence
  Description of Artificial Sequence: Synthetic oligonucleotide
guacaccgcguccagcagu

SEQ ID NO: 2795447 - RNA, 19 nt, Artificial Sequence
  Description of Artificial Sequence: Synthetic oligonucleotide
gcgccauagucgaugggag

SEQ ID NO: 2795448 - RNA, 19 nt, Artificial Sequence
  Description of Artificial Sequence: Synthetic oligonucleotide
agagggcgauggccuuguc

SEQ ID NO: 2795449 - RNA, 19 nt, Artificial Sequence
  Description of Artificial Sequence: Synthetic oligonucleotide
gcaggaguuccgacagggg

SEQ ID NO: 2795450 - RNA, 19 nt, Artificial Sequence
  Description of Artificial Sequence: Synthetic oligonucleotide
acaccgcguccagcagucc

SEQ ID NO: 2795451 - RNA, 19 nt, Artificial Sequence
  Description of Artificial Sequence: Synthetic oligonucleotide
aacuugccaggaacccaaa

SEQ ID NO: 2795452 - RNA, 19 nt, Artificial Sequence
  Description of Artificial Sequence: Synthetic oligonucleotide
aggggccagcugaugcagg

SEQ ID NO: 2795453 - RNA, 19 nt, Artificial Sequence
  Description of Artificial Sequence: Synthetic oligonucleotide
gggcgauggccuugucagg

SEQ ID NO: 2795454 - RNA, 19 nt, Artificial Sequence
  Description of Artificial Sequence: Synthetic oligonucleotide
accgcguccagcagucccu

SEQ ID NO: 2795455 - RNA, 19 nt, Artificial Sequence
  Description of Artificial Sequence: Synthetic oligonucleotide
agccccgauccaugcgaca

SEQ ID NO: 2795456 - RNA, 19 nt, Artificial Sequence
  Description of Artificial Sequence: Synthetic oligonucleotide
gugguccgaaugagccccg

SEQ ID NO: 2795457 - RNA, 19 nt, Artificial Sequence
  Description of Artificial Sequence: Synthetic oligonucleotide
gagccccgauccaugcgac

SEQ ID NO: 2795458 - RNA, 19 nt, Artificial Sequence
  Description of Artificial Sequence: Synthetic oligonucleotide
ucccuccgagggcuggcau

SEQ ID NO: 2795459 - RNA, 19 nt, Artificial Sequence
  Description of Artificial Sequence: Synthetic oligonucleotide
agggugccgauuacauagu

SEQ ID NO: 2795460 - RNA, 19 nt, Artificial Sequence
  Description of Artificial Sequence: Synthetic oligonucleotide
agucgaugggaggggcgga

SEQ ID NO: 2795461 - RNA, 19 nt, Artificial Sequence
  Description of Artificial Sequence: Synthetic oligonucleotide
gcccagaccggcuggccgc

SEQ ID NO: 2795462 - RNA, 19 nt, Artificial Sequence
  Description of Artificial Sequence: Synthetic oligonucleotide
ccacuuugagcagggcgcc

SEQ ID NO: 2795463 - RNA, 19 nt, Artificial Sequence
  Description of Artificial Sequence: Synthetic oligonucleotide
cgccauagucgaugggagg

SEQ ID NO: 2795464 - RNA, 19 nt, Artificial Sequence
  Description of Artificial Sequence: Synthetic oligonucleotide
ggaggggcggagcuucgca

SEQ ID NO: 2795465 - RNA, 19 nt, Artificial Sequence
  Description of Artificial Sequence: Synthetic oligonucleotide
ugguccgaaugagccccga

SEQ ID NO: 2795466 - RNA, 19 nt, Artificial Sequence
  Description of Artificial Sequence: Synthetic oligonucleotide
uggcauggccccggcgcgc

SEQ ID NO: 2795467 - RNA, 19 nt, Artificial Sequence
  Description of Artificial Sequence: Synthetic oligonucleotide
ucccgcuaccaggccauuc

SEQ ID NO: 2795468 - RNA, 19 nt, Artificial Sequence
  Description of Artificial Sequence: Synthetic oligonucleotide
agggcgcccugggugcgcg

SEQ ID NO: 2795469 - RNA, 19 nt, Artificial Sequence
  Description of Artificial Sequence: Synthetic oligonucleotide
gccacaagcuugccaggca

SEQ ID NO: 2795470 - RNA, 19 nt, Artificial Sequence
  Description of Artificial Sequence: Synthetic oligonucleotide
uggccuugucaggcagaug

SEQ ID NO: 2795471 - RNA, 19 nt, Artificial Sequence
  Description of Artificial Sequence: Synthetic oligonucleotide
ccagcugaugcaggugagc

SEQ ID NO: 2795472 - RNA, 19 nt, Artificial Sequence
  Description of Artificial Sequence: Synthetic oligonucleotide
gcacgugguccgaaugagc

SEQ ID NO: 2795473 - RNA, 19 nt, Artificial Sequence
  Description of Artificial Sequence: Synthetic oligonucleotide
caggaacccaaagaccgcu

SEQ ID NO: 2795474 - RNA, 19 nt, Artificial Sequence
  Description of Artificial Sequence: Synthetic oligonucleotide
ggucgcagauggugacuac

SEQ ID NO: 2795475 - RNA, 19 nt, Artificial Sequence
  Description of Artificial Sequence: Synthetic oligonucleotide
ccaaagaccgcucccgcua

SEQ ID NO: 2795476 - RNA, 19 nt, Artificial Sequence
  Description of Artificial Sequence: Synthetic oligonucleotide
guuccgacaggggccagcu

SEQ ID NO: 2795477 - RNA, 19 nt, Artificial Sequence
  Description of Artificial Sequence: Synthetic oligonucleotide
ggggcggagcuucgcacac

SEQ ID NO: 2795478 - RNA, 19 nt, Artificial Sequence
  Description of Artificial Sequence: Synthetic oligonucleotide
gcggguacaccgcguccag

SEQ ID NO: 2795479 - RNA, 19 nt, Artificial Sequence
  Description of Artificial Sequence: Synthetic oligonucleotide
gaggucgcagauggugacu

SEQ ID NO: 2795480 - RNA, 19 nt, Artificial Sequence
  Description of Artificial Sequence: Synthetic oligonucleotide
ggcuggcauggccccggcg

SEQ ID NO: 2795481 - RNA, 19 nt, Artificial Sequence
  Description of Artificial Sequence: Synthetic oligonucleotide
cgauggccuugucaggcag

SEQ ID NO: 2795482 - RNA, 19 nt, Artificial Sequence
  Description of Artificial Sequence: Synthetic oligonucleotide
ccacgauggaggcgaugag

SEQ ID NO: 2795483 - RNA, 19 nt, Artificial Sequence
  Description of Artificial Sequence: Synthetic oligonucleotide
gcuugccaggcagaggaaa

SEQ ID NO: 2795484 - RNA, 19 nt, Artificial Sequence
  Description of Artificial Sequence: Synthetic oligonucleotide
cgauuacauagugcaggag

SEQ ID NO: 2795485 - RNA, 19 nt, Artificial Sequence
  Description of Artificial Sequence: Synthetic oligonucleotide
agcuucgcacacagaugaa

SEQ ID NO: 2795486 - RNA, 19 nt, Artificial Sequence
  Description of Artificial Sequence: Synthetic oligonucleotide
gaguuccgacaggggccag

SEQ ID NO: 2795487 - RNA, 19 nt, Artificial Sequence
  Description of Artificial Sequence: Synthetic oligonucleotide
ggcugccacgauggaggcg

SEQ ID NO: 2795488 - RNA, 19 nt, Artificial Sequence
  Description of Artificial Sequence: Synthetic oligonucleotide
cccuccgagggcuggcaug

SEQ ID NO: 2795489 - RNA, 19 nt, Artificial Sequence
  Description of Artificial Sequence: Synthetic oligonucleotide
ccauucugguuguaacucu

SEQ ID NO: 2795490 - RNA, 19 nt, Artificial Sequence
  Description of Artificial Sequence: Synthetic oligonucleotide
cgagggcuggcauggcccc

SEQ ID NO: 2795491 - RNA, 19 nt, Artificial Sequence
  Description of Artificial Sequence: Synthetic oligonucleotide
gcagggugccgauuacaua

SEQ ID NO: 2795492 - RNA, 19 nt, Artificial Sequence
  Description of Artificial Sequence: Synthetic oligonucleotide
ccgcuaccaggccauucug

SEQ ID NO: 2795493 - RNA, 19 nt, Artificial Sequence
  Description of Artificial Sequence: Synthetic oligonucleotide
ccgauccaugcgacaucgc

SEQ ID NO: 2795494 - RNA, 19 nt, Artificial Sequence
  Description of Artificial Sequence: Synthetic oligonucleotide
ggguuauauaagugaucuu

SEQ ID NO: 2795495 - RNA, 19 nt, Artificial Sequence
  Description of Artificial Sequence: Synthetic oligonucleotide
cggagcuucgcacacagau

SEQ ID NO: 2795496 - RNA, 19 nt, Artificial Sequence
  Description of Artificial Sequence: Synthetic oligonucleotide
gcgcggguacaccgcgucc

SEQ ID NO: 2795497 - RNA, 19 nt, Artificial Sequence
  Description of Artificial Sequence: Synthetic oligonucleotide
agcuugccaggcagaggaa

SEQ ID NO: 2795498 - RNA, 19 nt, Artificial Sequence
  Description of Artificial Sequence: Synthetic oligonucleotide
ggcauggccccggcgcgcc

SEQ ID NO: 2795499 - RNA, 19 nt, Artificial Sequence
  Description of Artificial Sequence: Synthetic oligonucleotide
gggccagcugaugcaggug

SEQ ID NO: 2795500 - RNA, 19 nt, Artificial Sequence
  Description of Artificial Sequence: Synthetic oligonucleotide
gggugcgcggguacaccgc

SEQ ID NO: 2795501 - RNA, 19 nt, Artificial Sequence
  Description of Artificial Sequence: Synthetic oligonucleotide
ccgaaugagccccgaucca

SEQ ID NO: 2795502 - RNA, 19 nt, Artificial Sequence
  Description of Artificial Sequence: Synthetic oligonucleotide
cuccgagggcuggcauggc

SEQ ID NO: 2795503 - RNA, 19 nt, Artificial Sequence
  Description of Artificial Sequence: Synthetic oligonucleotide
gccuugucaggcagaugca

SEQ ID NO: 2795504 - RNA, 19 nt, Artificial Sequence
  Description of Artificial Sequence: Synthetic oligonucleotide
ccugggugcgcggguacac

SEQ ID NO: 2795505 - RNA, 19 nt, Artificial Sequence
  Description of Artificial Sequence: Synthetic oligonucleotide
gucccuccgagggcuggca

SEQ ID NO: 2795506 - RNA, 19 nt, Artificial Sequence
  Description of Artificial Sequence: Synthetic oligonucleotide
ggacagccacaagcuugcc

SEQ ID NO: 2795507 - RNA, 19 nt, Artificial Sequence
  Description of Artificial Sequence: Synthetic oligonucleotide
gggaggggcggagcuucgc

SEQ ID NO: 2795508 - RNA, 19 nt, Artificial Sequence
  Description of Artificial Sequence: Synthetic oligonucleotide
cccgcuaccaggccauucu

SEQ ID NO: 2795509 - RNA, 19 nt, Artificial Sequence
  Description of Artificial Sequence: Synthetic oligonucleotide
ccccgauccaugcgacauc

SEQ ID NO: 2795510 - RNA, 19 nt, Artificial Sequence
  Description of Artificial Sequence: Synthetic oligonucleotide
gcugcugcacgugguccga

SEQ ID NO: 2795511 - RNA, 19 nt, Artificial Sequence
  Description of Artificial Sequence: Synthetic oligonucleotide
cagaugcaucugucugggu

SEQ ID NO: 2795512 - RNA, 19 nt, Artificial Sequence
  Description of Artificial Sequence: Synthetic oligonucleotide
gcauggccccggcgcgccg

SEQ ID NO: 2795513 - RNA, 19 nt, Artificial Sequence
  Description of Artificial Sequence: Synthetic oligonucleotide
cagagggcgauggccuugu

SEQ ID NO: 2795514 - RNA, 19 nt, Artificial Sequence
  Description of Artificial Sequence: Synthetic oligonucleotide
gcacacgguagaagcggaa

SEQ ID NO: 2795515 - RNA, 19 nt, Artificial Sequence
  Description of Artificial Sequence: Synthetic oligonucleotide
gcccugggugcgcggguac

SEQ ID NO: 2795516 - RNA, 19 nt, Artificial Sequence
  Description of Artificial Sequence: Synthetic oligonucleotide
gguccgaaugagccccgau

SEQ ID NO: 2795517 - RNA, 19 nt, Artificial Sequence
  Description of Artificial Sequence: Synthetic oligonucleotide
cccaaagaccgcucccgcu

SEQ ID NO: 2795518 - RNA, 19 nt, Artificial Sequence
  Description of Artificial Sequence: Synthetic oligonucleotide
gccccgauccaugcgacau

SEQ ID NO: 2795519 - RNA, 19 nt, Artificial Sequence
  Description of Artificial Sequence: Synthetic oligonucleotide
cccagaccggcuggccgcc

SEQ ID NO: 2795520 - RNA, 19 nt, Artificial Sequence
  Description of Artificial Sequence: Synthetic oligonucleotide
gggcgcccugggugcgcgg

SEQ ID NO: 2795521 - RNA, 19 nt, Artificial Sequence
  Description of Artificial Sequence: Synthetic oligonucleotide
ccuugucaggcagaugcau

SEQ ID NO: 2795522 - RNA, 19 nt, Artificial Sequence
  Description of Artificial Sequence: Synthetic oligonucleotide
cugcugcacgugguccgaa

SEQ ID NO: 2795523 - RNA, 19 nt, Artificial Sequence
  Description of Artificial Sequence: Synthetic oligonucleotide
cgcguccagcagucccucc

SEQ ID NO: 2795524 - RNA, 19 nt, Artificial Sequence
  Description of Artificial Sequence: Synthetic oligonucleotide
gcgccacuuugagcagggc

SEQ ID NO: 2795525 - RNA, 19 nt, Artificial Sequence
  Description of Artificial Sequence: Synthetic oligonucleotide
cgcucccgcuaccaggcca

SEQ ID NO: 2795526 - RNA, 19 nt, Artificial Sequence
  Description of Artificial Sequence: Synthetic oligonucleotide
cggguacaccgcguccagc

SEQ ID NO: 2795527 - RNA, 19 nt, Artificial Sequence
  Description of Artificial Sequence: Synthetic oligonucleotide
gggcggagcuucgcacaca

SEQ ID NO: 2795528 - RNA, 19 nt, Artificial Sequence
  Description of Artificial Sequence: Synthetic oligonucleotide
gcucccgcuaccaggccau

SEQ ID NO: 2795529 - RNA, 19 nt, Artificial Sequence
  Description of Artificial Sequence: Synthetic oligonucleotide
cgaaugagccccgauccau

SEQ ID NO: 2795530 - RNA, 19 nt, Artificial Sequence
  Description of Artificial Sequence: Synthetic oligonucleotide
cagaagcagggugccgauu

SEQ ID NO: 2795531 - RNA, 19 nt, Artificial Sequence
  Description of Artificial Sequence: Synthetic oligonucleotide
ccgcguccagcagucccuc

SEQ ID NO: 2795532 - RNA, 19 nt, Artificial Sequence
  Description of Artificial Sequence: Synthetic oligonucleotide
gugcgcggguacaccgcgu

SEQ ID NO: 2795533 - RNA, 19 nt, Artificial Sequence
  Description of Artificial Sequence: Synthetic oligonucleotide
gcggagcuucgcacacaga

SEQ ID NO: 2795534 - RNA, 19 nt, Artificial Sequence
  Description of Artificial Sequence: Synthetic oligonucleotide
ccgacaggggccagcugau

SEQ ID NO: 2795535 - RNA, 19 nt, Artificial Sequence
  Description of Artificial Sequence: Synthetic oligonucleotide
cugccacgauggaggcgau

SEQ ID NO: 2795536 - RNA, 19 nt, Artificial Sequence
  Description of Artificial Sequence: Synthetic oligonucleotide
cgaugagcagaagcagggu

SEQ ID NO: 2795537 - RNA, 19 nt, Artificial Sequence
  Description of Artificial Sequence: Synthetic oligonucleotide
cccugggugcgcggguaca

SEQ ID NO: 2795538 - RNA, 19 nt, Artificial Sequence
  Description of Artificial Sequence: Synthetic oligonucleotide
gcgcccugggugcgcgggu

SEQ ID NO: 2795539 - RNA, 19 nt, Artificial Sequence
  Description of Artificial Sequence: Synthetic oligonucleotide
ccaggccauucugguugua

SEQ ID NO: 2795540 - RNA, 19 nt, Artificial Sequence
  Description of Artificial Sequence: Synthetic oligonucleotide
cucccgcuaccaggccauu

SEQ ID NO: 2795541 - RNA, 19 nt, Artificial Sequence
  Description of Artificial Sequence: Synthetic oligonucleotide
gccccggcgcgccgccgcu

SEQ ID NO: 2795542 - RNA, 19 nt, Artificial Sequence
  Description of Artificial Sequence: Synthetic oligonucleotide
cgcccugggugcgcgggua

SEQ ID NO: 2795543 - RNA, 19 nt, Artificial Sequence
  Description of Artificial Sequence: Synthetic oligonucleotide
aauuguaugcagaagcugc

SEQ ID NO: 2795544 - RNA, 19 nt, Artificial Sequence
  Description of Artificial Sequence: Synthetic oligonucleotide
cauaauuguaugcagaagc

SEQ ID NO: 2795545 - RNA, 19 nt, Artificial Sequence
  Description of Artificial Sequence: Synthetic oligonucleotide
ugucauacagagaauuucg

SEQ ID NO: 2795546 - RNA, 19 nt, Artificial Sequence
  Description of Artificial Sequence: Synthetic oligonucleotide
auaggcaucauuguaauac

SEQ ID NO: 2795547 - RNA, 19 nt, Artificial Sequence
  Description of Artificial Sequence: Synthetic oligonucleotide
auaggugucugucauaggg

SEQ ID NO: 2795548 - RNA, 19 nt, Artificial Sequence
  Description of Artificial Sequence: Synthetic oligonucleotide
ugucccuuccauaauaggg

SEQ ID NO: 2795549 - RNA, 19 nt, Artificial Sequence
  Description of Artificial Sequence: Synthetic oligonucleotide
agcuucauaagaucggacc

SEQ ID NO: 2795550 - RNA, 19 nt, Artificial Sequence
  Description of Artificial Sequence: Synthetic oligonucleotide
uguauuccgacgcaguggg

SEQ ID NO: 2795551 - RNA, 19 nt, Artificial Sequence
  Description of Artificial Sequence: Synthetic oligonucleotide
aggaagaugagacaugguc

SEQ ID NO: 2795552 - RNA, 19 nt, Artificial Sequence
  Description of Artificial Sequence: Synthetic oligonucleotide
gagaauuucguguugcugc

SEQ ID NO: 2795553 - RNA, 19 nt, Artificial Sequence
  Description of Artificial Sequence: Synthetic oligonucleotide
uagcccaucgcauagggcg

SEQ ID NO: 2795554 - RNA, 19 nt, Artificial Sequence
  Description of Artificial Sequence: Synthetic oligonucleotide
agucgagugcuccauaggc

SEQ ID NO: 2795555 - RNA, 19 nt, Artificial Sequence
  Description of Artificial Sequence: Synthetic oligonucleotide
ucugucauagggaucaaca

SEQ ID NO: 2795556 - RNA, 19 nt, Artificial Sequence
  Description of Artificial Sequence: Synthetic oligonucleotide
agacaucucacucucuggc

SEQ ID NO: 2795557 - RNA, 19 nt, Artificial Sequence
  Description of Artificial Sequence: Synthetic oligonucleotide
ugcuccauaggcaucauug

SEQ ID NO: 2795558 - RNA, 19 nt, Artificial Sequence
  Description of Artificial Sequence: Synthetic oligonucleotide
uguaauacacggauucccc

SEQ ID NO: 2795559 - RNA, 19 nt, Artificial Sequence
  Description of Artificial Sequence: Synthetic oligonucleotide
auacuguucauuguacugc

SEQ ID NO: 2795560 - RNA, 19 nt, Artificial Sequence
  Description of Artificial Sequence: Synthetic oligonucleotide
ugagcucuggacuugagga

SEQ ID NO: 2795561 - RNA, 19 nt, Artificial Sequence
  Description of Artificial Sequence: Synthetic oligonucleotide
acagaaguggaguugaggu

SEQ ID NO: 2795562 - RNA, 19 nt, Artificial Sequence
  Description of Artificial Sequence: Synthetic oligonucleotide
ugaggaagaugagacaugg

SEQ ID NO: 2795563 - RNA, 19 nt, Artificial Sequence
  Description of Artificial Sequence: Synthetic oligonucleotide
aaccguaacccucuccaac

SEQ ID NO: 2795564 - RNA, 19 nt, Artificial Sequence
  Description of Artificial Sequence: Synthetic oligonucleotide
aucauuguaauacacggau

SEQ ID NO: 2795565 - RNA, 19 nt, Artificial Sequence
  Description of Artificial Sequence: Synthetic oligonucleotide
cauuguaauacacggauuc

SEQ ID NO: 2795566 - RNA, 19 nt, Artificial Sequence
  Description of Artificial Sequence: Synthetic oligonucleotide
uaagaucggacccuguagc

SEQ ID NO: 2795567 - RNA, 19 nt, Artificial Sequence
  Description of Artificial Sequence: Synthetic oligonucleotide
gaagaugagacauggucug

SEQ ID NO: 2795568 - RNA, 19 nt, Artificial Sequence
  Description of Artificial Sequence: Synthetic oligonucleotide
uagggaucaacagaagugg

SEQ ID NO: 2795569 - RNA, 19 nt, Artificial Sequence
  Description of Artificial Sequence: Synthetic oligonucleotide
acaucucacucucuggccc

SEQ ID NO: 2795570 - RNA, 19 nt, Artificial Sequence
  Description of Artificial Sequence: Synthetic oligonucleotide
uauaauagucgagugcucc

SEQ ID NO: 2795571 - RNA, 19 nt, Artificial Sequence
  Description of Artificial Sequence: Synthetic oligonucleotide
ucugcauaauuguaugcag

SEQ ID NO: 2795572 - RNA, 19 nt, Artificial Sequence
  Description of Artificial Sequence: Synthetic oligonucleotide
gcaucauuguaauacacgg

SEQ ID NO: 2795573 - RNA, 19 nt, Artificial Sequence
  Description of Artificial Sequence: Synthetic oligonucleotide
aagaucggacccuguagcg

SEQ ID NO: 2795574 - RNA, 19 nt, Artificial Sequence
  Description of Artificial Sequence: Synthetic oligonucleotide
aauuucguguugcugcuga

SEQ ID NO: 2795575 - RNA, 19 nt, Artificial Sequence
  Description of Artificial Sequence: Synthetic oligonucleotide
ugagacaucucacucucug

SEQ ID NO: 2795576 - RNA, 19 nt, Artificial Sequence
  Description of Artificial Sequence: Synthetic oligonucleotide
auuguaauacacggauucc

SEQ ID NO: 2795577 - RNA, 19 nt, Artificial Sequence
  Description of Artificial Sequence: Synthetic oligonucleotide
ucauacagagaauuucgug

SEQ ID NO: 2795578 - RNA, 19 nt, Artificial Sequence
  Description of Artificial Sequence: Synthetic oligonucleotide
aauuauccuaccuccaguu

SEQ ID NO: 2795579 - RNA, 19 nt, Artificial Sequence
  Description of Artificial Sequence: Synthetic oligonucleotide
uucguguugcugcugaagc

SEQ ID NO: 2795580 - RNA, 19 nt, Artificial Sequence
  Description of Artificial Sequence: Synthetic oligonucleotide
auaagaucggacccuguag

SEQ ID NO: 2795581 - RNA, 19 nt, Artificial Sequence
  Description of Artificial Sequence: Synthetic oligonucleotide
acagagaauuucguguugc

SEQ ID NO: 2795582 - RNA, 19 nt, Artificial Sequence
  Description of Artificial Sequence: Synthetic oligonucleotide
uguagcgcuuauaauaguc

SEQ ID NO: 2795583 - RNA, 19 nt, Artificial Sequence
  Description of Artificial Sequence: Synthetic oligonucleotide
aacagaaguggaguugagg

SEQ ID NO: 2795584 - RNA, 19 nt, Artificial Sequence
  Description of Artificial Sequence: Synthetic oligonucleotide
ugaagccugagacaucuca

SEQ ID NO: 2795585 - RNA, 19 nt, Artificial Sequence
  Description of Artificial Sequence: Synthetic oligonucleotide
uccauaggcaucauuguaa

SEQ ID NO: 2795586 - RNA, 19 nt, Artificial Sequence
  Description of Artificial Sequence: Synthetic oligonucleotide
uucauuguacugcucaguc

SEQ ID NO: 2795587 - RNA, 19 nt, Artificial Sequence
  Description of Artificial Sequence: Synthetic oligonucleotide
cuggacuugaggaagauga

SEQ ID NO: 2795588 - RNA, 19 nt, Artificial Sequence
  Description of Artificial Sequence: Synthetic oligonucleotide
ugcauaauuguaugcagaa

SEQ ID NO: 2795589 - RNA, 19 nt, Artificial Sequence
  Description of Artificial Sequence: Synthetic oligonucleotide
uguaugcagaagcugcagc

SEQ ID NO: 2795590 - RNA, 19 nt, Artificial Sequence
  Description of Artificial Sequence: Synthetic oligonucleotide
uuguaauacacggauuccc

SEQ ID NO: 2795591 - RNA, 19 nt, Artificial Sequence
  Description of Artificial Sequence: Synthetic oligonucleotide
cauacuguucauuguacug

SEQ ID NO: 2795592 - RNA, 19 nt, Artificial Sequence
  Description of Artificial Sequence: Synthetic oligonucleotide
augucauacagagaauuuc

SEQ ID NO: 2795593 - RNA, 19 nt, Artificial Sequence
  Description of Artificial Sequence: Synthetic oligonucleotide
gacuugaggaagaugagac

SEQ ID NO: 2795594 - RNA, 19 nt, Artificial Sequence
  Description of Artificial Sequence: Synthetic oligonucleotide
aguugaggugacuggguac

SEQ ID NO: 2795595 - RNA, 19 nt, Artificial Sequence
  Description of Artificial Sequence: Synthetic oligonucleotide
uacagcugagcucuggacu

SEQ ID NO: 2795596 - RNA, 19 nt, Artificial Sequence
  Description of Artificial Sequence: Synthetic oligonucleotide
aacccucuccaacugcagg

SEQ ID NO: 2795597 - RNA, 19 nt, Artificial Sequence
  Description of Artificial Sequence: Synthetic oligonucleotide
aauaggugucugucauagg

SEQ ID NO: 2795598 - RNA, 19 nt, Artificial Sequence
  Description of Artificial Sequence: Synthetic oligonucleotide
uuccccauagcccaucgca

SEQ ID NO: 2795599 - RNA, 19 nt, Artificial Sequence
  Description of Artificial Sequence: Synthetic oligonucleotide
uguucauuguacugcucag

SEQ ID NO: 2795600 - RNA, 19 nt, Artificial Sequence
  Description of Artificial Sequence: Synthetic oligonucleotide
uggcccauaaccguaaccc

SEQ ID NO: 2795601 - RNA, 19 nt, Artificial Sequence
  Description of Artificial Sequence: Synthetic oligonucleotide
auagucgagugcuccauag

SEQ ID NO: 2795602 - RNA, 19 nt, Artificial Sequence
  Description of Artificial Sequence: Synthetic oligonucleotide
auagggaucaacagaagug

SEQ ID NO: 2795603 - RNA, 19 nt, Artificial Sequence
  Description of Artificial Sequence: Synthetic oligonucleotide
ucaacagaaguggaguuga

SEQ ID NO: 2795604 - RNA, 19 nt, Artificial Sequence
  Description of Artificial Sequence: Synthetic oligonucleotide
ugagguggcagcugagccg

SEQ ID NO: 2795605 - RNA, 19 nt, Artificial Sequence
  Description of Artificial Sequence: Synthetic oligonucleotide
agggcgugcgcacugcucc

SEQ ID NO: 2795606 - RNA, 19 nt, Artificial Sequence
  Description of Artificial Sequence: Synthetic oligonucleotide
uuauccuaccuccaguuuu

SEQ ID NO: 2795607 - RNA, 19 nt, Artificial Sequence
  Description of Artificial Sequence: Synthetic oligonucleotide
caauaggugucugucauag

SEQ ID NO: 2795608 - RNA, 19 nt, Artificial Sequence
  Description of Artificial Sequence: Synthetic oligonucleotide
ugcaauaggugucugucau

SEQ ID NO: 2795609 - RNA, 19 nt, Artificial Sequence
  Description of Artificial Sequence: Synthetic oligonucleotide
aagaugagacauggucugc

SEQ ID NO: 2795610 - RNA, 19 nt, Artificial Sequence
  Description of Artificial Sequence: Synthetic oligonucleotide
ugagacauggucugcucug

SEQ ID NO: 2795611 - RNA, 19 nt, Artificial Sequence
  Description of Artificial Sequence: Synthetic oligonucleotide
uaauuguaugcagaagcug

SEQ ID NO: 2795612 - RNA, 19 nt, Artificial Sequence
  Description of Artificial Sequence: Synthetic oligonucleotide
agcacagguguauuccgac

SEQ ID NO: 2795613 - RNA, 19 nt, Artificial Sequence
  Description of Artificial Sequence: Synthetic oligonucleotide
agaaguggaguugagguga

SEQ ID NO: 2795614 - RNA, 19 nt, Artificial Sequence
  Description of Artificial Sequence: Synthetic oligonucleotide
guagcgcuuauaauagucg

SEQ ID NO: 2795615 - RNA, 19 nt, Artificial Sequence
  Description of Artificial Sequence: Synthetic oligonucleotide
cacagcuucauaagaucgg

SEQ ID NO: 2795616 - RNA, 19 nt, Artificial Sequence
  Description of Artificial Sequence: Synthetic oligonucleotide
uggaguugaggugacuggg

SEQ ID NO: 2795617 - RNA, 19 nt, Artificial Sequence
  Description of Artificial Sequence: Synthetic oligonucleotide
cugucauagggaucaacag

SEQ ID NO: 2795618 - RNA, 19 nt, Artificial Sequence
  Description of Artificial Sequence: Synthetic oligonucleotide
aagccugagacaucucacu

SEQ ID NO: 2795619 - RNA, 19 nt, Artificial Sequence
  Description of Artificial Sequence: Synthetic oligonucleotide
gucccuuccauaauagggg

SEQ ID NO: 2795620 - RNA, 19 nt, Artificial Sequence
  Description of Artificial Sequence: Synthetic oligonucleotide
cauacagagaauuucgugu

SEQ ID NO: 2795621 - RNA, 19 nt, Artificial Sequence
  Description of Artificial Sequence: Synthetic oligonucleotide
acuggguacagcugagcuc

SEQ ID NO: 2795622 - RNA, 19 nt, Artificial Sequence
  Description of Artificial Sequence: Synthetic oligonucleotide
ucgguccacauacugcucc

SEQ ID NO: 2795623 - RNA, 19 nt, Artificial Sequence
  Description of Artificial Sequence: Synthetic oligonucleotide
cacagguguauuccgacgc

SEQ ID NO: 2795624 - RNA, 19 nt, Artificial Sequence
  Description of Artificial Sequence: Synthetic oligonucleotide
auaauuguaugcagaagcu

SEQ ID NO: 2795625 - RNA, 19 nt, Artificial Sequence
  Description of Artificial Sequence: Synthetic oligonucleotide
acggauuccccauagccca

SEQ ID NO: 2795626 - RNA, 19 nt, Artificial Sequence
  Description of Artificial Sequence: Synthetic oligonucleotide
cuuauaauagucgagugcu

SEQ ID NO: 2795627 - RNA, 19 nt, Artificial Sequence
  Description of Artificial Sequence: Synthetic oligonucleotide
auaauagucgagugcucca

SEQ ID NO: 2795628 - RNA, 19 nt, Artificial Sequence
  Description of Artificial Sequence: Synthetic oligonucleotide
ucugcaauaggugucuguc

SEQ ID NO: 2795629 - RNA, 19 nt, Artificial Sequence
  Description of Artificial Sequence: Synthetic oligonucleotide
uacagagaauuucguguug

SEQ ID NO: 2795630 - RNA, 19 nt, Artificial Sequence
  Description of Artificial Sequence: Synthetic oligonucleotide
aaggcugaguaccgugcuc

SEQ ID NO: 2795631 - RNA, 19 nt, Artificial Sequence
  Description of Artificial Sequence: Synthetic oligonucleotide
cacggauuccccauagccc

SEQ ID NO: 2795632 - RNA, 19 nt, Artificial Sequence
  Description of Artificial Sequence: Synthetic oligonucleotide
cauagcccaucgcauaggg

SEQ ID NO: 2795633 - RNA, 19 nt, Artificial Sequence
  Description of Artificial Sequence: Synthetic oligonucleotide
gcuuauaauagucgagugc

SEQ ID NO: 2795634 - RNA, 19 nt, Artificial Sequence
  Description of Artificial Sequence: Synthetic oligonucleotide
uagucgagugcuccauagg

SEQ ID NO: 2795635 - RNA, 19 nt, Artificial Sequence
  Description of Artificial Sequence: Synthetic oligonucleotide
uagcgcuuauaauagucga

SEQ ID NO: 2795636 - RNA, 19 nt, Artificial Sequence
  Description of Artificial Sequence: Synthetic oligonucleotide
ucauagggaucaacagaag

SEQ ID NO: 2795637 - RNA, 19 nt, Artificial Sequence
  Description of Artificial Sequence: Synthetic oligonucleotide
agccugagacaucucacuc

SEQ ID NO: 2795638 - RNA, 19 nt, Artificial Sequence
  Description of Artificial Sequence: Synthetic oligonucleotide
uaggcaucauuguaauaca

SEQ ID NO: 2795639 - RNA, 19 nt, Artificial Sequence
  Description of Artificial Sequence: Synthetic oligonucleotide
uaggugucugucauaggga

SEQ ID NO: 2795640 - RNA, 19 nt, Artificial Sequence
  Description of Artificial Sequence: Synthetic oligonucleotide
uacuguucauuguacugcu

SEQ ID NO: 2795641 - RNA, 19 nt, Artificial Sequence
  Description of Artificial Sequence: Synthetic oligonucleotide
uggacuugaggaagaugag

SEQ ID NO: 2795642 - RNA, 19 nt, Artificial Sequence
  Description of Artificial Sequence: Synthetic oligonucleotide
gacaucucacucucuggcc

SEQ ID NO: 2795643 - RNA, 19 nt, Artificial Sequence
  Description of Artificial Sequence: Synthetic oligonucleotide
agaauuucguguugcugcu

SEQ ID NO: 2795644 - RNA, 19 nt, Artificial Sequence
  Description of Artificial Sequence: Synthetic oligonucleotide
uauuccgacgcagugggcu

SEQ ID NO: 2795645 - RNA, 19 nt, Artificial Sequence
  Description of Artificial Sequence: Synthetic oligonucleotide
auacagagaauuucguguu

SEQ ID NO: 2795646 - RNA, 19 nt, Artificial Sequence
  Description of Artificial Sequence: Synthetic oligonucleotide
uaauacacggauuccccau

SEQ ID NO: 2795647 - RNA, 19 nt, Artificial Sequence
  Description of Artificial Sequence: Synthetic oligonucleotide
ugcucgguccacauacugc

SEQ ID NO: 2795648 - RNA, 19 nt, Artificial Sequence
  Description of Artificial Sequence: Synthetic oligonucleotide
gcuucauaagaucggaccc

SEQ ID NO: 2795649 - RNA, 19 nt, Artificial Sequence
  Description of Artificial Sequence: Synthetic oligonucleotide
cauuguacugcucagucaa

SEQ ID NO: 2795650 - RNA, 19 nt, Artificial Sequence
  Description of Artificial Sequence: Synthetic oligonucleotide
aguggaguugaggugacug

SEQ ID NO: 2795651 - RNA, 19 nt, Artificial Sequence
  Description of Artificial Sequence: Synthetic oligonucleotide
gauuccccauagcccaucg

SEQ ID NO: 2795652 - RNA, 19 nt, Artificial Sequence
  Description of Artificial Sequence: Synthetic oligonucleotide
uuauaauagucgagugcuc

SEQ ID NO: 2795653 - RNA, 19 nt, Artificial Sequence
  Description of Artificial Sequence: Synthetic oligonucleotide
auacacggauuccccauag

SEQ ID NO: 2795654 - RNA, 19 nt, Artificial Sequence
  Description of Artificial Sequence: Synthetic oligonucleotide
agaucggacccuguagcgc

SEQ ID NO: 2795655 - RNA, 19 nt, Artificial Sequence
  Description of Artificial Sequence: Synthetic oligonucleotide
guggaguugaggugacugg

SEQ ID NO: 2795656 - RNA, 19 nt, Artificial Sequence
  Description of Artificial Sequence: Synthetic oligonucleotide
uguacugcucagucaaguc

SEQ ID NO: 2795657 - RNA, 19 nt, Artificial Sequence
  Description of Artificial Sequence: Synthetic oligonucleotide
uucauaagaucggacccug

SEQ ID NO: 2795658 - RNA, 19 nt, Artificial Sequence
  Description of Artificial Sequence: Synthetic oligonucleotide
gucauagggaucaacagaa

SEQ ID NO: 2795659 - RNA, 19 nt, Artificial Sequence
  Description of Artificial Sequence: Synthetic oligonucleotide
aauacacggauuccccaua

SEQ ID NO: 2795660 - RNA, 19 nt, Artificial Sequence
  Description of Artificial Sequence: Synthetic oligonucleotide
accguaacccucuccaacu

SEQ ID NO: 2795661 - RNA, 19 nt, Artificial Sequence
  Description of Artificial Sequence: Synthetic oligonucleotide
gagguggcagcugagccgg

SEQ ID NO: 2795662 - RNA, 19 nt, Artificial Sequence
  Description of Artificial Sequence: Synthetic oligonucleotide
ggcaucauuguaauacacg

SEQ ID NO: 2795663 - RNA, 19 nt, Artificial Sequence
  Description of Artificial Sequence: Synthetic oligonucleotide
uuucguguugcugcugaag

SEQ ID NO: 2795664 - RNA, 19 nt, Artificial Sequence
  Description of Artificial Sequence: Synthetic oligonucleotide
ugaguaccgugcucggucc

SEQ ID NO: 2795665 - RNA, 19 nt, Artificial Sequence
  Description of Artificial Sequence: Synthetic oligonucleotide
ucgagugcuccauaggcau

SEQ ID NO: 2795666 - RNA, 19 nt, Artificial Sequence
  Description of Artificial Sequence: Synthetic oligonucleotide
agagaauuucguguugcug

SEQ ID NO: 2795667 - RNA, 19 nt, Artificial Sequence
  Description of Artificial Sequence: Synthetic oligonucleotide
uaugcagaagcugcagcug

SEQ ID NO: 2795668 - RNA, 19 nt, Artificial Sequence
  Description of Artificial Sequence: Synthetic oligonucleotide
cugagcucuggacuugagg

SEQ ID NO: 2795669 - RNA, 19 nt, Artificial Sequence
  Description of Artificial Sequence: Synthetic oligonucleotide
ccuguagcgcuuauaauag

SEQ ID NO: 2795670 - RNA, 19 nt, Artificial Sequence
  Description of Artificial Sequence: Synthetic oligonucleotide
cuguucauuguacugcuca

SEQ ID NO: 2795671 - RNA, 19 nt, Artificial Sequence
  Description of Artificial Sequence: Synthetic oligonucleotide
aucaacagaaguggaguug

SEQ ID NO: 2795672 - RNA, 19 nt, Artificial Sequence
  Description of Artificial Sequence: Synthetic oligonucleotide
gacccuguagcgcuuauaa

SEQ ID NO: 2795673 - RNA, 19 nt, Artificial Sequence
  Description of Artificial Sequence: Synthetic oligonucleotide
ucguguugcugcugaagcc

SEQ ID NO: 2795674 - RNA, 19 nt, Artificial Sequence
  Description of Artificial Sequence: Synthetic oligonucleotide
gugucugucauagggauca

SEQ ID NO: 2795675 - RNA, 19 nt, Artificial Sequence
  Description of Artificial Sequence: Synthetic oligonucleotide
acucucuggcccauaaccg

SEQ ID NO: 2795676 - RNA, 19 nt, Artificial Sequence
  Description of Artificial Sequence: Synthetic oligonucleotide
acgcagugggcuccugucc

SEQ ID NO: 2795677 - RNA, 19 nt, Artificial Sequence
  Description of Artificial Sequence: Synthetic oligonucleotide
guguauuccgacgcagugg

SEQ ID NO: 2795678 - RNA, 19 nt, Artificial Sequence
  Description of Artificial Sequence: Synthetic oligonucleotide
ccacagcuucauaagaucg

SEQ ID NO: 2795679 - RNA, 19 nt, Artificial Sequence
  Description of Artificial Sequence: Synthetic oligonucleotide
ugagccggaguucugcaau

SEQ ID NO: 2795680 - RNA, 19 nt, Artificial Sequence
  Description of Artificial Sequence: Synthetic oligonucleotide
uuguaugcagaagcugcag

SEQ ID NO: 2795681 - RNA, 19 nt, Artificial Sequence
  Description of Artificial Sequence: Synthetic oligonucleotide
augagacauggucugcucu

SEQ ID NO: 2795682 - RNA, 19 nt, Artificial Sequence
  Description of Artificial Sequence: Synthetic oligonucleotide
gcaauuauccuaccuccag

SEQ ID NO: 2795683 - RNA, 19 nt, Artificial Sequence
  Description of Artificial Sequence: Synthetic oligonucleotide
cagaaguggaguugaggug

SEQ ID NO: 2795684 - RNA, 19 nt, Artificial Sequence
  Description of Artificial Sequence: Synthetic oligonucleotide
cauaaccguaacccucucc

SEQ ID NO: 2795685 - RNA, 19 nt, Artificial Sequence
  Description of Artificial Sequence: Synthetic oligonucleotide
auuccccauagcccaucgc

SEQ ID NO: 2795686 - RNA, 19 nt, Artificial Sequence
  Description of Artificial Sequence: Synthetic oligonucleotide
aauagucgagugcuccaua

SEQ ID NO: 2795687 - RNA, 19 nt, Artificial Sequence
  Description of Artificial Sequence: Synthetic oligonucleotide
guaauacacggauucccca

SEQ ID NO: 2795688 - RNA, 19 nt, Artificial Sequence
  Description of Artificial Sequence: Synthetic oligonucleotide
cucuccaacugcagggagc

SEQ ID NO: 2795689 - RNA, 19 nt, Artificial Sequence
  Description of Artificial Sequence: Synthetic oligonucleotide
auuccgacgcagugggcuc

SEQ ID NO: 2795690 - RNA, 19 nt, Artificial Sequence
  Description of Artificial Sequence: Synthetic oligonucleotide
agggagcacagguguauuc

SEQ ID NO: 2795691 - RNA, 19 nt, Artificial Sequence
  Description of Artificial Sequence: Synthetic oligonucleotide
cugaguaccgugcucgguc

SEQ ID NO: 2795692 - RNA, 19 nt, Artificial Sequence
  Description of Artificial Sequence: Synthetic oligonucleotide
agcugagccggaguucugc

SEQ ID NO: 2795693 - RNA, 19 nt, Artificial Sequence
  Description of Artificial Sequence: Synthetic oligonucleotide
uaacccucuccaacugcag

SEQ ID NO: 2795694 - RNA, 19 nt, Artificial Sequence
  Description of Artificial Sequence: Synthetic oligonucleotide
agcucuggacuugaggaag

SEQ ID NO: 2795695 - RNA, 19 nt, Artificial Sequence
  Description of Artificial Sequence: Synthetic oligonucleotide
uuguacugcucagucaagu

SEQ ID NO: 2795696 - RNA, 19 nt, Artificial Sequence
  Description of Artificial Sequence: Synthetic oligonucleotide
gaugagacauggucugcuc

SEQ ID NO: 2795697 - RNA, 19 nt, Artificial Sequence
  Description of Artificial Sequence: Synthetic oligonucleotide
aggugucugucauagggau

SEQ ID NO: 2795698 - RNA, 19 nt, Artificial Sequence
  Description of Artificial Sequence: Synthetic oligonucleotide
cugucccuuccauaauagg

SEQ ID NO: 2795699 - RNA, 19 nt, Artificial Sequence
  Description of Artificial Sequence: Synthetic oligonucleotide
aagagguggcagcagccau

SEQ ID NO: 2795700 - RNA, 19 nt, Artificial Sequence
  Description of Artificial Sequence: Synthetic oligonucleotide
gaagccugagacaucucac

SEQ ID NO: 2795701 - RNA, 19 nt, Artificial Sequence
  Description of Artificial Sequence: Synthetic oligonucleotide
aggcaucauuguaauacac

SEQ ID NO: 2795702 - RNA, 19 nt, Artificial Sequence
  Description of Artificial Sequence: Synthetic oligonucleotide
cugcauaauuguaugcaga

SEQ ID NO: 2795703 - RNA, 19 nt, Artificial Sequence
  Description of Artificial Sequence: Synthetic oligonucleotide
uucugcaauaggugucugu

SEQ ID NO: 2795704 - RNA, 19 nt, Artificial Sequence
  Description of Artificial Sequence: Synthetic oligonucleotide
caucauuguaauacacgga

SEQ ID NO: 2795705 - RNA, 19 nt, Artificial Sequence
  Description of Artificial Sequence: Synthetic oligonucleotide
uccugucccuuccauaaua

SEQ ID NO: 2795706 - RNA, 19 nt, Artificial Sequence
  Description of Artificial Sequence: Synthetic oligonucleotide
uacacggauuccccauagc

SEQ ID NO: 2795707 - RNA, 19 nt, Artificial Sequence
  Description of Artificial Sequence: Synthetic oligonucleotide
acagcuucauaagaucgga

SEQ ID NO: 2795708 - RNA, 19 nt, Artificial Sequence
  Description of Artificial Sequence: Synthetic oligonucleotide
ggagcacagguguauuccg

SEQ ID NO: 2795709 - RNA, 19 nt, Artificial Sequence
  Description of Artificial Sequence: Synthetic oligonucleotide
gaggugacuggguacagcu

SEQ ID NO: 2795710 - RNA, 19 nt, Artificial Sequence
  Description of Artificial Sequence: Synthetic oligonucleotide
gguguauuccgacgcagug

SEQ ID NO: 2795711 - RNA, 19 nt, Artificial Sequence
  Description of Artificial Sequence: Synthetic oligonucleotide
agcgcuuauaauagucgag

SEQ ID NO: 2795712 - RNA, 19 nt, Artificial Sequence
  Description of Artificial Sequence: Synthetic oligonucleotide
auuguaugcagaagcugca

SEQ ID NO: 2795713 - RNA, 19 nt, Artificial Sequence
  Description of Artificial Sequence: Synthetic oligonucleotide
agaugagacauggucugcu

SEQ ID NO: 2795714 - RNA, 19 nt, Artificial Sequence
  Description of Artificial Sequence: Synthetic oligonucleotide
ucuggacuugaggaagaug

SEQ ID NO: 2795715 - RNA, 19 nt, Artificial Sequence
  Description of Artificial Sequence: Synthetic oligonucleotide
guaugcagaagcugcagcu

SEQ ID NO: 2795716 - RNA, 19 nt, Artificial Sequence
  Description of Artificial Sequence: Synthetic oligonucleotide
uggucugcucugcauaauu

SEQ ID NO: 2795717 - RNA, 19 nt, Artificial Sequence
  Description of Artificial Sequence: Synthetic oligonucleotide
ggugacuggguacagcuga

SEQ ID NO: 2795718 - RNA, 19 nt, Artificial Sequence
  Description of Artificial Sequence: Synthetic oligonucleotide
guugaggugacuggguaca

SEQ ID NO: 2795719 - RNA, 19 nt, Artificial Sequence
  Description of Artificial Sequence: Synthetic oligonucleotide
acauggucugcucugcaua

SEQ ID NO: 2795720 - RNA, 19 nt, Artificial Sequence
  Description of Artificial Sequence: Synthetic oligonucleotide
ucauaagaucggacccugu

SEQ ID NO: 2795721 - RNA, 19 nt, Artificial Sequence
  Description of Artificial Sequence: Synthetic oligonucleotide
auagcccaucgcauagggc

SEQ ID NO: 2795722 - RNA, 19 nt, Artificial Sequence
  Description of Artificial Sequence: Synthetic oligonucleotide
auuauccuaccuccaguuu

SEQ ID NO: 2795723 - RNA, 19 nt, Artificial Sequence
  Description of Artificial Sequence: Synthetic oligonucleotide
uaauagucgagugcuccau

SEQ ID NO: 2795724 - RNA, 19 nt, Artificial Sequence
  Description of Artificial Sequence: Synthetic oligonucleotide
ucucuggcccauaaccgua

SEQ ID NO: 2795725 - RNA, 19 nt, Artificial Sequence
  Description of Artificial Sequence: Synthetic oligonucleotide
acagguguauuccgacgca

SEQ ID NO: 2795726 - RNA, 19 nt, Artificial Sequence
  Description of Artificial Sequence: Synthetic oligonucleotide
cauagggaucaacagaagu

SEQ ID NO: 2795727 - RNA, 19 nt, Artificial Sequence
  Description of Artificial Sequence: Synthetic oligonucleotide
aucgcauagggcgugcgca

SEQ ID NO: 2795728 - RNA, 19 nt, Artificial Sequence
  Description of Artificial Sequence: Synthetic oligonucleotide
uguugcugcugaagccuga

SEQ ID NO: 2795729 - RNA, 19 nt, Artificial Sequence
  Description of Artificial Sequence: Synthetic oligonucleotide
guacagcugagcucuggac

SEQ ID NO: 2795730 - RNA, 19 nt, Artificial Sequence
  Description of Artificial Sequence: Synthetic oligonucleotide
gagacauggucugcucugc

SEQ ID NO: 2795731 - RNA, 19 nt, Artificial Sequence
  Description of Artificial Sequence: Synthetic oligonucleotide
gagugcuccauaggcauca

SEQ ID NO: 2795732 - RNA, 19 nt, Artificial Sequence
  Description of Artificial Sequence: Synthetic oligonucleotide
aguaccgugcucgguccac

SEQ ID NO: 2795733 - RNA, 19 nt, Artificial Sequence
  Description of Artificial Sequence: Synthetic oligonucleotide
cuggcccauaaccguaacc

SEQ ID NO: 2795734 - RNA, 19 nt, Artificial Sequence
  Description of Artificial Sequence: Synthetic oligonucleotide
gacgcagugggcuccuguc

SEQ ID NO: 2795735 - RNA, 19 nt, Artificial Sequence
  Description of Artificial Sequence: Synthetic oligonucleotide
uccccauagcccaucgcau

SEQ ID NO: 2795736 - RNA, 19 nt, Artificial Sequence
  Description of Artificial Sequence: Synthetic oligonucleotide
gccauggcugcugaggugg

SEQ ID NO: 2795737 - RNA, 19 nt, Artificial Sequence
  Description of Artificial Sequence: Synthetic oligonucleotide
ugaggugacuggguacagc

SEQ ID NO: 2795738 - RNA, 19 nt, Artificial Sequence
  Description of Artificial Sequence: Synthetic oligonucleotide
gacuggguacagcugagcu

SEQ ID NO: 2795739 - RNA, 19 nt, Artificial Sequence
  Description of Artificial Sequence: Synthetic oligonucleotide
cauaagaucggacccugua

SEQ ID NO: 2795740 - RNA, 19 nt, Artificial Sequence
  Description of Artificial Sequence: Synthetic oligonucleotide
gggaucaacagaaguggag

SEQ ID NO: 2795741 - RNA, 19 nt, Artificial Sequence
  Description of Artificial Sequence: Synthetic oligonucleotide
gaucggacccuguagcgcu

SEQ ID NO: 2795742 - RNA, 19 nt, Artificial Sequence
  Description of Artificial Sequence: Synthetic oligonucleotide
cagcuucauaagaucggac

SEQ ID NO: 2795743 - RNA, 19 nt, Artificial Sequence
  Description of Artificial Sequence: Synthetic oligonucleotide
guaacccucuccaacugca

SEQ ID NO: 2795744 - RNA, 19 nt, Artificial Sequence
  Description of Artificial Sequence: Synthetic oligonucleotide
cgggccaugucauacagag

SEQ ID NO: 2795745 - RNA, 19 nt, Artificial Sequence
  Description of Artificial Sequence: Synthetic oligonucleotide
caacagaaguggaguugag

SEQ ID NO: 2795746 - RNA, 19 nt, Artificial Sequence
  Description of Artificial Sequence: Synthetic oligonucleotide
uaaccguaacccucuccaa

SEQ ID NO: 2795747 - RNA, 19 nt, Artificial Sequence
  Description of Artificial Sequence: Synthetic oligonucleotide
gaguugaggugacugggua

SEQ ID NO: 2795748 - RNA, 19 nt, Artificial Sequence
  Description of Artificial Sequence: Synthetic oligonucleotide
gaagagguggcagcagcca

SEQ ID NO: 2795749 - RNA, 19 nt, Artificial Sequence
  Description of Artificial Sequence: Synthetic oligonucleotide
caucgcauagggcgugcgc

SEQ ID NO: 2795750 - RNA, 19 nt, Artificial Sequence
  Description of Artificial Sequence: Synthetic oligonucleotide
gcacagguguauuccgacg

SEQ ID NO: 2795751 - RNA, 19 nt, Artificial Sequence
  Description of Artificial Sequence: Synthetic oligonucleotide
gcauaauuguaugcagaag

SEQ ID NO: 2795752 - RNA, 19 nt, Artificial Sequence
  Description of Artificial Sequence: Synthetic oligonucleotide
ugcugagguggcagcugag

SEQ ID NO: 2795753 - RNA, 19 nt, Artificial Sequence
  Description of Artificial Sequence: Synthetic oligonucleotide
guugcugcugaagccugag

SEQ ID NO: 2795754 - RNA, 19 nt, Artificial Sequence
  Description of Artificial Sequence: Synthetic oligonucleotide
ggaguucugcaauaggugu

SEQ ID NO: 2795755 - RNA, 19 nt, Artificial Sequence
  Description of Artificial Sequence: Synthetic oligonucleotide
gugcucgguccacauacug

SEQ ID NO: 2795756 - RNA, 19 nt, Artificial Sequence
  Description of Artificial Sequence: Synthetic oligonucleotide
gaauuucguguugcugcug

SEQ ID NO: 2795757 - RNA, 19 nt, Artificial Sequence
  Description of Artificial Sequence: Synthetic oligonucleotide
gaucaacagaaguggaguu

SEQ ID NO: 2795758 - RNA, 19 nt, Artificial Sequence
  Description of Artificial Sequence: Synthetic oligonucleotide
agacauggucugcucugca

SEQ ID NO: 2795759 - RNA, 19 nt, Artificial Sequence
  Description of Artificial Sequence: Synthetic oligonucleotide
agugggcuccugucccuuc

SEQ ID NO: 2795760 - RNA, 19 nt, Artificial Sequence
  Description of Artificial Sequence: Synthetic oligonucleotide
ucuggcccauaaccguaac

SEQ ID NO: 2795761 - RNA, 19 nt, Artificial Sequence
  Description of Artificial Sequence: Synthetic oligonucleotide
cagguguauuccgacgcag

SEQ ID NO: 2795762 - RNA, 19 nt, Artificial Sequence
  Description of Artificial Sequence: Synthetic oligonucleotide
ggaagaugagacauggucu

SEQ ID NO: 2795763 - RNA, 19 nt, Artificial Sequence
  Description of Artificial Sequence: Synthetic oligonucleotide
ugacuggguacagcugagc

SEQ ID NO: 2795764 - RNA, 19 nt, Artificial Sequence
  Description of Artificial Sequence: Synthetic oligonucleotide
uugaggugacuggguacag

SEQ ID NO: 2795765 - RNA, 19 nt, Artificial Sequence
  Description of Artificial Sequence: Synthetic oligonucleotide
ucgcauagggcgugcgcac

SEQ ID NO: 2795766 - RNA, 19 nt, Artificial Sequence
  Description of Artificial Sequence: Synthetic oligonucleotide
acuguucauuguacugcuc

SEQ ID NO: 2795767 - RNA, 19 nt, Artificial Sequence
  Description of Artificial Sequence: Synthetic oligonucleotide
ccugucccuuccauaauag

SEQ ID NO: 2795768 - RNA, 19 nt, Artificial Sequence
  Description of Artificial Sequence: Synthetic oligonucleotide
gggagcacagguguauucc

SEQ ID NO: 2795769 - RNA, 19 nt, Artificial Sequence
  Description of Artificial Sequence: Synthetic oligonucleotide
ccugagacaucucacucuc

SEQ ID NO: 2795770 - RNA, 19 nt, Artificial Sequence
  Description of Artificial Sequence: Synthetic oligonucleotide
cauggucugcucugcauaa

SEQ ID NO: 2795771 - RNA, 19 nt, Artificial Sequence
  Description of Artificial Sequence: Synthetic oligonucleotide
cugcaauaggugucuguca

SEQ ID NO: 2795772 - RNA, 19 nt, Artificial Sequence
  Description of Artificial Sequence: Synthetic oligonucleotide
uggcagcugagccggaguu

SEQ ID NO: 2795773 - RNA, 19 nt, Artificial Sequence
  Description of Artificial Sequence: Synthetic oligonucleotide
cuggguacagcugagcucu

SEQ ID NO: 2795774 - RNA, 19 nt, Artificial Sequence
  Description of Artificial Sequence: Synthetic oligonucleotide
gucugcucugcauaauugu

SEQ ID NO: 2795775 - RNA, 19 nt, Artificial Sequence
  Description of Artificial Sequence: Synthetic oligonucleotide
gaaguggaguugaggugac

SEQ ID NO: 2795776 - RNA, 19 nt, Artificial Sequence
  Description of Artificial Sequence: Synthetic oligonucleotide
auuucguguugcugcugaa

SEQ ID NO: 2795777 - RNA, 19 nt, Artificial Sequence
  Description of Artificial Sequence: Synthetic oligonucleotide
gguggcagcagccauggcu

SEQ ID NO: 2795778 - RNA, 19 nt, Artificial Sequence
  Description of Artificial Sequence: Synthetic oligonucleotide
caauuauccuaccuccagu

SEQ ID NO: 2795779 - RNA, 19 nt, Artificial Sequence
  Description of Artificial Sequence: Synthetic oligonucleotide
gccgccacagcuucauaag

SEQ ID NO: 2795780 - RNA, 19 nt, Artificial Sequence
  Description of Artificial Sequence: Synthetic oligonucleotide
gccacagcuucauaagauc

SEQ ID NO: 2795781 - RNA, 19 nt, Artificial Sequence
  Description of Artificial Sequence: Synthetic oligonucleotide
gguacagcugagcucugga

SEQ ID NO: 2795782 - RNA, 19 nt, Artificial Sequence
  Description of Artificial Sequence: Synthetic oligonucleotide
cccuguagcgcuuauaaua

SEQ ID NO: 2795783 - RNA, 19 nt, Artificial Sequence
  Description of Artificial Sequence: Synthetic oligonucleotide
agccauggcugcugaggug

SEQ ID NO: 2795784 - RNA, 19 nt, Artificial Sequence
  Description of Artificial Sequence: Synthetic oligonucleotide
ccgugcucgguccacauac

SEQ ID NO: 2795785 - RNA, 19 nt, Artificial Sequence
  Description of Artificial Sequence: Synthetic oligonucleotide
ugcagggagcacaggugua

SEQ ID NO: 2795786 - RNA, 19 nt, Artificial Sequence
  Description of Artificial Sequence: Synthetic oligonucleotide
cuccauaggcaucauugua

SEQ ID NO: 2795787 - RNA, 19 nt, Artificial Sequence
  Description of Artificial Sequence: Synthetic oligonucleotide
auagggcgugcgcacugcu

SEQ ID NO: 2795788 - RNA, 19 nt, Artificial Sequence
  Description of Artificial Sequence: Synthetic oligonucleotide
ggaucaacagaaguggagu

SEQ ID NO: 2795789 - RNA, 19 nt, Artificial Sequence
  Description of Artificial Sequence: Synthetic oligonucleotide
agccggaguucugcaauag

SEQ ID NO: 2795790 - RNA, 19 nt, Artificial Sequence
  Description of Artificial Sequence: Synthetic oligonucleotide
gucgagugcuccauaggca

SEQ ID NO: 2795791 - RNA, 19 nt, Artificial Sequence
  Description of Artificial Sequence: Synthetic oligonucleotide
gcuccugucccuuccauaa

SEQ ID NO: 2795792 - RNA, 19 nt, Artificial Sequence
  Description of Artificial Sequence: Synthetic oligonucleotide
agggaucaacagaagugga

SEQ ID NO: 2795793 - RNA, 19 nt, Artificial Sequence
  Description of Artificial Sequence: Synthetic oligonucleotide
gugacuggguacagcugag

SEQ ID NO: 2795794 - RNA, 19 nt, Artificial Sequence
  Description of Artificial Sequence: Synthetic oligonucleotide
caucucacucucuggccca

SEQ ID NO: 2795795 - RNA, 19 nt, Artificial Sequence
  Description of Artificial Sequence: Synthetic oligonucleotide
gugggcuccugucccuucc

SEQ ID NO: 2795796 - RNA, 19 nt, Artificial Sequence
  Description of Artificial Sequence: Synthetic oligonucleotide
cauagggcgugcgcacugc

SEQ ID NO: 2795797 - RNA, 19 nt, Artificial Sequence
  Description of Artificial Sequence: Synthetic oligonucleotide
gccggaguucugcaauagg

SEQ ID NO: 2795798 - RNA, 19 nt, Artificial Sequence
  Description of Artificial Sequence: Synthetic oligonucleotide
cccauagcccaucgcauag

SEQ ID NO: 2795799 - RNA, 19 nt, Artificial Sequence
  Description of Artificial Sequence: Synthetic oligonucleotide
acccuguagcgcuuauaau

SEQ ID NO: 2795800 - RNA, 19 nt, Artificial Sequence
  Description of Artificial Sequence: Synthetic oligonucleotide
cacauacugcucccgcuca

SEQ ID NO: 2795801 - RNA, 19 nt, Artificial Sequence
  Description of Artificial Sequence: Synthetic oligonucleotide
ggacuugaggaagaugaga

SEQ ID NO: 2795802 - RNA, 19 nt, Artificial Sequence
  Description of Artificial Sequence: Synthetic oligonucleotide
uagggcgugcgcacugcuc

SEQ ID NO: 2795803 - RNA, 19 nt, Artificial Sequence
  Description of Artificial Sequence: Synthetic oligonucleotide
caugucauacagagaauuu

SEQ ID NO: 2795804 - RNA, 19 nt, Artificial Sequence
  Description of Artificial Sequence: Synthetic oligonucleotide
agguguauuccgacgcagu

SEQ ID NO: 2795805 - RNA, 19 nt, Artificial Sequence
  Description of Artificial Sequence: Synthetic oligonucleotide
gagcacagguguauuccga

SEQ ID NO: 2795806 - RNA, 19 nt, Artificial Sequence
  Description of Artificial Sequence: Synthetic oligonucleotide
aaguggaguugaggugacu

SEQ ID NO: 2795807 - RNA, 19 nt, Artificial Sequence
  Description of Artificial Sequence: Synthetic oligonucleotide
uuccgacgcagugggcucc

SEQ ID NO: 2795808 - RNA, 19 nt, Artificial Sequence
  Description of Artificial Sequence: Synthetic oligonucleotide
cgcuuauaauagucgagug

SEQ ID NO: 2795809 - RNA, 19 nt, Artificial Sequence
  Description of Artificial Sequence: Synthetic oligonucleotide
cuucauaagaucggacccu

SEQ ID NO: 2795810 - RNA, 19 nt, Artificial Sequence
  Description of Artificial Sequence: Synthetic oligonucleotide
gcagaagcugcagcugccg

SEQ ID NO: 2795811 - RNA, 19 nt, Artificial Sequence
  Description of Artificial Sequence: Synthetic oligonucleotide
gacauggucugcucugcau

SEQ ID NO: 2795812 - RNA, 19 nt, Artificial Sequence
  Description of Artificial Sequence: Synthetic oligonucleotide
cggaguucugcaauaggug

SEQ ID NO: 2795813 - RNA, 19 nt, Artificial Sequence
  Description of Artificial Sequence: Synthetic oligonucleotide
gucauacagagaauuucgu

SEQ ID NO: 2795814 - RNA, 19 nt, Artificial Sequence
  Description of Artificial Sequence: Synthetic oligonucleotide
gucugucauagggaucaac

SEQ ID NO: 2795815 - RNA, 19 nt, Artificial Sequence
  Description of Artificial Sequence: Synthetic oligonucleotide
ggcugaguaccgugcucgg

SEQ ID NO: 2795816 - RNA, 19 nt, Artificial Sequence
  Description of Artificial Sequence: Synthetic oligonucleotide
cucgguccacauacugcuc

SEQ ID NO: 2795817 - RNA, 19 nt, Artificial Sequence
  Description of Artificial Sequence: Synthetic oligonucleotide
gguccacauacugcucccg

SEQ ID NO: 2795818 - RNA, 19 nt, Artificial Sequence
  Description of Artificial Sequence: Synthetic oligonucleotide
cauaggcaucauuguaaua

SEQ ID NO: 2795819 - RNA, 19 nt, Artificial Sequence
  Description of Artificial Sequence: Synthetic oligonucleotide
gcucgguccacauacugcu

SEQ ID NO: 2795820 - RNA, 19 nt, Artificial Sequence
  Description of Artificial Sequence: Synthetic oligonucleotide
guucauuguacugcucagu

SEQ ID NO: 2795821 - RNA, 19 nt, Artificial Sequence
  Description of Artificial Sequence: Synthetic oligonucleotide
uaccgugcucgguccacau

SEQ ID NO: 2795822 - RNA, 19 nt, Artificial Sequence
  Description of Artificial Sequence: Synthetic oligonucleotide
guucugcaauaggugucug

SEQ ID NO: 2795823 - RNA, 19 nt, Artificial Sequence
  Description of Artificial Sequence: Synthetic oligonucleotide
uggguacagcugagcucug

SEQ ID NO: 2795824 - RNA, 19 nt, Artificial Sequence
  Description of Artificial Sequence: Synthetic oligonucleotide
gaguaccgugcucggucca

SEQ ID NO: 2795825 - RNA, 19 nt, Artificial Sequence
  Description of Artificial Sequence: Synthetic oligonucleotide
ccacauacugcucccgcuc

SEQ ID NO: 2795826 - RNA, 19 nt, Artificial Sequence
  Description of Artificial Sequence: Synthetic oligonucleotide
aggugacuggguacagcug

SEQ ID NO: 2795827 - RNA, 19 nt, Artificial Sequence
  Description of Artificial Sequence: Synthetic oligonucleotide
gagccggaguucugcaaua

SEQ ID NO: 2795828 - RNA, 19 nt, Artificial Sequence
  Description of Artificial Sequence: Synthetic oligonucleotide
gcauagggcgugcgcacug

SEQ ID NO: 2795829 - RNA, 19 nt, Artificial Sequence
  Description of Artificial Sequence: Synthetic oligonucleotide
cugaagccugagacaucuc

SEQ ID NO: 2795830 - RNA, 19 nt, Artificial Sequence
  Description of Artificial Sequence: Synthetic oligonucleotide
cguaacccucuccaacugc

SEQ ID NO: 2795831 - RNA, 19 nt, Artificial Sequence
  Description of Artificial Sequence: Synthetic oligonucleotide
cucuggcccauaaccguaa

SEQ ID NO: 2795832 - RNA, 19 nt, Artificial Sequence
  Description of Artificial Sequence: Synthetic oligonucleotide
gcccauaaccguaacccuc

SEQ ID NO: 2795833 - RNA, 19 nt, Artificial Sequence
  Description of Artificial Sequence: Synthetic oligonucleotide
agcccaucgcauagggcgu

SEQ ID NO: 2795834 - RNA, 19 nt, Artificial Sequence
  Description of Artificial Sequence: Synthetic oligonucleotide
gcgcuuauaauagucgagu

SEQ ID NO: 2795835 - RNA, 19 nt, Artificial Sequence
  Description of Artificial Sequence: Synthetic oligonucleotide
cugccgccgccacagcuuc

SEQ ID NO: 2795836 - RNA, 19 nt, Artificial Sequence
  Description of Artificial Sequence: Synthetic oligonucleotide
guauuccgacgcagugggc

SEQ ID NO: 2795837 - RNA, 19 nt, Artificial Sequence
  Description of Artificial Sequence: Synthetic oligonucleotide
ccggaguucugcaauaggu

SEQ ID NO: 2795838 - RNA, 19 nt, Artificial Sequence
  Description of Artificial Sequence: Synthetic oligonucleotide
cugagccggaguucugcaa

SEQ ID NO: 2795839 - RNA, 19 nt, Artificial Sequence
  Description of Artificial Sequence: Synthetic oligonucleotide
ugucugucauagggaucaa

SEQ ID NO: 2795840 - RNA, 19 nt, Artificial Sequence
  Description of Artificial Sequence: Synthetic oligonucleotide
ccucuccaacugcagggag

SEQ ID NO: 2795841 - RNA, 19 nt, Artificial Sequence
  Description of Artificial Sequence: Synthetic oligonucleotide
ccauagcccaucgcauagg

SEQ ID NO: 2795842 - RNA, 19 nt, Artificial Sequence
  Description of Artificial Sequence: Synthetic oligonucleotide
cgcagugggcuccuguccc

SEQ ID NO: 2795843 - RNA, 19 nt, Artificial Sequence
  Description of Artificial Sequence: Synthetic oligonucleotide
gguggcagcugagccggag

SEQ ID NO: 2795844 - RNA, 19 nt, Artificial Sequence
  Description of Artificial Sequence: Synthetic oligonucleotide
ggugucugucauagggauc

SEQ ID NO: 2795845 - RNA, 19 nt, Artificial Sequence
  Description of Artificial Sequence: Synthetic oligonucleotide
gccugagacaucucacucu

SEQ ID NO: 2795846 - RNA, 19 nt, Artificial Sequence
  Description of Artificial Sequence: Synthetic oligonucleotide
gaggaagaugagacauggu

SEQ ID NO: 2795847 - RNA, 19 nt, Artificial Sequence
  Description of Artificial Sequence: Synthetic oligonucleotide
auggucugcucugcauaau

SEQ ID NO: 2795848 - RNA, 19 nt, Artificial Sequence
  Description of Artificial Sequence: Synthetic oligonucleotide
gcugagccggaguucugca

SEQ ID NO: 2795849 - RNA, 19 nt, Artificial Sequence
  Description of Artificial Sequence: Synthetic oligonucleotide
cuguagcgcuuauaauagu

SEQ ID NO: 2795850 - RNA, 19 nt, Artificial Sequence
  Description of Artificial Sequence: Synthetic oligonucleotide
cagcugagcucuggacuug

SEQ ID NO: 2795851 - RNA, 19 nt, Artificial Sequence
  Description of Artificial Sequence: Synthetic oligonucleotide
accgugcucgguccacaua

SEQ ID NO: 2795852 - RNA, 19 nt, Artificial Sequence
  Description of Artificial Sequence: Synthetic oligonucleotide
gcaauaggugucugucaua

SEQ ID NO: 2795853 - RNA, 19 nt, Artificial Sequence
  Description of Artificial Sequence: Synthetic oligonucleotide
ccauacuguucauuguacu

SEQ ID NO: 2795854 - RNA, 19 nt, Artificial Sequence
  Description of Artificial Sequence: Synthetic oligonucleotide
ccguaacccucuccaacug

SEQ ID NO: 2795855 - RNA, 19 nt, Artificial Sequence
  Description of Artificial Sequence: Synthetic oligonucleotide
uccgacgcagugggcuccu

SEQ ID NO: 2795856 - RNA, 19 nt, Artificial Sequence
  Description of Artificial Sequence: Synthetic oligonucleotide
cagcugagccggaguucug

SEQ ID NO: 2795857 - RNA, 19 nt, Artificial Sequence
  Description of Artificial Sequence: Synthetic oligonucleotide
guaccgugcucgguccaca

SEQ ID NO: 2795858 - RNA, 19 nt, Artificial Sequence
  Description of Artificial Sequence: Synthetic oligonucleotide
cccauaaccguaacccucu

SEQ ID NO: 2795859 - RNA, 19 nt, Artificial Sequence
  Description of Artificial Sequence: Synthetic oligonucleotide
aucucacucucuggcccau

SEQ ID NO: 2795860 - RNA, 19 nt, Artificial Sequence
  Description of Artificial Sequence: Synthetic oligonucleotide
guggcagcugagccggagu

SEQ ID NO: 2795861 - RNA, 19 nt, Artificial Sequence
  Description of Artificial Sequence: Synthetic oligonucleotide
ugccgccgccacagcuuca

SEQ ID NO: 2795862 - RNA, 19 nt, Artificial Sequence
  Description of Artificial Sequence: Synthetic oligonucleotide
ggcccauaaccguaacccu

SEQ ID NO: 2795863 - RNA, 19 nt, Artificial Sequence
  Description of Artificial Sequence: Synthetic oligonucleotide
agugcuccauaggcaucau

SEQ ID NO: 2795864 - RNA, 19 nt, Artificial Sequence
  Description of Artificial Sequence: Synthetic oligonucleotide
ucggacccuguagcgcuua

SEQ ID NO: 2795865 - RNA, 19 nt, Artificial Sequence
  Description of Artificial Sequence: Synthetic oligonucleotide
gcagcugagccggaguucu

SEQ ID NO: 2795866 - RNA, 19 nt, Artificial Sequence
  Description of Artificial Sequence: Synthetic oligonucleotide
ccauaggcaucauuguaau

SEQ ID NO: 2795867 - RNA, 19 nt, Artificial Sequence
  Description of Artificial Sequence: Synthetic oligonucleotide
gcucuggacuugaggaaga

SEQ ID NO: 2795868 - RNA, 19 nt, Artificial Sequence
  Description of Artificial Sequence: Synthetic oligonucleotide
cugagacaucucacucucu

SEQ ID NO: 2795869 - RNA, 19 nt, Artificial Sequence
  Description of Artificial Sequence: Synthetic oligonucleotide
ucucacucucuggcccaua

SEQ ID NO: 2795870 - RNA, 19 nt, Artificial Sequence
  Description of Artificial Sequence: Synthetic oligonucleotide
ggaguugaggugacugggu

SEQ ID NO: 2795871 - RNA, 19 nt, Artificial Sequence
  Description of Artificial Sequence: Synthetic oligonucleotide
ccaucgcauagggcgugcg

SEQ ID NO: 2795872 - RNA, 19 nt, Artificial Sequence
  Description of Artificial Sequence: Synthetic oligonucleotide
ggauuccccauagcccauc

SEQ ID NO: 2795873 - RNA, 19 nt, Artificial Sequence
  Description of Artificial Sequence: Synthetic oligonucleotide
ccaugucauacagagaauu

SEQ ID NO: 2795874 - RNA, 19 nt, Artificial Sequence
  Description of Artificial Sequence: Synthetic oligonucleotide
ggcuccugucccuuccaua

SEQ ID NO: 2795875 - RNA, 19 nt, Artificial Sequence
  Description of Artificial Sequence: Synthetic oligonucleotide
cuccaacugcagggagcac

SEQ ID NO: 2795876 - RNA, 19 nt, Artificial Sequence
  Description of Artificial Sequence: Synthetic oligonucleotide
ccauaaccguaacccucuc

SEQ ID NO: 2795877 - RNA, 19 nt, Artificial Sequence
  Description of Artificial Sequence: Synthetic oligonucleotide
ccgccacagcuucauaaga

SEQ ID NO: 2795878 - RNA, 19 nt, Artificial Sequence
  Description of Artificial Sequence: Synthetic oligonucleotide
cgagugcuccauaggcauc

SEQ ID NO: 2795879 - RNA, 19 nt, Artificial Sequence
  Description of Artificial Sequence: Synthetic oligonucleotide
gcccaucgcauagggcgug

SEQ ID NO: 2795880 - RNA, 19 nt, Artificial Sequence
  Description of Artificial Sequence: Synthetic oligonucleotide
cagcugccgccgccacagc

SEQ ID NO: 2795881 - RNA, 19 nt, Artificial Sequence
  Description of Artificial Sequence: Synthetic oligonucleotide
ccccauagcccaucgcaua

SEQ ID NO: 2795882 - RNA, 19 nt, Artificial Sequence
  Description of Artificial Sequence: Synthetic oligonucleotide
cccaucgcauagggcgugc

SEQ ID NO: 2795883 - RNA, 19 nt, Artificial Sequence
  Description of Artificial Sequence: Synthetic oligonucleotide
aucggacccuguagcgcuu

SEQ ID NO: 2795884 - RNA, 19 nt, Artificial Sequence
  Description of Artificial Sequence: Synthetic oligonucleotide
cguguugcugcugaagccu

SEQ ID NO: 2795885 - RNA, 19 nt, Artificial Sequence
  Description of Artificial Sequence: Synthetic oligonucleotide
cucuggacuugaggaagau

SEQ ID NO: 2795886 - RNA, 19 nt, Artificial Sequence
  Description of Artificial Sequence: Synthetic oligonucleotide
gcagggagcacagguguau

SEQ ID NO: 2795887 - RNA, 19 nt, Artificial Sequence
  Description of Artificial Sequence: Synthetic oligonucleotide
gugcuccauaggcaucauu

SEQ ID NO: 2795888 - RNA, 19 nt, Artificial Sequence
  Description of Artificial Sequence: Synthetic oligonucleotide
cgccgccacagcuucauaa

SEQ ID NO: 2795889 - RNA, 19 nt, Artificial Sequence
  Description of Artificial Sequence: Synthetic oligonucleotide
cuccugucccuuccauaau

SEQ ID NO: 2795890 - RNA, 19 nt, Artificial Sequence
  Description of Artificial Sequence: Synthetic oligonucleotide
cccucuccaacugcaggga

SEQ ID NO: 2795891 - RNA, 19 nt, Artificial Sequence
  Description of Artificial Sequence: Synthetic oligonucleotide
gcagugggcuccugucccu

SEQ ID NO: 2795892 - RNA, 19 nt, Artificial Sequence
  Description of Artificial Sequence: Synthetic oligonucleotide
ggacccuguagcgcuuaua

SEQ ID NO: 2795893 - RNA, 19 nt, Artificial Sequence
  Description of Artificial Sequence: Synthetic oligonucleotide
cgccacagcuucauaagau

SEQ ID NO: 2795894 - RNA, 19 nt, Artificial Sequence
  Description of Artificial Sequence: Synthetic oligonucleotide
gcugaguaccgugcucggu

SEQ ID NO: 2795895 - RNA, 19 nt, Artificial Sequence
  Description of Artificial Sequence: Synthetic oligonucleotide
gccaugucauacagagaau

SEQ ID NO: 2795896 - RNA, 19 nt, Artificial Sequence
  Description of Artificial Sequence: Synthetic oligonucleotide
cagggagcacagguguauu

SEQ ID NO: 2795897 - RNA, 19 nt, Artificial Sequence
  Description of Artificial Sequence: Synthetic oligonucleotide
ggcagcagccauggcugcu

SEQ ID NO: 2795898 - RNA, 19 nt, Artificial Sequence
  Description of Artificial Sequence: Synthetic oligonucleotide
gggcuccugucccuuccau

SEQ ID NO: 2795899 - RNA, 19 nt, Artificial Sequence
  Description of Artificial Sequence: Synthetic oligonucleotide
gcugccgccgccacagcuu

SEQ ID NO: 2795900 - RNA, 19 nt, Artificial Sequence
  Description of Artificial Sequence: Synthetic oligonucleotide
cagugggcuccugucccuu

SEQ ID NO: 2795901 - RNA, 19 nt, Artificial Sequence
  Description of Artificial Sequence: Synthetic oligonucleotide
cgugcucgguccacauacu

SEQ ID NO: 2795902 - RNA, 19 nt, Artificial Sequence
  Description of Artificial Sequence: Synthetic oligonucleotide
gccgccgccacagcuucau

SEQ ID NO: 2795903 - RNA, 19 nt, Artificial Sequence
  Description of Artificial Sequence: Synthetic oligonucleotide
cgacgcagugggcuccugu

SEQ ID NO: 2795904 - RNA, 19 nt, Artificial Sequence
  Description of Artificial Sequence: Synthetic oligonucleotide
ccgacgcagugggcuccug

SEQ ID NO: 2795905 - RNA, 19 nt, Artificial Sequence
  Description of Artificial Sequence: Synthetic oligonucleotide
cgcauagggcgugcgcacu

SEQ ID NO: 2795906 - RNA, 19 nt, Artificial Sequence
  Description of Artificial Sequence: Synthetic oligonucleotide
cggauuccccauagcccau

SEQ ID NO: 2795907 - RNA, 19 nt, Artificial Sequence
  Description of Artificial Sequence: Synthetic oligonucleotide
ccgccgccacagcuucaua

SEQ ID NO: 2795908 - RNA, 19 nt, Artificial Sequence
  Description of Artificial Sequence: Synthetic oligonucleotide
cggacccuguagcgcuuau

SEQ ID NO: 2795909 - RNA, 19 nt, Artificial Sequence
  Description of Artificial Sequence: Synthetic oligonucleotide
gaaucuguucuucagaaag

SEQ ID NO: 2795910 - RNA, 19 nt, Artificial Sequence
  Description of Artificial Sequence: Synthetic oligonucleotide
agaaagcacacacugcucc

SEQ ID NO: 2795911 - RNA, 19 nt, Artificial Sequence
  Description of Artificial Sequence: Synthetic oligonucleotide
aaggcauccauuuggcagg

SEQ ID NO: 2795912 - RNA, 19 nt, Artificial Sequence
  Description of Artificial Sequence: Synthetic oligonucleotide
ucagaaagcacacacugcu

SEQ ID NO: 2795913 - RNA, 19 nt, Artificial Sequence
  Description of Artificial Sequence: Synthetic oligonucleotide
ugagaugauggccagcucc

SEQ ID NO: 2795914 - RNA, 19 nt, Artificial Sequence
  Description of Artificial Sequence: Synthetic oligonucleotide
uggaucaucagcucuugcg

SEQ ID NO: 2795915 - RNA, 19 nt, Artificial Sequence
  Description of Artificial Sequence: Synthetic oligonucleotide
caugaaggcauccauuugg

SEQ ID NO: 2795916 - RNA, 19 nt, Artificial Sequence
  Description of Artificial Sequence: Synthetic oligonucleotide
uccuggacugagaugaugg

SEQ ID NO: 2795917 - RNA, 19 nt, Artificial Sequence
  Description of Artificial Sequence: Synthetic oligonucleotide
agcaucucgggacugaggg

SEQ ID NO: 2795918 - RNA, 19 nt, Artificial Sequence
  Description of Artificial Sequence: Synthetic oligonucleotide
uucuucagaaagcacacac

SEQ ID NO: 2795919 - RNA, 19 nt, Artificial Sequence
  Description of Artificial Sequence: Synthetic oligonucleotide
uccacaaucuccuggacug

SEQ ID NO: 2795920 - RNA, 19 nt, Artificial Sequence
  Description of Artificial Sequence: Synthetic oligonucleotide
uuuguugcacugcagcugc

SEQ ID NO: 2795921 - RNA, 19 nt, Artificial Sequence
  Description of Artificial Sequence: Synthetic oligonucleotide
aggcauagcgcccagcccc

SEQ ID NO: 2795922 - RNA, 19 nt, Artificial Sequence
  Description of Artificial Sequence: Synthetic oligonucleotide
gagaaagagcguuuguugc

SEQ ID NO: 2795923 - RNA, 19 nt, Artificial Sequence
  Description of Artificial Sequence: Synthetic oligonucleotide
agggucugcacccaagggc

SEQ ID NO: 2795924 - RNA, 19 nt, Artificial Sequence
  Description of Artificial Sequence: Synthetic oligonucleotide
cuucagaaagcacacacug

SEQ ID NO: 2795925 - RNA, 19 nt, Artificial Sequence
  Description of Artificial Sequence: Synthetic oligonucleotide
uggacugagaugauggcca

SEQ ID NO: 2795926 - RNA, 19 nt, Artificial Sequence
  Description of Artificial Sequence: Synthetic oligonucleotide
agcuacuugaugcuggcuc

SEQ ID NO: 2795927 - RNA, 19 nt, Artificial Sequence
  Description of Artificial Sequence: Synthetic oligonucleotide
ugccucgacaggcauagcg

SEQ ID NO: 2795928 - RNA, 19 nt, Artificial Sequence
  Description of Artificial Sequence: Synthetic oligonucleotide
uguucuucagaaagcacac

SEQ ID NO: 2795929 - RNA, 19 nt, Artificial Sequence
  Description of Artificial Sequence: Synthetic oligonucleotide
acuugcgccgcaugaaggc

SEQ ID NO: 2795930 - RNA, 19 nt, Artificial Sequence
  Description of Artificial Sequence: Synthetic oligonucleotide
uuuggcagguuccacugcc

SEQ ID NO: 2795931 - RNA, 19 nt, Artificial Sequence
  Description of Artificial Sequence: Synthetic oligonucleotide
uugaugcuggcucagucug

SEQ ID NO: 2795932 - RNA, 19 nt, Artificial Sequence
  Description of Artificial Sequence: Synthetic oligonucleotide
agagcuggcacuugcgccg

SEQ ID NO: 2795933 - RNA, 19 nt, Artificial Sequence
  Description of Artificial Sequence: Synthetic oligonucleotide
uucagaaagcacacacugc

SEQ ID NO: 2795934 - RNA, 19 nt, Artificial Sequence
  Description of Artificial Sequence: Synthetic oligonucleotide
ugagggucugcacccaagg

SEQ ID NO: 2795935 - RNA, 19 nt, Artificial Sequence
  Description of Artificial Sequence: Synthetic oligonucleotide
aagcacacacugcucccgc

SEQ ID NO: 2795936 - RNA, 19 nt, Artificial Sequence
  Description of Artificial Sequence: Synthetic oligonucleotide
cuugcacuugcguagccgg

SEQ ID NO: 2795937 - RNA, 19 nt, Artificial Sequence
  Description of Artificial Sequence: Synthetic oligonucleotide
ugcgcagcaaccaacugcu

SEQ ID NO: 2795938 - RNA, 19 nt, Artificial Sequence
  Description of Artificial Sequence: Synthetic oligonucleotide
gugacuuugggcuggucgg

SEQ ID NO: 2795939 - RNA, 19 nt, Artificial Sequence
  Description of Artificial Sequence: Synthetic oligonucleotide
aacugcuggaucaucagcu

SEQ ID NO: 2795940 - RNA, 19 nt, Artificial Sequence
  Description of Artificial Sequence: Synthetic oligonucleotide
acuugaugcuggcucaguc

SEQ ID NO: 2795941 - RNA, 19 nt, Artificial Sequence
  Description of Artificial Sequence: Synthetic oligonucleotide
gaucaucagcucuugcgcc

SEQ ID NO: 2795942 - RNA, 19 nt, Artificial Sequence
  Description of Artificial Sequence: Synthetic oligonucleotide
agccccaccauguaccacg

SEQ ID NO: 2795943 - RNA, 19 nt, Artificial Sequence
  Description of Artificial Sequence: Synthetic oligonucleotide
aucaucagcucuugcgccg

SEQ ID NO: 2795944 - RNA, 19 nt, Artificial Sequence
  Description of Artificial Sequence: Synthetic oligonucleotide
aagagcguuuguugcacug

SEQ ID NO: 2795945 - RNA, 19 nt, Artificial Sequence
  Description of Artificial Sequence: Synthetic oligonucleotide
acacacugcucccgcaugc

SEQ ID NO: 2795946 - RNA, 19 nt, Artificial Sequence
  Description of Artificial Sequence: Synthetic oligonucleotide
cugagcuacuugaugcugg

SEQ ID NO: 2795947 - RNA, 19 nt, Artificial Sequence
  Description of Artificial Sequence: Synthetic oligonucleotide
cugacgagcaucucgggac

SEQ ID NO: 2795948 - RNA, 19 nt, Artificial Sequence
  Description of Artificial Sequence: Synthetic oligonucleotide
agaaagagcguuuguugca

SEQ ID NO: 2795949 - RNA, 19 nt, Artificial Sequence
  Description of Artificial Sequence: Synthetic oligonucleotide
cauccauuuggcagguucc

SEQ ID NO: 2795950 - RNA, 19 nt, Artificial Sequence
  Description of Artificial Sequence: Synthetic oligonucleotide
uccgaaucuguucuucaga

SEQ ID NO: 2795951 - RNA, 19 nt, Artificial Sequence
  Description of Artificial Sequence: Synthetic oligonucleotide
gagaugauggccagcuccg

SEQ ID NO: 2795952 - RNA, 19 nt, Artificial Sequence
  Description of Artificial Sequence: Synthetic oligonucleotide
agcuucagaaguaccaggg

SEQ ID NO: 2795953 - RNA, 19 nt, Artificial Sequence
  Description of Artificial Sequence: Synthetic oligonucleotide
gaaagcacacacugcuccc

SEQ ID NO: 2795954 - RNA, 19 nt, Artificial Sequence
  Description of Artificial Sequence: Synthetic oligonucleotide
uugcguagccggcagagcu

SEQ ID NO: 2795955 - RNA, 19 nt, Artificial Sequence
  Description of Artificial Sequence: Synthetic oligonucleotide
augaaggcauccauuuggc

SEQ ID NO: 2795956 - RNA, 19 nt, Artificial Sequence
  Description of Artificial Sequence: Synthetic oligonucleotide
auuuggcagguuccacugc

SEQ ID NO: 2795957 - RNA, 19 nt, Artificial Sequence
  Description of Artificial Sequence: Synthetic oligonucleotide
ggagaaagagcguuuguug

SEQ ID NO: 2795958 - RNA, 19 nt, Artificial Sequence
  Description of Artificial Sequence: Synthetic oligonucleotide
gguuccacugccucgacag

SEQ ID NO: 2795959 - RNA, 19 nt, Artificial Sequence
  Description of Artificial Sequence: Synthetic oligonucleotide
cugcugacgagcaucucgg

SEQ ID NO: 2795960 - RNA, 19 nt, Artificial Sequence
  Description of Artificial Sequence: Synthetic oligonucleotide
uuccgaaucuguucuucag

SEQ ID NO: 2795961 - RNA, 19 nt, Artificial Sequence
  Description of Artificial Sequence: Synthetic oligonucleotide
ucuguucuucagaaagcac

SEQ ID NO: 2795962 - RNA, 19 nt, Artificial Sequence
  Description of Artificial Sequence: Synthetic oligonucleotide
cauuuggcagguuccacug

SEQ ID NO: 2795963 - RNA, 19 nt, Artificial Sequence
  Description of Artificial Sequence: Synthetic oligonucleotide
agagcguuuguugcacugc

SEQ ID NO: 2795964 - RNA, 19 nt, Artificial Sequence
  Description of Artificial Sequence: Synthetic oligonucleotide
gaggcuacaggucgggcug

SEQ ID NO: 2795965 - RNA, 19 nt, Artificial Sequence
  Description of Artificial Sequence: Synthetic oligonucleotide
gaugcuggcucagucuggg

SEQ ID NO: 2795966 - RNA, 19 nt, Artificial Sequence
  Description of Artificial Sequence: Synthetic oligonucleotide
caggggaggcuacaggucg

SEQ ID NO: 2795967 - RNA, 19 nt, Artificial Sequence
  Description of Artificial Sequence: Synthetic oligonucleotide
ggaucaucagcucuugcgc

SEQ ID NO: 2795968 - RNA, 19 nt, Artificial Sequence
  Description of Artificial Sequence: Synthetic oligonucleotide
ugagcuacuugaugcuggc

SEQ ID NO: 2795969 - RNA, 19 nt, Artificial Sequence
  Description of Artificial Sequence: Synthetic oligonucleotide
acugccucgacaggcauag

SEQ ID NO: 2795970 - RNA, 19 nt, Artificial Sequence
  Description of Artificial Sequence: Synthetic oligonucleotide
cugcgcagcaaccaacugc

SEQ ID NO: 2795971 - RNA, 19 nt, Artificial Sequence
  Description of Artificial Sequence: Synthetic oligonucleotide
gcuggucggagaaagagcg

SEQ ID NO: 2795972 - RNA, 19 nt, Artificial Sequence
  Description of Artificial Sequence: Synthetic oligonucleotide
accaggggaggcuacaggu

SEQ ID NO: 2795973 - RNA, 19 nt, Artificial Sequence
  Description of Artificial Sequence: Synthetic oligonucleotide
augauggccagcuccguga

SEQ ID NO: 2795974 - RNA, 19 nt, Artificial Sequence
  Description of Artificial Sequence: Synthetic oligonucleotide
ugaugcuggcucagucugg

SEQ ID NO: 2795975 - RNA, 19 nt, Artificial Sequence
  Description of Artificial Sequence: Synthetic oligonucleotide
aaagagcguuuguugcacu

SEQ ID NO: 2795976 - RNA, 19 nt, Artificial Sequence
  Description of Artificial Sequence: Synthetic oligonucleotide
ucuugcgccgcugucagcu

SEQ ID NO: 2795977 - RNA, 19 nt, Artificial Sequence
  Description of Artificial Sequence: Synthetic oligonucleotide
gaaagagcguuuguugcac

SEQ ID NO: 2795978 - RNA, 19 nt, Artificial Sequence
  Description of Artificial Sequence: Synthetic oligonucleotide
acaggucgggcugagcuac

SEQ ID NO: 2795979 - RNA, 19 nt, Artificial Sequence
  Description of Artificial Sequence: Synthetic oligonucleotide
uaccaggggaggcuacagg

SEQ ID NO: 2795980 - RNA, 19 nt, Artificial Sequence
  Description of Artificial Sequence: Synthetic oligonucleotide
gcugcugacgagcaucucg

SEQ ID NO: 2795981 - RNA, 19 nt, Artificial Sequence
  Description of Artificial Sequence: Synthetic oligonucleotide
gagggucugcacccaaggg

SEQ ID NO: 2795982 - RNA, 19 nt, Artificial Sequence
  Description of Artificial Sequence: Synthetic oligonucleotide
gccgcugucagcuggaugc

SEQ ID NO: 2795983 - RNA, 19 nt, Artificial Sequence
  Description of Artificial Sequence: Synthetic oligonucleotide
uugggcuggucggagaaag

SEQ ID NO: 2795984 - RNA, 19 nt, Artificial Sequence
  Description of Artificial Sequence: Synthetic oligonucleotide
ucagcuggaugcccucucc

SEQ ID NO: 2795985 - RNA, 19 nt, Artificial Sequence
  Description of Artificial Sequence: Synthetic oligonucleotide
ccauguaccacgcugcgcc

SEQ ID NO: 2795986 - RNA, 19 nt, Artificial Sequence
  Description of Artificial Sequence: Synthetic oligonucleotide
ugaagugggcaaagcgcug

SEQ ID NO: 2795987 - RNA, 19 nt, Artificial Sequence
  Description of Artificial Sequence: Synthetic oligonucleotide
cagagcuggcacuugcgcc

SEQ ID NO: 2795988 - RNA, 19 nt, Artificial Sequence
  Description of Artificial Sequence: Synthetic oligonucleotide
cucagucugggauggcugc

SEQ ID NO: 2795989 - RNA, 19 nt, Artificial Sequence
  Description of Artificial Sequence: Synthetic oligonucleotide
guuuguugcacugcagcug

SEQ ID NO: 2795990 - RNA, 19 nt, Artificial Sequence
  Description of Artificial Sequence: Synthetic oligonucleotide
gcacccaagggccagggcg

SEQ ID NO: 2795991 - RNA, 19 nt, Artificial Sequence
  Description of Artificial Sequence: Synthetic oligonucleotide
ugaaggcauccauuuggca

SEQ ID NO: 2795992 - RNA, 19 nt, Artificial Sequence
  Description of Artificial Sequence: Synthetic oligonucleotide
agcaaccaacugcuggauc

SEQ ID NO: 2795993 - RNA, 19 nt, Artificial Sequence
  Description of Artificial Sequence: Synthetic oligonucleotide
cacuugcgccgcaugaagg

SEQ ID NO: 2795994 - RNA, 19 nt, Artificial Sequence
  Description of Artificial Sequence: Synthetic oligonucleotide
cuggacugagaugauggcc

SEQ ID NO: 2795995 - RNA, 19 nt, Artificial Sequence
  Description of Artificial Sequence: Synthetic oligonucleotide
gggcugagcuacuugaugc

SEQ ID NO: 2795996 - RNA, 19 nt, Artificial Sequence
  Description of Artificial Sequence: Synthetic oligonucleotide
cuggaugcccucuccuucc

SEQ ID NO: 2795997 - RNA, 19 nt, Artificial Sequence
  Description of Artificial Sequence: Synthetic oligonucleotide
uugcacugcagcugcgcag

SEQ ID NO: 2795998 - RNA, 19 nt, Artificial Sequence
  Description of Artificial Sequence: Synthetic oligonucleotide
uuccacugccucgacaggc

SEQ ID NO: 2795999 - RNA, 19 nt, Artificial Sequence
  Description of Artificial Sequence: Synthetic oligonucleotide
agcgcugcugacgagcauc

SEQ ID NO: 2796000 - RNA, 19 nt, Artificial Sequence
  Description of Artificial Sequence: Synthetic oligonucleotide
caugccagccuccuugcac

SEQ ID NO: 2796001 - RNA, 19 nt, Artificial Sequence
  Description of Artificial Sequence: Synthetic oligonucleotide
ugcacugcagcugcgcagc

SEQ ID NO: 2796002 - RNA, 19 nt, Artificial Sequence
  Description of Artificial Sequence: Synthetic oligonucleotide
ucuccuuccccggagcccc

SEQ ID NO: 2796003 - RNA, 19 nt, Artificial Sequence
  Description of Artificial Sequence: Synthetic oligonucleotide
ugcaagaacccuggcaccu

SEQ ID NO: 2796004 - RNA, 19 nt, Artificial Sequence
  Description of Artificial Sequence: Synthetic oligonucleotide
gggacugagggucugcacc

SEQ ID NO: 2796005 - RNA, 19 nt, Artificial Sequence
  Description of Artificial Sequence: Synthetic oligonucleotide
gcaaccaacugcuggauca

SEQ ID NO: 2796006 - RNA, 19 nt, Artificial Sequence
  Description of Artificial Sequence: Synthetic oligonucleotide
uccacugccucgacaggca

SEQ ID NO: 2796007 - RNA, 19 nt, Artificial Sequence
  Description of Artificial Sequence: Synthetic oligonucleotide
augccagccuccuugcacu

SEQ ID NO: 2796008 - RNA, 19 nt, Artificial Sequence
  Description of Artificial Sequence: Synthetic oligonucleotide
ugacgagcaucucgggacu

SEQ ID NO: 2796009 - RNA, 19 nt, Artificial Sequence
  Description of Artificial Sequence: Synthetic oligonucleotide
acuugcguagccggcagag

SEQ ID NO: 2796010 - RNA, 19 nt, Artificial Sequence
  Description of Artificial Sequence: Synthetic oligonucleotide
uugcgccgcugucagcugg

SEQ ID NO: 2796011 - RNA, 19 nt, Artificial Sequence
  Description of Artificial Sequence: Synthetic oligonucleotide
caucucgggacugaggguc

SEQ ID NO: 2796012 - RNA, 19 nt, Artificial Sequence
  Description of Artificial Sequence: Synthetic oligonucleotide
auagcgcccagccccacca

SEQ ID NO: 2796013 - RNA, 19 nt, Artificial Sequence
  Description of Artificial Sequence: Synthetic oligonucleotide
ucagcucuugcgccgcugu

SEQ ID NO: 2796014 - RNA, 19 nt, Artificial Sequence
  Description of Artificial Sequence: Synthetic oligonucleotide
ugcuggaucaucagcucuu

SEQ ID NO: 2796015 - RNA, 19 nt, Artificial Sequence
  Description of Artificial Sequence: Synthetic oligonucleotide
accauguaccacgcugcgc

SEQ ID NO: 2796016 - RNA, 19 nt, Artificial Sequence
  Description of Artificial Sequence: Synthetic oligonucleotide
ucggagaaagagcguuugu

SEQ ID NO: 2796017 - RNA, 19 nt, Artificial Sequence
  Description of Artificial Sequence: Synthetic oligonucleotide
aaccaacugcuggaucauc

SEQ ID NO: 2796018 - RNA, 19 nt, Artificial Sequence
  Description of Artificial Sequence: Synthetic oligonucleotide
cgugaagugggcaaagcgc

SEQ ID NO: 2796019 - RNA, 19 nt, Artificial Sequence
  Description of Artificial Sequence: Synthetic oligonucleotide
uguugcacugcagcugcgc

SEQ ID NO: 2796020 - RNA, 19 nt, Artificial Sequence
  Description of Artificial Sequence: Synthetic oligonucleotide
caagaacccuggcaccugc

SEQ ID NO: 2796021 - RNA, 19 nt, Artificial Sequence
  Description of Artificial Sequence: Synthetic oligonucleotide
uggcacuugcgccgcauga

SEQ ID NO: 2796022 - RNA, 19 nt, Artificial Sequence
  Description of Artificial Sequence: Synthetic oligonucleotide
aaagcgcugcugacgagca

SEQ ID NO: 2796023 - RNA, 19 nt, Artificial Sequence
  Description of Artificial Sequence: Synthetic oligonucleotide
cugcaagaacccuggcacc

SEQ ID NO: 2796024 - RNA, 19 nt, Artificial Sequence
  Description of Artificial Sequence: Synthetic oligonucleotide
ugcguagccggcagagcug

SEQ ID NO: 2796025 - RNA, 19 nt, Artificial Sequence
  Description of Artificial Sequence: Synthetic oligonucleotide
uguaccacgcugcgccgga

SEQ ID NO: 2796026 - RNA, 19 nt, Artificial Sequence
  Description of Artificial Sequence: Synthetic oligonucleotide
cucgacaggcauagcgccc

SEQ ID NO: 2796027 - RNA, 19 nt, Artificial Sequence
  Description of Artificial Sequence: Synthetic oligonucleotide
gagcguuuguugcacugca

SEQ ID NO: 2796028 - RNA, 19 nt, Artificial Sequence
  Description of Artificial Sequence: Synthetic oligonucleotide
ugcugacgagcaucucggg

SEQ ID NO: 2796029 - RNA, 19 nt, Artificial Sequence
  Description of Artificial Sequence: Synthetic oligonucleotide
uuguugcacugcagcugcg

SEQ ID NO: 2796030 - RNA, 19 nt, Artificial Sequence
  Description of Artificial Sequence: Synthetic oligonucleotide
cauguaccacgcugcgccg

SEQ ID NO: 2796031 - RNA, 19 nt, Artificial Sequence
  Description of Artificial Sequence: Synthetic oligonucleotide
uugcacuugcguagccggc

SEQ ID NO: 2796032 - RNA, 19 nt, Artificial Sequence
  Description of Artificial Sequence: Synthetic oligonucleotide
ucgacaggcauagcgccca

SEQ ID NO: 2796033 - RNA, 19 nt, Artificial Sequence
  Description of Artificial Sequence: Synthetic oligonucleotide
gcguuuguugcacugcagc

SEQ ID NO: 2796034 - RNA, 19 nt, Artificial Sequence
  Description of Artificial Sequence: Synthetic oligonucleotide
gccggaagagccuugcagc

SEQ ID NO: 2796035 - RNA, 19 nt, Artificial Sequence
  Description of Artificial Sequence: Synthetic oligonucleotide
cuggcucagucugggaugg

SEQ ID NO: 2796036 - RNA, 19 nt, Artificial Sequence
  Description of Artificial Sequence: Synthetic oligonucleotide
cagaaagcacacacugcuc

SEQ ID NO: 2796037 - RNA, 19 nt, Artificial Sequence
  Description of Artificial Sequence: Synthetic oligonucleotide
uaccacgcugcgccggaag

SEQ ID NO: 2796038 - RNA, 19 nt, Artificial Sequence
  Description of Artificial Sequence: Synthetic oligonucleotide
caccauguaccacgcugcg

SEQ ID NO: 2796039 - RNA, 19 nt, Artificial Sequence
  Description of Artificial Sequence: Synthetic oligonucleotide
aaguaccaggggaggcuac

SEQ ID NO: 2796040 - RNA, 19 nt, Artificial Sequence
  Description of Artificial Sequence: Synthetic oligonucleotide
ugcacuugcguagccggca

SEQ ID NO: 2796041 - RNA, 19 nt, Artificial Sequence
  Description of Artificial Sequence: Synthetic oligonucleotide
gucgggcugagcuacuuga

SEQ ID NO: 2796042 - RNA, 19 nt, Artificial Sequence
  Description of Artificial Sequence: Synthetic oligonucleotide
uagccggcagagcuggcac

SEQ ID NO: 2796043 - RNA, 19 nt, Artificial Sequence
  Description of Artificial Sequence: Synthetic oligonucleotide
ccuccuugcacuugcguag

SEQ ID NO: 2796044 - RNA, 19 nt, Artificial Sequence
  Description of Artificial Sequence: Synthetic oligonucleotide
ggacugagggucugcaccc

SEQ ID NO: 2796045 - RNA, 19 nt, Artificial Sequence
  Description of Artificial Sequence: Synthetic oligonucleotide
agcuccgugaagugggcaa

SEQ ID NO: 2796046 - RNA, 19 nt, Artificial Sequence
  Description of Artificial Sequence: Synthetic oligonucleotide
cgugacuuugggcuggucg

SEQ ID NO: 2796047 - RNA, 19 nt, Artificial Sequence
  Description of Artificial Sequence: Synthetic oligonucleotide
gcauccauuuggcagguuc

SEQ ID NO: 2796048 - RNA, 19 nt, Artificial Sequence
  Description of Artificial Sequence: Synthetic oligonucleotide
gucggagaaagagcguuug

SEQ ID NO: 2796049 - RNA, 19 nt, Artificial Sequence
  Description of Artificial Sequence: Synthetic oligonucleotide
cuuccgaaucuguucuuca

SEQ ID NO: 2796050 - RNA, 19 nt, Artificial Sequence
  Description of Artificial Sequence: Synthetic oligonucleotide
uggucggagaaagagcguu

SEQ ID NO: 2796051 - RNA, 19 nt, Artificial Sequence
  Description of Artificial Sequence: Synthetic oligonucleotide
cagggcgugacuuugggcu

SEQ ID NO: 2796052 - RNA, 19 nt, Artificial Sequence
  Description of Artificial Sequence: Synthetic oligonucleotide
uggccaccagcuucagaag

SEQ ID NO: 2796053 - RNA, 19 nt, Artificial Sequence
  Description of Artificial Sequence: Synthetic oligonucleotide
ucaucagcucuugcgccgc

SEQ ID NO: 2796054 - RNA, 19 nt, Artificial Sequence
  Description of Artificial Sequence: Synthetic oligonucleotide
cacaaucuccuggacugag

SEQ ID NO: 2796055 - RNA, 19 nt, Artificial Sequence
  Description of Artificial Sequence: Synthetic oligonucleotide
uccccggagccccuggcca

SEQ ID NO: 2796056 - RNA, 19 nt, Artificial Sequence
  Description of Artificial Sequence: Synthetic oligonucleotide
caccagcuucagaaguacc

SEQ ID NO: 2796057 - RNA, 19 nt, Artificial Sequence
  Description of Artificial Sequence: Synthetic oligonucleotide
cugagggucugcacccaag

SEQ ID NO: 2796058 - RNA, 19 nt, Artificial Sequence
  Description of Artificial Sequence: Synthetic oligonucleotide
ccgugaagugggcaaagcg

SEQ ID NO: 2796059 - RNA, 19 nt, Artificial Sequence
  Description of Artificial Sequence: Synthetic oligonucleotide
uccgugaagugggcaaagc

SEQ ID NO: 2796060 - RNA, 19 nt, Artificial Sequence
  Description of Artificial Sequence: Synthetic oligonucleotide
gacuuugggcuggucggag

SEQ ID NO: 2796061 - RNA, 19 nt, Artificial Sequence
  Description of Artificial Sequence: Synthetic oligonucleotide
gggucugcacccaagggcc

SEQ ID NO: 2796062 - RNA, 19 nt, Artificial Sequence
  Description of Artificial Sequence: Synthetic oligonucleotide
ucugcacccaagggccagg

SEQ ID NO: 2796063 - RNA, 19 nt, Artificial Sequence
  Description of Artificial Sequence: Synthetic oligonucleotide
guugcacugcagcugcgca

SEQ ID NO: 2796064 - RNA, 19 nt, Artificial Sequence
  Description of Artificial Sequence: Synthetic oligonucleotide
uccuugcacuugcguagcc

SEQ ID NO: 2796065 - RNA, 19 nt, Artificial Sequence
  Description of Artificial Sequence: Synthetic oligonucleotide
acuuugggcuggucggaga

SEQ ID NO: 2796066 - RNA, 19 nt, Artificial Sequence
  Description of Artificial Sequence: Synthetic oligonucleotide
agggcgugacuuugggcug

SEQ ID NO: 2796067 - RNA, 19 nt, Artificial Sequence
  Description of Artificial Sequence: Synthetic oligonucleotide
ccaccauguaccacgcugc

SEQ ID NO: 2796068 - RNA, 19 nt, Artificial Sequence
  Description of Artificial Sequence: Synthetic oligonucleotide
gcagcaaccaacugcugga

SEQ ID NO: 2796069 - RNA, 19 nt, Artificial Sequence
  Description of Artificial Sequence: Synthetic oligonucleotide
gagcaucucgggacugagg

SEQ ID NO: 2796070 - RNA, 19 nt, Artificial Sequence
  Description of Artificial Sequence: Synthetic oligonucleotide
uccauuuggcagguuccac

SEQ ID NO: 2796071 - RNA, 19 nt, Artificial Sequence
  Description of Artificial Sequence: Synthetic oligonucleotide
cuugaugcuggcucagucu

SEQ ID NO: 2796072 - RNA, 19 nt, Artificial Sequence
  Description of Artificial Sequence: Synthetic oligonucleotide
augcccucuccuuccccgg

SEQ ID NO: 2796073 - RNA, 19 nt, Artificial Sequence
  Description of Artificial Sequence: Synthetic oligonucleotide
cuacaggucgggcugagcu

SEQ ID NO: 2796074 - RNA, 19 nt, Artificial Sequence
  Description of Artificial Sequence: Synthetic oligonucleotide
ugacuuugggcuggucgga

SEQ ID NO: 2796075 - RNA, 19 nt, Artificial Sequence
  Description of Artificial Sequence: Synthetic oligonucleotide
uugcgccgcaugaaggcau

SEQ ID NO: 2796076 - RNA, 19 nt, Artificial Sequence
  Description of Artificial Sequence: Synthetic oligonucleotide
gccagcuccgugaaguggg

SEQ ID NO: 2796077 - RNA, 19 nt, Artificial Sequence
  Description of Artificial Sequence: Synthetic oligonucleotide
uacaggucgggcugagcua

SEQ ID NO: 2796078 - RNA, 19 nt, Artificial Sequence
  Description of Artificial Sequence: Synthetic oligonucleotide
cccaccauguaccacgcug

SEQ ID NO: 2796079 - RNA, 19 nt, Artificial Sequence
  Description of Artificial Sequence: Synthetic oligonucleotide
uggcugcugcugcugcugc

SEQ ID NO: 2796080 - RNA, 19 nt, Artificial Sequence
  Description of Artificial Sequence: Synthetic oligonucleotide
auguaccacgcugcgccgg

SEQ ID NO: 2796081 - RNA, 19 nt, Artificial Sequence
  Description of Artificial Sequence: Synthetic oligonucleotide
ccucgacaggcauagcgcc

SEQ ID NO: 2796082 - RNA, 19 nt, Artificial Sequence
  Description of Artificial Sequence: Synthetic oligonucleotide
auccauuuggcagguucca

SEQ ID NO: 2796083 - RNA, 19 nt, Artificial Sequence
  Description of Artificial Sequence: Synthetic oligonucleotide
cuacuugaugcuggcucag

SEQ ID NO: 2796084 - RNA, 19 nt, Artificial Sequence
  Description of Artificial Sequence: Synthetic oligonucleotide
gugaagugggcaaagcgcu

SEQ ID NO: 2796085 - RNA, 19 nt, Artificial Sequence
  Description of Artificial Sequence: Synthetic oligonucleotide
ugggcuggucggagaaaga

SEQ ID NO: 2796086 - RNA, 19 nt, Artificial Sequence
  Description of Artificial Sequence: Synthetic oligonucleotide
gcuggcucagucugggaug

SEQ ID NO: 2796087 - RNA, 19 nt, Artificial Sequence
  Description of Artificial Sequence: Synthetic oligonucleotide
acacugcucccgcaugcca

SEQ ID NO: 2796088 - RNA, 19 nt, Artificial Sequence
  Description of Artificial Sequence: Synthetic oligonucleotide
cacacacugcucccgcaug

SEQ ID NO: 2796089 - RNA, 19 nt, Artificial Sequence
  Description of Artificial Sequence: Synthetic oligonucleotide
accacgcugcgccggaaga

SEQ ID NO: 2796090 - RNA, 19 nt, Artificial Sequence
  Description of Artificial Sequence: Synthetic oligonucleotide
gcagagcuggcacuugcgc

SEQ ID NO: 2796091 - RNA, 19 nt, Artificial Sequence
  Description of Artificial Sequence: Synthetic oligonucleotide
cccagccccaccauguacc

SEQ ID NO: 2796092 - RNA, 19 nt, Artificial Sequence
  Description of Artificial Sequence: Synthetic oligonucleotide
ugcacccaagggccagggc

SEQ ID NO: 2796093 - RNA, 19 nt, Artificial Sequence
  Description of Artificial Sequence: Synthetic oligonucleotide
cauagcgcccagccccacc

SEQ ID NO: 2796094 - RNA, 19 nt, Artificial Sequence
  Description of Artificial Sequence: Synthetic oligonucleotide
ucgggcugagcuacuugau

SEQ ID NO: 2796095 - RNA, 19 nt, Artificial Sequence
  Description of Artificial Sequence: Synthetic oligonucleotide
aguaccaggggaggcuaca

SEQ ID NO: 2796096 - RNA, 19 nt, Artificial Sequence
  Description of Artificial Sequence: Synthetic oligonucleotide
gcaugaaggcauccauuug

SEQ ID NO: 2796097 - RNA, 19 nt, Artificial Sequence
  Description of Artificial Sequence: Synthetic oligonucleotide
agaacccuggcaccugcuu

SEQ ID NO: 2796098 - RNA, 19 nt, Artificial Sequence
  Description of Artificial Sequence: Synthetic oligonucleotide
gggcuggucggagaaagag

SEQ ID NO: 2796099 - RNA, 19 nt, Artificial Sequence
  Description of Artificial Sequence: Synthetic oligonucleotide
cuuugggcuggucggagaa

SEQ ID NO: 2796100 - RNA, 19 nt, Artificial Sequence
  Description of Artificial Sequence: Synthetic oligonucleotide
acgcugcgccggaagagcc

SEQ ID NO: 2796101 - RNA, 19 nt, Artificial Sequence
  Description of Artificial Sequence: Synthetic oligonucleotide
gcacuugcgccgcaugaag

SEQ ID NO: 2796102 - RNA, 19 nt, Artificial Sequence
  Description of Artificial Sequence: Synthetic oligonucleotide
aagggccagggcgugacuu

SEQ ID NO: 2796103 - RNA, 19 nt, Artificial Sequence
  Description of Artificial Sequence: Synthetic oligonucleotide
ucagucugggauggcugcu

SEQ ID NO: 2796104 - RNA, 19 nt, Artificial Sequence
  Description of Artificial Sequence: Synthetic oligonucleotide
cacgcugcgccggaagagc

SEQ ID NO: 2796105 - RNA, 19 nt, Artificial Sequence
  Description of Artificial Sequence: Synthetic oligonucleotide
ggacugagaugauggccag

SEQ ID NO: 2796106 - RNA, 19 nt, Artificial Sequence
  Description of Artificial Sequence: Synthetic oligonucleotide
cugcagcugcgcagcaacc

SEQ ID NO: 2796107 - RNA, 19 nt, Artificial Sequence
  Description of Artificial Sequence: Synthetic oligonucleotide
guaccaggggaggcuacag

SEQ ID NO: 2796108 - RNA, 19 nt, Artificial Sequence
  Description of Artificial Sequence: Synthetic oligonucleotide
agcacacacugcucccgca

SEQ ID NO: 2796109 - RNA, 19 nt, Artificial Sequence
  Description of Artificial Sequence: Synthetic oligonucleotide
cagcugcgcagcaaccaac

SEQ ID NO: 2796110 - RNA, 19 nt, Artificial Sequence
  Description of Artificial Sequence: Synthetic oligonucleotide
cuccuugcacuugcguagc

SEQ ID NO: 2796111 - RNA, 19 nt, Artificial Sequence
  Description of Artificial Sequence: Synthetic oligonucleotide
uacuugaugcuggcucagu

SEQ ID NO: 2796112 - RNA, 19 nt, Artificial Sequence
  Description of Artificial Sequence: Synthetic oligonucleotide
agguuccacugccucgaca

SEQ ID NO: 2796113 - RNA, 19 nt, Artificial Sequence
  Description of Artificial Sequence: Synthetic oligonucleotide
ccggaagagccuugcagcc

SEQ ID NO: 2796114 - RNA, 19 nt, Artificial Sequence
  Description of Artificial Sequence: Synthetic oligonucleotide
ugcgccggaagagccuugc

SEQ ID NO: 2796115 - RNA, 19 nt, Artificial Sequence
  Description of Artificial Sequence: Synthetic oligonucleotide
gcucuugcgccgcugucag

SEQ ID NO: 2796116 - RNA, 19 nt, Artificial Sequence
  Description of Artificial Sequence: Synthetic oligonucleotide
cuugcguagccggcagagc

SEQ ID NO: 2796117 - RNA, 19 nt, Artificial Sequence
  Description of Artificial Sequence: Synthetic oligonucleotide
agccuccuugcacuugcgu

SEQ ID NO: 2796118 - RNA, 19 nt, Artificial Sequence
  Description of Artificial Sequence: Synthetic oligonucleotide
agcguuuguugcacugcag

SEQ ID NO: 2796119 - RNA, 19 nt, Artificial Sequence
  Description of Artificial Sequence: Synthetic oligonucleotide
ucgggacugagggucugca

SEQ ID NO: 2796120 - RNA, 19 nt, Artificial Sequence
  Description of Artificial Sequence: Synthetic oligonucleotide
ugcgccgcugucagcugga

SEQ ID NO: 2796121 - RNA, 19 nt, Artificial Sequence
  Description of Artificial Sequence: Synthetic oligonucleotide
agcuggaugcccucuccuu

SEQ ID NO: 2796122 - RNA, 19 nt, Artificial Sequence
  Description of Artificial Sequence: Synthetic oligonucleotide
ugucagcuggaugcccucu

SEQ ID NO: 2796123 - RNA, 19 nt, Artificial Sequence
  Description of Artificial Sequence: Synthetic oligonucleotide
agcugcgcagcaaccaacu

SEQ ID NO: 2796124 - RNA, 19 nt, Artificial Sequence
  Description of Artificial Sequence: Synthetic oligonucleotide
aagaacccuggcaccugcu

SEQ ID NO: 2796125 - RNA, 19 nt, Artificial Sequence
  Description of Artificial Sequence: Synthetic oligonucleotide
cacacugcucccgcaugcc

SEQ ID NO: 2796126 - RNA, 19 nt, Artificial Sequence
  Description of Artificial Sequence: Synthetic oligonucleotide
acugagggucugcacccaa

SEQ ID NO: 2796127 - RNA, 19 nt, Artificial Sequence
  Description of Artificial Sequence: Synthetic oligonucleotide
ccuggacugagaugauggc

SEQ ID NO: 2796128 - RNA, 19 nt, Artificial Sequence
  Description of Artificial Sequence: Synthetic oligonucleotide
ugcccucuccuuccccgga

SEQ ID NO: 2796129 - RNA, 19 nt, Artificial Sequence
  Description of Artificial Sequence: Synthetic oligonucleotide
ugcgccgcaugaaggcauc

SEQ ID NO: 2796130 - RNA, 19 nt, Artificial Sequence
  Description of Artificial Sequence: Synthetic oligonucleotide
ccagccuccuugcacuugc

SEQ ID NO: 2796131 - RNA, 19 nt, Artificial Sequence
  Description of Artificial Sequence: Synthetic oligonucleotide
cuccgugaagugggcaaag

SEQ ID NO: 2796132 - RNA, 19 nt, Artificial Sequence
  Description of Artificial Sequence: Synthetic oligonucleotide
cuccuggacugagaugaug

SEQ ID NO: 2796133 - RNA, 19 nt, Artificial Sequence
  Description of Artificial Sequence: Synthetic oligonucleotide
ucuccuggacugagaugau

SEQ ID NO: 2796134 - RNA, 19 nt, Artificial Sequence
  Description of Artificial Sequence: Synthetic oligonucleotide
gcuggaugcccucuccuuc

SEQ ID NO: 2796135 - RNA, 19 nt, Artificial Sequence
  Description of Artificial Sequence: Synthetic oligonucleotide
gacgagcaucucgggacug

SEQ ID NO: 2796136 - RNA, 19 nt, Artificial Sequence
  Description of Artificial Sequence: Synthetic oligonucleotide
aggggaggcuacaggucgg

SEQ ID NO: 2796137 - RNA, 19 nt, Artificial Sequence
  Description of Artificial Sequence: Synthetic oligonucleotide
gucagcuggaugcccucuc

SEQ ID NO: 2796138 - RNA, 19 nt, Artificial Sequence
  Description of Artificial Sequence: Synthetic oligonucleotide
uuugggcuggucggagaaa

SEQ ID NO: 2796139 - RNA, 19 nt, Artificial Sequence
  Description of Artificial Sequence: Synthetic oligonucleotide
gccagggcgugacuuuggg

SEQ ID NO: 2796140 - RNA, 19 nt, Artificial Sequence
  Description of Artificial Sequence: Synthetic oligonucleotide
gccucgacaggcauagcgc

SEQ ID NO: 2796141 - RNA, 19 nt, Artificial Sequence
  Description of Artificial Sequence: Synthetic oligonucleotide
ggcuggucggagaaagagc

SEQ ID NO: 2796142 - RNA, 19 nt, Artificial Sequence
  Description of Artificial Sequence: Synthetic oligonucleotide
cugagaugauggccagcuc

SEQ ID NO: 2796143 - RNA, 19 nt, Artificial Sequence
  Description of Artificial Sequence: Synthetic oligonucleotide
ggcagagcuggcacuugcg

SEQ ID NO: 2796144 - RNA, 19 nt, Artificial Sequence
  Description of Artificial Sequence: Synthetic oligonucleotide
cugucagcuggaugcccuc

SEQ ID NO: 2796145 - RNA, 19 nt, Artificial Sequence
  Description of Artificial Sequence: Synthetic oligonucleotide
cuuccccggagccccuggc

SEQ ID NO: 2796146 - RNA, 19 nt, Artificial Sequence
  Description of Artificial Sequence: Synthetic oligonucleotide
gacaggcauagcgcccagc

SEQ ID NO: 2796147 - RNA, 19 nt, Artificial Sequence
  Description of Artificial Sequence: Synthetic oligonucleotide
ccuugcacuugcguagccg

SEQ ID NO: 2796148 - RNA, 19 nt, Artificial Sequence
  Description of Artificial Sequence: Synthetic oligonucleotide
gucugcacccaagggccag

SEQ ID NO: 2796149 - RNA, 19 nt, Artificial Sequence
  Description of Artificial Sequence: Synthetic oligonucleotide
gcugagcuacuugaugcug

SEQ ID NO: 2796150 - RNA, 19 nt, Artificial Sequence
  Description of Artificial Sequence: Synthetic oligonucleotide
gcaccugcuuggcaaaguc

SEQ ID NO: 2796151 - RNA, 19 nt, Artificial Sequence
  Description of Artificial Sequence: Synthetic oligonucleotide
cuggcacuugcgccgcaug

SEQ ID NO: 2796152 - RNA, 19 nt, Artificial Sequence
  Description of Artificial Sequence: Synthetic oligonucleotide
cagccuccuugcacuugcg

SEQ ID NO: 2796153 - RNA, 19 nt, Artificial Sequence
  Description of Artificial Sequence: Synthetic oligonucleotide
cugcacccaagggccaggg

SEQ ID NO: 2796154 - RNA, 19 nt, Artificial Sequence
  Description of Artificial Sequence: Synthetic oligonucleotide
guagccggcagagcuggca

SEQ ID NO: 2796155 - RNA, 19 nt, Artificial Sequence
  Description of Artificial Sequence: Synthetic oligonucleotide
agaugauggccagcuccgu

SEQ ID NO: 2796156 - RNA, 19 nt, Artificial Sequence
  Description of Artificial Sequence: Synthetic oligonucleotide
aagcgcugcugacgagcau

SEQ ID NO: 2796157 - RNA, 19 nt, Artificial Sequence
  Description of Artificial Sequence: Synthetic oligonucleotide
gcguagccggcagagcugg

SEQ ID NO: 2796158 - RNA, 19 nt, Artificial Sequence
  Description of Artificial Sequence: Synthetic oligonucleotide
gcacuugcguagccggcag

SEQ ID NO: 2796159 - RNA, 19 nt, Artificial Sequence
  Description of Artificial Sequence: Synthetic oligonucleotide
cuugcgccgcugucagcug

SEQ ID NO: 2796160 - RNA, 19 nt, Artificial Sequence
  Description of Artificial Sequence: Synthetic oligonucleotide
ccgcaugccagccuccuug

SEQ ID NO: 2796161 - RNA, 19 nt, Artificial Sequence
  Description of Artificial Sequence: Synthetic oligonucleotide
ucucgggacugagggucug

SEQ ID NO: 2796162 - RNA, 19 nt, Artificial Sequence
  Description of Artificial Sequence: Synthetic oligonucleotide
agccggcagagcuggcacu

SEQ ID NO: 2796163 - RNA, 19 nt, Artificial Sequence
  Description of Artificial Sequence: Synthetic oligonucleotide
aucagcucuugcgccgcug

SEQ ID NO: 2796164 - RNA, 19 nt, Artificial Sequence
  Description of Artificial Sequence: Synthetic oligonucleotide
acgagcaucucgggacuga

SEQ ID NO: 2796165 - RNA, 19 nt, Artificial Sequence
  Description of Artificial Sequence: Synthetic oligonucleotide
gcucagucugggauggcug

SEQ ID NO: 2796166 - RNA, 19 nt, Artificial Sequence
  Description of Artificial Sequence: Synthetic oligonucleotide
cuugcgccgcaugaaggca

SEQ ID NO: 2796167 - RNA, 19 nt, Artificial Sequence
  Description of Artificial Sequence: Synthetic oligonucleotide
ggaggcuacaggucgggcu

SEQ ID NO: 2796168 - RNA, 19 nt, Artificial Sequence
  Description of Artificial Sequence: Synthetic oligonucleotide
ggagccccuggccaccagc

SEQ ID NO: 2796169 - RNA, 19 nt, Artificial Sequence
  Description of Artificial Sequence: Synthetic oligonucleotide
cucccgcaugccagccucc

SEQ ID NO: 2796170 - RNA, 19 nt, Artificial Sequence
  Description of Artificial Sequence: Synthetic oligonucleotide
gagcuggcacuugcgccgc

SEQ ID NO: 2796171 - RNA, 19 nt, Artificial Sequence
  Description of Artificial Sequence: Synthetic oligonucleotide
cucgggacugagggucugc

SEQ ID NO: 2796172 - RNA, 19 nt, Artificial Sequence
  Description of Artificial Sequence: Synthetic oligonucleotide
ccuggcaccugcuuggcaa

SEQ ID NO: 2796173 - RNA, 19 nt, Artificial Sequence
  Description of Artificial Sequence: Synthetic oligonucleotide
agggccagggcgugacuuu

SEQ ID NO: 2796174 - RNA, 19 nt, Artificial Sequence
  Description of Artificial Sequence: Synthetic oligonucleotide
cugcugcugcugcugcuuc

SEQ ID NO: 2796175 - RNA, 19 nt, Artificial Sequence
  Description of Artificial Sequence: Synthetic oligonucleotide
gcuggaucaucagcucuug

SEQ ID NO: 2796176 - RNA, 19 nt, Artificial Sequence
  Description of Artificial Sequence: Synthetic oligonucleotide
gcagguuccacugccucga

SEQ ID NO: 2796177 - RNA, 19 nt, Artificial Sequence
  Description of Artificial Sequence: Synthetic oligonucleotide
cucuugcgccgcugucagc

SEQ ID NO: 2796178 - RNA, 19 nt, Artificial Sequence
  Description of Artificial Sequence: Synthetic oligonucleotide
cugcuggaucaucagcucu

SEQ ID NO: 2796179 - RNA, 19 nt, Artificial Sequence
  Description of Artificial Sequence: Synthetic oligonucleotide
ucccgcaugccagccuccu

SEQ ID NO: 2796180 - RNA, 19 nt, Artificial Sequence
  Description of Artificial Sequence: Synthetic oligonucleotide
aggcauccauuuggcaggu

SEQ ID NO: 2796181 - RNA, 19 nt, Artificial Sequence
  Description of Artificial Sequence: Synthetic oligonucleotide
ccagggcgugacuuugggc

SEQ ID NO: 2796182 - RNA, 19 nt, Artificial Sequence
  Description of Artificial Sequence: Synthetic oligonucleotide
gcugcgcagcaaccaacug

SEQ ID NO: 2796183 - RNA, 19 nt, Artificial Sequence
  Description of Artificial Sequence: Synthetic oligonucleotide
gacugagggucugcaccca

SEQ ID NO: 2796184 - RNA, 19 nt, Artificial Sequence
  Description of Artificial Sequence: Synthetic oligonucleotide
ggggaggcuacaggucggg

SEQ ID NO: 2796185 - RNA, 19 nt, Artificial Sequence
  Description of Artificial Sequence: Synthetic oligonucleotide
gaagagccuugcagccuuc

SEQ ID NO: 2796186 - RNA, 19 nt, Artificial Sequence
  Description of Artificial Sequence: Synthetic oligonucleotide
gggcgugacuuugggcugg

SEQ ID NO: 2796187 - RNA, 19 nt, Artificial Sequence
  Description of Artificial Sequence: Synthetic oligonucleotide
gcucccgcaugccagccuc

SEQ ID NO: 2796188 - RNA, 19 nt, Artificial Sequence
  Description of Artificial Sequence: Synthetic oligonucleotide
cgccggaagagccuugcag

SEQ ID NO: 2796189 - RNA, 19 nt, Artificial Sequence
  Description of Artificial Sequence: Synthetic oligonucleotide
ccaggggaggcuacagguc

SEQ ID NO: 2796190 - RNA, 19 nt, Artificial Sequence
  Description of Artificial Sequence: Synthetic oligonucleotide
ccaccagcuucagaaguac

SEQ ID NO: 2796191 - RNA, 19 nt, Artificial Sequence
  Description of Artificial Sequence: Synthetic oligonucleotide
cuggcaccugcuuggcaaa

SEQ ID NO: 2796192 - RNA, 19 nt, Artificial Sequence
  Description of Artificial Sequence: Synthetic oligonucleotide
gcaagaacccuggcaccug

SEQ ID NO: 2796193 - RNA, 19 nt, Artificial Sequence
  Description of Artificial Sequence: Synthetic oligonucleotide
cacccaagggccagggcgu

SEQ ID NO: 2796194 - RNA, 19 nt, Artificial Sequence
  Description of Artificial Sequence: Synthetic oligonucleotide
cugcucccgcaugccagcc

SEQ ID NO: 2796195 - RNA, 19 nt, Artificial Sequence
  Description of Artificial Sequence: Synthetic oligonucleotide
ggaagagccuugcagccuu

SEQ ID NO: 2796196 - RNA, 19 nt, Artificial Sequence
  Description of Artificial Sequence: Synthetic oligonucleotide
ggcugagcuacuugaugcu

SEQ ID NO: 2796197 - RNA, 19 nt, Artificial Sequence
  Description of Artificial Sequence: Synthetic oligonucleotide
ugccagccuccuugcacuu

SEQ ID NO: 2796198 - RNA, 19 nt, Artificial Sequence
  Description of Artificial Sequence: Synthetic oligonucleotide
gcagcugcgcagcaaccaa

SEQ ID NO: 2796199 - RNA, 19 nt, Artificial Sequence
  Description of Artificial Sequence: Synthetic oligonucleotide
ccagcuccgugaagugggc

SEQ ID NO: 2796200 - RNA, 19 nt, Artificial Sequence
  Description of Artificial Sequence: Synthetic oligonucleotide
ggccaccagcuucagaagu

SEQ ID NO: 2796201 - RNA, 19 nt, Artificial Sequence
  Description of Artificial Sequence: Synthetic oligonucleotide
aggcuacaggucgggcuga

SEQ ID NO: 2796202 - RNA, 19 nt, Artificial Sequence
  Description of Artificial Sequence: Synthetic oligonucleotide
uccuuccccggagccccug

SEQ ID NO: 2796203 - RNA, 19 nt, Artificial Sequence
  Description of Artificial Sequence: Synthetic oligonucleotide
acccaagggccagggcgug

SEQ ID NO: 2796204 - RNA, 19 nt, Artificial Sequence
  Description of Artificial Sequence: Synthetic oligonucleotide
gcccucuccuuccccggag

SEQ ID NO: 2796205 - RNA, 19 nt, Artificial Sequence
  Description of Artificial Sequence: Synthetic oligonucleotide
ggccagggcgugacuuugg

SEQ ID NO: 2796206 - RNA, 19 nt, Artificial Sequence
  Description of Artificial Sequence: Synthetic oligonucleotide
cacuugcguagccggcaga

SEQ ID NO: 2796207 - RNA, 19 nt, Artificial Sequence
  Description of Artificial Sequence: Synthetic oligonucleotide
cgggcugagcuacuugaug

SEQ ID NO: 2796208 - RNA, 19 nt, Artificial Sequence
  Description of Artificial Sequence: Synthetic oligonucleotide
cugcgccggaagagccuug

SEQ ID NO: 2796209 - RNA, 19 nt, Artificial Sequence
  Description of Artificial Sequence: Synthetic oligonucleotide
cacugccucgacaggcaua

SEQ ID NO: 2796210 - RNA, 19 nt, Artificial Sequence
  Description of Artificial Sequence: Synthetic oligonucleotide
gagccccuggccaccagcu

SEQ ID NO: 2796211 - RNA, 19 nt, Artificial Sequence
  Description of Artificial Sequence: Synthetic oligonucleotide
gcccagccccaccauguac

SEQ ID NO: 2796212 - RNA, 19 nt, Artificial Sequence
  Description of Artificial Sequence: Synthetic oligonucleotide
cgcaugccagccuccuugc

SEQ ID NO: 2796213 - RNA, 19 nt, Artificial Sequence
  Description of Artificial Sequence: Synthetic oligonucleotide
ccaagggccagggcgugac

SEQ ID NO: 2796214 - RNA, 19 nt, Artificial Sequence
  Description of Artificial Sequence: Synthetic oligonucleotide
gagcuacuugaugcuggcu

SEQ ID NO: 2796215 - RNA, 19 nt, Artificial Sequence
  Description of Artificial Sequence: Synthetic oligonucleotide
cccucuccuuccccggagc

SEQ ID NO: 2796216 - RNA, 19 nt, Artificial Sequence
  Description of Artificial Sequence: Synthetic oligonucleotide
ggcacuugcgccgcaugaa

SEQ ID NO: 2796217 - RNA, 19 nt, Artificial Sequence
  Description of Artificial Sequence: Synthetic oligonucleotide
cuggucggagaaagagcgu

SEQ ID NO: 2796218 - RNA, 19 nt, Artificial Sequence
  Description of Artificial Sequence: Synthetic oligonucleotide
gggccagggcgugacuuug

SEQ ID NO: 2796219 - RNA, 19 nt, Artificial Sequence
  Description of Artificial Sequence: Synthetic oligonucleotide
agccccuggccaccagcuu

SEQ ID NO: 2796220 - RNA, 19 nt, Artificial Sequence
  Description of Artificial Sequence: Synthetic oligonucleotide
ccuuccccggagccccugg

SEQ ID NO: 2796221 - RNA, 19 nt, Artificial Sequence
  Description of Artificial Sequence: Synthetic oligonucleotide
gggaggcuacaggucgggc

SEQ ID NO: 2796222 - RNA, 19 nt, Artificial Sequence
  Description of Artificial Sequence: Synthetic oligonucleotide
ggcuacaggucgggcugag

SEQ ID NO: 2796223 - RNA, 19 nt, Artificial Sequence
  Description of Artificial Sequence: Synthetic oligonucleotide
gcuacaggucgggcugagc

SEQ ID NO: 2796224 - RNA, 19 nt, Artificial Sequence
  Description of Artificial Sequence: Synthetic oligonucleotide
agcuggcacuugcgccgca

SEQ ID NO: 2796225 - RNA, 19 nt, Artificial Sequence
  Description of Artificial Sequence: Synthetic oligonucleotide
aggucgggcugagcuacuu

SEQ ID NO: 2796226 - RNA, 19 nt, Artificial Sequence
  Description of Artificial Sequence: Synthetic oligonucleotide
ccacgcugcgccggaagag

SEQ ID NO: 2796227 - RNA, 19 nt, Artificial Sequence
  Description of Artificial Sequence: Synthetic oligonucleotide
gccgcaugaaggcauccau

SEQ ID NO: 2796228 - RNA, 19 nt, Artificial Sequence
  Description of Artificial Sequence: Synthetic oligonucleotide
cggcagagcuggcacuugc

SEQ ID NO: 2796229 - RNA, 19 nt, Artificial Sequence
  Description of Artificial Sequence: Synthetic oligonucleotide
gccaccagcuucagaagua

SEQ ID NO: 2796230 - RNA, 19 nt, Artificial Sequence
  Description of Artificial Sequence: Synthetic oligonucleotide
cgaaucuguucuucagaaa

SEQ ID NO: 2796231 - RNA, 19 nt, Artificial Sequence
  Description of Artificial Sequence: Synthetic oligonucleotide
gcugucagcuggaugcccu

SEQ ID NO: 2796232 - RNA, 19 nt, Artificial Sequence
  Description of Artificial Sequence: Synthetic oligonucleotide
ggcauagcgcccagcccca

SEQ ID NO: 2796233 - RNA, 19 nt, Artificial Sequence
  Description of Artificial Sequence: Synthetic oligonucleotide
cgagcaucucgggacugag

SEQ ID NO: 2796234 - RNA, 19 nt, Artificial Sequence
  Description of Artificial Sequence: Synthetic oligonucleotide
ggcucagucugggauggcu

SEQ ID NO: 2796235 - RNA, 19 nt, Artificial Sequence
  Description of Artificial Sequence: Synthetic oligonucleotide
cagcuccgugaagugggca

SEQ ID NO: 2796236 - RNA, 19 nt, Artificial Sequence
  Description of Artificial Sequence: Synthetic oligonucleotide
caaccaacugcuggaucau

SEQ ID NO: 2796237 - RNA, 19 nt, Artificial Sequence
  Description of Artificial Sequence: Synthetic oligonucleotide
gccccaccauguaccacgc

SEQ ID NO: 2796238 - RNA, 19 nt, Artificial Sequence
  Description of Artificial Sequence: Synthetic oligonucleotide
cugccucgacaggcauagc

SEQ ID NO: 2796239 - RNA, 19 nt, Artificial Sequence
  Description of Artificial Sequence: Synthetic oligonucleotide
gcuccgugaagugggcaaa

SEQ ID NO: 2796240 - RNA, 19 nt, Artificial Sequence
  Description of Artificial Sequence: Synthetic oligonucleotide
gcacacacugcucccgcau

SEQ ID NO: 2796241 - RNA, 19 nt, Artificial Sequence
  Description of Artificial Sequence: Synthetic oligonucleotide
gcaucucgggacugagggu

SEQ ID NO: 2796242 - RNA, 19 nt, Artificial Sequence
  Description of Artificial Sequence: Synthetic oligonucleotide
ggucugcacccaagggcca

SEQ ID NO: 2796243 - RNA, 19 nt, Artificial Sequence
  Description of Artificial Sequence: Synthetic oligonucleotide
gccagccuccuugcacuug

SEQ ID NO: 2796244 - RNA, 19 nt, Artificial Sequence
  Description of Artificial Sequence: Synthetic oligonucleotide
ccgcugucagcuggaugcc

SEQ ID NO: 2796245 - RNA, 19 nt, Artificial Sequence
  Description of Artificial Sequence: Synthetic oligonucleotide
cgggacugagggucugcac

SEQ ID NO: 2796246 - RNA, 19 nt, Artificial Sequence
  Description of Artificial Sequence: Synthetic oligonucleotide
cagcaaccaacugcuggau

SEQ ID NO: 2796247 - RNA, 19 nt, Artificial Sequence
  Description of Artificial Sequence: Synthetic oligonucleotide
gcgccgcaugaaggcaucc

SEQ ID NO: 2796248 - RNA, 19 nt, Artificial Sequence
  Description of Artificial Sequence: Synthetic oligonucleotide
guaccacgcugcgccggaa

SEQ ID NO: 2796249 - RNA, 19 nt, Artificial Sequence
  Description of Artificial Sequence: Synthetic oligonucleotide
ggcaccugcuuggcaaagu

SEQ ID NO: 2796250 - RNA, 19 nt, Artificial Sequence
  Description of Artificial Sequence: Synthetic oligonucleotide
cgcugucagcuggaugccc

SEQ ID NO: 2796251 - RNA, 19 nt, Artificial Sequence
  Description of Artificial Sequence: Synthetic oligonucleotide
ggucggagaaagagcguuu

SEQ ID NO: 2796252 - RNA, 19 nt, Artificial Sequence
  Description of Artificial Sequence: Synthetic oligonucleotide
ccacaaucuccuggacuga

SEQ ID NO: 2796253 - RNA, 19 nt, Artificial Sequence
  Description of Artificial Sequence: Synthetic oligonucleotide
caucagcucuugcgccgcu

SEQ ID NO: 2796254 - RNA, 19 nt, Artificial Sequence
  Description of Artificial Sequence: Synthetic oligonucleotide
gcgccggaagagccuugca

SEQ ID NO: 2796255 - RNA, 19 nt, Artificial Sequence
  Description of Artificial Sequence: Synthetic oligonucleotide
ggcugcugcugcugcugcu

SEQ ID NO: 2796256 - RNA, 19 nt, Artificial Sequence
  Description of Artificial Sequence: Synthetic oligonucleotide
caagggccagggcgugacu

SEQ ID NO: 2796257 - RNA, 19 nt, Artificial Sequence
  Description of Artificial Sequence: Synthetic oligonucleotide
cccggagccccuggccacc

SEQ ID NO: 2796258 - RNA, 19 nt, Artificial Sequence
  Description of Artificial Sequence: Synthetic oligonucleotide
gcgcagcaaccaacugcug

SEQ ID NO: 2796259 - RNA, 19 nt, Artificial Sequence
  Description of Artificial Sequence: Synthetic oligonucleotide
cguagccggcagagcuggc

SEQ ID NO: 2796260 - RNA, 19 nt, Artificial Sequence
  Description of Artificial Sequence: Synthetic oligonucleotide
cgacaggcauagcgcccag

SEQ ID NO: 2796261 - RNA, 19 nt, Artificial Sequence
  Description of Artificial Sequence: Synthetic oligonucleotide
caggucgggcugagcuacu

SEQ ID NO: 2796262 - RNA, 19 nt, Artificial Sequence
  Description of Artificial Sequence: Synthetic oligonucleotide
ccgcaugaaggcauccauu

SEQ ID NO: 2796263 - RNA, 19 nt, Artificial Sequence
  Description of Artificial Sequence: Synthetic oligonucleotide
cgccgcugucagcuggaug

SEQ ID NO: 2796264 - RNA, 19 nt, Artificial Sequence
  Description of Artificial Sequence: Synthetic oligonucleotide
gcgcugcugacgagcaucu

SEQ ID NO: 2796265 - RNA, 19 nt, Artificial Sequence
  Description of Artificial Sequence: Synthetic oligonucleotide
gcgcccagccccaccaugu

SEQ ID NO: 2796266 - RNA, 19 nt, Artificial Sequence
  Description of Artificial Sequence: Synthetic oligonucleotide
gcugcugcugcugcugcuu

SEQ ID NO: 2796267 - RNA, 19 nt, Artificial Sequence
  Description of Artificial Sequence: Synthetic oligonucleotide
cggagaaagagcguuuguu

SEQ ID NO: 2796268 - RNA, 19 nt, Artificial Sequence
  Description of Artificial Sequence: Synthetic oligonucleotide
gcauagcgcccagccccac

SEQ ID NO: 2796269 - RNA, 19 nt, Artificial Sequence
  Description of Artificial Sequence: Synthetic oligonucleotide
ccggcagagcuggcacuug

SEQ ID NO: 2796270 - RNA, 19 nt, Artificial Sequence
  Description of Artificial Sequence: Synthetic oligonucleotide
gcugcgccggaagagccuu

SEQ ID NO: 2796271 - RNA, 19 nt, Artificial Sequence
  Description of Artificial Sequence: Synthetic oligonucleotide
cuccuuccccggagccccu

SEQ ID NO: 2796272 - RNA, 19 nt, Artificial Sequence
  Description of Artificial Sequence: Synthetic oligonucleotide
gccggcagagcuggcacuu

SEQ ID NO: 2796273 - RNA, 19 nt, Artificial Sequence
  Description of Artificial Sequence: Synthetic oligonucleotide
gcuggcacuugcgccgcau

SEQ ID NO: 2796274 - RNA, 19 nt, Artificial Sequence
  Description of Artificial Sequence: Synthetic oligonucleotide
gcgugacuuugggcugguc

SEQ ID NO: 2796275 - RNA, 19 nt, Artificial Sequence
  Description of Artificial Sequence: Synthetic oligonucleotide
ggcgugacuuugggcuggu

SEQ ID NO: 2796276 - RNA, 19 nt, Artificial Sequence
  Description of Artificial Sequence: Synthetic oligonucleotide
cccaagggccagggcguga

SEQ ID NO: 2796277 - RNA, 19 nt, Artificial Sequence
  Description of Artificial Sequence: Synthetic oligonucleotide
ccacugccucgacaggcau

SEQ ID NO: 2796278 - RNA, 19 nt, Artificial Sequence
  Description of Artificial Sequence: Synthetic oligonucleotide
cggaagagccuugcagccu

SEQ ID NO: 2796279 - RNA, 19 nt, Artificial Sequence
  Description of Artificial Sequence: Synthetic oligonucleotide
cgcugcugacgagcaucuc

SEQ ID NO: 2796280 - RNA, 19 nt, Artificial Sequence
  Description of Artificial Sequence: Synthetic oligonucleotide
cgcugcgccggaagagccu

SEQ ID NO: 2796281 - RNA, 19 nt, Artificial Sequence
  Description of Artificial Sequence: Synthetic oligonucleotide
ccggagccccuggccacca

SEQ ID NO: 2796282 - RNA, 19 nt, Artificial Sequence
  Description of Artificial Sequence: Synthetic oligonucleotide
ggcauccauuuggcagguu

SEQ ID NO: 2796283 - RNA, 19 nt, Artificial Sequence
  Description of Artificial Sequence: Synthetic oligonucleotide
cgcccagccccaccaugua

SEQ ID NO: 2796284 - RNA, 19 nt, Artificial Sequence
  Description of Artificial Sequence: Synthetic oligonucleotide
ccccaccauguaccacgcu

SEQ ID NO: 2796285 - RNA, 19 nt, Artificial Sequence
  Description of Artificial Sequence: Synthetic oligonucleotide
cccgcaugccagccuccuu

SEQ ID NO: 2796286 - RNA, 19 nt, Artificial Sequence
  Description of Artificial Sequence: Synthetic oligonucleotide
gcgccgcugucagcuggau

SEQ ID NO: 2796287 - RNA, 19 nt, Artificial Sequence
  Description of Artificial Sequence: Synthetic oligonucleotide
uauuauauaaaugagaacg

SEQ ID NO: 2796288 - RNA, 19 nt, Artificial Sequence
  Description of Artificial Sequence: Synthetic oligonucleotide
agaaauagaacauagugag

SEQ ID NO: 2796289 - RNA, 19 nt, Artificial Sequence
  Description of Artificial Sequence: Synthetic oligonucleotide
aaaaccaugaaagucaggg

SEQ ID NO: 2796290 - RNA, 19 nt, Artificial Sequence
  Description of Artificial Sequence: Synthetic oligonucleotide
aauaaggacaucuuugguc

SEQ ID NO: 2796291 - RNA, 19 nt, Artificial Sequence
  Description of Artificial Sequence: Synthetic oligonucleotide
auaaggacaucuuuggucc

SEQ ID NO: 2796292 - RNA, 19 nt, Artificial Sequence
  Description of Artificial Sequence: Synthetic oligonucleotide
uguauuauauaaaugagaa

SEQ ID NO: 2796293 - RNA, 19 nt, Artificial Sequence
  Description of Artificial Sequence: Synthetic oligonucleotide
uacuguauuauauaaauga

SEQ ID NO: 2796294 - RNA, 19 nt, Artificial Sequence
  Description of Artificial Sequence: Synthetic oligonucleotide
aacacuagcaauuauuaga

SEQ ID NO: 2796295 - RNA, 19 nt, Artificial Sequence
  Description of Artificial Sequence: Synthetic oligonucleotide
ugcaguguaaccaaaaucu

SEQ ID NO: 2796296 - RNA, 19 nt, Artificial Sequence
  Description of Artificial Sequence: Synthetic oligonucleotide
gaaagcauaaaacacuuug

SEQ ID NO: 2796297 - RNA, 19 nt, Artificial Sequence
  Description of Artificial Sequence: Synthetic oligonucleotide
aaauagaacauagugagga

SEQ ID NO: 2796298 - RNA, 19 nt, Artificial Sequence
  Description of Artificial Sequence: Synthetic oligonucleotide
acuagcaauuauuagaaag

SEQ ID NO: 2796299 - RNA, 19 nt, Artificial Sequence
  Description of Artificial Sequence: Synthetic oligonucleotide
uuauuagaaagcauaaaac

SEQ ID NO: 2796300 - RNA, 19 nt, Artificial Sequence
  Description of Artificial Sequence: Synthetic oligonucleotide
guaauacugauuuaccucg

SEQ ID NO: 2796301 - RNA, 19 nt, Artificial Sequence
  Description of Artificial Sequence: Synthetic oligonucleotide
cuagaaauagaacauagug

SEQ ID NO: 2796302 - RNA, 19 nt, Artificial Sequence
  Description of Artificial Sequence: Synthetic oligonucleotide
agaaucaggugacaaaggc

SEQ ID NO: 2796303 - RNA, 19 nt, Artificial Sequence
  Description of Artificial Sequence: Synthetic oligonucleotide
aacucgaaaggucaggcuc

SEQ ID NO: 2796304 - RNA, 19 nt, Artificial Sequence
  Description of Artificial Sequence: Synthetic oligonucleotide
agugaggaaaaccacugcc

SEQ ID NO: 2796305 - RNA, 19 nt, Artificial Sequence
  Description of Artificial Sequence: Synthetic oligonucleotide
uagaaauagaacauaguga

SEQ ID NO: 2796306 - RNA, 19 nt, Artificial Sequence
  Description of Artificial Sequence: Synthetic oligonucleotide
auaaaugagaacguaacuc

SEQ ID NO: 2796307 - RNA, 19 nt, Artificial Sequence
  Description of Artificial Sequence: Synthetic oligonucleotide
aagacauaguuuguaauac

SEQ ID NO: 2796308 - RNA, 19 nt, Artificial Sequence
  Description of Artificial Sequence: Synthetic oligonucleotide
agucauuugauuauagccc

SEQ ID NO: 2796309 - RNA, 19 nt, Artificial Sequence
  Description of Artificial Sequence: Synthetic oligonucleotide
aauagaacauagugaggac

SEQ ID NO: 2796310 - RNA, 19 nt, Artificial Sequence
  Description of Artificial Sequence: Synthetic oligonucleotide
cuagcaauuauuagaaagc

SEQ ID NO: 2796311 - RNA, 19 nt, Artificial Sequence
  Description of Artificial Sequence: Synthetic oligonucleotide
uaaaugagaacguaacuca

SEQ ID NO: 2796312 - RNA, 19 nt, Artificial Sequence
  Description of Artificial Sequence: Synthetic oligonucleotide
uacuagaaauagaacauag

SEQ ID NO: 2796313 - RNA, 19 nt, Artificial Sequence
  Description of Artificial Sequence: Synthetic oligonucleotide
uuuaugucuuccaucaagc

SEQ ID NO: 2796314 - RNA, 19 nt, Artificial Sequence
  Description of Artificial Sequence: Synthetic oligonucleotide
uccaucaagcacaagaaug

SEQ ID NO: 2796315 - RNA, 19 nt, Artificial Sequence
  Description of Artificial Sequence: Synthetic oligonucleotide
uauacaagucauuugauua

SEQ ID NO: 2796316 - RNA, 19 nt, Artificial Sequence
  Description of Artificial Sequence: Synthetic oligonucleotide
uuuguaauacugauuuacc

SEQ ID NO: 2796317 - RNA, 19 nt, Artificial Sequence
  Description of Artificial Sequence: Synthetic oligonucleotide
ucuacagacuaaucuaggg

SEQ ID NO: 2796318 - RNA, 19 nt, Artificial Sequence
  Description of Artificial Sequence: Synthetic oligonucleotide
auauaaaugagaacguaac

SEQ ID NO: 2796319 - RNA, 19 nt, Artificial Sequence
  Description of Artificial Sequence: Synthetic oligonucleotide
guaaccaaaaucuauacaa

SEQ ID NO: 2796320 - RNA, 19 nt, Artificial Sequence
  Description of Artificial Sequence: Synthetic oligonucleotide
augagaacguaacucauuc

SEQ ID NO: 2796321 - RNA, 19 nt, Artificial Sequence
  Description of Artificial Sequence: Synthetic oligonucleotide
aaccaaaaucuauacaagu

SEQ ID NO: 2796322 - RNA, 19 nt, Artificial Sequence
  Description of Artificial Sequence: Synthetic oligonucleotide
acuuuguaaauucuucguc

SEQ ID NO: 2796323 - RNA, 19 nt, Artificial Sequence
  Description of Artificial Sequence: Synthetic oligonucleotide
uacagacuaaucuagggga

SEQ ID NO: 2796324 - RNA, 19 nt, Artificial Sequence
  Description of Artificial Sequence: Synthetic oligonucleotide
uuccccaagacauaguuug

SEQ ID NO: 2796325 - RNA, 19 nt, Artificial Sequence
  Description of Artificial Sequence: Synthetic oligonucleotide
uauaaaugagaacguaacu

SEQ ID NO: 2796326 - RNA, 19 nt, Artificial Sequence
  Description of Artificial Sequence: Synthetic oligonucleotide
aaacacuagcaauuauuag

SEQ ID NO: 2796327 - RNA, 19 nt, Artificial Sequence
  Description of Artificial Sequence: Synthetic oligonucleotide
aaucuauacaagucauuug

SEQ ID NO: 2796328 - RNA, 19 nt, Artificial Sequence
  Description of Artificial Sequence: Synthetic oligonucleotide
acacuuuguaaauucuucg

SEQ ID NO: 2796329 - RNA, 19 nt, Artificial Sequence
  Description of Artificial Sequence: Synthetic oligonucleotide
acugauuuaccucgugagc

SEQ ID NO: 2796330 - RNA, 19 nt, Artificial Sequence
  Description of Artificial Sequence: Synthetic oligonucleotide
aacacuuuguaaauucuuc

SEQ ID NO: 2796331 - RNA, 19 nt, Artificial Sequence
  Description of Artificial Sequence: Synthetic oligonucleotide
uuugucaauaaggacaucu

SEQ ID NO: 2796332 - RNA, 19 nt, Artificial Sequence
  Description of Artificial Sequence: Synthetic oligonucleotide
agcacaagaaugcuuagug

SEQ ID NO: 2796333 - RNA, 19 nt, Artificial Sequence
  Description of Artificial Sequence: Synthetic oligonucleotide
uguaaauucuucgucuucc

SEQ ID NO: 2796334 - RNA, 19 nt, Artificial Sequence
  Description of Artificial Sequence: Synthetic oligonucleotide
ucauucuagcaacugagcu

SEQ ID NO: 2796335 - RNA, 19 nt, Artificial Sequence
  Description of Artificial Sequence: Synthetic oligonucleotide
ucaagcacaagaaugcuua

SEQ ID NO: 2796336 - RNA, 19 nt, Artificial Sequence
  Description of Artificial Sequence: Synthetic oligonucleotide
uacugauuuaccucgugag

SEQ ID NO: 2796337 - RNA, 19 nt, Artificial Sequence
  Description of Artificial Sequence: Synthetic oligonucleotide
uaugucuuccaucaagcac

SEQ ID NO: 2796338 - RNA, 19 nt, Artificial Sequence
  Description of Artificial Sequence: Synthetic oligonucleotide
ugaaagucaggguaacaag

SEQ ID NO: 2796339 - RNA, 19 nt, Artificial Sequence
  Description of Artificial Sequence: Synthetic oligonucleotide
cuacagacuaaucuagggg

SEQ ID NO: 2796340 - RNA, 19 nt, Artificial Sequence
  Description of Artificial Sequence: Synthetic oligonucleotide
uagaacauagugaggacac

SEQ ID NO: 2796341 - RNA, 19 nt, Artificial Sequence
  Description of Artificial Sequence: Synthetic oligonucleotide
aacguaacucauucuagca

SEQ ID NO: 2796342 - RNA, 19 nt, Artificial Sequence
  Description of Artificial Sequence: Synthetic oligonucleotide
uuguaauacugauuuaccu

SEQ ID NO: 2796343 - RNA, 19 nt, Artificial Sequence
  Description of Artificial Sequence: Synthetic oligonucleotide
uucuacagacuaaucuagg

SEQ ID NO: 2796344 - RNA, 19 nt, Artificial Sequence
  Description of Artificial Sequence: Synthetic oligonucleotide
uggagaacucgaaagguca

SEQ ID NO: 2796345 - RNA, 19 nt, Artificial Sequence
  Description of Artificial Sequence: Synthetic oligonucleotide
cuagaaucaggugacaaag

SEQ ID NO: 2796346 - RNA, 19 nt, Artificial Sequence
  Description of Artificial Sequence: Synthetic oligonucleotide
aagcauaaaacacuuugua

SEQ ID NO: 2796347 - RNA, 19 nt, Artificial Sequence
  Description of Artificial Sequence: Synthetic oligonucleotide
gaaagucaggguaacaagc

SEQ ID NO: 2796348 - RNA, 19 nt, Artificial Sequence
  Description of Artificial Sequence: Synthetic oligonucleotide
ugaggaaaaccacugccug

SEQ ID NO: 2796349 - RNA, 19 nt, Artificial Sequence
  Description of Artificial Sequence: Synthetic oligonucleotide
gucauuugauuauagcccc

SEQ ID NO: 2796350 - RNA, 19 nt, Artificial Sequence
  Description of Artificial Sequence: Synthetic oligonucleotide
aaugcuuaguguucuuacu

SEQ ID NO: 2796351 - RNA, 19 nt, Artificial Sequence
  Description of Artificial Sequence: Synthetic oligonucleotide
gucgcuaacuucuacagac

SEQ ID NO: 2796352 - RNA, 19 nt, Artificial Sequence
  Description of Artificial Sequence: Synthetic oligonucleotide
aucuuugguccuucuaggc

SEQ ID NO: 2796353 - RNA, 19 nt, Artificial Sequence
  Description of Artificial Sequence: Synthetic oligonucleotide
gacauaguuuguaauacug

SEQ ID NO: 2796354 - RNA, 19 nt, Artificial Sequence
  Description of Artificial Sequence: Synthetic oligonucleotide
aacucauucuagcaacuga

SEQ ID NO: 2796355 - RNA, 19 nt, Artificial Sequence
  Description of Artificial Sequence: Synthetic oligonucleotide
gaacguaacucauucuagc

SEQ ID NO: 2796356 - RNA, 19 nt, Artificial Sequence
  Description of Artificial Sequence: Synthetic oligonucleotide
guuuguaauacugauuuac

SEQ ID NO: 2796357 - RNA, 19 nt, Artificial Sequence
  Description of Artificial Sequence: Synthetic oligonucleotide
aggaaaaccacugccugcc

SEQ ID NO: 2796358 - RNA, 19 nt, Artificial Sequence
  Description of Artificial Sequence: Synthetic oligonucleotide
aaaaccacugccugccaug

SEQ ID NO: 2796359 - RNA, 19 nt, Artificial Sequence
  Description of Artificial Sequence: Synthetic oligonucleotide
cuucuacagacuaaucuag

SEQ ID NO: 2796360 - RNA, 19 nt, Artificial Sequence
  Description of Artificial Sequence: Synthetic oligonucleotide
uucuuacuguauuauauaa

SEQ ID NO: 2796361 - RNA, 19 nt, Artificial Sequence
  Description of Artificial Sequence: Synthetic oligonucleotide
agaacucgaaaggucaggc

SEQ ID NO: 2796362 - RNA, 19 nt, Artificial Sequence
  Description of Artificial Sequence: Synthetic oligonucleotide
ugugagaaacacuagcaau

SEQ ID NO: 2796363 - RNA, 19 nt, Artificial Sequence
  Description of Artificial Sequence: Synthetic oligonucleotide
uaccucgugagcaugugag

SEQ ID NO: 2796364 - RNA, 19 nt, Artificial Sequence
  Description of Artificial Sequence: Synthetic oligonucleotide
accaaaaucuauacaaguc

SEQ ID NO: 2796365 - RNA, 19 nt, Artificial Sequence
  Description of Artificial Sequence: Synthetic oligonucleotide
aaagcauaaaacacuuugu

SEQ ID NO: 2796366 - RNA, 19 nt, Artificial Sequence
  Description of Artificial Sequence: Synthetic oligonucleotide
ugccaugucgcuaacuucu

SEQ ID NO: 2796367 - RNA, 19 nt, Artificial Sequence
  Description of Artificial Sequence: Synthetic oligonucleotide
agucaggguaacaagcugc

SEQ ID NO: 2796368 - RNA, 19 nt, Artificial Sequence
  Description of Artificial Sequence: Synthetic oligonucleotide
ucagccuuccuucaagaga

SEQ ID NO: 2796369 - RNA, 19 nt, Artificial Sequence
  Description of Artificial Sequence: Synthetic oligonucleotide
ucuuacuguauuauauaaa

SEQ ID NO: 2796370 - RNA, 19 nt, Artificial Sequence
  Description of Artificial Sequence: Synthetic oligonucleotide
accacugccugccaugucg

SEQ ID NO: 2796371 - RNA, 19 nt, Artificial Sequence
  Description of Artificial Sequence: Synthetic oligonucleotide
agcuggagaacucgaaagg

SEQ ID NO: 2796372 - RNA, 19 nt, Artificial Sequence
  Description of Artificial Sequence: Synthetic oligonucleotide
aaggucaggcuccaccauc

SEQ ID NO: 2796373 - RNA, 19 nt, Artificial Sequence
  Description of Artificial Sequence: Synthetic oligonucleotide
gagcuggagaacucgaaag

SEQ ID NO: 2796374 - RNA, 19 nt, Artificial Sequence
  Description of Artificial Sequence: Synthetic oligonucleotide
aggguaacaagcugcagug

SEQ ID NO: 2796375 - RNA, 19 nt, Artificial Sequence
  Description of Artificial Sequence: Synthetic oligonucleotide
gaaauagaacauagugagg

SEQ ID NO: 2796376 - RNA, 19 nt, Artificial Sequence
  Description of Artificial Sequence: Synthetic oligonucleotide
cauucuagcaacugagcug

SEQ ID NO: 2796377 - RNA, 19 nt, Artificial Sequence
  Description of Artificial Sequence: Synthetic oligonucleotide
agcauaaaacacuuuguaa

SEQ ID NO: 2796378 - RNA, 19 nt, Artificial Sequence
  Description of Artificial Sequence: Synthetic oligonucleotide
gaaugcuuaguguucuuac

SEQ ID NO: 2796379 - RNA, 19 nt, Artificial Sequence
  Description of Artificial Sequence: Synthetic oligonucleotide
acuucuacagacuaaucua

SEQ ID NO: 2796380 - RNA, 19 nt, Artificial Sequence
  Description of Artificial Sequence: Synthetic oligonucleotide
cuacaggagaccuuucccc

SEQ ID NO: 2796381 - RNA, 19 nt, Artificial Sequence
  Description of Artificial Sequence: Synthetic oligonucleotide
cuguauuauauaaaugaga

SEQ ID NO: 2796382 - RNA, 19 nt, Artificial Sequence
  Description of Artificial Sequence: Synthetic oligonucleotide
aaaccaugaaagucagggu

SEQ ID NO: 2796383 - RNA, 19 nt, Artificial Sequence
  Description of Artificial Sequence: Synthetic oligonucleotide
augcuuaguguucuuacug

SEQ ID NO: 2796384 - RNA, 19 nt, Artificial Sequence
  Description of Artificial Sequence: Synthetic oligonucleotide
auuauauaaaugagaacgu

SEQ ID NO: 2796385 - RNA, 19 nt, Artificial Sequence
  Description of Artificial Sequence: Synthetic oligonucleotide
uagcaauuauuagaaagca

SEQ ID NO: 2796386 - RNA, 19 nt, Artificial Sequence
  Description of Artificial Sequence: Synthetic oligonucleotide
aacauagugaggacacuag

SEQ ID NO: 2796387 - RNA, 19 nt, Artificial Sequence
  Description of Artificial Sequence: Synthetic oligonucleotide
ucuuugguccuucuaggcu

SEQ ID NO: 2796388 - RNA, 19 nt, Artificial Sequence
  Description of Artificial Sequence: Synthetic oligonucleotide
augucgcuaacuucuacag

SEQ ID NO: 2796389 - RNA, 19 nt, Artificial Sequence
  Description of Artificial Sequence: Synthetic oligonucleotide
uuugcaguguaaccaaaau

SEQ ID NO: 2796390 - RNA, 19 nt, Artificial Sequence
  Description of Artificial Sequence: Synthetic oligonucleotide
caucuuugguccuucuagg

SEQ ID NO: 2796391 - RNA, 19 nt, Artificial Sequence
  Description of Artificial Sequence: Synthetic oligonucleotide
uaacaagcugcagugagga

SEQ ID NO: 2796392 - RNA, 19 nt, Artificial Sequence
  Description of Artificial Sequence: Synthetic oligonucleotide
gaaucaggugacaaaggcc

SEQ ID NO: 2796393 - RNA, 19 nt, Artificial Sequence
  Description of Artificial Sequence: Synthetic oligonucleotide
aacugagcuggagaacucg

SEQ ID NO: 2796394 - RNA, 19 nt, Artificial Sequence
  Description of Artificial Sequence: Synthetic oligonucleotide
uuaguguucuuacuguauu

SEQ ID NO: 2796395 - RNA, 19 nt, Artificial Sequence
  Description of Artificial Sequence: Synthetic oligonucleotide
augucuuccaucaagcaca

SEQ ID NO: 2796396 - RNA, 19 nt, Artificial Sequence
  Description of Artificial Sequence: Synthetic oligonucleotide
gcauaaaacacuuuguaaa

SEQ ID NO: 2796397 - RNA, 19 nt, Artificial Sequence
  Description of Artificial Sequence: Synthetic oligonucleotide
auacaagucauuugauuau

SEQ ID NO: 2796398 - RNA, 19 nt, Artificial Sequence
  Description of Artificial Sequence: Synthetic oligonucleotide
ucuauacaagucauuugau

SEQ ID NO: 2796399 - RNA, 19 nt, Artificial Sequence
  Description of Artificial Sequence: Synthetic oligonucleotide
auacugauuuaccucguga

SEQ ID NO: 2796400 - RNA, 19 nt, Artificial Sequence
  Description of Artificial Sequence: Synthetic oligonucleotide
gacacuagaaucaggugac

SEQ ID NO: 2796401 - RNA, 19 nt, Artificial Sequence
  Description of Artificial Sequence: Synthetic oligonucleotide
gagaacguaacucauucua

SEQ ID NO: 2796402 - RNA, 19 nt, Artificial Sequence
  Description of Artificial Sequence: Synthetic oligonucleotide
uuaugucuuccaucaagca

SEQ ID NO: 2796403 - RNA, 19 nt, Artificial Sequence
  Description of Artificial Sequence: Synthetic oligonucleotide
uccuacaggagaccuuucc

SEQ ID NO: 2796404 - RNA, 19 nt, Artificial Sequence
  Description of Artificial Sequence: Synthetic oligonucleotide
acucauucuagcaacugag

SEQ ID NO: 2796405 - RNA, 19 nt, Artificial Sequence
  Description of Artificial Sequence: Synthetic oligonucleotide
ugaggacacuagaaucagg

SEQ ID NO: 2796406 - RNA, 19 nt, Artificial Sequence
  Description of Artificial Sequence: Synthetic oligonucleotide
cuuacuguauuauauaaau

SEQ ID NO: 2796407 - RNA, 19 nt, Artificial Sequence
  Description of Artificial Sequence: Synthetic oligonucleotide
caagagaccugccacacuc

SEQ ID NO: 2796408 - RNA, 19 nt, Artificial Sequence
  Description of Artificial Sequence: Synthetic oligonucleotide
gguaacaagcugcagugag

SEQ ID NO: 2796409 - RNA, 19 nt, Artificial Sequence
  Description of Artificial Sequence: Synthetic oligonucleotide
acaagaaugcuuaguguuc

SEQ ID NO: 2796410 - RNA, 19 nt, Artificial Sequence
  Description of Artificial Sequence: Synthetic oligonucleotide
gaaacacuagcaauuauua

SEQ ID NO: 2796411 - RNA, 19 nt, Artificial Sequence
  Description of Artificial Sequence: Synthetic oligonucleotide
auagaacauagugaggaca

SEQ ID NO: 2796412 - RNA, 19 nt, Artificial Sequence
  Description of Artificial Sequence: Synthetic oligonucleotide
ugcuuaguguucuuacugu

SEQ ID NO: 2796413 - RNA, 19 nt, Artificial Sequence
  Description of Artificial Sequence: Synthetic oligonucleotide
agacuaaucuaggggaggg

SEQ ID NO: 2796414 - RNA, 19 nt, Artificial Sequence
  Description of Artificial Sequence: Synthetic oligonucleotide
acucgaaaggucaggcucc

SEQ ID NO: 2796415 - RNA, 19 nt, Artificial Sequence
  Description of Artificial Sequence: Synthetic oligonucleotide
ugagcaugugagaaacacu

SEQ ID NO: 2796416 - RNA, 19 nt, Artificial Sequence
  Description of Artificial Sequence: Synthetic oligonucleotide
caauuauuagaaagcauaa

SEQ ID NO: 2796417 - RNA, 19 nt, Artificial Sequence
  Description of Artificial Sequence: Synthetic oligonucleotide
acuagaaucaggugacaaa

SEQ ID NO: 2796418 - RNA, 19 nt, Artificial Sequence
  Description of Artificial Sequence: Synthetic oligonucleotide
cucauucuagcaacugagc

SEQ ID NO: 2796419 - RNA, 19 nt, Artificial Sequence
  Description of Artificial Sequence: Synthetic oligonucleotide
ccaucaagcacaagaaugc

SEQ ID NO: 2796420 - RNA, 19 nt, Artificial Sequence
  Description of Artificial Sequence: Synthetic oligonucleotide
guguaaccaaaaucuauac

SEQ ID NO: 2796421 - RNA, 19 nt, Artificial Sequence
  Description of Artificial Sequence: Synthetic oligonucleotide
agacauaguuuguaauacu

SEQ ID NO: 2796422 - RNA, 19 nt, Artificial Sequence
  Description of Artificial Sequence: Synthetic oligonucleotide
agaccuuuccccaagacau

SEQ ID NO: 2796423 - RNA, 19 nt, Artificial Sequence
  Description of Artificial Sequence: Synthetic oligonucleotide
aucuaggggagggauuugc

SEQ ID NO: 2796424 - RNA, 19 nt, Artificial Sequence
  Description of Artificial Sequence: Synthetic oligonucleotide
uacaggagaccuuucccca

SEQ ID NO: 2796425 - RNA, 19 nt, Artificial Sequence
  Description of Artificial Sequence: Synthetic oligonucleotide
ggacacuagaaucagguga

SEQ ID NO: 2796426 - RNA, 19 nt, Artificial Sequence
  Description of Artificial Sequence: Synthetic oligonucleotide
agaacguaacucauucuag

SEQ ID NO: 2796427 - RNA, 19 nt, Artificial Sequence
  Description of Artificial Sequence: Synthetic oligonucleotide
augugagaaacacuagcaa

SEQ ID NO: 2796428 - RNA, 19 nt, Artificial Sequence
  Description of Artificial Sequence: Synthetic oligonucleotide
gagaccuuuccccaagaca

SEQ ID NO: 2796429 - RNA, 19 nt, Artificial Sequence
  Description of Artificial Sequence: Synthetic oligonucleotide
cuaggggagggauuugcag

SEQ ID NO: 2796430 - RNA, 19 nt, Artificial Sequence
  Description of Artificial Sequence: Synthetic oligonucleotide
acauagugaggacacuaga

SEQ ID NO: 2796431 - RNA, 19 nt, Artificial Sequence
  Description of Artificial Sequence: Synthetic oligonucleotide
uaggcuuuaugucuuccau

SEQ ID NO: 2796432 - RNA, 19 nt, Artificial Sequence
  Description of Artificial Sequence: Synthetic oligonucleotide
guaacaagcugcagugagg

SEQ ID NO: 2796433 - RNA, 19 nt, Artificial Sequence
  Description of Artificial Sequence: Synthetic oligonucleotide
aagagaccugccacacucc

SEQ ID NO: 2796434 - RNA, 19 nt, Artificial Sequence
  Description of Artificial Sequence: Synthetic oligonucleotide
uccuucuaggcuuuauguc

SEQ ID NO: 2796435 - RNA, 19 nt, Artificial Sequence
  Description of Artificial Sequence: Synthetic oligonucleotide
gagaacucgaaaggucagg

SEQ ID NO: 2796436 - RNA, 19 nt, Artificial Sequence
  Description of Artificial Sequence: Synthetic oligonucleotide
acacuagcaauuauuagaa

SEQ ID NO: 2796437 - RNA, 19 nt, Artificial Sequence
  Description of Artificial Sequence: Synthetic oligonucleotide
uccacaguugguccucagc

SEQ ID NO: 2796438 - RNA, 19 nt, Artificial Sequence
  Description of Artificial Sequence: Synthetic oligonucleotide
agaaacacuagcaauuauu

SEQ ID NO: 2796439 - RNA, 19 nt, Artificial Sequence
  Description of Artificial Sequence: Synthetic oligonucleotide
caagacauaguuuguaaua

SEQ ID NO: 2796440 - RNA, 19 nt, Artificial Sequence
  Description of Artificial Sequence: Synthetic oligonucleotide
aguguaaccaaaaucuaua

SEQ ID NO: 2796441 - RNA, 19 nt, Artificial Sequence
  Description of Artificial Sequence: Synthetic oligonucleotide
uagcaacugagcuggagaa

SEQ ID NO: 2796442 - RNA, 19 nt, Artificial Sequence
  Description of Artificial Sequence: Synthetic oligonucleotide
ucuaggggagggauuugca

SEQ ID NO: 2796443 - RNA, 19 nt, Artificial Sequence
  Description of Artificial Sequence: Synthetic oligonucleotide
cugauuuaccucgugagca

SEQ ID NO: 2796444 - RNA, 19 nt, Artificial Sequence
  Description of Artificial Sequence: Synthetic oligonucleotide
aaaugagaacguaacucau

SEQ ID NO: 2796445 - RNA, 19 nt, Artificial Sequence
  Description of Artificial Sequence: Synthetic oligonucleotide
gagcaugugagaaacacua

SEQ ID NO: 2796446 - RNA, 19 nt, Artificial Sequence
  Description of Artificial Sequence: Synthetic oligonucleotide
cauagugaggacacuagaa

SEQ ID NO: 2796447 - RNA, 19 nt, Artificial Sequence
  Description of Artificial Sequence: Synthetic oligonucleotide
ucgugagcaugugagaaac

SEQ ID NO: 2796448 - RNA, 19 nt, Artificial Sequence
  Description of Artificial Sequence: Synthetic oligonucleotide
ugagaacguaacucauucu

SEQ ID NO: 2796449 - RNA, 19 nt, Artificial Sequence
  Description of Artificial Sequence: Synthetic oligonucleotide
aaacacuuuguaaauucuu

SEQ ID NO: 2796450 - RNA, 19 nt, Artificial Sequence
  Description of Artificial Sequence: Synthetic oligonucleotide
acaagcugcagugaggaaa

SEQ ID NO: 2796451 - RNA, 19 nt, Artificial Sequence
  Description of Artificial Sequence: Synthetic oligonucleotide
ugucgcuaacuucuacaga

SEQ ID NO: 2796452 - RNA, 19 nt, Artificial Sequence
  Description of Artificial Sequence: Synthetic oligonucleotide
ucuagcaacugagcuggag

SEQ ID NO: 2796453 - RNA, 19 nt, Artificial Sequence
  Description of Artificial Sequence: Synthetic oligonucleotide
acuagaaauagaacauagu

SEQ ID NO: 2796454 - RNA, 19 nt, Artificial Sequence
  Description of Artificial Sequence: Synthetic oligonucleotide
acguaacucauucuagcaa

SEQ ID NO: 2796455 - RNA, 19 nt, Artificial Sequence
  Description of Artificial Sequence: Synthetic oligonucleotide
cccuacuagaaauagaaca

SEQ ID NO: 2796456 - RNA, 19 nt, Artificial Sequence
  Description of Artificial Sequence: Synthetic oligonucleotide
uaacucauucuagcaacug

SEQ ID NO: 2796457 - RNA, 19 nt, Artificial Sequence
  Description of Artificial Sequence: Synthetic oligonucleotide
cuggagaacucgaaagguc

SEQ ID NO: 2796458 - RNA, 19 nt, Artificial Sequence
  Description of Artificial Sequence: Synthetic oligonucleotide
gugagcaugugagaaacac

SEQ ID NO: 2796459 - RNA, 19 nt, Artificial Sequence
  Description of Artificial Sequence: Synthetic oligonucleotide
uuccaucaagcacaagaau

SEQ ID NO: 2796460 - RNA, 19 nt, Artificial Sequence
  Description of Artificial Sequence: Synthetic oligonucleotide
acaagucauuugauuauag

SEQ ID NO: 2796461 - RNA, 19 nt, Artificial Sequence
  Description of Artificial Sequence: Synthetic oligonucleotide
cuuccaucaagcacaagaa

SEQ ID NO: 2796462 - RNA, 19 nt, Artificial Sequence
  Description of Artificial Sequence: Synthetic oligonucleotide
gcaauuauuagaaagcaua

SEQ ID NO: 2796463 - RNA, 19 nt, Artificial Sequence
  Description of Artificial Sequence: Synthetic oligonucleotide
caugucgcuaacuucuaca

SEQ ID NO: 2796464 - RNA, 19 nt, Artificial Sequence
  Description of Artificial Sequence: Synthetic oligonucleotide
cuagcaacugagcuggaga

SEQ ID NO: 2796465 - RNA, 19 nt, Artificial Sequence
  Description of Artificial Sequence: Synthetic oligonucleotide
uuaccucgugagcauguga

SEQ ID NO: 2796466 - RNA, 19 nt, Artificial Sequence
  Description of Artificial Sequence: Synthetic oligonucleotide
uucaagagaccugccacac

SEQ ID NO: 2796467 - RNA, 19 nt, Artificial Sequence
  Description of Artificial Sequence: Synthetic oligonucleotide
ugauuuaccucgugagcau

SEQ ID NO: 2796468 - RNA, 19 nt, Artificial Sequence
  Description of Artificial Sequence: Synthetic oligonucleotide
aaugagaacguaacucauu

SEQ ID NO: 2796469 - RNA, 19 nt, Artificial Sequence
  Description of Artificial Sequence: Synthetic oligonucleotide
uccaccauccacaguuggu

SEQ ID NO: 2796470 - RNA, 19 nt, Artificial Sequence
  Description of Artificial Sequence: Synthetic oligonucleotide
aggacacuagaaucaggug

SEQ ID NO: 2796471 - RNA, 19 nt, Artificial Sequence
  Description of Artificial Sequence: Synthetic oligonucleotide
gagggauuugcaguguaac

SEQ ID NO: 2796472 - RNA, 19 nt, Artificial Sequence
  Description of Artificial Sequence: Synthetic oligonucleotide
aguguucuuacuguauuau

SEQ ID NO: 2796473 - RNA, 19 nt, Artificial Sequence
  Description of Artificial Sequence: Synthetic oligonucleotide
acuaaucuaggggagggau

SEQ ID NO: 2796474 - RNA, 19 nt, Artificial Sequence
  Description of Artificial Sequence: Synthetic oligonucleotide
acagacuaaucuaggggag

SEQ ID NO: 2796475 - RNA, 19 nt, Artificial Sequence
  Description of Artificial Sequence: Synthetic oligonucleotide
uaguguucuuacuguauua

SEQ ID NO: 2796476 - RNA, 19 nt, Artificial Sequence
  Description of Artificial Sequence: Synthetic oligonucleotide
ucuaggcuuuaugucuucc

SEQ ID NO: 2796477 - RNA, 19 nt, Artificial Sequence
  Description of Artificial Sequence: Synthetic oligonucleotide
cauaguuuguaauacugau

SEQ ID NO: 2796478 - RNA, 19 nt, Artificial Sequence
  Description of Artificial Sequence: Synthetic oligonucleotide
cagacuaaucuaggggagg

SEQ ID NO: 2796479 - RNA, 19 nt, Artificial Sequence
  Description of Artificial Sequence: Synthetic oligonucleotide
accugccacacuccuacag

SEQ ID NO: 2796480 - RNA, 19 nt, Artificial Sequence
  Description of Artificial Sequence: Synthetic oligonucleotide
gauuuaccucgugagcaug

SEQ ID NO: 2796481 - RNA, 19 nt, Artificial Sequence
  Description of Artificial Sequence: Synthetic oligonucleotide
caagcacaagaaugcuuag

SEQ ID NO: 2796482 - RNA, 19 nt, Artificial Sequence
  Description of Artificial Sequence: Synthetic oligonucleotide
gaggacacuagaaucaggu

SEQ ID NO: 2796483 - RNA, 19 nt, Artificial Sequence
  Description of Artificial Sequence: Synthetic oligonucleotide
aaaccacugccugccaugu

SEQ ID NO: 2796484 - RNA, 19 nt, Artificial Sequence
  Description of Artificial Sequence: Synthetic oligonucleotide
ucgcuaacuucuacagacu

SEQ ID NO: 2796485 - RNA, 19 nt, Artificial Sequence
  Description of Artificial Sequence: Synthetic oligonucleotide
caccauccacaguuggucc

SEQ ID NO: 2796486 - RNA, 19 nt, Artificial Sequence
  Description of Artificial Sequence: Synthetic oligonucleotide
uacaagucauuugauuaua

SEQ ID NO: 2796487 - RNA, 19 nt, Artificial Sequence
  Description of Artificial Sequence: Synthetic oligonucleotide
uuuccccaagacauaguuu

SEQ ID NO: 2796488 - RNA, 19 nt, Artificial Sequence
  Description of Artificial Sequence: Synthetic oligonucleotide
agcaacugagcuggagaac

SEQ ID NO: 2796489 - RNA, 19 nt, Artificial Sequence
  Description of Artificial Sequence: Synthetic oligonucleotide
ccacaguugguccucagcc

SEQ ID NO: 2796490 - RNA, 19 nt, Artificial Sequence
  Description of Artificial Sequence: Synthetic oligonucleotide
cuucaagagaccugccaca

SEQ ID NO: 2796491 - RNA, 19 nt, Artificial Sequence
  Description of Artificial Sequence: Synthetic oligonucleotide
gaacauagugaggacacua

SEQ ID NO: 2796492 - RNA, 19 nt, Artificial Sequence
  Description of Artificial Sequence: Synthetic oligonucleotide
agagaccugccacacuccu

SEQ ID NO: 2796493 - RNA, 19 nt, Artificial Sequence
  Description of Artificial Sequence: Synthetic oligonucleotide
uuuaccucgugagcaugug

SEQ ID NO: 2796494 - RNA, 19 nt, Artificial Sequence
  Description of Artificial Sequence: Synthetic oligonucleotide
ucaagagaccugccacacu

SEQ ID NO: 2796495 - RNA, 19 nt, Artificial Sequence
  Description of Artificial Sequence: Synthetic oligonucleotide
cguaacucauucuagcaac

SEQ ID NO: 2796496 - RNA, 19 nt, Artificial Sequence
  Description of Artificial Sequence: Synthetic oligonucleotide
gugaggacacuagaaucag

SEQ ID NO: 2796497 - RNA, 19 nt, Artificial Sequence
  Description of Artificial Sequence: Synthetic oligonucleotide
ugucuuccaucaagcacaa

SEQ ID NO: 2796498 - RNA, 19 nt, Artificial Sequence
  Description of Artificial Sequence: Synthetic oligonucleotide
aguuuguaauacugauuua

SEQ ID NO: 2796499 - RNA, 19 nt, Artificial Sequence
  Description of Artificial Sequence: Synthetic oligonucleotide
auaguuuguaauacugauu

SEQ ID NO: 2796500 - RNA, 19 nt, Artificial Sequence
  Description of Artificial Sequence: Synthetic oligonucleotide
aagaaugcuuaguguucuu

SEQ ID NO: 2796501 - RNA, 19 nt, Artificial Sequence
  Description of Artificial Sequence: Synthetic oligonucleotide
cuccaccauccacaguugg

SEQ ID NO: 2796502 - RNA, 19 nt, Artificial Sequence
  Description of Artificial Sequence: Synthetic oligonucleotide
ccuucaagagaccugccac

SEQ ID NO: 2796503 - RNA, 19 nt, Artificial Sequence
  Description of Artificial Sequence: Synthetic oligonucleotide
cuaggcuuuaugucuucca

SEQ ID NO: 2796504 - RNA, 19 nt, Artificial Sequence
  Description of Artificial Sequence: Synthetic oligonucleotide
uaaggacaucuuugguccu

SEQ ID NO: 2796505 - RNA, 19 nt, Artificial Sequence
  Description of Artificial Sequence: Synthetic oligonucleotide
uccccaagacauaguuugu

SEQ ID NO: 2796506 - RNA, 19 nt, Artificial Sequence
  Description of Artificial Sequence: Synthetic oligonucleotide
ccuacaggagaccuuuccc

SEQ ID NO: 2796507 - RNA, 19 nt, Artificial Sequence
  Description of Artificial Sequence: Synthetic oligonucleotide
gguccuucuaggcuuuaug

SEQ ID NO: 2796508 - RNA, 19 nt, Artificial Sequence
  Description of Artificial Sequence: Synthetic oligonucleotide
agcaugugagaaacacuag

SEQ ID NO: 2796509 - RNA, 19 nt, Artificial Sequence
  Description of Artificial Sequence: Synthetic oligonucleotide
accaugaaagucaggguaa

SEQ ID NO: 2796510 - RNA, 19 nt, Artificial Sequence
  Description of Artificial Sequence: Synthetic oligonucleotide
aacaagcugcagugaggaa

SEQ ID NO: 2796511 - RNA, 19 nt, Artificial Sequence
  Description of Artificial Sequence: Synthetic oligonucleotide
auuuaccucgugagcaugu

SEQ ID NO: 2796512 - RNA, 19 nt, Artificial Sequence
  Description of Artificial Sequence: Synthetic oligonucleotide
aaucuaggggagggauuug

SEQ ID NO: 2796513 - RNA, 19 nt, Artificial Sequence
  Description of Artificial Sequence: Synthetic oligonucleotide
cacuuuguaaauucuucgu

SEQ ID NO: 2796514 - RNA, 19 nt, Artificial Sequence
  Description of Artificial Sequence: Synthetic oligonucleotide
caaaggccagcuuugucaa

SEQ ID NO: 2796515 - RNA, 19 nt, Artificial Sequence
  Description of Artificial Sequence: Synthetic oligonucleotide
caggagaccuuuccccaag

SEQ ID NO: 2796516 - RNA, 19 nt, Artificial Sequence
  Description of Artificial Sequence: Synthetic oligonucleotide
caggcuccaccauccacag

SEQ ID NO: 2796517 - RNA, 19 nt, Artificial Sequence
  Description of Artificial Sequence: Synthetic oligonucleotide
agaaugcuuaguguucuua

SEQ ID NO: 2796518 - RNA, 19 nt, Artificial Sequence
  Description of Artificial Sequence: Synthetic oligonucleotide
cuaacuucuacagacuaau

SEQ ID NO: 2796519 - RNA, 19 nt, Artificial Sequence
  Description of Artificial Sequence: Synthetic oligonucleotide
cuauacaagucauuugauu

SEQ ID NO: 2796520 - RNA, 19 nt, Artificial Sequence
  Description of Artificial Sequence: Synthetic oligonucleotide
cugccacacuccuacagga

SEQ ID NO: 2796521 - RNA, 19 nt, Artificial Sequence
  Description of Artificial Sequence: Synthetic oligonucleotide
aaaggccagcuuugucaau

SEQ ID NO: 2796522 - RNA, 19 nt, Artificial Sequence
  Description of Artificial Sequence: Synthetic oligonucleotide
cugccaugucgcuaacuuc

SEQ ID NO: 2796523 - RNA, 19 nt, Artificial Sequence
  Description of Artificial Sequence: Synthetic oligonucleotide
aagcugcagugaggaaaac

SEQ ID NO: 2796524 - RNA, 19 nt, Artificial Sequence
  Description of Artificial Sequence: Synthetic oligonucleotide
agaacauagugaggacacu

SEQ ID NO: 2796525 - RNA, 19 nt, Artificial Sequence
  Description of Artificial Sequence: Synthetic oligonucleotide
caggguaacaagcugcagu

SEQ ID NO: 2796526 - RNA, 19 nt, Artificial Sequence
  Description of Artificial Sequence: Synthetic oligonucleotide
accucgugagcaugugaga

SEQ ID NO: 2796527 - RNA, 19 nt, Artificial Sequence
  Description of Artificial Sequence: Synthetic oligonucleotide
cuuaguguucuuacuguau

SEQ ID NO: 2796528 - RNA, 19 nt, Artificial Sequence
  Description of Artificial Sequence: Synthetic oligonucleotide
guguucuuacuguauuaua

SEQ ID NO: 2796529 - RNA, 19 nt, Artificial Sequence
  Description of Artificial Sequence: Synthetic oligonucleotide
acaggagaccuuuccccaa

SEQ ID NO: 2796530 - RNA, 19 nt, Artificial Sequence
  Description of Artificial Sequence: Synthetic oligonucleotide
caacugagcuggagaacuc

SEQ ID NO: 2796531 - RNA, 19 nt, Artificial Sequence
  Description of Artificial Sequence: Synthetic oligonucleotide
gaacucgaaaggucaggcu

SEQ ID NO: 2796532 - RNA, 19 nt, Artificial Sequence
  Description of Artificial Sequence: Synthetic oligonucleotide
gucaggcuccaccauccac

SEQ ID NO: 2796533 - RNA, 19 nt, Artificial Sequence
  Description of Artificial Sequence: Synthetic oligonucleotide
ggagaacucgaaaggucag

SEQ ID NO: 2796534 - RNA, 19 nt, Artificial Sequence
  Description of Artificial Sequence: Synthetic oligonucleotide
caguguaaccaaaaucuau

SEQ ID NO: 2796535 - RNA, 19 nt, Artificial Sequence
  Description of Artificial Sequence: Synthetic oligonucleotide
ggugacaaaggccagcuuu

SEQ ID NO: 2796536 - RNA, 19 nt, Artificial Sequence
  Description of Artificial Sequence: Synthetic oligonucleotide
aggagaccuuuccccaaga

SEQ ID NO: 2796537 - RNA, 19 nt, Artificial Sequence
  Description of Artificial Sequence: Synthetic oligonucleotide
ccuacuagaaauagaacau

SEQ ID NO: 2796538 - RNA, 19 nt, Artificial Sequence
  Description of Artificial Sequence: Synthetic oligonucleotide
gacuaaucuaggggaggga

SEQ ID NO: 2796539 - RNA, 19 nt, Artificial Sequence
  Description of Artificial Sequence: Synthetic oligonucleotide
auccacaguugguccucag

SEQ ID NO: 2796540 - RNA, 19 nt, Artificial Sequence
  Description of Artificial Sequence: Synthetic oligonucleotide
caagaaugcuuaguguucu

SEQ ID NO: 2796541 - RNA, 19 nt, Artificial Sequence
  Description of Artificial Sequence: Synthetic oligonucleotide
ccacacuccuacaggagac

SEQ ID NO: 2796542 - RNA, 19 nt, Artificial Sequence
  Description of Artificial Sequence: Synthetic oligonucleotide
ccuucuaggcuuuaugucu

SEQ ID NO: 2796543 - RNA, 19 nt, Artificial Sequence
  Description of Artificial Sequence: Synthetic oligonucleotide
cacuagaaucaggugacaa

SEQ ID NO: 2796544 - RNA, 19 nt, Artificial Sequence
  Description of Artificial Sequence: Synthetic oligonucleotide
ccuuccuucaagagaccug

SEQ ID NO: 2796545 - RNA, 19 nt, Artificial Sequence
  Description of Artificial Sequence: Synthetic oligonucleotide
agaaagcauaaaacacuuu

SEQ ID NO: 2796546 - RNA, 19 nt, Artificial Sequence
  Description of Artificial Sequence: Synthetic oligonucleotide
cucgugagcaugugagaaa

SEQ ID NO: 2796547 - RNA, 19 nt, Artificial Sequence
  Description of Artificial Sequence: Synthetic oligonucleotide
ggagaccuuuccccaagac

SEQ ID NO: 2796548 - RNA, 19 nt, Artificial Sequence
  Description of Artificial Sequence: Synthetic oligonucleotide
uucuagcaacugagcugga

SEQ ID NO: 2796549 - RNA, 19 nt, Artificial Sequence
  Description of Artificial Sequence: Synthetic oligonucleotide
aggccagcuuugucaauaa

SEQ ID NO: 2796550 - RNA, 19 nt, Artificial Sequence
  Description of Artificial Sequence: Synthetic oligonucleotide
cugccugccaugucgcuaa

SEQ ID NO: 2796551 - RNA, 19 nt, Artificial Sequence
  Description of Artificial Sequence: Synthetic oligonucleotide
agccuuccuucaagagacc

SEQ ID NO: 2796552 - RNA, 19 nt, Artificial Sequence
  Description of Artificial Sequence: Synthetic oligonucleotide
guaacucauucuagcaacu

SEQ ID NO: 2796553 - RNA, 19 nt, Artificial Sequence
  Description of Artificial Sequence: Synthetic oligonucleotide
acacuagaaucaggugaca

SEQ ID NO: 2796554 - RNA, 19 nt, Artificial Sequence
  Description of Artificial Sequence: Synthetic oligonucleotide
cacuagcaauuauuagaaa

SEQ ID NO: 2796555 - RNA, 19 nt, Artificial Sequence
  Description of Artificial Sequence: Synthetic oligonucleotide
gcuuaguguucuuacugua

SEQ ID NO: 2796556 - RNA, 19 nt, Artificial Sequence
  Description of Artificial Sequence: Synthetic oligonucleotide
gcaacugagcuggagaacu

SEQ ID NO: 2796557 - RNA, 19 nt, Artificial Sequence
  Description of Artificial Sequence: Synthetic oligonucleotide
ggccagcuuugucaauaag

SEQ ID NO: 2796558 - RNA, 19 nt, Artificial Sequence
  Description of Artificial Sequence: Synthetic oligonucleotide
ccccuacuagaaauagaac

SEQ ID NO: 2796559 - RNA, 19 nt, Artificial Sequence
  Description of Artificial Sequence: Synthetic oligonucleotide
cacaguugguccucagccu

SEQ ID NO: 2796560 - RNA, 19 nt, Artificial Sequence
  Description of Artificial Sequence: Synthetic oligonucleotide
cuaaucuaggggagggauu

SEQ ID NO: 2796561 - RNA, 19 nt, Artificial Sequence
  Description of Artificial Sequence: Synthetic oligonucleotide
gcuaacuucuacagacuaa

SEQ ID NO: 2796562 - RNA, 19 nt, Artificial Sequence
  Description of Artificial Sequence: Synthetic oligonucleotide
cuccuacaggagaccuuuc

SEQ ID NO: 2796563 - RNA, 19 nt, Artificial Sequence
  Description of Artificial Sequence: Synthetic oligonucleotide
ugguccuucuaggcuuuau

SEQ ID NO: 2796564 - RNA, 19 nt, Artificial Sequence
  Description of Artificial Sequence: Synthetic oligonucleotide
caucaagcacaagaaugcu

SEQ ID NO: 2796565 - RNA, 19 nt, Artificial Sequence
  Description of Artificial Sequence: Synthetic oligonucleotide
ccacugccugccaugucgc

SEQ ID NO: 2796566 - RNA, 19 nt, Artificial Sequence
  Description of Artificial Sequence: Synthetic oligonucleotide
aggugacaaaggccagcuu

SEQ ID NO: 2796567 - RNA, 19 nt, Artificial Sequence
  Description of Artificial Sequence: Synthetic oligonucleotide
ucgaaaggucaggcuccac

SEQ ID NO: 2796568 - RNA, 19 nt, Artificial Sequence
  Description of Artificial Sequence: Synthetic oligonucleotide
ccaugucgcuaacuucuac

SEQ ID NO: 2796569 - RNA, 19 nt, Artificial Sequence
  Description of Artificial Sequence: Synthetic oligonucleotide
gcuggagaacucgaaaggu

SEQ ID NO: 2796570 - RNA, 19 nt, Artificial Sequence
  Description of Artificial Sequence: Synthetic oligonucleotide
cucgaaaggucaggcucca

SEQ ID NO: 2796571 - RNA, 19 nt, Artificial Sequence
  Description of Artificial Sequence: Synthetic oligonucleotide
gcaguguaaccaaaaucua

SEQ ID NO: 2796572 - RNA, 19 nt, Artificial Sequence
  Description of Artificial Sequence: Synthetic oligonucleotide
ccaagacauaguuuguaau

SEQ ID NO: 2796573 - RNA, 19 nt, Artificial Sequence
  Description of Artificial Sequence: Synthetic oligonucleotide
gaccuuuccccaagacaua

SEQ ID NO: 2796574 - RNA, 19 nt, Artificial Sequence
  Description of Artificial Sequence: Synthetic oligonucleotide
ugccugccaugucgcuaac

SEQ ID NO: 2796575 - RNA, 19 nt, Artificial Sequence
  Description of Artificial Sequence: Synthetic oligonucleotide
ggagggauuugcaguguaa

SEQ ID NO: 2796576 - RNA, 19 nt, Artificial Sequence
  Description of Artificial Sequence: Synthetic oligonucleotide
gagaccugccacacuccua

SEQ ID NO: 2796577 - RNA, 19 nt, Artificial Sequence
  Description of Artificial Sequence: Synthetic oligonucleotide
ccucgugagcaugugagaa

SEQ ID NO: 2796578 - RNA, 19 nt, Artificial Sequence
  Description of Artificial Sequence: Synthetic oligonucleotide
ccucagccuuccuucaaga

SEQ ID NO: 2796579 - RNA, 19 nt, Artificial Sequence
  Description of Artificial Sequence: Synthetic oligonucleotide
ggguaacaagcugcaguga

SEQ ID NO: 2796580 - RNA, 19 nt, Artificial Sequence
  Description of Artificial Sequence: Synthetic oligonucleotide
gggagggauuugcagugua

SEQ ID NO: 2796581 - RNA, 19 nt, Artificial Sequence
  Description of Artificial Sequence: Synthetic oligonucleotide
cauccacaguugguccuca

SEQ ID NO: 2796582 - RNA, 19 nt, Artificial Sequence
  Description of Artificial Sequence: Synthetic oligonucleotide
ccauccacaguugguccuc

SEQ ID NO: 2796583 - RNA, 19 nt, Artificial Sequence
  Description of Artificial Sequence: Synthetic oligonucleotide
cgcuaacuucuacagacua

SEQ ID NO: 2796584 - RNA, 19 nt, Artificial Sequence
  Description of Artificial Sequence: Synthetic oligonucleotide
ccugccaugucgcuaacuu

SEQ ID NO: 2796585 - RNA, 19 nt, Artificial Sequence
  Description of Artificial Sequence: Synthetic oligonucleotide
gccuuccuucaagagaccu

SEQ ID NO: 2796586 - RNA, 19 nt, Artificial Sequence
  Description of Artificial Sequence: Synthetic oligonucleotide
guugguccucagccuuccu

SEQ ID NO: 2796587 - RNA, 19 nt, Artificial Sequence
  Description of Artificial Sequence: Synthetic oligonucleotide
ccccaagacauaguuugua

SEQ ID NO: 2796588 - RNA, 19 nt, Artificial Sequence
  Description of Artificial Sequence: Synthetic oligonucleotide
cacugccugccaugucgcu

SEQ ID NO: 2796589 - RNA, 19 nt, Artificial Sequence
  Description of Artificial Sequence: Synthetic oligonucleotide
gccaugucgcuaacuucua

SEQ ID NO: 2796590 - RNA, 19 nt, Artificial Sequence
  Description of Artificial Sequence: Synthetic oligonucleotide
ccuuuccccaagacauagu

SEQ ID NO: 2796591 - RNA, 19 nt, Artificial Sequence
  Description of Artificial Sequence: Synthetic oligonucleotide
ggggagggauuugcagugu

SEQ ID NO: 2796592 - RNA, 19 nt, Artificial Sequence
  Description of Artificial Sequence: Synthetic oligonucleotide
gccugccaugucgcuaacu

SEQ ID NO: 2796593 - RNA, 19 nt, Artificial Sequence
  Description of Artificial Sequence: Synthetic oligonucleotide
uaugaauuaauacaaaaca

SEQ ID NO: 2796594 - RNA, 19 nt, Artificial Sequence
  Description of Artificial Sequence: Synthetic oligonucleotide
aauacaaaacauugcagac

SEQ ID NO: 2796595 - RNA, 19 nt, Artificial Sequence
  Description of Artificial Sequence: Synthetic oligonucleotide
uuauuuaugaauuaauaca

SEQ ID NO: 2796596 - RNA, 19 nt, Artificial Sequence
  Description of Artificial Sequence: Synthetic oligonucleotide
aaacauugcagaccaaugc

SEQ ID NO: 2796597 - RNA, 19 nt, Artificial Sequence
  Description of Artificial Sequence: Synthetic oligonucleotide
gauacaaugauaaaccacg

SEQ ID NO: 2796598 - RNA, 19 nt, Artificial Sequence
  Description of Artificial Sequence: Synthetic oligonucleotide
auuaauacaaaacauugca

SEQ ID NO: 2796599 - RNA, 19 nt, Artificial Sequence
  Description of Artificial Sequence: Synthetic oligonucleotide
aauuaauacaaaacauugc

SEQ ID NO: 2796600 - RNA, 19 nt, Artificial Sequence
  Description of Artificial Sequence: Synthetic oligonucleotide
aaaccacggauuuuguucc

SEQ ID NO: 2796601 - RNA, 19 nt, Artificial Sequence
  Description of Artificial Sequence: Synthetic oligonucleotide
uauuuaugaauuaauacaa

SEQ ID NO: 2796602 - RNA, 19 nt, Artificial Sequence
  Description of Artificial Sequence: Synthetic oligonucleotide
agagauacaaugauaaacc

SEQ ID NO: 2796603 - RNA, 19 nt, Artificial Sequence
  Description of Artificial Sequence: Synthetic oligonucleotide
ugagauauuucaaauaccu

SEQ ID NO: 2796604 - RNA, 19 nt, Artificial Sequence
  Description of Artificial Sequence: Synthetic oligonucleotide
aacauugcagaccaaugcg

SEQ ID NO: 2796605 - RNA, 19 nt, Artificial Sequence
  Description of Artificial Sequence: Synthetic oligonucleotide
uuaugaauuaauacaaaac

SEQ ID NO: 2796606 - RNA, 19 nt, Artificial Sequence
  Description of Artificial Sequence: Synthetic oligonucleotide
uaauacaaaacauugcaga

SEQ ID NO: 2796607 - RNA, 19 nt, Artificial Sequence
  Description of Artificial Sequence: Synthetic oligonucleotide
gaucccaucuucuacaggg

SEQ ID NO: 2796608 - RNA, 19 nt, Artificial Sequence
  Description of Artificial Sequence: Synthetic oligonucleotide
gaauuaauacaaaacauug

SEQ ID NO: 2796609 - RNA, 19 nt, Artificial Sequence
  Description of Artificial Sequence: Synthetic oligonucleotide
uauacaaaugagcagcagc

SEQ ID NO: 2796610 - RNA, 19 nt, Artificial Sequence
  Description of Artificial Sequence: Synthetic oligonucleotide
uacaaaacauugcagacca

SEQ ID NO: 2796611 - RNA, 19 nt, Artificial Sequence
  Description of Artificial Sequence: Synthetic oligonucleotide
cuauauacaaaugagcagc

SEQ ID NO: 2796612 - RNA, 19 nt, Artificial Sequence
  Description of Artificial Sequence: Synthetic oligonucleotide
ucagaugugacagugaucu

SEQ ID NO: 2796613 - RNA, 19 nt, Artificial Sequence
  Description of Artificial Sequence: Synthetic oligonucleotide
uuuaugaauuaauacaaaa

SEQ ID NO: 2796614 - RNA, 19 nt, Artificial Sequence
  Description of Artificial Sequence: Synthetic oligonucleotide
aacugcucgaaauuggcag

SEQ ID NO: 2796615 - RNA, 19 nt, Artificial Sequence
  Description of Artificial Sequence: Synthetic oligonucleotide
ugucuauauacaaaugagc

SEQ ID NO: 2796616 - RNA, 19 nt, Artificial Sequence
  Description of Artificial Sequence: Synthetic oligonucleotide
aagauuguucuucuucagg

SEQ ID NO: 2796617 - RNA, 19 nt, Artificial Sequence
  Description of Artificial Sequence: Synthetic oligonucleotide
ucuauauacaaaugagcag

SEQ ID NO: 2796618 - RNA, 19 nt, Artificial Sequence
  Description of Artificial Sequence: Synthetic oligonucleotide
aagauucccagcuuucccg

SEQ ID NO: 2796619 - RNA, 19 nt, Artificial Sequence
  Description of Artificial Sequence: Synthetic oligonucleotide
auacaaaugagcagcagcc

SEQ ID NO: 2796620 - RNA, 19 nt, Artificial Sequence
  Description of Artificial Sequence: Synthetic oligonucleotide
aaugauaaaccacggauuu

SEQ ID NO: 2796621 - RNA, 19 nt, Artificial Sequence
  Description of Artificial Sequence: Synthetic oligonucleotide
uuaaucuggaaguagcgca

SEQ ID NO: 2796622 - RNA, 19 nt, Artificial Sequence
  Description of Artificial Sequence: Synthetic oligonucleotide
uccuaaauuuuauuuauga

SEQ ID NO: 2796623 - RNA, 19 nt, Artificial Sequence
  Description of Artificial Sequence: Synthetic oligonucleotide
ugcagagauacaaugauaa

SEQ ID NO: 2796624 - RNA, 19 nt, Artificial Sequence
  Description of Artificial Sequence: Synthetic oligonucleotide
ucaaauaccuuuuggagaa

SEQ ID NO: 2796625 - RNA, 19 nt, Artificial Sequence
  Description of Artificial Sequence: Synthetic oligonucleotide
agauauuucaaauaccuuu

SEQ ID NO: 2796626 - RNA, 19 nt, Artificial Sequence
  Description of Artificial Sequence: Synthetic oligonucleotide
auaccuuuuggagaaaggc

SEQ ID NO: 2796627 - RNA, 19 nt, Artificial Sequence
  Description of Artificial Sequence: Synthetic oligonucleotide
uucaaauaccuuuuggaga

SEQ ID NO: 2796628 - RNA, 19 nt, Artificial Sequence
  Description of Artificial Sequence: Synthetic oligonucleotide
acaaugauaaaccacggau

SEQ ID NO: 2796629 - RNA, 19 nt, Artificial Sequence
  Description of Artificial Sequence: Synthetic oligonucleotide
agaaaggcaccucagaugu

SEQ ID NO: 2796630 - RNA, 19 nt, Artificial Sequence
  Description of Artificial Sequence: Synthetic oligonucleotide
ucaagggugaacuucaaaa

SEQ ID NO: 2796631 - RNA, 19 nt, Artificial Sequence
  Description of Artificial Sequence: Synthetic oligonucleotide
auacaaaacauugcagacc

SEQ ID NO: 2796632 - RNA, 19 nt, Artificial Sequence
  Description of Artificial Sequence: Synthetic oligonucleotide
agaccaaugcgucuuaauc

SEQ ID NO: 2796633 - RNA, 19 nt, Artificial Sequence
  Description of Artificial Sequence: Synthetic oligonucleotide
uucccguucaccuugauuc

SEQ ID NO: 2796634 - RNA, 19 nt, Artificial Sequence
  Description of Artificial Sequence: Synthetic oligonucleotide
ugcgucuuaauccucgucc

SEQ ID NO: 2796635 - RNA, 19 nt, Artificial Sequence
  Description of Artificial Sequence: Synthetic oligonucleotide
uuggcagcguccaugaucc

SEQ ID NO: 2796636 - RNA, 19 nt, Artificial Sequence
  Description of Artificial Sequence: Synthetic oligonucleotide
ugauaaaccacggauuuug

SEQ ID NO: 2796637 - RNA, 19 nt, Artificial Sequence
  Description of Artificial Sequence: Synthetic oligonucleotide
gaccaaugcgucuuaaucc

SEQ ID NO: 2796638 - RNA, 19 nt, Artificial Sequence
  Description of Artificial Sequence: Synthetic oligonucleotide
acagugaucuugcucuugc

SEQ ID NO: 2796639 - RNA, 19 nt, Artificial Sequence
  Description of Artificial Sequence: Synthetic oligonucleotide
uucaugggcgccauggcgg

SEQ ID NO: 2796640 - RNA, 19 nt, Artificial Sequence
  Description of Artificial Sequence: Synthetic oligonucleotide
aauggucacaaccccuccg

SEQ ID NO: 2796641 - RNA, 19 nt, Artificial Sequence
  Description of Artificial Sequence: Synthetic oligonucleotide
aaccccuccgccaagauuc

SEQ ID NO: 2796642 - RNA, 19 nt, Artificial Sequence
  Description of Artificial Sequence: Synthetic oligonucleotide
uuuggagaaaggcaccuca

SEQ ID NO: 2796643 - RNA, 19 nt, Artificial Sequence
  Description of Artificial Sequence: Synthetic oligonucleotide
acuacacgcaaccagucuc

SEQ ID NO: 2796644 - RNA, 19 nt, Artificial Sequence
  Description of Artificial Sequence: Synthetic oligonucleotide
agcagcagccaguuaaacc

SEQ ID NO: 2796645 - RNA, 19 nt, Artificial Sequence
  Description of Artificial Sequence: Synthetic oligonucleotide
cuugauucucuccuggagg

SEQ ID NO: 2796646 - RNA, 19 nt, Artificial Sequence
  Description of Artificial Sequence: Synthetic oligonucleotide
uuucaugggcgccauggcg

SEQ ID NO: 2796647 - RNA, 19 nt, Artificial Sequence
  Description of Artificial Sequence: Synthetic oligonucleotide
uauauacaaaugagcagca

SEQ ID NO: 2796648 - RNA, 19 nt, Artificial Sequence
  Description of Artificial Sequence: Synthetic oligonucleotide
agauuguucuucuucaggu

SEQ ID NO: 2796649 - RNA, 19 nt, Artificial Sequence
  Description of Artificial Sequence: Synthetic oligonucleotide
auuggcagcguccaugauc

SEQ ID NO: 2796650 - RNA, 19 nt, Artificial Sequence
  Description of Artificial Sequence: Synthetic oligonucleotide
ucagguauuucuuggugag

SEQ ID NO: 2796651 - RNA, 19 nt, Artificial Sequence
  Description of Artificial Sequence: Synthetic oligonucleotide
uuaauccucguccuccucc

SEQ ID NO: 2796652 - RNA, 19 nt, Artificial Sequence
  Description of Artificial Sequence: Synthetic oligonucleotide
ggugagauauuucaaauac

SEQ ID NO: 2796653 - RNA, 19 nt, Artificial Sequence
  Description of Artificial Sequence: Synthetic oligonucleotide
agauacaaugauaaaccac

SEQ ID NO: 2796654 - RNA, 19 nt, Artificial Sequence
  Description of Artificial Sequence: Synthetic oligonucleotide
aaguagcgcagcucguagc

SEQ ID NO: 2796655 - RNA, 19 nt, Artificial Sequence
  Description of Artificial Sequence: Synthetic oligonucleotide
uccaauuuccuguccaacc

SEQ ID NO: 2796656 - RNA, 19 nt, Artificial Sequence
  Description of Artificial Sequence: Synthetic oligonucleotide
uguuccuaaauuuuauuua

SEQ ID NO: 2796657 - RNA, 19 nt, Artificial Sequence
  Description of Artificial Sequence: Synthetic oligonucleotide
caaccagucucgaagauug

SEQ ID NO: 2796658 - RNA, 19 nt, Artificial Sequence
  Description of Artificial Sequence: Synthetic oligonucleotide
uaaucuggaaguagcgcag

SEQ ID NO: 2796659 - RNA, 19 nt, Artificial Sequence
  Description of Artificial Sequence: Synthetic oligonucleotide
aaauuggcagcguccauga

SEQ ID NO: 2796660 - RNA, 19 nt, Artificial Sequence
  Description of Artificial Sequence: Synthetic oligonucleotide
acaaaugagcagcagccag

SEQ ID NO: 2796661 - RNA, 19 nt, Artificial Sequence
  Description of Artificial Sequence: Synthetic oligonucleotide
agugaucuugcucuugcuc

SEQ ID NO: 2796662 - RNA, 19 nt, Artificial Sequence
  Description of Artificial Sequence: Synthetic oligonucleotide
cuggaaguagcgcagcucg

SEQ ID NO: 2796663 - RNA, 19 nt, Artificial Sequence
  Description of Artificial Sequence: Synthetic oligonucleotide
ucuucuacagggugggugc

SEQ ID NO: 2796664 - RNA, 19 nt, Artificial Sequence
  Description of Artificial Sequence: Synthetic oligonucleotide
gucuauauacaaaugagca

SEQ ID NO: 2796665 - RNA, 19 nt, Artificial Sequence
  Description of Artificial Sequence: Synthetic oligonucleotide
cuaaauuuuauuuaugaau

SEQ ID NO: 2796666 - RNA, 19 nt, Artificial Sequence
  Description of Artificial Sequence: Synthetic oligonucleotide
aaaacauugcagaccaaug

SEQ ID NO: 2796667 - RNA, 19 nt, Artificial Sequence
  Description of Artificial Sequence: Synthetic oligonucleotide
aauaccuuuuggagaaagg

SEQ ID NO: 2796668 - RNA, 19 nt, Artificial Sequence
  Description of Artificial Sequence: Synthetic oligonucleotide
accuuuuggagaaaggcac

SEQ ID NO: 2796669 - RNA, 19 nt, Artificial Sequence
  Description of Artificial Sequence: Synthetic oligonucleotide
uaccuuuuggagaaaggca

SEQ ID NO: 2796670 - RNA, 19 nt, Artificial Sequence
  Description of Artificial Sequence: Synthetic oligonucleotide
uuuuguuccuaaauuuuau

SEQ ID NO: 2796671 - RNA, 19 nt, Artificial Sequence
  Description of Artificial Sequence: Synthetic oligonucleotide
auggucacaaccccuccgc

SEQ ID NO: 2796672 - RNA, 19 nt, Artificial Sequence
  Description of Artificial Sequence: Synthetic oligonucleotide
uccuguccaacccacacug

SEQ ID NO: 2796673 - RNA, 19 nt, Artificial Sequence
  Description of Artificial Sequence: Synthetic oligonucleotide
ucgaagauuguucuucuuc

SEQ ID NO: 2796674 - RNA, 19 nt, Artificial Sequence
  Description of Artificial Sequence: Synthetic oligonucleotide
uucagguauuucuugguga

SEQ ID NO: 2796675 - RNA, 19 nt, Artificial Sequence
  Description of Artificial Sequence: Synthetic oligonucleotide
uccugguuaaucuggaagu

SEQ ID NO: 2796676 - RNA, 19 nt, Artificial Sequence
  Description of Artificial Sequence: Synthetic oligonucleotide
cuuuucaugggcgccaugg

SEQ ID NO: 2796677 - RNA, 19 nt, Artificial Sequence
  Description of Artificial Sequence: Synthetic oligonucleotide
gugaucuugcucuugcucc

SEQ ID NO: 2796678 - RNA, 19 nt, Artificial Sequence
  Description of Artificial Sequence: Synthetic oligonucleotide
uacaaugauaaaccacgga

SEQ ID NO: 2796679 - RNA, 19 nt, Artificial Sequence
  Description of Artificial Sequence: Synthetic oligonucleotide
agccaguuaaaccccaguc

SEQ ID NO: 2796680 - RNA, 19 nt, Artificial Sequence
  Description of Artificial Sequence: Synthetic oligonucleotide
aauuuccuguccaacccac

SEQ ID NO: 2796681 - RNA, 19 nt, Artificial Sequence
  Description of Artificial Sequence: Synthetic oligonucleotide
uuggcgacuacacgcaacc

SEQ ID NO: 2796682 - RNA, 19 nt, Artificial Sequence
  Description of Artificial Sequence: Synthetic oligonucleotide
uuguuccuaaauuuuauuu

SEQ ID NO: 2796683 - RNA, 19 nt, Artificial Sequence
  Description of Artificial Sequence: Synthetic oligonucleotide
uugauucucuccuggagga

SEQ ID NO: 2796684 - RNA, 19 nt, Artificial Sequence
  Description of Artificial Sequence: Synthetic oligonucleotide
gaagauuguucuucuucag

SEQ ID NO: 2796685 - RNA, 19 nt, Artificial Sequence
  Description of Artificial Sequence: Synthetic oligonucleotide
gcagcagccaguuaaaccc

SEQ ID NO: 2796686 - RNA, 19 nt, Artificial Sequence
  Description of Artificial Sequence: Synthetic oligonucleotide
acaggcuuuucaugggcgc

SEQ ID NO: 2796687 - RNA, 19 nt, Artificial Sequence
  Description of Artificial Sequence: Synthetic oligonucleotide
caaugcgucuuaauccucg

SEQ ID NO: 2796688 - RNA, 19 nt, Artificial Sequence
  Description of Artificial Sequence: Synthetic oligonucleotide
aaucuggaaguagcgcagc

SEQ ID NO: 2796689 - RNA, 19 nt, Artificial Sequence
  Description of Artificial Sequence: Synthetic oligonucleotide
uccgccaagauucccagcu

SEQ ID NO: 2796690 - RNA, 19 nt, Artificial Sequence
  Description of Artificial Sequence: Synthetic oligonucleotide
caagggugaacuucaaaac

SEQ ID NO: 2796691 - RNA, 19 nt, Artificial Sequence
  Description of Artificial Sequence: Synthetic oligonucleotide
ucuugcuccguucaauggu

SEQ ID NO: 2796692 - RNA, 19 nt, Artificial Sequence
  Description of Artificial Sequence: Synthetic oligonucleotide
aaaggcaccucagauguga

SEQ ID NO: 2796693 - RNA, 19 nt, Artificial Sequence
  Description of Artificial Sequence: Synthetic oligonucleotide
cacgcaaccagucucgaag

SEQ ID NO: 2796694 - RNA, 19 nt, Artificial Sequence
  Description of Artificial Sequence: Synthetic oligonucleotide
augaauuaauacaaaacau

SEQ ID NO: 2796695 - RNA, 19 nt, Artificial Sequence
  Description of Artificial Sequence: Synthetic oligonucleotide
gaaauuggcagcguccaug

SEQ ID NO: 2796696 - RNA, 19 nt, Artificial Sequence
  Description of Artificial Sequence: Synthetic oligonucleotide
accaaugcgucuuaauccu

SEQ ID NO: 2796697 - RNA, 19 nt, Artificial Sequence
  Description of Artificial Sequence: Synthetic oligonucleotide
gaugugacagugaucuugc

SEQ ID NO: 2796698 - RNA, 19 nt, Artificial Sequence
  Description of Artificial Sequence: Synthetic oligonucleotide
gagauacaaugauaaacca

SEQ ID NO: 2796699 - RNA, 19 nt, Artificial Sequence
  Description of Artificial Sequence: Synthetic oligonucleotide
ugugacagugaucuugcuc

SEQ ID NO: 2796700 - RNA, 19 nt, Artificial Sequence
  Description of Artificial Sequence: Synthetic oligonucleotide
cucgaaauuggcagcgucc

SEQ ID NO: 2796701 - RNA, 19 nt, Artificial Sequence
  Description of Artificial Sequence: Synthetic oligonucleotide
agaugugacagugaucuug

SEQ ID NO: 2796702 - RNA, 19 nt, Artificial Sequence
  Description of Artificial Sequence: Synthetic oligonucleotide
ucaauggucacaaccccuc

SEQ ID NO: 2796703 - RNA, 19 nt, Artificial Sequence
  Description of Artificial Sequence: Synthetic oligonucleotide
uuggugagauauuucaaau

SEQ ID NO: 2796704 - RNA, 19 nt, Artificial Sequence
  Description of Artificial Sequence: Synthetic oligonucleotide
uucaauggucacaaccccu

SEQ ID NO: 2796705 - RNA, 19 nt, Artificial Sequence
  Description of Artificial Sequence: Synthetic oligonucleotide
uuugcuguuggcgacuaca

SEQ ID NO: 2796706 - RNA, 19 nt, Artificial Sequence
  Description of Artificial Sequence: Synthetic oligonucleotide
guccugguuaaucuggaag

SEQ ID NO: 2796707 - RNA, 19 nt, Artificial Sequence
  Description of Artificial Sequence: Synthetic oligonucleotide
gaaguagcgcagcucguag

SEQ ID NO: 2796708 - RNA, 19 nt, Artificial Sequence
  Description of Artificial Sequence: Synthetic oligonucleotide
uuggagaaaggcaccucag

SEQ ID NO: 2796709 - RNA, 19 nt, Artificial Sequence
  Description of Artificial Sequence: Synthetic oligonucleotide
uuugccuucccuucgccac

SEQ ID NO: 2796710 - RNA, 19 nt, Artificial Sequence
  Description of Artificial Sequence: Synthetic oligonucleotide
uuaaaccccagucccugug

SEQ ID NO: 2796711 - RNA, 19 nt, Artificial Sequence
  Description of Artificial Sequence: Synthetic oligonucleotide
uguccaacccacacugcag

SEQ ID NO: 2796712 - RNA, 19 nt, Artificial Sequence
  Description of Artificial Sequence: Synthetic oligonucleotide
cuacacgcaaccagucucg

SEQ ID NO: 2796713 - RNA, 19 nt, Artificial Sequence
  Description of Artificial Sequence: Synthetic oligonucleotide
cucguccugguuaaucugg

SEQ ID NO: 2796714 - RNA, 19 nt, Artificial Sequence
  Description of Artificial Sequence: Synthetic oligonucleotide
guuaaucuggaaguagcgc

SEQ ID NO: 2796715 - RNA, 19 nt, Artificial Sequence
  Description of Artificial Sequence: Synthetic oligonucleotide
ugcuguuggcgacuacacg

SEQ ID NO: 2796716 - RNA, 19 nt, Artificial Sequence
  Description of Artificial Sequence: Synthetic oligonucleotide
gugacagugaucuugcucu

SEQ ID NO: 2796717 - RNA, 19 nt, Artificial Sequence
  Description of Artificial Sequence: Synthetic oligonucleotide
uuuucaugggcgccauggc

SEQ ID NO: 2796718 - RNA, 19 nt, Artificial Sequence
  Description of Artificial Sequence: Synthetic oligonucleotide
gcuguuggcgacuacacgc

SEQ ID NO: 2796719 - RNA, 19 nt, Artificial Sequence
  Description of Artificial Sequence: Synthetic oligonucleotide
ucuucagguauuucuuggu

SEQ ID NO: 2796720 - RNA, 19 nt, Artificial Sequence
  Description of Artificial Sequence: Synthetic oligonucleotide
agcucguagcucucuuugc

SEQ ID NO: 2796721 - RNA, 19 nt, Artificial Sequence
  Description of Artificial Sequence: Synthetic oligonucleotide
uuuguuccuaaauuuuauu

SEQ ID NO: 2796722 - RNA, 19 nt, Artificial Sequence
  Description of Artificial Sequence: Synthetic oligonucleotide
ucuuggugagauauuucaa

SEQ ID NO: 2796723 - RNA, 19 nt, Artificial Sequence
  Description of Artificial Sequence: Synthetic oligonucleotide
guucaauggucacaacccc

SEQ ID NO: 2796724 - RNA, 19 nt, Artificial Sequence
  Description of Artificial Sequence: Synthetic oligonucleotide
ugguccaauuuccugucca

SEQ ID NO: 2796725 - RNA, 19 nt, Artificial Sequence
  Description of Artificial Sequence: Synthetic oligonucleotide
caagauucccagcuuuccc

SEQ ID NO: 2796726 - RNA, 19 nt, Artificial Sequence
  Description of Artificial Sequence: Synthetic oligonucleotide
auacaaugauaaaccacgg

SEQ ID NO: 2796727 - RNA, 19 nt, Artificial Sequence
  Description of Artificial Sequence: Synthetic oligonucleotide
uggagaaaggcaccucaga

SEQ ID NO: 2796728 - RNA, 19 nt, Artificial Sequence
  Description of Artificial Sequence: Synthetic oligonucleotide
aguagcgcagcucguagcu

SEQ ID NO: 2796729 - RNA, 19 nt, Artificial Sequence
  Description of Artificial Sequence: Synthetic oligonucleotide
aaugcgucuuaauccucgu

SEQ ID NO: 2796730 - RNA, 19 nt, Artificial Sequence
  Description of Artificial Sequence: Synthetic oligonucleotide
auucccagcuuucccguuc

SEQ ID NO: 2796731 - RNA, 19 nt, Artificial Sequence
  Description of Artificial Sequence: Synthetic oligonucleotide
cuucagguauuucuuggug

SEQ ID NO: 2796732 - RNA, 19 nt, Artificial Sequence
  Description of Artificial Sequence: Synthetic oligonucleotide
ugaucccaucuucuacagg

SEQ ID NO: 2796733 - RNA, 19 nt, Artificial Sequence
  Description of Artificial Sequence: Synthetic oligonucleotide
acggauuuuguuccuaaau

SEQ ID NO: 2796734 - RNA, 19 nt, Artificial Sequence
  Description of Artificial Sequence: Synthetic oligonucleotide
ccaguuaaaccccaguccc

SEQ ID NO: 2796735 - RNA, 19 nt, Artificial Sequence
  Description of Artificial Sequence: Synthetic oligonucleotide
cuuggugagauauuucaaa

SEQ ID NO: 2796736 - RNA, 19 nt, Artificial Sequence
  Description of Artificial Sequence: Synthetic oligonucleotide
uggaggaacugcucgaaau

SEQ ID NO: 2796737 - RNA, 19 nt, Artificial Sequence
  Description of Artificial Sequence: Synthetic oligonucleotide
caugaucccaucuucuaca

SEQ ID NO: 2796738 - RNA, 19 nt, Artificial Sequence
  Description of Artificial Sequence: Synthetic oligonucleotide
cacaggcuuuucaugggcg

SEQ ID NO: 2796739 - RNA, 19 nt, Artificial Sequence
  Description of Artificial Sequence: Synthetic oligonucleotide
ucgaaauuggcagcgucca

SEQ ID NO: 2796740 - RNA, 19 nt, Artificial Sequence
  Description of Artificial Sequence: Synthetic oligonucleotide
augaucccaucuucuacag

SEQ ID NO: 2796741 - RNA, 19 nt, Artificial Sequence
  Description of Artificial Sequence: Synthetic oligonucleotide
ucucgaagauuguucuucu

SEQ ID NO: 2796742 - RNA, 19 nt, Artificial Sequence
  Description of Artificial Sequence: Synthetic oligonucleotide
cauugcagaccaaugcguc

SEQ ID NO: 2796743 - RNA, 19 nt, Artificial Sequence
  Description of Artificial Sequence: Synthetic oligonucleotide
uccucguccugguuaaucu

SEQ ID NO: 2796744 - RNA, 19 nt, Artificial Sequence
  Description of Artificial Sequence: Synthetic oligonucleotide
cucuugcuccguucaaugg

SEQ ID NO: 2796745 - RNA, 19 nt, Artificial Sequence
  Description of Artificial Sequence: Synthetic oligonucleotide
auugcagaccaaugcgucu

SEQ ID NO: 2796746 - RNA, 19 nt, Artificial Sequence
  Description of Artificial Sequence: Synthetic oligonucleotide
gucuuaauccucguccucc

SEQ ID NO: 2796747 - RNA, 19 nt, Artificial Sequence
  Description of Artificial Sequence: Synthetic oligonucleotide
gguuaaucuggaaguagcg

SEQ ID NO: 2796748 - RNA, 19 nt, Artificial Sequence
  Description of Artificial Sequence: Synthetic oligonucleotide
aguuaaaccccagucccug

SEQ ID NO: 2796749 - RNA, 19 nt, Artificial Sequence
  Description of Artificial Sequence: Synthetic oligonucleotide
agcuuucccguucaccuug

SEQ ID NO: 2796750 - RNA, 19 nt, Artificial Sequence
  Description of Artificial Sequence: Synthetic oligonucleotide
gugagauauuucaaauacc

SEQ ID NO: 2796751 - RNA, 19 nt, Artificial Sequence
  Description of Artificial Sequence: Synthetic oligonucleotide
uuuugccuucccuucgcca

SEQ ID NO: 2796752 - RNA, 19 nt, Artificial Sequence
  Description of Artificial Sequence: Synthetic oligonucleotide
ucguagcucucuuugcugu

SEQ ID NO: 2796753 - RNA, 19 nt, Artificial Sequence
  Description of Artificial Sequence: Synthetic oligonucleotide
ucuuaauccucguccuccu

SEQ ID NO: 2796754 - RNA, 19 nt, Artificial Sequence
  Description of Artificial Sequence: Synthetic oligonucleotide
agggugaacuucaaaaccu

SEQ ID NO: 2796755 - RNA, 19 nt, Artificial Sequence
  Description of Artificial Sequence: Synthetic oligonucleotide
auauacaaaugagcagcag

SEQ ID NO: 2796756 - RNA, 19 nt, Artificial Sequence
  Description of Artificial Sequence: Synthetic oligonucleotide
cuugcuccguucaaugguc

SEQ ID NO: 2796757 - RNA, 19 nt, Artificial Sequence
  Description of Artificial Sequence: Synthetic oligonucleotide
cguucaauggucacaaccc

SEQ ID NO: 2796758 - RNA, 19 nt, Artificial Sequence
  Description of Artificial Sequence: Synthetic oligonucleotide
uucgccacaggcuuuucau

SEQ ID NO: 2796759 - RNA, 19 nt, Artificial Sequence
  Description of Artificial Sequence: Synthetic oligonucleotide
aaaccccagucccuguggu

SEQ ID NO: 2796760 - RNA, 19 nt, Artificial Sequence
  Description of Artificial Sequence: Synthetic oligonucleotide
gauucucuccuggaggaac

SEQ ID NO: 2796761 - RNA, 19 nt, Artificial Sequence
  Description of Artificial Sequence: Synthetic oligonucleotide
aucuucuacagggugggug

SEQ ID NO: 2796762 - RNA, 19 nt, Artificial Sequence
  Description of Artificial Sequence: Synthetic oligonucleotide
aggaacugcucgaaauugg

SEQ ID NO: 2796763 - RNA, 19 nt, Artificial Sequence
  Description of Artificial Sequence: Synthetic oligonucleotide
uacaaaugagcagcagcca

SEQ ID NO: 2796764 - RNA, 19 nt, Artificial Sequence
  Description of Artificial Sequence: Synthetic oligonucleotide
aaccccagucccugugguc

SEQ ID NO: 2796765 - RNA, 19 nt, Artificial Sequence
  Description of Artificial Sequence: Synthetic oligonucleotide
gugggugcagucaagggug

SEQ ID NO: 2796766 - RNA, 19 nt, Artificial Sequence
  Description of Artificial Sequence: Synthetic oligonucleotide
auuuaugaauuaauacaaa

SEQ ID NO: 2796767 - RNA, 19 nt, Artificial Sequence
  Description of Artificial Sequence: Synthetic oligonucleotide
caccuugauucucuccugg

SEQ ID NO: 2796768 - RNA, 19 nt, Artificial Sequence
  Description of Artificial Sequence: Synthetic oligonucleotide
ugugguccaauuuccuguc

SEQ ID NO: 2796769 - RNA, 19 nt, Artificial Sequence
  Description of Artificial Sequence: Synthetic oligonucleotide
gccaguuaaaccccagucc

SEQ ID NO: 2796770 - RNA, 19 nt, Artificial Sequence
  Description of Artificial Sequence: Synthetic oligonucleotide
gauauuucaaauaccuuuu

SEQ ID NO: 2796771 - RNA, 19 nt, Artificial Sequence
  Description of Artificial Sequence: Synthetic oligonucleotide
aaaugagcagcagccaguu

SEQ ID NO: 2796772 - RNA, 19 nt, Artificial Sequence
  Description of Artificial Sequence: Synthetic oligonucleotide
ggcaccucagaugugacag

SEQ ID NO: 2796773 - RNA, 19 nt, Artificial Sequence
  Description of Artificial Sequence: Synthetic oligonucleotide
uucccuucgccacaggcuu

SEQ ID NO: 2796774 - RNA, 19 nt, Artificial Sequence
  Description of Artificial Sequence: Synthetic oligonucleotide
auaaaccacggauuuuguu

SEQ ID NO: 2796775 - RNA, 19 nt, Artificial Sequence
  Description of Artificial Sequence: Synthetic oligonucleotide
cucucuuugcuguuggcga

SEQ ID NO: 2796776 - RNA, 19 nt, Artificial Sequence
  Description of Artificial Sequence: Synthetic oligonucleotide
agcucucuuugcuguuggc

SEQ ID NO: 2796777 - RNA, 19 nt, Artificial Sequence
  Description of Artificial Sequence: Synthetic oligonucleotide
ugagcagcagccaguuaaa

SEQ ID NO: 2796778 - RNA, 19 nt, Artificial Sequence
  Description of Artificial Sequence: Synthetic oligonucleotide
uuccuguccaacccacacu

SEQ ID NO: 2796779 - RNA, 19 nt, Artificial Sequence
  Description of Artificial Sequence: Synthetic oligonucleotide
ccaauuuccuguccaaccc

SEQ ID NO: 2796780 - RNA, 19 nt, Artificial Sequence
  Description of Artificial Sequence: Synthetic oligonucleotide
ucaccuugauucucuccug

SEQ ID NO: 2796781 - RNA, 19 nt, Artificial Sequence
  Description of Artificial Sequence: Synthetic oligonucleotide
gauuguucuucuucaggua

SEQ ID NO: 2796782 - RNA, 19 nt, Artificial Sequence
  Description of Artificial Sequence: Synthetic oligonucleotide
uauuucuuggugagauauu

SEQ ID NO: 2796783 - RNA, 19 nt, Artificial Sequence
  Description of Artificial Sequence: Synthetic oligonucleotide
agauucccagcuuucccgu

SEQ ID NO: 2796784 - RNA, 19 nt, Artificial Sequence
  Description of Artificial Sequence: Synthetic oligonucleotide
gucccugugguccaauuuc

SEQ ID NO: 2796785 - RNA, 19 nt, Artificial Sequence
  Description of Artificial Sequence: Synthetic oligonucleotide
gucucgaagauuguucuuc

SEQ ID NO: 2796786 - RNA, 19 nt, Artificial Sequence
  Description of Artificial Sequence: Synthetic oligonucleotide
cucguagcucucuuugcug

SEQ ID NO: 2796787 - RNA, 19 nt, Artificial Sequence
  Description of Artificial Sequence: Synthetic oligonucleotide
uccaugaucccaucuucua

SEQ ID NO: 2796788 - RNA, 19 nt, Artificial Sequence
  Description of Artificial Sequence: Synthetic oligonucleotide
ccguucaauggucacaacc

SEQ ID NO: 2796789 - RNA, 19 nt, Artificial Sequence
  Description of Artificial Sequence: Synthetic oligonucleotide
augcgucuuaauccucguc

SEQ ID NO: 2796790 - RNA, 19 nt, Artificial Sequence
  Description of Artificial Sequence: Synthetic oligonucleotide
ggcgacuacacgcaaccag

SEQ ID NO: 2796791 - RNA, 19 nt, Artificial Sequence
  Description of Artificial Sequence: Synthetic oligonucleotide
cagucaagggugaacuuca

SEQ ID NO: 2796792 - RNA, 19 nt, Artificial Sequence
  Description of Artificial Sequence: Synthetic oligonucleotide
aaggcaccucagaugugac

SEQ ID NO: 2796793 - RNA, 19 nt, Artificial Sequence
  Description of Artificial Sequence: Synthetic oligonucleotide
acauugcagaccaaugcgu

SEQ ID NO: 2796794 - RNA, 19 nt, Artificial Sequence
  Description of Artificial Sequence: Synthetic oligonucleotide
ucguccugguuaaucugga

SEQ ID NO: 2796795 - RNA, 19 nt, Artificial Sequence
  Description of Artificial Sequence: Synthetic oligonucleotide
uuguucuucuucagguauu

SEQ ID NO: 2796796 - RNA, 19 nt, Artificial Sequence
  Description of Artificial Sequence: Synthetic oligonucleotide
uccuggaggaacugcucga

SEQ ID NO: 2796797 - RNA, 19 nt, Artificial Sequence
  Description of Artificial Sequence: Synthetic oligonucleotide
uggucacaaccccuccgcc

SEQ ID NO: 2796798 - RNA, 19 nt, Artificial Sequence
  Description of Artificial Sequence: Synthetic oligonucleotide
caauggucacaaccccucc

SEQ ID NO: 2796799 - RNA, 19 nt, Artificial Sequence
  Description of Artificial Sequence: Synthetic oligonucleotide
cagcucguagcucucuuug

SEQ ID NO: 2796800 - RNA, 19 nt, Artificial Sequence
  Description of Artificial Sequence: Synthetic oligonucleotide
agggugggugcagucaagg

SEQ ID NO: 2796801 - RNA, 19 nt, Artificial Sequence
  Description of Artificial Sequence: Synthetic oligonucleotide
guauuucuuggugagauau

SEQ ID NO: 2796802 - RNA, 19 nt, Artificial Sequence
  Description of Artificial Sequence: Synthetic oligonucleotide
cuugcucuugcuccguuca

SEQ ID NO: 2796803 - RNA, 19 nt, Artificial Sequence
  Description of Artificial Sequence: Synthetic oligonucleotide
uguucuucuucagguauuu

SEQ ID NO: 2796804 - RNA, 19 nt, Artificial Sequence
  Description of Artificial Sequence: Synthetic oligonucleotide
acgcaaccagucucgaaga

SEQ ID NO: 2796805 - RNA, 19 nt, Artificial Sequence
  Description of Artificial Sequence: Synthetic oligonucleotide
ucgccacaggcuuuucaug

SEQ ID NO: 2796806 - RNA, 19 nt, Artificial Sequence
  Description of Artificial Sequence: Synthetic oligonucleotide
ucaugggcgccauggcggc

SEQ ID NO: 2796807 - RNA, 19 nt, Artificial Sequence
  Description of Artificial Sequence: Synthetic oligonucleotide
uugcuccguucaaugguca

SEQ ID NO: 2796808 - RNA, 19 nt, Artificial Sequence
  Description of Artificial Sequence: Synthetic oligonucleotide
aaccacggauuuuguuccu

SEQ ID NO: 2796809 - RNA, 19 nt, Artificial Sequence
  Description of Artificial Sequence: Synthetic oligonucleotide
accuugauucucuccugga

SEQ ID NO: 2796810 - RNA, 19 nt, Artificial Sequence
  Description of Artificial Sequence: Synthetic oligonucleotide
cagcagccaguuaaacccc

SEQ ID NO: 2796811 - RNA, 19 nt, Artificial Sequence
  Description of Artificial Sequence: Synthetic oligonucleotide
ucuggaaguagcgcagcuc

SEQ ID NO: 2796812 - RNA, 19 nt, Artificial Sequence
  Description of Artificial Sequence: Synthetic oligonucleotide
ucuacagggugggugcagu

SEQ ID NO: 2796813 - RNA, 19 nt, Artificial Sequence
  Description of Artificial Sequence: Synthetic oligonucleotide
cucagaugugacagugauc

SEQ ID NO: 2796814 - RNA, 19 nt, Artificial Sequence
  Description of Artificial Sequence: Synthetic oligonucleotide
ggaacugcucgaaauuggc

SEQ ID NO: 2796815 - RNA, 19 nt, Artificial Sequence
  Description of Artificial Sequence: Synthetic oligonucleotide
gaacugcucgaaauuggca

SEQ ID NO: 2796816 - RNA, 19 nt, Artificial Sequence
  Description of Artificial Sequence: Synthetic oligonucleotide
uuuuggagaaaggcaccuc

SEQ ID NO: 2796817 - RNA, 19 nt, Artificial Sequence
  Description of Artificial Sequence: Synthetic oligonucleotide
acagggugggugcagucaa

SEQ ID NO: 2796818 - RNA, 19 nt, Artificial Sequence
  Description of Artificial Sequence: Synthetic oligonucleotide
gcucucuuugcuguuggcg

SEQ ID NO: 2796819 - RNA, 19 nt, Artificial Sequence
  Description of Artificial Sequence: Synthetic oligonucleotide
ccuaaauuuuauuuaugaa

SEQ ID NO: 2796820 - RNA, 19 nt, Artificial Sequence
  Description of Artificial Sequence: Synthetic oligonucleotide
caauuuccuguccaaccca

SEQ ID NO: 2796821 - RNA, 19 nt, Artificial Sequence
  Description of Artificial Sequence: Synthetic oligonucleotide
ucccguucaccuugauucu

SEQ ID NO: 2796822 - RNA, 19 nt, Artificial Sequence
  Description of Artificial Sequence: Synthetic oligonucleotide
uggaaguagcgcagcucgu

SEQ ID NO: 2796823 - RNA, 19 nt, Artificial Sequence
  Description of Artificial Sequence: Synthetic oligonucleotide
uccuccucguccugguuaa

SEQ ID NO: 2796824 - RNA, 19 nt, Artificial Sequence
  Description of Artificial Sequence: Synthetic oligonucleotide
caaugauaaaccacggauu

SEQ ID NO: 2796825 - RNA, 19 nt, Artificial Sequence
  Description of Artificial Sequence: Synthetic oligonucleotide
uugccuucccuucgccaca

SEQ ID NO: 2796826 - RNA, 19 nt, Artificial Sequence
  Description of Artificial Sequence: Synthetic oligonucleotide
ccuuuuggagaaaggcacc

SEQ ID NO: 2796827 - RNA, 19 nt, Artificial Sequence
  Description of Artificial Sequence: Synthetic oligonucleotide
guccaacccacacugcaga

SEQ ID NO: 2796828 - RNA, 19 nt, Artificial Sequence
  Description of Artificial Sequence: Synthetic oligonucleotide
uguuggcgacuacacgcaa

SEQ ID NO: 2796829 - RNA, 19 nt, Artificial Sequence
  Description of Artificial Sequence: Synthetic oligonucleotide
ggauuuuguuccuaaauuu

SEQ ID NO: 2796830 - RNA, 19 nt, Artificial Sequence
  Description of Artificial Sequence: Synthetic oligonucleotide
gacagugaucuugcucuug

SEQ ID NO: 2796831 - RNA, 19 nt, Artificial Sequence
  Description of Artificial Sequence: Synthetic oligonucleotide
agcguccaugaucccaucu

SEQ ID NO: 2796832 - RNA, 19 nt, Artificial Sequence
  Description of Artificial Sequence: Synthetic oligonucleotide
ccagucucgaagauuguuc

SEQ ID NO: 2796833 - RNA, 19 nt, Artificial Sequence
  Description of Artificial Sequence: Synthetic oligonucleotide
uucuacagggugggugcag

SEQ ID NO: 2796834 - RNA, 19 nt, Artificial Sequence
  Description of Artificial Sequence: Synthetic oligonucleotide
gucacaaccccuccgccaa

SEQ ID NO: 2796835 - RNA, 19 nt, Artificial Sequence
  Description of Artificial Sequence: Synthetic oligonucleotide
guagcucucuuugcuguug

SEQ ID NO: 2796836 - RNA, 19 nt, Artificial Sequence
  Description of Artificial Sequence: Synthetic oligonucleotide
ugcuccguucaauggucac

SEQ ID NO: 2796837 - RNA, 19 nt, Artificial Sequence
  Description of Artificial Sequence: Synthetic oligonucleotide
aaugagcagcagccaguua

SEQ ID NO: 2796838 - RNA, 19 nt, Artificial Sequence
  Description of Artificial Sequence: Synthetic oligonucleotide
guccuccuccuccuccucg

SEQ ID NO: 2796839 - RNA, 19 nt, Artificial Sequence
  Description of Artificial Sequence: Synthetic oligonucleotide
gcucuugcuccguucaaug

SEQ ID NO: 2796840 - RNA, 19 nt, Artificial Sequence
  Description of Artificial Sequence: Synthetic oligonucleotide
ccuugauucucuccuggag

SEQ ID NO: 2796841 - RNA, 19 nt, Artificial Sequence
  Description of Artificial Sequence: Synthetic oligonucleotide
uugcagaccaaugcgucuu

SEQ ID NO: 2796842 - RNA, 19 nt, Artificial Sequence
  Description of Artificial Sequence: Synthetic oligonucleotide
cugugguccaauuuccugu

SEQ ID NO: 2796843 - RNA, 19 nt, Artificial Sequence
  Description of Artificial Sequence: Synthetic oligonucleotide
agucccugugguccaauuu

SEQ ID NO: 2796844 - RNA, 19 nt, Artificial Sequence
  Description of Artificial Sequence: Synthetic oligonucleotide
ugggugcagucaaggguga

SEQ ID NO: 2796845 - RNA, 19 nt, Artificial Sequence
  Description of Artificial Sequence: Synthetic oligonucleotide
caggcuuuucaugggcgcc

SEQ ID NO: 2796846 - RNA, 19 nt, Artificial Sequence
  Description of Artificial Sequence: Synthetic oligonucleotide
cuguuggcgacuacacgca

SEQ ID NO: 2796847 - RNA, 19 nt, Artificial Sequence
  Description of Artificial Sequence: Synthetic oligonucleotide
ucacaaccccuccgccaag

SEQ ID NO: 2796848 - RNA, 19 nt, Artificial Sequence
  Description of Artificial Sequence: Synthetic oligonucleotide
auucucuccuggaggaacu

SEQ ID NO: 2796849 - RNA, 19 nt, Artificial Sequence
  Description of Artificial Sequence: Synthetic oligonucleotide
gugaacuucaaaaccugcu

SEQ ID NO: 2796850 - RNA, 19 nt, Artificial Sequence
  Description of Artificial Sequence: Synthetic oligonucleotide
ccaucuucuacaggguggg

SEQ ID NO: 2796851 - RNA, 19 nt, Artificial Sequence
  Description of Artificial Sequence: Synthetic oligonucleotide
gacuacacgcaaccagucu

SEQ ID NO: 2796852 - RNA, 19 nt, Artificial Sequence
  Description of Artificial Sequence: Synthetic oligonucleotide
uccuccuccuccuccucgu

SEQ ID NO: 2796853 - RNA, 19 nt, Artificial Sequence
  Description of Artificial Sequence: Synthetic oligonucleotide
cgccacaggcuuuucaugg

SEQ ID NO: 2796854 - RNA, 19 nt, Artificial Sequence
  Description of Artificial Sequence: Synthetic oligonucleotide
caaaugagcagcagccagu

SEQ ID NO: 2796855 - RNA, 19 nt, Artificial Sequence
  Description of Artificial Sequence: Synthetic oligonucleotide
gccacaggcuuuucauggg

SEQ ID NO: 2796856 - RNA, 19 nt, Artificial Sequence
  Description of Artificial Sequence: Synthetic oligonucleotide
guccaauuuccuguccaac

SEQ ID NO: 2796857 - RNA, 19 nt, Artificial Sequence
  Description of Artificial Sequence: Synthetic oligonucleotide
ugcucuugcuccguucaau

SEQ ID NO: 2796858 - RNA, 19 nt, Artificial Sequence
  Description of Artificial Sequence: Synthetic oligonucleotide
ccaugaucccaucuucuac

SEQ ID NO: 2796859 - RNA, 19 nt, Artificial Sequence
  Description of Artificial Sequence: Synthetic oligonucleotide
gugguccaauuuccugucc

SEQ ID NO: 2796860 - RNA, 19 nt, Artificial Sequence
  Description of Artificial Sequence: Synthetic oligonucleotide
agucucgaagauuguucuu

SEQ ID NO: 2796861 - RNA, 19 nt, Artificial Sequence
  Description of Artificial Sequence: Synthetic oligonucleotide
cagucucgaagauuguucu

SEQ ID NO: 2796862 - RNA, 19 nt, Artificial Sequence
  Description of Artificial Sequence: Synthetic oligonucleotide
ugcagucaagggugaacuu

SEQ ID NO: 2796863 - RNA, 19 nt, Artificial Sequence
  Description of Artificial Sequence: Synthetic oligonucleotide
augauaaaccacggauuuu

SEQ ID NO: 2796864 - RNA, 19 nt, Artificial Sequence
  Description of Artificial Sequence: Synthetic oligonucleotide
cugcagagauacaaugaua

SEQ ID NO: 2796865 - RNA, 19 nt, Artificial Sequence
  Description of Artificial Sequence: Synthetic oligonucleotide
gucaagggugaacuucaaa

SEQ ID NO: 2796866 - RNA, 19 nt, Artificial Sequence
  Description of Artificial Sequence: Synthetic oligonucleotide
cgaagauuguucuucuuca

SEQ ID NO: 2796867 - RNA, 19 nt, Artificial Sequence
  Description of Artificial Sequence: Synthetic oligonucleotide
gauaaaccacggauuuugu

SEQ ID NO: 2796868 - RNA, 19 nt, Artificial Sequence
  Description of Artificial Sequence: Synthetic oligonucleotide
ggagaaaggcaccucagau

SEQ ID NO: 2796869 - RNA, 19 nt, Artificial Sequence
  Description of Artificial Sequence: Synthetic oligonucleotide
guuggcgacuacacgcaac

SEQ ID NO: 2796870 - RNA, 19 nt, Artificial Sequence
  Description of Artificial Sequence: Synthetic oligonucleotide
ugcagaccaaugcgucuua

SEQ ID NO: 2796871 - RNA, 19 nt, Artificial Sequence
  Description of Artificial Sequence: Synthetic oligonucleotide
ccugugguccaauuuccug

SEQ ID NO: 2796872 - RNA, 19 nt, Artificial Sequence
  Description of Artificial Sequence: Synthetic oligonucleotide
gaaaggcaccucagaugug

SEQ ID NO: 2796873 - RNA, 19 nt, Artificial Sequence
  Description of Artificial Sequence: Synthetic oligonucleotide
gcagucaagggugaacuuc

SEQ ID NO: 2796874 - RNA, 19 nt, Artificial Sequence
  Description of Artificial Sequence: Synthetic oligonucleotide
uacacgcaaccagucucga

SEQ ID NO: 2796875 - RNA, 19 nt, Artificial Sequence
  Description of Artificial Sequence: Synthetic oligonucleotide
cuacagggugggugcaguc

SEQ ID NO: 2796876 - RNA, 19 nt, Artificial Sequence
  Description of Artificial Sequence: Synthetic oligonucleotide
ugauucucuccuggaggaa

SEQ ID NO: 2796877 - RNA, 19 nt, Artificial Sequence
  Description of Artificial Sequence: Synthetic oligonucleotide
ccaagauucccagcuuucc

SEQ ID NO: 2796878 - RNA, 19 nt, Artificial Sequence
  Description of Artificial Sequence: Synthetic oligonucleotide
augugacagugaucuugcu

SEQ ID NO: 2796879 - RNA, 19 nt, Artificial Sequence
  Description of Artificial Sequence: Synthetic oligonucleotide
ccuucccuucgccacaggc

SEQ ID NO: 2796880 - RNA, 19 nt, Artificial Sequence
  Description of Artificial Sequence: Synthetic oligonucleotide
aggcuuuucaugggcgcca

SEQ ID NO: 2796881 - RNA, 19 nt, Artificial Sequence
  Description of Artificial Sequence: Synthetic oligonucleotide
cuccguucaauggucacaa

SEQ ID NO: 2796882 - RNA, 19 nt, Artificial Sequence
  Description of Artificial Sequence: Synthetic oligonucleotide
ggugggugcagucaagggu

SEQ ID NO: 2796883 - RNA, 19 nt, Artificial Sequence
  Description of Artificial Sequence: Synthetic oligonucleotide
ucuuugcuguuggcgacua

SEQ ID NO: 2796884 - RNA, 19 nt, Artificial Sequence
  Description of Artificial Sequence: Synthetic oligonucleotide
caacccacacugcagagau

SEQ ID NO: 2796885 - RNA, 19 nt, Artificial Sequence
  Description of Artificial Sequence: Synthetic oligonucleotide
ugccuucccuucgccacag

SEQ ID NO: 2796886 - RNA, 19 nt, Artificial Sequence
  Description of Artificial Sequence: Synthetic oligonucleotide
cuucccuucgccacaggcu

SEQ ID NO: 2796887 - RNA, 19 nt, Artificial Sequence
  Description of Artificial Sequence: Synthetic oligonucleotide
gagcagcagccaguuaaac

SEQ ID NO: 2796888 - RNA, 19 nt, Artificial Sequence
  Description of Artificial Sequence: Synthetic oligonucleotide
gagauauuucaaauaccuu

SEQ ID NO: 2796889 - RNA, 19 nt, Artificial Sequence
  Description of Artificial Sequence: Synthetic oligonucleotide
ggucacaaccccuccgcca

SEQ ID NO: 2796890 - RNA, 19 nt, Artificial Sequence
  Description of Artificial Sequence: Synthetic oligonucleotide
uccguucaauggucacaac

SEQ ID NO: 2796891 - RNA, 19 nt, Artificial Sequence
  Description of Artificial Sequence: Synthetic oligonucleotide
gugcagucaagggugaacu

SEQ ID NO: 2796892 - RNA, 19 nt, Artificial Sequence
  Description of Artificial Sequence: Synthetic oligonucleotide
ggugcagucaagggugaac

SEQ ID NO: 2796893 - RNA, 19 nt, Artificial Sequence
  Description of Artificial Sequence: Synthetic oligonucleotide
cuucgccacaggcuuuuca

SEQ ID NO: 2796894 - RNA, 19 nt, Artificial Sequence
  Description of Artificial Sequence: Synthetic oligonucleotide
ugcucgaaauuggcagcgu

SEQ ID NO: 2796895 - RNA, 19 nt, Artificial Sequence
  Description of Artificial Sequence: Synthetic oligonucleotide
cuccucguccugguuaauc

SEQ ID NO: 2796896 - RNA, 19 nt, Artificial Sequence
  Description of Artificial Sequence: Synthetic oligonucleotide
gcucgaaauuggcagcguc

SEQ ID NO: 2796897 - RNA, 19 nt, Artificial Sequence
  Description of Artificial Sequence: Synthetic oligonucleotide
cagggugggugcagucaag

SEQ ID NO: 2796898 - RNA, 19 nt, Artificial Sequence
  Description of Artificial Sequence: Synthetic oligonucleotide
aaccagucucgaagauugu

SEQ ID NO: 2796899 - RNA, 19 nt, Artificial Sequence
  Description of Artificial Sequence: Synthetic oligonucleotide
acacgcaaccagucucgaa

SEQ ID NO: 2796900 - RNA, 19 nt, Artificial Sequence
  Description of Artificial Sequence: Synthetic oligonucleotide
cuccgccaagauucccagc

SEQ ID NO: 2796901 - RNA, 19 nt, Artificial Sequence
  Description of Artificial Sequence: Synthetic oligonucleotide
cuuugcuguuggcgacuac

SEQ ID NO: 2796902 - RNA, 19 nt, Artificial Sequence
  Description of Artificial Sequence: Synthetic oligonucleotide
acaaccccuccgccaagau

SEQ ID NO: 2796903 - RNA, 19 nt, Artificial Sequence
  Description of Artificial Sequence: Synthetic oligonucleotide
cacggauuuuguuccuaaa

SEQ ID NO: 2796904 - RNA, 19 nt, Artificial Sequence
  Description of Artificial Sequence: Synthetic oligonucleotide
gguccaauuuccuguccaa

SEQ ID NO: 2796905 - RNA, 19 nt, Artificial Sequence
  Description of Artificial Sequence: Synthetic oligonucleotide
uggcgacuacacgcaacca

SEQ ID NO: 2796906 - RNA, 19 nt, Artificial Sequence
  Description of Artificial Sequence: Synthetic oligonucleotide
cacacugcagagauacaau

SEQ ID NO: 2796907 - RNA, 19 nt, Artificial Sequence
  Description of Artificial Sequence: Synthetic oligonucleotide
guuaaaccccagucccugu

SEQ ID NO: 2796908 - RNA, 19 nt, Artificial Sequence
  Description of Artificial Sequence: Synthetic oligonucleotide
accucagaugugacaguga

SEQ ID NO: 2796909 - RNA, 19 nt, Artificial Sequence
  Description of Artificial Sequence: Synthetic oligonucleotide
ccagcuuucccguucaccu

SEQ ID NO: 2796910 - RNA, 19 nt, Artificial Sequence
  Description of Artificial Sequence: Synthetic oligonucleotide
accccuccgccaagauucc

SEQ ID NO: 2796911 - RNA, 19 nt, Artificial Sequence
  Description of Artificial Sequence: Synthetic oligonucleotide
agcagccaguuaaacccca

SEQ ID NO: 2796912 - RNA, 19 nt, Artificial Sequence
  Description of Artificial Sequence: Synthetic oligonucleotide
aucuugcucuugcuccguu

SEQ ID NO: 2796913 - RNA, 19 nt, Artificial Sequence
  Description of Artificial Sequence: Synthetic oligonucleotide
gguauuucuuggugagaua

SEQ ID NO: 2796914 - RNA, 19 nt, Artificial Sequence
  Description of Artificial Sequence: Synthetic oligonucleotide
caguuaaaccccagucccu

SEQ ID NO: 2796915 - RNA, 19 nt, Artificial Sequence
  Description of Artificial Sequence: Synthetic oligonucleotide
cuccuccucguccugguua

SEQ ID NO: 2796916 - RNA, 19 nt, Artificial Sequence
  Description of Artificial Sequence: Synthetic oligonucleotide
ccuccgccaagauucccag

SEQ ID NO: 2796917 - RNA, 19 nt, Artificial Sequence
  Description of Artificial Sequence: Synthetic oligonucleotide
ccucguccugguuaaucug

SEQ ID NO: 2796918 - RNA, 19 nt, Artificial Sequence
  Description of Artificial Sequence: Synthetic oligonucleotide
agcgcagcucguagcucuc

SEQ ID NO: 2796919 - RNA, 19 nt, Artificial Sequence
  Description of Artificial Sequence: Synthetic oligonucleotide
ggaggaacugcucgaaauu

SEQ ID NO: 2796920 - RNA, 19 nt, Artificial Sequence
  Description of Artificial Sequence: Synthetic oligonucleotide
cuggaggaacugcucgaaa

SEQ ID NO: 2796921 - RNA, 19 nt, Artificial Sequence
  Description of Artificial Sequence: Synthetic oligonucleotide
guccaugaucccaucuucu

SEQ ID NO: 2796922 - RNA, 19 nt, Artificial Sequence
  Description of Artificial Sequence: Synthetic oligonucleotide
cagguauuucuuggugaga

SEQ ID NO: 2796923 - RNA, 19 nt, Artificial Sequence
  Description of Artificial Sequence: Synthetic oligonucleotide
gcucguagcucucuuugcu

SEQ ID NO: 2796924 - RNA, 19 nt, Artificial Sequence
  Description of Artificial Sequence: Synthetic oligonucleotide
ggcagcguccaugauccca

SEQ ID NO: 2796925 - RNA, 19 nt, Artificial Sequence
  Description of Artificial Sequence: Synthetic oligonucleotide
cguccaugaucccaucuuc

SEQ ID NO: 2796926 - RNA, 19 nt, Artificial Sequence
  Description of Artificial Sequence: Synthetic oligonucleotide
acaaaacauugcagaccaa

SEQ ID NO: 2796927 - RNA, 19 nt, Artificial Sequence
  Description of Artificial Sequence: Synthetic oligonucleotide
accacggauuuuguuccua

SEQ ID NO: 2796928 - RNA, 19 nt, Artificial Sequence
  Description of Artificial Sequence: Synthetic oligonucleotide
ccaaugcgucuuaauccuc

SEQ ID NO: 2796929 - RNA, 19 nt, Artificial Sequence
  Description of Artificial Sequence: Synthetic oligonucleotide
ucccuucgccacaggcuuu

SEQ ID NO: 2796930 - RNA, 19 nt, Artificial Sequence
  Description of Artificial Sequence: Synthetic oligonucleotide
guagcgcagcucguagcuc

SEQ ID NO: 2796931 - RNA, 19 nt, Artificial Sequence
  Description of Artificial Sequence: Synthetic oligonucleotide
agucaagggugaacuucaa

SEQ ID NO: 2796932 - RNA, 19 nt, Artificial Sequence
  Description of Artificial Sequence: Synthetic oligonucleotide
gccaagauucccagcuuuc

SEQ ID NO: 2796933 - RNA, 19 nt, Artificial Sequence
  Description of Artificial Sequence: Synthetic oligonucleotide
ccacacugcagagauacaa

SEQ ID NO: 2796934 - RNA, 19 nt, Artificial Sequence
  Description of Artificial Sequence: Synthetic oligonucleotide
cccagcuuucccguucacc

SEQ ID NO: 2796935 - RNA, 19 nt, Artificial Sequence
  Description of Artificial Sequence: Synthetic oligonucleotide
cuucuacagggugggugca

SEQ ID NO: 2796936 - RNA, 19 nt, Artificial Sequence
  Description of Artificial Sequence: Synthetic oligonucleotide
ggaaguagcgcagcucgua

SEQ ID NO: 2796937 - RNA, 19 nt, Artificial Sequence
  Description of Artificial Sequence: Synthetic oligonucleotide
gcgucuuaauccucguccu

SEQ ID NO: 2796938 - RNA, 19 nt, Artificial Sequence
  Description of Artificial Sequence: Synthetic oligonucleotide
gcagccaguuaaaccccag

SEQ ID NO: 2796939 - RNA, 19 nt, Artificial Sequence
  Description of Artificial Sequence: Synthetic oligonucleotide
gcuccguucaauggucaca

SEQ ID NO: 2796940 - RNA, 19 nt, Artificial Sequence
  Description of Artificial Sequence: Synthetic oligonucleotide
uggcagcguccaugauccc

SEQ ID NO: 2796941 - RNA, 19 nt, Artificial Sequence
  Description of Artificial Sequence: Synthetic oligonucleotide
cagaccaaugcgucuuaau

SEQ ID NO: 2796942 - RNA, 19 nt, Artificial Sequence
  Description of Artificial Sequence: Synthetic oligonucleotide
cacaaccccuccgccaaga

SEQ ID NO: 2796943 - RNA, 19 nt, Artificial Sequence
  Description of Artificial Sequence: Synthetic oligonucleotide
gaucuugcucuugcuccgu

SEQ ID NO: 2796944 - RNA, 19 nt, Artificial Sequence
  Description of Artificial Sequence: Synthetic oligonucleotide
gcgacuacacgcaaccagu

SEQ ID NO: 2796945 - RNA, 19 nt, Artificial Sequence
  Description of Artificial Sequence: Synthetic oligonucleotide
gauucccagcuuucccguu

SEQ ID NO: 2796946 - RNA, 19 nt, Artificial Sequence
  Description of Artificial Sequence: Synthetic oligonucleotide
cgacuacacgcaaccaguc

SEQ ID NO: 2796947 - RNA, 19 nt, Artificial Sequence
  Description of Artificial Sequence: Synthetic oligonucleotide
cagugaucuugcucuugcu

SEQ ID NO: 2796948 - RNA, 19 nt, Artificial Sequence
  Description of Artificial Sequence: Synthetic oligonucleotide
cagccaguuaaaccccagu

SEQ ID NO: 2796949 - RNA, 19 nt, Artificial Sequence
  Description of Artificial Sequence: Synthetic oligonucleotide
aacccacacugcagagaua

SEQ ID NO: 2796950 - RNA, 19 nt, Artificial Sequence
  Description of Artificial Sequence: Synthetic oligonucleotide
cagcguccaugaucccauc

SEQ ID NO: 2796951 - RNA, 19 nt, Artificial Sequence
  Description of Artificial Sequence: Synthetic oligonucleotide
ccucagaugugacagugau

SEQ ID NO: 2796952 - RNA, 19 nt, Artificial Sequence
  Description of Artificial Sequence: Synthetic oligonucleotide
cccuccgccaagauuccca

SEQ ID NO: 2796953 - RNA, 19 nt, Artificial Sequence
  Description of Artificial Sequence: Synthetic oligonucleotide
ccacggauuuuguuccuaa

SEQ ID NO: 2796954 - RNA, 19 nt, Artificial Sequence
  Description of Artificial Sequence: Synthetic oligonucleotide
cucgaagauuguucuucuu

SEQ ID NO: 2796955 - RNA, 19 nt, Artificial Sequence
  Description of Artificial Sequence: Synthetic oligonucleotide
cgucuuaauccucguccuc

SEQ ID NO: 2796956 - RNA, 19 nt, Artificial Sequence
  Description of Artificial Sequence: Synthetic oligonucleotide
cggauuuuguuccuaaauu

SEQ ID NO: 2796957 - RNA, 19 nt, Artificial Sequence
  Description of Artificial Sequence: Synthetic oligonucleotide
cucuuugcuguuggcgacu

SEQ ID NO: 2796958 - RNA, 19 nt, Artificial Sequence
  Description of Artificial Sequence: Synthetic oligonucleotide
cguucaccuugauucucuc

SEQ ID NO: 2796959 - RNA, 19 nt, Artificial Sequence
  Description of Artificial Sequence: Synthetic oligonucleotide
ccugguuaaucuggaagua

SEQ ID NO: 2796960 - RNA, 19 nt, Artificial Sequence
  Description of Artificial Sequence: Synthetic oligonucleotide
ccaacccacacugcagaga

SEQ ID NO: 2796961 - RNA, 19 nt, Artificial Sequence
  Description of Artificial Sequence: Synthetic oligonucleotide
gcguccaugaucccaucuu

SEQ ID NO: 2796962 - RNA, 19 nt, Artificial Sequence
  Description of Artificial Sequence: Synthetic oligonucleotide
cccguucaccuugauucuc

SEQ ID NO: 2796963 - RNA, 19 nt, Artificial Sequence
  Description of Artificial Sequence: Synthetic oligonucleotide
ccguucaccuugauucucu

SEQ ID NO: 2796964 - RNA, 19 nt, Artificial Sequence
  Description of Artificial Sequence: Synthetic oligonucleotide
gcagcguccaugaucccau

SEQ ID NO: 2796965 - RNA, 19 nt, Artificial Sequence
  Description of Artificial Sequence: Synthetic oligonucleotide
gccuucccuucgccacagg

SEQ ID NO: 2796966 - RNA, 19 nt, Artificial Sequence
  Description of Artificial Sequence: Synthetic oligonucleotide
caaccccuccgccaagauu

SEQ ID NO: 2796967 - RNA, 19 nt, Artificial Sequence
  Description of Artificial Sequence: Synthetic oligonucleotide
gcagaccaaugcgucuuaa

SEQ ID NO: 2796968 - RNA, 19 nt, Artificial Sequence
  Description of Artificial Sequence: Synthetic oligonucleotide
gcuuucccguucaccuuga

SEQ ID NO: 2796969 - RNA, 19 nt, Artificial Sequence
  Description of Artificial Sequence: Synthetic oligonucleotide
cagcuuucccguucaccuu

SEQ ID NO: 2796970 - RNA, 19 nt, Artificial Sequence
  Description of Artificial Sequence: Synthetic oligonucleotide
ccuggaggaacugcucgaa

SEQ ID NO: 2796971 - RNA, 19 nt, Artificial Sequence
  Description of Artificial Sequence: Synthetic oligonucleotide
gcagcucguagcucucuuu

SEQ ID NO: 2796972 - RNA, 19 nt, Artificial Sequence
  Description of Artificial Sequence: Synthetic oligonucleotide
cagaugugacagugaucuu

SEQ ID NO: 2796973 - RNA, 19 nt, Artificial Sequence
  Description of Artificial Sequence: Synthetic oligonucleotide
caucuucuacagggugggu

SEQ ID NO: 2796974 - RNA, 19 nt, Artificial Sequence
  Description of Artificial Sequence: Synthetic oligonucleotide
cagucccugugguccaauu

SEQ ID NO: 2796975 - RNA, 19 nt, Artificial Sequence
  Description of Artificial Sequence: Synthetic oligonucleotide
cuuucccguucaccuugau

SEQ ID NO: 2796976 - RNA, 19 nt, Artificial Sequence
  Description of Artificial Sequence: Synthetic oligonucleotide
gggugcagucaagggugaa

SEQ ID NO: 2796977 - RNA, 19 nt, Artificial Sequence
  Description of Artificial Sequence: Synthetic oligonucleotide
ccccuccgccaagauuccc

SEQ ID NO: 2796978 - RNA, 19 nt, Artificial Sequence
  Description of Artificial Sequence: Synthetic oligonucleotide
ccuucgccacaggcuuuuc

SEQ ID NO: 2796979 - RNA, 19 nt, Artificial Sequence
  Description of Artificial Sequence: Synthetic oligonucleotide
cguccuccuccuccuccuc

SEQ ID NO: 2796980 - RNA, 19 nt, Artificial Sequence
  Description of Artificial Sequence: Synthetic oligonucleotide
cgccaagauucccagcuuu

SEQ ID NO: 2796981 - RNA, 19 nt, Artificial Sequence
  Description of Artificial Sequence: Synthetic oligonucleotide
cgaaauuggcagcguccau

SEQ ID NO: 2796982 - RNA, 19 nt, Artificial Sequence
  Description of Artificial Sequence: Synthetic oligonucleotide
cgcaaccagucucgaagau

SEQ ID NO: 2796983 - RNA, 19 nt, Artificial Sequence
  Description of Artificial Sequence: Synthetic oligonucleotide
gcgcagcucguagcucucu

SEQ ID NO: 2796984 - RNA, 19 nt, Artificial Sequence
  Description of Artificial Sequence: Synthetic oligonucleotide
ccgccaagauucccagcuu

SEQ ID NO: 2796985 - RNA, 19 nt, Artificial Sequence
  Description of Artificial Sequence: Synthetic oligonucleotide
cccuucgccacaggcuuuu

SEQ ID NO: 2796986 - RNA, 19 nt, Artificial Sequence
  Description of Artificial Sequence: Synthetic oligonucleotide
ccagucccugugguccaau

SEQ ID NO: 2796987 - RNA, 19 nt, Artificial Sequence
  Description of Artificial Sequence: Synthetic oligonucleotide
ccuccucguccugguuaau

SEQ ID NO: 2796988 - RNA, 19 nt, Artificial Sequence
  Description of Artificial Sequence: Synthetic oligonucleotide
  modified_base (3)..(3): a, c, u, g, unknown or other
aanguuuucaagcucauca

SEQ ID NO: 2796989 - RNA, 19 nt, Artificial Sequence
  Description of Artificial Sequence: Synthetic oligonucleotide
ugaaaugcuauguagaucc

SEQ ID NO: 2796990 - RNA, 19 nt, Artificial Sequence
  Description of Artificial Sequence: Synthetic oligonucleotide
aaaguuacuaguuccauga

SEQ ID NO: 2796991 - RNA, 19 nt, Artificial Sequence
  Description of Artificial Sequence: Synthetic oligonucleotide
ugugcauuuacgaauuugg

SEQ ID NO: 2796992 - RNA, 19 nt, Artificial Sequence
  Description of Artificial Sequence: Synthetic oligonucleotide
caucacuucaaauaggugg

SEQ ID NO: 2796993 - RNA, 19 nt, Artificial Sequence
  Description of Artificial Sequence: Synthetic oligonucleotide
ucuaauucugcaagaaggg

SEQ ID NO: 2796994 - RNA, 19 nt, Artificial Sequence
  Description of Artificial Sequence: Synthetic oligonucleotide
aaaaucagcugcuccauuc

SEQ ID NO: 2796995 - RNA, 19 nt, Artificial Sequence
  Description of Artificial Sequence: Synthetic oligonucleotide
cucuaauucugcaagaagg

SEQ ID NO: 2796996 - RNA, 19 nt, Artificial Sequence
  Description of Artificial Sequence: Synthetic oligonucleotide
aauucaaccuuauacuucu

SEQ ID NO: 2796997 - RNA, 19 nt, Artificial Sequence
  Description of Artificial Sequence: Synthetic oligonucleotide
aaauagguggucuugaaau

SEQ ID NO: 2796998 - RNA, 19 nt, Artificial Sequence
  Description of Artificial Sequence: Synthetic oligonucleotide
agaacugggccucauaggc

SEQ ID NO: 2796999 - RNA, 19 nt, Artificial Sequence
  Description of Artificial Sequence: Synthetic oligonucleotide
aaagaacugggccucauag

SEQ ID NO: 2797000 - RNA, 19 nt, Artificial Sequence
  Description of Artificial Sequence: Synthetic oligonucleotide
uucuucauuaaaaggaugc

SEQ ID NO: 2797001 - RNA, 19 nt, Artificial Sequence
  Description of Artificial Sequence: Synthetic oligonucleotide
auuaaaaggaugcgucucc

SEQ ID NO: 2797002 - RNA, 19 nt, Artificial Sequence
  Description of Artificial Sequence: Synthetic oligonucleotide
aaaacguccuuucaugaag

SEQ ID NO: 2797003 - RNA, 19 nt, Artificial Sequence
  Description of Artificial Sequence: Synthetic oligonucleotide
aaagguuaucaaaacgucc

SEQ ID NO: 2797004 - RNA, 19 nt, Artificial Sequence
  Description of Artificial Sequence: Synthetic oligonucleotide
  modified_base (9)..(9): a, c, u, g, unknown or other
ucugccaanguuuucaagc

SEQ ID NO: 2797005 - RNA, 19 nt, Artificial Sequence
  Description of Artificial Sequence: Synthetic oligonucleotide
aagucuguggugugaagcc

SEQ ID NO: 2797006 - RNA, 19 nt, Artificial Sequence
  Description of Artificial Sequence: Synthetic oligonucleotide
cuuaucuucaggaagcaag

SEQ ID NO: 2797007 - RNA, 19 nt, Artificial Sequence
  Description of Artificial Sequence: Synthetic oligonucleotide
gaagcaaggauguuugggg

SEQ ID NO: 2797008 - RNA, 19 nt, Artificial Sequence
  Description of Artificial Sequence: Synthetic oligonucleotide
uuaucuucaggaagcaagg

SEQ ID NO: 2797009 - RNA, 19 nt, Artificial Sequence
  Description of Artificial Sequence: Synthetic oligonucleotide
uuugaguuuggcuuuaaca

SEQ ID NO: 2797010 - RNA, 19 nt, Artificial Sequence
  Description of Artificial Sequence: Synthetic oligonucleotide
uuucaugaagcaaaggaac

SEQ ID NO: 2797011 - RNA, 19 nt, Artificial Sequence
  Description of Artificial Sequence: Synthetic oligonucleotide
aacaaaaucagcugcucca

SEQ ID NO: 2797012 - RNA, 19 nt, Artificial Sequence
  Description of Artificial Sequence: Synthetic oligonucleotide
aucggauccacagacaucc

SEQ ID NO: 2797013 - RNA, 19 nt, Artificial Sequence
  Description of Artificial Sequence: Synthetic oligonucleotide
gauuacguguuccacagcc

SEQ ID NO: 2797014 - RNA, 19 nt, Artificial Sequence
  Description of Artificial Sequence: Synthetic oligonucleotide
uucauuaaaaggaugcguc

SEQ ID NO: 2797015 - RNA, 19 nt, Artificial Sequence
  Description of Artificial Sequence: Synthetic oligonucleotide
ucuugaaaugcuauguaga

SEQ ID NO: 2797016 - RNA, 19 nt, Artificial Sequence
  Description of Artificial Sequence: Synthetic oligonucleotide
uauguagauccucaguaag

SEQ ID NO: 2797017 - RNA, 19 nt, Artificial Sequence
  Description of Artificial Sequence: Synthetic oligonucleotide
ugugaagccaaagaacugg

SEQ ID NO: 2797018 - RNA, 19 nt, Artificial Sequence
  Description of Artificial Sequence: Synthetic oligonucleotide
uuuacgaauuuggacaggg

SEQ ID NO: 2797019 - RNA, 19 nt, Artificial Sequence
  Description of Artificial Sequence: Synthetic oligonucleotide
aaaagguuaucaaaacguc

SEQ ID NO: 2797020 - RNA, 19 nt, Artificial Sequence
  Description of Artificial Sequence: Synthetic oligonucleotide
aaaggaacuucucugugca

SEQ ID NO: 2797021 - RNA, 19 nt, Artificial Sequence
  Description of Artificial Sequence: Synthetic oligonucleotide
gaagccaaagaacugggcc

SEQ ID NO: 2797022 - RNA, 19 nt, Artificial Sequence
  Description of Artificial Sequence: Synthetic oligonucleotide
uagauccucaguaagcaag

SEQ ID NO: 2797023 - RNA, 19 nt, Artificial Sequence
  Description of Artificial Sequence: Synthetic oligonucleotide
gacacuuaucuucaggaag

SEQ ID NO: 2797024 - RNA, 19 nt, Artificial Sequence
  Description of Artificial Sequence: Synthetic oligonucleotide
uccucaguaagcaagucug

SEQ ID NO: 2797025 - RNA, 19 nt, Artificial Sequence
  Description of Artificial Sequence: Synthetic oligonucleotide
aaaaggaugcgucuccuga

SEQ ID NO: 2797026 - RNA, 19 nt, Artificial Sequence
  Description of Artificial Sequence: Synthetic oligonucleotide
aagcaaaggaacuucucug

SEQ ID NO: 2797027 - RNA, 19 nt, Artificial Sequence
  Description of Artificial Sequence: Synthetic oligonucleotide
aaaggaugcgucuccugac

SEQ ID NO: 2797028 - RNA, 19 nt, Artificial Sequence
  Description of Artificial Sequence: Synthetic oligonucleotide
aacuucucugugcauuuac

SEQ ID NO: 2797029 - RNA, 19 nt, Artificial Sequence
  Description of Artificial Sequence: Synthetic oligonucleotide
cucaucaagaaagucaagg

SEQ ID NO: 2797030 - RNA, 19 nt, Artificial Sequence
  Description of Artificial Sequence: Synthetic oligonucleotide
aauagguggucuugaaaug

SEQ ID NO: 2797031 - RNA, 19 nt, Artificial Sequence
  Description of Artificial Sequence: Synthetic oligonucleotide
uacgaauuuggacagggcu

SEQ ID NO: 2797032 - RNA, 19 nt, Artificial Sequence
  Description of Artificial Sequence: Synthetic oligonucleotide
aguuacuaguuccaugauc

SEQ ID NO: 2797033 - RNA, 19 nt, Artificial Sequence
  Description of Artificial Sequence: Synthetic oligonucleotide
acacuuaucuucaggaagc

SEQ ID NO: 2797034 - RNA, 19 nt, Artificial Sequence
  Description of Artificial Sequence: Synthetic oligonucleotide
ugcaucacuucaaauaggu

SEQ ID NO: 2797035 - RNA, 19 nt, Artificial Sequence
  Description of Artificial Sequence: Synthetic oligonucleotide
ugcauuuacgaauuuggac

SEQ ID NO: 2797036 - RNA, 19 nt, Artificial Sequence
  Description of Artificial Sequence: Synthetic oligonucleotide
gacagggcuaaucucagag

SEQ ID NO: 2797037 - RNA, 19 nt, Artificial Sequence
  Description of Artificial Sequence: Synthetic oligonucleotide
aaccuuauacuucuccugu

SEQ ID NO: 2797038 - RNA, 19 nt, Artificial Sequence
  Description of Artificial Sequence: Synthetic oligonucleotide
aagaacugggccucauagg

SEQ ID NO: 2797039 - RNA, 19 nt, Artificial Sequence
  Description of Artificial Sequence: Synthetic oligonucleotide
auagguggucuugaaaugc

SEQ ID NO: 2797040 - RNA, 19 nt, Artificial Sequence
  Description of Artificial Sequence: Synthetic oligonucleotide
aaacguccuuucaugaagc

SEQ ID NO: 2797041 - RNA, 19 nt, Artificial Sequence
  Description of Artificial Sequence: Synthetic oligonucleotide
ucaucaagaaagucaaggu

SEQ ID NO: 2797042 - RNA, 19 nt, Artificial Sequence
  Description of Artificial Sequence: Synthetic oligonucleotide
ugcaagaagggccugcuca

SEQ ID NO: 2797043 - RNA, 19 nt, Artificial Sequence
  Description of Artificial Sequence: Synthetic oligonucleotide
uuauacuucuccuguaacu

SEQ ID NO: 2797044 - RNA, 19 nt, Artificial Sequence
  Description of Artificial Sequence: Synthetic oligonucleotide
ucuccugacacuuaucuuc

SEQ ID NO: 2797045 - RNA, 19 nt, Artificial Sequence
  Description of Artificial Sequence: Synthetic oligonucleotide
uuuugcuccucuaauucug

SEQ ID NO: 2797046 - RNA, 19 nt, Artificial Sequence
  Description of Artificial Sequence: Synthetic oligonucleotide
aucaaaacguccuuucaug

SEQ ID NO: 2797047 - RNA, 19 nt, Artificial Sequence
  Description of Artificial Sequence: Synthetic oligonucleotide
ucuucauuaaaaggaugcg

SEQ ID NO: 2797048 - RNA, 19 nt, Artificial Sequence
  Description of Artificial Sequence: Synthetic oligonucleotide
aagguuaucaaaacguccu

SEQ ID NO: 2797049 - RNA, 19 nt, Artificial Sequence
  Description of Artificial Sequence: Synthetic oligonucleotide
  modified_base (19)..(19): a, c, u, g, unknown or other
aucaagaaagucaaggucn

SEQ ID NO: 2797050 - RNA, 19 nt, Artificial Sequence
  Description of Artificial Sequence: Synthetic oligonucleotide
uguggugugaagccaaaga

SEQ ID NO: 2797051 - RNA, 19 nt, Artificial Sequence
  Description of Artificial Sequence: Synthetic oligonucleotide
uguuccacagccugcauca

SEQ ID NO: 2797052 - RNA, 19 nt, Artificial Sequence
  Description of Artificial Sequence: Synthetic oligonucleotide
ugaguuuggcuuuaacagc

SEQ ID NO: 2797053 - RNA, 19 nt, Artificial Sequence
  Description of Artificial Sequence: Synthetic oligonucleotide
aagccaaagaacugggccu

SEQ ID NO: 2797054 - RNA, 19 nt, Artificial Sequence
  Description of Artificial Sequence: Synthetic oligonucleotide
uuugcugcccucaacugug

SEQ ID NO: 2797055 - RNA, 19 nt, Artificial Sequence
  Description of Artificial Sequence: Synthetic oligonucleotide
uucaugaagcaaaggaacu

SEQ ID NO: 2797056 - RNA, 19 nt, Artificial Sequence
  Description of Artificial Sequence: Synthetic oligonucleotide
cucagugcguaauucaacc

SEQ ID NO: 2797057 - RNA, 19 nt, Artificial Sequence
  Description of Artificial Sequence: Synthetic oligonucleotide
uaauucaaccuuauacuuc

SEQ ID NO: 2797058 - RNA, 19 nt, Artificial Sequence
  Description of Artificial Sequence: Synthetic oligonucleotide
aggauuacguguuccacag

SEQ ID NO: 2797059 - RNA, 19 nt, Artificial Sequence
  Description of Artificial Sequence: Synthetic oligonucleotide
aaugcuauguagauccuca

SEQ ID NO: 2797060 - RNA, 19 nt, Artificial Sequence
  Description of Artificial Sequence: Synthetic oligonucleotide
aguuccaugaucucugcca

SEQ ID NO: 2797061 - RNA, 19 nt, Artificial Sequence
  Description of Artificial Sequence: Synthetic oligonucleotide
uuuaggauuacguguucca

SEQ ID NO: 2797062 - RNA, 19 nt, Artificial Sequence
  Description of Artificial Sequence: Synthetic oligonucleotide
uucuuugcugcccucaacu

SEQ ID NO: 2797063 - RNA, 19 nt, Artificial Sequence
  Description of Artificial Sequence: Synthetic oligonucleotide
uuaucaaaacguccuuuca

SEQ ID NO: 2797064 - RNA, 19 nt, Artificial Sequence
  Description of Artificial Sequence: Synthetic oligonucleotide
cauuuacgaauuuggacag

SEQ ID NO: 2797065 - RNA, 19 nt, Artificial Sequence
  Description of Artificial Sequence: Synthetic oligonucleotide
aauuuggacagggcuaauc

SEQ ID NO: 2797066 - RNA, 19 nt, Artificial Sequence
  Description of Artificial Sequence: Synthetic oligonucleotide
uuuucaagcucaucaagaa

SEQ ID NO: 2797067 - RNA, 19 nt, Artificial Sequence
  Description of Artificial Sequence: Synthetic oligonucleotide
auuuggacagggcuaaucu

SEQ ID NO: 2797068 - RNA, 19 nt, Artificial Sequence
  Description of Artificial Sequence: Synthetic oligonucleotide
uuucuucauuaaaaggaug

SEQ ID NO: 2797069 - RNA, 19 nt, Artificial Sequence
  Description of Artificial Sequence: Synthetic oligonucleotide
gucuugaaaugcuauguag

SEQ ID NO: 2797070 - RNA, 19 nt, Artificial Sequence
  Description of Artificial Sequence: Synthetic oligonucleotide
ucaaaacguccuuucauga

SEQ ID NO: 2797071 - RNA, 19 nt, Artificial Sequence
  Description of Artificial Sequence: Synthetic oligonucleotide
ucaaccuuauacuucuccu

SEQ ID NO: 2797072 - RNA, 19 nt, Artificial Sequence
  Description of Artificial Sequence: Synthetic oligonucleotide
uguagauccucaguaagca

SEQ ID NO: 2797073 - RNA, 19 nt, Artificial Sequence
  Description of Artificial Sequence: Synthetic oligonucleotide
uaucaaaacguccuuucau

SEQ ID NO: 2797074 - RNA, 19 nt, Artificial Sequence
  Description of Artificial Sequence: Synthetic oligonucleotide
ucauuaaaaggaugcgucu

SEQ ID NO: 2797075 - RNA, 19 nt, Artificial Sequence
  Description of Artificial Sequence: Synthetic oligonucleotide
ucuccuguaacucuucaau

SEQ ID NO: 2797076 - RNA, 19 nt, Artificial Sequence
  Description of Artificial Sequence: Synthetic oligonucleotide
  modified_base (18)..(18): a, c, u, g, unknown or other
ucaagaaagucaaggucnc

SEQ ID NO: 2797077 - RNA, 19 nt, Artificial Sequence
  Description of Artificial Sequence: Synthetic oligonucleotide
  modified_base (16)..(16): a, c, u, g, unknown or other
aagaaagucaaggucncuu

SEQ ID NO: 2797078 - RNA, 19 nt, Artificial Sequence
  Description of Artificial Sequence: Synthetic oligonucleotide
aaaugcuauguagauccuc

SEQ ID NO: 2797079 - RNA, 19 nt, Artificial Sequence
  Description of Artificial Sequence: Synthetic oligonucleotide
uguaacucuucaauuuccu

SEQ ID NO: 2797080 - RNA, 19 nt, Artificial Sequence
  Description of Artificial Sequence: Synthetic oligonucleotide
ucucccuaaaguuacuagu

SEQ ID NO: 2797081 - RNA, 19 nt, Artificial Sequence
  Description of Artificial Sequence: Synthetic oligonucleotide
gcauuuacgaauuuggaca

SEQ ID NO: 2797082 - RNA, 19 nt, Artificial Sequence
  Description of Artificial Sequence: Synthetic oligonucleotide
uaggccaucggauccacag

SEQ ID NO: 2797083 - RNA, 19 nt, Artificial Sequence
  Description of Artificial Sequence: Synthetic oligonucleotide
  modified_base (2)..(2): a, c, u, g, unknown or other
anguuuucaagcucaucaa

SEQ ID NO: 2797084 - RNA, 19 nt, Artificial Sequence
  Description of Artificial Sequence: Synthetic oligonucleotide
uuacguguuccacagccug

SEQ ID NO: 2797085 - RNA, 19 nt, Artificial Sequence
  Description of Artificial Sequence: Synthetic oligonucleotide
aaaucagcugcuccauucu

SEQ ID NO: 2797086 - RNA, 19 nt, Artificial Sequence
  Description of Artificial Sequence: Synthetic oligonucleotide
aacugggccucauaggcca

SEQ ID NO: 2797087 - RNA, 19 nt, Artificial Sequence
  Description of Artificial Sequence: Synthetic oligonucleotide
uauacuucuccuguaacuc

SEQ ID NO: 2797088 - RNA, 19 nt, Artificial Sequence
  Description of Artificial Sequence: Synthetic oligonucleotide
aauucugcaagaagggccu

SEQ ID NO: 2797089 - RNA, 19 nt, Artificial Sequence
  Description of Artificial Sequence: Synthetic oligonucleotide
caucaagaaagucaagguc

SEQ ID NO: 2797090 - RNA, 19 nt, Artificial Sequence
  Description of Artificial Sequence: Synthetic oligonucleotide
auguagauccucaguaagc

SEQ ID NO: 2797091 - RNA, 19 nt, Artificial Sequence
  Description of Artificial Sequence: Synthetic oligonucleotide
uucuuuaggauuacguguu

SEQ ID NO: 2797092 - RNA, 19 nt, Artificial Sequence
  Description of Artificial Sequence: Synthetic oligonucleotide
uggugugaagccaaagaac

SEQ ID NO: 2797093 - RNA, 19 nt, Artificial Sequence
  Description of Artificial Sequence: Synthetic oligonucleotide
guuaucaaaacguccuuuc

SEQ ID NO: 2797094 - RNA, 19 nt, Artificial Sequence
  Description of Artificial Sequence: Synthetic oligonucleotide
  modified_base (18)..(18): a, c, u, g, unknown or other
uccaugaucucugccaang

SEQ ID NO: 2797095 - RNA, 19 nt, Artificial Sequence
  Description of Artificial Sequence: Synthetic oligonucleotide
agaagggccugcucagugc

SEQ ID NO: 2797096 - RNA, 19 nt, Artificial Sequence
  Description of Artificial Sequence: Synthetic oligonucleotide
gcguaauucaaccuuauac

SEQ ID NO: 2797097 - RNA, 19 nt, Artificial Sequence
  Description of Artificial Sequence: Synthetic oligonucleotide
cuguaacucuucaauuucc

SEQ ID NO: 2797098 - RNA, 19 nt, Artificial Sequence
  Description of Artificial Sequence: Synthetic oligonucleotide
aagaagggccugcucagug

SEQ ID NO: 2797099 - RNA, 19 nt, Artificial Sequence
  Description of Artificial Sequence: Synthetic oligonucleotide
ucucugugcauuuacgaau

SEQ ID NO: 2797100 - RNA, 19 nt, Artificial Sequence
  Description of Artificial Sequence: Synthetic oligonucleotide
uaggauuacguguuccaca

SEQ ID NO: 2797101 - RNA, 19 nt, Artificial Sequence
  Description of Artificial Sequence: Synthetic oligonucleotide
gaagggccugcucagugcg

SEQ ID NO: 2797102 - RNA, 19 nt, Artificial Sequence
  Description of Artificial Sequence: Synthetic oligonucleotide
ucuggcaugcccuccagcu

SEQ ID NO: 2797103 - RNA, 19 nt, Artificial Sequence
  Description of Artificial Sequence: Synthetic oligonucleotide
cuuucaugaagcaaaggaa

SEQ ID NO: 2797104 - RNA, 19 nt, Artificial Sequence
  Description of Artificial Sequence: Synthetic oligonucleotide
uuucaagcucaucaagaaa

SEQ ID NO: 2797105 - RNA, 19 nt, Artificial Sequence
  Description of Artificial Sequence: Synthetic oligonucleotide
ucagagucuggcaugcccu

SEQ ID NO: 2797106 - RNA, 19 nt, Artificial Sequence
  Description of Artificial Sequence: Synthetic oligonucleotide
ucaagcucaucaagaaagu

SEQ ID NO: 2797107 - RNA, 19 nt, Artificial Sequence
  Description of Artificial Sequence: Synthetic oligonucleotide
agcaaaggaacuucucugu

SEQ ID NO: 2797108 - RNA, 19 nt, Artificial Sequence
  Description of Artificial Sequence: Synthetic oligonucleotide
aaucagcugcuccauucug

SEQ ID NO: 2797109 - RNA, 19 nt, Artificial Sequence
  Description of Artificial Sequence: Synthetic oligonucleotide
  modified_base (14)..(14): a, c, u, g, unknown or other
ugaucucugccaanguuuu

SEQ ID NO: 2797110 - RNA, 19 nt, Artificial Sequence
  Description of Artificial Sequence: Synthetic oligonucleotide
uuugcuccucuaauucugc

SEQ ID NO: 2797111 - RNA, 19 nt, Artificial Sequence
  Description of Artificial Sequence: Synthetic oligonucleotide
guuacuaguuccaugaucu

SEQ ID NO: 2797112 - RNA, 19 nt, Artificial Sequence
  Description of Artificial Sequence: Synthetic oligonucleotide
cucauaggccaucggaucc

SEQ ID NO: 2797113 - RNA, 19 nt, Artificial Sequence
  Description of Artificial Sequence: Synthetic oligonucleotide
  modified_base (10)..(10): a, c, u, g, unknown or other
gucaaggucncuuugaguu

SEQ ID NO: 2797114 - RNA, 19 nt, Artificial Sequence
  Description of Artificial Sequence: Synthetic oligonucleotide
caggaagcaaggauguuug

SEQ ID NO: 2797115 - RNA, 19 nt, Artificial Sequence
  Description of Artificial Sequence: Synthetic oligonucleotide
ucagcugcuccauucugcc

SEQ ID NO: 2797116 - RNA, 19 nt, Artificial Sequence
  Description of Artificial Sequence: Synthetic oligonucleotide
cuuauacuucuccuguaac

SEQ ID NO: 2797117 - RNA, 19 nt, Artificial Sequence
  Description of Artificial Sequence: Synthetic oligonucleotide
cugacacuuaucuucagga

SEQ ID NO: 2797118 - RNA, 19 nt, Artificial Sequence
  Description of Artificial Sequence: Synthetic oligonucleotide
cuaauucugcaagaagggc

SEQ ID NO: 2797119 - RNA, 19 nt, Artificial Sequence
  Description of Artificial Sequence: Synthetic oligonucleotide
ugaagccaaagaacugggc

SEQ ID NO: 2797120 - RNA, 19 nt, Artificial Sequence
  Description of Artificial Sequence: Synthetic oligonucleotide
uucucugugcauuuacgaa

SEQ ID NO: 2797121 - RNA, 19 nt, Artificial Sequence
  Description of Artificial Sequence: Synthetic oligonucleotide
uccuguaacucuucaauuu

SEQ ID NO: 2797122 - RNA, 19 nt, Artificial Sequence
  Description of Artificial Sequence: Synthetic oligonucleotide
gaagcaaaggaacuucucu

SEQ ID NO: 2797123 - RNA, 19 nt, Artificial Sequence
  Description of Artificial Sequence: Synthetic oligonucleotide
ugcuauguagauccucagu

SEQ ID NO: 2797124 - RNA, 19 nt, Artificial Sequence
  Description of Artificial Sequence: Synthetic oligonucleotide
aaggaugcgucuccugaca

SEQ ID NO: 2797125 - RNA, 19 nt, Artificial Sequence
  Description of Artificial Sequence: Synthetic oligonucleotide
aucucagagucuggcaugc

SEQ ID NO: 2797126 - RNA, 19 nt, Artificial Sequence
  Description of Artificial Sequence: Synthetic oligonucleotide
uucaaauagguggucuuga

SEQ ID NO: 2797127 - RNA, 19 nt, Artificial Sequence
  Description of Artificial Sequence: Synthetic oligonucleotide
acuaguuccaugaucucug

SEQ ID NO: 2797128 - RNA, 19 nt, Artificial Sequence
  Description of Artificial Sequence: Synthetic oligonucleotide
caagucuguggugugaagc

SEQ ID NO: 2797129 - RNA, 19 nt, Artificial Sequence
  Description of Artificial Sequence: Synthetic oligonucleotide
uggucuugaaaugcuaugu

SEQ ID NO: 2797130 - RNA, 19 nt, Artificial Sequence
  Description of Artificial Sequence: Synthetic oligonucleotide
uuacgaauuuggacagggc

SEQ ID NO: 2797131 - RNA, 19 nt, Artificial Sequence
  Description of Artificial Sequence: Synthetic oligonucleotide
caaccuuauacuucuccug

SEQ ID NO: 2797132 - RNA, 19 nt, Artificial Sequence
  Description of Artificial Sequence: Synthetic oligonucleotide
cuuuaggauuacguguucc

SEQ ID NO: 2797133 - RNA, 19 nt, Artificial Sequence
  Description of Artificial Sequence: Synthetic oligonucleotide
ugaagcaaaggaacuucuc

SEQ ID NO: 2797134 - RNA, 19 nt, Artificial Sequence
  Description of Artificial Sequence: Synthetic oligonucleotide
guuuucaagcucaucaaga

SEQ ID NO: 2797135 - RNA, 19 nt, Artificial Sequence
  Description of Artificial Sequence: Synthetic oligonucleotide
uacuaguuccaugaucucu

SEQ ID NO: 2797136 - RNA, 19 nt, Artificial Sequence
  Description of Artificial Sequence: Synthetic oligonucleotide
cagggcuaaucucagaguc

SEQ ID NO: 2797137 - RNA, 19 nt, Artificial Sequence
  Description of Artificial Sequence: Synthetic oligonucleotide
ucccuaaaguuacuaguuc

SEQ ID NO: 2797138 - RNA, 19 nt, Artificial Sequence
  Description of Artificial Sequence: Synthetic oligonucleotide
aucagcugcuccauucugc

SEQ ID NO: 2797139 - RNA, 19 nt, Artificial Sequence
  Description of Artificial Sequence: Synthetic oligonucleotide
uaaaaggaugcgucuccug

SEQ ID NO: 2797140 - RNA, 19 nt, Artificial Sequence
  Description of Artificial Sequence: Synthetic oligonucleotide
  modified_base (4)..(4): a, c, u, g, unknown or other
gucncuuugaguuuggcuu

SEQ ID NO: 2797141 - RNA, 19 nt, Artificial Sequence
  Description of Artificial Sequence: Synthetic oligonucleotide
gcuucuuuaggauuacgug

SEQ ID NO: 2797142 - RNA, 19 nt, Artificial Sequence
  Description of Artificial Sequence: Synthetic oligonucleotide
ccugcaucacuucaaauag

SEQ ID NO: 2797143 - RNA, 19 nt, Artificial Sequence
  Description of Artificial Sequence: Synthetic oligonucleotide
uggacagggcuaaucucag

SEQ ID NO: 2797144 - RNA, 19 nt, Artificial Sequence
  Description of Artificial Sequence: Synthetic oligonucleotide
aucacuucaaauagguggu

SEQ ID NO: 2797145 - RNA, 19 nt, Artificial Sequence
  Description of Artificial Sequence: Synthetic oligonucleotide
agacauccugcuuucuuug

SEQ ID NO: 2797146 - RNA, 19 nt, Artificial Sequence
  Description of Artificial Sequence: Synthetic oligonucleotide
ucuuugcugcccucaacug

SEQ ID NO: 2797147 - RNA, 19 nt, Artificial Sequence
  Description of Artificial Sequence: Synthetic oligonucleotide
aggaugcgucuccugacac

SEQ ID NO: 2797148 - RNA, 19 nt, Artificial Sequence
  Description of Artificial Sequence: Synthetic oligonucleotide
cucagagucuggcaugccc

SEQ ID NO: 2797149 - RNA, 19 nt, Artificial Sequence
  Description of Artificial Sequence: Synthetic oligonucleotide
  modified_base (7)..(7): a, c, u, g, unknown or other
ugccaanguuuucaagcuc

SEQ ID NO: 2797150 - RNA, 19 nt, Artificial Sequence
  Description of Artificial Sequence: Synthetic oligonucleotide
ggggaacaaaaucagcugc

SEQ ID NO: 2797151 - RNA, 19 nt, Artificial Sequence
  Description of Artificial Sequence: Synthetic oligonucleotide
ugcucagugcguaauucaa

SEQ ID NO: 2797152 - RNA, 19 nt, Artificial Sequence
  Description of Artificial Sequence: Synthetic oligonucleotide
cuucuuuaggauuacgugu

SEQ ID NO: 2797153 - RNA, 19 nt, Artificial Sequence
  Description of Artificial Sequence: Synthetic oligonucleotide
ucaaauagguggucuugaa

SEQ ID NO: 2797154 - RNA, 19 nt, Artificial Sequence
  Description of Artificial Sequence: Synthetic oligonucleotide
uuaggauuacguguuccac

SEQ ID NO: 2797155 - RNA, 19 nt, Artificial Sequence
  Description of Artificial Sequence: Synthetic oligonucleotide
  modified_base (12)..(12): a, c, u, g, unknown or other
aucucugccaanguuuuca

SEQ ID NO: 2797156 - RNA, 19 nt, Artificial Sequence
  Description of Artificial Sequence: Synthetic oligonucleotide
caugaagcaaaggaacuuc

SEQ ID NO: 2797157 - RNA, 19 nt, Artificial Sequence
  Description of Artificial Sequence: Synthetic oligonucleotide
cauuaaaaggaugcgucuc

SEQ ID NO: 2797158 - RNA, 19 nt, Artificial Sequence
  Description of Artificial Sequence: Synthetic oligonucleotide
auacuucuccuguaacucu

SEQ ID NO: 2797159 - RNA, 19 nt, Artificial Sequence
  Description of Artificial Sequence: Synthetic oligonucleotide
uuaaaaggaugcgucuccu

SEQ ID NO: 2797160 - RNA, 19 nt, Artificial Sequence
  Description of Artificial Sequence: Synthetic oligonucleotide
cugcaucacuucaaauagg

SEQ ID NO: 2797161 - RNA, 19 nt, Artificial Sequence
  Description of Artificial Sequence: Synthetic oligonucleotide
ugacacuuaucuucaggaa

SEQ ID NO: 2797162 - RNA, 19 nt, Artificial Sequence
  Description of Artificial Sequence: Synthetic oligonucleotide
ucagugcguaauucaaccu

SEQ ID NO: 2797163 - RNA, 19 nt, Artificial Sequence
  Description of Artificial Sequence: Synthetic oligonucleotide
aacguccuuucaugaagca

SEQ ID NO: 2797164 - RNA, 19 nt, Artificial Sequence
  Description of Artificial Sequence: Synthetic oligonucleotide
aguaagcaagucuguggug

SEQ ID NO: 2797165 - RNA, 19 nt, Artificial Sequence
  Description of Artificial Sequence: Synthetic oligonucleotide
uaagcaagucuguggugug

SEQ ID NO: 2797166 - RNA, 19 nt, Artificial Sequence
  Description of Artificial Sequence: Synthetic oligonucleotide
  modified_base (15)..(15): a, c, u, g, unknown or other
agaaagucaaggucncuuu

SEQ ID NO: 2797167 - RNA, 19 nt, Artificial Sequence
  Description of Artificial Sequence: Synthetic oligonucleotide
ggaagcaaggauguuuggg

SEQ ID NO: 2797168 - RNA, 19 nt, Artificial Sequence
  Description of Artificial Sequence: Synthetic oligonucleotide
ucaggaagcaaggauguuu

SEQ ID NO: 2797169 - RNA, 19 nt, Artificial Sequence
  Description of Artificial Sequence: Synthetic oligonucleotide
cccuaaaguuacuaguucc

SEQ ID NO: 2797170 - RNA, 19 nt, Artificial Sequence
  Description of Artificial Sequence: Synthetic oligonucleotide
uugaaaugcuauguagauc

SEQ ID NO: 2797171 - RNA, 19 nt, Artificial Sequence
  Description of Artificial Sequence: Synthetic oligonucleotide
  modified_base (10)..(10): a, c, u, g, unknown or other
cucugccaanguuuucaag

SEQ ID NO: 2797172 - RNA, 19 nt, Artificial Sequence
  Description of Artificial Sequence: Synthetic oligonucleotide
uacguguuccacagccugc

SEQ ID NO: 2797173 - RNA, 19 nt, Artificial Sequence
  Description of Artificial Sequence: Synthetic oligonucleotide
acuucucugugcauuuacg

SEQ ID NO: 2797174 - RNA, 19 nt, Artificial Sequence
  Description of Artificial Sequence: Synthetic oligonucleotide
guggugugaagccaaagaa

SEQ ID NO: 2797175 - RNA, 19 nt, Artificial Sequence
  Description of Artificial Sequence: Synthetic oligonucleotide
guggucuugaaaugcuaug

SEQ ID NO: 2797176 - RNA, 19 nt, Artificial Sequence
  Description of Artificial Sequence: Synthetic oligonucleotide
uuuugagaagcuggaauuu

SEQ ID NO: 2797177 - RNA, 19 nt, Artificial Sequence
  Description of Artificial Sequence: Synthetic oligonucleotide
  modified_base (11)..(11): a, c, u, g, unknown or other
agucaaggucncuuugagu

SEQ ID NO: 2797178 - RNA, 19 nt, Artificial Sequence
  Description of Artificial Sequence: Synthetic oligonucleotide
uaguuccaugaucucugcc

SEQ ID NO: 2797179 - RNA, 19 nt, Artificial Sequence
  Description of Artificial Sequence: Synthetic oligonucleotide
gugaagccaaagaacuggg

SEQ ID NO: 2797180 - RNA, 19 nt, Artificial Sequence
  Description of Artificial Sequence: Synthetic oligonucleotide
aaguuacuaguuccaugau

SEQ ID NO: 2797181 - RNA, 19 nt, Artificial Sequence
  Description of Artificial Sequence: Synthetic oligonucleotide
gcuccucuaauucugcaag

SEQ ID NO: 2797182 - RNA, 19 nt, Artificial Sequence
  Description of Artificial Sequence: Synthetic oligonucleotide
ccuuucaugaagcaaagga

SEQ ID NO: 2797183 - RNA, 19 nt, Artificial Sequence
  Description of Artificial Sequence: Synthetic oligonucleotide
agcugcuccauucugccaa

SEQ ID NO: 2797184 - RNA, 19 nt, Artificial Sequence
  Description of Artificial Sequence: Synthetic oligonucleotide
acuucaaauagguggucuu

SEQ ID NO: 2797185 - RNA, 19 nt, Artificial Sequence
  Description of Artificial Sequence: Synthetic oligonucleotide
uggcaugcccuccagcuuc

SEQ ID NO: 2797186 - RNA, 19 nt, Artificial Sequence
  Description of Artificial Sequence: Synthetic oligonucleotide
gacauccugcuuucuuugc

SEQ ID NO: 2797187 - RNA, 19 nt, Artificial Sequence
  Description of Artificial Sequence: Synthetic oligonucleotide
  modified_base (3)..(3): a, c, u, g, unknown or other
ucncuuugaguuuggcuuu

SEQ ID NO: 2797188 - RNA, 19 nt, Artificial Sequence
  Description of Artificial Sequence: Synthetic oligonucleotide
ucuuuaggauuacguguuc

SEQ ID NO: 2797189 - RNA, 19 nt, Artificial Sequence
  Description of Artificial Sequence: Synthetic oligonucleotide
agcuucuuuaggauuacgu

SEQ ID NO: 2797190 - RNA, 19 nt, Artificial Sequence
  Description of Artificial Sequence: Synthetic oligonucleotide
uuucuuugcugcccucaac

SEQ ID NO: 2797191 - RNA, 19 nt, Artificial Sequence
  Description of Artificial Sequence: Synthetic oligonucleotide
aggaagcaaggauguuugg

SEQ ID NO: 2797192 - RNA, 19 nt, Artificial Sequence
  Description of Artificial Sequence: Synthetic oligonucleotide
cuaguuccaugaucucugc

SEQ ID NO: 2797193 - RNA, 19 nt, Artificial Sequence
  Description of Artificial Sequence: Synthetic oligonucleotide
augcuauguagauccucag

SEQ ID NO: 2797194 - RNA, 19 nt, Artificial Sequence
  Description of Artificial Sequence: Synthetic oligonucleotide
ucaugaagcaaaggaacuu

SEQ ID NO: 2797195 - RNA, 19 nt, Artificial Sequence
  Description of Artificial Sequence: Synthetic oligonucleotide
auuuacgaauuuggacagg

SEQ ID NO: 2797196 - RNA, 19 nt, Artificial Sequence
  Description of Artificial Sequence: Synthetic oligonucleotide
guaauucaaccuuauacuu

SEQ ID NO: 2797197 - RNA, 19 nt, Artificial Sequence
  Description of Artificial Sequence: Synthetic oligonucleotide
gcuauguagauccucagua

SEQ ID NO: 2797198 - RNA, 19 nt, Artificial Sequence
  Description of Artificial Sequence: Synthetic oligonucleotide
ugcuccucuaauucugcaa

SEQ ID NO: 2797199 - RNA, 19 nt, Artificial Sequence
  Description of Artificial Sequence: Synthetic oligonucleotide
  modified_base (8)..(8): a, c, u, g, unknown or other
caaggucncuuugaguuug

SEQ ID NO: 2797200 - RNA, 19 nt, Artificial Sequence
  Description of Artificial Sequence: Synthetic oligonucleotide
  modified_base (7)..(7): a, c, u, g, unknown or other
aaggucncuuugaguuugg

SEQ ID NO: 2797201 - RNA, 19 nt, Artificial Sequence
  Description of Artificial Sequence: Synthetic oligonucleotide
cuuugaguuuggcuuuaac

SEQ ID NO: 2797202 - RNA, 19 nt, Artificial Sequence
  Description of Artificial Sequence: Synthetic oligonucleotide
agccaaagaacugggccuc

SEQ ID NO: 2797203 - RNA, 19 nt, Artificial Sequence
  Description of Artificial Sequence: Synthetic oligonucleotide
uccucuaauucugcaagaa

SEQ ID NO: 2797204 - RNA, 19 nt, Artificial Sequence
  Description of Artificial Sequence: Synthetic oligonucleotide
cucaguaagcaagucugug

SEQ ID NO: 2797205 - RNA, 19 nt, Artificial Sequence
  Description of Artificial Sequence: Synthetic oligonucleotide
cuauguagauccucaguaa

SEQ ID NO: 2797206 - RNA, 19 nt, Artificial Sequence
  Description of Artificial Sequence: Synthetic oligonucleotide
acagggcuaaucucagagu

SEQ ID NO: 2797207 - RNA, 19 nt, Artificial Sequence
  Description of Artificial Sequence: Synthetic oligonucleotide
cuugaaaugcuauguagau

SEQ ID NO: 2797208 - RNA, 19 nt, Artificial Sequence
  Description of Artificial Sequence: Synthetic oligonucleotide
uaucuucaggaagcaagga

SEQ ID NO: 2797209 - RNA, 19 nt, Artificial Sequence
  Description of Artificial Sequence: Synthetic oligonucleotide
  modified_base (9)..(9): a, c, u, g, unknown or other
ucaaggucncuuugaguuu

SEQ ID NO: 2797210 - RNA, 19 nt, Artificial Sequence
  Description of Artificial Sequence: Synthetic oligonucleotide
uuccacagccugcaucacu

SEQ ID NO: 2797211 - RNA, 19 nt, Artificial Sequence
  Description of Artificial Sequence: Synthetic oligonucleotide
ugcgucuccugacacuuau

SEQ ID NO: 2797212 - RNA, 19 nt, Artificial Sequence
  Description of Artificial Sequence: Synthetic oligonucleotide
agagucuggcaugcccucc

SEQ ID NO: 2797213 - RNA, 19 nt, Artificial Sequence
  Description of Artificial Sequence: Synthetic oligonucleotide
uucuccuguaacucuucaa

SEQ ID NO: 2797214 - RNA, 19 nt, Artificial Sequence
  Description of Artificial Sequence: Synthetic oligonucleotide
ggauccacagacauccugc

SEQ ID NO: 2797215 - RNA, 19 nt, Artificial Sequence
  Description of Artificial Sequence: Synthetic oligonucleotide
cugugcauuuacgaauuug

SEQ ID NO: 2797216 - RNA, 19 nt, Artificial Sequence
  Description of Artificial Sequence: Synthetic oligonucleotide
gaguuuggcuuuaacagcu

SEQ ID NO: 2797217 - RNA, 19 nt, Artificial Sequence
  Description of Artificial Sequence: Synthetic oligonucleotide
acagacauccugcuuucuu

SEQ ID NO: 2797218 - RNA, 19 nt, Artificial Sequence
  Description of Artificial Sequence: Synthetic oligonucleotide
ugcguaauucaaccuuaua

SEQ ID NO: 2797219 - RNA, 19 nt, Artificial Sequence
  Description of Artificial Sequence: Synthetic oligonucleotide
uuacuaguuccaugaucuc

SEQ ID NO: 2797220 - RNA, 19 nt, Artificial Sequence
  Description of Artificial Sequence: Synthetic oligonucleotide
  modified_base (15)..(15): a, c, u, g, unknown or other
augaucucugccaanguuu

SEQ ID NO: 2797221 - RNA, 19 nt, Artificial Sequence
  Description of Artificial Sequence: Synthetic oligonucleotide
ugggccucauaggccaucg

SEQ ID NO: 2797222 - RNA, 19 nt, Artificial Sequence
  Description of Artificial Sequence: Synthetic oligonucleotide
ucauaggccaucggaucca

SEQ ID NO: 2797223 - RNA, 19 nt, Artificial Sequence
  Description of Artificial Sequence: Synthetic oligonucleotide
  modified_base (11)..(11): a, c, u, g, unknown or other
ucucugccaanguuuucaa

SEQ ID NO: 2797224 - RNA, 19 nt, Artificial Sequence
  Description of Artificial Sequence: Synthetic oligonucleotide
guaagcaagucuguggugu

SEQ ID NO: 2797225 - RNA, 19 nt, Artificial Sequence
  Description of Artificial Sequence: Synthetic oligonucleotide
augaagcaaaggaacuucu

SEQ ID NO: 2797226 - RNA, 19 nt, Artificial Sequence
  Description of Artificial Sequence: Synthetic oligonucleotide
gaacugggccucauaggcc

SEQ ID NO: 2797227 - RNA, 19 nt, Artificial Sequence
  Description of Artificial Sequence: Synthetic oligonucleotide
ccugacacuuaucuucagg

SEQ ID NO: 2797228 - RNA, 19 nt, Artificial Sequence
  Description of Artificial Sequence: Synthetic oligonucleotide
uucugcaagaagggccugc

SEQ ID NO: 2797229 - RNA, 19 nt, Artificial Sequence
  Description of Artificial Sequence: Synthetic oligonucleotide
  modified_base (6)..(6): a, c, u, g, unknown or other
aggucncuuugaguuuggc

SEQ ID NO: 2797230 - RNA, 19 nt, Artificial Sequence
  Description of Artificial Sequence: Synthetic oligonucleotide
caaauagguggucuugaaa

SEQ ID NO: 2797231 - RNA, 19 nt, Artificial Sequence
  Description of Artificial Sequence: Synthetic oligonucleotide
acaaaaucagcugcuccau

SEQ ID NO: 2797232 - RNA, 19 nt, Artificial Sequence
  Description of Artificial Sequence: Synthetic oligonucleotide
agauccucaguaagcaagu

SEQ ID NO: 2797233 - RNA, 19 nt, Artificial Sequence
  Description of Artificial Sequence: Synthetic oligonucleotide
guuccaugaucucugccaa

SEQ ID NO: 2797234 - RNA, 19 nt, Artificial Sequence
  Description of Artificial Sequence: Synthetic oligonucleotide
uugcuccucuaauucugca

SEQ ID NO: 2797235 - RNA, 19 nt, Artificial Sequence
  Description of Artificial Sequence: Synthetic oligonucleotide
aaggaacuucucugugcau

SEQ ID NO: 2797236 - RNA, 19 nt, Artificial Sequence
  Description of Artificial Sequence: Synthetic oligonucleotide
caagcucaucaagaaaguc

SEQ ID NO: 2797237 - RNA, 19 nt, Artificial Sequence
  Description of Artificial Sequence: Synthetic oligonucleotide
ggugugaagccaaagaacu

SEQ ID NO: 2797238 - RNA, 19 nt, Artificial Sequence
  Description of Artificial Sequence: Synthetic oligonucleotide
caaaacguccuuucaugaa

SEQ ID NO: 2797239 - RNA, 19 nt, Artificial Sequence
  Description of Artificial Sequence: Synthetic oligonucleotide
gcaaaggaacuucucugug

SEQ ID NO: 2797240 - RNA, 19 nt, Artificial Sequence
  Description of Artificial Sequence: Synthetic oligonucleotide
ucuguggugugaagccaaa

SEQ ID NO: 2797241 - RNA, 19 nt, Artificial Sequence
  Description of Artificial Sequence: Synthetic oligonucleotide
aagcaagucugugguguga

SEQ ID NO: 2797242 - RNA, 19 nt, Artificial Sequence
  Description of Artificial Sequence: Synthetic oligonucleotide
cuccugacacuuaucuuca

SEQ ID NO: 2797243 - RNA, 19 nt, Artificial Sequence
  Description of Artificial Sequence: Synthetic oligonucleotide
aggaacuucucugugcauu

SEQ ID NO: 2797244 - RNA, 19 nt, Artificial Sequence
  Description of Artificial Sequence: Synthetic oligonucleotide
  modified_base (4)..(4): a, c, u, g, unknown or other
caanguuuucaagcucauc

SEQ ID NO: 2797245 - RNA, 19 nt, Artificial Sequence
  Description of Artificial Sequence: Synthetic oligonucleotide
  modified_base (6)..(6): a, c, u, g, unknown or other
gccaanguuuucaagcuca

SEQ ID NO: 2797246 - RNA, 19 nt, Artificial Sequence
  Description of Artificial Sequence: Synthetic oligonucleotide
uccugacacuuaucuucag

SEQ ID NO: 2797247 - RNA, 19 nt, Artificial Sequence
  Description of Artificial Sequence: Synthetic oligonucleotide
ccucuaauucugcaagaag

SEQ ID NO: 2797248 - RNA, 19 nt, Artificial Sequence
  Description of Artificial Sequence: Synthetic oligonucleotide
ccuaaaguuacuaguucca

SEQ ID NO: 2797249 - RNA, 19 nt, Artificial Sequence
  Description of Artificial Sequence: Synthetic oligonucleotide
cuucauuaaaaggaugcgu

SEQ ID NO: 2797250 - RNA, 19 nt, Artificial Sequence
  Description of Artificial Sequence: Synthetic oligonucleotide
acgaauuuggacagggcua

SEQ ID NO: 2797251 - RNA, 19 nt, Artificial Sequence
  Description of Artificial Sequence: Synthetic oligonucleotide
agguuaucaaaacguccuu

SEQ ID NO: 2797252 - RNA, 19 nt, Artificial Sequence
  Description of Artificial Sequence: Synthetic oligonucleotide
caguaagcaagucuguggu

SEQ ID NO: 2797253 - RNA, 19 nt, Artificial Sequence
  Description of Artificial Sequence: Synthetic oligonucleotide
agugcguaauucaaccuua

SEQ ID NO: 2797254 - RNA, 19 nt, Artificial Sequence
  Description of Artificial Sequence: Synthetic oligonucleotide
ggccaucggauccacagac

SEQ ID NO: 2797255 - RNA, 19 nt, Artificial Sequence
  Description of Artificial Sequence: Synthetic oligonucleotide
gugugaagccaaagaacug

SEQ ID NO: 2797256 - RNA, 19 nt, Artificial Sequence
  Description of Artificial Sequence: Synthetic oligonucleotide
cugcccucaacugugaaaa

SEQ ID NO: 2797257 - RNA, 19 nt, Artificial Sequence
  Description of Artificial Sequence: Synthetic oligonucleotide
gggcuaaucucagagucug

SEQ ID NO: 2797258 - RNA, 19 nt, Artificial Sequence
  Description of Artificial Sequence: Synthetic oligonucleotide
caucggauccacagacauc

SEQ ID NO: 2797259 - RNA, 19 nt, Artificial Sequence
  Description of Artificial Sequence: Synthetic oligonucleotide
auuacguguuccacagccu

SEQ ID NO: 2797260 - RNA, 19 nt, Artificial Sequence
  Description of Artificial Sequence: Synthetic oligonucleotide
ucugugcauuuacgaauuu

SEQ ID NO: 2797261 - RNA, 19 nt, Artificial Sequence
  Description of Artificial Sequence: Synthetic oligonucleotide
gccugcaucacuucaaaua

SEQ ID NO: 2797262 - RNA, 19 nt, Artificial Sequence
  Description of Artificial Sequence: Synthetic oligonucleotide
cugcucagugcguaauuca

SEQ ID NO: 2797263 - RNA, 19 nt, Artificial Sequence
  Description of Artificial Sequence: Synthetic oligonucleotide
gugcauuuacgaauuugga

SEQ ID NO: 2797264 - RNA, 19 nt, Artificial Sequence
  Description of Artificial Sequence: Synthetic oligonucleotide
guagauccucaguaagcaa

SEQ ID NO: 2797265 - RNA, 19 nt, Artificial Sequence
  Description of Artificial Sequence: Synthetic oligonucleotide
gagucuggcaugcccucca

SEQ ID NO: 2797266 - RNA, 19 nt, Artificial Sequence
  Description of Artificial Sequence: Synthetic oligonucleotide
accuuauacuucuccugua

SEQ ID NO: 2797267 - RNA, 19 nt, Artificial Sequence
  Description of Artificial Sequence: Synthetic oligonucleotide
cguaauucaaccuuauacu

SEQ ID NO: 2797268 - RNA, 19 nt, Artificial Sequence
  Description of Artificial Sequence: Synthetic oligonucleotide
agucuggcaugcccuccag

SEQ ID NO: 2797269 - RNA, 19 nt, Artificial Sequence
  Description of Artificial Sequence: Synthetic oligonucleotide
  modified_base (19)..(19): a, c, u, g, unknown or other
uuccaugaucucugccaan

SEQ ID NO: 2797270 - RNA, 19 nt, Artificial Sequence
  Description of Artificial Sequence: Synthetic oligonucleotide
  modified_base (8)..(8): a, c, u, g, unknown or other
cugccaanguuuucaagcu

SEQ ID NO: 2797271 - RNA, 19 nt, Artificial Sequence
  Description of Artificial Sequence: Synthetic oligonucleotide
gauccacagacauccugcu

SEQ ID NO: 2797272 - RNA, 19 nt, Artificial Sequence
  Description of Artificial Sequence: Synthetic oligonucleotide
ucacuucaaauaggugguc

SEQ ID NO: 2797273 - RNA, 19 nt, Artificial Sequence
  Description of Artificial Sequence: Synthetic oligonucleotide
acguguuccacagccugca

SEQ ID NO: 2797274 - RNA, 19 nt, Artificial Sequence
  Description of Artificial Sequence: Synthetic oligonucleotide
auucaaccuuauacuucuc

SEQ ID NO: 2797275 - RNA, 19 nt, Artificial Sequence
  Description of Artificial Sequence: Synthetic oligonucleotide
cuccucuaauucugcaaga

SEQ ID NO: 2797276 - RNA, 19 nt, Artificial Sequence
  Description of Artificial Sequence: Synthetic oligonucleotide
acuuaucuucaggaagcaa

SEQ ID NO: 2797277 - RNA, 19 nt, Artificial Sequence
  Description of Artificial Sequence: Synthetic oligonucleotide
aggccaucggauccacaga

SEQ ID NO: 2797278 - RNA, 19 nt, Artificial Sequence
  Description of Artificial Sequence: Synthetic oligonucleotide
agcaagucuguggugugaa

SEQ ID NO: 2797279 - RNA, 19 nt, Artificial Sequence
  Description of Artificial Sequence: Synthetic oligonucleotide
agggcuaaucucagagucu

SEQ ID NO: 2797280 - RNA, 19 nt, Artificial Sequence
  Description of Artificial Sequence: Synthetic oligonucleotide
cuucuccuguaacucuuca

SEQ ID NO: 2797281 - RNA, 19 nt, Artificial Sequence
  Description of Artificial Sequence: Synthetic oligonucleotide
uugcugcccucaacuguga

SEQ ID NO: 2797282 - RNA, 19 nt, Artificial Sequence
  Description of Artificial Sequence: Synthetic oligonucleotide
cuguggugugaagccaaag

SEQ ID NO: 2797283 - RNA, 19 nt, Artificial Sequence
  Description of Artificial Sequence: Synthetic oligonucleotide
cagagucuggcaugcccuc

SEQ ID NO: 2797284 - RNA, 19 nt, Artificial Sequence
  Description of Artificial Sequence: Synthetic oligonucleotide
ggccucauaggccaucgga

SEQ ID NO: 2797285 - RNA, 19 nt, Artificial Sequence
  Description of Artificial Sequence: Synthetic oligonucleotide
cagcuucuuuaggauuacg

SEQ ID NO: 2797286 - RNA, 19 nt, Artificial Sequence
  Description of Artificial Sequence: Synthetic oligonucleotide
ggucuugaaaugcuaugua

SEQ ID NO: 2797287 - RNA, 19 nt, Artificial Sequence
  Description of Artificial Sequence: Synthetic oligonucleotide
  modified_base (13)..(13): a, c, u, g, unknown or other
gaucucugccaanguuuuc

SEQ ID NO: 2797288 - RNA, 19 nt, Artificial Sequence
  Description of Artificial Sequence: Synthetic oligonucleotide
cucccuaaaguuacuaguu

SEQ ID NO: 2797289 - RNA, 19 nt, Artificial Sequence
  Description of Artificial Sequence: Synthetic oligonucleotide
acguccuuucaugaagcaa

SEQ ID NO: 2797290 - RNA, 19 nt, Artificial Sequence
  Description of Artificial Sequence: Synthetic oligonucleotide
agccugcaucacuucaaau

SEQ ID NO: 2797291 - RNA, 19 nt, Artificial Sequence
  Description of Artificial Sequence: Synthetic oligonucleotide
gaugcgucuccugacacuu

SEQ ID NO: 2797292 - RNA, 19 nt, Artificial Sequence
  Description of Artificial Sequence: Synthetic oligonucleotide
cguccuuucaugaagcaaa

SEQ ID NO: 2797293 - RNA, 19 nt, Artificial Sequence
  Description of Artificial Sequence: Synthetic oligonucleotide
gucuggcaugcccuccagc

SEQ ID NO: 2797294 - RNA, 19 nt, Artificial Sequence
  Description of Artificial Sequence: Synthetic oligonucleotide
ugcugcccucaacugugaa

SEQ ID NO: 2797295 - RNA, 19 nt, Artificial Sequence
  Description of Artificial Sequence: Synthetic oligonucleotide
ucggauccacagacauccu

SEQ ID NO: 2797296 - RNA, 19 nt, Artificial Sequence
  Description of Artificial Sequence: Synthetic oligonucleotide
  modified_base (5)..(5): a, c, u, g, unknown or other
ggucncuuugaguuuggcu

SEQ ID NO: 2797297 - RNA, 19 nt, Artificial Sequence
  Description of Artificial Sequence: Synthetic oligonucleotide
ucucagagucuggcaugcc

SEQ ID NO: 2797298 - RNA, 19 nt, Artificial Sequence
  Description of Artificial Sequence: Synthetic oligonucleotide
ugcuuucuuugcugcccuc

SEQ ID NO: 2797299 - RNA, 19 nt, Artificial Sequence
  Description of Artificial Sequence: Synthetic oligonucleotide
cauaggccaucggauccac

SEQ ID NO: 2797300 - RNA, 19 nt, Artificial Sequence
  Description of Artificial Sequence: Synthetic oligonucleotide
cacuuaucuucaggaagca

SEQ ID NO: 2797301 - RNA, 19 nt, Artificial Sequence
  Description of Artificial Sequence: Synthetic oligonucleotide
cuaaaguuacuaguuccau

SEQ ID NO: 2797302 - RNA, 19 nt, Artificial Sequence
  Description of Artificial Sequence: Synthetic oligonucleotide
cucugugcauuuacgaauu

SEQ ID NO: 2797303 - RNA, 19 nt, Artificial Sequence
  Description of Artificial Sequence: Synthetic oligonucleotide
ggauuacguguuccacagc

SEQ ID NO: 2797304 - RNA, 19 nt, Artificial Sequence
  Description of Artificial Sequence: Synthetic oligonucleotide
gcaucacuucaaauaggug

SEQ ID NO: 2797305 - RNA, 19 nt, Artificial Sequence
  Description of Artificial Sequence: Synthetic oligonucleotide
auucugcaagaagggccug

SEQ ID NO: 2797306 - RNA, 19 nt, Artificial Sequence
  Description of Artificial Sequence: Synthetic oligonucleotide
ccuuauacuucuccuguaa

SEQ ID NO: 2797307 - RNA, 19 nt, Artificial Sequence
  Description of Artificial Sequence: Synthetic oligonucleotide
uucaggaagcaaggauguu

SEQ ID NO: 2797308 - RNA, 19 nt, Artificial Sequence
  Description of Artificial Sequence: Synthetic oligonucleotide
gucuguggugugaagccaa

SEQ ID NO: 2797309 - RNA, 19 nt, Artificial Sequence
  Description of Artificial Sequence: Synthetic oligonucleotide
guuuggcuuuaacagcuuu

SEQ ID NO: 2797310 - RNA, 19 nt, Artificial Sequence
  Description of Artificial Sequence: Synthetic oligonucleotide
ggcuaaucucagagucugg

SEQ ID NO: 2797311 - RNA, 19 nt, Artificial Sequence
  Description of Artificial Sequence: Synthetic oligonucleotide
cacuucaaauagguggucu

SEQ ID NO: 2797312 - RNA, 19 nt, Artificial Sequence
  Description of Artificial Sequence: Synthetic oligonucleotide
cugcaagaagggccugcuc

SEQ ID NO: 2797313 - RNA, 19 nt, Artificial Sequence
  Description of Artificial Sequence: Synthetic oligonucleotide
cagacauccugcuuucuuu

SEQ ID NO: 2797314 - RNA, 19 nt, Artificial Sequence
  Description of Artificial Sequence: Synthetic oligonucleotide
gaaaugcuauguagauccu

SEQ ID NO: 2797315 - RNA, 19 nt, Artificial Sequence
  Description of Artificial Sequence: Synthetic oligonucleotide
cagugcguaauucaaccuu

SEQ ID NO: 2797316 - RNA, 19 nt, Artificial Sequence
  Description of Artificial Sequence: Synthetic oligonucleotide
gcucagugcguaauucaac

SEQ ID NO: 2797317 - RNA, 19 nt, Artificial Sequence
  Description of Artificial Sequence: Synthetic oligonucleotide
cuccuguaacucuucaauu

SEQ ID NO: 2797318 - RNA, 19 nt, Artificial Sequence
  Description of Artificial Sequence: Synthetic oligonucleotide
gcuuucuuugcugcccuca

SEQ ID NO: 2797319 - RNA, 19 nt, Artificial Sequence
  Description of Artificial Sequence: Synthetic oligonucleotide
gaacuucucugugcauuua

SEQ ID NO: 2797320 - RNA, 19 nt, Artificial Sequence
  Description of Artificial Sequence: Synthetic oligonucleotide
ccugcucagugcguaauuc

SEQ ID NO: 2797321 - RNA, 19 nt, Artificial Sequence
  Description of Artificial Sequence: Synthetic oligonucleotide
cagccugcaucacuucaaa

SEQ ID NO: 2797322 - RNA, 19 nt, Artificial Sequence
  Description of Artificial Sequence: Synthetic oligonucleotide
gcugcccucaacugugaaa

SEQ ID NO: 2797323 - RNA, 19 nt, Artificial Sequence
  Description of Artificial Sequence: Synthetic oligonucleotide
aguuuggcuuuaacagcuu

SEQ ID NO: 2797324 - RNA, 19 nt, Artificial Sequence
  Description of Artificial Sequence: Synthetic oligonucleotide
ggaacuucucugugcauuu

SEQ ID NO: 2797325 - RNA, 19 nt, Artificial Sequence
  Description of Artificial Sequence: Synthetic oligonucleotide
agguggucuugaaaugcua

SEQ ID NO: 2797326 - RNA, 19 nt, Artificial Sequence
  Description of Artificial Sequence: Synthetic oligonucleotide
gguuaucaaaacguccuuu

SEQ ID NO: 2797327 - RNA, 19 nt, Artificial Sequence
  Description of Artificial Sequence: Synthetic oligonucleotide
agggccugcucagugcgua

SEQ ID NO: 2797328 - RNA, 19 nt, Artificial Sequence
  Description of Artificial Sequence: Synthetic oligonucleotide
gguggucuugaaaugcuau

SEQ ID NO: 2797329 - RNA, 19 nt, Artificial Sequence
  Description of Artificial Sequence: Synthetic oligonucleotide
gggccucauaggccaucgg

SEQ ID NO: 2797330 - RNA, 19 nt, Artificial Sequence
  Description of Artificial Sequence: Synthetic oligonucleotide
guuccacagccugcaucac

SEQ ID NO: 2797331 - RNA, 19 nt, Artificial Sequence
  Description of Artificial Sequence: Synthetic oligonucleotide
gucuccugacacuuaucuu

SEQ ID NO: 2797332 - RNA, 19 nt, Artificial Sequence
  Description of Artificial Sequence: Synthetic oligonucleotide
cggauccacagacauccug

SEQ ID NO: 2797333 - RNA, 19 nt, Artificial Sequence
  Description of Artificial Sequence: Synthetic oligonucleotide
auaggccaucggauccaca

SEQ ID NO: 2797334 - RNA, 19 nt, Artificial Sequence
  Description of Artificial Sequence: Synthetic oligonucleotide
ggacagggcuaaucucaga

SEQ ID NO: 2797335 - RNA, 19 nt, Artificial Sequence
  Description of Artificial Sequence: Synthetic oligonucleotide
caaaaucagcugcuccauu

SEQ ID NO: 2797336 - RNA, 19 nt, Artificial Sequence
  Description of Artificial Sequence: Synthetic oligonucleotide
  modified_base (17)..(17): a, c, u, g, unknown or other
caagaaagucaaggucncu

SEQ ID NO: 2797337 - RNA, 19 nt, Artificial Sequence
  Description of Artificial Sequence: Synthetic oligonucleotide
ggaugcgucuccugacacu

SEQ ID NO: 2797338 - RNA, 19 nt, Artificial Sequence
  Description of Artificial Sequence: Synthetic oligonucleotide
cugggccucauaggccauc

SEQ ID NO: 2797339 - RNA, 19 nt, Artificial Sequence
  Description of Artificial Sequence: Synthetic oligonucleotide
ccagcuucuuuaggauuac

SEQ ID NO: 2797340 - RNA, 19 nt, Artificial Sequence
  Description of Artificial Sequence: Synthetic oligonucleotide
  modified_base (2)..(2): a, c, u, g, unknown or other
cncuuugaguuuggcuuua

SEQ ID NO: 2797341 - RNA, 19 nt, Artificial Sequence
  Description of Artificial Sequence: Synthetic oligonucleotide
cgaauuuggacagggcuaa

SEQ ID NO: 2797342 - RNA, 19 nt, Artificial Sequence
  Description of Artificial Sequence: Synthetic oligonucleotide
cgucuccugacacuuaucu

SEQ ID NO: 2797343 - RNA, 19 nt, Artificial Sequence
  Description of Artificial Sequence: Synthetic oligonucleotide
ccaucggauccacagacau

SEQ ID NO: 2797344 - RNA, 19 nt, Artificial Sequence
  Description of Artificial Sequence: Synthetic oligonucleotide
gaauuuggacagggcuaau

SEQ ID NO: 2797345 - RNA, 19 nt, Artificial Sequence
  Description of Artificial Sequence: Synthetic oligonucleotide
gugcguaauucaaccuuau

SEQ ID NO: 2797346 - RNA, 19 nt, Artificial Sequence
  Description of Artificial Sequence: Synthetic oligonucleotide
gccucauaggccaucggau

SEQ ID NO: 2797347 - RNA, 19 nt, Artificial Sequence
  Description of Artificial Sequence: Synthetic oligonucleotide
gcugcuccauucugccaaa

SEQ ID NO: 2797348 - RNA, 19 nt, Artificial Sequence
  Description of Artificial Sequence: Synthetic oligonucleotide
acugggccucauaggccau

SEQ ID NO: 2797349 - RNA, 19 nt, Artificial Sequence
  Description of Artificial Sequence: Synthetic oligonucleotide
  modified_base (5)..(5): a, c, u, g, unknown or other
ccaanguuuucaagcucau

SEQ ID NO: 2797350 - RNA, 19 nt, Artificial Sequence
  Description of Artificial Sequence: Synthetic oligonucleotide
ccucaguaagcaagucugu

SEQ ID NO: 2797351 - RNA, 19 nt, Artificial Sequence
  Description of Artificial Sequence: Synthetic oligonucleotide
gccaaagaacugggccuca

SEQ ID NO: 2797352 - RNA, 19 nt, Artificial Sequence
  Description of Artificial Sequence: Synthetic oligonucleotide
ccuccagcuucuuuaggau

SEQ ID NO: 2797353 - RNA, 19 nt, Artificial Sequence
  Description of Artificial Sequence: Synthetic oligonucleotide
cuggcaugcccuccagcuu

SEQ ID NO: 2797354 - RNA, 19 nt, Artificial Sequence
  Description of Artificial Sequence: Synthetic oligonucleotide
  modified_base (17)..(17): a, c, u, g, unknown or other
ccaugaucucugccaangu

SEQ ID NO: 2797355 - RNA, 19 nt, Artificial Sequence
  Description of Artificial Sequence: Synthetic oligonucleotide
augcgucuccugacacuua

SEQ ID NO: 2797356 - RNA, 19 nt, Artificial Sequence
  Description of Artificial Sequence: Synthetic oligonucleotide
cacagacauccugcuuucu

SEQ ID NO: 2797357 - RNA, 19 nt, Artificial Sequence
  Description of Artificial Sequence: Synthetic oligonucleotide
gggccugcucagugcguaa

SEQ ID NO: 2797358 - RNA, 19 nt, Artificial Sequence
  Description of Artificial Sequence: Synthetic oligonucleotide
gccugcucagugcguaauu

SEQ ID NO: 2797359 - RNA, 19 nt, Artificial Sequence
  Description of Artificial Sequence: Synthetic oligonucleotide
ccaaagaacugggccucau

SEQ ID NO: 2797360 - RNA, 19 nt, Artificial Sequence
  Description of Artificial Sequence: Synthetic oligonucleotide
  modified_base (1)..(1): a, c, u, g, unknown or other
nguuuucaagcucaucaag

SEQ ID NO: 2797361 - RNA, 19 nt, Artificial Sequence
  Description of Artificial Sequence: Synthetic oligonucleotide
  modified_base (1)..(1): a, c, u, g, unknown or other
ncuuugaguuuggcuuuaa

SEQ ID NO: 2797362 - RNA, 19 nt, Artificial Sequence
  Description of Artificial Sequence: Synthetic oligonucleotide
acuaugaucuccuggaucc

SEQ ID NO: 2797363 - RNA, 19 nt, Artificial Sequence
  Description of Artificial Sequence: Synthetic oligonucleotide
aacaucaucaugccauucc

SEQ ID NO: 2797364 - RNA, 19 nt, Artificial Sequence
  Description of Artificial Sequence: Synthetic oligonucleotide
agucgaauuacacacuugg

SEQ ID NO: 2797365 - RNA, 19 nt, Artificial Sequence
  Description of Artificial Sequence: Synthetic oligonucleotide
aaccugauugcgcaggucg

SEQ ID NO: 2797366 - RNA, 19 nt, Artificial Sequence
  Description of Artificial Sequence: Synthetic oligonucleotide
uuuucagcagucauccugg

SEQ ID NO: 2797367 - RNA, 19 nt, Artificial Sequence
  Description of Artificial Sequence: Synthetic oligonucleotide
ucagcagucauccuggagc

SEQ ID NO: 2797368 - RNA, 19 nt, Artificial Sequence
  Description of Artificial Sequence: Synthetic oligonucleotide
aaucaccuggccuuagucg

SEQ ID NO: 2797369 - RNA, 19 nt, Artificial Sequence
  Description of Artificial Sequence: Synthetic oligonucleotide
ucgaauuacacacuuggga

SEQ ID NO: 2797370 - RNA, 19 nt, Artificial Sequence
  Description of Artificial Sequence: Synthetic oligonucleotide
ugaaguauccuccacccug

SEQ ID NO: 2797371 - RNA, 19 nt, Artificial Sequence
  Description of Artificial Sequence: Synthetic oligonucleotide
ugggaaugagcccagcccg

SEQ ID NO: 2797372 - RNA, 19 nt, Artificial Sequence
  Description of Artificial Sequence: Synthetic oligonucleotide
uccaguaugucccggaggc

SEQ ID NO: 2797373 - RNA, 19 nt, Artificial Sequence
  Description of Artificial Sequence: Synthetic oligonucleotide
ucauccuggagccugaagu

SEQ ID NO: 2797374 - RNA, 19 nt, Artificial Sequence
  Description of Artificial Sequence: Synthetic oligonucleotide
guaagaaagggccggaaag

SEQ ID NO: 2797375 - RNA, 19 nt, Artificial Sequence
  Description of Artificial Sequence: Synthetic oligonucleotide
uuaaaggggacuccaucag

SEQ ID NO: 2797376 - RNA, 19 nt, Artificial Sequence
  Description of Artificial Sequence: Synthetic oligonucleotide
uccacuaugaucuccugga

SEQ ID NO: 2797377 - RNA, 19 nt, Artificial Sequence
  Description of Artificial Sequence: Synthetic oligonucleotide
cucuggguaaaccugauug

SEQ ID NO: 2797378 - RNA, 19 nt, Artificial Sequence
  Description of Artificial Sequence: Synthetic oligonucleotide
uggagggaucguaagaaag

SEQ ID NO: 2797379 - RNA, 19 nt, Artificial Sequence
  Description of Artificial Sequence: Synthetic oligonucleotide
uaagaaagggccggaaagg

SEQ ID NO: 2797380 - RNA, 19 nt, Artificial Sequence
  Description of Artificial Sequence: Synthetic oligonucleotide
uaaaggggacuccaucagg

SEQ ID NO: 2797381 - RNA, 19 nt, Artificial Sequence
  Description of Artificial Sequence: Synthetic oligonucleotide
aggucgcuuaccuuaaagg

SEQ ID NO: 2797382 - RNA, 19 nt, Artificial Sequence
  Description of Artificial Sequence: Synthetic oligonucleotide
cuugcgaacuuucugccgg

SEQ ID NO: 2797383 - RNA, 19 nt, Artificial Sequence
  Description of Artificial Sequence: Synthetic oligonucleotide
uggggaguaguucugcaag

SEQ ID NO: 2797384 - RNA, 19 nt, Artificial Sequence
  Description of Artificial Sequence: Synthetic oligonucleotide
ucgcuuaccuuaaagggga

SEQ ID NO: 2797385 - RNA, 19 nt, Artificial Sequence
  Description of Artificial Sequence: Synthetic oligonucleotide
ggucgcuuaccuuaaaggg

SEQ ID NO: 2797386 - RNA, 19 nt, Artificial Sequence
  Description of Artificial Sequence: Synthetic oligonucleotide
aguauccuccacccugucc

SEQ ID NO: 2797387 - RNA, 19 nt, Artificial Sequence
  Description of Artificial Sequence: Synthetic oligonucleotide
ucuggguaaaccugauugc

SEQ ID NO: 2797388 - RNA, 19 nt, Artificial Sequence
  Description of Artificial Sequence: Synthetic oligonucleotide
gaucguaagaaagggccgg

SEQ ID NO: 2797389 - RNA, 19 nt, Artificial Sequence
  Description of Artificial Sequence: Synthetic oligonucleotide
gagggaucguaagaaaggg

SEQ ID NO: 2797390 - RNA, 19 nt, Artificial Sequence
  Description of Artificial Sequence: Synthetic oligonucleotide
uuagucgaauuacacacuu

SEQ ID NO: 2797391 - RNA, 19 nt, Artificial Sequence
  Description of Artificial Sequence: Synthetic oligonucleotide
cuuaaaggggacuccauca

SEQ ID NO: 2797392 - RNA, 19 nt, Artificial Sequence
  Description of Artificial Sequence: Synthetic oligonucleotide
gauccgggcaggcaguggg

SEQ ID NO: 2797393 - RNA, 19 nt, Artificial Sequence
  Description of Artificial Sequence: Synthetic oligonucleotide
ucugagggaaagaagccau

SEQ ID NO: 2797394 - RNA, 19 nt, Artificial Sequence
  Description of Artificial Sequence: Synthetic oligonucleotide
aucaggauacagccgcugg

SEQ ID NO: 2797395 - RNA, 19 nt, Artificial Sequence
  Description of Artificial Sequence: Synthetic oligonucleotide
gucgcuuaccuuaaagggg

SEQ ID NO: 2797396 - RNA, 19 nt, Artificial Sequence
  Description of Artificial Sequence: Synthetic oligonucleotide
ugagggaaagaagccaucc

SEQ ID NO: 2797397 - RNA, 19 nt, Artificial Sequence
  Description of Artificial Sequence: Synthetic oligonucleotide
uggguaaaccugauugcgc

SEQ ID NO: 2797398 - RNA, 19 nt, Artificial Sequence
  Description of Artificial Sequence: Synthetic oligonucleotide
ucaggccgcaucaucagca

SEQ ID NO: 2797399 - RNA, 19 nt, Artificial Sequence
  Description of Artificial Sequence: Synthetic oligonucleotide
augcgcagcauggagagcg

SEQ ID NO: 2797400 - RNA, 19 nt, Artificial Sequence
  Description of Artificial Sequence: Synthetic oligonucleotide
aggauacagccgcuggagc

SEQ ID NO: 2797401 - RNA, 19 nt, Artificial Sequence
  Description of Artificial Sequence: Synthetic oligonucleotide
uacacacuugggaagccug

SEQ ID NO: 2797402 - RNA, 19 nt, Artificial Sequence
  Description of Artificial Sequence: Synthetic oligonucleotide
guauccuccacccugucca

SEQ ID NO: 2797403 - RNA, 19 nt, Artificial Sequence
  Description of Artificial Sequence: Synthetic oligonucleotide
gcaagguggucccugaugg

SEQ ID NO: 2797404 - RNA, 19 nt, Artificial Sequence
  Description of Artificial Sequence: Synthetic oligonucleotide
aaugagcccagcccguccu

SEQ ID NO: 2797405 - RNA, 19 nt, Artificial Sequence
  Description of Artificial Sequence: Synthetic oligonucleotide
cuuaccuuaaaggggacuc

SEQ ID NO: 2797406 - RNA, 19 nt, Artificial Sequence
  Description of Artificial Sequence: Synthetic oligonucleotide
uaguucugcaagguggucc

SEQ ID NO: 2797407 - RNA, 19 nt, Artificial Sequence
  Description of Artificial Sequence: Synthetic oligonucleotide
aggugucuccacuaugauc

SEQ ID NO: 2797408 - RNA, 19 nt, Artificial Sequence
  Description of Artificial Sequence: Synthetic oligonucleotide
guaaaccugauugcgcagg

SEQ ID NO: 2797409 - RNA, 19 nt, Artificial Sequence
  Description of Artificial Sequence: Synthetic oligonucleotide
aucaccuggccuuagucga

SEQ ID NO: 2797410 - RNA, 19 nt, Artificial Sequence
  Description of Artificial Sequence: Synthetic oligonucleotide
cuggguaaaccugauugcg

SEQ ID NO: 2797411 - RNA, 19 nt, Artificial Sequence
  Description of Artificial Sequence: Synthetic oligonucleotide
cugggaaugagcccagccc

SEQ ID NO: 2797412 - RNA, 19 nt, Artificial Sequence
  Description of Artificial Sequence: Synthetic oligonucleotide
ucaccugggaaugagccca

SEQ ID NO: 2797413 - RNA, 19 nt, Artificial Sequence
  Description of Artificial Sequence: Synthetic oligonucleotide
caucaucaugccauuccgg

SEQ ID NO: 2797414 - RNA, 19 nt, Artificial Sequence
  Description of Artificial Sequence: Synthetic oligonucleotide
ucaggauacagccgcugga

SEQ ID NO: 2797415 - RNA, 19 nt, Artificial Sequence
  Description of Artificial Sequence: Synthetic oligonucleotide
ugcaagguggucccugaug

SEQ ID NO: 2797416 - RNA, 19 nt, Artificial Sequence
  Description of Artificial Sequence: Synthetic oligonucleotide
gggaucguaagaaagggcc

SEQ ID NO: 2797417 - RNA, 19 nt, Artificial Sequence
  Description of Artificial Sequence: Synthetic oligonucleotide
ccggaugucaaucaccugg

SEQ ID NO: 2797418 - RNA, 19 nt, Artificial Sequence
  Description of Artificial Sequence: Synthetic oligonucleotide
agaaagggccggaaagggc

SEQ ID NO: 2797419 - RNA, 19 nt, Artificial Sequence
  Description of Artificial Sequence: Synthetic oligonucleotide
auccaguaugucccggagg

SEQ ID NO: 2797420 - RNA, 19 nt, Artificial Sequence
  Description of Artificial Sequence: Synthetic oligonucleotide
uugggaagccuguucagaa

SEQ ID NO: 2797421 - RNA, 19 nt, Artificial Sequence
  Description of Artificial Sequence: Synthetic oligonucleotide
uaaaccugauugcgcaggu

SEQ ID NO: 2797422 - RNA, 19 nt, Artificial Sequence
  Description of Artificial Sequence: Synthetic oligonucleotide
uagucgaauuacacacuug

SEQ ID NO: 2797423 - RNA, 19 nt, Artificial Sequence
  Description of Artificial Sequence: Synthetic oligonucleotide
agccaaggcaggugucucc

SEQ ID NO: 2797424 - RNA, 19 nt, Artificial Sequence
  Description of Artificial Sequence: Synthetic oligonucleotide
agggaucguaagaaagggc

SEQ ID NO: 2797425 - RNA, 19 nt, Artificial Sequence
  Description of Artificial Sequence: Synthetic oligonucleotide
uggccuuagucgaauuaca

SEQ ID NO: 2797426 - RNA, 19 nt, Artificial Sequence
  Description of Artificial Sequence: Synthetic oligonucleotide
ugaccggaugcgcagcaug

SEQ ID NO: 2797427 - RNA, 19 nt, Artificial Sequence
  Description of Artificial Sequence: Synthetic oligonucleotide
gucgaauuacacacuuggg

SEQ ID NO: 2797428 - RNA, 19 nt, Artificial Sequence
  Description of Artificial Sequence: Synthetic oligonucleotide
uuaccuuaaaggggacucc

SEQ ID NO: 2797429 - RNA, 19 nt, Artificial Sequence
  Description of Artificial Sequence: Synthetic oligonucleotide
ggagggaucguaagaaagg

SEQ ID NO: 2797430 - RNA, 19 nt, Artificial Sequence
  Description of Artificial Sequence: Synthetic oligonucleotide
cagcagucauccuggagcc

SEQ ID NO: 2797431 - RNA, 19 nt, Artificial Sequence
  Description of Artificial Sequence: Synthetic oligonucleotide
aaguauccuccacccuguc

SEQ ID NO: 2797432 - RNA, 19 nt, Artificial Sequence
  Description of Artificial Sequence: Synthetic oligonucleotide
aguccggugacuccuggcu

SEQ ID NO: 2797433 - RNA, 19 nt, Artificial Sequence
  Description of Artificial Sequence: Synthetic oligonucleotide
uccggugacuccuggcucc

SEQ ID NO: 2797434 - RNA, 19 nt, Artificial Sequence
  Description of Artificial Sequence: Synthetic oligonucleotide
uuucugccggcccaccaca

SEQ ID NO: 2797435 - RNA, 19 nt, Artificial Sequence
  Description of Artificial Sequence: Synthetic oligonucleotide
ugcguggagggaucguaag

SEQ ID NO: 2797436 - RNA, 19 nt, Artificial Sequence
  Description of Artificial Sequence: Synthetic oligonucleotide
ucaaucaccuggccuuagu

SEQ ID NO: 2797437 - RNA, 19 nt, Artificial Sequence
  Description of Artificial Sequence: Synthetic oligonucleotide
aaaccugauugcgcagguc

SEQ ID NO: 2797438 - RNA, 19 nt, Artificial Sequence
  Description of Artificial Sequence: Synthetic oligonucleotide
cacacgacccucaccuggg

SEQ ID NO: 2797439 - RNA, 19 nt, Artificial Sequence
  Description of Artificial Sequence: Synthetic oligonucleotide
cacuaugaucuccuggauc

SEQ ID NO: 2797440 - RNA, 19 nt, Artificial Sequence
  Description of Artificial Sequence: Synthetic oligonucleotide
caguaugucccggaggcag

SEQ ID NO: 2797441 - RNA, 19 nt, Artificial Sequence
  Description of Artificial Sequence: Synthetic oligonucleotide
gaaugagcccagcccgucc

SEQ ID NO: 2797442 - RNA, 19 nt, Artificial Sequence
  Description of Artificial Sequence: Synthetic oligonucleotide
gaccggaugcgcagcaugg

SEQ ID NO: 2797443 - RNA, 19 nt, Artificial Sequence
  Description of Artificial Sequence: Synthetic oligonucleotide
cucaccugggaaugagccc

SEQ ID NO: 2797444 - RNA, 19 nt, Artificial Sequence
  Description of Artificial Sequence: Synthetic oligonucleotide
aguaugucccggaggcagc

SEQ ID NO: 2797445 - RNA, 19 nt, Artificial Sequence
  Description of Artificial Sequence: Synthetic oligonucleotide
caggucgcuuaccuuaaag

SEQ ID NO: 2797446 - RNA, 19 nt, Artificial Sequence
  Description of Artificial Sequence: Synthetic oligonucleotide
cuggccuuagucgaauuac

SEQ ID NO: 2797447 - RNA, 19 nt, Artificial Sequence
  Description of Artificial Sequence: Synthetic oligonucleotide
ggcagcacugcguggaggg

SEQ ID NO: 2797448 - RNA, 19 nt, Artificial Sequence
  Description of Artificial Sequence: Synthetic oligonucleotide
cuccaucaggauacagccg

SEQ ID NO: 2797449 - RNA, 19 nt, Artificial Sequence
  Description of Artificial Sequence: Synthetic oligonucleotide
ucugaccggaugcgcagca

SEQ ID NO: 2797450 - RNA, 19 nt, Artificial Sequence
  Description of Artificial Sequence: Synthetic oligonucleotide
ggccuugcgaacuuucugc

SEQ ID NO: 2797451 - RNA, 19 nt, Artificial Sequence
  Description of Artificial Sequence: Synthetic oligonucleotide
agccugaaguauccuccac

SEQ ID NO: 2797452 - RNA, 19 nt, Artificial Sequence
  Description of Artificial Sequence: Synthetic oligonucleotide
uguccaaggccuugcgaac

SEQ ID NO: 2797453 - RNA, 19 nt, Artificial Sequence
  Description of Artificial Sequence: Synthetic oligonucleotide
gagggaaagaagccaucca

SEQ ID NO: 2797454 - RNA, 19 nt, Artificial Sequence
  Description of Artificial Sequence: Synthetic oligonucleotide
uugcgcaggucgcuuaccu

SEQ ID NO: 2797455 - RNA, 19 nt, Artificial Sequence
  Description of Artificial Sequence: Synthetic oligonucleotide
uccuggagccugaaguauc

SEQ ID NO: 2797456 - RNA, 19 nt, Artificial Sequence
  Description of Artificial Sequence: Synthetic oligonucleotide
ucugccgcucagaagccaa

SEQ ID NO: 2797457 - RNA, 19 nt, Artificial Sequence
  Description of Artificial Sequence: Synthetic oligonucleotide
ugucccggaggcagcacug

SEQ ID NO: 2797458 - RNA, 19 nt, Artificial Sequence
  Description of Artificial Sequence: Synthetic oligonucleotide
ucccggaggcagcacugcg

SEQ ID NO: 2797459 - RNA, 19 nt, Artificial Sequence
  Description of Artificial Sequence: Synthetic oligonucleotide
caggauacagccgcuggag

SEQ ID NO: 2797460 - RNA, 19 nt, Artificial Sequence
  Description of Artificial Sequence: Synthetic oligonucleotide
gagagcgcaggcacuggcg

SEQ ID NO: 2797461 - RNA, 19 nt, Artificial Sequence
  Description of Artificial Sequence: Synthetic oligonucleotide
gauugcgcaggucgcuuac

SEQ ID NO: 2797462 - RNA, 19 nt, Artificial Sequence
  Description of Artificial Sequence: Synthetic oligonucleotide
ggaucguaagaaagggccg

SEQ ID NO: 2797463 - RNA, 19 nt, Artificial Sequence
  Description of Artificial Sequence: Synthetic oligonucleotide
aggccuugcgaacuuucug

SEQ ID NO: 2797464 - RNA, 19 nt, Artificial Sequence
  Description of Artificial Sequence: Synthetic oligonucleotide
uuacacacuugggaagccu

SEQ ID NO: 2797465 - RNA, 19 nt, Artificial Sequence
  Description of Artificial Sequence: Synthetic oligonucleotide
ugucuccacuaugaucucc

SEQ ID NO: 2797466 - RNA, 19 nt, Artificial Sequence
  Description of Artificial Sequence: Synthetic oligonucleotide
ggggaguaguucugcaagg

SEQ ID NO: 2797467 - RNA, 19 nt, Artificial Sequence
  Description of Artificial Sequence: Synthetic oligonucleotide
accugauugcgcaggucgc

SEQ ID NO: 2797468 - RNA, 19 nt, Artificial Sequence
  Description of Artificial Sequence: Synthetic oligonucleotide
aguggggaguaguucugca

SEQ ID NO: 2797469 - RNA, 19 nt, Artificial Sequence
  Description of Artificial Sequence: Synthetic oligonucleotide
ggguaaaccugauugcgca

SEQ ID NO: 2797470 - RNA, 19 nt, Artificial Sequence
  Description of Artificial Sequence: Synthetic oligonucleotide
cuuucugccggcccaccac

SEQ ID NO: 2797471 - RNA, 19 nt, Artificial Sequence
  Description of Artificial Sequence: Synthetic oligonucleotide
gauacagccgcuggagcuc

SEQ ID NO: 2797472 - RNA, 19 nt, Artificial Sequence
  Description of Artificial Sequence: Synthetic oligonucleotide
ggaguaguucugcaaggug

SEQ ID NO: 2797473 - RNA, 19 nt, Artificial Sequence
  Description of Artificial Sequence: Synthetic oligonucleotide
auugcgcaggucgcuuacc

SEQ ID NO: 2797474 - RNA, 19 nt, Artificial Sequence
  Description of Artificial Sequence: Synthetic oligonucleotide
gaucuccuggauccgggca

SEQ ID NO: 2797475 - RNA, 19 nt, Artificial Sequence
  Description of Artificial Sequence: Synthetic oligonucleotide
cacuugggaagccuguuca

SEQ ID NO: 2797476 - RNA, 19 nt, Artificial Sequence
  Description of Artificial Sequence: Synthetic oligonucleotide
augaucuccuggauccggg

SEQ ID NO: 2797477 - RNA, 19 nt, Artificial Sequence
  Description of Artificial Sequence: Synthetic oligonucleotide
gguaaaccugauugcgcag

SEQ ID NO: 2797478 - RNA, 19 nt, Artificial Sequence
  Description of Artificial Sequence: Synthetic oligonucleotide
ugccgcucagaagccaagg

SEQ ID NO: 2797479 - RNA, 19 nt, Artificial Sequence
  Description of Artificial Sequence: Synthetic oligonucleotide
gagcucugagggaaagaag

SEQ ID NO: 2797480 - RNA, 19 nt, Artificial Sequence
  Description of Artificial Sequence: Synthetic oligonucleotide
acgacccucaccugggaau

SEQ ID NO: 2797481 - RNA, 19 nt, Artificial Sequence
  Description of Artificial Sequence: Synthetic oligonucleotide
agccauccaguaugucccg

SEQ ID NO: 2797482 - RNA, 19 nt, Artificial Sequence
  Description of Artificial Sequence: Synthetic oligonucleotide
uucugcaagguggucccug

SEQ ID NO: 2797483 - RNA, 19 nt, Artificial Sequence
  Description of Artificial Sequence: Synthetic oligonucleotide
uugcgaacuuucugccggc

SEQ ID NO: 2797484 - RNA, 19 nt, Artificial Sequence
  Description of Artificial Sequence: Synthetic oligonucleotide
cuaugaucuccuggauccg

SEQ ID NO: 2797485 - RNA, 19 nt, Artificial Sequence
  Description of Artificial Sequence: Synthetic oligonucleotide
ugggaagccuguucagaaa

SEQ ID NO: 2797486 - RNA, 19 nt, Artificial Sequence
  Description of Artificial Sequence: Synthetic oligonucleotide
gccugaaguauccuccacc

SEQ ID NO: 2797487 - RNA, 19 nt, Artificial Sequence
  Description of Artificial Sequence: Synthetic oligonucleotide
caaggccuugcgaacuuuc

SEQ ID NO: 2797488 - RNA, 19 nt, Artificial Sequence
  Description of Artificial Sequence: Synthetic oligonucleotide
ggggacuccaucaggauac

SEQ ID NO: 2797489 - RNA, 19 nt, Artificial Sequence
  Description of Artificial Sequence: Synthetic oligonucleotide
aaggccuugcgaacuuucu

SEQ ID NO: 2797490 - RNA, 19 nt, Artificial Sequence
  Description of Artificial Sequence: Synthetic oligonucleotide
uuucagcagucauccugga

SEQ ID NO: 2797491 - RNA, 19 nt, Artificial Sequence
  Description of Artificial Sequence: Synthetic oligonucleotide
aggccgcaucaucagcagg

SEQ ID NO: 2797492 - RNA, 19 nt, Artificial Sequence
  Description of Artificial Sequence: Synthetic oligonucleotide
auggagagcgcaggcacug

SEQ ID NO: 2797493 - RNA, 19 nt, Artificial Sequence
  Description of Artificial Sequence: Synthetic oligonucleotide
caucaucagcaggaaggcc

SEQ ID NO: 2797494 - RNA, 19 nt, Artificial Sequence
  Description of Artificial Sequence: Synthetic oligonucleotide
cucaggccgcaucaucagc

SEQ ID NO: 2797495 - RNA, 19 nt, Artificial Sequence
  Description of Artificial Sequence: Synthetic oligonucleotide
aggggacuccaucaggaua

SEQ ID NO: 2797496 - RNA, 19 nt, Artificial Sequence
  Description of Artificial Sequence: Synthetic oligonucleotide
gcauggagagcgcaggcac

SEQ ID NO: 2797497 - RNA, 19 nt, Artificial Sequence
  Description of Artificial Sequence: Synthetic oligonucleotide
gaguccggugacuccuggc

SEQ ID NO: 2797498 - RNA, 19 nt, Artificial Sequence
  Description of Artificial Sequence: Synthetic oligonucleotide
caccacacgacccucaccu

SEQ ID NO: 2797499 - RNA, 19 nt, Artificial Sequence
  Description of Artificial Sequence: Synthetic oligonucleotide
gccuuagucgaauuacaca

SEQ ID NO: 2797500 - RNA, 19 nt, Artificial Sequence
  Description of Artificial Sequence: Synthetic oligonucleotide
uccccguucucugaccgga

SEQ ID NO: 2797501 - RNA, 19 nt, Artificial Sequence
  Description of Artificial Sequence: Synthetic oligonucleotide
cuccacccuguccaaggcc

SEQ ID NO: 2797502 - RNA, 19 nt, Artificial Sequence
  Description of Artificial Sequence: Synthetic oligonucleotide
gucauccuggagccugaag

SEQ ID NO: 2797503 - RNA, 19 nt, Artificial Sequence
  Description of Artificial Sequence: Synthetic oligonucleotide
ccuggauccgggcaggcag

SEQ ID NO: 2797504 - RNA, 19 nt, Artificial Sequence
  Description of Artificial Sequence: Synthetic oligonucleotide
gagcgcaggcacuggcgag

SEQ ID NO: 2797505 - RNA, 19 nt, Artificial Sequence
  Description of Artificial Sequence: Synthetic oligonucleotide
aggcaguggggaguaguuc

SEQ ID NO: 2797506 - RNA, 19 nt, Artificial Sequence
  Description of Artificial Sequence: Synthetic oligonucleotide
cagcauggagagcgcaggc

SEQ ID NO: 2797507 - RNA, 19 nt, Artificial Sequence
  Description of Artificial Sequence: Synthetic oligonucleotide
agaagccaaggcagguguc

SEQ ID NO: 2797508 - RNA, 19 nt, Artificial Sequence
  Description of Artificial Sequence: Synthetic oligonucleotide
cucugagggaaagaagcca

SEQ ID NO: 2797509 - RNA, 19 nt, Artificial Sequence
  Description of Artificial Sequence: Synthetic oligonucleotide
aagccuguucagaaauuuu

SEQ ID NO: 2797510 - RNA, 19 nt, Artificial Sequence
  Description of Artificial Sequence: Synthetic oligonucleotide
ugcgcagcauggagagcgc

SEQ ID NO: 2797511 - RNA, 19 nt, Artificial Sequence
  Description of Artificial Sequence: Synthetic oligonucleotide
gauggggccccggauguca

SEQ ID NO: 2797512 - RNA, 19 nt, Artificial Sequence
  Description of Artificial Sequence: Synthetic oligonucleotide
caggccgcaucaucagcag

SEQ ID NO: 2797513 - RNA, 19 nt, Artificial Sequence
  Description of Artificial Sequence: Synthetic oligonucleotide
ucaccuggccuuagucgaa

SEQ ID NO: 2797514 - RNA, 19 nt, Artificial Sequence
  Description of Artificial Sequence: Synthetic oligonucleotide
ccuuaaaggggacuccauc

SEQ ID NO: 2797515 - RNA, 19 nt, Artificial Sequence
  Description of Artificial Sequence: Synthetic oligonucleotide
agcacugcguggagggauc

SEQ ID NO: 2797516 - RNA, 19 nt, Artificial Sequence
  Description of Artificial Sequence: Synthetic oligonucleotide
gcuccccguucucugaccg

SEQ ID NO: 2797517 - RNA, 19 nt, Artificial Sequence
  Description of Artificial Sequence: Synthetic oligonucleotide
guucucugaccggaugcgc

SEQ ID NO: 2797518 - RNA, 19 nt, Artificial Sequence
  Description of Artificial Sequence: Synthetic oligonucleotide
ucccugauggggccccgga

SEQ ID NO: 2797519 - RNA, 19 nt, Artificial Sequence
  Description of Artificial Sequence: Synthetic oligonucleotide
uccucuggguaaaccugau

SEQ ID NO: 2797520 - RNA, 19 nt, Artificial Sequence
  Description of Artificial Sequence: Synthetic oligonucleotide
ucguaagaaagggccggaa

SEQ ID NO: 2797521 - RNA, 19 nt, Artificial Sequence
  Description of Artificial Sequence: Synthetic oligonucleotide
caucaggauacagccgcug

SEQ ID NO: 2797522 - RNA, 19 nt, Artificial Sequence
  Description of Artificial Sequence: Synthetic oligonucleotide
uccaaggccuugcgaacuu

SEQ ID NO: 2797523 - RNA, 19 nt, Artificial Sequence
  Description of Artificial Sequence: Synthetic oligonucleotide
aucguaagaaagggccgga

SEQ ID NO: 2797524 - RNA, 19 nt, Artificial Sequence
  Description of Artificial Sequence: Synthetic oligonucleotide
ugcgaacuuucugccggcc

SEQ ID NO: 2797525 - RNA, 19 nt, Artificial Sequence
  Description of Artificial Sequence: Synthetic oligonucleotide
augagcccagcccguccuc

SEQ ID NO: 2797526 - RNA, 19 nt, Artificial Sequence
  Description of Artificial Sequence: Synthetic oligonucleotide
gaacuuucugccggcccac

SEQ ID NO: 2797527 - RNA, 19 nt, Artificial Sequence
  Description of Artificial Sequence: Synthetic oligonucleotide
gaaguauccuccacccugu

SEQ ID NO: 2797528 - RNA, 19 nt, Artificial Sequence
  Description of Artificial Sequence: Synthetic oligonucleotide
cauccuggagccugaagua

SEQ ID NO: 2797529 - RNA, 19 nt, Artificial Sequence
  Description of Artificial Sequence: Synthetic oligonucleotide
ccuugcgaacuuucugccg

SEQ ID NO: 2797530 - RNA, 19 nt, Artificial Sequence
  Description of Artificial Sequence: Synthetic oligonucleotide
gccuugcgaacuuucugcc

SEQ ID NO: 2797531 - RNA, 19 nt, Artificial Sequence
  Description of Artificial Sequence: Synthetic oligonucleotide
uggagcucugagggaaaga

SEQ ID NO: 2797532 - RNA, 19 nt, Artificial Sequence
  Description of Artificial Sequence: Synthetic oligonucleotide
aucagcaggaaggccugcu

SEQ ID NO: 2797533 - RNA, 19 nt, Artificial Sequence
  Description of Artificial Sequence: Synthetic oligonucleotide
aggaaggccugcuccccgu

SEQ ID NO: 2797534 - RNA, 19 nt, Artificial Sequence
  Description of Artificial Sequence: Synthetic oligonucleotide
gugacuccuggcuccucug

SEQ ID NO: 2797535 - RNA, 19 nt, Artificial Sequence
  Description of Artificial Sequence: Synthetic oligonucleotide
uucugccggcccaccacac

SEQ ID NO: 2797536 - RNA, 19 nt, Artificial Sequence
  Description of Artificial Sequence: Synthetic oligonucleotide
gaagccuguucagaaauuu

SEQ ID NO: 2797537 - RNA, 19 nt, Artificial Sequence
  Description of Artificial Sequence: Synthetic oligonucleotide
caguggggaguaguucugc

SEQ ID NO: 2797538 - RNA, 19 nt, Artificial Sequence
  Description of Artificial Sequence: Synthetic oligonucleotide
ggagcucugagggaaagaa

SEQ ID NO: 2797539 - RNA, 19 nt, Artificial Sequence
  Description of Artificial Sequence: Synthetic oligonucleotide
cuccucugccgcucagaag

SEQ ID NO: 2797540 - RNA, 19 nt, Artificial Sequence
  Description of Artificial Sequence: Synthetic oligonucleotide
cuggagcucugagggaaag

SEQ ID NO: 2797541 - RNA, 19 nt, Artificial Sequence
  Description of Artificial Sequence: Synthetic oligonucleotide
caggcacuggcgaguccgg

SEQ ID NO: 2797542 - RNA, 19 nt, Artificial Sequence
  Description of Artificial Sequence: Synthetic oligonucleotide
gcaggugucuccacuauga

SEQ ID NO: 2797543 - RNA, 19 nt, Artificial Sequence
  Description of Artificial Sequence: Synthetic oligonucleotide
guggggaguaguucugcaa

SEQ ID NO: 2797544 - RNA, 19 nt, Artificial Sequence
  Description of Artificial Sequence: Synthetic oligonucleotide
ccguucucugaccggaugc

SEQ ID NO: 2797545 - RNA, 19 nt, Artificial Sequence
  Description of Artificial Sequence: Synthetic oligonucleotide
guggagggaucguaagaaa

SEQ ID NO: 2797546 - RNA, 19 nt, Artificial Sequence
  Description of Artificial Sequence: Synthetic oligonucleotide
ggagagcgcaggcacuggc

SEQ ID NO: 2797547 - RNA, 19 nt, Artificial Sequence
  Description of Artificial Sequence: Synthetic oligonucleotide
cuccccguucucugaccgg

SEQ ID NO: 2797548 - RNA, 19 nt, Artificial Sequence
  Description of Artificial Sequence: Synthetic oligonucleotide
uggcgaguccggugacucc

SEQ ID NO: 2797549 - RNA, 19 nt, Artificial Sequence
  Description of Artificial Sequence: Synthetic oligonucleotide
ggauacagccgcuggagcu

SEQ ID NO: 2797550 - RNA, 19 nt, Artificial Sequence
  Description of Artificial Sequence: Synthetic oligonucleotide
cuggcgaguccggugacuc

SEQ ID NO: 2797551 - RNA, 19 nt, Artificial Sequence
  Description of Artificial Sequence: Synthetic oligonucleotide
acacacuugggaagccugu

SEQ ID NO: 2797552 - RNA, 19 nt, Artificial Sequence
  Description of Artificial Sequence: Synthetic oligonucleotide
gguggucccugauggggcc

SEQ ID NO: 2797553 - RNA, 19 nt, Artificial Sequence
  Description of Artificial Sequence: Synthetic oligonucleotide
ggcaguggggaguaguucu

SEQ ID NO: 2797554 - RNA, 19 nt, Artificial Sequence
  Description of Artificial Sequence: Synthetic oligonucleotide
ggccuuagucgaauuacac

SEQ ID NO: 2797555 - RNA, 19 nt, Artificial Sequence
  Description of Artificial Sequence: Synthetic oligonucleotide
auccuggagccugaaguau

SEQ ID NO: 2797556 - RNA, 19 nt, Artificial Sequence
  Description of Artificial Sequence: Synthetic oligonucleotide
guccucuggguaaaccuga

SEQ ID NO: 2797557 - RNA, 19 nt, Artificial Sequence
  Description of Artificial Sequence: Synthetic oligonucleotide
cugccgcucagaagccaag

SEQ ID NO: 2797558 - RNA, 19 nt, Artificial Sequence
  Description of Artificial Sequence: Synthetic oligonucleotide
accugggaaugagcccagc

SEQ ID NO: 2797559 - RNA, 19 nt, Artificial Sequence
  Description of Artificial Sequence: Synthetic oligonucleotide
uccgggcaggcagugggga

SEQ ID NO: 2797560 - RNA, 19 nt, Artificial Sequence
  Description of Artificial Sequence: Synthetic oligonucleotide
acugcguggagggaucgua

SEQ ID NO: 2797561 - RNA, 19 nt, Artificial Sequence
  Description of Artificial Sequence: Synthetic oligonucleotide
ggcacuggcgaguccggug

SEQ ID NO: 2797562 - RNA, 19 nt, Artificial Sequence
  Description of Artificial Sequence: Synthetic oligonucleotide
uggauccgggcaggcagug

SEQ ID NO: 2797563 - RNA, 19 nt, Artificial Sequence
  Description of Artificial Sequence: Synthetic oligonucleotide
gucaaucaccuggccuuag

SEQ ID NO: 2797564 - RNA, 19 nt, Artificial Sequence
  Description of Artificial Sequence: Synthetic oligonucleotide
gcgaacuuucugccggccc

SEQ ID NO: 2797565 - RNA, 19 nt, Artificial Sequence
  Description of Artificial Sequence: Synthetic oligonucleotide
gccgcucagaagccaaggc

SEQ ID NO: 2797566 - RNA, 19 nt, Artificial Sequence
  Description of Artificial Sequence: Synthetic oligonucleotide
uccuggauccgggcaggca

SEQ ID NO: 2797567 - RNA, 19 nt, Artificial Sequence
  Description of Artificial Sequence: Synthetic oligonucleotide
caccugggaaugagcccag

SEQ ID NO: 2797568 - RNA, 19 nt, Artificial Sequence
  Description of Artificial Sequence: Synthetic oligonucleotide
cucugaccggaugcgcagc

SEQ ID NO: 2797569 - RNA, 19 nt, Artificial Sequence
  Description of Artificial Sequence: Synthetic oligonucleotide
guccggugacuccuggcuc

SEQ ID NO: 2797570 - RNA, 19 nt, Artificial Sequence
  Description of Artificial Sequence: Synthetic oligonucleotide
cugccggcccaccacacga

SEQ ID NO: 2797571 - RNA, 19 nt, Artificial Sequence
  Description of Artificial Sequence: Synthetic oligonucleotide
ugcgcaggucgcuuaccuu

SEQ ID NO: 2797572 - RNA, 19 nt, Artificial Sequence
  Description of Artificial Sequence: Synthetic oligonucleotide
cugcuccccguucucugac

SEQ ID NO: 2797573 - RNA, 19 nt, Artificial Sequence
  Description of Artificial Sequence: Synthetic oligonucleotide
ugccggcccaccacacgac

SEQ ID NO: 2797574 - RNA, 19 nt, Artificial Sequence
  Description of Artificial Sequence: Synthetic oligonucleotide
ggccgcaucaucagcagga

SEQ ID NO: 2797575 - RNA, 19 nt, Artificial Sequence
  Description of Artificial Sequence: Synthetic oligonucleotide
guaugucccggaggcagca

SEQ ID NO: 2797576 - RNA, 19 nt, Artificial Sequence
  Description of Artificial Sequence: Synthetic oligonucleotide
gucuccacuaugaucuccu

SEQ ID NO: 2797577 - RNA, 19 nt, Artificial Sequence
  Description of Artificial Sequence: Synthetic oligonucleotide
aagggccggaaagggccca

SEQ ID NO: 2797578 - RNA, 19 nt, Artificial Sequence
  Description of Artificial Sequence: Synthetic oligonucleotide
gcacuggcgaguccgguga

SEQ ID NO: 2797579 - RNA, 19 nt, Artificial Sequence
  Description of Artificial Sequence: Synthetic oligonucleotide
uaugucccggaggcagcac

SEQ ID NO: 2797580 - RNA, 19 nt, Artificial Sequence
  Description of Artificial Sequence: Synthetic oligonucleotide
gggaagccuguucagaaau

SEQ ID NO: 2797581 - RNA, 19 nt, Artificial Sequence
  Description of Artificial Sequence: Synthetic oligonucleotide
ccggaugcgcagcauggag

SEQ ID NO: 2797582 - RNA, 19 nt, Artificial Sequence
  Description of Artificial Sequence: Synthetic oligonucleotide
accuuaaaggggacuccau

SEQ ID NO: 2797583 - RNA, 19 nt, Artificial Sequence
  Description of Artificial Sequence: Synthetic oligonucleotide
auccgggcaggcagugggg

SEQ ID NO: 2797584 - RNA, 19 nt, Artificial Sequence
  Description of Artificial Sequence: Synthetic oligonucleotide
cugcguggagggaucguaa

SEQ ID NO: 2797585 - RNA, 19 nt, Artificial Sequence
  Description of Artificial Sequence: Synthetic oligonucleotide
acuggcgaguccggugacu

SEQ ID NO: 2797586 - RNA, 19 nt, Artificial Sequence
  Description of Artificial Sequence: Synthetic oligonucleotide
gggaaagaagccauccagu

SEQ ID NO: 2797587 - RNA, 19 nt, Artificial Sequence
  Description of Artificial Sequence: Synthetic oligonucleotide
ggacuccaucaggauacag

SEQ ID NO: 2797588 - RNA, 19 nt, Artificial Sequence
  Description of Artificial Sequence: Synthetic oligonucleotide
cugauggggccccggaugu

SEQ ID NO: 2797589 - RNA, 19 nt, Artificial Sequence
  Description of Artificial Sequence: Synthetic oligonucleotide
cagucauccuggagccuga

SEQ ID NO: 2797590 - RNA, 19 nt, Artificial Sequence
  Description of Artificial Sequence: Synthetic oligonucleotide
gcgcaggucgcuuaccuua

SEQ ID NO: 2797591 - RNA, 19 nt, Artificial Sequence
  Description of Artificial Sequence: Synthetic oligonucleotide
cguucucugaccggaugcg

SEQ ID NO: 2797592 - RNA, 19 nt, Artificial Sequence
  Description of Artificial Sequence: Synthetic oligonucleotide
gcguggagggaucguaaga

SEQ ID NO: 2797593 - RNA, 19 nt, Artificial Sequence
  Description of Artificial Sequence: Synthetic oligonucleotide
cccucaccugggaaugagc

SEQ ID NO: 2797594 - RNA, 19 nt, Artificial Sequence
  Description of Artificial Sequence: Synthetic oligonucleotide
ggccggaaagggcccauca

SEQ ID NO: 2797595 - RNA, 19 nt, Artificial Sequence
  Description of Artificial Sequence: Synthetic oligonucleotide
ccgcucagaagccaaggca

SEQ ID NO: 2797596 - RNA, 19 nt, Artificial Sequence
  Description of Artificial Sequence: Synthetic oligonucleotide
cagcccguccucuggguaa

SEQ ID NO: 2797597 - RNA, 19 nt, Artificial Sequence
  Description of Artificial Sequence: Synthetic oligonucleotide
accuggccuuagucgaauu

SEQ ID NO: 2797598 - RNA, 19 nt, Artificial Sequence
  Description of Artificial Sequence: Synthetic oligonucleotide
gcaguggggaguaguucug

SEQ ID NO: 2797599 - RNA, 19 nt, Artificial Sequence
  Description of Artificial Sequence: Synthetic oligonucleotide
cacuggcgaguccggugac

SEQ ID NO: 2797600 - RNA, 19 nt, Artificial Sequence
  Description of Artificial Sequence: Synthetic oligonucleotide
gccauccaguaugucccgg

SEQ ID NO: 2797601 - RNA, 19 nt, Artificial Sequence
  Description of Artificial Sequence: Synthetic oligonucleotide
cugaaguauccuccacccu

SEQ ID NO: 2797602 - RNA, 19 nt, Artificial Sequence
  Description of Artificial Sequence: Synthetic oligonucleotide
gucccggaggcagcacugc

SEQ ID NO: 2797603 - RNA, 19 nt, Artificial Sequence
  Description of Artificial Sequence: Synthetic oligonucleotide
ccggaaagggcccaucaaa

SEQ ID NO: 2797604 - RNA, 19 nt, Artificial Sequence
  Description of Artificial Sequence: Synthetic oligonucleotide
ggugacuccuggcuccucu

SEQ ID NO: 2797605 - RNA, 19 nt, Artificial Sequence
  Description of Artificial Sequence: Synthetic oligonucleotide
gccugcuccccguucucug

SEQ ID NO: 2797606 - RNA, 19 nt, Artificial Sequence
  Description of Artificial Sequence: Synthetic oligonucleotide
gcuccucugccgcucagaa

SEQ ID NO: 2797607 - RNA, 19 nt, Artificial Sequence
  Description of Artificial Sequence: Synthetic oligonucleotide
gucccugauggggccccgg

SEQ ID NO: 2797608 - RNA, 19 nt, Artificial Sequence
  Description of Artificial Sequence: Synthetic oligonucleotide
cgaacuuucugccggccca

SEQ ID NO: 2797609 - RNA, 19 nt, Artificial Sequence
  Description of Artificial Sequence: Synthetic oligonucleotide
gccccggaugucaaucacc

SEQ ID NO: 2797610 - RNA, 19 nt, Artificial Sequence
  Description of Artificial Sequence: Synthetic oligonucleotide
ccggcccaccacacgaccc

SEQ ID NO: 2797611 - RNA, 19 nt, Artificial Sequence
  Description of Artificial Sequence: Synthetic oligonucleotide
ggaaugagcccagcccguc

SEQ ID NO: 2797612 - RNA, 19 nt, Artificial Sequence
  Description of Artificial Sequence: Synthetic oligonucleotide
guccaaggccuugcgaacu

SEQ ID NO: 2797613 - RNA, 19 nt, Artificial Sequence
  Description of Artificial Sequence: Synthetic oligonucleotide
ccucugccgcucagaagcc

SEQ ID NO: 2797614 - RNA, 19 nt, Artificial Sequence
  Description of Artificial Sequence: Synthetic oligonucleotide
ccgcaucaucagcaggaag

SEQ ID NO: 2797615 - RNA, 19 nt, Artificial Sequence
  Description of Artificial Sequence: Synthetic oligonucleotide
gacccucaccugggaauga

SEQ ID NO: 2797616 - RNA, 19 nt, Artificial Sequence
  Description of Artificial Sequence: Synthetic oligonucleotide
gcacugcguggagggaucg

SEQ ID NO: 2797617 - RNA, 19 nt, Artificial Sequence
  Description of Artificial Sequence: Synthetic oligonucleotide
ggccccggaugucaaucac

SEQ ID NO: 2797618 - RNA, 19 nt, Artificial Sequence
  Description of Artificial Sequence: Synthetic oligonucleotide
cguaagaaagggccggaaa

SEQ ID NO: 2797619 - RNA, 19 nt, Artificial Sequence
  Description of Artificial Sequence: Synthetic oligonucleotide
gccaaggcaggugucucca

SEQ ID NO: 2797620 - RNA, 19 nt, Artificial Sequence
  Description of Artificial Sequence: Synthetic oligonucleotide
gggaguaguucugcaaggu

SEQ ID NO: 2797621 - RNA, 19 nt, Artificial Sequence
  Description of Artificial Sequence: Synthetic oligonucleotide
gccggcccaccacacgacc

SEQ ID NO: 2797622 - RNA, 19 nt, Artificial Sequence
  Description of Artificial Sequence: Synthetic oligonucleotide
aggcacuggcgaguccggu

SEQ ID NO: 2797623 - RNA, 19 nt, Artificial Sequence
  Description of Artificial Sequence: Synthetic oligonucleotide
cguggagggaucguaagaa

SEQ ID NO: 2797624 - RNA, 19 nt, Artificial Sequence
  Description of Artificial Sequence: Synthetic oligonucleotide
gggccccggaugucaauca

SEQ ID NO: 2797625 - RNA, 19 nt, Artificial Sequence
  Description of Artificial Sequence: Synthetic oligonucleotide
cuggauccgggcaggcagu

SEQ ID NO: 2797626 - RNA, 19 nt, Artificial Sequence
  Description of Artificial Sequence: Synthetic oligonucleotide
agcccguccucuggguaaa

SEQ ID NO: 2797627 - RNA, 19 nt, Artificial Sequence
  Description of Artificial Sequence: Synthetic oligonucleotide
ccccggaugucaaucaccu

SEQ ID NO: 2797628 - RNA, 19 nt, Artificial Sequence
  Description of Artificial Sequence: Synthetic oligonucleotide
cccguccucuggguaaacc

SEQ ID NO: 2797629 - RNA, 19 nt, Artificial Sequence
  Description of Artificial Sequence: Synthetic oligonucleotide
gcuuaccuuaaaggggacu

SEQ ID NO: 2797630 - RNA, 19 nt, Artificial Sequence
  Description of Artificial Sequence: Synthetic oligonucleotide
cgaguccggugacuccugg

SEQ ID NO: 2797631 - RNA, 19 nt, Artificial Sequence
  Description of Artificial Sequence: Synthetic oligonucleotide
ccuggccuuagucgaauua

SEQ ID NO: 2797632 - RNA, 19 nt, Artificial Sequence
  Description of Artificial Sequence: Synthetic oligonucleotide
cccggaugucaaucaccug

SEQ ID NO: 2797633 - RNA, 19 nt, Artificial Sequence
  Description of Artificial Sequence: Synthetic oligonucleotide
ccguccucuggguaaaccu

SEQ ID NO: 2797634 - RNA, 19 nt, Artificial Sequence
  Description of Artificial Sequence: Synthetic oligonucleotide
ccugcuccccguucucuga

SEQ ID NO: 2797635 - RNA, 19 nt, Artificial Sequence
  Description of Artificial Sequence: Synthetic oligonucleotide
cgacccucaccugggaaug

SEQ ID NO: 2797636 - RNA, 19 nt, Artificial Sequence
  Description of Artificial Sequence: Synthetic oligonucleotide
cgcuuaccuuaaaggggac

SEQ ID NO: 2797637 - RNA, 19 nt, Artificial Sequence
  Description of Artificial Sequence: Synthetic oligonucleotide
agggccggaaagggcccau

SEQ ID NO: 2797638 - RNA, 19 nt, Artificial Sequence
  Description of Artificial Sequence: Synthetic oligonucleotide
cugauugcgcaggucgcuu

SEQ ID NO: 2797639 - RNA, 19 nt, Artificial Sequence
  Description of Artificial Sequence: Synthetic oligonucleotide
cacacuugggaagccuguu

SEQ ID NO: 2797640 - RNA, 19 nt, Artificial Sequence
  Description of Artificial Sequence: Synthetic oligonucleotide
gggaaugagcccagcccgu

SEQ ID NO: 2797641 - RNA, 19 nt, Artificial Sequence
  Description of Artificial Sequence: Synthetic oligonucleotide
gcaggucgcuuaccuuaaa

SEQ ID NO: 2797642 - RNA, 19 nt, Artificial Sequence
  Description of Artificial Sequence: Synthetic oligonucleotide
gcgaguccggugacuccug

SEQ ID NO: 2797643 - RNA, 19 nt, Artificial Sequence
  Description of Artificial Sequence: Synthetic oligonucleotide
gccgcaucaucagcaggaa

SEQ ID NO: 2797644 - RNA, 19 nt, Artificial Sequence
  Description of Artificial Sequence: Synthetic oligonucleotide
ggaagccuguucagaaauu

SEQ ID NO: 2797645 - RNA, 19 nt, Artificial Sequence
  Description of Artificial Sequence: Synthetic oligonucleotide
cuggagccugaaguauccu

SEQ ID NO: 2797646 - RNA, 19 nt, Artificial Sequence
  Description of Artificial Sequence: Synthetic oligonucleotide
gcuggagcucugagggaaa

SEQ ID NO: 2797647 - RNA, 19 nt, Artificial Sequence
  Description of Artificial Sequence: Synthetic oligonucleotide
gcagcacugcguggaggga

SEQ ID NO: 2797648 - RNA, 19 nt, Artificial Sequence
  Description of Artificial Sequence: Synthetic oligonucleotide
guucugcaagguggucccu

SEQ ID NO: 2797649 - RNA, 19 nt, Artificial Sequence
  Description of Artificial Sequence: Synthetic oligonucleotide
cugcaagguggucccugau

SEQ ID NO: 2797650 - RNA, 19 nt, Artificial Sequence
  Description of Artificial Sequence: Synthetic oligonucleotide
ccaguaugucccggaggca

SEQ ID NO: 2797651 - RNA, 19 nt, Artificial Sequence
  Description of Artificial Sequence: Synthetic oligonucleotide
gcgcagcauggagagcgca

SEQ ID NO: 2797652 - RNA, 19 nt, Artificial Sequence
  Description of Artificial Sequence: Synthetic oligonucleotide
ccaucaggauacagccgcu

SEQ ID NO: 2797653 - RNA, 19 nt, Artificial Sequence
  Description of Artificial Sequence: Synthetic oligonucleotide
ggcccaccacacgacccuc

SEQ ID NO: 2797654 - RNA, 19 nt, Artificial Sequence
  Description of Artificial Sequence: Synthetic oligonucleotide
gcgcaggcacuggcgaguc

SEQ ID NO: 2797655 - RNA, 19 nt, Artificial Sequence
  Description of Artificial Sequence: Synthetic oligonucleotide
ccugauugcgcaggucgcu

SEQ ID NO: 2797656 - RNA, 19 nt, Artificial Sequence
  Description of Artificial Sequence: Synthetic oligonucleotide
caccuggccuuagucgaau

SEQ ID NO: 2797657 - RNA, 19 nt, Artificial Sequence
  Description of Artificial Sequence: Synthetic oligonucleotide
ccacuaugaucuccuggau

SEQ ID NO: 2797658 - RNA, 19 nt, Artificial Sequence
  Description of Artificial Sequence: Synthetic oligonucleotide
ccagcccguccucugggua

SEQ ID NO: 2797659 - RNA, 19 nt, Artificial Sequence
  Description of Artificial Sequence: Synthetic oligonucleotide
gggccggaaagggcccauc

SEQ ID NO: 2797660 - RNA, 19 nt, Artificial Sequence
  Description of Artificial Sequence: Synthetic oligonucleotide
cgcaggcacuggcgagucc

SEQ ID NO: 2797661 - RNA, 19 nt, Artificial Sequence
  Description of Artificial Sequence: Synthetic oligonucleotide
cacugcguggagggaucgu

SEQ ID NO: 2797662 - RNA, 19 nt, Artificial Sequence
  Description of Artificial Sequence: Synthetic oligonucleotide
ccgcuggagcucugaggga

SEQ ID NO: 2797663 - RNA, 19 nt, Artificial Sequence
  Description of Artificial Sequence: Synthetic oligonucleotide
cugaccggaugcgcagcau

SEQ ID NO: 2797664 - RNA, 19 nt, Artificial Sequence
  Description of Artificial Sequence: Synthetic oligonucleotide
ggccugcuccccguucucu

SEQ ID NO: 2797665 - RNA, 19 nt, Artificial Sequence
  Description of Artificial Sequence: Synthetic oligonucleotide
ccucuggguaaaccugauu

SEQ ID NO: 2797666 - RNA, 19 nt, Artificial Sequence
  Description of Artificial Sequence: Synthetic oligonucleotide
gcccguccucuggguaaac

SEQ ID NO: 2797667 - RNA, 19 nt, Artificial Sequence
  Description of Artificial Sequence: Synthetic oligonucleotide
ccaaggccuugcgaacuuu

SEQ ID NO: 2797668 - RNA, 19 nt, Artificial Sequence
  Description of Artificial Sequence: Synthetic oligonucleotide
ccggugacuccuggcuccu

SEQ ID NO: 2797669 - RNA, 19 nt, Artificial Sequence
  Description of Artificial Sequence: Synthetic oligonucleotide
cggugacuccuggcuccuc

SEQ ID NO: 2797670 - RNA, 19 nt, Artificial Sequence
  Description of Artificial Sequence: Synthetic oligonucleotide
aaaacauauuucuuuaccc

SEQ ID NO: 2797671 - RNA, 19 nt, Artificial Sequence
  Description of Artificial Sequence: Synthetic oligonucleotide
ucuagaaauaaaaugaucc

SEQ ID NO: 2797672 - RNA, 19 nt, Artificial Sequence
  Description of Artificial Sequence: Synthetic oligonucleotide
uuaaauaucagaauucucc

SEQ ID NO: 2797673 - RNA, 19 nt, Artificial Sequence
  Description of Artificial Sequence: Synthetic oligonucleotide
aaacauauuucuuuacccc

SEQ ID NO: 2797674 - RNA, 19 nt, Artificial Sequence
  Description of Artificial Sequence: Synthetic oligonucleotide
aauaaaaugauccauuaau

SEQ ID NO: 2797675 - RNA, 19 nt, Artificial Sequence
  Description of Artificial Sequence: Synthetic oligonucleotide
ugauccauuaaucugaacc

SEQ ID NO: 2797676 - RNA, 19 nt, Artificial Sequence
  Description of Artificial Sequence: Synthetic oligonucleotide
aauaucagaauucuccauc

SEQ ID NO: 2797677 - RNA, 19 nt, Artificial Sequence
  Description of Artificial Sequence: Synthetic oligonucleotide
aaaaugauccauuaaucug

SEQ ID NO: 2797678 - RNA, 19 nt, Artificial Sequence
  Description of Artificial Sequence: Synthetic oligonucleotide
cuuuaaucaacaauugugg

SEQ ID NO: 2797679 - RNA, 19 nt, Artificial Sequence
  Description of Artificial Sequence: Synthetic oligonucleotide
aauuguggcaacaauacac

SEQ ID NO: 2797680 - RNA, 19 nt, Artificial Sequence
  Description of Artificial Sequence: Synthetic oligonucleotide
uguuauuauaguuuaaaac

SEQ ID NO: 2797681 - RNA, 19 nt, Artificial Sequence
  Description of Artificial Sequence: Synthetic oligonucleotide
uauaguuuaaaacaccuuc

SEQ ID NO: 2797682 - RNA, 19 nt, Artificial Sequence
  Description of Artificial Sequence: Synthetic oligonucleotide
auacagaaaacuuuaauca

SEQ ID NO: 2797683 - RNA, 19 nt, Artificial Sequence
  Description of Artificial Sequence: Synthetic oligonucleotide
aaaacuuuaaucaacaauu

SEQ ID NO: 2797684 - RNA, 19 nt, Artificial Sequence
  Description of Artificial Sequence: Synthetic oligonucleotide
agauaaaagagauuuagga

SEQ ID NO: 2797685 - RNA, 19 nt, Artificial Sequence
  Description of Artificial Sequence: Synthetic oligonucleotide
gauacagaaaacuuuaauc

SEQ ID NO: 2797686 - RNA, 19 nt, Artificial Sequence
  Description of Artificial Sequence: Synthetic oligonucleotide
uaaaaguuuaacgugagug

SEQ ID NO: 2797687 - RNA, 19 nt, Artificial Sequence
  Description of Artificial Sequence: Synthetic oligonucleotide
auaaaagagauuuaggaaa

SEQ ID NO: 2797688 - RNA, 19 nt, Artificial Sequence
  Description of Artificial Sequence: Synthetic oligonucleotide
aauucuauguuauuauagu

SEQ ID NO: 2797689 - RNA, 19 nt, Artificial Sequence
  Description of Artificial Sequence: Synthetic oligonucleotide
ucaugcaagccaaugaagg

SEQ ID NO: 2797690 - RNA, 19 nt, Artificial Sequence
  Description of Artificial Sequence: Synthetic oligonucleotide
uuauuauaguuuaaaacac

SEQ ID NO: 2797691 - RNA, 19 nt, Artificial Sequence
  Description of Artificial Sequence: Synthetic oligonucleotide
ucagaauucuccaucauca

SEQ ID NO: 2797692 - RNA, 19 nt, Artificial Sequence
  Description of Artificial Sequence: Synthetic oligonucleotide
aucacuaugaaauggcuuc

SEQ ID NO: 2797693 - RNA, 19 nt, Artificial Sequence
  Description of Artificial Sequence: Synthetic oligonucleotide
aaaaguuuaacgugaguga

SEQ ID NO: 2797694 - RNA, 19 nt, Artificial Sequence
  Description of Artificial Sequence: Synthetic oligonucleotide
caaugaaggagauagacug

SEQ ID NO: 2797695 - RNA, 19 nt, Artificial Sequence
  Description of Artificial Sequence: Synthetic oligonucleotide
uaaaaugauccauuaaucu

SEQ ID NO: 2797696 - RNA, 19 nt, Artificial Sequence
  Description of Artificial Sequence: Synthetic oligonucleotide
aauggcuucccuuacucuc

SEQ ID NO: 2797697 - RNA, 19 nt, Artificial Sequence
  Description of Artificial Sequence: Synthetic oligonucleotide
gacaaguuuguacucaagg

SEQ ID NO: 2797698 - RNA, 19 nt, Artificial Sequence
  Description of Artificial Sequence: Synthetic oligonucleotide
acacuuaccagacagaaca

SEQ ID NO: 2797699 - RNA, 19 nt, Artificial Sequence
  Description of Artificial Sequence: Synthetic oligonucleotide
agucuauaagaaaauaacc

SEQ ID NO: 2797700 - RNA, 19 nt, Artificial Sequence
  Description of Artificial Sequence: Synthetic oligonucleotide
uauuauaguuuaaaacacc

SEQ ID NO: 2797701 - RNA, 19 nt, Artificial Sequence
  Description of Artificial Sequence: Synthetic oligonucleotide
acaaguuuguacucaaggg

SEQ ID NO: 2797702 - RNA, 19 nt, Artificial Sequence
  Description of Artificial Sequence: Synthetic oligonucleotide
auuucuuuaccccaucuag

SEQ ID NO: 2797703 - RNA, 19 nt, Artificial Sequence
  Description of Artificial Sequence: Synthetic oligonucleotide
aaaagacaaguuuguacuc

SEQ ID NO: 2797704 - RNA, 19 nt, Artificial Sequence
  Description of Artificial Sequence: Synthetic oligonucleotide
uuaaucaacaauuguggca

SEQ ID NO: 2797705 - RNA, 19 nt, Artificial Sequence
  Description of Artificial Sequence: Synthetic oligonucleotide
cauucaaguacugagagag

SEQ ID NO: 2797706 - RNA, 19 nt, Artificial Sequence
  Description of Artificial Sequence: Synthetic oligonucleotide
agauagacuguacagacug

SEQ ID NO: 2797707 - RNA, 19 nt, Artificial Sequence
  Description of Artificial Sequence: Synthetic oligonucleotide
uuaaucugaaccauuccug

SEQ ID NO: 2797708 - RNA, 19 nt, Artificial Sequence
  Description of Artificial Sequence: Synthetic oligonucleotide
uuuaggaaaauguuuucca

SEQ ID NO: 2797709 - RNA, 19 nt, Artificial Sequence
  Description of Artificial Sequence: Synthetic oligonucleotide
guuuaaaacaccuuccuca

SEQ ID NO: 2797710 - RNA, 19 nt, Artificial Sequence
  Description of Artificial Sequence: Synthetic oligonucleotide
aacauauuucuuuacccca

SEQ ID NO: 2797711 - RNA, 19 nt, Artificial Sequence
  Description of Artificial Sequence: Synthetic oligonucleotide
auuaaucugaaccauuccu

SEQ ID NO: 2797712 - RNA, 19 nt, Artificial Sequence
  Description of Artificial Sequence: Synthetic oligonucleotide
gucuauaagaaaauaaccc

SEQ ID NO: 2797713 - RNA, 19 nt, Artificial Sequence
  Description of Artificial Sequence: Synthetic oligonucleotide
auuccauucaaguacugag

SEQ ID NO: 2797714 - RNA, 19 nt, Artificial Sequence
  Description of Artificial Sequence: Synthetic oligonucleotide
uaaucugaaccauuccugg

SEQ ID NO: 2797715 - RNA, 19 nt, Artificial Sequence
  Description of Artificial Sequence: Synthetic oligonucleotide
auaguuuaaaacaccuucc

SEQ ID NO: 2797716 - RNA, 19 nt, Artificial Sequence
  Description of Artificial Sequence: Synthetic oligonucleotide
uaaauaucagaauucucca

SEQ ID NO: 2797717 - RNA, 19 nt, Artificial Sequence
  Description of Artificial Sequence: Synthetic oligonucleotide
uccauucaaguacugagag

SEQ ID NO: 2797718 - RNA, 19 nt, Artificial Sequence
  Description of Artificial Sequence: Synthetic oligonucleotide
uuuaaucaacaauuguggc

SEQ ID NO: 2797719 - RNA, 19 nt, Artificial Sequence
  Description of Artificial Sequence: Synthetic oligonucleotide
cuauacacuuaccagacag

SEQ ID NO: 2797720 - RNA, 19 nt, Artificial Sequence
  Description of Artificial Sequence: Synthetic oligonucleotide
gauauacaagucuauaaga

SEQ ID NO: 2797721 - RNA, 19 nt, Artificial Sequence
  Description of Artificial Sequence: Synthetic oligonucleotide
gaauucuauguuauuauag

SEQ ID NO: 2797722 - RNA, 19 nt, Artificial Sequence
  Description of Artificial Sequence: Synthetic oligonucleotide
aaaugauccauuaaucuga

SEQ ID NO: 2797723 - RNA, 19 nt, Artificial Sequence
  Description of Artificial Sequence: Synthetic oligonucleotide
gauaaaagagauuuaggaa

SEQ ID NO: 2797724 - RNA, 19 nt, Artificial Sequence
  Description of Artificial Sequence: Synthetic oligonucleotide
caaguaaaaguuuaacgug

SEQ ID NO: 2797725 - RNA, 19 nt, Artificial Sequence
  Description of Artificial Sequence: Synthetic oligonucleotide
auaaaaugauccauuaauc

SEQ ID NO: 2797726 - RNA, 19 nt, Artificial Sequence
  Description of Artificial Sequence: Synthetic oligonucleotide
acuuuaaucaacaauugug

SEQ ID NO: 2797727 - RNA, 19 nt, Artificial Sequence
  Description of Artificial Sequence: Synthetic oligonucleotide
ucuggauugaugagcagag

SEQ ID NO: 2797728 - RNA, 19 nt, Artificial Sequence
  Description of Artificial Sequence: Synthetic oligonucleotide
uuuaacgugagugaauucu

SEQ ID NO: 2797729 - RNA, 19 nt, Artificial Sequence
  Description of Artificial Sequence: Synthetic oligonucleotide
uauccagccagcuuuguag

SEQ ID NO: 2797730 - RNA, 19 nt, Artificial Sequence
  Description of Artificial Sequence: Synthetic oligonucleotide
acaauuguggcaacaauac

SEQ ID NO: 2797731 - RNA, 19 nt, Artificial Sequence
  Description of Artificial Sequence: Synthetic oligonucleotide
aguacugagagagugugcg

SEQ ID NO: 2797732 - RNA, 19 nt, Artificial Sequence
  Description of Artificial Sequence: Synthetic oligonucleotide
aaauaaccccaacuacaac

SEQ ID NO: 2797733 - RNA, 19 nt, Artificial Sequence
  Description of Artificial Sequence: Synthetic oligonucleotide
uauaagaaaauaaccccaa

SEQ ID NO: 2797734 - RNA, 19 nt, Artificial Sequence
  Description of Artificial Sequence: Synthetic oligonucleotide
aguuuaaaacaccuuccuc

SEQ ID NO: 2797735 - RNA, 19 nt, Artificial Sequence
  Description of Artificial Sequence: Synthetic oligonucleotide
ugcucuacuauacacuuac

SEQ ID NO: 2797736 - RNA, 19 nt, Artificial Sequence
  Description of Artificial Sequence: Synthetic oligonucleotide
aaguuauccagccagcuuu

SEQ ID NO: 2797737 - RNA, 19 nt, Artificial Sequence
  Description of Artificial Sequence: Synthetic oligonucleotide
cuuuaccccaucuagacuc

SEQ ID NO: 2797738 - RNA, 19 nt, Artificial Sequence
  Description of Artificial Sequence: Synthetic oligonucleotide
uucuauguuauuauaguuu

SEQ ID NO: 2797739 - RNA, 19 nt, Artificial Sequence
  Description of Artificial Sequence: Synthetic oligonucleotide
aucagaauucuccaucauc

SEQ ID NO: 2797740 - RNA, 19 nt, Artificial Sequence
  Description of Artificial Sequence: Synthetic oligonucleotide
auagacuguacagacugcc

SEQ ID NO: 2797741 - RNA, 19 nt, Artificial Sequence
  Description of Artificial Sequence: Synthetic oligonucleotide
gauccauuaaucugaacca

SEQ ID NO: 2797742 - RNA, 19 nt, Artificial Sequence
  Description of Artificial Sequence: Synthetic oligonucleotide
gaaaauaaccccaacuaca

SEQ ID NO: 2797743 - RNA, 19 nt, Artificial Sequence
  Description of Artificial Sequence: Synthetic oligonucleotide
acagaaaacuuuaaucaac

SEQ ID NO: 2797744 - RNA, 19 nt, Artificial Sequence
  Description of Artificial Sequence: Synthetic oligonucleotide
gagauaaaagagauuuagg

SEQ ID NO: 2797745 - RNA, 19 nt, Artificial Sequence
  Description of Artificial Sequence: Synthetic oligonucleotide
uauacaagucuauaagaaa

SEQ ID NO: 2797746 - RNA, 19 nt, Artificial Sequence
  Description of Artificial Sequence: Synthetic oligonucleotide
cuugacacggauauacaag

SEQ ID NO: 2797747 - RNA, 19 nt, Artificial Sequence
  Description of Artificial Sequence: Synthetic oligonucleotide
  modified_base (4)..(4): a, c, u, g, unknown or other
acgnugcucuacuauacac

SEQ ID NO: 2797748 - RNA, 19 nt, Artificial Sequence
  Description of Artificial Sequence: Synthetic oligonucleotide
ggauauacaagucuauaag

SEQ ID NO: 2797749 - RNA, 19 nt, Artificial Sequence
  Description of Artificial Sequence: Synthetic oligonucleotide
uacuauacacuuaccagac

SEQ ID NO: 2797750 - RNA, 19 nt, Artificial Sequence
  Description of Artificial Sequence: Synthetic oligonucleotide
uauguuauuauaguuuaaa

SEQ ID NO: 2797751 - RNA, 19 nt, Artificial Sequence
  Description of Artificial Sequence: Synthetic oligonucleotide
ugggagauaaaagagauuu

SEQ ID NO: 2797752 - RNA, 19 nt, Artificial Sequence
  Description of Artificial Sequence: Synthetic oligonucleotide
uucaaguacugagagagug

SEQ ID NO: 2797753 - RNA, 19 nt, Artificial Sequence
  Description of Artificial Sequence: Synthetic oligonucleotide
  modified_base (6)..(6): a, c, u, g, unknown or other
aaacgnugcucuacuauac

SEQ ID NO: 2797754 - RNA, 19 nt, Artificial Sequence
  Description of Artificial Sequence: Synthetic oligonucleotide
auuauaguuuaaaacaccu

SEQ ID NO: 2797755 - RNA, 19 nt, Artificial Sequence
  Description of Artificial Sequence: Synthetic oligonucleotide
agcuuuguagcacagcuca

SEQ ID NO: 2797756 - RNA, 19 nt, Artificial Sequence
  Description of Artificial Sequence: Synthetic oligonucleotide
uaguuuaaaacaccuuccu

SEQ ID NO: 2797757 - RNA, 19 nt, Artificial Sequence
  Description of Artificial Sequence: Synthetic oligonucleotide
uaugaaauggcuucccuua

SEQ ID NO: 2797758 - RNA, 19 nt, Artificial Sequence
  Description of Artificial Sequence: Synthetic oligonucleotide
uugacacggauauacaagu

SEQ ID NO: 2797759 - RNA, 19 nt, Artificial Sequence
  Description of Artificial Sequence: Synthetic oligonucleotide
aaacuuuaaucaacaauug

SEQ ID NO: 2797760 - RNA, 19 nt, Artificial Sequence
  Description of Artificial Sequence: Synthetic oligonucleotide
uacucaagggaaguuaucc

SEQ ID NO: 2797761 - RNA, 19 nt, Artificial Sequence
  Description of Artificial Sequence: Synthetic oligonucleotide
ugauacagaaaacuuuaau

SEQ ID NO: 2797762 - RNA, 19 nt, Artificial Sequence
  Description of Artificial Sequence: Synthetic oligonucleotide
ucaagggaaguuauccagc

SEQ ID NO: 2797763 - RNA, 19 nt, Artificial Sequence
  Description of Artificial Sequence: Synthetic oligonucleotide
uuucuuuaccccaucuaga

SEQ ID NO: 2797764 - RNA, 19 nt, Artificial Sequence
  Description of Artificial Sequence: Synthetic oligonucleotide
uacagaaaacuuuaaucaa

SEQ ID NO: 2797765 - RNA, 19 nt, Artificial Sequence
  Description of Artificial Sequence: Synthetic oligonucleotide
uucuuuaccccaucuagac

SEQ ID NO: 2797766 - RNA, 19 nt, Artificial Sequence
  Description of Artificial Sequence: Synthetic oligonucleotide
uugaugagcagaggaaacg

SEQ ID NO: 2797767 - RNA, 19 nt, Artificial Sequence
  Description of Artificial Sequence: Synthetic oligonucleotide
aaauaucagaauucuccau

SEQ ID NO: 2797768 - RNA, 19 nt, Artificial Sequence
  Description of Artificial Sequence: Synthetic oligonucleotide
ugagugaauucuauguuau

SEQ ID NO: 2797769 - RNA, 19 nt, Artificial Sequence
  Description of Artificial Sequence: Synthetic oligonucleotide
aacgugagugaauucuaug

SEQ ID NO: 2797770 - RNA, 19 nt, Artificial Sequence
  Description of Artificial Sequence: Synthetic oligonucleotide
cacacagacauuaaauauc

SEQ ID NO: 2797771 - RNA, 19 nt, Artificial Sequence
  Description of Artificial Sequence: Synthetic oligonucleotide
aaagacaaguuuguacuca

SEQ ID NO: 2797772 - RNA, 19 nt, Artificial Sequence
  Description of Artificial Sequence: Synthetic oligonucleotide
gacauuaaauaucagaauu

SEQ ID NO: 2797773 - RNA, 19 nt, Artificial Sequence
  Description of Artificial Sequence: Synthetic oligonucleotide
cucaagggaaguuauccag

SEQ ID NO: 2797774 - RNA, 19 nt, Artificial Sequence
  Description of Artificial Sequence: Synthetic oligonucleotide
aacaccuuccucaugcaag

SEQ ID NO: 2797775 - RNA, 19 nt, Artificial Sequence
  Description of Artificial Sequence: Synthetic oligonucleotide
aaaguuuaacgugagugaa

SEQ ID NO: 2797776 - RNA, 19 nt, Artificial Sequence
  Description of Artificial Sequence: Synthetic oligonucleotide
ggagauaaaagagauuuag

SEQ ID NO: 2797777 - RNA, 19 nt, Artificial Sequence
  Description of Artificial Sequence: Synthetic oligonucleotide
aggaaaauguuuuccaaaa

SEQ ID NO: 2797778 - RNA, 19 nt, Artificial Sequence
  Description of Artificial Sequence: Synthetic oligonucleotide
ggcaacaauacacacagac

SEQ ID NO: 2797779 - RNA, 19 nt, Artificial Sequence
  Description of Artificial Sequence: Synthetic oligonucleotide
acgugagugaauucuaugu

SEQ ID NO: 2797780 - RNA, 19 nt, Artificial Sequence
  Description of Artificial Sequence: Synthetic oligonucleotide
cuacuauacacuuaccaga

SEQ ID NO: 2797781 - RNA, 19 nt, Artificial Sequence
  Description of Artificial Sequence: Synthetic oligonucleotide
uuccauucaaguacugaga

SEQ ID NO: 2797782 - RNA, 19 nt, Artificial Sequence
  Description of Artificial Sequence: Synthetic oligonucleotide
acacacagacauuaaauau

SEQ ID NO: 2797783 - RNA, 19 nt, Artificial Sequence
  Description of Artificial Sequence: Synthetic oligonucleotide
uauacacuuaccagacaga

SEQ ID NO: 2797784 - RNA, 19 nt, Artificial Sequence
  Description of Artificial Sequence: Synthetic oligonucleotide
gaaaacuuuaaucaacaau

SEQ ID NO: 2797785 - RNA, 19 nt, Artificial Sequence
  Description of Artificial Sequence: Synthetic oligonucleotide
uguacucaagggaaguuau

SEQ ID NO: 2797786 - RNA, 19 nt, Artificial Sequence
  Description of Artificial Sequence: Synthetic oligonucleotide
ugcaagccaaugaaggaga

SEQ ID NO: 2797787 - RNA, 19 nt, Artificial Sequence
  Description of Artificial Sequence: Synthetic oligonucleotide
auacaagucuauaagaaaa

SEQ ID NO: 2797788 - RNA, 19 nt, Artificial Sequence
  Description of Artificial Sequence: Synthetic oligonucleotide
acugccugccuucucaguc

SEQ ID NO: 2797789 - RNA, 19 nt, Artificial Sequence
  Description of Artificial Sequence: Synthetic oligonucleotide
  modified_base (7)..(7): a, c, u, g, unknown or other
gaaacgnugcucuacuaua

SEQ ID NO: 2797790 - RNA, 19 nt, Artificial Sequence
  Description of Artificial Sequence: Synthetic oligonucleotide
aucugaaccauuccuggug

SEQ ID NO: 2797791 - RNA, 19 nt, Artificial Sequence
  Description of Artificial Sequence: Synthetic oligonucleotide
uacaagucuauaagaaaau

SEQ ID NO: 2797792 - RNA, 19 nt, Artificial Sequence
  Description of Artificial Sequence: Synthetic oligonucleotide
caagggaaguuauccagcc

SEQ ID NO: 2797793 - RNA, 19 nt, Artificial Sequence
  Description of Artificial Sequence: Synthetic oligonucleotide
ucaucacuaugaaauggcu

SEQ ID NO: 2797794 - RNA, 19 nt, Artificial Sequence
  Description of Artificial Sequence: Synthetic oligonucleotide
aaucugaaccauuccuggu

SEQ ID NO: 2797795 - RNA, 19 nt, Artificial Sequence
  Description of Artificial Sequence: Synthetic oligonucleotide
aaguuuguacucaagggaa

SEQ ID NO: 2797796 - RNA, 19 nt, Artificial Sequence
  Description of Artificial Sequence: Synthetic oligonucleotide
uggugggagauaaaagaga

SEQ ID NO: 2797797 - RNA, 19 nt, Artificial Sequence
  Description of Artificial Sequence: Synthetic oligonucleotide
uaccagacagaacaaguaa

SEQ ID NO: 2797798 - RNA, 19 nt, Artificial Sequence
  Description of Artificial Sequence: Synthetic oligonucleotide
auugaugagcagaggaaac

SEQ ID NO: 2797799 - RNA, 19 nt, Artificial Sequence
  Description of Artificial Sequence: Synthetic oligonucleotide
cauuaaucugaaccauucc

SEQ ID NO: 2797800 - RNA, 19 nt, Artificial Sequence
  Description of Artificial Sequence: Synthetic oligonucleotide
auucuauguuauuauaguu

SEQ ID NO: 2797801 - RNA, 19 nt, Artificial Sequence
  Description of Artificial Sequence: Synthetic oligonucleotide
ugaauucuauguuauuaua

SEQ ID NO: 2797802 - RNA, 19 nt, Artificial Sequence
  Description of Artificial Sequence: Synthetic oligonucleotide
  modified_base (5)..(5): a, c, u, g, unknown or other
aacgnugcucuacuauaca

SEQ ID NO: 2797803 - RNA, 19 nt, Artificial Sequence
  Description of Artificial Sequence: Synthetic oligonucleotide
uuaccagacagaacaagua

SEQ ID NO: 2797804 - RNA, 19 nt, Artificial Sequence
  Description of Artificial Sequence: Synthetic oligonucleotide
uccucaugcaagccaauga

SEQ ID NO: 2797805 - RNA, 19 nt, Artificial Sequence
  Description of Artificial Sequence: Synthetic oligonucleotide
ucaaguacugagagagugu

SEQ ID NO: 2797806 - RNA, 19 nt, Artificial Sequence
  Description of Artificial Sequence: Synthetic oligonucleotide
aagacaaguuuguacucaa

SEQ ID NO: 2797807 - RNA, 19 nt, Artificial Sequence
  Description of Artificial Sequence: Synthetic oligonucleotide
uuauaguuuaaaacaccuu

SEQ ID NO: 2797808 - RNA, 19 nt, Artificial Sequence
  Description of Artificial Sequence: Synthetic oligonucleotide
caaguuuguacucaaggga

SEQ ID NO: 2797809 - RNA, 19 nt, Artificial Sequence
  Description of Artificial Sequence: Synthetic oligonucleotide
  modified_base (11)..(11): a, c, u, g, unknown or other
agaggaaacgnugcucuac

SEQ ID NO: 2797810 - RNA, 19 nt, Artificial Sequence
  Description of Artificial Sequence: Synthetic oligonucleotide
agauuuaggaaaauguuuu

SEQ ID NO: 2797811 - RNA, 19 nt, Artificial Sequence
  Description of Artificial Sequence: Synthetic oligonucleotide
uauuucuuuaccccaucua

SEQ ID NO: 2797812 - RNA, 19 nt, Artificial Sequence
  Description of Artificial Sequence: Synthetic oligonucleotide
aaauggcuucccuuacucu

SEQ ID NO: 2797813 - RNA, 19 nt, Artificial Sequence
  Description of Artificial Sequence: Synthetic oligonucleotide
ggagauagacuguacagac

SEQ ID NO: 2797814 - RNA, 19 nt, Artificial Sequence
  Description of Artificial Sequence: Synthetic oligonucleotide
  modified_base (14)..(14): a, c, u, g, unknown or other
agcagaggaaacgnugcuc

SEQ ID NO: 2797815 - RNA, 19 nt, Artificial Sequence
  Description of Artificial Sequence: Synthetic oligonucleotide
uuaaaacaccuuccucaug

SEQ ID NO: 2797816 - RNA, 19 nt, Artificial Sequence
  Description of Artificial Sequence: Synthetic oligonucleotide
uuaacgugagugaauucua

SEQ ID NO: 2797817 - RNA, 19 nt, Artificial Sequence
  Description of Artificial Sequence: Synthetic oligonucleotide
agaaauaaaaugauccauu

SEQ ID NO: 2797818 - RNA, 19 nt, Artificial Sequence
  Description of Artificial Sequence: Synthetic oligonucleotide
  modified_base (19)..(19): a, c, u, g, unknown or other
ugaugagcagaggaaacgn

SEQ ID NO: 2797819 - RNA, 19 nt, Artificial Sequence
  Description of Artificial Sequence: Synthetic oligonucleotide
aucuagacuccacacagaa

SEQ ID NO: 2797820 - RNA, 19 nt, Artificial Sequence
  Description of Artificial Sequence: Synthetic oligonucleotide
cucaugcaagccaaugaag

SEQ ID NO: 2797821 - RNA, 19 nt, Artificial Sequence
  Description of Artificial Sequence: Synthetic oligonucleotide
aaguacugagagagugugc

SEQ ID NO: 2797822 - RNA, 19 nt, Artificial Sequence
  Description of Artificial Sequence: Synthetic oligonucleotide
auaaccccaacuacaacag

SEQ ID NO: 2797823 - RNA, 19 nt, Artificial Sequence
  Description of Artificial Sequence: Synthetic oligonucleotide
acaauacacacagacauua

SEQ ID NO: 2797824 - RNA, 19 nt, Artificial Sequence
  Description of Artificial Sequence: Synthetic oligonucleotide
aaaacaccuuccucaugca

SEQ ID NO: 2797825 - RNA, 19 nt, Artificial Sequence
  Description of Artificial Sequence: Synthetic oligonucleotide
ugaaauggcuucccuuacu

SEQ ID NO: 2797826 - RNA, 19 nt, Artificial Sequence
  Description of Artificial Sequence: Synthetic oligonucleotide
accaccaccagucuagaaa

SEQ ID NO: 2797827 - RNA, 19 nt, Artificial Sequence
  Description of Artificial Sequence: Synthetic oligonucleotide
ucucagucaccuugacacg

SEQ ID NO: 2797828 - RNA, 19 nt, Artificial Sequence
  Description of Artificial Sequence: Synthetic oligonucleotide
gacagaacaaguaaaaguu

SEQ ID NO: 2797829 - RNA, 19 nt, Artificial Sequence
  Description of Artificial Sequence: Synthetic oligonucleotide
uguacagacugccugccuu

SEQ ID NO: 2797830 - RNA, 19 nt, Artificial Sequence
  Description of Artificial Sequence: Synthetic oligonucleotide
acuaugaaauggcuucccu

SEQ ID NO: 2797831 - RNA, 19 nt, Artificial Sequence
  Description of Artificial Sequence: Synthetic oligonucleotide
ucuuuaccccaucuagacu

SEQ ID NO: 2797832 - RNA, 19 nt, Artificial Sequence
  Description of Artificial Sequence: Synthetic oligonucleotide
uuuaccccaucuagacucc

SEQ ID NO: 2797833 - RNA, 19 nt, Artificial Sequence
  Description of Artificial Sequence: Synthetic oligonucleotide
agaaaacuuuaaucaacaa

SEQ ID NO: 2797834 - RNA, 19 nt, Artificial Sequence
  Description of Artificial Sequence: Synthetic oligonucleotide
gaaccauuccuggugggag

SEQ ID NO: 2797835 - RNA, 19 nt, Artificial Sequence
  Description of Artificial Sequence: Synthetic oligonucleotide
aguuuaacgugagugaauu

SEQ ID NO: 2797836 - RNA, 19 nt, Artificial Sequence
  Description of Artificial Sequence: Synthetic oligonucleotide
ugaaggagauagacuguac

SEQ ID NO: 2797837 - RNA, 19 nt, Artificial Sequence
  Description of Artificial Sequence: Synthetic oligonucleotide
acuguacagacugccugcc

SEQ ID NO: 2797838 - RNA, 19 nt, Artificial Sequence
  Description of Artificial Sequence: Synthetic oligonucleotide
caaguacugagagagugug

SEQ ID NO: 2797839 - RNA, 19 nt, Artificial Sequence
  Description of Artificial Sequence: Synthetic oligonucleotide
uacacuuaccagacagaac

SEQ ID NO: 2797840 - RNA, 19 nt, Artificial Sequence
  Description of Artificial Sequence: Synthetic oligonucleotide
acucaagggaaguuaucca

SEQ ID NO: 2797841 - RNA, 19 nt, Artificial Sequence
  Description of Artificial Sequence: Synthetic oligonucleotide
gauugaugagcagaggaaa

SEQ ID NO: 2797842 - RNA, 19 nt, Artificial Sequence
  Description of Artificial Sequence: Synthetic oligonucleotide
uucccuuacucuccccucc

SEQ ID NO: 2797843 - RNA, 19 nt, Artificial Sequence
  Description of Artificial Sequence: Synthetic oligonucleotide
caccuugacacggauauac

SEQ ID NO: 2797844 - RNA, 19 nt, Artificial Sequence
  Description of Artificial Sequence: Synthetic oligonucleotide
agcucaucacuaugaaaug

SEQ ID NO: 2797845 - RNA, 19 nt, Artificial Sequence
  Description of Artificial Sequence: Synthetic oligonucleotide
auuguggcaacaauacaca

SEQ ID NO: 2797846 - RNA, 19 nt, Artificial Sequence
  Description of Artificial Sequence: Synthetic oligonucleotide
aaacaccuuccucaugcaa

SEQ ID NO: 2797847 - RNA, 19 nt, Artificial Sequence
  Description of Artificial Sequence: Synthetic oligonucleotide
uccauuaaucugaaccauu

SEQ ID NO: 2797848 - RNA, 19 nt, Artificial Sequence
  Description of Artificial Sequence: Synthetic oligonucleotide
gacacggauauacaagucu

SEQ ID NO: 2797849 - RNA, 19 nt, Artificial Sequence
  Description of Artificial Sequence: Synthetic oligonucleotide
aagggaaguuauccagcca

SEQ ID NO: 2797850 - RNA, 19 nt, Artificial Sequence
  Description of Artificial Sequence: Synthetic oligonucleotide
acuacaacagccauuccau

SEQ ID NO: 2797851 - RNA, 19 nt, Artificial Sequence
  Description of Artificial Sequence: Synthetic oligonucleotide
acuuaccagacagaacaag

SEQ ID NO: 2797852 - RNA, 19 nt, Artificial Sequence
  Description of Artificial Sequence: Synthetic oligonucleotide
agcacagcucaucacuaug

SEQ ID NO: 2797853 - RNA, 19 nt, Artificial Sequence
  Description of Artificial Sequence: Synthetic oligonucleotide
auacacuuaccagacagaa

SEQ ID NO: 2797854 - RNA, 19 nt, Artificial Sequence
  Description of Artificial Sequence: Synthetic oligonucleotide
auggcuucccuuacucucc

SEQ ID NO: 2797855 - RNA, 19 nt, Artificial Sequence
  Description of Artificial Sequence: Synthetic oligonucleotide
ucacuaugaaauggcuucc

SEQ ID NO: 2797856 - RNA, 19 nt, Artificial Sequence
  Description of Artificial Sequence: Synthetic oligonucleotide
aaccauuccuggugggaga

SEQ ID NO: 2797857 - RNA, 19 nt, Artificial Sequence
  Description of Artificial Sequence: Synthetic oligonucleotide
cagaacaaguaaaaguuua

SEQ ID NO: 2797858 - RNA, 19 nt, Artificial Sequence
  Description of Artificial Sequence: Synthetic oligonucleotide
ccaucuagacuccacacag

SEQ ID NO: 2797859 - RNA, 19 nt, Artificial Sequence
  Description of Artificial Sequence: Synthetic oligonucleotide
aggagauagacuguacaga

SEQ ID NO: 2797860 - RNA, 19 nt, Artificial Sequence
  Description of Artificial Sequence: Synthetic oligonucleotide
agucuagaaauaaaaugau

SEQ ID NO: 2797861 - RNA, 19 nt, Artificial Sequence
  Description of Artificial Sequence: Synthetic oligonucleotide
cagcucaucacuaugaaau

SEQ ID NO: 2797862 - RNA, 19 nt, Artificial Sequence
  Description of Artificial Sequence: Synthetic oligonucleotide
  modified_base (17)..(17): a, c, u, g, unknown or other
augagcagaggaaacgnug

SEQ ID NO: 2797863 - RNA, 19 nt, Artificial Sequence
  Description of Artificial Sequence: Synthetic oligonucleotide
augauccauuaaucugaac

SEQ ID NO: 2797864 - RNA, 19 nt, Artificial Sequence
  Description of Artificial Sequence: Synthetic oligonucleotide
  modified_base (10)..(10): a, c, u, g, unknown or other
gaggaaacgnugcucuacu

SEQ ID NO: 2797865 - RNA, 19 nt, Artificial Sequence
  Description of Artificial Sequence: Synthetic oligonucleotide
aucaucaccgccaccacca

SEQ ID NO: 2797866 - RNA, 19 nt, Artificial Sequence
  Description of Artificial Sequence: Synthetic oligonucleotide
ucuagacuccacacagaaa

SEQ ID NO: 2797867 - RNA, 19 nt, Artificial Sequence
  Description of Artificial Sequence: Synthetic oligonucleotide
gucuagaaauaaaaugauc

SEQ ID NO: 2797868 - RNA, 19 nt, Artificial Sequence
  Description of Artificial Sequence: Synthetic oligonucleotide
ucccucuggauugaugagc

SEQ ID NO: 2797869 - RNA, 19 nt, Artificial Sequence
  Description of Artificial Sequence: Synthetic oligonucleotide
aaugauccauuaaucugaa

SEQ ID NO: 2797870 - RNA, 19 nt, Artificial Sequence
  Description of Artificial Sequence: Synthetic oligonucleotide
  modified_base (2)..(2): a, c, u, g, unknown or other
gnugcucuacuauacacuu

SEQ ID NO: 2797871 - RNA, 19 nt, Artificial Sequence
  Description of Artificial Sequence: Synthetic oligonucleotide
aguuuguacucaagggaag

SEQ ID NO: 2797872 - RNA, 19 nt, Artificial Sequence
  Description of Artificial Sequence: Synthetic oligonucleotide
ugacacggauauacaaguc

SEQ ID NO: 2797873 - RNA, 19 nt, Artificial Sequence
  Description of Artificial Sequence: Synthetic oligonucleotide
caugcaagccaaugaagga

SEQ ID NO: 2797874 - RNA, 19 nt, Artificial Sequence
  Description of Artificial Sequence: Synthetic oligonucleotide
gugagugaauucuauguua

SEQ ID NO: 2797875 - RNA, 19 nt, Artificial Sequence
  Description of Artificial Sequence: Synthetic oligonucleotide
uaaccccaacuacaacagc

SEQ ID NO: 2797876 - RNA, 19 nt, Artificial Sequence
  Description of Artificial Sequence: Synthetic oligonucleotide
gauagacuguacagacugc

SEQ ID NO: 2797877 - RNA, 19 nt, Artificial Sequence
  Description of Artificial Sequence: Synthetic oligonucleotide
uuguacucaagggaaguua

SEQ ID NO: 2797878 - RNA, 19 nt, Artificial Sequence
  Description of Artificial Sequence: Synthetic oligonucleotide
uaucagaauucuccaucau

SEQ ID NO: 2797879 - RNA, 19 nt, Artificial Sequence
  Description of Artificial Sequence: Synthetic oligonucleotide
ugaaccauuccugguggga

SEQ ID NO: 2797880 - RNA, 19 nt, Artificial Sequence
  Description of Artificial Sequence: Synthetic oligonucleotide
uacucuccccucccucugg

SEQ ID NO: 2797881 - RNA, 19 nt, Artificial Sequence
  Description of Artificial Sequence: Synthetic oligonucleotide
cauauuucuuuaccccauc

SEQ ID NO: 2797882 - RNA, 19 nt, Artificial Sequence
  Description of Artificial Sequence: Synthetic oligonucleotide
cuuuguagcacagcucauc

SEQ ID NO: 2797883 - RNA, 19 nt, Artificial Sequence
  Description of Artificial Sequence: Synthetic oligonucleotide
gcucaucacuaugaaaugg

SEQ ID NO: 2797884 - RNA, 19 nt, Artificial Sequence
  Description of Artificial Sequence: Synthetic oligonucleotide
acuauacacuuaccagaca

SEQ ID NO: 2797885 - RNA, 19 nt, Artificial Sequence
  Description of Artificial Sequence: Synthetic oligonucleotide
agaacaaguaaaaguuuaa

SEQ ID NO: 2797886 - RNA, 19 nt, Artificial Sequence
  Description of Artificial Sequence: Synthetic oligonucleotide
caccagucuagaaauaaaa

SEQ ID NO: 2797887 - RNA, 19 nt, Artificial Sequence
  Description of Artificial Sequence: Synthetic oligonucleotide
acaagucuauaagaaaaua

SEQ ID NO: 2797888 - RNA, 19 nt, Artificial Sequence
  Description of Artificial Sequence: Synthetic oligonucleotide
gucaccuugacacggauau

SEQ ID NO: 2797889 - RNA, 19 nt, Artificial Sequence
  Description of Artificial Sequence: Synthetic oligonucleotide
ccaacuacaacagccauuc

SEQ ID NO: 2797890 - RNA, 19 nt, Artificial Sequence
  Description of Artificial Sequence: Synthetic oligonucleotide
aaguuuaacgugagugaau

SEQ ID NO: 2797891 - RNA, 19 nt, Artificial Sequence
  Description of Artificial Sequence: Synthetic oligonucleotide
uuccucaugcaagccaaug

SEQ ID NO: 2797892 - RNA, 19 nt, Artificial Sequence
  Description of Artificial Sequence: Synthetic oligonucleotide
gagauuuaggaaaauguuu

SEQ ID NO: 2797893 - RNA, 19 nt, Artificial Sequence
  Description of Artificial Sequence: Synthetic oligonucleotide
gugaauucuauguuauuau

SEQ ID NO: 2797894 - RNA, 19 nt, Artificial Sequence
  Description of Artificial Sequence: Synthetic oligonucleotide
cacagacauuaaauaucag

SEQ ID NO: 2797895 - RNA, 19 nt, Artificial Sequence
  Description of Artificial Sequence: Synthetic oligonucleotide
accagucuagaaauaaaau

SEQ ID NO: 2797896 - RNA, 19 nt, Artificial Sequence
  Description of Artificial Sequence: Synthetic oligonucleotide
uuuguacucaagggaaguu

SEQ ID NO: 2797897 - RNA, 19 nt, Artificial Sequence
  Description of Artificial Sequence: Synthetic oligonucleotide
aacagccauuccauucaag

SEQ ID NO: 2797898 - RNA, 19 nt, Artificial Sequence
  Description of Artificial Sequence: Synthetic oligonucleotide
gccaaugaaggagauagac

SEQ ID NO: 2797899 - RNA, 19 nt, Artificial Sequence
  Description of Artificial Sequence: Synthetic oligonucleotide
ucccuuacucuccccuccc

SEQ ID NO: 2797900 - RNA, 19 nt, Artificial Sequence
  Description of Artificial Sequence: Synthetic oligonucleotide
cacuaugaaauggcuuccc

SEQ ID NO: 2797901 - RNA, 19 nt, Artificial Sequence
  Description of Artificial Sequence: Synthetic oligonucleotide
accccaucuagacuccaca

SEQ ID NO: 2797902 - RNA, 19 nt, Artificial Sequence
  Description of Artificial Sequence: Synthetic oligonucleotide
guuuaacgugagugaauuc

SEQ ID NO: 2797903 - RNA, 19 nt, Artificial Sequence
  Description of Artificial Sequence: Synthetic oligonucleotide
accaccagucuagaaauaa

SEQ ID NO: 2797904 - RNA, 19 nt, Artificial Sequence
  Description of Artificial Sequence: Synthetic oligonucleotide
accagacagaacaaguaaa

SEQ ID NO: 2797905 - RNA, 19 nt, Artificial Sequence
  Description of Artificial Sequence: Synthetic oligonucleotide
cucuggauugaugagcaga

SEQ ID NO: 2797906 - RNA, 19 nt, Artificial Sequence
  Description of Artificial Sequence: Synthetic oligonucleotide
acagaacaaguaaaaguuu

SEQ ID NO: 2797907 - RNA, 19 nt, Artificial Sequence
  Description of Artificial Sequence: Synthetic oligonucleotide
auccauuaaucugaaccau

SEQ ID NO: 2797908 - RNA, 19 nt, Artificial Sequence
  Description of Artificial Sequence: Synthetic oligonucleotide
cuauguuauuauaguuuaa

SEQ ID NO: 2797909 - RNA, 19 nt, Artificial Sequence
  Description of Artificial Sequence: Synthetic oligonucleotide
uggcuucccuuacucuccc

SEQ ID NO: 2797910 - RNA, 19 nt, Artificial Sequence
  Description of Artificial Sequence: Synthetic oligonucleotide
acagacugccugccuucuc

SEQ ID NO: 2797911 - RNA, 19 nt, Artificial Sequence
  Description of Artificial Sequence: Synthetic oligonucleotide
guacagacugccugccuuc

SEQ ID NO: 2797912 - RNA, 19 nt, Artificial Sequence
  Description of Artificial Sequence: Synthetic oligonucleotide
cuggauugaugagcagagg

SEQ ID NO: 2797913 - RNA, 19 nt, Artificial Sequence
  Description of Artificial Sequence: Synthetic oligonucleotide
cauuccauucaaguacuga

SEQ ID NO: 2797914 - RNA, 19 nt, Artificial Sequence
  Description of Artificial Sequence: Synthetic oligonucleotide
uaccccaucuagacuccac

SEQ ID NO: 2797915 - RNA, 19 nt, Artificial Sequence
  Description of Artificial Sequence: Synthetic oligonucleotide
acacggauauacaagucua

SEQ ID NO: 2797916 - RNA, 19 nt, Artificial Sequence
  Description of Artificial Sequence: Synthetic oligonucleotide
agacaaguuuguacucaag

SEQ ID NO: 2797917 - RNA, 19 nt, Artificial Sequence
  Description of Artificial Sequence: Synthetic oligonucleotide
guaaaaguuuaacgugagu

SEQ ID NO: 2797918 - RNA, 19 nt, Artificial Sequence
  Description of Artificial Sequence: Synthetic oligonucleotide
cugauacagaaaacuuuaa

SEQ ID NO: 2797919 - RNA, 19 nt, Artificial Sequence
  Description of Artificial Sequence: Synthetic oligonucleotide
cagcuuuguagcacagcuc

SEQ ID NO: 2797920 - RNA, 19 nt, Artificial Sequence
  Description of Artificial Sequence: Synthetic oligonucleotide
acggauauacaagucuaua

SEQ ID NO: 2797921 - RNA, 19 nt, Artificial Sequence
  Description of Artificial Sequence: Synthetic oligonucleotide
cagacugccugccuucuca

SEQ ID NO: 2797922 - RNA, 19 nt, Artificial Sequence
  Description of Artificial Sequence: Synthetic oligonucleotide
uagcacagcucaucacuau

SEQ ID NO: 2797923 - RNA, 19 nt, Artificial Sequence
  Description of Artificial Sequence: Synthetic oligonucleotide
gcaacaauacacacagaca

SEQ ID NO: 2797924 - RNA, 19 nt, Artificial Sequence
  Description of Artificial Sequence: Synthetic oligonucleotide
caucaccgccaccaccacc

SEQ ID NO: 2797925 - RNA, 19 nt, Artificial Sequence
  Description of Artificial Sequence: Synthetic oligonucleotide
  modified_base (9)..(9): a, c, u, g, unknown or other
aggaaacgnugcucuacua

SEQ ID NO: 2797926 - RNA, 19 nt, Artificial Sequence
  Description of Artificial Sequence: Synthetic oligonucleotide
ucaucaccgccaccaccac

SEQ ID NO: 2797927 - RNA, 19 nt, Artificial Sequence
  Description of Artificial Sequence: Synthetic oligonucleotide
caucuagacuccacacaga

SEQ ID NO: 2797928 - RNA, 19 nt, Artificial Sequence
  Description of Artificial Sequence: Synthetic oligonucleotide
accccaacuacaacagcca

SEQ ID NO: 2797929 - RNA, 19 nt, Artificial Sequence
  Description of Artificial Sequence: Synthetic oligonucleotide
uggcaacaauacacacaga

SEQ ID NO: 2797930 - RNA, 19 nt, Artificial Sequence
  Description of Artificial Sequence: Synthetic oligonucleotide
guuuguacucaagggaagu

SEQ ID NO: 2797931 - RNA, 19 nt, Artificial Sequence
  Description of Artificial Sequence: Synthetic oligonucleotide
auucaaguacugagagagu

SEQ ID NO: 2797932 - RNA, 19 nt, Artificial Sequence
  Description of Artificial Sequence: Synthetic oligonucleotide
caacuacaacagccauucc

SEQ ID NO: 2797933 - RNA, 19 nt, Artificial Sequence
  Description of Artificial Sequence: Synthetic oligonucleotide
uacagacugccugccuucu

SEQ ID NO: 2797934 - RNA, 19 nt, Artificial Sequence
  Description of Artificial Sequence: Synthetic oligonucleotide
cuaugaaauggcuucccuu

SEQ ID NO: 2797935 - RNA, 19 nt, Artificial Sequence
  Description of Artificial Sequence: Synthetic oligonucleotide
ggauugaugagcagaggaa

SEQ ID NO: 2797936 - RNA, 19 nt, Artificial Sequence
  Description of Artificial Sequence: Synthetic oligonucleotide
gagauagacuguacagacu

SEQ ID NO: 2797937 - RNA, 19 nt, Artificial Sequence
  Description of Artificial Sequence: Synthetic oligonucleotide
ggugggagauaaaagagau

SEQ ID NO: 2797938 - RNA, 19 nt, Artificial Sequence
  Description of Artificial Sequence: Synthetic oligonucleotide
uuaccccaucuagacucca

SEQ ID NO: 2797939 - RNA, 19 nt, Artificial Sequence
  Description of Artificial Sequence: Synthetic oligonucleotide
  modified_base (8)..(8): a, c, u, g, unknown or other
ggaaacgnugcucuacuau

SEQ ID NO: 2797940 - RNA, 19 nt, Artificial Sequence
  Description of Artificial Sequence: Synthetic oligonucleotide
cacagcucaucacuaugaa

SEQ ID NO: 2797941 - RNA, 19 nt, Artificial Sequence
  Description of Artificial Sequence: Synthetic oligonucleotide
  modified_base (18)..(18): a, c, u, g, unknown or other
gaugagcagaggaaacgnu

SEQ ID NO: 2797942 - RNA, 19 nt, Artificial Sequence
  Description of Artificial Sequence: Synthetic oligonucleotide
accuugacacggauauaca

SEQ ID NO: 2797943 - RNA, 19 nt, Artificial Sequence
  Description of Artificial Sequence: Synthetic oligonucleotide
cagccagcuuuguagcaca

SEQ ID NO: 2797944 - RNA, 19 nt, Artificial Sequence
  Description of Artificial Sequence: Synthetic oligonucleotide
cacuuaccagacagaacaa

SEQ ID NO: 2797945 - RNA, 19 nt, Artificial Sequence
  Description of Artificial Sequence: Synthetic oligonucleotide
accauuccuggugggagau

SEQ ID NO: 2797946 - RNA, 19 nt, Artificial Sequence
  Description of Artificial Sequence: Synthetic oligonucleotide
ccuugacacggauauacaa

SEQ ID NO: 2797947 - RNA, 19 nt, Artificial Sequence
  Description of Artificial Sequence: Synthetic oligonucleotide
ccucaugcaagccaaugaa

SEQ ID NO: 2797948 - RNA, 19 nt, Artificial Sequence
  Description of Artificial Sequence: Synthetic oligonucleotide
cggauauacaagucuauaa

SEQ ID NO: 2797949 - RNA, 19 nt, Artificial Sequence
  Description of Artificial Sequence: Synthetic oligonucleotide
  modified_base (13)..(13): a, c, u, g, unknown or other
gcagaggaaacgnugcucu

SEQ ID NO: 2797950 - RNA, 19 nt, Artificial Sequence
  Description of Artificial Sequence: Synthetic oligonucleotide
cccucuggauugaugagca

SEQ ID NO: 2797951 - RNA, 19 nt, Artificial Sequence
  Description of Artificial Sequence: Synthetic oligonucleotide
caccuuccucaugcaagcc

SEQ ID NO: 2797952 - RNA, 19 nt, Artificial Sequence
  Description of Artificial Sequence: Synthetic oligonucleotide
gagugaauucuauguuauu

SEQ ID NO: 2797953 - RNA, 19 nt, Artificial Sequence
  Description of Artificial Sequence: Synthetic oligonucleotide
ccaaugaaggagauagacu

SEQ ID NO: 2797954 - RNA, 19 nt, Artificial Sequence
  Description of Artificial Sequence: Synthetic oligonucleotide
ccagcuuuguagcacagcu

SEQ ID NO: 2797955 - RNA, 19 nt, Artificial Sequence
  Description of Artificial Sequence: Synthetic oligonucleotide
caacaauuguggcaacaau

SEQ ID NO: 2797956 - RNA, 19 nt, Artificial Sequence
  Description of Artificial Sequence: Synthetic oligonucleotide
ccauucaaguacugagaga

SEQ ID NO: 2797957 - RNA, 19 nt, Artificial Sequence
  Description of Artificial Sequence: Synthetic oligonucleotide
cacggauauacaagucuau

SEQ ID NO: 2797958 - RNA, 19 nt, Artificial Sequence
  Description of Artificial Sequence: Synthetic oligonucleotide
guacugagagagugugcgu

SEQ ID NO: 2797959 - RNA, 19 nt, Artificial Sequence
  Description of Artificial Sequence: Synthetic oligonucleotide
cugagagagugugcgugga

SEQ ID NO: 2797960 - RNA, 19 nt, Artificial Sequence
  Description of Artificial Sequence: Synthetic oligonucleotide
agccagcuuuguagcacag

SEQ ID NO: 2797961 - RNA, 19 nt, Artificial Sequence
  Description of Artificial Sequence: Synthetic oligonucleotide
ucaccuugacacggauaua

SEQ ID NO: 2797962 - RNA, 19 nt, Artificial Sequence
  Description of Artificial Sequence: Synthetic oligonucleotide
caacagccauuccauucaa

SEQ ID NO: 2797963 - RNA, 19 nt, Artificial Sequence
  Description of Artificial Sequence: Synthetic oligonucleotide
cccaucuagacuccacaca

SEQ ID NO: 2797964 - RNA, 19 nt, Artificial Sequence
  Description of Artificial Sequence: Synthetic oligonucleotide
ggaaguuauccagccagcu

SEQ ID NO: 2797965 - RNA, 19 nt, Artificial Sequence
  Description of Artificial Sequence: Synthetic oligonucleotide
agucaccuugacacggaua

SEQ ID NO: 2797966 - RNA, 19 nt, Artificial Sequence
  Description of Artificial Sequence: Synthetic oligonucleotide
ccuuacucuccccucccuc

SEQ ID NO: 2797967 - RNA, 19 nt, Artificial Sequence
  Description of Artificial Sequence: Synthetic oligonucleotide
  modified_base (12)..(12): a, c, u, g, unknown or other
cagaggaaacgnugcucua

SEQ ID NO: 2797968 - RNA, 19 nt, Artificial Sequence
  Description of Artificial Sequence: Synthetic oligonucleotide
ccauuccauucaaguacug

SEQ ID NO: 2797969 - RNA, 19 nt, Artificial Sequence
  Description of Artificial Sequence: Synthetic oligonucleotide
gcucuacuauacacuuacc

SEQ ID NO: 2797970 - RNA, 19 nt, Artificial Sequence
  Description of Artificial Sequence: Synthetic oligonucleotide
gggagauaaaagagauuua

SEQ ID NO: 2797971 - RNA, 19 nt, Artificial Sequence
  Description of Artificial Sequence: Synthetic oligonucleotide
gacugccugccuucucagu

SEQ ID NO: 2797972 - RNA, 19 nt, Artificial Sequence
  Description of Artificial Sequence: Synthetic oligonucleotide
ccaccagucuagaaauaaa

SEQ ID NO: 2797973 - RNA, 19 nt, Artificial Sequence
  Description of Artificial Sequence: Synthetic oligonucleotide
gccagcuuuguagcacagc

SEQ ID NO: 2797974 - RNA, 19 nt, Artificial Sequence
  Description of Artificial Sequence: Synthetic oligonucleotide
ccaccaccagucuagaaau

SEQ ID NO: 2797975 - RNA, 19 nt, Artificial Sequence
  Description of Artificial Sequence: Synthetic oligonucleotide
  modified_base (3)..(3): a, c, u, g, unknown or other
cgnugcucuacuauacacu

SEQ ID NO: 2797976 - RNA, 19 nt, Artificial Sequence
  Description of Artificial Sequence: Synthetic oligonucleotide
caccaccagucuagaaaua

SEQ ID NO: 2797977 - RNA, 19 nt, Artificial Sequence
  Description of Artificial Sequence: Synthetic oligonucleotide
caccaccaccagucuagaa

SEQ ID NO: 2797978 - RNA, 19 nt, Artificial Sequence
  Description of Artificial Sequence: Synthetic oligonucleotide
gugggagauaaaagagauu

SEQ ID NO: 2797979 - RNA, 19 nt, Artificial Sequence
  Description of Artificial Sequence: Synthetic oligonucleotide
cuuccucaugcaagccaau

SEQ ID NO: 2797980 - RNA, 19 nt, Artificial Sequence
  Description of Artificial Sequence: Synthetic oligonucleotide
cgugagugaauucuauguu

SEQ ID NO: 2797981 - RNA, 19 nt, Artificial Sequence
  Description of Artificial Sequence: Synthetic oligonucleotide
cccaacuacaacagccauu

SEQ ID NO: 2797982 - RNA, 19 nt, Artificial Sequence
  Description of Artificial Sequence: Synthetic oligonucleotide
ccccaacuacaacagccau

SEQ ID NO: 2797983 - RNA, 19 nt, Artificial Sequence
  Description of Artificial Sequence: Synthetic oligonucleotide
ccaccaccaccagucuaga

SEQ ID NO: 2797984 - RNA, 19 nt, Artificial Sequence
  Description of Artificial Sequence: Synthetic oligonucleotide
cccuuacucuccccucccu

SEQ ID NO: 2797985 - RNA, 19 nt, Artificial Sequence
  Description of Artificial Sequence: Synthetic oligonucleotide
cgccaccaccaccagucua

SEQ ID NO: 2797986 - RNA, 19 nt, Artificial Sequence
  Description of Artificial Sequence: Synthetic oligonucleotide
ccgccaccaccaccagucu

SEQ ID NO: 2797987 - RNA, 19 nt, Artificial Sequence
  Description of Artificial Sequence: Synthetic oligonucleotide
ccccucccucuggauugau

SEQ ID NO: 2797988 - RNA, 19 nt, Artificial Sequence
  Description of Artificial Sequence: Synthetic oligonucleotide
  modified_base (1)..(1): a, c, u, g, unknown or other
nugcucuacuauacacuua

SEQ ID NO: 2797989 - RNA, 19 nt, Artificial Sequence
  Description of Artificial Sequence: Synthetic oligonucleotide
uuuauagagguucacaaac

SEQ ID NO: 2797990 - RNA, 19 nt, Artificial Sequence
  Description of Artificial Sequence: Synthetic oligonucleotide
uagagguucacaaacugcg

SEQ ID NO: 2797991 - RNA, 19 nt, Artificial Sequence
  Description of Artificial Sequence: Synthetic oligonucleotide
uuuaccauauuuccccugg

SEQ ID NO: 2797992 - RNA, 19 nt, Artificial Sequence
  Description of Artificial Sequence: Synthetic oligonucleotide
aaagacaacgggcuggaag

SEQ ID NO: 2797993 - RNA, 19 nt, Artificial Sequence
  Description of Artificial Sequence: Synthetic oligonucleotide
uuuggggccaauauggccc

SEQ ID NO: 2797994 - RNA, 19 nt, Artificial Sequence
  Description of Artificial Sequence: Synthetic oligonucleotide
caagugugcacguugauag

SEQ ID NO: 2797995 - RNA, 19 nt, Artificial Sequence
  Description of Artificial Sequence: Synthetic oligonucleotide
ugcugaaguguuuauagag

SEQ ID NO: 2797996 - RNA, 19 nt, Artificial Sequence
  Description of Artificial Sequence: Synthetic oligonucleotide
aaagagacgcacccacacc

SEQ ID NO: 2797997 - RNA, 19 nt, Artificial Sequence
  Description of Artificial Sequence: Synthetic oligonucleotide
uagcagaagaacuugccgg

SEQ ID NO: 2797998 - RNA, 19 nt, Artificial Sequence
  Description of Artificial Sequence: Synthetic oligonucleotide
aagacaacgggcuggaagu

SEQ ID NO: 2797999 - RNA, 19 nt, Artificial Sequence
  Description of Artificial Sequence: Synthetic oligonucleotide
gauggugauauugauuugg

SEQ ID NO: 2798000 - RNA, 19 nt, Artificial Sequence
  Description of Artificial Sequence: Synthetic oligonucleotide
ucaccuuucaggaugguga

SEQ ID NO: 2798001 - RNA, 19 nt, Artificial Sequence
  Description of Artificial Sequence: Synthetic oligonucleotide
uauagagguucacaaacug

SEQ ID NO: 2798002 - RNA, 19 nt, Artificial Sequence
  Description of Artificial Sequence: Synthetic oligonucleotide
cuguuuaccauauuucccc

SEQ ID NO: 2798003 - RNA, 19 nt, Artificial Sequence
  Description of Artificial Sequence: Synthetic oligonucleotide
ugcauaguggcuuuugcag

SEQ ID NO: 2798004 - RNA, 19 nt, Artificial Sequence
  Description of Artificial Sequence: Synthetic oligonucleotide
caugcugaaguguuuauag

SEQ ID NO: 2798005 - RNA, 19 nt, Artificial Sequence
  Description of Artificial Sequence: Synthetic oligonucleotide
uguuuauagagguucacaa

SEQ ID NO: 2798006 - RNA, 19 nt, Artificial Sequence
  Description of Artificial Sequence: Synthetic oligonucleotide
uucaugaugugcagguacg

SEQ ID NO: 2798007 - RNA, 19 nt, Artificial Sequence
  Description of Artificial Sequence: Synthetic oligonucleotide
uuuugcagcggucuccagg

SEQ ID NO: 2798008 - RNA, 19 nt, Artificial Sequence
  Description of Artificial Sequence: Synthetic oligonucleotide
accauauuuccccuggagg

SEQ ID NO: 2798009 - RNA, 19 nt, Artificial Sequence
  Description of Artificial Sequence: Synthetic oligonucleotide
ugugcguacaggaucacca

SEQ ID NO: 2798010 - RNA, 19 nt, Artificial Sequence
  Description of Artificial Sequence: Synthetic oligonucleotide
aagagacgcacccacaccu

SEQ ID NO: 2798011 - RNA, 19 nt, Artificial Sequence
  Description of Artificial Sequence: Synthetic oligonucleotide
ugugcagaggcuucuuucg

SEQ ID NO: 2798012 - RNA, 19 nt, Artificial Sequence
  Description of Artificial Sequence: Synthetic oligonucleotide
aggauggugauauugauuu

SEQ ID NO: 2798013 - RNA, 19 nt, Artificial Sequence
  Description of Artificial Sequence: Synthetic oligonucleotide
accuuucucaccuuucagg

SEQ ID NO: 2798014 - RNA, 19 nt, Artificial Sequence
  Description of Artificial Sequence: Synthetic oligonucleotide
caaacugcgugucaaagac

SEQ ID NO: 2798015 - RNA, 19 nt, Artificial Sequence
  Description of Artificial Sequence: Synthetic oligonucleotide
gaaguguuuauagagguuc

SEQ ID NO: 2798016 - RNA, 19 nt, Artificial Sequence
  Description of Artificial Sequence: Synthetic oligonucleotide
uugaaagagacgcacccac

SEQ ID NO: 2798017 - RNA, 19 nt, Artificial Sequence
  Description of Artificial Sequence: Synthetic oligonucleotide
ugcgugucaaagacaacgg

SEQ ID NO: 2798018 - RNA, 19 nt, Artificial Sequence
  Description of Artificial Sequence: Synthetic oligonucleotide
aaccuguuuaccauauuuc

SEQ ID NO: 2798019 - RNA, 19 nt, Artificial Sequence
  Description of Artificial Sequence: Synthetic oligonucleotide
cauaguggcuuuugcagcg

SEQ ID NO: 2798020 - RNA, 19 nt, Artificial Sequence
  Description of Artificial Sequence: Synthetic oligonucleotide
auagagguucacaaacugc

SEQ ID NO: 2798021 - RNA, 19 nt, Artificial Sequence
  Description of Artificial Sequence: Synthetic oligonucleotide
ugauagcagaagaacuugc

SEQ ID NO: 2798022 - RNA, 19 nt, Artificial Sequence
  Description of Artificial Sequence: Synthetic oligonucleotide
ucgucgcugaaaauaggcg

SEQ ID NO: 2798023 - RNA, 19 nt, Artificial Sequence
  Description of Artificial Sequence: Synthetic oligonucleotide
aagugugcacguugauagc

SEQ ID NO: 2798024 - RNA, 19 nt, Artificial Sequence
  Description of Artificial Sequence: Synthetic oligonucleotide
gaaguagucacugcugugc

SEQ ID NO: 2798025 - RNA, 19 nt, Artificial Sequence
  Description of Artificial Sequence: Synthetic oligonucleotide
gaucgucugguacacgagg

SEQ ID NO: 2798026 - RNA, 19 nt, Artificial Sequence
  Description of Artificial Sequence: Synthetic oligonucleotide
  modified_base (15)..(15): a, c, u, g, unknown or other
uauugauuugggguncugg

SEQ ID NO: 2798027 - RNA, 19 nt, Artificial Sequence
  Description of Artificial Sequence: Synthetic oligonucleotide
aagaacuugccggugaaca

SEQ ID NO: 2798028 - RNA, 19 nt, Artificial Sequence
  Description of Artificial Sequence: Synthetic oligonucleotide
ugaaaauaggcguucucuc

SEQ ID NO: 2798029 - RNA, 19 nt, Artificial Sequence
  Description of Artificial Sequence: Synthetic oligonucleotide
cucucucuccccuugaaag

SEQ ID NO: 2798030 - RNA, 19 nt, Artificial Sequence
  Description of Artificial Sequence: Synthetic oligonucleotide
cugcgugucaaagacaacg

SEQ ID NO: 2798031 - RNA, 19 nt, Artificial Sequence
  Description of Artificial Sequence: Synthetic oligonucleotide
  modified_base (10)..(10): a, c, u, g, unknown or other
auuugggguncugggaucg

SEQ ID NO: 2798032 - RNA, 19 nt, Artificial Sequence
  Description of Artificial Sequence: Synthetic oligonucleotide
uuucaggauggugauauug

SEQ ID NO: 2798033 - RNA, 19 nt, Artificial Sequence
  Description of Artificial Sequence: Synthetic oligonucleotide
cuucuuucggcccacggag

SEQ ID NO: 2798034 - RNA, 19 nt, Artificial Sequence
  Description of Artificial Sequence: Synthetic oligonucleotide
uugccggugaacaugcuga

SEQ ID NO: 2798035 - RNA, 19 nt, Artificial Sequence
  Description of Artificial Sequence: Synthetic oligonucleotide
  modified_base (12)..(12): a, c, u, g, unknown or other
ugauuugggguncugggau

SEQ ID NO: 2798036 - RNA, 19 nt, Artificial Sequence
  Description of Artificial Sequence: Synthetic oligonucleotide
acguugauagcagaagaac

SEQ ID NO: 2798037 - RNA, 19 nt, Artificial Sequence
  Description of Artificial Sequence: Synthetic oligonucleotide
uaccauauuuccccuggag

SEQ ID NO: 2798038 - RNA, 19 nt, Artificial Sequence
  Description of Artificial Sequence: Synthetic oligonucleotide
uggugauauugauuugggg

SEQ ID NO: 2798039 - RNA, 19 nt, Artificial Sequence
  Description of Artificial Sequence: Synthetic oligonucleotide
cucgucgcugaaaauaggc

SEQ ID NO: 2798040 - RNA, 19 nt, Artificial Sequence
  Description of Artificial Sequence: Synthetic oligonucleotide
cuccccuugaaagagacgc

SEQ ID NO: 2798041 - RNA, 19 nt, Artificial Sequence
  Description of Artificial Sequence: Synthetic oligonucleotide
uucucaccuuucaggaugg

SEQ ID NO: 2798042 - RNA, 19 nt, Artificial Sequence
  Description of Artificial Sequence: Synthetic oligonucleotide
aacucgucgcugaaaauag

SEQ ID NO: 2798043 - RNA, 19 nt, Artificial Sequence
  Description of Artificial Sequence: Synthetic oligonucleotide
gauagcagaagaacuugcc

SEQ ID NO: 2798044 - RNA, 19 nt, Artificial Sequence
  Description of Artificial Sequence: Synthetic oligonucleotide
aaauaggcguucucucucu

SEQ ID NO: 2798045 - RNA, 19 nt, Artificial Sequence
  Description of Artificial Sequence: Synthetic oligonucleotide
uuucggcccacggagaagg

SEQ ID NO: 2798046 - RNA, 19 nt, Artificial Sequence
  Description of Artificial Sequence: Synthetic oligonucleotide
ugacucugcaugaugcuac

SEQ ID NO: 2798047 - RNA, 19 nt, Artificial Sequence
  Description of Artificial Sequence: Synthetic oligonucleotide
uugauagcagaagaacuug

SEQ ID NO: 2798048 - RNA, 19 nt, Artificial Sequence
  Description of Artificial Sequence: Synthetic oligonucleotide
gagguucacaaacugcgug

SEQ ID NO: 2798049 - RNA, 19 nt, Artificial Sequence
  Description of Artificial Sequence: Synthetic oligonucleotide
aauaggcguucucucucuc

SEQ ID NO: 2798050 - RNA, 19 nt, Artificial Sequence
  Description of Artificial Sequence: Synthetic oligonucleotide
acgggcuggaaguagucac

SEQ ID NO: 2798051 - RNA, 19 nt, Artificial Sequence
  Description of Artificial Sequence: Synthetic oligonucleotide
aaguagucacugcugugca

SEQ ID NO: 2798052 - RNA, 19 nt, Artificial Sequence
  Description of Artificial Sequence: Synthetic oligonucleotide
cuuuggggccaauauggcc

SEQ ID NO: 2798053 - RNA, 19 nt, Artificial Sequence
  Description of Artificial Sequence: Synthetic oligonucleotide
aacugcgugucaaagacaa

SEQ ID NO: 2798054 - RNA, 19 nt, Artificial Sequence
  Description of Artificial Sequence: Synthetic oligonucleotide
ucugcaugaugcuacgguc

SEQ ID NO: 2798055 - RNA, 19 nt, Artificial Sequence
  Description of Artificial Sequence: Synthetic oligonucleotide
ucgucugguacacgaggcg

SEQ ID NO: 2798056 - RNA, 19 nt, Artificial Sequence
  Description of Artificial Sequence: Synthetic oligonucleotide
ugcaugaugcuacggucgc

SEQ ID NO: 2798057 - RNA, 19 nt, Artificial Sequence
  Description of Artificial Sequence: Synthetic oligonucleotide
acaaacugcgugucaaaga

SEQ ID NO: 2798058 - RNA, 19 nt, Artificial Sequence
  Description of Artificial Sequence: Synthetic oligonucleotide
  modified_base (19)..(19): a, c, u, g, unknown or other
gugauauugauuuggggun

SEQ ID NO: 2798059 - RNA, 19 nt, Artificial Sequence
  Description of Artificial Sequence: Synthetic oligonucleotide
ggugauauugauuuggggu

SEQ ID NO: 2798060 - RNA, 19 nt, Artificial Sequence
  Description of Artificial Sequence: Synthetic oligonucleotide
uguggaaccuguuuaccau

SEQ ID NO: 2798061 - RNA, 19 nt, Artificial Sequence
  Description of Artificial Sequence: Synthetic oligonucleotide
ucugguuccaagugugcac

SEQ ID NO: 2798062 - RNA, 19 nt, Artificial Sequence
  Description of Artificial Sequence: Synthetic oligonucleotide
uccaggagcucccauggac

SEQ ID NO: 2798063 - RNA, 19 nt, Artificial Sequence
  Description of Artificial Sequence: Synthetic oligonucleotide
ugaaagagacgcacccaca

SEQ ID NO: 2798064 - RNA, 19 nt, Artificial Sequence
  Description of Artificial Sequence: Synthetic oligonucleotide
ugcacguugauagcagaag

SEQ ID NO: 2798065 - RNA, 19 nt, Artificial Sequence
  Description of Artificial Sequence: Synthetic oligonucleotide
ugcguacaggaucaccacc

SEQ ID NO: 2798066 - RNA, 19 nt, Artificial Sequence
  Description of Artificial Sequence: Synthetic oligonucleotide
agguucacaaacugcgugu

SEQ ID NO: 2798067 - RNA, 19 nt, Artificial Sequence
  Description of Artificial Sequence: Synthetic oligonucleotide
  modified_base (18)..(18): a, c, u, g, unknown or other
ugauauugauuuggggunc

SEQ ID NO: 2798068 - RNA, 19 nt, Artificial Sequence
  Description of Artificial Sequence: Synthetic oligonucleotide
aucgucugguacacgaggc

SEQ ID NO: 2798069 - RNA, 19 nt, Artificial Sequence
  Description of Artificial Sequence: Synthetic oligonucleotide
  modified_base (7)..(7): a, c, u, g, unknown or other
ugggguncugggaucgucu

SEQ ID NO: 2798070 - RNA, 19 nt, Artificial Sequence
  Description of Artificial Sequence: Synthetic oligonucleotide
caauauggccccuggcacc

SEQ ID NO: 2798071 - RNA, 19 nt, Artificial Sequence
  Description of Artificial Sequence: Synthetic oligonucleotide
cccuuuggggccaauaugg

SEQ ID NO: 2798072 - RNA, 19 nt, Artificial Sequence
  Description of Artificial Sequence: Synthetic oligonucleotide
uucacaaacugcgugucaa

SEQ ID NO: 2798073 - RNA, 19 nt, Artificial Sequence
  Description of Artificial Sequence: Synthetic oligonucleotide
gaugcuacggucgcucacc

SEQ ID NO: 2798074 - RNA, 19 nt, Artificial Sequence
  Description of Artificial Sequence: Synthetic oligonucleotide
uuccaagugugcacguuga

SEQ ID NO: 2798075 - RNA, 19 nt, Artificial Sequence
  Description of Artificial Sequence: Synthetic oligonucleotide
gaaaauaggcguucucucu

SEQ ID NO: 2798076 - RNA, 19 nt, Artificial Sequence
  Description of Artificial Sequence: Synthetic oligonucleotide
uacgucuccuucugguucc

SEQ ID NO: 2798077 - RNA, 19 nt, Artificial Sequence
  Description of Artificial Sequence: Synthetic oligonucleotide
gacucugcaugaugcuacg

SEQ ID NO: 2798078 - RNA, 19 nt, Artificial Sequence
  Description of Artificial Sequence: Synthetic oligonucleotide
acgcacccacaccucaucc

SEQ ID NO: 2798079 - RNA, 19 nt, Artificial Sequence
  Description of Artificial Sequence: Synthetic oligonucleotide
  modified_base (2)..(2): a, c, u, g, unknown or other
uncugggaucgucugguac

SEQ ID NO: 2798080 - RNA, 19 nt, Artificial Sequence
  Description of Artificial Sequence: Synthetic oligonucleotide
auggugauauugauuuggg

SEQ ID NO: 2798081 - RNA, 19 nt, Artificial Sequence
  Description of Artificial Sequence: Synthetic oligonucleotide
guuuauagagguucacaaa

SEQ ID NO: 2798082 - RNA, 19 nt, Artificial Sequence
  Description of Artificial Sequence: Synthetic oligonucleotide
ugcagcggucuccaggagc

SEQ ID NO: 2798083 - RNA, 19 nt, Artificial Sequence
  Description of Artificial Sequence: Synthetic oligonucleotide
cauauuuccccuggaggcc

SEQ ID NO: 2798084 - RNA, 19 nt, Artificial Sequence
  Description of Artificial Sequence: Synthetic oligonucleotide
gaggccucgauccccucgg

SEQ ID NO: 2798085 - RNA, 19 nt, Artificial Sequence
  Description of Artificial Sequence: Synthetic oligonucleotide
gaacuugccggugaacaug

SEQ ID NO: 2798086 - RNA, 19 nt, Artificial Sequence
  Description of Artificial Sequence: Synthetic oligonucleotide
cuggaaguagucacugcug

SEQ ID NO: 2798087 - RNA, 19 nt, Artificial Sequence
  Description of Artificial Sequence: Synthetic oligonucleotide
cacggagaaggcugcauag

SEQ ID NO: 2798088 - RNA, 19 nt, Artificial Sequence
  Description of Artificial Sequence: Synthetic oligonucleotide
cugguuccaagugugcacg

SEQ ID NO: 2798089 - RNA, 19 nt, Artificial Sequence
  Description of Artificial Sequence: Synthetic oligonucleotide
aaguguuuauagagguuca

SEQ ID NO: 2798090 - RNA, 19 nt, Artificial Sequence
  Description of Artificial Sequence: Synthetic oligonucleotide
ugugcacguugauagcaga

SEQ ID NO: 2798091 - RNA, 19 nt, Artificial Sequence
  Description of Artificial Sequence: Synthetic oligonucleotide
ccuguuuaccauauuuccc

SEQ ID NO: 2798092 - RNA, 19 nt, Artificial Sequence
  Description of Artificial Sequence: Synthetic oligonucleotide
aggcguucucucucucucc

SEQ ID NO: 2798093 - RNA, 19 nt, Artificial Sequence
  Description of Artificial Sequence: Synthetic oligonucleotide
uucucucucucuccccuug

SEQ ID NO: 2798094 - RNA, 19 nt, Artificial Sequence
  Description of Artificial Sequence: Synthetic oligonucleotide
aguagucacugcugugcag

SEQ ID NO: 2798095 - RNA, 19 nt, Artificial Sequence
  Description of Artificial Sequence: Synthetic oligonucleotide
uuaccauauuuccccugga

SEQ ID NO: 2798096 - RNA, 19 nt, Artificial Sequence
  Description of Artificial Sequence: Synthetic oligonucleotide
uaggcguucucucucucuc

SEQ ID NO: 2798097 - RNA, 19 nt, Artificial Sequence
  Description of Artificial Sequence: Synthetic oligonucleotide
agugugcacguugauagca

SEQ ID NO: 2798098 - RNA, 19 nt, Artificial Sequence
  Description of Artificial Sequence: Synthetic oligonucleotide
ucuccccuugaaagagacg

SEQ ID NO: 2798099 - RNA, 19 nt, Artificial Sequence
  Description of Artificial Sequence: Synthetic oligonucleotide
ugcagguacgucuccuucu

SEQ ID NO: 2798100 - RNA, 19 nt, Artificial Sequence
  Description of Artificial Sequence: Synthetic oligonucleotide
ucuuucggcccacggagaa

SEQ ID NO: 2798101 - RNA, 19 nt, Artificial Sequence
  Description of Artificial Sequence: Synthetic oligonucleotide
uggaaccuguuuaccauau

SEQ ID NO: 2798102 - RNA, 19 nt, Artificial Sequence
  Description of Artificial Sequence: Synthetic oligonucleotide
agguacgucuccuucuggu

SEQ ID NO: 2798103 - RNA, 19 nt, Artificial Sequence
  Description of Artificial Sequence: Synthetic oligonucleotide
uucugguuccaagugugca

SEQ ID NO: 2798104 - RNA, 19 nt, Artificial Sequence
  Description of Artificial Sequence: Synthetic oligonucleotide
guuuaccauauuuccccug

SEQ ID NO: 2798105 - RNA, 19 nt, Artificial Sequence
  Description of Artificial Sequence: Synthetic oligonucleotide
guacaggaucaccaccucc

SEQ ID NO: 2798106 - RNA, 19 nt, Artificial Sequence
  Description of Artificial Sequence: Synthetic oligonucleotide
cacaaacugcgugucaaag

SEQ ID NO: 2798107 - RNA, 19 nt, Artificial Sequence
  Description of Artificial Sequence: Synthetic oligonucleotide
ccuugaaagagacgcaccc

SEQ ID NO: 2798108 - RNA, 19 nt, Artificial Sequence
  Description of Artificial Sequence: Synthetic oligonucleotide
ugguacacgaggcgugcug

SEQ ID NO: 2798109 - RNA, 19 nt, Artificial Sequence
  Description of Artificial Sequence: Synthetic oligonucleotide
  modified_base (11)..(11): a, c, u, g, unknown or other
gauuugggguncugggauc

SEQ ID NO: 2798110 - RNA, 19 nt, Artificial Sequence
  Description of Artificial Sequence: Synthetic oligonucleotide
gaaccuguuuaccauauuu

SEQ ID NO: 2798111 - RNA, 19 nt, Artificial Sequence
  Description of Artificial Sequence: Synthetic oligonucleotide
gaacucgucgcugaaaaua

SEQ ID NO: 2798112 - RNA, 19 nt, Artificial Sequence
  Description of Artificial Sequence: Synthetic oligonucleotide
cuugccggugaacaugcug

SEQ ID NO: 2798113 - RNA, 19 nt, Artificial Sequence
  Description of Artificial Sequence: Synthetic oligonucleotide
cucuccccuugaaagagac

SEQ ID NO: 2798114 - RNA, 19 nt, Artificial Sequence
  Description of Artificial Sequence: Synthetic oligonucleotide
cucaccugugcguacagga

SEQ ID NO: 2798115 - RNA, 19 nt, Artificial Sequence
  Description of Artificial Sequence: Synthetic oligonucleotide
acggucgcucaccugugcg

SEQ ID NO: 2798116 - RNA, 19 nt, Artificial Sequence
  Description of Artificial Sequence: Synthetic oligonucleotide
gaccccuucugcccuuugg

SEQ ID NO: 2798117 - RNA, 19 nt, Artificial Sequence
  Description of Artificial Sequence: Synthetic oligonucleotide
cgugucaaagacaacgggc

SEQ ID NO: 2798118 - RNA, 19 nt, Artificial Sequence
  Description of Artificial Sequence: Synthetic oligonucleotide
agaacuugccggugaacau

SEQ ID NO: 2798119 - RNA, 19 nt, Artificial Sequence
  Description of Artificial Sequence: Synthetic oligonucleotide
agaagaacuugccggugaa

SEQ ID NO: 2798120 - RNA, 19 nt, Artificial Sequence
  Description of Artificial Sequence: Synthetic oligonucleotide
  modified_base (16)..(16): a, c, u, g, unknown or other
auauugauuugggguncug

SEQ ID NO: 2798121 - RNA, 19 nt, Artificial Sequence
  Description of Artificial Sequence: Synthetic oligonucleotide
cugugcagaggcuucuuuc

SEQ ID NO: 2798122 - RNA, 19 nt, Artificial Sequence
  Description of Artificial Sequence: Synthetic oligonucleotide
gugcagaggcuucuuucgg

SEQ ID NO: 2798123 - RNA, 19 nt, Artificial Sequence
  Description of Artificial Sequence: Synthetic oligonucleotide
ggagaaggcugcauagugg

SEQ ID NO: 2798124 - RNA, 19 nt, Artificial Sequence
  Description of Artificial Sequence: Synthetic oligonucleotide
cucucuccccuugaaagag

SEQ ID NO: 2798125 - RNA, 19 nt, Artificial Sequence
  Description of Artificial Sequence: Synthetic oligonucleotide
agaggcuucuuucggccca

SEQ ID NO: 2798126 - RNA, 19 nt, Artificial Sequence
  Description of Artificial Sequence: Synthetic oligonucleotide
gacaacgggcuggaaguag

SEQ ID NO: 2798127 - RNA, 19 nt, Artificial Sequence
  Description of Artificial Sequence: Synthetic oligonucleotide
ugaugcuacggucgcucac

SEQ ID NO: 2798128 - RNA, 19 nt, Artificial Sequence
  Description of Artificial Sequence: Synthetic oligonucleotide
guacgucuccuucugguuc

SEQ ID NO: 2798129 - RNA, 19 nt, Artificial Sequence
  Description of Artificial Sequence: Synthetic oligonucleotide
caugaugcuacggucgcuc

SEQ ID NO: 2798130 - RNA, 19 nt, Artificial Sequence
  Description of Artificial Sequence: Synthetic oligonucleotide
gcauaguggcuuuugcagc

SEQ ID NO: 2798131 - RNA, 19 nt, Artificial Sequence
  Description of Artificial Sequence: Synthetic oligonucleotide
uucuuucggcccacggaga

SEQ ID NO: 2798132 - RNA, 19 nt, Artificial Sequence
  Description of Artificial Sequence: Synthetic oligonucleotide
guguuuauagagguucaca

SEQ ID NO: 2798133 - RNA, 19 nt, Artificial Sequence
  Description of Artificial Sequence: Synthetic oligonucleotide
gucuccaggagcucccaug

SEQ ID NO: 2798134 - RNA, 19 nt, Artificial Sequence
  Description of Artificial Sequence: Synthetic oligonucleotide
ucaccugugcguacaggau

SEQ ID NO: 2798135 - RNA, 19 nt, Artificial Sequence
  Description of Artificial Sequence: Synthetic oligonucleotide
ucacaaacugcgugucaaa

SEQ ID NO: 2798136 - RNA, 19 nt, Artificial Sequence
  Description of Artificial Sequence: Synthetic oligonucleotide
aaggcugcauaguggcuuu

SEQ ID NO: 2798137 - RNA, 19 nt, Artificial Sequence
  Description of Artificial Sequence: Synthetic oligonucleotide
uccccuugaaagagacgca

SEQ ID NO: 2798138 - RNA, 19 nt, Artificial Sequence
  Description of Artificial Sequence: Synthetic oligonucleotide
aacgggcuggaaguaguca

SEQ ID NO: 2798139 - RNA, 19 nt, Artificial Sequence
  Description of Artificial Sequence: Synthetic oligonucleotide
uuggggccaauauggcccc

SEQ ID NO: 2798140 - RNA, 19 nt, Artificial Sequence
  Description of Artificial Sequence: Synthetic oligonucleotide
ucucuccccuugaaagaga

SEQ ID NO: 2798141 - RNA, 19 nt, Artificial Sequence
  Description of Artificial Sequence: Synthetic oligonucleotide
ucaugaugugcagguacgu

SEQ ID NO: 2798142 - RNA, 19 nt, Artificial Sequence
  Description of Artificial Sequence: Synthetic oligonucleotide
cugcauaguggcuuuugca

SEQ ID NO: 2798143 - RNA, 19 nt, Artificial Sequence
  Description of Artificial Sequence: Synthetic oligonucleotide
aaacugcgugucaaagaca

SEQ ID NO: 2798144 - RNA, 19 nt, Artificial Sequence
  Description of Artificial Sequence: Synthetic oligonucleotide
auauuuccccuggaggccu

SEQ ID NO: 2798145 - RNA, 19 nt, Artificial Sequence
  Description of Artificial Sequence: Synthetic oligonucleotide
acacgaggcgugcugggcu

SEQ ID NO: 2798146 - RNA, 19 nt, Artificial Sequence
  Description of Artificial Sequence: Synthetic oligonucleotide
aggcgugcugggcucacag

SEQ ID NO: 2798147 - RNA, 19 nt, Artificial Sequence
  Description of Artificial Sequence: Synthetic oligonucleotide
cacguugauagcagaagaa

SEQ ID NO: 2798148 - RNA, 19 nt, Artificial Sequence
  Description of Artificial Sequence: Synthetic oligonucleotide
gccaauauggccccuggca

SEQ ID NO: 2798149 - RNA, 19 nt, Artificial Sequence
  Description of Artificial Sequence: Synthetic oligonucleotide
caccugugcguacaggauc

SEQ ID NO: 2798150 - RNA, 19 nt, Artificial Sequence
  Description of Artificial Sequence: Synthetic oligonucleotide
auaguggcuuuugcagcgg

SEQ ID NO: 2798151 - RNA, 19 nt, Artificial Sequence
  Description of Artificial Sequence: Synthetic oligonucleotide
gaacaugcugaaguguuua

SEQ ID NO: 2798152 - RNA, 19 nt, Artificial Sequence
  Description of Artificial Sequence: Synthetic oligonucleotide
ucucucucucuccccuuga

SEQ ID NO: 2798153 - RNA, 19 nt, Artificial Sequence
  Description of Artificial Sequence: Synthetic oligonucleotide
gcgugucaaagacaacggg

SEQ ID NO: 2798154 - RNA, 19 nt, Artificial Sequence
  Description of Artificial Sequence: Synthetic oligonucleotide
gguacacgaggcgugcugg

SEQ ID NO: 2798155 - RNA, 19 nt, Artificial Sequence
  Description of Artificial Sequence: Synthetic oligonucleotide
cugaaaauaggcguucucu

SEQ ID NO: 2798156 - RNA, 19 nt, Artificial Sequence
  Description of Artificial Sequence: Synthetic oligonucleotide
caugaugugcagguacguc

SEQ ID NO: 2798157 - RNA, 19 nt, Artificial Sequence
  Description of Artificial Sequence: Synthetic oligonucleotide
cucaccuuucaggauggug

SEQ ID NO: 2798158 - RNA, 19 nt, Artificial Sequence
  Description of Artificial Sequence: Synthetic oligonucleotide
uacggucgcucaccugugc

SEQ ID NO: 2798159 - RNA, 19 nt, Artificial Sequence
  Description of Artificial Sequence: Synthetic oligonucleotide
uaguggcuuuugcagcggu

SEQ ID NO: 2798160 - RNA, 19 nt, Artificial Sequence
  Description of Artificial Sequence: Synthetic oligonucleotide
ggaaguagucacugcugug

SEQ ID NO: 2798161 - RNA, 19 nt, Artificial Sequence
  Description of Artificial Sequence: Synthetic oligonucleotide
ccacaccucauccugcucc

SEQ ID NO: 2798162 - RNA, 19 nt, Artificial Sequence
  Description of Artificial Sequence: Synthetic oligonucleotide
cagaagaacuugccgguga

SEQ ID NO: 2798163 - RNA, 19 nt, Artificial Sequence
  Description of Artificial Sequence: Synthetic oligonucleotide
gaagaacuugccggugaac

SEQ ID NO: 2798164 - RNA, 19 nt, Artificial Sequence
  Description of Artificial Sequence: Synthetic oligonucleotide
gggaucgucugguacacga

SEQ ID NO: 2798165 - RNA, 19 nt, Artificial Sequence
  Description of Artificial Sequence: Synthetic oligonucleotide
guugauagcagaagaacuu

SEQ ID NO: 2798166 - RNA, 19 nt, Artificial Sequence
  Description of Artificial Sequence: Synthetic oligonucleotide
gcugcauaguggcuuuugc

SEQ ID NO: 2798167 - RNA, 19 nt, Artificial Sequence
  Description of Artificial Sequence: Synthetic oligonucleotide
accugugcguacaggauca

SEQ ID NO: 2798168 - RNA, 19 nt, Artificial Sequence
  Description of Artificial Sequence: Synthetic oligonucleotide
ccuuucucaccuuucagga

SEQ ID NO: 2798169 - RNA, 19 nt, Artificial Sequence
  Description of Artificial Sequence: Synthetic oligonucleotide
augaugcuacggucgcuca

SEQ ID NO: 2798170 - RNA, 19 nt, Artificial Sequence
  Description of Artificial Sequence: Synthetic oligonucleotide
uacacgaggcgugcugggc

SEQ ID NO: 2798171 - RNA, 19 nt, Artificial Sequence
  Description of Artificial Sequence: Synthetic oligonucleotide
acucugcaugaugcuacgg

SEQ ID NO: 2798172 - RNA, 19 nt, Artificial Sequence
  Description of Artificial Sequence: Synthetic oligonucleotide
gugugcacguugauagcag

SEQ ID NO: 2798173 - RNA, 19 nt, Artificial Sequence
  Description of Artificial Sequence: Synthetic oligonucleotide
uccaagugugcacguugau

SEQ ID NO: 2798174 - RNA, 19 nt, Artificial Sequence
  Description of Artificial Sequence: Synthetic oligonucleotide
ccaggagcucccauggacc

SEQ ID NO: 2798175 - RNA, 19 nt, Artificial Sequence
  Description of Artificial Sequence: Synthetic oligonucleotide
gcacguugauagcagaaga

SEQ ID NO: 2798176 - RNA, 19 nt, Artificial Sequence
  Description of Artificial Sequence: Synthetic oligonucleotide
gugcguacaggaucaccac

SEQ ID NO: 2798177 - RNA, 19 nt, Artificial Sequence
  Description of Artificial Sequence: Synthetic oligonucleotide
cucccauggaccccuucug

SEQ ID NO: 2798178 - RNA, 19 nt, Artificial Sequence
  Description of Artificial Sequence: Synthetic oligonucleotide
acucgucgcugaaaauagg

SEQ ID NO: 2798179 - RNA, 19 nt, Artificial Sequence
  Description of Artificial Sequence: Synthetic oligonucleotide
aggagcucccauggacccc

SEQ ID NO: 2798180 - RNA, 19 nt, Artificial Sequence
  Description of Artificial Sequence: Synthetic oligonucleotide
  modified_base (5)..(5): a, c, u, g, unknown or other
ggguncugggaucgucugg

SEQ ID NO: 2798181 - RNA, 19 nt, Artificial Sequence
  Description of Artificial Sequence: Synthetic oligonucleotide
cacccacaccucauccugc

SEQ ID NO: 2798182 - RNA, 19 nt, Artificial Sequence
  Description of Artificial Sequence: Synthetic oligonucleotide
acccacaccucauccugcu

SEQ ID NO: 2798183 - RNA, 19 nt, Artificial Sequence
  Description of Artificial Sequence: Synthetic oligonucleotide
agagguucacaaacugcgu

SEQ ID NO: 2798184 - RNA, 19 nt, Artificial Sequence
  Description of Artificial Sequence: Synthetic oligonucleotide
acaacgggcuggaaguagu

SEQ ID NO: 2798185 - RNA, 19 nt, Artificial Sequence
  Description of Artificial Sequence: Synthetic oligonucleotide
ucgcugaaaauaggcguuc

SEQ ID NO: 2798186 - RNA, 19 nt, Artificial Sequence
  Description of Artificial Sequence: Synthetic oligonucleotide
cagguacgucuccuucugg

SEQ ID NO: 2798187 - RNA, 19 nt, Artificial Sequence
  Description of Artificial Sequence: Synthetic oligonucleotide
agagacgcacccacaccuc

SEQ ID NO: 2798188 - RNA, 19 nt, Artificial Sequence
  Description of Artificial Sequence: Synthetic oligonucleotide
gacgcacccacaccucauc

SEQ ID NO: 2798189 - RNA, 19 nt, Artificial Sequence
  Description of Artificial Sequence: Synthetic oligonucleotide
acaugcugaaguguuuaua

SEQ ID NO: 2798190 - RNA, 19 nt, Artificial Sequence
  Description of Artificial Sequence: Synthetic oligonucleotide
ggcguucucucucucuccc

SEQ ID NO: 2798191 - RNA, 19 nt, Artificial Sequence
  Description of Artificial Sequence: Synthetic oligonucleotide
cccuucugcccuuuggggc

SEQ ID NO: 2798192 - RNA, 19 nt, Artificial Sequence
  Description of Artificial Sequence: Synthetic oligonucleotide
ggauggugauauugauuug

SEQ ID NO: 2798193 - RNA, 19 nt, Artificial Sequence
  Description of Artificial Sequence: Synthetic oligonucleotide
gucugguacacgaggcgug

SEQ ID NO: 2798194 - RNA, 19 nt, Artificial Sequence
  Description of Artificial Sequence: Synthetic oligonucleotide
cugugcguacaggaucacc

SEQ ID NO: 2798195 - RNA, 19 nt, Artificial Sequence
  Description of Artificial Sequence: Synthetic oligonucleotide
ugguuccaagugugcacgu

SEQ ID NO: 2798196 - RNA, 19 nt, Artificial Sequence
  Description of Artificial Sequence: Synthetic oligonucleotide
ggaggccucgauccccucg

SEQ ID NO: 2798197 - RNA, 19 nt, Artificial Sequence
  Description of Artificial Sequence: Synthetic oligonucleotide
gcagguacgucuccuucug

SEQ ID NO: 2798198 - RNA, 19 nt, Artificial Sequence
  Description of Artificial Sequence: Synthetic oligonucleotide
ggcuucuuucggcccacgg

SEQ ID NO: 2798199 - RNA, 19 nt, Artificial Sequence
  Description of Artificial Sequence: Synthetic oligonucleotide
uugcagcggucuccaggag

SEQ ID NO: 2798200 - RNA, 19 nt, Artificial Sequence
  Description of Artificial Sequence: Synthetic oligonucleotide
gcuacggucgcucaccugu

SEQ ID NO: 2798201 - RNA, 19 nt, Artificial Sequence
  Description of Artificial Sequence: Synthetic oligonucleotide
ccauggaccccuucugccc

SEQ ID NO: 2798202 - RNA, 19 nt, Artificial Sequence
  Description of Artificial Sequence: Synthetic oligonucleotide
gcuggaaguagucacugcu

SEQ ID NO: 2798203 - RNA, 19 nt, Artificial Sequence
  Description of Artificial Sequence: Synthetic oligonucleotide
caacgggcuggaaguaguc

SEQ ID NO: 2798204 - RNA, 19 nt, Artificial Sequence
  Description of Artificial Sequence: Synthetic oligonucleotide
ccccuggaggccucgaucc

SEQ ID NO: 2798205 - RNA, 19 nt, Artificial Sequence
  Description of Artificial Sequence: Synthetic oligonucleotide
acugcgugucaaagacaac

SEQ ID NO: 2798206 - RNA, 19 nt, Artificial Sequence
  Description of Artificial Sequence: Synthetic oligonucleotide
gugcagguacgucuccuuc

SEQ ID NO: 2798207 - RNA, 19 nt, Artificial Sequence
  Description of Artificial Sequence: Synthetic oligonucleotide
augcuacggucgcucaccu

SEQ ID NO: 2798208 - RNA, 19 nt, Artificial Sequence
  Description of Artificial Sequence: Synthetic oligonucleotide
cccuugaaagagacgcacc

SEQ ID NO: 2798209 - RNA, 19 nt, Artificial Sequence
  Description of Artificial Sequence: Synthetic oligonucleotide
ugccggugaacaugcugaa

SEQ ID NO: 2798210 - RNA, 19 nt, Artificial Sequence
  Description of Artificial Sequence: Synthetic oligonucleotide
  modified_base (17)..(17): a, c, u, g, unknown or other
gauauugauuugggguncu

SEQ ID NO: 2798211 - RNA, 19 nt, Artificial Sequence
  Description of Artificial Sequence: Synthetic oligonucleotide
cuacggucgcucaccugug

SEQ ID NO: 2798212 - RNA, 19 nt, Artificial Sequence
  Description of Artificial Sequence: Synthetic oligonucleotide
cucugcaugaugcuacggu

SEQ ID NO: 2798213 - RNA, 19 nt, Artificial Sequence
  Description of Artificial Sequence: Synthetic oligonucleotide
auccccucggucaccuuuc

SEQ ID NO: 2798214 - RNA, 19 nt, Artificial Sequence
  Description of Artificial Sequence: Synthetic oligonucleotide
gcuucuuucggcccacgga

SEQ ID NO: 2798215 - RNA, 19 nt, Artificial Sequence
  Description of Artificial Sequence: Synthetic oligonucleotide
gcugaaaauaggcguucuc

SEQ ID NO: 2798216 - RNA, 19 nt, Artificial Sequence
  Description of Artificial Sequence: Synthetic oligonucleotide
cccauggaccccuucugcc

SEQ ID NO: 2798217 - RNA, 19 nt, Artificial Sequence
  Description of Artificial Sequence: Synthetic oligonucleotide
acggagaaggcugcauagu

SEQ ID NO: 2798218 - RNA, 19 nt, Artificial Sequence
  Description of Artificial Sequence: Synthetic oligonucleotide
cuuuugcagcggucuccag

SEQ ID NO: 2798219 - RNA, 19 nt, Artificial Sequence
  Description of Artificial Sequence: Synthetic oligonucleotide
gccucgauccccucgguca

SEQ ID NO: 2798220 - RNA, 19 nt, Artificial Sequence
  Description of Artificial Sequence: Synthetic oligonucleotide
ccuuuggggccaauauggc

SEQ ID NO: 2798221 - RNA, 19 nt, Artificial Sequence
  Description of Artificial Sequence: Synthetic oligonucleotide
ugggaucgucugguacacg

SEQ ID NO: 2798222 - RNA, 19 nt, Artificial Sequence
  Description of Artificial Sequence: Synthetic oligonucleotide
uucggcccacggagaaggc

SEQ ID NO: 2798223 - RNA, 19 nt, Artificial Sequence
  Description of Artificial Sequence: Synthetic oligonucleotide
caccuguggaaccuguuua

SEQ ID NO: 2798224 - RNA, 19 nt, Artificial Sequence
  Description of Artificial Sequence: Synthetic oligonucleotide
guggaaccuguuuaccaua

SEQ ID NO: 2798225 - RNA, 19 nt, Artificial Sequence
  Description of Artificial Sequence: Synthetic oligonucleotide
auuuccccuggaggccucg

SEQ ID NO: 2798226 - RNA, 19 nt, Artificial Sequence
  Description of Artificial Sequence: Synthetic oligonucleotide
ucgauccccucggucaccu

SEQ ID NO: 2798227 - RNA, 19 nt, Artificial Sequence
  Description of Artificial Sequence: Synthetic oligonucleotide
gggccaauauggccccugg

SEQ ID NO: 2798228 - RNA, 19 nt, Artificial Sequence
  Description of Artificial Sequence: Synthetic oligonucleotide
cuuucggcccacggagaag

SEQ ID NO: 2798229 - RNA, 19 nt, Artificial Sequence
  Description of Artificial Sequence: Synthetic oligonucleotide
ugcuacggucgcucaccug

SEQ ID NO: 2798230 - RNA, 19 nt, Artificial Sequence
  Description of Artificial Sequence: Synthetic oligonucleotide
  modified_base (8)..(8): a, c, u, g, unknown or other
uugggguncugggaucguc

SEQ ID NO: 2798231 - RNA, 19 nt, Artificial Sequence
  Description of Artificial Sequence: Synthetic oligonucleotide
gugcugggcucacagcauc

SEQ ID NO: 2798232 - RNA, 19 nt, Artificial Sequence
  Description of Artificial Sequence: Synthetic oligonucleotide
  modified_base (6)..(6): a, c, u, g, unknown or other
gggguncugggaucgucug

SEQ ID NO: 2798233 - RNA, 19 nt, Artificial Sequence
  Description of Artificial Sequence: Synthetic oligonucleotide
gcccuuuggggccaauaug

SEQ ID NO: 2798234 - RNA, 19 nt, Artificial Sequence
  Description of Artificial Sequence: Synthetic oligonucleotide
gugaacaugcugaaguguu

SEQ ID NO: 2798235 - RNA, 19 nt, Artificial Sequence
  Description of Artificial Sequence: Synthetic oligonucleotide
  modified_base (9)..(9): a, c, u, g, unknown or other
uuugggguncugggaucgu

SEQ ID NO: 2798236 - RNA, 19 nt, Artificial Sequence
  Description of Artificial Sequence: Synthetic oligonucleotide
cacgaggcgugcugggcuc

SEQ ID NO: 2798237 - RNA, 19 nt, Artificial Sequence
  Description of Artificial Sequence: Synthetic oligonucleotide
ggaucgucugguacacgag

SEQ ID NO: 2798238 - RNA, 19 nt, Artificial Sequence
  Description of Artificial Sequence: Synthetic oligonucleotide
  modified_base (4)..(4): a, c, u, g, unknown or other
gguncugggaucgucuggu

SEQ ID NO: 2798239 - RNA, 19 nt, Artificial Sequence
  Description of Artificial Sequence: Synthetic oligonucleotide
ucggcccacggagaaggcu

SEQ ID NO: 2798240 - RNA, 19 nt, Artificial Sequence
  Description of Artificial Sequence: Synthetic oligonucleotide
agaaggcugcauaguggcu

SEQ ID NO: 2798241 - RNA, 19 nt, Artificial Sequence
  Description of Artificial Sequence: Synthetic oligonucleotide
uuccccuggaggccucgau

SEQ ID NO: 2798242 - RNA, 19 nt, Artificial Sequence
  Description of Artificial Sequence: Synthetic oligonucleotide
cggagaaggcugcauagug

SEQ ID NO: 2798243 - RNA, 19 nt, Artificial Sequence
  Description of Artificial Sequence: Synthetic oligonucleotide
uccccucggucaccuuucu

SEQ ID NO: 2798244 - RNA, 19 nt, Artificial Sequence
  Description of Artificial Sequence: Synthetic oligonucleotide
ggccaauauggccccuggc

SEQ ID NO: 2798245 - RNA, 19 nt, Artificial Sequence
  Description of Artificial Sequence: Synthetic oligonucleotide
gucgcucaccugugcguac

SEQ ID NO: 2798246 - RNA, 19 nt, Artificial Sequence
  Description of Artificial Sequence: Synthetic oligonucleotide
gaggcuucuuucggcccac

SEQ ID NO: 2798247 - RNA, 19 nt, Artificial Sequence
  Description of Artificial Sequence: Synthetic oligonucleotide
gugcacguugauagcagaa

SEQ ID NO: 2798248 - RNA, 19 nt, Artificial Sequence
  Description of Artificial Sequence: Synthetic oligonucleotide
ccccuugaaagagacgcac

SEQ ID NO: 2798249 - RNA, 19 nt, Artificial Sequence
  Description of Artificial Sequence: Synthetic oligonucleotide
gcagaagaacuugccggug

SEQ ID NO: 2798250 - RNA, 19 nt, Artificial Sequence
  Description of Artificial Sequence: Synthetic oligonucleotide
ccggugaacaugcugaagu

SEQ ID NO: 2798251 - RNA, 19 nt, Artificial Sequence
  Description of Artificial Sequence: Synthetic oligonucleotide
cuuucucaccuuucaggau

SEQ ID NO: 2798252 - RNA, 19 nt, Artificial Sequence
  Description of Artificial Sequence: Synthetic oligonucleotide
ggugaacaugcugaagugu

SEQ ID NO: 2798253 - RNA, 19 nt, Artificial Sequence
  Description of Artificial Sequence: Synthetic oligonucleotide
cggugaacaugcugaagug

SEQ ID NO: 2798254 - RNA, 19 nt, Artificial Sequence
  Description of Artificial Sequence: Synthetic oligonucleotide
ggcugcauaguggcuuuug

SEQ ID NO: 2798255 - RNA, 19 nt, Artificial Sequence
  Description of Artificial Sequence: Synthetic oligonucleotide
uuuccccuggaggccucga

SEQ ID NO: 2798256 - RNA, 19 nt, Artificial Sequence
  Description of Artificial Sequence: Synthetic oligonucleotide
gucgcugaaaauaggcguu

SEQ ID NO: 2798257 - RNA, 19 nt, Artificial Sequence
  Description of Artificial Sequence: Synthetic oligonucleotide
cucgauccccucggucacc

SEQ ID NO: 2798258 - RNA, 19 nt, Artificial Sequence
  Description of Artificial Sequence: Synthetic oligonucleotide
cauggaccccuucugcccu

SEQ ID NO: 2798259 - RNA, 19 nt, Artificial Sequence
  Description of Artificial Sequence: Synthetic oligonucleotide
ucucaccuuucaggauggu

SEQ ID NO: 2798260 - RNA, 19 nt, Artificial Sequence
  Description of Artificial Sequence: Synthetic oligonucleotide
agacaacgggcuggaagua

SEQ ID NO: 2798261 - RNA, 19 nt, Artificial Sequence
  Description of Artificial Sequence: Synthetic oligonucleotide
ccuuucaggauggugauau

SEQ ID NO: 2798262 - RNA, 19 nt, Artificial Sequence
  Description of Artificial Sequence: Synthetic oligonucleotide
gcucaccugugcguacagg

SEQ ID NO: 2798263 - RNA, 19 nt, Artificial Sequence
  Description of Artificial Sequence: Synthetic oligonucleotide
ggcgugcugggcucacagc

SEQ ID NO: 2798264 - RNA, 19 nt, Artificial Sequence
  Description of Artificial Sequence: Synthetic oligonucleotide
gcguucucucucucucccc

SEQ ID NO: 2798265 - RNA, 19 nt, Artificial Sequence
  Description of Artificial Sequence: Synthetic oligonucleotide
aggcuucuuucggcccacg

SEQ ID NO: 2798266 - RNA, 19 nt, Artificial Sequence
  Description of Artificial Sequence: Synthetic oligonucleotide
  modified_base (3)..(3): a, c, u, g, unknown or other
guncugggaucgucuggua

SEQ ID NO: 2798267 - RNA, 19 nt, Artificial Sequence
  Description of Artificial Sequence: Synthetic oligonucleotide
caccuuucaggauggugau

SEQ ID NO: 2798268 - RNA, 19 nt, Artificial Sequence
  Description of Artificial Sequence: Synthetic oligonucleotide
agacgcacccacaccucau

SEQ ID NO: 2798269 - RNA, 19 nt, Artificial Sequence
  Description of Artificial Sequence: Synthetic oligonucleotide
cggcccacggagaaggcug

SEQ ID NO: 2798270 - RNA, 19 nt, Artificial Sequence
  Description of Artificial Sequence: Synthetic oligonucleotide
ccucgauccccucggucac

SEQ ID NO: 2798271 - RNA, 19 nt, Artificial Sequence
  Description of Artificial Sequence: Synthetic oligonucleotide
gccggugaacaugcugaag

SEQ ID NO: 2798272 - RNA, 19 nt, Artificial Sequence
  Description of Artificial Sequence: Synthetic oligonucleotide
gcucccauggaccccuucu

SEQ ID NO: 2798273 - RNA, 19 nt, Artificial Sequence
  Description of Artificial Sequence: Synthetic oligonucleotide
aggccucgauccccucggu

SEQ ID NO: 2798274 - RNA, 19 nt, Artificial Sequence
  Description of Artificial Sequence: Synthetic oligonucleotide
cgucgcugaaaauaggcgu

SEQ ID NO: 2798275 - RNA, 19 nt, Artificial Sequence
  Description of Artificial Sequence: Synthetic oligonucleotide
auggaccccuucugcccuu

SEQ ID NO: 2798276 - RNA, 19 nt, Artificial Sequence
  Description of Artificial Sequence: Synthetic oligonucleotide
gguacgucuccuucugguu

SEQ ID NO: 2798277 - RNA, 19 nt, Artificial Sequence
  Description of Artificial Sequence: Synthetic oligonucleotide
cuggaggccucgauccccu

SEQ ID NO: 2798278 - RNA, 19 nt, Artificial Sequence
  Description of Artificial Sequence: Synthetic oligonucleotide
gcagcggucuccaggagcu

SEQ ID NO: 2798279 - RNA, 19 nt, Artificial Sequence
  Description of Artificial Sequence: Synthetic oligonucleotide
ggggccaauauggccccug

SEQ ID NO: 2798280 - RNA, 19 nt, Artificial Sequence
  Description of Artificial Sequence: Synthetic oligonucleotide
ggccccuggcaccugugga

SEQ ID NO: 2798281 - RNA, 19 nt, Artificial Sequence
  Description of Artificial Sequence: Synthetic oligonucleotide
cccuggcaccuguggaacc

SEQ ID NO: 2798282 - RNA, 19 nt, Artificial Sequence
  Description of Artificial Sequence: Synthetic oligonucleotide
ccaagugugcacguugaua

SEQ ID NO: 2798283 - RNA, 19 nt, Artificial Sequence
  Description of Artificial Sequence: Synthetic oligonucleotide
acgaggcgugcugggcuca

SEQ ID NO: 2798284 - RNA, 19 nt, Artificial Sequence
  Description of Artificial Sequence: Synthetic oligonucleotide
auauggccccuggcaccug

SEQ ID NO: 2798285 - RNA, 19 nt, Artificial Sequence
  Description of Artificial Sequence: Synthetic oligonucleotide
acuugccggugaacaugcu

SEQ ID NO: 2798286 - RNA, 19 nt, Artificial Sequence
  Description of Artificial Sequence: Synthetic oligonucleotide
gcggucuccaggagcuccc

SEQ ID NO: 2798287 - RNA, 19 nt, Artificial Sequence
  Description of Artificial Sequence: Synthetic oligonucleotide
ggagcucccauggaccccu

SEQ ID NO: 2798288 - RNA, 19 nt, Artificial Sequence
  Description of Artificial Sequence: Synthetic oligonucleotide
cccuggaggccucgauccc

SEQ ID NO: 2798289 - RNA, 19 nt, Artificial Sequence
  Description of Artificial Sequence: Synthetic oligonucleotide
ggucgcucaccugugcgua

SEQ ID NO: 2798290 - RNA, 19 nt, Artificial Sequence
  Description of Artificial Sequence: Synthetic oligonucleotide
uggggccaauauggccccu

SEQ ID NO: 2798291 - RNA, 19 nt, Artificial Sequence
  Description of Artificial Sequence: Synthetic oligonucleotide
gaggcgugcugggcucaca

SEQ ID NO: 2798292 - RNA, 19 nt, Artificial Sequence
  Description of Artificial Sequence: Synthetic oligonucleotide
cuuucaggauggugauauu

SEQ ID NO: 2798293 - RNA, 19 nt, Artificial Sequence
  Description of Artificial Sequence: Synthetic oligonucleotide
guucucucucucuccccuu

SEQ ID NO: 2798294 - RNA, 19 nt, Artificial Sequence
  Description of Artificial Sequence: Synthetic oligonucleotide
caaagacaacgggcuggaa

SEQ ID NO: 2798295 - RNA, 19 nt, Artificial Sequence
  Description of Artificial Sequence: Synthetic oligonucleotide
ccacggagaaggcugcaua

SEQ ID NO: 2798296 - RNA, 19 nt, Artificial Sequence
  Description of Artificial Sequence: Synthetic oligonucleotide
ggaccccuucugcccuuug

SEQ ID NO: 2798297 - RNA, 19 nt, Artificial Sequence
  Description of Artificial Sequence: Synthetic oligonucleotide
cugcugugcagaggcuucu

SEQ ID NO: 2798298 - RNA, 19 nt, Artificial Sequence
  Description of Artificial Sequence: Synthetic oligonucleotide
cagcggucuccaggagcuc

SEQ ID NO: 2798299 - RNA, 19 nt, Artificial Sequence
  Description of Artificial Sequence: Synthetic oligonucleotide
cgcucaccugugcguacag

SEQ ID NO: 2798300 - RNA, 19 nt, Artificial Sequence
  Description of Artificial Sequence: Synthetic oligonucleotide
cguucucucucucuccccu

SEQ ID NO: 2798301 - RNA, 19 nt, Artificial Sequence
  Description of Artificial Sequence: Synthetic oligonucleotide
ccugugcguacaggaucac

SEQ ID NO: 2798302 - RNA, 19 nt, Artificial Sequence
  Description of Artificial Sequence: Synthetic oligonucleotide
cugguacacgaggcgugcu

SEQ ID NO: 2798303 - RNA, 19 nt, Artificial Sequence
  Description of Artificial Sequence: Synthetic oligonucleotide
gguuccaagugugcacguu

SEQ ID NO: 2798304 - RNA, 19 nt, Artificial Sequence
  Description of Artificial Sequence: Synthetic oligonucleotide
ccccucggucaccuuucuc

SEQ ID NO: 2798305 - RNA, 19 nt, Artificial Sequence
  Description of Artificial Sequence: Synthetic oligonucleotide
gcaugaugcuacggucgcu

SEQ ID NO: 2798306 - RNA, 19 nt, Artificial Sequence
  Description of Artificial Sequence: Synthetic oligonucleotide
ccuggcaccuguggaaccu

SEQ ID NO: 2798307 - RNA, 19 nt, Artificial Sequence
  Description of Artificial Sequence: Synthetic oligonucleotide
cgucugguacacgaggcgu

SEQ ID NO: 2798308 - RNA, 19 nt, Artificial Sequence
  Description of Artificial Sequence: Synthetic oligonucleotide
cuccagcaucaggcucuga

SEQ ID NO: 2798309 - RNA, 19 nt, Artificial Sequence
  Description of Artificial Sequence: Synthetic oligonucleotide
gcccacggagaaggcugca

SEQ ID NO: 2798310 - RNA, 19 nt, Artificial Sequence
  Description of Artificial Sequence: Synthetic oligonucleotide
cgaacucgucgcugaaaau

SEQ ID NO: 2798311 - RNA, 19 nt, Artificial Sequence
  Description of Artificial Sequence: Synthetic oligonucleotide
cgcugaaaauaggcguucu

SEQ ID NO: 2798312 - RNA, 19 nt, Artificial Sequence
  Description of Artificial Sequence: Synthetic oligonucleotide
cccacggagaaggcugcau

SEQ ID NO: 2798313 - RNA, 19 nt, Artificial Sequence
  Description of Artificial Sequence: Synthetic oligonucleotide
gagcucccauggaccccuu

SEQ ID NO: 2798314 - RNA, 19 nt, Artificial Sequence
  Description of Artificial Sequence: Synthetic oligonucleotide
cgucuccuucugguuccaa

SEQ ID NO: 2798315 - RNA, 19 nt, Artificial Sequence
  Description of Artificial Sequence: Synthetic oligonucleotide
cgauccccucggucaccuu

SEQ ID NO: 2798316 - RNA, 19 nt, Artificial Sequence
  Description of Artificial Sequence: Synthetic oligonucleotide
gugaacaucggcauggugg

SEQ ID NO: 2798317 - RNA, 19 nt, Artificial Sequence
  Description of Artificial Sequence: Synthetic oligonucleotide
uucacggugaacaucggca

SEQ ID NO: 2798318 - RNA, 19 nt, Artificial Sequence
  Description of Artificial Sequence: Synthetic oligonucleotide
aacguugguguucacggug

SEQ ID NO: 2798319 - RNA, 19 nt, Artificial Sequence
  Description of Artificial Sequence: Synthetic oligonucleotide
ugaacaucggcaugguggc

SEQ ID NO: 2798320 - RNA, 19 nt, Artificial Sequence
  Description of Artificial Sequence: Synthetic oligonucleotide
ggaacguugguguucacgg

SEQ ID NO: 2798321 - RNA, 19 nt, Artificial Sequence
  Description of Artificial Sequence: Synthetic oligonucleotide
aacaucggcaugguggcgg

SEQ ID NO: 2798322 - RNA, 19 nt, Artificial Sequence
  Description of Artificial Sequence: Synthetic oligonucleotide
guguucacggugaacaucg

SEQ ID NO: 2798323 - RNA, 19 nt, Artificial Sequence
  Description of Artificial Sequence: Synthetic oligonucleotide
gggaguagaggacagugcg

SEQ ID NO: 2798324 - RNA, 19 nt, Artificial Sequence
  Description of Artificial Sequence: Synthetic oligonucleotide
uguggcccaagccagggac

SEQ ID NO: 2798325 - RNA, 19 nt, Artificial Sequence
  Description of Artificial Sequence: Synthetic oligonucleotide
guagaggacagugcgacgc

SEQ ID NO: 2798326 - RNA, 19 nt, Artificial Sequence
  Description of Artificial Sequence: Synthetic oligonucleotide
acggugaacaucggcaugg

SEQ ID NO: 2798327 - RNA, 19 nt, Artificial Sequence
  Description of Artificial Sequence: Synthetic oligonucleotide
uagaggacagugcgacgcg

SEQ ID NO: 2798328 - RNA, 19 nt, Artificial Sequence
  Description of Artificial Sequence: Synthetic oligonucleotide
gaguagaggacagugcgac

SEQ ID NO: 2798329 - RNA, 19 nt, Artificial Sequence
  Description of Artificial Sequence: Synthetic oligonucleotide
agggaccugagcuacguga

SEQ ID NO: 2798330 - RNA, 19 nt, Artificial Sequence
  Description of Artificial Sequence: Synthetic oligonucleotide
gacagugcgacgcgggaug

SEQ ID NO: 2798331 - RNA, 19 nt, Artificial Sequence
  Description of Artificial Sequence: Synthetic oligonucleotide
aguagaggacagugcgacg

SEQ ID NO: 2798332 - RNA, 19 nt, Artificial Sequence
  Description of Artificial Sequence: Synthetic oligonucleotide
ucggcaugguggcggaggg

SEQ ID NO: 2798333 - RNA, 19 nt, Artificial Sequence
  Description of Artificial Sequence: Synthetic oligonucleotide
agugcgacgcgggaugugg

SEQ ID NO: 2798334 - RNA, 19 nt, Artificial Sequence
  Description of Artificial Sequence: Synthetic oligonucleotide
uguucacggugaacaucgg

SEQ ID NO: 2798335 - RNA, 19 nt, Artificial Sequence
  Description of Artificial Sequence: Synthetic oligonucleotide
gagagaagccccucuggca

SEQ ID NO: 2798336 - RNA, 19 nt, Artificial Sequence
  Description of Artificial Sequence: Synthetic oligonucleotide
uggcggaggggacugcaag

SEQ ID NO: 2798337 - RNA, 19 nt, Artificial Sequence
  Description of Artificial Sequence: Synthetic oligonucleotide
gagaagccccucuggcacg

SEQ ID NO: 2798338 - RNA, 19 nt, Artificial Sequence
  Description of Artificial Sequence: Synthetic oligonucleotide
guucacggugaacaucggc

SEQ ID NO: 2798339 - RNA, 19 nt, Artificial Sequence
  Description of Artificial Sequence: Synthetic oligonucleotide
acugcaagcggggaguaga

SEQ ID NO: 2798340 - RNA, 19 nt, Artificial Sequence
  Description of Artificial Sequence: Synthetic oligonucleotide
ggugagcucggagagaagc

SEQ ID NO: 2798341 - RNA, 19 nt, Artificial Sequence
  Description of Artificial Sequence: Synthetic oligonucleotide
ucuggcacggaggcgcggg

SEQ ID NO: 2798342 - RNA, 19 nt, Artificial Sequence
  Description of Artificial Sequence: Synthetic oligonucleotide
ggagagaagccccucuggc

SEQ ID NO: 2798343 - RNA, 19 nt, Artificial Sequence
  Description of Artificial Sequence: Synthetic oligonucleotide
ugggugagcucggagagaa

SEQ ID NO: 2798344 - RNA, 19 nt, Artificial Sequence
  Description of Artificial Sequence: Synthetic oligonucleotide
aucggcaugguggcggagg

SEQ ID NO: 2798345 - RNA, 19 nt, Artificial Sequence
  Description of Artificial Sequence: Synthetic oligonucleotide
caagccagggaccugagcu

SEQ ID NO: 2798346 - RNA, 19 nt, Artificial Sequence
  Description of Artificial Sequence: Synthetic oligonucleotide
aagccccucuggcacggag

SEQ ID NO: 2798347 - RNA, 19 nt, Artificial Sequence
  Description of Artificial Sequence: Synthetic oligonucleotide
caagcggggaguagaggac

SEQ ID NO: 2798348 - RNA, 19 nt, Artificial Sequence
  Description of Artificial Sequence: Synthetic oligonucleotide
agccagggaccugagcuac

SEQ ID NO: 2798349 - RNA, 19 nt, Artificial Sequence
  Description of Artificial Sequence: Synthetic oligonucleotide
aagcggggaguagaggaca

SEQ ID NO: 2798350 - RNA, 19 nt, Artificial Sequence
  Description of Artificial Sequence: Synthetic oligonucleotide
ugcaagcggggaguagagg

SEQ ID NO: 2798351 - RNA, 19 nt, Artificial Sequence
  Description of Artificial Sequence: Synthetic oligonucleotide
gcaagcggggaguagagga

SEQ ID NO: 2798352 - RNA, 19 nt, Artificial Sequence
  Description of Artificial Sequence: Synthetic oligonucleotide
aagccagggaccugagcua

SEQ ID NO: 2798353 - RNA, 19 nt, Artificial Sequence
  Description of Artificial Sequence: Synthetic oligonucleotide
gaggggacugcaagcgggg

SEQ ID NO: 2798354 - RNA, 19 nt, Artificial Sequence
  Description of Artificial Sequence: Synthetic oligonucleotide
ugcgacgcgggauguggcc

SEQ ID NO: 2798355 - RNA, 19 nt, Artificial Sequence
  Description of Artificial Sequence: Synthetic oligonucleotide
cugcaagcggggaguagag

SEQ ID NO: 2798356 - RNA, 19 nt, Artificial Sequence
  Description of Artificial Sequence: Synthetic oligonucleotide
ggaggggacugcaagcggg

SEQ ID NO: 2798357 - RNA, 19 nt, Artificial Sequence
  Description of Artificial Sequence: Synthetic oligonucleotide
gggaacguugguguucacg

SEQ ID NO: 2798358 - RNA, 19 nt, Artificial Sequence
  Description of Artificial Sequence: Synthetic oligonucleotide
agaagccccucuggcacgg

SEQ ID NO: 2798359 - RNA, 19 nt, Artificial Sequence
  Description of Artificial Sequence: Synthetic oligonucleotide
gugagcucggagagaagcc

SEQ ID NO: 2798360 - RNA, 19 nt, Artificial Sequence
  Description of Artificial Sequence: Synthetic oligonucleotide
ugguguucacggugaacau

SEQ ID NO: 2798361 - RNA, 19 nt, Artificial Sequence
  Description of Artificial Sequence: Synthetic oligonucleotide
gaacaucggcaugguggcg

SEQ ID NO: 2798362 - RNA, 19 nt, Artificial Sequence
  Description of Artificial Sequence: Synthetic oligonucleotide
cacggugaacaucggcaug

SEQ ID NO: 2798363 - RNA, 19 nt, Artificial Sequence
  Description of Artificial Sequence: Synthetic oligonucleotide
cacggaggcgcggggaacg

SEQ ID NO: 2798364 - RNA, 19 nt, Artificial Sequence
  Description of Artificial Sequence: Synthetic oligonucleotide
acaucggcaugguggcgga

SEQ ID NO: 2798365 - RNA, 19 nt, Artificial Sequence
  Description of Artificial Sequence: Synthetic oligonucleotide
acguugguguucacgguga

SEQ ID NO: 2798366 - RNA, 19 nt, Artificial Sequence
  Description of Artificial Sequence: Synthetic oligonucleotide
uggcccaagccagggaccu

SEQ ID NO: 2798367 - RNA, 19 nt, Artificial Sequence
  Description of Artificial Sequence: Synthetic oligonucleotide
ggugaacaucggcauggug

SEQ ID NO: 2798368 - RNA, 19 nt, Artificial Sequence
  Description of Artificial Sequence: Synthetic oligonucleotide
gaggcgcggggaacguugg

SEQ ID NO: 2798369 - RNA, 19 nt, Artificial Sequence
  Description of Artificial Sequence: Synthetic oligonucleotide
gcggaggggacugcaagcg

SEQ ID NO: 2798370 - RNA, 19 nt, Artificial Sequence
  Description of Artificial Sequence: Synthetic oligonucleotide
gacugcaagcggggaguag

SEQ ID NO: 2798371 - RNA, 19 nt, Artificial Sequence
  Description of Artificial Sequence: Synthetic oligonucleotide
ggcggaggggacugcaagc

SEQ ID NO: 2798372 - RNA, 19 nt, Artificial Sequence
  Description of Artificial Sequence: Synthetic oligonucleotide
agccccucuggcacggagg

SEQ ID NO: 2798373 - RNA, 19 nt, Artificial Sequence
  Description of Artificial Sequence: Synthetic oligonucleotide
augguggcggaggggacug

SEQ ID NO: 2798374 - RNA, 19 nt, Artificial Sequence
  Description of Artificial Sequence: Synthetic oligonucleotide
gaacguugguguucacggu

SEQ ID NO: 2798375 - RNA, 19 nt, Artificial Sequence
  Description of Artificial Sequence: Synthetic oligonucleotide
agcggggaguagaggacag

SEQ ID NO: 2798376 - RNA, 19 nt, Artificial Sequence
  Description of Artificial Sequence: Synthetic oligonucleotide
ggggaguagaggacagugc

SEQ ID NO: 2798377 - RNA, 19 nt, Artificial Sequence
  Description of Artificial Sequence: Synthetic oligonucleotide
cugcugggugagcucggag

SEQ ID NO: 2798378 - RNA, 19 nt, Artificial Sequence
  Description of Artificial Sequence: Synthetic oligonucleotide
gguguucacggugaacauc

SEQ ID NO: 2798379 - RNA, 19 nt, Artificial Sequence
  Description of Artificial Sequence: Synthetic oligonucleotide
ggcaugguggcggagggga

SEQ ID NO: 2798380 - RNA, 19 nt, Artificial Sequence
  Description of Artificial Sequence: Synthetic oligonucleotide
cccucuggcacggaggcgc

SEQ ID NO: 2798381 - RNA, 19 nt, Artificial Sequence
  Description of Artificial Sequence: Synthetic oligonucleotide
ggaggcgcggggaacguug

SEQ ID NO: 2798382 - RNA, 19 nt, Artificial Sequence
  Description of Artificial Sequence: Synthetic oligonucleotide
cuggcacggaggcgcgggg

SEQ ID NO: 2798383 - RNA, 19 nt, Artificial Sequence
  Description of Artificial Sequence: Synthetic oligonucleotide
guggcccaagccagggacc

SEQ ID NO: 2798384 - RNA, 19 nt, Artificial Sequence
  Description of Artificial Sequence: Synthetic oligonucleotide
gggaccugagcuacgugac

SEQ ID NO: 2798385 - RNA, 19 nt, Artificial Sequence
  Description of Artificial Sequence: Synthetic oligonucleotide
gcgggauguggcccaagcc

SEQ ID NO: 2798386 - RNA, 19 nt, Artificial Sequence
  Description of Artificial Sequence: Synthetic oligonucleotide
gccccucuggcacggaggc

SEQ ID NO: 2798387 - RNA, 19 nt, Artificial Sequence
  Description of Artificial Sequence: Synthetic oligonucleotide
ggaguagaggacagugcga

SEQ ID NO: 2798388 - RNA, 19 nt, Artificial Sequence
  Description of Artificial Sequence: Synthetic oligonucleotide
acagugcgacgcgggaugu

SEQ ID NO: 2798389 - RNA, 19 nt, Artificial Sequence
  Description of Artificial Sequence: Synthetic oligonucleotide
cagggaccugagcuacgug

SEQ ID NO: 2798390 - RNA, 19 nt, Artificial Sequence
  Description of Artificial Sequence: Synthetic oligonucleotide
cggagagaagccccucugg

SEQ ID NO: 2798391 - RNA, 19 nt, Artificial Sequence
  Description of Artificial Sequence: Synthetic oligonucleotide
ggcgcggggaacguuggug

SEQ ID NO: 2798392 - RNA, 19 nt, Artificial Sequence
  Description of Artificial Sequence: Synthetic oligonucleotide
aggggacugcaagcgggga

SEQ ID NO: 2798393 - RNA, 19 nt, Artificial Sequence
  Description of Artificial Sequence: Synthetic oligonucleotide
gugcgacgcgggauguggc

SEQ ID NO: 2798394 - RNA, 19 nt, Artificial Sequence
  Description of Artificial Sequence: Synthetic oligonucleotide
ccaagccagggaccugagc

SEQ ID NO: 2798395 - RNA, 19 nt, Artificial Sequence
  Description of Artificial Sequence: Synthetic oligonucleotide
cggggaguagaggacagug

SEQ ID NO: 2798396 - RNA, 19 nt, Artificial Sequence
  Description of Artificial Sequence: Synthetic oligonucleotide
cucuggcacggaggcgcgg

SEQ ID NO: 2798397 - RNA, 19 nt, Artificial Sequence
  Description of Artificial Sequence: Synthetic oligonucleotide
aggcgcggggaacguuggu

SEQ ID NO: 2798398 - RNA, 19 nt, Artificial Sequence
  Description of Artificial Sequence: Synthetic oligonucleotide
gcgacgcgggauguggccc

SEQ ID NO: 2798399 - RNA, 19 nt, Artificial Sequence
  Description of Artificial Sequence: Synthetic oligonucleotide
ccucuggcacggaggcgcg

SEQ ID NO: 2798400 - RNA, 19 nt, Artificial Sequence
  Description of Artificial Sequence: Synthetic oligonucleotide
caucggcaugguggcggag

SEQ ID NO: 2798401 - RNA, 19 nt, Artificial Sequence
  Description of Artificial Sequence: Synthetic oligonucleotide
gcccaagccagggaccuga

SEQ ID NO: 2798402 - RNA, 19 nt, Artificial Sequence
  Description of Artificial Sequence: Synthetic oligonucleotide
ugguggcggaggggacugc

SEQ ID NO: 2798403 - RNA, 19 nt, Artificial Sequence
  Description of Artificial Sequence: Synthetic oligonucleotide
caugguggcggaggggacu

SEQ ID NO: 2798404 - RNA, 19 nt, Artificial Sequence
  Description of Artificial Sequence: Synthetic oligonucleotide
cagugcgacgcgggaugug

SEQ ID NO: 2798405 - RNA, 19 nt, Artificial Sequence
  Description of Artificial Sequence: Synthetic oligonucleotide
cugggugagcucggagaga

SEQ ID NO: 2798406 - RNA, 19 nt, Artificial Sequence
  Description of Artificial Sequence: Synthetic oligonucleotide
cggaggggacugcaagcgg

SEQ ID NO: 2798407 - RNA, 19 nt, Artificial Sequence
  Description of Artificial Sequence: Synthetic oligonucleotide
ggcacggaggcgcggggaa

SEQ ID NO: 2798408 - RNA, 19 nt, Artificial Sequence
  Description of Artificial Sequence: Synthetic oligonucleotide
gguggcggaggggacugca

SEQ ID NO: 2798409 - RNA, 19 nt, Artificial Sequence
  Description of Artificial Sequence: Synthetic oligonucleotide
gccagggaccugagcuacg

SEQ ID NO: 2798410 - RNA, 19 nt, Artificial Sequence
  Description of Artificial Sequence: Synthetic oligonucleotide
acggaggcgcggggaacgu

SEQ ID NO: 2798411 - RNA, 19 nt, Artificial Sequence
  Description of Artificial Sequence: Synthetic oligonucleotide
gcgcggggaacguuggugu

SEQ ID NO: 2798412 - RNA, 19 nt, Artificial Sequence
  Description of Artificial Sequence: Synthetic oligonucleotide
cccaagccagggaccugag

SEQ ID NO: 2798413 - RNA, 19 nt, Artificial Sequence
  Description of Artificial Sequence: Synthetic oligonucleotide
gcggggaacguugguguuc

SEQ ID NO: 2798414 - RNA, 19 nt, Artificial Sequence
  Description of Artificial Sequence: Synthetic oligonucleotide
gggugagcucggagagaag

SEQ ID NO: 2798415 - RNA, 19 nt, Artificial Sequence
  Description of Artificial Sequence: Synthetic oligonucleotide
acgcgggauguggcccaag

SEQ ID NO: 2798416 - RNA, 19 nt, Artificial Sequence
  Description of Artificial Sequence: Synthetic oligonucleotide
guggcggaggggacugcaa

SEQ ID NO: 2798417 - RNA, 19 nt, Artificial Sequence
  Description of Artificial Sequence: Synthetic oligonucleotide
gcaugguggcggaggggac

SEQ ID NO: 2798418 - RNA, 19 nt, Artificial Sequence
  Description of Artificial Sequence: Synthetic oligonucleotide
gacgcgggauguggcccaa

SEQ ID NO: 2798419 - RNA, 19 nt, Artificial Sequence
  Description of Artificial Sequence: Synthetic oligonucleotide
gcugcugggugagcucgga

SEQ ID NO: 2798420 - RNA, 19 nt, Artificial Sequence
  Description of Artificial Sequence: Synthetic oligonucleotide
ggggaacguugguguucac

SEQ ID NO: 2798421 - RNA, 19 nt, Artificial Sequence
  Description of Artificial Sequence: Synthetic oligonucleotide
gcacggaggcgcggggaac

SEQ ID NO: 2798422 - RNA, 19 nt, Artificial Sequence
  Description of Artificial Sequence: Synthetic oligonucleotide
cggggaacguugguguuca

SEQ ID NO: 2798423 - RNA, 19 nt, Artificial Sequence
  Description of Artificial Sequence: Synthetic oligonucleotide
ggacagugcgacgcgggau

SEQ ID NO: 2798424 - RNA, 19 nt, Artificial Sequence
  Description of Artificial Sequence: Synthetic oligonucleotide
ggacugcaagcggggagua

SEQ ID NO: 2798425 - RNA, 19 nt, Artificial Sequence
  Description of Artificial Sequence: Synthetic oligonucleotide
ggcccaagccagggaccug

SEQ ID NO: 2798426 - RNA, 19 nt, Artificial Sequence
  Description of Artificial Sequence: Synthetic oligonucleotide
ccccucuggcacggaggcg

SEQ ID NO: 2798427 - RNA, 19 nt, Artificial Sequence
  Description of Artificial Sequence: Synthetic oligonucleotide
ccagggaccugagcuacgu

SEQ ID NO: 2798428 - RNA, 19 nt, Artificial Sequence
  Description of Artificial Sequence: Synthetic oligonucleotide
cgacgcgggauguggccca

SEQ ID NO: 2798429 - RNA, 19 nt, Artificial Sequence
  Description of Artificial Sequence: Synthetic oligonucleotide
cggcaugguggcggagggg

SEQ ID NO: 2798430 - RNA, 19 nt, Artificial Sequence
  Description of Artificial Sequence: Synthetic oligonucleotide
cguugguguucacggugaa

SEQ ID NO: 2798431 - RNA, 19 nt, Artificial Sequence
  Description of Artificial Sequence: Synthetic oligonucleotide
gcggggaguagaggacagu

SEQ ID NO: 2798432 - RNA, 19 nt, Artificial Sequence
  Description of Artificial Sequence: Synthetic oligonucleotide
cggugaacaucggcauggu

SEQ ID NO: 2798433 - RNA, 19 nt, Artificial Sequence
  Description of Artificial Sequence: Synthetic oligonucleotide
cgcggggaacguugguguu

SEQ ID NO: 2798434 - RNA, 19 nt, Artificial Sequence
  Description of Artificial Sequence: Synthetic oligonucleotide
cggaggcgcggggaacguu

SEQ ID NO: 2798435 - RNA, 19 nt, Artificial Sequence
  Description of Artificial Sequence: Synthetic oligonucleotide
aaucuaguaauacagcugc

SEQ ID NO: 2798436 - RNA, 19 nt, Artificial Sequence
  Description of Artificial Sequence: Synthetic oligonucleotide
aauacagcugcugacaugc

SEQ ID NO: 2798437 - RNA, 19 nt, Artificial Sequence
  Description of Artificial Sequence: Synthetic oligonucleotide
aaaacauguacuuuucuug

SEQ ID NO: 2798438 - RNA, 19 nt, Artificial Sequence
  Description of Artificial Sequence: Synthetic oligonucleotide
uuggaaucuaguaauacag

SEQ ID NO: 2798439 - RNA, 19 nt, Artificial Sequence
  Description of Artificial Sequence: Synthetic oligonucleotide
aaaccaguuucacaauggc

SEQ ID NO: 2798440 - RNA, 19 nt, Artificial Sequence
  Description of Artificial Sequence: Synthetic oligonucleotide
uguaugacgauuuucugug

SEQ ID NO: 2798441 - RNA, 19 nt, Artificial Sequence
  Description of Artificial Sequence: Synthetic oligonucleotide
ucuuguaugacgauuuucu

SEQ ID NO: 2798442 - RNA, 19 nt, Artificial Sequence
  Description of Artificial Sequence: Synthetic oligonucleotide
uuuaccuaaaacagcuggg

SEQ ID NO: 2798443 - RNA, 19 nt, Artificial Sequence
  Description of Artificial Sequence: Synthetic oligonucleotide
cuuauuauugguuggaauc

SEQ ID NO: 2798444 - RNA, 19 nt, Artificial Sequence
  Description of Artificial Sequence: Synthetic oligonucleotide
ucaagugugacaacgcaag

SEQ ID NO: 2798445 - RNA, 19 nt, Artificial Sequence
  Description of Artificial Sequence: Synthetic oligonucleotide
ugagaaugaaccagaagcc

SEQ ID NO: 2798446 - RNA, 19 nt, Artificial Sequence
  Description of Artificial Sequence: Synthetic oligonucleotide
cuuuaccuaaaacagcugg

SEQ ID NO: 2798447 - RNA, 19 nt, Artificial Sequence
  Description of Artificial Sequence: Synthetic oligonucleotide
ugucaaaccaguuucacaa

SEQ ID NO: 2798448 - RNA, 19 nt, Artificial Sequence
  Description of Artificial Sequence: Synthetic oligonucleotide
uuuacagugugcuagcgga

SEQ ID NO: 2798449 - RNA, 19 nt, Artificial Sequence
  Description of Artificial Sequence: Synthetic oligonucleotide
aaacauguacuuuucuugu

SEQ ID NO: 2798450 - RNA, 19 nt, Artificial Sequence
  Description of Artificial Sequence: Synthetic oligonucleotide
ucaagcacccuccaacugg

SEQ ID NO: 2798451 - RNA, 19 nt, Artificial Sequence
  Description of Artificial Sequence: Synthetic oligonucleotide
agcuucuuuaccuaaaaca

SEQ ID NO: 2798452 - RNA, 19 nt, Artificial Sequence
  Description of Artificial Sequence: Synthetic oligonucleotide
gaagcgaugucccucaagc

SEQ ID NO: 2798453 - RNA, 19 nt, Artificial Sequence
  Description of Artificial Sequence: Synthetic oligonucleotide
agcagacacuucuagaaac

SEQ ID NO: 2798454 - RNA, 19 nt, Artificial Sequence
  Description of Artificial Sequence: Synthetic oligonucleotide
acaauggccugcuaccucc

SEQ ID NO: 2798455 - RNA, 19 nt, Artificial Sequence
  Description of Artificial Sequence: Synthetic oligonucleotide
uacuuuucuuguaugacga

SEQ ID NO: 2798456 - RNA, 19 nt, Artificial Sequence
  Description of Artificial Sequence: Synthetic oligonucleotide
acuucuagaaaccuuggcu

SEQ ID NO: 2798457 - RNA, 19 nt, Artificial Sequence
  Description of Artificial Sequence: Synthetic oligonucleotide
guacuuuucuuguaugacg

SEQ ID NO: 2798458 - RNA, 19 nt, Artificial Sequence
  Description of Artificial Sequence: Synthetic oligonucleotide
ucacucagggccaaguucc

SEQ ID NO: 2798459 - RNA, 19 nt, Artificial Sequence
  Description of Artificial Sequence: Synthetic oligonucleotide
agugugacaacgcaaguca

SEQ ID NO: 2798460 - RNA, 19 nt, Artificial Sequence
  Description of Artificial Sequence: Synthetic oligonucleotide
agauucaagugugacaacg

SEQ ID NO: 2798461 - RNA, 19 nt, Artificial Sequence
  Description of Artificial Sequence: Synthetic oligonucleotide
agaaaccuuggcuucacuc

SEQ ID NO: 2798462 - RNA, 19 nt, Artificial Sequence
  Description of Artificial Sequence: Synthetic oligonucleotide
ucaaaccaguuucacaaug

SEQ ID NO: 2798463 - RNA, 19 nt, Artificial Sequence
  Description of Artificial Sequence: Synthetic oligonucleotide
agaaugaaccagaagcccc

SEQ ID NO: 2798464 - RNA, 19 nt, Artificial Sequence
  Description of Artificial Sequence: Synthetic oligonucleotide
aaccaguuucacaauggcc

SEQ ID NO: 2798465 - RNA, 19 nt, Artificial Sequence
  Description of Artificial Sequence: Synthetic oligonucleotide
caaaccaguuucacaaugg

SEQ ID NO: 2798466 - RNA, 19 nt, Artificial Sequence
  Description of Artificial Sequence: Synthetic oligonucleotide
uuucacaauggccugcuac

SEQ ID NO: 2798467 - RNA, 19 nt, Artificial Sequence
  Description of Artificial Sequence: Synthetic oligonucleotide
uucacaauggccugcuacc

SEQ ID NO: 2798468 - RNA, 19 nt, Artificial Sequence
  Description of Artificial Sequence: Synthetic oligonucleotide
caugugucaaaccaguuuc

SEQ ID NO: 2798469 - RNA, 19 nt, Artificial Sequence
  Description of Artificial Sequence: Synthetic oligonucleotide
acucagagccuaccuaucc

SEQ ID NO: 2798470 - RNA, 19 nt, Artificial Sequence
  Description of Artificial Sequence: Synthetic oligonucleotide
auugguuggaaucuaguaa

SEQ ID NO: 2798471 - RNA, 19 nt, Artificial Sequence
  Description of Artificial Sequence: Synthetic oligonucleotide
uuguaugacgauuuucugu

SEQ ID NO: 2798472 - RNA, 19 nt, Artificial Sequence
  Description of Artificial Sequence: Synthetic oligonucleotide
ccaacuggcacucagagcc

SEQ ID NO: 2798473 - RNA, 19 nt, Artificial Sequence
  Description of Artificial Sequence: Synthetic oligonucleotide
uuauuauugguuggaaucu

SEQ ID NO: 2798474 - RNA, 19 nt, Artificial Sequence
  Description of Artificial Sequence: Synthetic oligonucleotide
cuucuuuacagugugcuag

SEQ ID NO: 2798475 - RNA, 19 nt, Artificial Sequence
  Description of Artificial Sequence: Synthetic oligonucleotide
cuucuuuaccuaaaacagc

SEQ ID NO: 2798476 - RNA, 19 nt, Artificial Sequence
  Description of Artificial Sequence: Synthetic oligonucleotide
gacacuucuagaaaccuug

SEQ ID NO: 2798477 - RNA, 19 nt, Artificial Sequence
  Description of Artificial Sequence: Synthetic oligonucleotide
uugguuggaaucuaguaau

SEQ ID NO: 2798478 - RNA, 19 nt, Artificial Sequence
  Description of Artificial Sequence: Synthetic oligonucleotide
ucuacaaguggcucagcag

SEQ ID NO: 2798479 - RNA, 19 nt, Artificial Sequence
  Description of Artificial Sequence: Synthetic oligonucleotide
uggaaucuaguaauacagc

SEQ ID NO: 2798480 - RNA, 19 nt, Artificial Sequence
  Description of Artificial Sequence: Synthetic oligonucleotide
agaaggcagaccccaagac

SEQ ID NO: 2798481 - RNA, 19 nt, Artificial Sequence
  Description of Artificial Sequence: Synthetic oligonucleotide
ugugcuagcggaugggcag

SEQ ID NO: 2798482 - RNA, 19 nt, Artificial Sequence
  Description of Artificial Sequence: Synthetic oligonucleotide
agcgaugucccucaagcag

SEQ ID NO: 2798483 - RNA, 19 nt, Artificial Sequence
  Description of Artificial Sequence: Synthetic oligonucleotide
uaugacgauuuucugugcu

SEQ ID NO: 2798484 - RNA, 19 nt, Artificial Sequence
  Description of Artificial Sequence: Synthetic oligonucleotide
gaaucuaguaauacagcug

SEQ ID NO: 2798485 - RNA, 19 nt, Artificial Sequence
  Description of Artificial Sequence: Synthetic oligonucleotide
accuaaaacagcugggacu

SEQ ID NO: 2798486 - RNA, 19 nt, Artificial Sequence
  Description of Artificial Sequence: Synthetic oligonucleotide
gaaaccuuggcuucacuca

SEQ ID NO: 2798487 - RNA, 19 nt, Artificial Sequence
  Description of Artificial Sequence: Synthetic oligonucleotide
gaaccagaagccccugucg

SEQ ID NO: 2798488 - RNA, 19 nt, Artificial Sequence
  Description of Artificial Sequence: Synthetic oligonucleotide
ugucgaggcuucuuuacag

SEQ ID NO: 2798489 - RNA, 19 nt, Artificial Sequence
  Description of Artificial Sequence: Synthetic oligonucleotide
accaguuucacaauggccu

SEQ ID NO: 2798490 - RNA, 19 nt, Artificial Sequence
  Description of Artificial Sequence: Synthetic oligonucleotide
uuauugguuggaaucuagu

SEQ ID NO: 2798491 - RNA, 19 nt, Artificial Sequence
  Description of Artificial Sequence: Synthetic oligonucleotide
uauugguuggaaucuagua

SEQ ID NO: 2798492 - RNA, 19 nt, Artificial Sequence
  Description of Artificial Sequence: Synthetic oligonucleotide
cuuuacagugugcuagcgg

SEQ ID NO: 2798493 - RNA, 19 nt, Artificial Sequence
  Description of Artificial Sequence: Synthetic oligonucleotide
guuggaaucuaguaauaca

SEQ ID NO: 2798494 - RNA, 19 nt, Artificial Sequence
  Description of Artificial Sequence: Synthetic oligonucleotide
uucaagugugacaacgcaa

SEQ ID NO: 2798495 - RNA, 19 nt, Artificial Sequence
  Description of Artificial Sequence: Synthetic oligonucleotide
cugugcuuauuauugguug

SEQ ID NO: 2798496 - RNA, 19 nt, Artificial Sequence
  Description of Artificial Sequence: Synthetic oligonucleotide
uuaccuaaaacagcuggga

SEQ ID NO: 2798497 - RNA, 19 nt, Artificial Sequence
  Description of Artificial Sequence: Synthetic oligonucleotide
aagacuggcuaccaugcau

SEQ ID NO: 2798498 - RNA, 19 nt, Artificial Sequence
  Description of Artificial Sequence: Synthetic oligonucleotide
gagaaugaaccagaagccc

SEQ ID NO: 2798499 - RNA, 19 nt, Artificial Sequence
  Description of Artificial Sequence: Synthetic oligonucleotide
ucagagccuaccuauccgc

SEQ ID NO: 2798500 - RNA, 19 nt, Artificial Sequence
  Description of Artificial Sequence: Synthetic oligonucleotide
aaccagaagccccugucga

SEQ ID NO: 2798501 - RNA, 19 nt, Artificial Sequence
  Description of Artificial Sequence: Synthetic oligonucleotide
uggaaccccagauucaagu

SEQ ID NO: 2798502 - RNA, 19 nt, Artificial Sequence
  Description of Artificial Sequence: Synthetic oligonucleotide
auucaagugugacaacgca

SEQ ID NO: 2798503 - RNA, 19 nt, Artificial Sequence
  Description of Artificial Sequence: Synthetic oligonucleotide
aaguuccagggcuacagaa

SEQ ID NO: 2798504 - RNA, 19 nt, Artificial Sequence
  Description of Artificial Sequence: Synthetic oligonucleotide
ggcuacagaaggcagaccc

SEQ ID NO: 2798505 - RNA, 19 nt, Artificial Sequence
  Description of Artificial Sequence: Synthetic oligonucleotide
gauucaagugugacaacgc

SEQ ID NO: 2798506 - RNA, 19 nt, Artificial Sequence
  Description of Artificial Sequence: Synthetic oligonucleotide
cucccagucagccaacugc

SEQ ID NO: 2798507 - RNA, 19 nt, Artificial Sequence
  Description of Artificial Sequence: Synthetic oligonucleotide
ucuuuaccuaaaacagcug

SEQ ID NO: 2798508 - RNA, 19 nt, Artificial Sequence
  Description of Artificial Sequence: Synthetic oligonucleotide
uaccuaaaacagcugggac

SEQ ID NO: 2798509 - RNA, 19 nt, Artificial Sequence
  Description of Artificial Sequence: Synthetic oligonucleotide
gaaucugggagccgcuucc

SEQ ID NO: 2798510 - RNA, 19 nt, Artificial Sequence
  Description of Artificial Sequence: Synthetic oligonucleotide
uucacucagggccaaguuc

SEQ ID NO: 2798511 - RNA, 19 nt, Artificial Sequence
  Description of Artificial Sequence: Synthetic oligonucleotide
uucuuuacagugugcuagc

SEQ ID NO: 2798512 - RNA, 19 nt, Artificial Sequence
  Description of Artificial Sequence: Synthetic oligonucleotide
acagugugcuagcggaugg

SEQ ID NO: 2798513 - RNA, 19 nt, Artificial Sequence
  Description of Artificial Sequence: Synthetic oligonucleotide
acauguacuuuucuuguau

SEQ ID NO: 2798514 - RNA, 19 nt, Artificial Sequence
  Description of Artificial Sequence: Synthetic oligonucleotide
agaaucugggagccgcuuc

SEQ ID NO: 2798515 - RNA, 19 nt, Artificial Sequence
  Description of Artificial Sequence: Synthetic oligonucleotide
cuaguaauacagcugcuga

SEQ ID NO: 2798516 - RNA, 19 nt, Artificial Sequence
  Description of Artificial Sequence: Synthetic oligonucleotide
uucugugcuuauuauuggu

SEQ ID NO: 2798517 - RNA, 19 nt, Artificial Sequence
  Description of Artificial Sequence: Synthetic oligonucleotide
ucaagcaggcaaagcagac

SEQ ID NO: 2798518 - RNA, 19 nt, Artificial Sequence
  Description of Artificial Sequence: Synthetic oligonucleotide
cauguacuuuucuuguaug

SEQ ID NO: 2798519 - RNA, 19 nt, Artificial Sequence
  Description of Artificial Sequence: Synthetic oligonucleotide
cuuguaugacgauuuucug

SEQ ID NO: 2798520 - RNA, 19 nt, Artificial Sequence
  Description of Artificial Sequence: Synthetic oligonucleotide
ugcugacaugcuugaagcg

SEQ ID NO: 2798521 - RNA, 19 nt, Artificial Sequence
  Description of Artificial Sequence: Synthetic oligonucleotide
ccaggagcaccuaugaugg

SEQ ID NO: 2798522 - RNA, 19 nt, Artificial Sequence
  Description of Artificial Sequence: Synthetic oligonucleotide
cucagggccaaguuccagg

SEQ ID NO: 2798523 - RNA, 19 nt, Artificial Sequence
  Description of Artificial Sequence: Synthetic oligonucleotide
ugaaccagaagccccuguc

SEQ ID NO: 2798524 - RNA, 19 nt, Artificial Sequence
  Description of Artificial Sequence: Synthetic oligonucleotide
ucgaggcuucuuuacagug

SEQ ID NO: 2798525 - RNA, 19 nt, Artificial Sequence
  Description of Artificial Sequence: Synthetic oligonucleotide
accuuggcuucacucaggg

SEQ ID NO: 2798526 - RNA, 19 nt, Artificial Sequence
  Description of Artificial Sequence: Synthetic oligonucleotide
accaugcaugugucaaacc

SEQ ID NO: 2798527 - RNA, 19 nt, Artificial Sequence
  Description of Artificial Sequence: Synthetic oligonucleotide
uucuagaaaccuuggcuuc

SEQ ID NO: 2798528 - RNA, 19 nt, Artificial Sequence
  Description of Artificial Sequence: Synthetic oligonucleotide
agcacccuccaacuggcac

SEQ ID NO: 2798529 - RNA, 19 nt, Artificial Sequence
  Description of Artificial Sequence: Synthetic oligonucleotide
ucuuuacagugugcuagcg

SEQ ID NO: 2798530 - RNA, 19 nt, Artificial Sequence
  Description of Artificial Sequence: Synthetic oligonucleotide
ucugugcuuauuauugguu

SEQ ID NO: 2798531 - RNA, 19 nt, Artificial Sequence
  Description of Artificial Sequence: Synthetic oligonucleotide
auuauugguuggaaucuag

SEQ ID NO: 2798532 - RNA, 19 nt, Artificial Sequence
  Description of Artificial Sequence: Synthetic oligonucleotide
agugugcuagcggaugggc

SEQ ID NO: 2798533 - RNA, 19 nt, Artificial Sequence
  Description of Artificial Sequence: Synthetic oligonucleotide
cucagagccuaccuauccg

SEQ ID NO: 2798534 - RNA, 19 nt, Artificial Sequence
  Description of Artificial Sequence: Synthetic oligonucleotide
aacauguacuuuucuugua

SEQ ID NO: 2798535 - RNA, 19 nt, Artificial Sequence
  Description of Artificial Sequence: Synthetic oligonucleotide
uccccugagaaugaaccag

SEQ ID NO: 2798536 - RNA, 19 nt, Artificial Sequence
  Description of Artificial Sequence: Synthetic oligonucleotide
agggcuacagaaggcagac

SEQ ID NO: 2798537 - RNA, 19 nt, Artificial Sequence
  Description of Artificial Sequence: Synthetic oligonucleotide
agccuaccuauccgcagcc

SEQ ID NO: 2798538 - RNA, 19 nt, Artificial Sequence
  Description of Artificial Sequence: Synthetic oligonucleotide
aaccccagauucaagugug

SEQ ID NO: 2798539 - RNA, 19 nt, Artificial Sequence
  Description of Artificial Sequence: Synthetic oligonucleotide
ucuagaaaccuuggcuuca

SEQ ID NO: 2798540 - RNA, 19 nt, Artificial Sequence
  Description of Artificial Sequence: Synthetic oligonucleotide
cuccaacuggcacucagag

SEQ ID NO: 2798541 - RNA, 19 nt, Artificial Sequence
  Description of Artificial Sequence: Synthetic oligonucleotide
uagcggaugggcagccugg

SEQ ID NO: 2798542 - RNA, 19 nt, Artificial Sequence
  Description of Artificial Sequence: Synthetic oligonucleotide
uccucuacaaguggcucag

SEQ ID NO: 2798543 - RNA, 19 nt, Artificial Sequence
  Description of Artificial Sequence: Synthetic oligonucleotide
acaacgcaagucaggaggg

SEQ ID NO: 2798544 - RNA, 19 nt, Artificial Sequence
  Description of Artificial Sequence: Synthetic oligonucleotide
aagcgaugucccucaagca

SEQ ID NO: 2798545 - RNA, 19 nt, Artificial Sequence
  Description of Artificial Sequence: Synthetic oligonucleotide
ugugucaaaccaguuucac

SEQ ID NO: 2798546 - RNA, 19 nt, Artificial Sequence
  Description of Artificial Sequence: Synthetic oligonucleotide
gagccuaccuauccgcagc

SEQ ID NO: 2798547 - RNA, 19 nt, Artificial Sequence
  Description of Artificial Sequence: Synthetic oligonucleotide
cagagaaucugggagccgc

SEQ ID NO: 2798548 - RNA, 19 nt, Artificial Sequence
  Description of Artificial Sequence: Synthetic oligonucleotide
agagccuaccuauccgcag

SEQ ID NO: 2798549 - RNA, 19 nt, Artificial Sequence
  Description of Artificial Sequence: Synthetic oligonucleotide
ugacaacgcaagucaggag

SEQ ID NO: 2798550 - RNA, 19 nt, Artificial Sequence
  Description of Artificial Sequence: Synthetic oligonucleotide
uccaacuggcacucagagc

SEQ ID NO: 2798551 - RNA, 19 nt, Artificial Sequence
  Description of Artificial Sequence: Synthetic oligonucleotide
gcaccuaugauggggaggg

SEQ ID NO: 2798552 - RNA, 19 nt, Artificial Sequence
  Description of Artificial Sequence: Synthetic oligonucleotide
ggaaucuaguaauacagcu

SEQ ID NO: 2798553 - RNA, 19 nt, Artificial Sequence
  Description of Artificial Sequence: Synthetic oligonucleotide
uucuuguaugacgauuuuc

SEQ ID NO: 2798554 - RNA, 19 nt, Artificial Sequence
  Description of Artificial Sequence: Synthetic oligonucleotide
agaccccaagacuggcuac

SEQ ID NO: 2798555 - RNA, 19 nt, Artificial Sequence
  Description of Artificial Sequence: Synthetic oligonucleotide
accuauccgcagcccaccc

SEQ ID NO: 2798556 - RNA, 19 nt, Artificial Sequence
  Description of Artificial Sequence: Synthetic oligonucleotide
caaagcagacacuucuaga

SEQ ID NO: 2798557 - RNA, 19 nt, Artificial Sequence
  Description of Artificial Sequence: Synthetic oligonucleotide
uuccccugagaaugaacca

SEQ ID NO: 2798558 - RNA, 19 nt, Artificial Sequence
  Description of Artificial Sequence: Synthetic oligonucleotide
ccuaaaacagcugggacug

SEQ ID NO: 2798559 - RNA, 19 nt, Artificial Sequence
  Description of Artificial Sequence: Synthetic oligonucleotide
ucugggagccgcuuccccu

SEQ ID NO: 2798560 - RNA, 19 nt, Artificial Sequence
  Description of Artificial Sequence: Synthetic oligonucleotide
uauuauugguuggaaucua

SEQ ID NO: 2798561 - RNA, 19 nt, Artificial Sequence
  Description of Artificial Sequence: Synthetic oligonucleotide
agcaccuaugauggggagg

SEQ ID NO: 2798562 - RNA, 19 nt, Artificial Sequence
  Description of Artificial Sequence: Synthetic oligonucleotide
ugacaugcuugaagcgaug

SEQ ID NO: 2798563 - RNA, 19 nt, Artificial Sequence
  Description of Artificial Sequence: Synthetic oligonucleotide
uuucuuguaugacgauuuu

SEQ ID NO: 2798564 - RNA, 19 nt, Artificial Sequence
  Description of Artificial Sequence: Synthetic oligonucleotide
ccaagacuggcuaccaugc

SEQ ID NO: 2798565 - RNA, 19 nt, Artificial Sequence
  Description of Artificial Sequence: Synthetic oligonucleotide
aaugaaccagaagccccug

SEQ ID NO: 2798566 - RNA, 19 nt, Artificial Sequence
  Description of Artificial Sequence: Synthetic oligonucleotide
aacgcaagucaggagggaa

SEQ ID NO: 2798567 - RNA, 19 nt, Artificial Sequence
  Description of Artificial Sequence: Synthetic oligonucleotide
cuaccuauccgcagcccac

SEQ ID NO: 2798568 - RNA, 19 nt, Artificial Sequence
  Description of Artificial Sequence: Synthetic oligonucleotide
agacuggcuaccaugcaug

SEQ ID NO: 2798569 - RNA, 19 nt, Artificial Sequence
  Description of Artificial Sequence: Synthetic oligonucleotide
guaugacgauuuucugugc

SEQ ID NO: 2798570 - RNA, 19 nt, Artificial Sequence
  Description of Artificial Sequence: Synthetic oligonucleotide
ugcuaccucccagucagcc

SEQ ID NO: 2798571 - RNA, 19 nt, Artificial Sequence
  Description of Artificial Sequence: Synthetic oligonucleotide
cucaagcaggcaaagcaga

SEQ ID NO: 2798572 - RNA, 19 nt, Artificial Sequence
  Description of Artificial Sequence: Synthetic oligonucleotide
cuaugauggggaggggagg

SEQ ID NO: 2798573 - RNA, 19 nt, Artificial Sequence
  Description of Artificial Sequence: Synthetic oligonucleotide
cccaggagcaccuaugaug

SEQ ID NO: 2798574 - RNA, 19 nt, Artificial Sequence
  Description of Artificial Sequence: Synthetic oligonucleotide
gugucaaaccaguuucaca

SEQ ID NO: 2798575 - RNA, 19 nt, Artificial Sequence
  Description of Artificial Sequence: Synthetic oligonucleotide
ugacgauuuucugugcuua

SEQ ID NO: 2798576 - RNA, 19 nt, Artificial Sequence
  Description of Artificial Sequence: Synthetic oligonucleotide
gauuuucugugcuuauuau

SEQ ID NO: 2798577 - RNA, 19 nt, Artificial Sequence
  Description of Artificial Sequence: Synthetic oligonucleotide
gaaggcagaccccaagacu

SEQ ID NO: 2798578 - RNA, 19 nt, Artificial Sequence
  Description of Artificial Sequence: Synthetic oligonucleotide
cucuacaaguggcucagca

SEQ ID NO: 2798579 - RNA, 19 nt, Artificial Sequence
  Description of Artificial Sequence: Synthetic oligonucleotide
acacuucuagaaaccuugg

SEQ ID NO: 2798580 - RNA, 19 nt, Artificial Sequence
  Description of Artificial Sequence: Synthetic oligonucleotide
ugguuggaaucuaguaaua

SEQ ID NO: 2798581 - RNA, 19 nt, Artificial Sequence
  Description of Artificial Sequence: Synthetic oligonucleotide
ugcuuauuauugguuggaa

SEQ ID NO: 2798582 - RNA, 19 nt, Artificial Sequence
  Description of Artificial Sequence: Synthetic oligonucleotide
uacagcugcugacaugcuu

SEQ ID NO: 2798583 - RNA, 19 nt, Artificial Sequence
  Description of Artificial Sequence: Synthetic oligonucleotide
cuucuagaaaccuuggcuu

SEQ ID NO: 2798584 - RNA, 19 nt, Artificial Sequence
  Description of Artificial Sequence: Synthetic oligonucleotide
cuagcggaugggcagccug

SEQ ID NO: 2798585 - RNA, 19 nt, Artificial Sequence
  Description of Artificial Sequence: Synthetic oligonucleotide
ggcucaagcacccuccaac

SEQ ID NO: 2798586 - RNA, 19 nt, Artificial Sequence
  Description of Artificial Sequence: Synthetic oligonucleotide
ggaaccccagauucaagug

SEQ ID NO: 2798587 - RNA, 19 nt, Artificial Sequence
  Description of Artificial Sequence: Synthetic oligonucleotide
auggccugcuaccucccag

SEQ ID NO: 2798588 - RNA, 19 nt, Artificial Sequence
  Description of Artificial Sequence: Synthetic oligonucleotide
cagcuucuuuaccuaaaac

SEQ ID NO: 2798589 - RNA, 19 nt, Artificial Sequence
  Description of Artificial Sequence: Synthetic oligonucleotide
uuacagugugcuagcggau

SEQ ID NO: 2798590 - RNA, 19 nt, Artificial Sequence
  Description of Artificial Sequence: Synthetic oligonucleotide
gaaccccagauucaagugu

SEQ ID NO: 2798591 - RNA, 19 nt, Artificial Sequence
  Description of Artificial Sequence: Synthetic oligonucleotide
aauggccugcuaccuccca

SEQ ID NO: 2798592 - RNA, 19 nt, Artificial Sequence
  Description of Artificial Sequence: Synthetic oligonucleotide
ucacaauggccugcuaccu

SEQ ID NO: 2798593 - RNA, 19 nt, Artificial Sequence
  Description of Artificial Sequence: Synthetic oligonucleotide
ccuaugauggggaggggag

SEQ ID NO: 2798594 - RNA, 19 nt, Artificial Sequence
  Description of Artificial Sequence: Synthetic oligonucleotide
gaagggcacagcuucuuua

SEQ ID NO: 2798595 - RNA, 19 nt, Artificial Sequence
  Description of Artificial Sequence: Synthetic oligonucleotide
uggcacucagagccuaccu

SEQ ID NO: 2798596 - RNA, 19 nt, Artificial Sequence
  Description of Artificial Sequence: Synthetic oligonucleotide
cagaagccccugucgaggc

SEQ ID NO: 2798597 - RNA, 19 nt, Artificial Sequence
  Description of Artificial Sequence: Synthetic oligonucleotide
gguuggaaucuaguaauac

SEQ ID NO: 2798598 - RNA, 19 nt, Artificial Sequence
  Description of Artificial Sequence: Synthetic oligonucleotide
augcaugugucaaaccagu

SEQ ID NO: 2798599 - RNA, 19 nt, Artificial Sequence
  Description of Artificial Sequence: Synthetic oligonucleotide
uagaaaccuuggcuucacu

SEQ ID NO: 2798600 - RNA, 19 nt, Artificial Sequence
  Description of Artificial Sequence: Synthetic oligonucleotide
acuggaaccccagauucaa

SEQ ID NO: 2798601 - RNA, 19 nt, Artificial Sequence
  Description of Artificial Sequence: Synthetic oligonucleotide
gaccccaagacuggcuacc

SEQ ID NO: 2798602 - RNA, 19 nt, Artificial Sequence
  Description of Artificial Sequence: Synthetic oligonucleotide
gcacuggaaccccagauuc

SEQ ID NO: 2798603 - RNA, 19 nt, Artificial Sequence
  Description of Artificial Sequence: Synthetic oligonucleotide
accuaugauggggagggga

SEQ ID NO: 2798604 - RNA, 19 nt, Artificial Sequence
  Description of Artificial Sequence: Synthetic oligonucleotide
gagcaccuaugauggggag

SEQ ID NO: 2798605 - RNA, 19 nt, Artificial Sequence
  Description of Artificial Sequence: Synthetic oligonucleotide
cucaagcacccuccaacug

SEQ ID NO: 2798606 - RNA, 19 nt, Artificial Sequence
  Description of Artificial Sequence: Synthetic oligonucleotide
uacagaaggcagaccccaa

SEQ ID NO: 2798607 - RNA, 19 nt, Artificial Sequence
  Description of Artificial Sequence: Synthetic oligonucleotide
gcgaugucccucaagcagg

SEQ ID NO: 2798608 - RNA, 19 nt, Artificial Sequence
  Description of Artificial Sequence: Synthetic oligonucleotide
gccgcuuccccugagaaug

SEQ ID NO: 2798609 - RNA, 19 nt, Artificial Sequence
  Description of Artificial Sequence: Synthetic oligonucleotide
ugcuugaagcgaugucccu

SEQ ID NO: 2798610 - RNA, 19 nt, Artificial Sequence
  Description of Artificial Sequence: Synthetic oligonucleotide
cuacagaaggcagacccca

SEQ ID NO: 2798611 - RNA, 19 nt, Artificial Sequence
  Description of Artificial Sequence: Synthetic oligonucleotide
cuagaaaccuuggcuucac

SEQ ID NO: 2798612 - RNA, 19 nt, Artificial Sequence
  Description of Artificial Sequence: Synthetic oligonucleotide
ccaugcaugugucaaacca

SEQ ID NO: 2798613 - RNA, 19 nt, Artificial Sequence
  Description of Artificial Sequence: Synthetic oligonucleotide
gaaugaaccagaagccccu

SEQ ID NO: 2798614 - RNA, 19 nt, Artificial Sequence
  Description of Artificial Sequence: Synthetic oligonucleotide
agucagccaacugcugcuc

SEQ ID NO: 2798615 - RNA, 19 nt, Artificial Sequence
  Description of Artificial Sequence: Synthetic oligonucleotide
gaccuccccaccccaggag

SEQ ID NO: 2798616 - RNA, 19 nt, Artificial Sequence
  Description of Artificial Sequence: Synthetic oligonucleotide
acgcaagucaggagggaag

SEQ ID NO: 2798617 - RNA, 19 nt, Artificial Sequence
  Description of Artificial Sequence: Synthetic oligonucleotide
cuggaaccccagauucaag

SEQ ID NO: 2798618 - RNA, 19 nt, Artificial Sequence
  Description of Artificial Sequence: Synthetic oligonucleotide
ugcuccccagaccucccca

SEQ ID NO: 2798619 - RNA, 19 nt, Artificial Sequence
  Description of Artificial Sequence: Synthetic oligonucleotide
cccaagacuggcuaccaug

SEQ ID NO: 2798620 - RNA, 19 nt, Artificial Sequence
  Description of Artificial Sequence: Synthetic oligonucleotide
uaccuauccgcagcccacc

SEQ ID NO: 2798621 - RNA, 19 nt, Artificial Sequence
  Description of Artificial Sequence: Synthetic oligonucleotide
caguuucacaauggccugc

SEQ ID NO: 2798622 - RNA, 19 nt, Artificial Sequence
  Description of Artificial Sequence: Synthetic oligonucleotide
guaauacagcugcugacau

SEQ ID NO: 2798623 - RNA, 19 nt, Artificial Sequence
  Description of Artificial Sequence: Synthetic oligonucleotide
cuccucuacaaguggcuca

SEQ ID NO: 2798624 - RNA, 19 nt, Artificial Sequence
  Description of Artificial Sequence: Synthetic oligonucleotide
caauggccugcuaccuccc

SEQ ID NO: 2798625 - RNA, 19 nt, Artificial Sequence
  Description of Artificial Sequence: Synthetic oligonucleotide
uggcuaccaugcauguguc

SEQ ID NO: 2798626 - RNA, 19 nt, Artificial Sequence
  Description of Artificial Sequence: Synthetic oligonucleotide
cacaauggccugcuaccuc

SEQ ID NO: 2798627 - RNA, 19 nt, Artificial Sequence
  Description of Artificial Sequence: Synthetic oligonucleotide
aggcuucuuuacagugugc

SEQ ID NO: 2798628 - RNA, 19 nt, Artificial Sequence
  Description of Artificial Sequence: Synthetic oligonucleotide
cugggagccgcuuccccug

SEQ ID NO: 2798629 - RNA, 19 nt, Artificial Sequence
  Description of Artificial Sequence: Synthetic oligonucleotide
caccccaggagcaccuaug

SEQ ID NO: 2798630 - RNA, 19 nt, Artificial Sequence
  Description of Artificial Sequence: Synthetic oligonucleotide
augugucaaaccaguuuca

SEQ ID NO: 2798631 - RNA, 19 nt, Artificial Sequence
  Description of Artificial Sequence: Synthetic oligonucleotide
gcugacaugcuugaagcga

SEQ ID NO: 2798632 - RNA, 19 nt, Artificial Sequence
  Description of Artificial Sequence: Synthetic oligonucleotide
ucccucaagcaggcaaagc

SEQ ID NO: 2798633 - RNA, 19 nt, Artificial Sequence
  Description of Artificial Sequence: Synthetic oligonucleotide
cccucaagcaggcaaagca

SEQ ID NO: 2798634 - RNA, 19 nt, Artificial Sequence
  Description of Artificial Sequence: Synthetic oligonucleotide
cagugugcuagcggauggg

SEQ ID NO: 2798635 - RNA, 19 nt, Artificial Sequence
  Description of Artificial Sequence: Synthetic oligonucleotide
cugucgaggcuucuuuaca

SEQ ID NO: 2798636 - RNA, 19 nt, Artificial Sequence
  Description of Artificial Sequence: Synthetic oligonucleotide
acuggcacucagagccuac

SEQ ID NO: 2798637 - RNA, 19 nt, Artificial Sequence
  Description of Artificial Sequence: Synthetic oligonucleotide
cuggcacucagagccuacc

SEQ ID NO: 2798638 - RNA, 19 nt, Artificial Sequence
  Description of Artificial Sequence: Synthetic oligonucleotide
cagggcuacagaaggcaga

SEQ ID NO: 2798639 - RNA, 19 nt, Artificial Sequence
  Description of Artificial Sequence: Synthetic oligonucleotide
gagccgcuuccccugagaa

SEQ ID NO: 2798640 - RNA, 19 nt, Artificial Sequence
  Description of Artificial Sequence: Synthetic oligonucleotide
aucuaguaauacagcugcu

SEQ ID NO: 2798641 - RNA, 19 nt, Artificial Sequence
  Description of Artificial Sequence: Synthetic oligonucleotide
ccugucgaggcuucuuuac

SEQ ID NO: 2798642 - RNA, 19 nt, Artificial Sequence
  Description of Artificial Sequence: Synthetic oligonucleotide
caggagcaccuaugauggg

SEQ ID NO: 2798643 - RNA, 19 nt, Artificial Sequence
  Description of Artificial Sequence: Synthetic oligonucleotide
agcggaugggcagccuggg

SEQ ID NO: 2798644 - RNA, 19 nt, Artificial Sequence
  Description of Artificial Sequence: Synthetic oligonucleotide
gacaugcuugaagcgaugu

SEQ ID NO: 2798645 - RNA, 19 nt, Artificial Sequence
  Description of Artificial Sequence: Synthetic oligonucleotide
acuggcuaccaugcaugug

SEQ ID NO: 2798646 - RNA, 19 nt, Artificial Sequence
  Description of Artificial Sequence: Synthetic oligonucleotide
gcuaccaugcaugugucaa

SEQ ID NO: 2798647 - RNA, 19 nt, Artificial Sequence
  Description of Artificial Sequence: Synthetic oligonucleotide
cacuggaaccccagauuca

SEQ ID NO: 2798648 - RNA, 19 nt, Artificial Sequence
  Description of Artificial Sequence: Synthetic oligonucleotide
acucagggccaaguuccag

SEQ ID NO: 2798649 - RNA, 19 nt, Artificial Sequence
  Description of Artificial Sequence: Synthetic oligonucleotide
ccagaagccccugucgagg

SEQ ID NO: 2798650 - RNA, 19 nt, Artificial Sequence
  Description of Artificial Sequence: Synthetic oligonucleotide
agacacuucuagaaaccuu

SEQ ID NO: 2798651 - RNA, 19 nt, Artificial Sequence
  Description of Artificial Sequence: Synthetic oligonucleotide
agaagccccugucgaggcu

SEQ ID NO: 2798652 - RNA, 19 nt, Artificial Sequence
  Description of Artificial Sequence: Synthetic oligonucleotide
cagagccuaccuauccgca

SEQ ID NO: 2798653 - RNA, 19 nt, Artificial Sequence
  Description of Artificial Sequence: Synthetic oligonucleotide
cuaccaugcaugugucaaa

SEQ ID NO: 2798654 - RNA, 19 nt, Artificial Sequence
  Description of Artificial Sequence: Synthetic oligonucleotide
ugcuagcggaugggcagcc

SEQ ID NO: 2798655 - RNA, 19 nt, Artificial Sequence
  Description of Artificial Sequence: Synthetic oligonucleotide
uugaagcgaugucccucaa

SEQ ID NO: 2798656 - RNA, 19 nt, Artificial Sequence
  Description of Artificial Sequence: Synthetic oligonucleotide
cuccccagaccuccccacc

SEQ ID NO: 2798657 - RNA, 19 nt, Artificial Sequence
  Description of Artificial Sequence: Synthetic oligonucleotide
caaguuccagggcuacaga

SEQ ID NO: 2798658 - RNA, 19 nt, Artificial Sequence
  Description of Artificial Sequence: Synthetic oligonucleotide
gcuacagaaggcagacccc

SEQ ID NO: 2798659 - RNA, 19 nt, Artificial Sequence
  Description of Artificial Sequence: Synthetic oligonucleotide
cagccaacugcugcucccc

SEQ ID NO: 2798660 - RNA, 19 nt, Artificial Sequence
  Description of Artificial Sequence: Synthetic oligonucleotide
aagccccugucgaggcuuc

SEQ ID NO: 2798661 - RNA, 19 nt, Artificial Sequence
  Description of Artificial Sequence: Synthetic oligonucleotide
gacgauuuucugugcuuau

SEQ ID NO: 2798662 - RNA, 19 nt, Artificial Sequence
  Description of Artificial Sequence: Synthetic oligonucleotide
cccagagaaucugggagcc

SEQ ID NO: 2798663 - RNA, 19 nt, Artificial Sequence
  Description of Artificial Sequence: Synthetic oligonucleotide
agagaaucugggagccgcu

SEQ ID NO: 2798664 - RNA, 19 nt, Artificial Sequence
  Description of Artificial Sequence: Synthetic oligonucleotide
gcuuauuauugguuggaau

SEQ ID NO: 2798665 - RNA, 19 nt, Artificial Sequence
  Description of Artificial Sequence: Synthetic oligonucleotide
ccagggcuacagaaggcag

SEQ ID NO: 2798666 - RNA, 19 nt, Artificial Sequence
  Description of Artificial Sequence: Synthetic oligonucleotide
cagggccaaguuccagggc

SEQ ID NO: 2798667 - RNA, 19 nt, Artificial Sequence
  Description of Artificial Sequence: Synthetic oligonucleotide
caagacuggcuaccaugca

SEQ ID NO: 2798668 - RNA, 19 nt, Artificial Sequence
  Description of Artificial Sequence: Synthetic oligonucleotide
gacuggcuaccaugcaugu

SEQ ID NO: 2798669 - RNA, 19 nt, Artificial Sequence
  Description of Artificial Sequence: Synthetic oligonucleotide
cccagauucaagugugaca

SEQ ID NO: 2798670 - RNA, 19 nt, Artificial Sequence
  Description of Artificial Sequence: Synthetic oligonucleotide
ggagcaccuaugaugggga

SEQ ID NO: 2798671 - RNA, 19 nt, Artificial Sequence
  Description of Artificial Sequence: Synthetic oligonucleotide
gcuugaagcgaugucccuc

SEQ ID NO: 2798672 - RNA, 19 nt, Artificial Sequence
  Description of Artificial Sequence: Synthetic oligonucleotide
gucgaggcuucuuuacagu

SEQ ID NO: 2798673 - RNA, 19 nt, Artificial Sequence
  Description of Artificial Sequence: Synthetic oligonucleotide
agccgcuuccccugagaau

SEQ ID NO: 2798674 - RNA, 19 nt, Artificial Sequence
  Description of Artificial Sequence: Synthetic oligonucleotide
gugugcuagcggaugggca

SEQ ID NO: 2798675 - RNA, 19 nt, Artificial Sequence
  Description of Artificial Sequence: Synthetic oligonucleotide
uaccucccagucagccaac

SEQ ID NO: 2798676 - RNA, 19 nt, Artificial Sequence
  Description of Artificial Sequence: Synthetic oligonucleotide
ggcuucuuuacagugugcu

SEQ ID NO: 2798677 - RNA, 19 nt, Artificial Sequence
  Description of Artificial Sequence: Synthetic oligonucleotide
gugcuagcggaugggcagc

SEQ ID NO: 2798678 - RNA, 19 nt, Artificial Sequence
  Description of Artificial Sequence: Synthetic oligonucleotide
gggcacagcuucuuuaccu

SEQ ID NO: 2798679 - RNA, 19 nt, Artificial Sequence
  Description of Artificial Sequence: Synthetic oligonucleotide
ccuaccuauccgcagccca

SEQ ID NO: 2798680 - RNA, 19 nt, Artificial Sequence
  Description of Artificial Sequence: Synthetic oligonucleotide
gcuaccucccagucagcca

SEQ ID NO: 2798681 - RNA, 19 nt, Artificial Sequence
  Description of Artificial Sequence: Synthetic oligonucleotide
gcaugugucaaaccaguuu

SEQ ID NO: 2798682 - RNA, 19 nt, Artificial Sequence
  Description of Artificial Sequence: Synthetic oligonucleotide
gcuucuuuacagugugcua

SEQ ID NO: 2798683 - RNA, 19 nt, Artificial Sequence
  Description of Artificial Sequence: Synthetic oligonucleotide
gcacucagagccuaccuau

SEQ ID NO: 2798684 - RNA, 19 nt, Artificial Sequence
  Description of Artificial Sequence: Synthetic oligonucleotide
ccuauccgcagcccacccc

SEQ ID NO: 2798685 - RNA, 19 nt, Artificial Sequence
  Description of Artificial Sequence: Synthetic oligonucleotide
gcucaagcacccuccaacu

SEQ ID NO: 2798686 - RNA, 19 nt, Artificial Sequence
  Description of Artificial Sequence: Synthetic oligonucleotide
caccuaugauggggagggg

SEQ ID NO: 2798687 - RNA, 19 nt, Artificial Sequence
  Description of Artificial Sequence: Synthetic oligonucleotide
cacucagggccaaguucca

SEQ ID NO: 2798688 - RNA, 19 nt, Artificial Sequence
  Description of Artificial Sequence: Synthetic oligonucleotide
aagcacccuccaacuggca

SEQ ID NO: 2798689 - RNA, 19 nt, Artificial Sequence
  Description of Artificial Sequence: Synthetic oligonucleotide
ggcagaccccaagacuggc

SEQ ID NO: 2798690 - RNA, 19 nt, Artificial Sequence
  Description of Artificial Sequence: Synthetic oligonucleotide
ccccugagaaugaaccaga

SEQ ID NO: 2798691 - RNA, 19 nt, Artificial Sequence
  Description of Artificial Sequence: Synthetic oligonucleotide
accccagauucaaguguga

SEQ ID NO: 2798692 - RNA, 19 nt, Artificial Sequence
  Description of Artificial Sequence: Synthetic oligonucleotide
ggcuaccaugcauguguca

SEQ ID NO: 2798693 - RNA, 19 nt, Artificial Sequence
  Description of Artificial Sequence: Synthetic oligonucleotide
auacagcugcugacaugcu

SEQ ID NO: 2798694 - RNA, 19 nt, Artificial Sequence
  Description of Artificial Sequence: Synthetic oligonucleotide
ccccagauucaagugugac

SEQ ID NO: 2798695 - RNA, 19 nt, Artificial Sequence
  Description of Artificial Sequence: Synthetic oligonucleotide
gcaggcaaagcagacacuu

SEQ ID NO: 2798696 - RNA, 19 nt, Artificial Sequence
  Description of Artificial Sequence: Synthetic oligonucleotide
ccaacugcugcuccccaga

SEQ ID NO: 2798697 - RNA, 19 nt, Artificial Sequence
  Description of Artificial Sequence: Synthetic oligonucleotide
gcuuccccugagaaugaac

SEQ ID NO: 2798698 - RNA, 19 nt, Artificial Sequence
  Description of Artificial Sequence: Synthetic oligonucleotide
caacgcaagucaggaggga

SEQ ID NO: 2798699 - RNA, 19 nt, Artificial Sequence
  Description of Artificial Sequence: Synthetic oligonucleotide
gaagccccugucgaggcuu

SEQ ID NO: 2798700 - RNA, 19 nt, Artificial Sequence
  Description of Artificial Sequence: Synthetic oligonucleotide
ccagaccuccccaccccag

SEQ ID NO: 2798701 - RNA, 19 nt, Artificial Sequence
  Description of Artificial Sequence: Synthetic oligonucleotide
cuccccaccccaggagcac

SEQ ID NO: 2798702 - RNA, 19 nt, Artificial Sequence
  Description of Artificial Sequence: Synthetic oligonucleotide
cuucacucagggccaaguu

SEQ ID NO: 2798703 - RNA, 19 nt, Artificial Sequence
  Description of Artificial Sequence: Synthetic oligonucleotide
ggagccgcuuccccugaga

SEQ ID NO: 2798704 - RNA, 19 nt, Artificial Sequence
  Description of Artificial Sequence: Synthetic oligonucleotide
ggcaaagcagacacuucua

SEQ ID NO: 2798705 - RNA, 19 nt, Artificial Sequence
  Description of Artificial Sequence: Synthetic oligonucleotide
ggcacuggaaccccagauu

SEQ ID NO: 2798706 - RNA, 19 nt, Artificial Sequence
  Description of Artificial Sequence: Synthetic oligonucleotide
uggcuucacucagggccaa

SEQ ID NO: 2798707 - RNA, 19 nt, Artificial Sequence
  Description of Artificial Sequence: Synthetic oligonucleotide
gagaaucugggagccgcuu

SEQ ID NO: 2798708 - RNA, 19 nt, Artificial Sequence
  Description of Artificial Sequence: Synthetic oligonucleotide
ggccaaguuccagggcuac

SEQ ID NO: 2798709 - RNA, 19 nt, Artificial Sequence
  Description of Artificial Sequence: Synthetic oligonucleotide
caacuggcacucagagccu

SEQ ID NO: 2798710 - RNA, 19 nt, Artificial Sequence
  Description of Artificial Sequence: Synthetic oligonucleotide
ggggcucaagcacccucca

SEQ ID NO: 2798711 - RNA, 19 nt, Artificial Sequence
  Description of Artificial Sequence: Synthetic oligonucleotide
cccugagaaugaaccagaa

SEQ ID NO: 2798712 - RNA, 19 nt, Artificial Sequence
  Description of Artificial Sequence: Synthetic oligonucleotide
gggcuacagaaggcagacc

SEQ ID NO: 2798713 - RNA, 19 nt, Artificial Sequence
  Description of Artificial Sequence: Synthetic oligonucleotide
gccuaccuauccgcagccc

SEQ ID NO: 2798714 - RNA, 19 nt, Artificial Sequence
  Description of Artificial Sequence: Synthetic oligonucleotide
ggcuucacucagggccaag

SEQ ID NO: 2798715 - RNA, 19 nt, Artificial Sequence
  Description of Artificial Sequence: Synthetic oligonucleotide
ggaagggcacagcuucuuu

SEQ ID NO: 2798716 - RNA, 19 nt, Artificial Sequence
  Description of Artificial Sequence: Synthetic oligonucleotide
ccuccccaccccaggagca

SEQ ID NO: 2798717 - RNA, 19 nt, Artificial Sequence
  Description of Artificial Sequence: Synthetic oligonucleotide
gggcucaagcacccuccaa

SEQ ID NO: 2798718 - RNA, 19 nt, Artificial Sequence
  Description of Artificial Sequence: Synthetic oligonucleotide
gccaaguuccagggcuaca

SEQ ID NO: 2798719 - RNA, 19 nt, Artificial Sequence
  Description of Artificial Sequence: Synthetic oligonucleotide
ccucuacaaguggcucagc

SEQ ID NO: 2798720 - RNA, 19 nt, Artificial Sequence
  Description of Artificial Sequence: Synthetic oligonucleotide
agccccugucgaggcuucu

SEQ ID NO: 2798721 - RNA, 19 nt, Artificial Sequence
  Description of Artificial Sequence: Synthetic oligonucleotide
cccagaccuccccacccca

SEQ ID NO: 2798722 - RNA, 19 nt, Artificial Sequence
  Description of Artificial Sequence: Synthetic oligonucleotide
cccugucgaggcuucuuua

SEQ ID NO: 2798723 - RNA, 19 nt, Artificial Sequence
  Description of Artificial Sequence: Synthetic oligonucleotide
gcagaccccaagacuggcu

SEQ ID NO: 2798724 - RNA, 19 nt, Artificial Sequence
  Description of Artificial Sequence: Synthetic oligonucleotide
gggccaaguuccagggcua

SEQ ID NO: 2798725 - RNA, 19 nt, Artificial Sequence
  Description of Artificial Sequence: Synthetic oligonucleotide
ccgcuuccccugagaauga

SEQ ID NO: 2798726 - RNA, 19 nt, Artificial Sequence
  Description of Artificial Sequence: Synthetic oligonucleotide
gcuagcggaugggcagccu

SEQ ID NO: 2798727 - RNA, 19 nt, Artificial Sequence
  Description of Artificial Sequence: Synthetic oligonucleotide
ccccugucgaggcuucuuu

SEQ ID NO: 2798728 - RNA, 19 nt, Artificial Sequence
  Description of Artificial Sequence: Synthetic oligonucleotide
gccccugucgaggcuucuu

SEQ ID NO: 2798729 - RNA, 19 nt, Artificial Sequence
  Description of Artificial Sequence: Synthetic oligonucleotide
aaaauaauuugagaagucc

SEQ ID NO: 2798730 - RNA, 19 nt, Artificial Sequence
  Description of Artificial Sequence: Synthetic oligonucleotide
agaaagaucaguaacaugg

SEQ ID NO: 2798731 - RNA, 19 nt, Artificial Sequence
  Description of Artificial Sequence: Synthetic oligonucleotide
auuaacagaaaauaauuug

SEQ ID NO: 2798732 - RNA, 19 nt, Artificial Sequence
  Description of Artificial Sequence: Synthetic oligonucleotide
uuuauuaacagaaaauaau

SEQ ID NO: 2798733 - RNA, 19 nt, Artificial Sequence
  Description of Artificial Sequence: Synthetic oligonucleotide
acagaaaauaauuugagaa

SEQ ID NO: 2798734 - RNA, 19 nt, Artificial Sequence
  Description of Artificial Sequence: Synthetic oligonucleotide
aauuugagaaguccuguuc

SEQ ID NO: 2798735 - RNA, 19 nt, Artificial Sequence
  Description of Artificial Sequence: Synthetic oligonucleotide
aaagcaauuuauuaacaga

SEQ ID NO: 2798736 - RNA, 19 nt, Artificial Sequence
  Description of Artificial Sequence: Synthetic oligonucleotide
aauuuauuaacagaaaaua

SEQ ID NO: 2798737 - RNA, 19 nt, Artificial Sequence
  Description of Artificial Sequence: Synthetic oligonucleotide
aaagaucaguaacauggac

SEQ ID NO: 2798738 - RNA, 19 nt, Artificial Sequence
  Description of Artificial Sequence: Synthetic oligonucleotide
uuccuugccagaaagauca

SEQ ID NO: 2798739 - RNA, 19 nt, Artificial Sequence
  Description of Artificial Sequence: Synthetic oligonucleotide
uaacagaaaauaauuugag

SEQ ID NO: 2798740 - RNA, 19 nt, Artificial Sequence
  Description of Artificial Sequence: Synthetic oligonucleotide
uuauuaacagaaaauaauu

SEQ ID NO: 2798741 - RNA, 19 nt, Artificial Sequence
  Description of Artificial Sequence: Synthetic oligonucleotide
aaggagaagacucaucucu

SEQ ID NO: 2798742 - RNA, 19 nt, Artificial Sequence
  Description of Artificial Sequence: Synthetic oligonucleotide
aauacauucucuccuucag

SEQ ID NO: 2798743 - RNA, 19 nt, Artificial Sequence
  Description of Artificial Sequence: Synthetic oligonucleotide
aucucugucagccuuuacc

SEQ ID NO: 2798744 - RNA, 19 nt, Artificial Sequence
  Description of Artificial Sequence: Synthetic oligonucleotide
caaucuucaucccugaacg

SEQ ID NO: 2798745 - RNA, 19 nt, Artificial Sequence
  Description of Artificial Sequence: Synthetic oligonucleotide
uuuaccuucauuccaccag

SEQ ID NO: 2798746 - RNA, 19 nt, Artificial Sequence
  Description of Artificial Sequence: Synthetic oligonucleotide
auaaggagaagacucaucu

SEQ ID NO: 2798747 - RNA, 19 nt, Artificial Sequence
  Description of Artificial Sequence: Synthetic oligonucleotide
aaguccuguucacagacgg

SEQ ID NO: 2798748 - RNA, 19 nt, Artificial Sequence
  Description of Artificial Sequence: Synthetic oligonucleotide
uacaaagcaauuuauuaac

SEQ ID NO: 2798749 - RNA, 19 nt, Artificial Sequence
  Description of Artificial Sequence: Synthetic oligonucleotide
aacagaaaauaauuugaga

SEQ ID NO: 2798750 - RNA, 19 nt, Artificial Sequence
  Description of Artificial Sequence: Synthetic oligonucleotide
auaugcagggcagugaugc

SEQ ID NO: 2798751 - RNA, 19 nt, Artificial Sequence
  Description of Artificial Sequence: Synthetic oligonucleotide
acaaaggugucguugaaag

SEQ ID NO: 2798752 - RNA, 19 nt, Artificial Sequence
  Description of Artificial Sequence: Synthetic oligonucleotide
ucuuauacaaagcaauuua

SEQ ID NO: 2798753 - RNA, 19 nt, Artificial Sequence
  Description of Artificial Sequence: Synthetic oligonucleotide
cagaaaauaauuugagaag

SEQ ID NO: 2798754 - RNA, 19 nt, Artificial Sequence
  Description of Artificial Sequence: Synthetic oligonucleotide
aacauggcugcauaaggag

SEQ ID NO: 2798755 - RNA, 19 nt, Artificial Sequence
  Description of Artificial Sequence: Synthetic oligonucleotide
aauaauuugagaaguccug

SEQ ID NO: 2798756 - RNA, 19 nt, Artificial Sequence
  Description of Artificial Sequence: Synthetic oligonucleotide
agaaaauaauuugagaagu

SEQ ID NO: 2798757 - RNA, 19 nt, Artificial Sequence
  Description of Artificial Sequence: Synthetic oligonucleotide
aucaguaacauggacaaag

SEQ ID NO: 2798758 - RNA, 19 nt, Artificial Sequence
  Description of Artificial Sequence: Synthetic oligonucleotide
uauuaacagaaaauaauuu

SEQ ID NO: 2798759 - RNA, 19 nt, Artificial Sequence
  Description of Artificial Sequence: Synthetic oligonucleotide
uuuuccuuucccuugcgag

SEQ ID NO: 2798760 - RNA, 19 nt, Artificial Sequence
  Description of Artificial Sequence: Synthetic oligonucleotide
uacauucucuccuucagcc

SEQ ID NO: 2798761 - RNA, 19 nt, Artificial Sequence
  Description of Artificial Sequence: Synthetic oligonucleotide
ucggaguuugauaugcagg

SEQ ID NO: 2798762 - RNA, 19 nt, Artificial Sequence
  Description of Artificial Sequence: Synthetic oligonucleotide
ucaguaacauggacaaagg

SEQ ID NO: 2798763 - RNA, 19 nt, Artificial Sequence
  Description of Artificial Sequence: Synthetic oligonucleotide
aaauaauuugagaaguccu

SEQ ID NO: 2798764 - RNA, 19 nt, Artificial Sequence
  Description of Artificial Sequence: Synthetic oligonucleotide
ugagaaguccuguucacag

SEQ ID NO: 2798765 - RNA, 19 nt, Artificial Sequence
  Description of Artificial Sequence: Synthetic oligonucleotide
caaagcaauuuauuaacag

SEQ ID NO: 2798766 - RNA, 19 nt, Artificial Sequence
  Description of Artificial Sequence: Synthetic oligonucleotide
uccugggcagccaacaugg

SEQ ID NO: 2798767 - RNA, 19 nt, Artificial Sequence
  Description of Artificial Sequence: Synthetic oligonucleotide
uucgggugcugucagaggg

SEQ ID NO: 2798768 - RNA, 19 nt, Artificial Sequence
  Description of Artificial Sequence: Synthetic oligonucleotide
uuuuagucuuauacaaagc

SEQ ID NO: 2798769 - RNA, 19 nt, Artificial Sequence
  Description of Artificial Sequence: Synthetic oligonucleotide
agacucaucucugucagcc

SEQ ID NO: 2798770 - RNA, 19 nt, Artificial Sequence
  Description of Artificial Sequence: Synthetic oligonucleotide
aaauacauucucuccuuca

SEQ ID NO: 2798771 - RNA, 19 nt, Artificial Sequence
  Description of Artificial Sequence: Synthetic oligonucleotide
aaaggugucguugaaagau

SEQ ID NO: 2798772 - RNA, 19 nt, Artificial Sequence
  Description of Artificial Sequence: Synthetic oligonucleotide
aguaacauggacaaaggug

SEQ ID NO: 2798773 - RNA, 19 nt, Artificial Sequence
  Description of Artificial Sequence: Synthetic oligonucleotide
uagucuuauacaaagcaau

SEQ ID NO: 2798774 - RNA, 19 nt, Artificial Sequence
  Description of Artificial Sequence: Synthetic oligonucleotide
cauuccaccagucacccgg

SEQ ID NO: 2798775 - RNA, 19 nt, Artificial Sequence
  Description of Artificial Sequence: Synthetic oligonucleotide
aagcaauuuauuaacagaa

SEQ ID NO: 2798776 - RNA, 19 nt, Artificial Sequence
  Description of Artificial Sequence: Synthetic oligonucleotide
uuagucuuauacaaagcaa

SEQ ID NO: 2798777 - RNA, 19 nt, Artificial Sequence
  Description of Artificial Sequence: Synthetic oligonucleotide
uguggcagacaccaaauac

SEQ ID NO: 2798778 - RNA, 19 nt, Artificial Sequence
  Description of Artificial Sequence: Synthetic oligonucleotide
auacauucucuccuucagc

SEQ ID NO: 2798779 - RNA, 19 nt, Artificial Sequence
  Description of Artificial Sequence: Synthetic oligonucleotide
agaucaguaacauggacaa

SEQ ID NO: 2798780 - RNA, 19 nt, Artificial Sequence
  Description of Artificial Sequence: Synthetic oligonucleotide
aagaucaguaacauggaca

SEQ ID NO: 2798781 - RNA, 19 nt, Artificial Sequence
  Description of Artificial Sequence: Synthetic oligonucleotide
auuugagaaguccuguuca

SEQ ID NO: 2798782 - RNA, 19 nt, Artificial Sequence
  Description of Artificial Sequence: Synthetic oligonucleotide
auuucugaacgucgucucc

SEQ ID NO: 2798783 - RNA, 19 nt, Artificial Sequence
  Description of Artificial Sequence: Synthetic oligonucleotide
aaauguggcagacaccaaa

SEQ ID NO: 2798784 - RNA, 19 nt, Artificial Sequence
  Description of Artificial Sequence: Synthetic oligonucleotide
uguuuccucccguagcucg

SEQ ID NO: 2798785 - RNA, 19 nt, Artificial Sequence
  Description of Artificial Sequence: Synthetic oligonucleotide
accaaauacauucucuccu

SEQ ID NO: 2798786 - RNA, 19 nt, Artificial Sequence
  Description of Artificial Sequence: Synthetic oligonucleotide
uuauacaaagcaauuuauu

SEQ ID NO: 2798787 - RNA, 19 nt, Artificial Sequence
  Description of Artificial Sequence: Synthetic oligonucleotide
uaguuuccuugccagaaag

SEQ ID NO: 2798788 - RNA, 19 nt, Artificial Sequence
  Description of Artificial Sequence: Synthetic oligonucleotide
aauccgcccaaucuucauc

SEQ ID NO: 2798789 - RNA, 19 nt, Artificial Sequence
  Description of Artificial Sequence: Synthetic oligonucleotide
aacauggacaaaggugucg

SEQ ID NO: 2798790 - RNA, 19 nt, Artificial Sequence
  Description of Artificial Sequence: Synthetic oligonucleotide
ugggcagccaacauggcug

SEQ ID NO: 2798791 - RNA, 19 nt, Artificial Sequence
  Description of Artificial Sequence: Synthetic oligonucleotide
ugagguccgaggcugauga

SEQ ID NO: 2798792 - RNA, 19 nt, Artificial Sequence
  Description of Artificial Sequence: Synthetic oligonucleotide
ucuucaucccugaacgagc

SEQ ID NO: 2798793 - RNA, 19 nt, Artificial Sequence
  Description of Artificial Sequence: Synthetic oligonucleotide
ucucugucagccuuuaccu

SEQ ID NO: 2798794 - RNA, 19 nt, Artificial Sequence
  Description of Artificial Sequence: Synthetic oligonucleotide
ugccagaaagaucaguaac

SEQ ID NO: 2798795 - RNA, 19 nt, Artificial Sequence
  Description of Artificial Sequence: Synthetic oligonucleotide
cuucauuccaccagucacc

SEQ ID NO: 2798796 - RNA, 19 nt, Artificial Sequence
  Description of Artificial Sequence: Synthetic oligonucleotide
gcagacaccaaauacauuc

SEQ ID NO: 2798797 - RNA, 19 nt, Artificial Sequence
  Description of Artificial Sequence: Synthetic oligonucleotide
acgagcaagagcucugagg

SEQ ID NO: 2798798 - RNA, 19 nt, Artificial Sequence
  Description of Artificial Sequence: Synthetic oligonucleotide
gaggugccauuucugaacg

SEQ ID NO: 2798799 - RNA, 19 nt, Artificial Sequence
  Description of Artificial Sequence: Synthetic oligonucleotide
augcccagcuccuugcacc

SEQ ID NO: 2798800 - RNA, 19 nt, Artificial Sequence
  Description of Artificial Sequence: Synthetic oligonucleotide
acagacggcgaccacgacg

SEQ ID NO: 2798801 - RNA, 19 nt, Artificial Sequence
  Description of Artificial Sequence: Synthetic oligonucleotide
gaguuugauaugcagggca

SEQ ID NO: 2798802 - RNA, 19 nt, Artificial Sequence
  Description of Artificial Sequence: Synthetic oligonucleotide
agaagacucaucucuguca

SEQ ID NO: 2798803 - RNA, 19 nt, Artificial Sequence
  Description of Artificial Sequence: Synthetic oligonucleotide
agcucggaguuugauaugc

SEQ ID NO: 2798804 - RNA, 19 nt, Artificial Sequence
  Description of Artificial Sequence: Synthetic oligonucleotide
cagauaguuuccuugccag

SEQ ID NO: 2798805 - RNA, 19 nt, Artificial Sequence
  Description of Artificial Sequence: Synthetic oligonucleotide
aagacucaucucugucagc

SEQ ID NO: 2798806 - RNA, 19 nt, Artificial Sequence
  Description of Artificial Sequence: Synthetic oligonucleotide
uucacagacggcgaccacg

SEQ ID NO: 2798807 - RNA, 19 nt, Artificial Sequence
  Description of Artificial Sequence: Synthetic oligonucleotide
uuaccuucauuccaccagu

SEQ ID NO: 2798808 - RNA, 19 nt, Artificial Sequence
  Description of Artificial Sequence: Synthetic oligonucleotide
ugauaugcagggcagugau

SEQ ID NO: 2798809 - RNA, 19 nt, Artificial Sequence
  Description of Artificial Sequence: Synthetic oligonucleotide
ugucguugaaagaugcaaa

SEQ ID NO: 2798810 - RNA, 19 nt, Artificial Sequence
  Description of Artificial Sequence: Synthetic oligonucleotide
ucaucccugaacgagcaag

SEQ ID NO: 2798811 - RNA, 19 nt, Artificial Sequence
  Description of Artificial Sequence: Synthetic oligonucleotide
uggacaaaggugucguuga

SEQ ID NO: 2798812 - RNA, 19 nt, Artificial Sequence
  Description of Artificial Sequence: Synthetic oligonucleotide
cugacugggcuccaggucc

SEQ ID NO: 2798813 - RNA, 19 nt, Artificial Sequence
  Description of Artificial Sequence: Synthetic oligonucleotide
agacaccaaauacauucuc

SEQ ID NO: 2798814 - RNA, 19 nt, Artificial Sequence
  Description of Artificial Sequence: Synthetic oligonucleotide
ucugucagccuuuaccuuc

SEQ ID NO: 2798815 - RNA, 19 nt, Artificial Sequence
  Description of Artificial Sequence: Synthetic oligonucleotide
gaaaauaauuugagaaguc

SEQ ID NO: 2798816 - RNA, 19 nt, Artificial Sequence
  Description of Artificial Sequence: Synthetic oligonucleotide
cugaacgucgucuccagac

SEQ ID NO: 2798817 - RNA, 19 nt, Artificial Sequence
  Description of Artificial Sequence: Synthetic oligonucleotide
caccaaauacauucucucc

SEQ ID NO: 2798818 - RNA, 19 nt, Artificial Sequence
  Description of Artificial Sequence: Synthetic oligonucleotide
auaauuugagaaguccugu

SEQ ID NO: 2798819 - RNA, 19 nt, Artificial Sequence
  Description of Artificial Sequence: Synthetic oligonucleotide
ugaacgagcaagagcucug

SEQ ID NO: 2798820 - RNA, 19 nt, Artificial Sequence
  Description of Artificial Sequence: Synthetic oligonucleotide
guaacauggacaaaggugu

SEQ ID NO: 2798821 - RNA, 19 nt, Artificial Sequence
  Description of Artificial Sequence: Synthetic oligonucleotide
uuugagaaguccuguucac

SEQ ID NO: 2798822 - RNA, 19 nt, Artificial Sequence
  Description of Artificial Sequence: Synthetic oligonucleotide
guccuguucacagacggcg

SEQ ID NO: 2798823 - RNA, 19 nt, Artificial Sequence
  Description of Artificial Sequence: Synthetic oligonucleotide
ugggcaacauccugggcag

SEQ ID NO: 2798824 - RNA, 19 nt, Artificial Sequence
  Description of Artificial Sequence: Synthetic oligonucleotide
ucacccggcagauaguuuc

SEQ ID NO: 2798825 - RNA, 19 nt, Artificial Sequence
  Description of Artificial Sequence: Synthetic oligonucleotide
cauucucuccuucagccac

SEQ ID NO: 2798826 - RNA, 19 nt, Artificial Sequence
  Description of Artificial Sequence: Synthetic oligonucleotide
ucccugaacgagcaagagc

SEQ ID NO: 2798827 - RNA, 19 nt, Artificial Sequence
  Description of Artificial Sequence: Synthetic oligonucleotide
uccuguuuccucccguagc

SEQ ID NO: 2798828 - RNA, 19 nt, Artificial Sequence
  Description of Artificial Sequence: Synthetic oligonucleotide
uggcagacaccaaauacau

SEQ ID NO: 2798829 - RNA, 19 nt, Artificial Sequence
  Description of Artificial Sequence: Synthetic oligonucleotide
uuuccuugccagaaagauc

SEQ ID NO: 2798830 - RNA, 19 nt, Artificial Sequence
  Description of Artificial Sequence: Synthetic oligonucleotide
aucuucaucccugaacgag

SEQ ID NO: 2798831 - RNA, 19 nt, Artificial Sequence
  Description of Artificial Sequence: Synthetic oligonucleotide
aaucuucaucccugaacga

SEQ ID NO: 2798832 - RNA, 19 nt, Artificial Sequence
  Description of Artificial Sequence: Synthetic oligonucleotide
gucgucuccagacuucucc

SEQ ID NO: 2798833 - RNA, 19 nt, Artificial Sequence
  Description of Artificial Sequence: Synthetic oligonucleotide
agguccgaggcugaugacc

SEQ ID NO: 2798834 - RNA, 19 nt, Artificial Sequence
  Description of Artificial Sequence: Synthetic oligonucleotide
gcaauuuauuaacagaaaa

SEQ ID NO: 2798835 - RNA, 19 nt, Artificial Sequence
  Description of Artificial Sequence: Synthetic oligonucleotide
agcuccuugcaccucuggg

SEQ ID NO: 2798836 - RNA, 19 nt, Artificial Sequence
  Description of Artificial Sequence: Synthetic oligonucleotide
cucggaguuugauaugcag

SEQ ID NO: 2798837 - RNA, 19 nt, Artificial Sequence
  Description of Artificial Sequence: Synthetic oligonucleotide
aggugucguugaaagaugc

SEQ ID NO: 2798838 - RNA, 19 nt, Artificial Sequence
  Description of Artificial Sequence: Synthetic oligonucleotide
uucauuccaccagucaccc

SEQ ID NO: 2798839 - RNA, 19 nt, Artificial Sequence
  Description of Artificial Sequence: Synthetic oligonucleotide
ugaacgucgucuccagacu

SEQ ID NO: 2798840 - RNA, 19 nt, Artificial Sequence
  Description of Artificial Sequence: Synthetic oligonucleotide
ucugagggcugacugggcu

SEQ ID NO: 2798841 - RNA, 19 nt, Artificial Sequence
  Description of Artificial Sequence: Synthetic oligonucleotide
ucacagacggcgaccacga

SEQ ID NO: 2798842 - RNA, 19 nt, Artificial Sequence
  Description of Artificial Sequence: Synthetic oligonucleotide
agguccaggggucuugguc

SEQ ID NO: 2798843 - RNA, 19 nt, Artificial Sequence
  Description of Artificial Sequence: Synthetic oligonucleotide
aacgagcaagagcucugag

SEQ ID NO: 2798844 - RNA, 19 nt, Artificial Sequence
  Description of Artificial Sequence: Synthetic oligonucleotide
uuucugaacgucgucucca

SEQ ID NO: 2798845 - RNA, 19 nt, Artificial Sequence
  Description of Artificial Sequence: Synthetic oligonucleotide
cgagcaagagcucugaggg

SEQ ID NO: 2798846 - RNA, 19 nt, Artificial Sequence
  Description of Artificial Sequence: Synthetic oligonucleotide
gauaguuuccuugccagaa

SEQ ID NO: 2798847 - RNA, 19 nt, Artificial Sequence
  Description of Artificial Sequence: Synthetic oligonucleotide
agugaugcccagcuccuug

SEQ ID NO: 2798848 - RNA, 19 nt, Artificial Sequence
  Description of Artificial Sequence: Synthetic oligonucleotide
aguuugauaugcagggcag

SEQ ID NO: 2798849 - RNA, 19 nt, Artificial Sequence
  Description of Artificial Sequence: Synthetic oligonucleotide
cuugccagaaagaucagua

SEQ ID NO: 2798850 - RNA, 19 nt, Artificial Sequence
  Description of Artificial Sequence: Synthetic oligonucleotide
uaauuugagaaguccuguu

SEQ ID NO: 2798851 - RNA, 19 nt, Artificial Sequence
  Description of Artificial Sequence: Synthetic oligonucleotide
agccacuugagguccgagg

SEQ ID NO: 2798852 - RNA, 19 nt, Artificial Sequence
  Description of Artificial Sequence: Synthetic oligonucleotide
ugcgaggugccauuucuga

SEQ ID NO: 2798853 - RNA, 19 nt, Artificial Sequence
  Description of Artificial Sequence: Synthetic oligonucleotide
cauaaggagaagacucauc

SEQ ID NO: 2798854 - RNA, 19 nt, Artificial Sequence
  Description of Artificial Sequence: Synthetic oligonucleotide
agcaagagcucugagggcu

SEQ ID NO: 2798855 - RNA, 19 nt, Artificial Sequence
  Description of Artificial Sequence: Synthetic oligonucleotide
cagccuuuaccuucauucc

SEQ ID NO: 2798856 - RNA, 19 nt, Artificial Sequence
  Description of Artificial Sequence: Synthetic oligonucleotide
auggacaaaggugucguug

SEQ ID NO: 2798857 - RNA, 19 nt, Artificial Sequence
  Description of Artificial Sequence: Synthetic oligonucleotide
aauguggcagacaccaaau

SEQ ID NO: 2798858 - RNA, 19 nt, Artificial Sequence
  Description of Artificial Sequence: Synthetic oligonucleotide
cauuucugaacgucgucuc

SEQ ID NO: 2798859 - RNA, 19 nt, Artificial Sequence
  Description of Artificial Sequence: Synthetic oligonucleotide
ucaauccgcccaaucuuca

SEQ ID NO: 2798860 - RNA, 19 nt, Artificial Sequence
  Description of Artificial Sequence: Synthetic oligonucleotide
ggcagugaugcccagcucc

SEQ ID NO: 2798861 - RNA, 19 nt, Artificial Sequence
  Description of Artificial Sequence: Synthetic oligonucleotide
uaaggagaagacucaucuc

SEQ ID NO: 2798862 - RNA, 19 nt, Artificial Sequence
  Description of Artificial Sequence: Synthetic oligonucleotide
uguucacagacggcgacca

SEQ ID NO: 2798863 - RNA, 19 nt, Artificial Sequence
  Description of Artificial Sequence: Synthetic oligonucleotide
uccaccagucacccggcag

SEQ ID NO: 2798864 - RNA, 19 nt, Artificial Sequence
  Description of Artificial Sequence: Synthetic oligonucleotide
cagaaagaucaguaacaug

SEQ ID NO: 2798865 - RNA, 19 nt, Artificial Sequence
  Description of Artificial Sequence: Synthetic oligonucleotide
uucugaacgucgucuccag

SEQ ID NO: 2798866 - RNA, 19 nt, Artificial Sequence
  Description of Artificial Sequence: Synthetic oligonucleotide
acaaagcaauuuauuaaca

SEQ ID NO: 2798867 - RNA, 19 nt, Artificial Sequence
  Description of Artificial Sequence: Synthetic oligonucleotide
ugccauuucugaacgucgu

SEQ ID NO: 2798868 - RNA, 19 nt, Artificial Sequence
  Description of Artificial Sequence: Synthetic oligonucleotide
cugggcaacauccugggca

SEQ ID NO: 2798869 - RNA, 19 nt, Artificial Sequence
  Description of Artificial Sequence: Synthetic oligonucleotide
cucugggcaacauccuggg

SEQ ID NO: 2798870 - RNA, 19 nt, Artificial Sequence
  Description of Artificial Sequence: Synthetic oligonucleotide
agccuuuaccuucauucca

SEQ ID NO: 2798871 - RNA, 19 nt, Artificial Sequence
  Description of Artificial Sequence: Synthetic oligonucleotide
ugcagggcagugaugccca

SEQ ID NO: 2798872 - RNA, 19 nt, Artificial Sequence
  Description of Artificial Sequence: Synthetic oligonucleotide
agggcagugaugcccagcu

SEQ ID NO: 2798873 - RNA, 19 nt, Artificial Sequence
  Description of Artificial Sequence: Synthetic oligonucleotide
cucaauccgcccaaucuuc

SEQ ID NO: 2798874 - RNA, 19 nt, Artificial Sequence
  Description of Artificial Sequence: Synthetic oligonucleotide
gaaagaucaguaacaugga

SEQ ID NO: 2798875 - RNA, 19 nt, Artificial Sequence
  Description of Artificial Sequence: Synthetic oligonucleotide
guagcucggaguuugauau

SEQ ID NO: 2798876 - RNA, 19 nt, Artificial Sequence
  Description of Artificial Sequence: Synthetic oligonucleotide
gagcucugagggcugacug

SEQ ID NO: 2798877 - RNA, 19 nt, Artificial Sequence
  Description of Artificial Sequence: Synthetic oligonucleotide
gacauccucaauccgccca

SEQ ID NO: 2798878 - RNA, 19 nt, Artificial Sequence
  Description of Artificial Sequence: Synthetic oligonucleotide
gguccaggggucuuggucc

SEQ ID NO: 2798879 - RNA, 19 nt, Artificial Sequence
  Description of Artificial Sequence: Synthetic oligonucleotide
acgaccacccuuccuucgg

SEQ ID NO: 2798880 - RNA, 19 nt, Artificial Sequence
  Description of Artificial Sequence: Synthetic oligonucleotide
aaggugucguugaaagaug

SEQ ID NO: 2798881 - RNA, 19 nt, Artificial Sequence
  Description of Artificial Sequence: Synthetic oligonucleotide
ccaacauggcugcauaagg

SEQ ID NO: 2798882 - RNA, 19 nt, Artificial Sequence
  Description of Artificial Sequence: Synthetic oligonucleotide
ggugacauccucaauccgc

SEQ ID NO: 2798883 - RNA, 19 nt, Artificial Sequence
  Description of Artificial Sequence: Synthetic oligonucleotide
accacgacgaccacccuuc

SEQ ID NO: 2798884 - RNA, 19 nt, Artificial Sequence
  Description of Artificial Sequence: Synthetic oligonucleotide
gaaguccuguucacagacg

SEQ ID NO: 2798885 - RNA, 19 nt, Artificial Sequence
  Description of Artificial Sequence: Synthetic oligonucleotide
cuuauacaaagcaauuuau

SEQ ID NO: 2798886 - RNA, 19 nt, Artificial Sequence
  Description of Artificial Sequence: Synthetic oligonucleotide
caacauggcugcauaagga

SEQ ID NO: 2798887 - RNA, 19 nt, Artificial Sequence
  Description of Artificial Sequence: Synthetic oligonucleotide
acauggacaaaggugucgu

SEQ ID NO: 2798888 - RNA, 19 nt, Artificial Sequence
  Description of Artificial Sequence: Synthetic oligonucleotide
uugagaaguccuguucaca

SEQ ID NO: 2798889 - RNA, 19 nt, Artificial Sequence
  Description of Artificial Sequence: Synthetic oligonucleotide
gucguugaaagaugcaaaa

SEQ ID NO: 2798890 - RNA, 19 nt, Artificial Sequence
  Description of Artificial Sequence: Synthetic oligonucleotide
cggaguuugauaugcaggg

SEQ ID NO: 2798891 - RNA, 19 nt, Artificial Sequence
  Description of Artificial Sequence: Synthetic oligonucleotide
aacgucgucuccagacuuc

SEQ ID NO: 2798892 - RNA, 19 nt, Artificial Sequence
  Description of Artificial Sequence: Synthetic oligonucleotide
uugauaugcagggcaguga

SEQ ID NO: 2798893 - RNA, 19 nt, Artificial Sequence
  Description of Artificial Sequence: Synthetic oligonucleotide
gacgaccacccuuccuucg

SEQ ID NO: 2798894 - RNA, 19 nt, Artificial Sequence
  Description of Artificial Sequence: Synthetic oligonucleotide
caaauacauucucuccuuc

SEQ ID NO: 2798895 - RNA, 19 nt, Artificial Sequence
  Description of Artificial Sequence: Synthetic oligonucleotide
gugccauuucugaacgucg

SEQ ID NO: 2798896 - RNA, 19 nt, Artificial Sequence
  Description of Artificial Sequence: Synthetic oligonucleotide
gugacauccucaauccgcc

SEQ ID NO: 2798897 - RNA, 19 nt, Artificial Sequence
  Description of Artificial Sequence: Synthetic oligonucleotide
uaacauggacaaagguguc

SEQ ID NO: 2798898 - RNA, 19 nt, Artificial Sequence
  Description of Artificial Sequence: Synthetic oligonucleotide
acgacgaccacccuuccuu

SEQ ID NO: 2798899 - RNA, 19 nt, Artificial Sequence
  Description of Artificial Sequence: Synthetic oligonucleotide
cauggcugcauaaggagaa

SEQ ID NO: 2798900 - RNA, 19 nt, Artificial Sequence
  Description of Artificial Sequence: Synthetic oligonucleotide
guggcagacaccaaauaca

SEQ ID NO: 2798901 - RNA, 19 nt, Artificial Sequence
  Description of Artificial Sequence: Synthetic oligonucleotide
cagacggcgaccacgacga

SEQ ID NO: 2798902 - RNA, 19 nt, Artificial Sequence
  Description of Artificial Sequence: Synthetic oligonucleotide
ucgucuccagacuucucca

SEQ ID NO: 2798903 - RNA, 19 nt, Artificial Sequence
  Description of Artificial Sequence: Synthetic oligonucleotide
ggggugacauccucaaucc

SEQ ID NO: 2798904 - RNA, 19 nt, Artificial Sequence
  Description of Artificial Sequence: Synthetic oligonucleotide
uuccuuucccuugcgaggu

SEQ ID NO: 2798905 - RNA, 19 nt, Artificial Sequence
  Description of Artificial Sequence: Synthetic oligonucleotide
uccuguucacagacggcga

SEQ ID NO: 2798906 - RNA, 19 nt, Artificial Sequence
  Description of Artificial Sequence: Synthetic oligonucleotide
aacauccugggcagccaac

SEQ ID NO: 2798907 - RNA, 19 nt, Artificial Sequence
  Description of Artificial Sequence: Synthetic oligonucleotide
cuugguccuguuuccuccc

SEQ ID NO: 2798908 - RNA, 19 nt, Artificial Sequence
  Description of Artificial Sequence: Synthetic oligonucleotide
uuccuucgggugcugucag

SEQ ID NO: 2798909 - RNA, 19 nt, Artificial Sequence
  Description of Artificial Sequence: Synthetic oligonucleotide
acauucucuccuucagcca

SEQ ID NO: 2798910 - RNA, 19 nt, Artificial Sequence
  Description of Artificial Sequence: Synthetic oligonucleotide
ccagucacccggcagauag

SEQ ID NO: 2798911 - RNA, 19 nt, Artificial Sequence
  Description of Artificial Sequence: Synthetic oligonucleotide
ccuucauuccaccagucac

SEQ ID NO: 2798912 - RNA, 19 nt, Artificial Sequence
  Description of Artificial Sequence: Synthetic oligonucleotide
accuucauuccaccaguca

SEQ ID NO: 2798913 - RNA, 19 nt, Artificial Sequence
  Description of Artificial Sequence: Synthetic oligonucleotide
uugcgaggugccauuucug

SEQ ID NO: 2798914 - RNA, 19 nt, Artificial Sequence
  Description of Artificial Sequence: Synthetic oligonucleotide
gcugaugaccuguucuucc

SEQ ID NO: 2798915 - RNA, 19 nt, Artificial Sequence
  Description of Artificial Sequence: Synthetic oligonucleotide
gccacuugagguccgaggc

SEQ ID NO: 2798916 - RNA, 19 nt, Artificial Sequence
  Description of Artificial Sequence: Synthetic oligonucleotide
auaguuuccuugccagaaa

SEQ ID NO: 2798917 - RNA, 19 nt, Artificial Sequence
  Description of Artificial Sequence: Synthetic oligonucleotide
uaugcagggcagugaugcc

SEQ ID NO: 2798918 - RNA, 19 nt, Artificial Sequence
  Description of Artificial Sequence: Synthetic oligonucleotide
acucaucucugucagccuu

SEQ ID NO: 2798919 - RNA, 19 nt, Artificial Sequence
  Description of Artificial Sequence: Synthetic oligonucleotide
ugagggcugacugggcucc

SEQ ID NO: 2798920 - RNA, 19 nt, Artificial Sequence
  Description of Artificial Sequence: Synthetic oligonucleotide
aguccuguucacagacggc

SEQ ID NO: 2798921 - RNA, 19 nt, Artificial Sequence
  Description of Artificial Sequence: Synthetic oligonucleotide
ucugaacgucgucuccaga

SEQ ID NO: 2798922 - RNA, 19 nt, Artificial Sequence
  Description of Artificial Sequence: Synthetic oligonucleotide
augaccuguucuuccuucu

SEQ ID NO: 2798923 - RNA, 19 nt, Artificial Sequence
  Description of Artificial Sequence: Synthetic oligonucleotide
cuuuaccuucauuccacca

SEQ ID NO: 2798924 - RNA, 19 nt, Artificial Sequence
  Description of Artificial Sequence: Synthetic oligonucleotide
ugcaccucugggcaacauc

SEQ ID NO: 2798925 - RNA, 19 nt, Artificial Sequence
  Description of Artificial Sequence: Synthetic oligonucleotide
cuuucccuugcgaggugcc

SEQ ID NO: 2798926 - RNA, 19 nt, Artificial Sequence
  Description of Artificial Sequence: Synthetic oligonucleotide
agcaauuuauuaacagaaa

SEQ ID NO: 2798927 - RNA, 19 nt, Artificial Sequence
  Description of Artificial Sequence: Synthetic oligonucleotide
ucauuccaccagucacccg

SEQ ID NO: 2798928 - RNA, 19 nt, Artificial Sequence
  Description of Artificial Sequence: Synthetic oligonucleotide
ucccguagcucggaguuug

SEQ ID NO: 2798929 - RNA, 19 nt, Artificial Sequence
  Description of Artificial Sequence: Synthetic oligonucleotide
gacaccaaauacauucucu

SEQ ID NO: 2798930 - RNA, 19 nt, Artificial Sequence
  Description of Artificial Sequence: Synthetic oligonucleotide
gagcaagagcucugagggc

SEQ ID NO: 2798931 - RNA, 19 nt, Artificial Sequence
  Description of Artificial Sequence: Synthetic oligonucleotide
cuucaucccugaacgagca

SEQ ID NO: 2798932 - RNA, 19 nt, Artificial Sequence
  Description of Artificial Sequence: Synthetic oligonucleotide
agucuuauacaaagcaauu

SEQ ID NO: 2798933 - RNA, 19 nt, Artificial Sequence
  Description of Artificial Sequence: Synthetic oligonucleotide
aagagcucugagggcugac

SEQ ID NO: 2798934 - RNA, 19 nt, Artificial Sequence
  Description of Artificial Sequence: Synthetic oligonucleotide
gaugcccagcuccuugcac

SEQ ID NO: 2798935 - RNA, 19 nt, Artificial Sequence
  Description of Artificial Sequence: Synthetic oligonucleotide
cacuugagguccgaggcug

SEQ ID NO: 2798936 - RNA, 19 nt, Artificial Sequence
  Description of Artificial Sequence: Synthetic oligonucleotide
cuucgggugcugucagagg

SEQ ID NO: 2798937 - RNA, 19 nt, Artificial Sequence
  Description of Artificial Sequence: Synthetic oligonucleotide
gcuccuugcaccucugggc

SEQ ID NO: 2798938 - RNA, 19 nt, Artificial Sequence
  Description of Artificial Sequence: Synthetic oligonucleotide
aggagaagacucaucucug

SEQ ID NO: 2798939 - RNA, 19 nt, Artificial Sequence
  Description of Artificial Sequence: Synthetic oligonucleotide
ugacauccucaauccgccc

SEQ ID NO: 2798940 - RNA, 19 nt, Artificial Sequence
  Description of Artificial Sequence: Synthetic oligonucleotide
ucugggcaacauccugggc

SEQ ID NO: 2798941 - RNA, 19 nt, Artificial Sequence
  Description of Artificial Sequence: Synthetic oligonucleotide
uggcugcauaaggagaaga

SEQ ID NO: 2798942 - RNA, 19 nt, Artificial Sequence
  Description of Artificial Sequence: Synthetic oligonucleotide
accuguucuuccuucuuuu

SEQ ID NO: 2798943 - RNA, 19 nt, Artificial Sequence
  Description of Artificial Sequence: Synthetic oligonucleotide
auuccaccagucacccggc

SEQ ID NO: 2798944 - RNA, 19 nt, Artificial Sequence
  Description of Artificial Sequence: Synthetic oligonucleotide
acauccucaauccgcccaa

SEQ ID NO: 2798945 - RNA, 19 nt, Artificial Sequence
  Description of Artificial Sequence: Synthetic oligonucleotide
gugucguugaaagaugcaa

SEQ ID NO: 2798946 - RNA, 19 nt, Artificial Sequence
  Description of Artificial Sequence: Synthetic oligonucleotide
acggcgaccacgacgacca

SEQ ID NO: 2798947 - RNA, 19 nt, Artificial Sequence
  Description of Artificial Sequence: Synthetic oligonucleotide
gcaccucugggcaacaucc

SEQ ID NO: 2798948 - RNA, 19 nt, Artificial Sequence
  Description of Artificial Sequence: Synthetic oligonucleotide
ggugcugucagaggggaug

SEQ ID NO: 2798949 - RNA, 19 nt, Artificial Sequence
  Description of Artificial Sequence: Synthetic oligonucleotide
accacccuuccuucgggug

SEQ ID NO: 2798950 - RNA, 19 nt, Artificial Sequence
  Description of Artificial Sequence: Synthetic oligonucleotide
acauggcugcauaaggaga

SEQ ID NO: 2798951 - RNA, 19 nt, Artificial Sequence
  Description of Artificial Sequence: Synthetic oligonucleotide
guccuguuuccucccguag

SEQ ID NO: 2798952 - RNA, 19 nt, Artificial Sequence
  Description of Artificial Sequence: Synthetic oligonucleotide
uaccuucauuccaccaguc

SEQ ID NO: 2798953 - RNA, 19 nt, Artificial Sequence
  Description of Artificial Sequence: Synthetic oligonucleotide
uccgaggcugaugaccugu

SEQ ID NO: 2798954 - RNA, 19 nt, Artificial Sequence
  Description of Artificial Sequence: Synthetic oligonucleotide
gugcugucagaggggaugg

SEQ ID NO: 2798955 - RNA, 19 nt, Artificial Sequence
  Description of Artificial Sequence: Synthetic oligonucleotide
guuuccucccguagcucgg

SEQ ID NO: 2798956 - RNA, 19 nt, Artificial Sequence
  Description of Artificial Sequence: Synthetic oligonucleotide
uccuugccagaaagaucag

SEQ ID NO: 2798957 - RNA, 19 nt, Artificial Sequence
  Description of Artificial Sequence: Synthetic oligonucleotide
ggggucuugguccuguuuc

SEQ ID NO: 2798958 - RNA, 19 nt, Artificial Sequence
  Description of Artificial Sequence: Synthetic oligonucleotide
caaaggugucguugaaaga

SEQ ID NO: 2798959 - RNA, 19 nt, Artificial Sequence
  Description of Artificial Sequence: Synthetic oligonucleotide
gccagaaagaucaguaaca

SEQ ID NO: 2798960 - RNA, 19 nt, Artificial Sequence
  Description of Artificial Sequence: Synthetic oligonucleotide
caucccugaacgagcaaga

SEQ ID NO: 2798961 - RNA, 19 nt, Artificial Sequence
  Description of Artificial Sequence: Synthetic oligonucleotide
gcagauaguuuccuugcca

SEQ ID NO: 2798962 - RNA, 19 nt, Artificial Sequence
  Description of Artificial Sequence: Synthetic oligonucleotide
aggcugaugaccuguucuu

SEQ ID NO: 2798963 - RNA, 19 nt, Artificial Sequence
  Description of Artificial Sequence: Synthetic oligonucleotide
gacggcgaccacgacgacc

SEQ ID NO: 2798964 - RNA, 19 nt, Artificial Sequence
  Description of Artificial Sequence: Synthetic oligonucleotide
cuguucacagacggcgacc

SEQ ID NO: 2798965 - RNA, 19 nt, Artificial Sequence
  Description of Artificial Sequence: Synthetic oligonucleotide
guuuccuugccagaaagau

SEQ ID NO: 2798966 - RNA, 19 nt, Artificial Sequence
  Description of Artificial Sequence: Synthetic oligonucleotide
uagcucggaguuugauaug

SEQ ID NO: 2798967 - RNA, 19 nt, Artificial Sequence
  Description of Artificial Sequence: Synthetic oligonucleotide
cccugaacgagcaagagcu

SEQ ID NO: 2798968 - RNA, 19 nt, Artificial Sequence
  Description of Artificial Sequence: Synthetic oligonucleotide
aguuuccuugccagaaaga

SEQ ID NO: 2798969 - RNA, 19 nt, Artificial Sequence
  Description of Artificial Sequence: Synthetic oligonucleotide
cacccggcagauaguuucc

SEQ ID NO: 2798970 - RNA, 19 nt, Artificial Sequence
  Description of Artificial Sequence: Synthetic oligonucleotide
aucccugaacgagcaagag

SEQ ID NO: 2798971 - RNA, 19 nt, Artificial Sequence
  Description of Artificial Sequence: Synthetic oligonucleotide
ugguccuguuuccucccgu

SEQ ID NO: 2798972 - RNA, 19 nt, Artificial Sequence
  Description of Artificial Sequence: Synthetic oligonucleotide
gcugucagaggggaugggg

SEQ ID NO: 2798973 - RNA, 19 nt, Artificial Sequence
  Description of Artificial Sequence: Synthetic oligonucleotide
cuuuuccuuucccuugcga

SEQ ID NO: 2798974 - RNA, 19 nt, Artificial Sequence
  Description of Artificial Sequence: Synthetic oligonucleotide
ugcccagcuccuugcaccu

SEQ ID NO: 2798975 - RNA, 19 nt, Artificial Sequence
  Description of Artificial Sequence: Synthetic oligonucleotide
ugaccuguucuuccuucuu

SEQ ID NO: 2798976 - RNA, 19 nt, Artificial Sequence
  Description of Artificial Sequence: Synthetic oligonucleotide
gcucugagggcugacuggg

SEQ ID NO: 2798977 - RNA, 19 nt, Artificial Sequence
  Description of Artificial Sequence: Synthetic oligonucleotide
aaaauguggcagacaccaa

SEQ ID NO: 2798978 - RNA, 19 nt, Artificial Sequence
  Description of Artificial Sequence: Synthetic oligonucleotide
uugagguccgaggcugaug

SEQ ID NO: 2798979 - RNA, 19 nt, Artificial Sequence
  Description of Artificial Sequence: Synthetic oligonucleotide
uuccucccguagcucggag

SEQ ID NO: 2798980 - RNA, 19 nt, Artificial Sequence
  Description of Artificial Sequence: Synthetic oligonucleotide
auguggcagacaccaaaua

SEQ ID NO: 2798981 - RNA, 19 nt, Artificial Sequence
  Description of Artificial Sequence: Synthetic oligonucleotide
gaacgagcaagagcucuga

SEQ ID NO: 2798982 - RNA, 19 nt, Artificial Sequence
  Description of Artificial Sequence: Synthetic oligonucleotide
cugagggcugacugggcuc

SEQ ID NO: 2798983 - RNA, 19 nt, Artificial Sequence
  Description of Artificial Sequence: Synthetic oligonucleotide
uccgcccaaucuucauccc

SEQ ID NO: 2798984 - RNA, 19 nt, Artificial Sequence
  Description of Artificial Sequence: Synthetic oligonucleotide
ggugccauuucugaacguc

SEQ ID NO: 2798985 - RNA, 19 nt, Artificial Sequence
  Description of Artificial Sequence: Synthetic oligonucleotide
gccaacauggcugcauaag

SEQ ID NO: 2798986 - RNA, 19 nt, Artificial Sequence
  Description of Artificial Sequence: Synthetic oligonucleotide
uuucccuugcgaggugcca

SEQ ID NO: 2798987 - RNA, 19 nt, Artificial Sequence
  Description of Artificial Sequence: Synthetic oligonucleotide
ccggcagauaguuuccuug

SEQ ID NO: 2798988 - RNA, 19 nt, Artificial Sequence
  Description of Artificial Sequence: Synthetic oligonucleotide
cuugcgaggugccauuucu

SEQ ID NO: 2798989 - RNA, 19 nt, Artificial Sequence
  Description of Artificial Sequence: Synthetic oligonucleotide
gggugacauccucaauccg

SEQ ID NO: 2798990 - RNA, 19 nt, Artificial Sequence
  Description of Artificial Sequence: Synthetic oligonucleotide
uccucccguagcucggagu

SEQ ID NO: 2798991 - RNA, 19 nt, Artificial Sequence
  Description of Artificial Sequence: Synthetic oligonucleotide
uucaucccugaacgagcaa

SEQ ID NO: 2798992 - RNA, 19 nt, Artificial Sequence
  Description of Artificial Sequence: Synthetic oligonucleotide
cugucagccuuuaccuuca

SEQ ID NO: 2798993 - RNA, 19 nt, Artificial Sequence
  Description of Artificial Sequence: Synthetic oligonucleotide
auggcugcauaaggagaag

SEQ ID NO: 2798994 - RNA, 19 nt, Artificial Sequence
  Description of Artificial Sequence: Synthetic oligonucleotide
ggcugcauaaggagaagac

SEQ ID NO: 2798995 - RNA, 19 nt, Artificial Sequence
  Description of Artificial Sequence: Synthetic oligonucleotide
uccagguccaggggucuug

SEQ ID NO: 2798996 - RNA, 19 nt, Artificial Sequence
  Description of Artificial Sequence: Synthetic oligonucleotide
ggaguuugauaugcagggc

SEQ ID NO: 2798997 - RNA, 19 nt, Artificial Sequence
  Description of Artificial Sequence: Synthetic oligonucleotide
gggucuugguccuguuucc

SEQ ID NO: 2798998 - RNA, 19 nt, Artificial Sequence
  Description of Artificial Sequence: Synthetic oligonucleotide
gcgaccacgacgaccaccc

SEQ ID NO: 2798999 - RNA, 19 nt, Artificial Sequence
  Description of Artificial Sequence: Synthetic oligonucleotide
agagcucugagggcugacu

SEQ ID NO: 2799000 - RNA, 19 nt, Artificial Sequence
  Description of Artificial Sequence: Synthetic oligonucleotide
uccuuucccuugcgaggug

SEQ ID NO: 2799001 - RNA, 19 nt, Artificial Sequence
  Description of Artificial Sequence: Synthetic oligonucleotide
ccuuuaccuucauuccacc

SEQ ID NO: 2799002 - RNA, 19 nt, Artificial Sequence
  Description of Artificial Sequence: Synthetic oligonucleotide
ugcugucagaggggauggg

SEQ ID NO: 2799003 - RNA, 19 nt, Artificial Sequence
  Description of Artificial Sequence: Synthetic oligonucleotide
agccaacauggcugcauaa

SEQ ID NO: 2799004 - RNA, 19 nt, Artificial Sequence
  Description of Artificial Sequence: Synthetic oligonucleotide
ucucuccuucagccacuug

SEQ ID NO: 2799005 - RNA, 19 nt, Artificial Sequence
  Description of Artificial Sequence: Synthetic oligonucleotide
cuuccuucgggugcuguca

SEQ ID NO: 2799006 - RNA, 19 nt, Artificial Sequence
  Description of Artificial Sequence: Synthetic oligonucleotide
uucccuugcgaggugccau

SEQ ID NO: 2799007 - RNA, 19 nt, Artificial Sequence
  Description of Artificial Sequence: Synthetic oligonucleotide
cgaggugccauuucugaac

SEQ ID NO: 2799008 - RNA, 19 nt, Artificial Sequence
  Description of Artificial Sequence: Synthetic oligonucleotide
agucacccggcagauaguu

SEQ ID NO: 2799009 - RNA, 19 nt, Artificial Sequence
  Description of Artificial Sequence: Synthetic oligonucleotide
uuccaccagucacccggca

SEQ ID NO: 2799010 - RNA, 19 nt, Artificial Sequence
  Description of Artificial Sequence: Synthetic oligonucleotide
uuuccucccguagcucgga

SEQ ID NO: 2799011 - RNA, 19 nt, Artificial Sequence
  Description of Artificial Sequence: Synthetic oligonucleotide
gccuuuaccuucauuccac

SEQ ID NO: 2799012 - RNA, 19 nt, Artificial Sequence
  Description of Artificial Sequence: Synthetic oligonucleotide
caguaacauggacaaaggu

SEQ ID NO: 2799013 - RNA, 19 nt, Artificial Sequence
  Description of Artificial Sequence: Synthetic oligonucleotide
cagacaccaaauacauucu

SEQ ID NO: 2799014 - RNA, 19 nt, Artificial Sequence
  Description of Artificial Sequence: Synthetic oligonucleotide
acgucgucuccagacuucu

SEQ ID NO: 2799015 - RNA, 19 nt, Artificial Sequence
  Description of Artificial Sequence: Synthetic oligonucleotide
ucaucucugucagccuuua

SEQ ID NO: 2799016 - RNA, 19 nt, Artificial Sequence
  Description of Artificial Sequence: Synthetic oligonucleotide
uccuucgggugcugucaga

SEQ ID NO: 2799017 - RNA, 19 nt, Artificial Sequence
  Description of Artificial Sequence: Synthetic oligonucleotide
ucagccacuugagguccga

SEQ ID NO: 2799018 - RNA, 19 nt, Artificial Sequence
  Description of Artificial Sequence: Synthetic oligonucleotide
aggugccauuucugaacgu

SEQ ID NO: 2799019 - RNA, 19 nt, Artificial Sequence
  Description of Artificial Sequence: Synthetic oligonucleotide
gaacgucgucuccagacuu

SEQ ID NO: 2799020 - RNA, 19 nt, Artificial Sequence
  Description of Artificial Sequence: Synthetic oligonucleotide
ccuucgggugcugucagag

SEQ ID NO: 2799021 - RNA, 19 nt, Artificial Sequence
  Description of Artificial Sequence: Synthetic oligonucleotide
cugaugaccuguucuuccu

SEQ ID NO: 2799022 - RNA, 19 nt, Artificial Sequence
  Description of Artificial Sequence: Synthetic oligonucleotide
auucucuccuucagccacu

SEQ ID NO: 2799023 - RNA, 19 nt, Artificial Sequence
  Description of Artificial Sequence: Synthetic oligonucleotide
cggcagauaguuuccuugc

SEQ ID NO: 2799024 - RNA, 19 nt, Artificial Sequence
  Description of Artificial Sequence: Synthetic oligonucleotide
ccacccuuccuucgggugc

SEQ ID NO: 2799025 - RNA, 19 nt, Artificial Sequence
  Description of Artificial Sequence: Synthetic oligonucleotide
caucucugucagccuuuac

SEQ ID NO: 2799026 - RNA, 19 nt, Artificial Sequence
  Description of Artificial Sequence: Synthetic oligonucleotide
cugaacgagcaagagcucu

SEQ ID NO: 2799027 - RNA, 19 nt, Artificial Sequence
  Description of Artificial Sequence: Synthetic oligonucleotide
gaucaguaacauggacaaa

SEQ ID NO: 2799028 - RNA, 19 nt, Artificial Sequence
  Description of Artificial Sequence: Synthetic oligonucleotide
ccuguucacagacggcgac

SEQ ID NO: 2799029 - RNA, 19 nt, Artificial Sequence
  Description of Artificial Sequence: Synthetic oligonucleotide
gacucaucucugucagccu

SEQ ID NO: 2799030 - RNA, 19 nt, Artificial Sequence
  Description of Artificial Sequence: Synthetic oligonucleotide
gggcagccaacauggcugc

SEQ ID NO: 2799031 - RNA, 19 nt, Artificial Sequence
  Description of Artificial Sequence: Synthetic oligonucleotide
gagguccgaggcugaugac

SEQ ID NO: 2799032 - RNA, 19 nt, Artificial Sequence
  Description of Artificial Sequence: Synthetic oligonucleotide
guucacagacggcgaccac

SEQ ID NO: 2799033 - RNA, 19 nt, Artificial Sequence
  Description of Artificial Sequence: Synthetic oligonucleotide
gcugacugggcuccagguc

SEQ ID NO: 2799034 - RNA, 19 nt, Artificial Sequence
  Description of Artificial Sequence: Synthetic oligonucleotide
ucccuugcgaggugccauu

SEQ ID NO: 2799035 - RNA, 19 nt, Artificial Sequence
  Description of Artificial Sequence: Synthetic oligonucleotide
agacggcgaccacgacgac

SEQ ID NO: 2799036 - RNA, 19 nt, Artificial Sequence
  Description of Artificial Sequence: Synthetic oligonucleotide
guuugauaugcagggcagu

SEQ ID NO: 2799037 - RNA, 19 nt, Artificial Sequence
  Description of Artificial Sequence: Synthetic oligonucleotide
ugucagccuuuaccuucau

SEQ ID NO: 2799038 - RNA, 19 nt, Artificial Sequence
  Description of Artificial Sequence: Synthetic oligonucleotide
cagggcagugaugcccagc

SEQ ID NO: 2799039 - RNA, 19 nt, Artificial Sequence
  Description of Artificial Sequence: Synthetic oligonucleotide
gcugcauaaggagaagacu

SEQ ID NO: 2799040 - RNA, 19 nt, Artificial Sequence
  Description of Artificial Sequence: Synthetic oligonucleotide
gccauuucugaacgucguc

SEQ ID NO: 2799041 - RNA, 19 nt, Artificial Sequence
  Description of Artificial Sequence: Synthetic oligonucleotide
cuguuuccucccguagcuc

SEQ ID NO: 2799042 - RNA, 19 nt, Artificial Sequence
  Description of Artificial Sequence: Synthetic oligonucleotide
cgcccaaucuucaucccug

SEQ ID NO: 2799043 - RNA, 19 nt, Artificial Sequence
  Description of Artificial Sequence: Synthetic oligonucleotide
ccuuucccuugcgaggugc

SEQ ID NO: 2799044 - RNA, 19 nt, Artificial Sequence
  Description of Artificial Sequence: Synthetic oligonucleotide
gaccacgacgaccacccuu

SEQ ID NO: 2799045 - RNA, 19 nt, Artificial Sequence
  Description of Artificial Sequence: Synthetic oligonucleotide
acuugagguccgaggcuga

SEQ ID NO: 2799046 - RNA, 19 nt, Artificial Sequence
  Description of Artificial Sequence: Synthetic oligonucleotide
ggugucguugaaagaugca

SEQ ID NO: 2799047 - RNA, 19 nt, Artificial Sequence
  Description of Artificial Sequence: Synthetic oligonucleotide
guccgaggcugaugaccug

SEQ ID NO: 2799048 - RNA, 19 nt, Artificial Sequence
  Description of Artificial Sequence: Synthetic oligonucleotide
cagccaacauggcugcaua

SEQ ID NO: 2799049 - RNA, 19 nt, Artificial Sequence
  Description of Artificial Sequence: Synthetic oligonucleotide
ggcgaccacgacgaccacc

SEQ ID NO: 2799050 - RNA, 19 nt, Artificial Sequence
  Description of Artificial Sequence: Synthetic oligonucleotide
ggcugaugaccuguucuuc

SEQ ID NO: 2799051 - RNA, 19 nt, Artificial Sequence
  Description of Artificial Sequence: Synthetic oligonucleotide
ccaccagucacccggcaga

SEQ ID NO: 2799052 - RNA, 19 nt, Artificial Sequence
  Description of Artificial Sequence: Synthetic oligonucleotide
acccggcagauaguuuccu

SEQ ID NO: 2799053 - RNA, 19 nt, Artificial Sequence
  Description of Artificial Sequence: Synthetic oligonucleotide
cagccacuugagguccgag

SEQ ID NO: 2799054 - RNA, 19 nt, Artificial Sequence
  Description of Artificial Sequence: Synthetic oligonucleotide
uccaggggucuugguccug

SEQ ID NO: 2799055 - RNA, 19 nt, Artificial Sequence
  Description of Artificial Sequence: Synthetic oligonucleotide
cacagacggcgaccacgac

SEQ ID NO: 2799056 - RNA, 19 nt, Artificial Sequence
  Description of Artificial Sequence: Synthetic oligonucleotide
caagagcucugagggcuga

SEQ ID NO: 2799057 - RNA, 19 nt, Artificial Sequence
  Description of Artificial Sequence: Synthetic oligonucleotide
gguccuguuuccucccgua

SEQ ID NO: 2799058 - RNA, 19 nt, Artificial Sequence
  Description of Artificial Sequence: Synthetic oligonucleotide
ccugaacgagcaagagcuc

SEQ ID NO: 2799059 - RNA, 19 nt, Artificial Sequence
  Description of Artificial Sequence: Synthetic oligonucleotide
gguccgaggcugaugaccu

SEQ ID NO: 2799060 - RNA, 19 nt, Artificial Sequence
  Description of Artificial Sequence: Synthetic oligonucleotide
gcaagagcucugagggcug

SEQ ID NO: 2799061 - RNA, 19 nt, Artificial Sequence
  Description of Artificial Sequence: Synthetic oligonucleotide
ccuugcaccucugggcaac

SEQ ID NO: 2799062 - RNA, 19 nt, Artificial Sequence
  Description of Artificial Sequence: Synthetic oligonucleotide
ccauuucugaacgucgucu

SEQ ID NO: 2799063 - RNA, 19 nt, Artificial Sequence
  Description of Artificial Sequence: Synthetic oligonucleotide
ccuguuuccucccguagcu

SEQ ID NO: 2799064 - RNA, 19 nt, Artificial Sequence
  Description of Artificial Sequence: Synthetic oligonucleotide
gcccaaucuucaucccuga

SEQ ID NO: 2799065 - RNA, 19 nt, Artificial Sequence
  Description of Artificial Sequence: Synthetic oligonucleotide
uugcaccucugggcaacau

SEQ ID NO: 2799066 - RNA, 19 nt, Artificial Sequence
  Description of Artificial Sequence: Synthetic oligonucleotide
cucaucucugucagccuuu

SEQ ID NO: 2799067 - RNA, 19 nt, Artificial Sequence
  Description of Artificial Sequence: Synthetic oligonucleotide
ccagaaagaucaguaacau

SEQ ID NO: 2799068 - RNA, 19 nt, Artificial Sequence
  Description of Artificial Sequence: Synthetic oligonucleotide
cuugcaccucugggcaaca

SEQ ID NO: 2799069 - RNA, 19 nt, Artificial Sequence
  Description of Artificial Sequence: Synthetic oligonucleotide
caauccgcccaaucuucau

SEQ ID NO: 2799070 - RNA, 19 nt, Artificial Sequence
  Description of Artificial Sequence: Synthetic oligonucleotide
guccaggggucuugguccu

SEQ ID NO: 2799071 - RNA, 19 nt, Artificial Sequence
  Description of Artificial Sequence: Synthetic oligonucleotide
cgaccacccuuccuucggg

SEQ ID NO: 2799072 - RNA, 19 nt, Artificial Sequence
  Description of Artificial Sequence: Synthetic oligonucleotide
ccugggcagccaacauggc

SEQ ID NO: 2799073 - RNA, 19 nt, Artificial Sequence
  Description of Artificial Sequence: Synthetic oligonucleotide
ccuugcgaggugccauuuc

SEQ ID NO: 2799074 - RNA, 19 nt, Artificial Sequence
  Description of Artificial Sequence: Synthetic oligonucleotide
cguagcucggaguuugaua

SEQ ID NO: 2799075 - RNA, 19 nt, Artificial Sequence
  Description of Artificial Sequence: Synthetic oligonucleotide
gucagccuuuaccuucauu

SEQ ID NO: 2799076 - RNA, 19 nt, Artificial Sequence
  Description of Artificial Sequence: Synthetic oligonucleotide
gcagggcagugaugcccag

SEQ ID NO: 2799077 - RNA, 19 nt, Artificial Sequence
  Description of Artificial Sequence: Synthetic oligonucleotide
cauggacaaaggugucguu

SEQ ID NO: 2799078 - RNA, 19 nt, Artificial Sequence
  Description of Artificial Sequence: Synthetic oligonucleotide
cauccugggcagccaacau

SEQ ID NO: 2799079 - RNA, 19 nt, Artificial Sequence
  Description of Artificial Sequence: Synthetic oligonucleotide
gcucggaguuugauaugca

SEQ ID NO: 2799080 - RNA, 19 nt, Artificial Sequence
  Description of Artificial Sequence: Synthetic oligonucleotide
cacgacgaccacccuuccu

SEQ ID NO: 2799081 - RNA, 19 nt, Artificial Sequence
  Description of Artificial Sequence: Synthetic oligonucleotide
ccucaauccgcccaaucuu

SEQ ID NO: 2799082 - RNA, 19 nt, Artificial Sequence
  Description of Artificial Sequence: Synthetic oligonucleotide
gggcuccagguccaggggu

SEQ ID NO: 2799083 - RNA, 19 nt, Artificial Sequence
  Description of Artificial Sequence: Synthetic oligonucleotide
ggucuugguccuguuuccu

SEQ ID NO: 2799084 - RNA, 19 nt, Artificial Sequence
  Description of Artificial Sequence: Synthetic oligonucleotide
gcagugaugcccagcuccu

SEQ ID NO: 2799085 - RNA, 19 nt, Artificial Sequence
  Description of Artificial Sequence: Synthetic oligonucleotide
cgacgaccacccuuccuuc

SEQ ID NO: 2799086 - RNA, 19 nt, Artificial Sequence
  Description of Artificial Sequence: Synthetic oligonucleotide
ccacgacgaccacccuucc

SEQ ID NO: 2799087 - RNA, 19 nt, Artificial Sequence
  Description of Artificial Sequence: Synthetic oligonucleotide
accagucacccggcagaua

SEQ ID NO: 2799088 - RNA, 19 nt, Artificial Sequence
  Description of Artificial Sequence: Synthetic oligonucleotide
cagucacccggcagauagu

SEQ ID NO: 2799089 - RNA, 19 nt, Artificial Sequence
  Description of Artificial Sequence: Synthetic oligonucleotide
gagggcugacugggcucca

SEQ ID NO: 2799090 - RNA, 19 nt, Artificial Sequence
  Description of Artificial Sequence: Synthetic oligonucleotide
cgaggcugaugaccuguuc

SEQ ID NO: 2799091 - RNA, 19 nt, Artificial Sequence
  Description of Artificial Sequence: Synthetic oligonucleotide
cuugagguccgaggcugau

SEQ ID NO: 2799092 - RNA, 19 nt, Artificial Sequence
  Description of Artificial Sequence: Synthetic oligonucleotide
cacccuuccuucgggugcu

SEQ ID NO: 2799093 - RNA, 19 nt, Artificial Sequence
  Description of Artificial Sequence: Synthetic oligonucleotide
gcagccaacauggcugcau

SEQ ID NO: 2799094 - RNA, 19 nt, Artificial Sequence
  Description of Artificial Sequence: Synthetic oligonucleotide
acccuuccuucgggugcug

SEQ ID NO: 2799095 - RNA, 19 nt, Artificial Sequence
  Description of Artificial Sequence: Synthetic oligonucleotide
gggcaacauccugggcagc

SEQ ID NO: 2799096 - RNA, 19 nt, Artificial Sequence
  Description of Artificial Sequence: Synthetic oligonucleotide
ccucccguagcucggaguu

SEQ ID NO: 2799097 - RNA, 19 nt, Artificial Sequence
  Description of Artificial Sequence: Synthetic oligonucleotide
cccagcuccuugcaccucu

SEQ ID NO: 2799098 - RNA, 19 nt, Artificial Sequence
  Description of Artificial Sequence: Synthetic oligonucleotide
ccuugccagaaagaucagu

SEQ ID NO: 2799099 - RNA, 19 nt, Artificial Sequence
  Description of Artificial Sequence: Synthetic oligonucleotide
caccagucacccggcagau

SEQ ID NO: 2799100 - RNA, 19 nt, Artificial Sequence
  Description of Artificial Sequence: Synthetic oligonucleotide
gucacccggcagauaguuu

SEQ ID NO: 2799101 - RNA, 19 nt, Artificial Sequence
  Description of Artificial Sequence: Synthetic oligonucleotide
cgucgucuccagacuucuc

SEQ ID NO: 2799102 - RNA, 19 nt, Artificial Sequence
  Description of Artificial Sequence: Synthetic oligonucleotide
ccgcccaaucuucaucccu

SEQ ID NO: 2799103 - RNA, 19 nt, Artificial Sequence
  Description of Artificial Sequence: Synthetic oligonucleotide
ggcagacaccaaauacauu

SEQ ID NO: 2799104 - RNA, 19 nt, Artificial Sequence
  Description of Artificial Sequence: Synthetic oligonucleotide
cccguagcucggaguuuga

SEQ ID NO: 2799105 - RNA, 19 nt, Artificial Sequence
  Description of Artificial Sequence: Synthetic oligonucleotide
cauccucaauccgcccaau

SEQ ID NO: 2799106 - RNA, 19 nt, Artificial Sequence
  Description of Artificial Sequence: Synthetic oligonucleotide
caggggucuugguccuguu

SEQ ID NO: 2799107 - RNA, 19 nt, Artificial Sequence
  Description of Artificial Sequence: Synthetic oligonucleotide
ccaggggucuugguccugu

SEQ ID NO: 2799108 - RNA, 19 nt, Artificial Sequence
  Description of Artificial Sequence: Synthetic oligonucleotide
cagugaugcccagcuccuu

SEQ ID NO: 2799109 - RNA, 19 nt, Artificial Sequence
  Description of Artificial Sequence: Synthetic oligonucleotide
cucccguagcucggaguuu

SEQ ID NO: 2799110 - RNA, 19 nt, Artificial Sequence
  Description of Artificial Sequence: Synthetic oligonucleotide
cccggcagauaguuuccuu

SEQ ID NO: 2799111 - RNA, 19 nt, Artificial Sequence
  Description of Artificial Sequence: Synthetic oligonucleotide
gcccagcuccuugcaccuc

SEQ ID NO: 2799112 - RNA, 19 nt, Artificial Sequence
  Description of Artificial Sequence: Synthetic oligonucleotide
ccgaggcugaugaccuguu

SEQ ID NO: 2799113 - RNA, 19 nt, Artificial Sequence
  Description of Artificial Sequence: Synthetic oligonucleotide
gggugcugucagaggggau

SEQ ID NO: 2799114 - RNA, 19 nt, Artificial Sequence
  Description of Artificial Sequence: Synthetic oligonucleotide
ccguagcucggaguuugau

SEQ ID NO: 2799115 - RNA, 19 nt, Artificial Sequence
  Description of Artificial Sequence: Synthetic oligonucleotide
cccuuccuucgggugcugu

SEQ ID NO: 2799116 - RNA, 19 nt, Artificial Sequence
  Description of Artificial Sequence: Synthetic oligonucleotide
cggcgaccacgacgaccac

SEQ ID NO: 2799117 - RNA, 19 nt, Artificial Sequence
  Description of Artificial Sequence: Synthetic oligonucleotide
cccuugcgaggugccauuu

SEQ ID NO: 2799118 - RNA, 19 nt, Artificial Sequence
  Description of Artificial Sequence: Synthetic oligonucleotide
cgaccacgacgaccacccu

SEQ ID NO: 2799119 - RNA, 19 nt, Artificial Sequence
  Description of Artificial Sequence: Synthetic oligonucleotide
aacaaagaaaacuccaaac

SEQ ID NO: 2799120 - RNA, 19 nt, Artificial Sequence
  Description of Artificial Sequence: Synthetic oligonucleotide
uuuauuuacacagacaacc

SEQ ID NO: 2799121 - RNA, 19 nt, Artificial Sequence
  Description of Artificial Sequence: Synthetic oligonucleotide
uccucuagaauccacaugc

SEQ ID NO: 2799122 - RNA, 19 nt, Artificial Sequence
  Description of Artificial Sequence: Synthetic oligonucleotide
ucuaacucauuaaagcagg

SEQ ID NO: 2799123 - RNA, 19 nt, Artificial Sequence
  Description of Artificial Sequence: Synthetic oligonucleotide
uguagacaaucucaaaacg

SEQ ID NO: 2799124 - RNA, 19 nt, Artificial Sequence
  Description of Artificial Sequence: Synthetic oligonucleotide
ugauccuugagaaaaguca

SEQ ID NO: 2799125 - RNA, 19 nt, Artificial Sequence
  Description of Artificial Sequence: Synthetic oligonucleotide
ugcuuuugaagcuacuugg

SEQ ID NO: 2799126 - RNA, 19 nt, Artificial Sequence
  Description of Artificial Sequence: Synthetic oligonucleotide
aaucucaaaacgguucugc

SEQ ID NO: 2799127 - RNA, 19 nt, Artificial Sequence
  Description of Artificial Sequence: Synthetic oligonucleotide
uucuaacucauuaaagcag

SEQ ID NO: 2799128 - RNA, 19 nt, Artificial Sequence
  Description of Artificial Sequence: Synthetic oligonucleotide
uuucuaacucauuaaagca

SEQ ID NO: 2799129 - RNA, 19 nt, Artificial Sequence
  Description of Artificial Sequence: Synthetic oligonucleotide
auggauacagauuucuaac

SEQ ID NO: 2799130 - RNA, 19 nt, Artificial Sequence
  Description of Artificial Sequence: Synthetic oligonucleotide
  modified_base (15)..(15): a, c, u, g, unknown or other
ucaacauagccaganaggg

SEQ ID NO: 2799131 - RNA, 19 nt, Artificial Sequence
  Description of Artificial Sequence: Synthetic oligonucleotide
uuugaauugugcauuggug

SEQ ID NO: 2799132 - RNA, 19 nt, Artificial Sequence
  Description of Artificial Sequence: Synthetic oligonucleotide
gagaccacagacucaaugg

SEQ ID NO: 2799133 - RNA, 19 nt, Artificial Sequence
  Description of Artificial Sequence: Synthetic oligonucleotide
  modified_base (16)..(16): a, c, u, g, unknown or other
cucaacauagccaganagg

SEQ ID NO: 2799134 - RNA, 19 nt, Artificial Sequence
  Description of Artificial Sequence: Synthetic oligonucleotide
aagcuacuuggcuucaggc

SEQ ID NO: 2799135 - RNA, 19 nt, Artificial Sequence
  Description of Artificial Sequence: Synthetic oligonucleotide
ucuacugcugucaugucag

SEQ ID NO: 2799136 - RNA, 19 nt, Artificial Sequence
  Description of Artificial Sequence: Synthetic oligonucleotide
agaguugaagcgcagggac

SEQ ID NO: 2799137 - RNA, 19 nt, Artificial Sequence
  Description of Artificial Sequence: Synthetic oligonucleotide
ugguuaacaaagaaaacuc

SEQ ID NO: 2799138 - RNA, 19 nt, Artificial Sequence
  Description of Artificial Sequence: Synthetic oligonucleotide
uuuacacagacaaccguag

SEQ ID NO: 2799139 - RNA, 19 nt, Artificial Sequence
  Description of Artificial Sequence: Synthetic oligonucleotide
aagaaaacuccaaacaugu

SEQ ID NO: 2799140 - RNA, 19 nt, Artificial Sequence
  Description of Artificial Sequence: Synthetic oligonucleotide
aaugucauucuuccucuag

SEQ ID NO: 2799141 - RNA, 19 nt, Artificial Sequence
  Description of Artificial Sequence: Synthetic oligonucleotide
uugaauugugcauuggugu

SEQ ID NO: 2799142 - RNA, 19 nt, Artificial Sequence
  Description of Artificial Sequence: Synthetic oligonucleotide
uagacaaucucaaaacggu

SEQ ID NO: 2799143 - RNA, 19 nt, Artificial Sequence
  Description of Artificial Sequence: Synthetic oligonucleotide
uagguaaugucauucuucc

SEQ ID NO: 2799144 - RNA, 19 nt, Artificial Sequence
  Description of Artificial Sequence: Synthetic oligonucleotide
  modified_base (13)..(13): a, c, u, g, unknown or other
aacauagccaganagggga

SEQ ID NO: 2799145 - RNA, 19 nt, Artificial Sequence
  Description of Artificial Sequence: Synthetic oligonucleotide
ucugcauaggucuucacac

SEQ ID NO: 2799146 - RNA, 19 nt, Artificial Sequence
  Description of Artificial Sequence: Synthetic oligonucleotide
ucucaaaacgguucugccg

SEQ ID NO: 2799147 - RNA, 19 nt, Artificial Sequence
  Description of Artificial Sequence: Synthetic oligonucleotide
acuccaucaggauggauac

SEQ ID NO: 2799148 - RNA, 19 nt, Artificial Sequence
  Description of Artificial Sequence: Synthetic oligonucleotide
ucuagaauccacaugcuuu

SEQ ID NO: 2799149 - RNA, 19 nt, Artificial Sequence
  Description of Artificial Sequence: Synthetic oligonucleotide
aaggauuugaauugugcau

SEQ ID NO: 2799150 - RNA, 19 nt, Artificial Sequence
  Description of Artificial Sequence: Synthetic oligonucleotide
auuggugugauccuugaga

SEQ ID NO: 2799151 - RNA, 19 nt, Artificial Sequence
  Description of Artificial Sequence: Synthetic oligonucleotide
aacgguucugccgaguugg

SEQ ID NO: 2799152 - RNA, 19 nt, Artificial Sequence
  Description of Artificial Sequence: Synthetic oligonucleotide
guagacaaucucaaaacgg

SEQ ID NO: 2799153 - RNA, 19 nt, Artificial Sequence
  Description of Artificial Sequence: Synthetic oligonucleotide
  modified_base (2)..(2): a, c, u, g, unknown or other
anaggggaaagcuuuccga

SEQ ID NO: 2799154 - RNA, 19 nt, Artificial Sequence
  Description of Artificial Sequence: Synthetic oligonucleotide
ucucauaccaguuggccgc

SEQ ID NO: 2799155 - RNA, 19 nt, Artificial Sequence
  Description of Artificial Sequence: Synthetic oligonucleotide
gaagccauagucugucagg

SEQ ID NO: 2799156 - RNA, 19 nt, Artificial Sequence
  Description of Artificial Sequence: Synthetic oligonucleotide
ugucaugucagccaaggau

SEQ ID NO: 2799157 - RNA, 19 nt, Artificial Sequence
  Description of Artificial Sequence: Synthetic oligonucleotide
aucucaaaacgguucugcc

SEQ ID NO: 2799158 - RNA, 19 nt, Artificial Sequence
  Description of Artificial Sequence: Synthetic oligonucleotide
  modified_base (3)..(3): a, c, u, g, unknown or other
ganaggggaaagcuuuccg

SEQ ID NO: 2799159 - RNA, 19 nt, Artificial Sequence
  Description of Artificial Sequence: Synthetic oligonucleotide
uugugcauuggugugaucc

SEQ ID NO: 2799160 - RNA, 19 nt, Artificial Sequence
  Description of Artificial Sequence: Synthetic oligonucleotide
guaacguagcucaacauag

SEQ ID NO: 2799161 - RNA, 19 nt, Artificial Sequence
  Description of Artificial Sequence: Synthetic oligonucleotide
gauacagauuucuaacuca

SEQ ID NO: 2799162 - RNA, 19 nt, Artificial Sequence
  Description of Artificial Sequence: Synthetic oligonucleotide
ugaauugugcauuggugug

SEQ ID NO: 2799163 - RNA, 19 nt, Artificial Sequence
  Description of Artificial Sequence: Synthetic oligonucleotide
  modified_base (14)..(14): a, c, u, g, unknown or other
caacauagccaganagggg

SEQ ID NO: 2799164 - RNA, 19 nt, Artificial Sequence
  Description of Artificial Sequence: Synthetic oligonucleotide
uuugaagcuacuuggcuuc

SEQ ID NO: 2799165 - RNA, 19 nt, Artificial Sequence
  Description of Artificial Sequence: Synthetic oligonucleotide
gauccuugagaaaagucag

SEQ ID NO: 2799166 - RNA, 19 nt, Artificial Sequence
  Description of Artificial Sequence: Synthetic oligonucleotide
uauuuacacagacaaccgu

SEQ ID NO: 2799167 - RNA, 19 nt, Artificial Sequence
  Description of Artificial Sequence: Synthetic oligonucleotide
uccaucaggauggauacag

SEQ ID NO: 2799168 - RNA, 19 nt, Artificial Sequence
  Description of Artificial Sequence: Synthetic oligonucleotide
gauggauacagauuucuaa

SEQ ID NO: 2799169 - RNA, 19 nt, Artificial Sequence
  Description of Artificial Sequence: Synthetic oligonucleotide
agcucaucugcauaggucu

SEQ ID NO: 2799170 - RNA, 19 nt, Artificial Sequence
  Description of Artificial Sequence: Synthetic oligonucleotide
agauuucuaacucauuaaa

SEQ ID NO: 2799171 - RNA, 19 nt, Artificial Sequence
  Description of Artificial Sequence: Synthetic oligonucleotide
uccgaaaggaugucccucg

SEQ ID NO: 2799172 - RNA, 19 nt, Artificial Sequence
  Description of Artificial Sequence: Synthetic oligonucleotide
ucccucucauaccaguugg

SEQ ID NO: 2799173 - RNA, 19 nt, Artificial Sequence
  Description of Artificial Sequence: Synthetic oligonucleotide
aaagucagcacggggauga

SEQ ID NO: 2799174 - RNA, 19 nt, Artificial Sequence
  Description of Artificial Sequence: Synthetic oligonucleotide
cuucacacggauccgagag

SEQ ID NO: 2799175 - RNA, 19 nt, Artificial Sequence
  Description of Artificial Sequence: Synthetic oligonucleotide
gaagcuacuuggcuucagg

SEQ ID NO: 2799176 - RNA, 19 nt, Artificial Sequence
  Description of Artificial Sequence: Synthetic oligonucleotide
uuacacagacaaccguagg

SEQ ID NO: 2799177 - RNA, 19 nt, Artificial Sequence
  Description of Artificial Sequence: Synthetic oligonucleotide
ucuuccucuagaauccaca

SEQ ID NO: 2799178 - RNA, 19 nt, Artificial Sequence
  Description of Artificial Sequence: Synthetic oligonucleotide
acaaucucaaaacgguucu

SEQ ID NO: 2799179 - RNA, 19 nt, Artificial Sequence
  Description of Artificial Sequence: Synthetic oligonucleotide
gauccuucuuagaucaggg

SEQ ID NO: 2799180 - RNA, 19 nt, Artificial Sequence
  Description of Artificial Sequence: Synthetic oligonucleotide
agcuucaagcuugagacuc

SEQ ID NO: 2799181 - RNA, 19 nt, Artificial Sequence
  Description of Artificial Sequence: Synthetic oligonucleotide
  modified_base (4)..(4): a, c, u, g, unknown or other
aganaggggaaagcuuucc

SEQ ID NO: 2799182 - RNA, 19 nt, Artificial Sequence
  Description of Artificial Sequence: Synthetic oligonucleotide
uuuugaagcuacuuggcuu

SEQ ID NO: 2799183 - RNA, 19 nt, Artificial Sequence
  Description of Artificial Sequence: Synthetic oligonucleotide
acaucuacugcugucaugu

SEQ ID NO: 2799184 - RNA, 19 nt, Artificial Sequence
  Description of Artificial Sequence: Synthetic oligonucleotide
uggauacagauuucuaacu

SEQ ID NO: 2799185 - RNA, 19 nt, Artificial Sequence
  Description of Artificial Sequence: Synthetic oligonucleotide
aaugggugucagcucaucu

SEQ ID NO: 2799186 - RNA, 19 nt, Artificial Sequence
  Description of Artificial Sequence: Synthetic oligonucleotide
ugggugucagcucaucugc

SEQ ID NO: 2799187 - RNA, 19 nt, Artificial Sequence
  Description of Artificial Sequence: Synthetic oligonucleotide
ucuuagaucagggugguua

SEQ ID NO: 2799188 - RNA, 19 nt, Artificial Sequence
  Description of Artificial Sequence: Synthetic oligonucleotide
agagaccacagacucaaug

SEQ ID NO: 2799189 - RNA, 19 nt, Artificial Sequence
  Description of Artificial Sequence: Synthetic oligonucleotide
gguaaugucauucuuccuc

SEQ ID NO: 2799190 - RNA, 19 nt, Artificial Sequence
  Description of Artificial Sequence: Synthetic oligonucleotide
uuggugugauccuugagaa

SEQ ID NO: 2799191 - RNA, 19 nt, Artificial Sequence
  Description of Artificial Sequence: Synthetic oligonucleotide
acucauuaaagcaggucac

SEQ ID NO: 2799192 - RNA, 19 nt, Artificial Sequence
  Description of Artificial Sequence: Synthetic oligonucleotide
uagucugucaggauccuuc

SEQ ID NO: 2799193 - RNA, 19 nt, Artificial Sequence
  Description of Artificial Sequence: Synthetic oligonucleotide
auaggcagggcgucguaac

SEQ ID NO: 2799194 - RNA, 19 nt, Artificial Sequence
  Description of Artificial Sequence: Synthetic oligonucleotide
caagcuugagacucucagg

SEQ ID NO: 2799195 - RNA, 19 nt, Artificial Sequence
  Description of Artificial Sequence: Synthetic oligonucleotide
ugagaaaagucagcacggg

SEQ ID NO: 2799196 - RNA, 19 nt, Artificial Sequence
  Description of Artificial Sequence: Synthetic oligonucleotide
  modified_base (10)..(10): a, c, u, g, unknown or other
auagccaganaggggaaag

SEQ ID NO: 2799197 - RNA, 19 nt, Artificial Sequence
  Description of Artificial Sequence: Synthetic oligonucleotide
caaggauuugaauugugca

SEQ ID NO: 2799198 - RNA, 19 nt, Artificial Sequence
  Description of Artificial Sequence: Synthetic oligonucleotide
ccuucuuagaucagggugg

SEQ ID NO: 2799199 - RNA, 19 nt, Artificial Sequence
  Description of Artificial Sequence: Synthetic oligonucleotide
accguagguaaugucauuc

SEQ ID NO: 2799200 - RNA, 19 nt, Artificial Sequence
  Description of Artificial Sequence: Synthetic oligonucleotide
gacaaucucaaaacgguuc

SEQ ID NO: 2799201 - RNA, 19 nt, Artificial Sequence
  Description of Artificial Sequence: Synthetic oligonucleotide
ucauuaaagcaggucaccu

SEQ ID NO: 2799202 - RNA, 19 nt, Artificial Sequence
  Description of Artificial Sequence: Synthetic oligonucleotide
ggauccgagaguugaagcg

SEQ ID NO: 2799203 - RNA, 19 nt, Artificial Sequence
  Description of Artificial Sequence: Synthetic oligonucleotide
acaaccguagguaauguca

SEQ ID NO: 2799204 - RNA, 19 nt, Artificial Sequence
  Description of Artificial Sequence: Synthetic oligonucleotide
gauuugaauugugcauugg

SEQ ID NO: 2799205 - RNA, 19 nt, Artificial Sequence
  Description of Artificial Sequence: Synthetic oligonucleotide
ugucauucuuccucuagaa

SEQ ID NO: 2799206 - RNA, 19 nt, Artificial Sequence
  Description of Artificial Sequence: Synthetic oligonucleotide
aaaacgguucugccgaguu

SEQ ID NO: 2799207 - RNA, 19 nt, Artificial Sequence
  Description of Artificial Sequence: Synthetic oligonucleotide
cagccaaggauuugaauug

SEQ ID NO: 2799208 - RNA, 19 nt, Artificial Sequence
  Description of Artificial Sequence: Synthetic oligonucleotide
uaacguagcucaacauagc

SEQ ID NO: 2799209 - RNA, 19 nt, Artificial Sequence
  Description of Artificial Sequence: Synthetic oligonucleotide
aagcuuuccgaaaggaugu

SEQ ID NO: 2799210 - RNA, 19 nt, Artificial Sequence
  Description of Artificial Sequence: Synthetic oligonucleotide
cucaaaacgguucugccga

SEQ ID NO: 2799211 - RNA, 19 nt, Artificial Sequence
  Description of Artificial Sequence: Synthetic oligonucleotide
aacuccaaacaugucccag

SEQ ID NO: 2799212 - RNA, 19 nt, Artificial Sequence
  Description of Artificial Sequence: Synthetic oligonucleotide
gacagcagguuguagacaa

SEQ ID NO: 2799213 - RNA, 19 nt, Artificial Sequence
  Description of Artificial Sequence: Synthetic oligonucleotide
  modified_base (17)..(17): a, c, u, g, unknown or other
gcucaacauagccaganag

SEQ ID NO: 2799214 - RNA, 19 nt, Artificial Sequence
  Description of Artificial Sequence: Synthetic oligonucleotide
ugcauuggugugauccuug

SEQ ID NO: 2799215 - RNA, 19 nt, Artificial Sequence
  Description of Artificial Sequence: Synthetic oligonucleotide
aaacgguucugccgaguug

SEQ ID NO: 2799216 - RNA, 19 nt, Artificial Sequence
  Description of Artificial Sequence: Synthetic oligonucleotide
uagaucagggugguuaaca

SEQ ID NO: 2799217 - RNA, 19 nt, Artificial Sequence
  Description of Artificial Sequence: Synthetic oligonucleotide
gauccgagaguugaagcgc

SEQ ID NO: 2799218 - RNA, 19 nt, Artificial Sequence
  Description of Artificial Sequence: Synthetic oligonucleotide
cagguuguagacaaucuca

SEQ ID NO: 2799219 - RNA, 19 nt, Artificial Sequence
  Description of Artificial Sequence: Synthetic oligonucleotide
agaauccacaugcuuuuga

SEQ ID NO: 2799220 - RNA, 19 nt, Artificial Sequence
  Description of Artificial Sequence: Synthetic oligonucleotide
augggugucagcucaucug

SEQ ID NO: 2799221 - RNA, 19 nt, Artificial Sequence
  Description of Artificial Sequence: Synthetic oligonucleotide
uuccucuagaauccacaug

SEQ ID NO: 2799222 - RNA, 19 nt, Artificial Sequence
  Description of Artificial Sequence: Synthetic oligonucleotide
aagccauagucugucagga

SEQ ID NO: 2799223 - RNA, 19 nt, Artificial Sequence
  Description of Artificial Sequence: Synthetic oligonucleotide
uaggcagggcgucguaacg

SEQ ID NO: 2799224 - RNA, 19 nt, Artificial Sequence
  Description of Artificial Sequence: Synthetic oligonucleotide
gcugacgauaggcagggcg

SEQ ID NO: 2799225 - RNA, 19 nt, Artificial Sequence
  Description of Artificial Sequence: Synthetic oligonucleotide
agcuacuuggcuucaggcu

SEQ ID NO: 2799226 - RNA, 19 nt, Artificial Sequence
  Description of Artificial Sequence: Synthetic oligonucleotide
acggggaugacuccaucag

SEQ ID NO: 2799227 - RNA, 19 nt, Artificial Sequence
  Description of Artificial Sequence: Synthetic oligonucleotide
gugcacagagaccacagac

SEQ ID NO: 2799228 - RNA, 19 nt, Artificial Sequence
  Description of Artificial Sequence: Synthetic oligonucleotide
gaauccacaugcuuuugaa

SEQ ID NO: 2799229 - RNA, 19 nt, Artificial Sequence
  Description of Artificial Sequence: Synthetic oligonucleotide
agacucaaugggugucagc

SEQ ID NO: 2799230 - RNA, 19 nt, Artificial Sequence
  Description of Artificial Sequence: Synthetic oligonucleotide
agaccucccucucauacca

SEQ ID NO: 2799231 - RNA, 19 nt, Artificial Sequence
  Description of Artificial Sequence: Synthetic oligonucleotide
gguuaacaaagaaaacucc

SEQ ID NO: 2799232 - RNA, 19 nt, Artificial Sequence
  Description of Artificial Sequence: Synthetic oligonucleotide
aaacuccaaacauguccca

SEQ ID NO: 2799233 - RNA, 19 nt, Artificial Sequence
  Description of Artificial Sequence: Synthetic oligonucleotide
guagguaaugucauucuuc

SEQ ID NO: 2799234 - RNA, 19 nt, Artificial Sequence
  Description of Artificial Sequence: Synthetic oligonucleotide
cucauuaaagcaggucacc

SEQ ID NO: 2799235 - RNA, 19 nt, Artificial Sequence
  Description of Artificial Sequence: Synthetic oligonucleotide
ugugcauuggugugauccu

SEQ ID NO: 2799236 - RNA, 19 nt, Artificial Sequence
  Description of Artificial Sequence: Synthetic oligonucleotide
acuccaaacaugucccaga

SEQ ID NO: 2799237 - RNA, 19 nt, Artificial Sequence
  Description of Artificial Sequence: Synthetic oligonucleotide
ucccucgaagccauagucu

SEQ ID NO: 2799238 - RNA, 19 nt, Artificial Sequence
  Description of Artificial Sequence: Synthetic oligonucleotide
auccuugagaaaagucagc

SEQ ID NO: 2799239 - RNA, 19 nt, Artificial Sequence
  Description of Artificial Sequence: Synthetic oligonucleotide
cguagcucaacauagccag

SEQ ID NO: 2799240 - RNA, 19 nt, Artificial Sequence
  Description of Artificial Sequence: Synthetic oligonucleotide
uccaaacaugucccagacc

SEQ ID NO: 2799241 - RNA, 19 nt, Artificial Sequence
  Description of Artificial Sequence: Synthetic oligonucleotide
aauugugcauuggugugau

SEQ ID NO: 2799242 - RNA, 19 nt, Artificial Sequence
  Description of Artificial Sequence: Synthetic oligonucleotide
auuuacacagacaaccgua

SEQ ID NO: 2799243 - RNA, 19 nt, Artificial Sequence
  Description of Artificial Sequence: Synthetic oligonucleotide
cucaaugggugucagcuca

SEQ ID NO: 2799244 - RNA, 19 nt, Artificial Sequence
  Description of Artificial Sequence: Synthetic oligonucleotide
ggauacagauuucuaacuc

SEQ ID NO: 2799245 - RNA, 19 nt, Artificial Sequence
  Description of Artificial Sequence: Synthetic oligonucleotide
ugugauccuugagaaaagu

SEQ ID NO: 2799246 - RNA, 19 nt, Artificial Sequence
  Description of Artificial Sequence: Synthetic oligonucleotide
gucguaacguagcucaaca

SEQ ID NO: 2799247 - RNA, 19 nt, Artificial Sequence
  Description of Artificial Sequence: Synthetic oligonucleotide
ccaaggauuugaauugugc

SEQ ID NO: 2799248 - RNA, 19 nt, Artificial Sequence
  Description of Artificial Sequence: Synthetic oligonucleotide
uuuccgaaaggaugucccu

SEQ ID NO: 2799249 - RNA, 19 nt, Artificial Sequence
  Description of Artificial Sequence: Synthetic oligonucleotide
uaacucauuaaagcagguc

SEQ ID NO: 2799250 - RNA, 19 nt, Artificial Sequence
  Description of Artificial Sequence: Synthetic oligonucleotide
aggauggauacagauuucu

SEQ ID NO: 2799251 - RNA, 19 nt, Artificial Sequence
  Description of Artificial Sequence: Synthetic oligonucleotide
gacucaaugggugucagcu

SEQ ID NO: 2799252 - RNA, 19 nt, Artificial Sequence
  Description of Artificial Sequence: Synthetic oligonucleotide
gaguugggacaucuacugc

SEQ ID NO: 2799253 - RNA, 19 nt, Artificial Sequence
  Description of Artificial Sequence: Synthetic oligonucleotide
gguucugccgaguugggac

SEQ ID NO: 2799254 - RNA, 19 nt, Artificial Sequence
  Description of Artificial Sequence: Synthetic oligonucleotide
uugaagcgcagggacagca

SEQ ID NO: 2799255 - RNA, 19 nt, Artificial Sequence
  Description of Artificial Sequence: Synthetic oligonucleotide
gacaucuacugcugucaug

SEQ ID NO: 2799256 - RNA, 19 nt, Artificial Sequence
  Description of Artificial Sequence: Synthetic oligonucleotide
agaucagggugguuaacaa

SEQ ID NO: 2799257 - RNA, 19 nt, Artificial Sequence
  Description of Artificial Sequence: Synthetic oligonucleotide
ucaaaacgguucugccgag

SEQ ID NO: 2799258 - RNA, 19 nt, Artificial Sequence
  Description of Artificial Sequence: Synthetic oligonucleotide
ggauuugaauugugcauug

SEQ ID NO: 2799259 - RNA, 19 nt, Artificial Sequence
  Description of Artificial Sequence: Synthetic oligonucleotide
ucaugucagccaaggauuu

SEQ ID NO: 2799260 - RNA, 19 nt, Artificial Sequence
  Description of Artificial Sequence: Synthetic oligonucleotide
  modified_base (19)..(19): a, c, u, g, unknown or other
uagcucaacauagccagan

SEQ ID NO: 2799261 - RNA, 19 nt, Artificial Sequence
  Description of Artificial Sequence: Synthetic oligonucleotide
ggugugauccuugagaaaa

SEQ ID NO: 2799262 - RNA, 19 nt, Artificial Sequence
  Description of Artificial Sequence: Synthetic oligonucleotide
ucuucacacggauccgaga

SEQ ID NO: 2799263 - RNA, 19 nt, Artificial Sequence
  Description of Artificial Sequence: Synthetic oligonucleotide
gggugguuaacaaagaaaa

SEQ ID NO: 2799264 - RNA, 19 nt, Artificial Sequence
  Description of Artificial Sequence: Synthetic oligonucleotide
ggcgucguaacguagcuca

SEQ ID NO: 2799265 - RNA, 19 nt, Artificial Sequence
  Description of Artificial Sequence: Synthetic oligonucleotide
cagacaaccguagguaaug

SEQ ID NO: 2799266 - RNA, 19 nt, Artificial Sequence
  Description of Artificial Sequence: Synthetic oligonucleotide
ggauccuucuuagaucagg

SEQ ID NO: 2799267 - RNA, 19 nt, Artificial Sequence
  Description of Artificial Sequence: Synthetic oligonucleotide
uucacacggauccgagagu

SEQ ID NO: 2799268 - RNA, 19 nt, Artificial Sequence
  Description of Artificial Sequence: Synthetic oligonucleotide
augucagccaaggauuuga

SEQ ID NO: 2799269 - RNA, 19 nt, Artificial Sequence
  Description of Artificial Sequence: Synthetic oligonucleotide
cuucaggcuucuugucucc

SEQ ID NO: 2799270 - RNA, 19 nt, Artificial Sequence
  Description of Artificial Sequence: Synthetic oligonucleotide
agucugucaggauccuucu

SEQ ID NO: 2799271 - RNA, 19 nt, Artificial Sequence
  Description of Artificial Sequence: Synthetic oligonucleotide
  modified_base (8)..(8): a, c, u, g, unknown or other
agccaganaggggaaagcu

SEQ ID NO: 2799272 - RNA, 19 nt, Artificial Sequence
  Description of Artificial Sequence: Synthetic oligonucleotide
gacaaccguagguaauguc

SEQ ID NO: 2799273 - RNA, 19 nt, Artificial Sequence
  Description of Artificial Sequence: Synthetic oligonucleotide
gucagcacggggaugacuc

SEQ ID NO: 2799274 - RNA, 19 nt, Artificial Sequence
  Description of Artificial Sequence: Synthetic oligonucleotide
cagggcgucguaacguagc

SEQ ID NO: 2799275 - RNA, 19 nt, Artificial Sequence
  Description of Artificial Sequence: Synthetic oligonucleotide
cagaccucccucucauacc

SEQ ID NO: 2799276 - RNA, 19 nt, Artificial Sequence
  Description of Artificial Sequence: Synthetic oligonucleotide
ugucccucgaagccauagu

SEQ ID NO: 2799277 - RNA, 19 nt, Artificial Sequence
  Description of Artificial Sequence: Synthetic oligonucleotide
auaccaguuggccgccuug

SEQ ID NO: 2799278 - RNA, 19 nt, Artificial Sequence
  Description of Artificial Sequence: Synthetic oligonucleotide
gacgauaggcagggcgucg

SEQ ID NO: 2799279 - RNA, 19 nt, Artificial Sequence
  Description of Artificial Sequence: Synthetic oligonucleotide
cuuagaucagggugguuaa

SEQ ID NO: 2799280 - RNA, 19 nt, Artificial Sequence
  Description of Artificial Sequence: Synthetic oligonucleotide
uugggacaucuacugcugu

SEQ ID NO: 2799281 - RNA, 19 nt, Artificial Sequence
  Description of Artificial Sequence: Synthetic oligonucleotide
ugucagccaaggauuugaa

SEQ ID NO: 2799282 - RNA, 19 nt, Artificial Sequence
  Description of Artificial Sequence: Synthetic oligonucleotide
auaggucuucacacggauc

SEQ ID NO: 2799283 - RNA, 19 nt, Artificial Sequence
  Description of Artificial Sequence: Synthetic oligonucleotide
auccuucuuagaucagggu

SEQ ID NO: 2799284 - RNA, 19 nt, Artificial Sequence
  Description of Artificial Sequence: Synthetic oligonucleotide
ugggacaucuacugcuguc

SEQ ID NO: 2799285 - RNA, 19 nt, Artificial Sequence
  Description of Artificial Sequence: Synthetic oligonucleotide
gucccucgaagccauaguc

SEQ ID NO: 2799286 - RNA, 19 nt, Artificial Sequence
  Description of Artificial Sequence: Synthetic oligonucleotide
acacggauccgagaguuga

SEQ ID NO: 2799287 - RNA, 19 nt, Artificial Sequence
  Description of Artificial Sequence: Synthetic oligonucleotide
gucaggauccuucuuagau

SEQ ID NO: 2799288 - RNA, 19 nt, Artificial Sequence
  Description of Artificial Sequence: Synthetic oligonucleotide
uccgagaguugaagcgcag

SEQ ID NO: 2799289 - RNA, 19 nt, Artificial Sequence
  Description of Artificial Sequence: Synthetic oligonucleotide
gccauagucugucaggauc

SEQ ID NO: 2799290 - RNA, 19 nt, Artificial Sequence
  Description of Artificial Sequence: Synthetic oligonucleotide
ugucaggauccuucuuaga

SEQ ID NO: 2799291 - RNA, 19 nt, Artificial Sequence
  Description of Artificial Sequence: Synthetic oligonucleotide
cauuggugugauccuugag

SEQ ID NO: 2799292 - RNA, 19 nt, Artificial Sequence
  Description of Artificial Sequence: Synthetic oligonucleotide
uuggccgccuugugcacag

SEQ ID NO: 2799293 - RNA, 19 nt, Artificial Sequence
  Description of Artificial Sequence: Synthetic oligonucleotide
  modified_base (5)..(5): a, c, u, g, unknown or other
caganaggggaaagcuuuc

SEQ ID NO: 2799294 - RNA, 19 nt, Artificial Sequence
  Description of Artificial Sequence: Synthetic oligonucleotide
ucacacggauccgagaguu

SEQ ID NO: 2799295 - RNA, 19 nt, Artificial Sequence
  Description of Artificial Sequence: Synthetic oligonucleotide
acacagacaaccguaggua

SEQ ID NO: 2799296 - RNA, 19 nt, Artificial Sequence
  Description of Artificial Sequence: Synthetic oligonucleotide
cuucuugucuccagcuuca

SEQ ID NO: 2799297 - RNA, 19 nt, Artificial Sequence
  Description of Artificial Sequence: Synthetic oligonucleotide
  modified_base (9)..(9): a, c, u, g, unknown or other
uagccaganaggggaaagc

SEQ ID NO: 2799298 - RNA, 19 nt, Artificial Sequence
  Description of Artificial Sequence: Synthetic oligonucleotide
cucgaagccauagucuguc

SEQ ID NO: 2799299 - RNA, 19 nt, Artificial Sequence
  Description of Artificial Sequence: Synthetic oligonucleotide
ucuccagcuucaagcuuga

SEQ ID NO: 2799300 - RNA, 19 nt, Artificial Sequence
  Description of Artificial Sequence: Synthetic oligonucleotide
aguuggccgccuugugcac

SEQ ID NO: 2799301 - RNA, 19 nt, Artificial Sequence
  Description of Artificial Sequence: Synthetic oligonucleotide
agggugguuaacaaagaaa

SEQ ID NO: 2799302 - RNA, 19 nt, Artificial Sequence
  Description of Artificial Sequence: Synthetic oligonucleotide
ucguaacguagcucaacau

SEQ ID NO: 2799303 - RNA, 19 nt, Artificial Sequence
  Description of Artificial Sequence: Synthetic oligonucleotide
cucccucucauaccaguug

SEQ ID NO: 2799304 - RNA, 19 nt, Artificial Sequence
  Description of Artificial Sequence: Synthetic oligonucleotide
agguaaugucauucuuccu

SEQ ID NO: 2799305 - RNA, 19 nt, Artificial Sequence
  Description of Artificial Sequence: Synthetic oligonucleotide
acggauccgagaguugaag

SEQ ID NO: 2799306 - RNA, 19 nt, Artificial Sequence
  Description of Artificial Sequence: Synthetic oligonucleotide
caguuggccgccuugugca

SEQ ID NO: 2799307 - RNA, 19 nt, Artificial Sequence
  Description of Artificial Sequence: Synthetic oligonucleotide
gagaguugaagcgcaggga

SEQ ID NO: 2799308 - RNA, 19 nt, Artificial Sequence
  Description of Artificial Sequence: Synthetic oligonucleotide
ugaagcuacuuggcuucag

SEQ ID NO: 2799309 - RNA, 19 nt, Artificial Sequence
  Description of Artificial Sequence: Synthetic oligonucleotide
uagaauccacaugcuuuug

SEQ ID NO: 2799310 - RNA, 19 nt, Artificial Sequence
  Description of Artificial Sequence: Synthetic oligonucleotide
ucagcacggggaugacucc

SEQ ID NO: 2799311 - RNA, 19 nt, Artificial Sequence
  Description of Artificial Sequence: Synthetic oligonucleotide
uuccgaaaggaugucccuc

SEQ ID NO: 2799312 - RNA, 19 nt, Artificial Sequence
  Description of Artificial Sequence: Synthetic oligonucleotide
augucccagaccucccucu

SEQ ID NO: 2799313 - RNA, 19 nt, Artificial Sequence
  Description of Artificial Sequence: Synthetic oligonucleotide
aggggaaagcuuuccgaaa

SEQ ID NO: 2799314 - RNA, 19 nt, Artificial Sequence
  Description of Artificial Sequence: Synthetic oligonucleotide
cuuuugaagcuacuuggcu

SEQ ID NO: 2799315 - RNA, 19 nt, Artificial Sequence
  Description of Artificial Sequence: Synthetic oligonucleotide
ugcugucaugucagccaag

SEQ ID NO: 2799316 - RNA, 19 nt, Artificial Sequence
  Description of Artificial Sequence: Synthetic oligonucleotide
acaugucccagaccucccu

SEQ ID NO: 2799317 - RNA, 19 nt, Artificial Sequence
  Description of Artificial Sequence: Synthetic oligonucleotide
acguagcucaacauagcca

SEQ ID NO: 2799318 - RNA, 19 nt, Artificial Sequence
  Description of Artificial Sequence: Synthetic oligonucleotide
augucccucgaagccauag

SEQ ID NO: 2799319 - RNA, 19 nt, Artificial Sequence
  Description of Artificial Sequence: Synthetic oligonucleotide
agcagguuguagacaaucu

SEQ ID NO: 2799320 - RNA, 19 nt, Artificial Sequence
  Description of Artificial Sequence: Synthetic oligonucleotide
aaccguagguaaugucauu

SEQ ID NO: 2799321 - RNA, 19 nt, Artificial Sequence
  Description of Artificial Sequence: Synthetic oligonucleotide
ucaaugggugucagcucau

SEQ ID NO: 2799322 - RNA, 19 nt, Artificial Sequence
  Description of Artificial Sequence: Synthetic oligonucleotide
auugugcauuggugugauc

SEQ ID NO: 2799323 - RNA, 19 nt, Artificial Sequence
  Description of Artificial Sequence: Synthetic oligonucleotide
uuagaucagggugguuaac

SEQ ID NO: 2799324 - RNA, 19 nt, Artificial Sequence
  Description of Artificial Sequence: Synthetic oligonucleotide
gcuuuugaagcuacuuggc

SEQ ID NO: 2799325 - RNA, 19 nt, Artificial Sequence
  Description of Artificial Sequence: Synthetic oligonucleotide
aagucagcacggggaugac

SEQ ID NO: 2799326 - RNA, 19 nt, Artificial Sequence
  Description of Artificial Sequence: Synthetic oligonucleotide
  modified_base (18)..(18): a, c, u, g, unknown or other
agcucaacauagccagana

SEQ ID NO: 2799327 - RNA, 19 nt, Artificial Sequence
  Description of Artificial Sequence: Synthetic oligonucleotide
ggugguuaacaaagaaaac

SEQ ID NO: 2799328 - RNA, 19 nt, Artificial Sequence
  Description of Artificial Sequence: Synthetic oligonucleotide
cgagaguugaagcgcaggg

SEQ ID NO: 2799329 - RNA, 19 nt, Artificial Sequence
  Description of Artificial Sequence: Synthetic oligonucleotide
agggcgucguaacguagcu

SEQ ID NO: 2799330 - RNA, 19 nt, Artificial Sequence
  Description of Artificial Sequence: Synthetic oligonucleotide
gcagguuguagacaaucuc

SEQ ID NO: 2799331 - RNA, 19 nt, Artificial Sequence
  Description of Artificial Sequence: Synthetic oligonucleotide
cacagacaaccguagguaa

SEQ ID NO: 2799332 - RNA, 19 nt, Artificial Sequence
  Description of Artificial Sequence: Synthetic oligonucleotide
aagcgcagggacagcaggu

SEQ ID NO: 2799333 - RNA, 19 nt, Artificial Sequence
  Description of Artificial Sequence: Synthetic oligonucleotide
uggugugauccuugagaaa

SEQ ID NO: 2799334 - RNA, 19 nt, Artificial Sequence
  Description of Artificial Sequence: Synthetic oligonucleotide
caaucucaaaacgguucug

SEQ ID NO: 2799335 - RNA, 19 nt, Artificial Sequence
  Description of Artificial Sequence: Synthetic oligonucleotide
guucugccgaguugggaca

SEQ ID NO: 2799336 - RNA, 19 nt, Artificial Sequence
  Description of Artificial Sequence: Synthetic oligonucleotide
gccgaguugggacaucuac

SEQ ID NO: 2799337 - RNA, 19 nt, Artificial Sequence
  Description of Artificial Sequence: Synthetic oligonucleotide
caggauggauacagauuuc

SEQ ID NO: 2799338 - RNA, 19 nt, Artificial Sequence
  Description of Artificial Sequence: Synthetic oligonucleotide
cuacugcugucaugucagc

SEQ ID NO: 2799339 - RNA, 19 nt, Artificial Sequence
  Description of Artificial Sequence: Synthetic oligonucleotide
gaguugaagcgcagggaca

SEQ ID NO: 2799340 - RNA, 19 nt, Artificial Sequence
  Description of Artificial Sequence: Synthetic oligonucleotide
cccucgaagccauagucug

SEQ ID NO: 2799341 - RNA, 19 nt, Artificial Sequence
  Description of Artificial Sequence: Synthetic oligonucleotide
agacaaccguagguaaugu

SEQ ID NO: 2799342 - RNA, 19 nt, Artificial Sequence
  Description of Artificial Sequence: Synthetic oligonucleotide
cacggggaugacuccauca

SEQ ID NO: 2799343 - RNA, 19 nt, Artificial Sequence
  Description of Artificial Sequence: Synthetic oligonucleotide
uaccaguuggccgccuugu

SEQ ID NO: 2799344 - RNA, 19 nt, Artificial Sequence
  Description of Artificial Sequence: Synthetic oligonucleotide
agacaaucucaaaacgguu

SEQ ID NO: 2799345 - RNA, 19 nt, Artificial Sequence
  Description of Artificial Sequence: Synthetic oligonucleotide
agccaaggauuugaauugu

SEQ ID NO: 2799346 - RNA, 19 nt, Artificial Sequence
  Description of Artificial Sequence: Synthetic oligonucleotide
ccagaccucccucucauac

SEQ ID NO: 2799347 - RNA, 19 nt, Artificial Sequence
  Description of Artificial Sequence: Synthetic oligonucleotide
cacagacucaauggguguc

SEQ ID NO: 2799348 - RNA, 19 nt, Artificial Sequence
  Description of Artificial Sequence: Synthetic oligonucleotide
uugaagcuacuuggcuuca

SEQ ID NO: 2799349 - RNA, 19 nt, Artificial Sequence
  Description of Artificial Sequence: Synthetic oligonucleotide
cuucaagcuugagacucuc

SEQ ID NO: 2799350 - RNA, 19 nt, Artificial Sequence
  Description of Artificial Sequence: Synthetic oligonucleotide
cugacgauaggcagggcgu

SEQ ID NO: 2799351 - RNA, 19 nt, Artificial Sequence
  Description of Artificial Sequence: Synthetic oligonucleotide
cagggugguuaacaaagaa

SEQ ID NO: 2799352 - RNA, 19 nt, Artificial Sequence
  Description of Artificial Sequence: Synthetic oligonucleotide
acagacaaccguagguaau

SEQ ID NO: 2799353 - RNA, 19 nt, Artificial Sequence
  Description of Artificial Sequence: Synthetic oligonucleotide
gauaggcagggcgucguaa

SEQ ID NO: 2799354 - RNA, 19 nt, Artificial Sequence
  Description of Artificial Sequence: Synthetic oligonucleotide
ggggcugacgauaggcagg

SEQ ID NO: 2799355 - RNA, 19 nt, Artificial Sequence
  Description of Artificial Sequence: Synthetic oligonucleotide
gggcugacgauaggcaggg

SEQ ID NO: 2799356 - RNA, 19 nt, Artificial Sequence
  Description of Artificial Sequence: Synthetic oligonucleotide
gucaugucagccaaggauu

SEQ ID NO: 2799357 - RNA, 19 nt, Artificial Sequence
  Description of Artificial Sequence: Synthetic oligonucleotide
ugacgauaggcagggcguc

SEQ ID NO: 2799358 - RNA, 19 nt, Artificial Sequence
  Description of Artificial Sequence: Synthetic oligonucleotide
ccaguuggccgccuugugc

SEQ ID NO: 2799359 - RNA, 19 nt, Artificial Sequence
  Description of Artificial Sequence: Synthetic oligonucleotide
cagacucaaugggugucag

SEQ ID NO: 2799360 - RNA, 19 nt, Artificial Sequence
  Description of Artificial Sequence: Synthetic oligonucleotide
cuaacucauuaaagcaggu

SEQ ID NO: 2799361 - RNA, 19 nt, Artificial Sequence
  Description of Artificial Sequence: Synthetic oligonucleotide
auccgagaguugaagcgca

SEQ ID NO: 2799362 - RNA, 19 nt, Artificial Sequence
  Description of Artificial Sequence: Synthetic oligonucleotide
cucauaccaguuggccgcc

SEQ ID NO: 2799363 - RNA, 19 nt, Artificial Sequence
  Description of Artificial Sequence: Synthetic oligonucleotide
cacacggauccgagaguug

SEQ ID NO: 2799364 - RNA, 19 nt, Artificial Sequence
  Description of Artificial Sequence: Synthetic oligonucleotide
gguuguagacaaucucaaa

SEQ ID NO: 2799365 - RNA, 19 nt, Artificial Sequence
  Description of Artificial Sequence: Synthetic oligonucleotide
gggacaucuacugcuguca

SEQ ID NO: 2799366 - RNA, 19 nt, Artificial Sequence
  Description of Artificial Sequence: Synthetic oligonucleotide
gaccacagacucaaugggu

SEQ ID NO: 2799367 - RNA, 19 nt, Artificial Sequence
  Description of Artificial Sequence: Synthetic oligonucleotide
aggcagggcgucguaacgu

SEQ ID NO: 2799368 - RNA, 19 nt, Artificial Sequence
  Description of Artificial Sequence: Synthetic oligonucleotide
caucuacugcugucauguc

SEQ ID NO: 2799369 - RNA, 19 nt, Artificial Sequence
  Description of Artificial Sequence: Synthetic oligonucleotide
gucauucuuccucuagaau

SEQ ID NO: 2799370 - RNA, 19 nt, Artificial Sequence
  Description of Artificial Sequence: Synthetic oligonucleotide
acgauaggcagggcgucgu

SEQ ID NO: 2799371 - RNA, 19 nt, Artificial Sequence
  Description of Artificial Sequence: Synthetic oligonucleotide
caaccguagguaaugucau

SEQ ID NO: 2799372 - RNA, 19 nt, Artificial Sequence
  Description of Artificial Sequence: Synthetic oligonucleotide
cugcugucaugucagccaa

SEQ ID NO: 2799373 - RNA, 19 nt, Artificial Sequence
  Description of Artificial Sequence: Synthetic oligonucleotide
agucagcacggggaugacu

SEQ ID NO: 2799374 - RNA, 19 nt, Artificial Sequence
  Description of Artificial Sequence: Synthetic oligonucleotide
cgaagccauagucugucag

SEQ ID NO: 2799375 - RNA, 19 nt, Artificial Sequence
  Description of Artificial Sequence: Synthetic oligonucleotide
acaugcuuuugaagcuacu

SEQ ID NO: 2799376 - RNA, 19 nt, Artificial Sequence
  Description of Artificial Sequence: Synthetic oligonucleotide
  modified_base (12)..(12): a, c, u, g, unknown or other
acauagccaganaggggaa

SEQ ID NO: 2799377 - RNA, 19 nt, Artificial Sequence
  Description of Artificial Sequence: Synthetic oligonucleotide
cggauccgagaguugaagc

SEQ ID NO: 2799378 - RNA, 19 nt, Artificial Sequence
  Description of Artificial Sequence: Synthetic oligonucleotide
  modified_base (11)..(11): a, c, u, g, unknown or other
cauagccaganaggggaaa

SEQ ID NO: 2799379 - RNA, 19 nt, Artificial Sequence
  Description of Artificial Sequence: Synthetic oligonucleotide
ggccgccuugugcacagag

SEQ ID NO: 2799380 - RNA, 19 nt, Artificial Sequence
  Description of Artificial Sequence: Synthetic oligonucleotide
uucugccgaguugggacau

SEQ ID NO: 2799381 - RNA, 19 nt, Artificial Sequence
  Description of Artificial Sequence: Synthetic oligonucleotide
caaugggugucagcucauc

SEQ ID NO: 2799382 - RNA, 19 nt, Artificial Sequence
  Description of Artificial Sequence: Synthetic oligonucleotide
gcauuggugugauccuuga

SEQ ID NO: 2799383 - RNA, 19 nt, Artificial Sequence
  Description of Artificial Sequence: Synthetic oligonucleotide
gaccucccucucauaccag

SEQ ID NO: 2799384 - RNA, 19 nt, Artificial Sequence
  Description of Artificial Sequence: Synthetic oligonucleotide
cucuagaauccacaugcuu

SEQ ID NO: 2799385 - RNA, 19 nt, Artificial Sequence
  Description of Artificial Sequence: Synthetic oligonucleotide
  modified_base (6)..(6): a, c, u, g, unknown or other
ccaganaggggaaagcuuu

SEQ ID NO: 2799386 - RNA, 19 nt, Artificial Sequence
  Description of Artificial Sequence: Synthetic oligonucleotide
gccaaggauuugaauugug

SEQ ID NO: 2799387 - RNA, 19 nt, Artificial Sequence
  Description of Artificial Sequence: Synthetic oligonucleotide
ugccgaguugggacaucua

SEQ ID NO: 2799388 - RNA, 19 nt, Artificial Sequence
  Description of Artificial Sequence: Synthetic oligonucleotide
cguaacguagcucaacaua

SEQ ID NO: 2799389 - RNA, 19 nt, Artificial Sequence
  Description of Artificial Sequence: Synthetic oligonucleotide
cccucucauaccaguuggc

SEQ ID NO: 2799390 - RNA, 19 nt, Artificial Sequence
  Description of Artificial Sequence: Synthetic oligonucleotide
guagcucaacauagccaga

SEQ ID NO: 2799391 - RNA, 19 nt, Artificial Sequence
  Description of Artificial Sequence: Synthetic oligonucleotide
cagggacagcagguuguag

SEQ ID NO: 2799392 - RNA, 19 nt, Artificial Sequence
  Description of Artificial Sequence: Synthetic oligonucleotide
ccgagaguugaagcgcagg

SEQ ID NO: 2799393 - RNA, 19 nt, Artificial Sequence
  Description of Artificial Sequence: Synthetic oligonucleotide
acgguucugccgaguuggg

SEQ ID NO: 2799394 - RNA, 19 nt, Artificial Sequence
  Description of Artificial Sequence: Synthetic oligonucleotide
ucauaccaguuggccgccu

SEQ ID NO: 2799395 - RNA, 19 nt, Artificial Sequence
  Description of Artificial Sequence: Synthetic oligonucleotide
gucagccaaggauuugaau

SEQ ID NO: 2799396 - RNA, 19 nt, Artificial Sequence
  Description of Artificial Sequence: Synthetic oligonucleotide
cuucuuagaucaggguggu

SEQ ID NO: 2799397 - RNA, 19 nt, Artificial Sequence
  Description of Artificial Sequence: Synthetic oligonucleotide
cacggauccgagaguugaa

SEQ ID NO: 2799398 - RNA, 19 nt, Artificial Sequence
  Description of Artificial Sequence: Synthetic oligonucleotide
uucuuagaucagggugguu

SEQ ID NO: 2799399 - RNA, 19 nt, Artificial Sequence
  Description of Artificial Sequence: Synthetic oligonucleotide
ucugccgaguugggacauc

SEQ ID NO: 2799400 - RNA, 19 nt, Artificial Sequence
  Description of Artificial Sequence: Synthetic oligonucleotide
agcacggggaugacuccau

SEQ ID NO: 2799401 - RNA, 19 nt, Artificial Sequence
  Description of Artificial Sequence: Synthetic oligonucleotide
cagcacggggaugacucca

SEQ ID NO: 2799402 - RNA, 19 nt, Artificial Sequence
  Description of Artificial Sequence: Synthetic oligonucleotide
gcagggcgucguaacguag

SEQ ID NO: 2799403 - RNA, 19 nt, Artificial Sequence
  Description of Artificial Sequence: Synthetic oligonucleotide
acagcagguuguagacaau

SEQ ID NO: 2799404 - RNA, 19 nt, Artificial Sequence
  Description of Artificial Sequence: Synthetic oligonucleotide
cagcuucaagcuugagacu

SEQ ID NO: 2799405 - RNA, 19 nt, Artificial Sequence
  Description of Artificial Sequence: Synthetic oligonucleotide
cgccuugugcacagagacc

SEQ ID NO: 2799406 - RNA, 19 nt, Artificial Sequence
  Description of Artificial Sequence: Synthetic oligonucleotide
ccaucaggauggauacaga

SEQ ID NO: 2799407 - RNA, 19 nt, Artificial Sequence
  Description of Artificial Sequence: Synthetic oligonucleotide
ggcagggcgucguaacgua

SEQ ID NO: 2799408 - RNA, 19 nt, Artificial Sequence
  Description of Artificial Sequence: Synthetic oligonucleotide
cuccaucaggauggauaca

SEQ ID NO: 2799409 - RNA, 19 nt, Artificial Sequence
  Description of Artificial Sequence: Synthetic oligonucleotide
gggaugacuccaucaggau

SEQ ID NO: 2799410 - RNA, 19 nt, Artificial Sequence
  Description of Artificial Sequence: Synthetic oligonucleotide
ggacaucuacugcugucau

SEQ ID NO: 2799411 - RNA, 19 nt, Artificial Sequence
  Description of Artificial Sequence: Synthetic oligonucleotide
cauagucugucaggauccu

SEQ ID NO: 2799412 - RNA, 19 nt, Artificial Sequence
  Description of Artificial Sequence: Synthetic oligonucleotide
caaaacgguucugccgagu

SEQ ID NO: 2799413 - RNA, 19 nt, Artificial Sequence
  Description of Artificial Sequence: Synthetic oligonucleotide
cgucguaacguagcucaac

SEQ ID NO: 2799414 - RNA, 19 nt, Artificial Sequence
  Description of Artificial Sequence: Synthetic oligonucleotide
cugccgaguugggacaucu

SEQ ID NO: 2799415 - RNA, 19 nt, Artificial Sequence
  Description of Artificial Sequence: Synthetic oligonucleotide
  modified_base (7)..(7): a, c, u, g, unknown or other
gccaganaggggaaagcuu

SEQ ID NO: 2799416 - RNA, 19 nt, Artificial Sequence
  Description of Artificial Sequence: Synthetic oligonucleotide
ccguagguaaugucauucu

SEQ ID NO: 2799417 - RNA, 19 nt, Artificial Sequence
  Description of Artificial Sequence: Synthetic oligonucleotide
cauaccaguuggccgccuu

SEQ ID NO: 2799418 - RNA, 19 nt, Artificial Sequence
  Description of Artificial Sequence: Synthetic oligonucleotide
gugcauuggugugauccuu

SEQ ID NO: 2799419 - RNA, 19 nt, Artificial Sequence
  Description of Artificial Sequence: Synthetic oligonucleotide
gcacggggaugacuccauc

SEQ ID NO: 2799420 - RNA, 19 nt, Artificial Sequence
  Description of Artificial Sequence: Synthetic oligonucleotide
ccacagacucaaugggugu

SEQ ID NO: 2799421 - RNA, 19 nt, Artificial Sequence
  Description of Artificial Sequence: Synthetic oligonucleotide
gaugucccucgaagccaua

SEQ ID NO: 2799422 - RNA, 19 nt, Artificial Sequence
  Description of Artificial Sequence: Synthetic oligonucleotide
gccgccuugugcacagaga

SEQ ID NO: 2799423 - RNA, 19 nt, Artificial Sequence
  Description of Artificial Sequence: Synthetic oligonucleotide
ggaugucccucgaagccau

SEQ ID NO: 2799424 - RNA, 19 nt, Artificial Sequence
  Description of Artificial Sequence: Synthetic oligonucleotide
ccucuagaauccacaugcu

SEQ ID NO: 2799425 - RNA, 19 nt, Artificial Sequence
  Description of Artificial Sequence: Synthetic oligonucleotide
ccgaaaggaugucccucga

SEQ ID NO: 2799426 - RNA, 19 nt, Artificial Sequence
  Description of Artificial Sequence: Synthetic oligonucleotide
gggcgucguaacguagcuc

SEQ ID NO: 2799427 - RNA, 19 nt, Artificial Sequence
  Description of Artificial Sequence: Synthetic oligonucleotide
ccacaugcuuuugaagcua

SEQ ID NO: 2799428 - RNA, 19 nt, Artificial Sequence
  Description of Artificial Sequence: Synthetic oligonucleotide
gcagggacagcagguugua

SEQ ID NO: 2799429 - RNA, 19 nt, Artificial Sequence
  Description of Artificial Sequence: Synthetic oligonucleotide
uggccgccuugugcacaga

SEQ ID NO: 2799430 - RNA, 19 nt, Artificial Sequence
  Description of Artificial Sequence: Synthetic oligonucleotide
cguagguaaugucauucuu

SEQ ID NO: 2799431 - RNA, 19 nt, Artificial Sequence
  Description of Artificial Sequence: Synthetic oligonucleotide
ggcugacgauaggcagggc

SEQ ID NO: 2799432 - RNA, 19 nt, Artificial Sequence
  Description of Artificial Sequence: Synthetic oligonucleotide
cgcagggacagcagguugu

SEQ ID NO: 2799433 - RNA, 19 nt, Artificial Sequence
  Description of Artificial Sequence: Synthetic oligonucleotide
gcgucguaacguagcucaa

SEQ ID NO: 2799434 - RNA, 19 nt, Artificial Sequence
  Description of Artificial Sequence: Synthetic oligonucleotide
cgguucugccgaguuggga

SEQ ID NO: 2799435 - RNA, 19 nt, Artificial Sequence
  Description of Artificial Sequence: Synthetic oligonucleotide
cccagaccucccucucaua

SEQ ID NO: 2799436 - RNA, 19 nt, Artificial Sequence
  Description of Artificial Sequence: Synthetic oligonucleotide
cgauaggcagggcgucgua

SEQ ID NO: 2799437 - RNA, 19 nt, Artificial Sequence
  Description of Artificial Sequence: Synthetic oligonucleotide
  modified_base (1)..(1): a, c, u, g, unknown or other
naggggaaagcuuuccgaa

SEQ ID NO: 2799438 - RNA, 19 nt, Artificial Sequence
  Description of Artificial Sequence: Synthetic oligonucleotide
aaaaccacaacacaaacca

SEQ ID NO: 2799439 - RNA, 19 nt, Artificial Sequence
  Description of Artificial Sequence: Synthetic oligonucleotide
aaaacaaacaaaacaaaac

SEQ ID NO: 2799440 - RNA, 19 nt, Artificial Sequence
  Description of Artificial Sequence: Synthetic oligonucleotide
ucuucaagaacuuugaugu

SEQ ID NO: 2799441 - RNA, 19 nt, Artificial Sequence
  Description of Artificial Sequence: Synthetic oligonucleotide
aucaaauucaucuucaaga

SEQ ID NO: 2799442 - RNA, 19 nt, Artificial Sequence
  Description of Artificial Sequence: Synthetic oligonucleotide
gauuuccuuagcuauagcg

SEQ ID NO: 2799443 - RNA, 19 nt, Artificial Sequence
  Description of Artificial Sequence: Synthetic oligonucleotide
gauucaaaaguccacugcg

SEQ ID NO: 2799444 - RNA, 19 nt, Artificial Sequence
  Description of Artificial Sequence: Synthetic oligonucleotide
ucuaccauaagacaguggu

SEQ ID NO: 2799445 - RNA, 19 nt, Artificial Sequence
  Description of Artificial Sequence: Synthetic oligonucleotide
uuugaugacgcucuccagg

SEQ ID NO: 2799446 - RNA, 19 nt, Artificial Sequence
  Description of Artificial Sequence: Synthetic oligonucleotide
uaccauaagacaguggucg

SEQ ID NO: 2799447 - RNA, 19 nt, Artificial Sequence
  Description of Artificial Sequence: Synthetic oligonucleotide
agauucaaaaguccacugc

SEQ ID NO: 2799448 - RNA, 19 nt, Artificial Sequence
  Description of Artificial Sequence: Synthetic oligonucleotide
ucacauuucagguccaagg

SEQ ID NO: 2799449 - RNA, 19 nt, Artificial Sequence
  Description of Artificial Sequence: Synthetic oligonucleotide
uucaaaaguccacugcgcg

SEQ ID NO: 2799450 - RNA, 19 nt, Artificial Sequence
  Description of Artificial Sequence: Synthetic oligonucleotide
agggucacauuucaggucc

SEQ ID NO: 2799451 - RNA, 19 nt, Artificial Sequence
  Description of Artificial Sequence: Synthetic oligonucleotide
gaugcugacauucuccucc

SEQ ID NO: 2799452 - RNA, 19 nt, Artificial Sequence
  Description of Artificial Sequence: Synthetic oligonucleotide
acugccugcguuuuguugc

SEQ ID NO: 2799453 - RNA, 19 nt, Artificial Sequence
  Description of Artificial Sequence: Synthetic oligonucleotide
ucagagucuaccauaagac

SEQ ID NO: 2799454 - RNA, 19 nt, Artificial Sequence
  Description of Artificial Sequence: Synthetic oligonucleotide
aagaacuuugaugucagag

SEQ ID NO: 2799455 - RNA, 19 nt, Artificial Sequence
  Description of Artificial Sequence: Synthetic oligonucleotide
ucagauuuuccacaugaga

SEQ ID NO: 2799456 - RNA, 19 nt, Artificial Sequence
  Description of Artificial Sequence: Synthetic oligonucleotide
uucaagguuuugaugacgc

SEQ ID NO: 2799457 - RNA, 19 nt, Artificial Sequence
  Description of Artificial Sequence: Synthetic oligonucleotide
uuugaugucagagucuacc

SEQ ID NO: 2799458 - RNA, 19 nt, Artificial Sequence
  Description of Artificial Sequence: Synthetic oligonucleotide
aucuucaagaacuuugaug

SEQ ID NO: 2799459 - RNA, 19 nt, Artificial Sequence
  Description of Artificial Sequence: Synthetic oligonucleotide
ucuacuaugagcucaucaa

SEQ ID NO: 2799460 - RNA, 19 nt, Artificial Sequence
  Description of Artificial Sequence: Synthetic oligonucleotide
ucaaauucaucuucaagaa

SEQ ID NO: 2799461 - RNA, 19 nt, Artificial Sequence
  Description of Artificial Sequence: Synthetic oligonucleotide
agauuuuccacaugagaag

SEQ ID NO: 2799462 - RNA, 19 nt, Artificial Sequence
  Description of Artificial Sequence: Synthetic oligonucleotide
gacauuucagauuuuccac

SEQ ID NO: 2799463 - RNA, 19 nt, Artificial Sequence
  Description of Artificial Sequence: Synthetic oligonucleotide
gaacuuugaugucagaguc

SEQ ID NO: 2799464 - RNA, 19 nt, Artificial Sequence
  Description of Artificial Sequence: Synthetic oligonucleotide
uuuguugccacaucuacua

SEQ ID NO: 2799465 - RNA, 19 nt, Artificial Sequence
  Description of Artificial Sequence: Synthetic oligonucleotide
ucaucuucaagaacuuuga

SEQ ID NO: 2799466 - RNA, 19 nt, Artificial Sequence
  Description of Artificial Sequence: Synthetic oligonucleotide
ucgugcugagcuuucaagg

SEQ ID NO: 2799467 - RNA, 19 nt, Artificial Sequence
  Description of Artificial Sequence: Synthetic oligonucleotide
uccacagcagauucaaaag

SEQ ID NO: 2799468 - RNA, 19 nt, Artificial Sequence
  Description of Artificial Sequence: Synthetic oligonucleotide
agaacuuugaugucagagu

SEQ ID NO: 2799469 - RNA, 19 nt, Artificial Sequence
  Description of Artificial Sequence: Synthetic oligonucleotide
uuuccacaugagaagcugg

SEQ ID NO: 2799470 - RNA, 19 nt, Artificial Sequence
  Description of Artificial Sequence: Synthetic oligonucleotide
uuagcuauagcguccccgc

SEQ ID NO: 2799471 - RNA, 19 nt, Artificial Sequence
  Description of Artificial Sequence: Synthetic oligonucleotide
uucaagaacuuugauguca

SEQ ID NO: 2799472 - RNA, 19 nt, Artificial Sequence
  Description of Artificial Sequence: Synthetic oligonucleotide
agagucuaccauaagacag

SEQ ID NO: 2799473 - RNA, 19 nt, Artificial Sequence
  Description of Artificial Sequence: Synthetic oligonucleotide
cacauuucagguccaaggg

SEQ ID NO: 2799474 - RNA, 19 nt, Artificial Sequence
  Description of Artificial Sequence: Synthetic oligonucleotide
aaaaguccacugcgcgucc

SEQ ID NO: 2799475 - RNA, 19 nt, Artificial Sequence
  Description of Artificial Sequence: Synthetic oligonucleotide
aaccgggcgauacugcuuc

SEQ ID NO: 2799476 - RNA, 19 nt, Artificial Sequence
  Description of Artificial Sequence: Synthetic oligonucleotide
uguccguugaugcugacau

SEQ ID NO: 2799477 - RNA, 19 nt, Artificial Sequence
  Description of Artificial Sequence: Synthetic oligonucleotide
acagcagauucaaaagucc

SEQ ID NO: 2799478 - RNA, 19 nt, Artificial Sequence
  Description of Artificial Sequence: Synthetic oligonucleotide
caagggaugcacaaccggg

SEQ ID NO: 2799479 - RNA, 19 nt, Artificial Sequence
  Description of Artificial Sequence: Synthetic oligonucleotide
ugccacaucuacuaugagc

SEQ ID NO: 2799480 - RNA, 19 nt, Artificial Sequence
  Description of Artificial Sequence: Synthetic oligonucleotide
cugacauucuccuccacag

SEQ ID NO: 2799481 - RNA, 19 nt, Artificial Sequence
  Description of Artificial Sequence: Synthetic oligonucleotide
uuuccuuagcuauagcguc

SEQ ID NO: 2799482 - RNA, 19 nt, Artificial Sequence
  Description of Artificial Sequence: Synthetic oligonucleotide
ugagcuuucaagguuuuga

SEQ ID NO: 2799483 - RNA, 19 nt, Artificial Sequence
  Description of Artificial Sequence: Synthetic oligonucleotide
uccaggauccuucuggggu

SEQ ID NO: 2799484 - RNA, 19 nt, Artificial Sequence
  Description of Artificial Sequence: Synthetic oligonucleotide
aagggaugcacaaccgggc

SEQ ID NO: 2799485 - RNA, 19 nt, Artificial Sequence
  Description of Artificial Sequence: Synthetic oligonucleotide
uacuaugagcucaucaaau

SEQ ID NO: 2799486 - RNA, 19 nt, Artificial Sequence
  Description of Artificial Sequence: Synthetic oligonucleotide
cauggcgucacugauuucc

SEQ ID NO: 2799487 - RNA, 19 nt, Artificial Sequence
  Description of Artificial Sequence: Synthetic oligonucleotide
uuucaagguuuugaugacg

SEQ ID NO: 2799488 - RNA, 19 nt, Artificial Sequence
  Description of Artificial Sequence: Synthetic oligonucleotide
gcuuucaagguuuugauga

SEQ ID NO: 2799489 - RNA, 19 nt, Artificial Sequence
  Description of Artificial Sequence: Synthetic oligonucleotide
auucaaaaguccacugcgc

SEQ ID NO: 2799490 - RNA, 19 nt, Artificial Sequence
  Description of Artificial Sequence: Synthetic oligonucleotide
acauuucagauuuuccaca

SEQ ID NO: 2799491 - RNA, 19 nt, Artificial Sequence
  Description of Artificial Sequence: Synthetic oligonucleotide
cagauuuuccacaugagaa

SEQ ID NO: 2799492 - RNA, 19 nt, Artificial Sequence
  Description of Artificial Sequence: Synthetic oligonucleotide
uguugccacaucuacuaug

SEQ ID NO: 2799493 - RNA, 19 nt, Artificial Sequence
  Description of Artificial Sequence: Synthetic oligonucleotide
ucagggucacauuucaggu

SEQ ID NO: 2799494 - RNA, 19 nt, Artificial Sequence
  Description of Artificial Sequence: Synthetic oligonucleotide
uccaagggaugcacaaccg

SEQ ID NO: 2799495 - RNA, 19 nt, Artificial Sequence
  Description of Artificial Sequence: Synthetic oligonucleotide
uucauggcgucacugauuu

SEQ ID NO: 2799496 - RNA, 19 nt, Artificial Sequence
  Description of Artificial Sequence: Synthetic oligonucleotide
guuuuguugccacaucuac

SEQ ID NO: 2799497 - RNA, 19 nt, Artificial Sequence
  Description of Artificial Sequence: Synthetic oligonucleotide
cuaugagcucaucaaauuc

SEQ ID NO: 2799498 - RNA, 19 nt, Artificial Sequence
  Description of Artificial Sequence: Synthetic oligonucleotide
uugaugacgcucuccagga

SEQ ID NO: 2799499 - RNA, 19 nt, Artificial Sequence
  Description of Artificial Sequence: Synthetic oligonucleotide
aucuacuaugagcucauca

SEQ ID NO: 2799500 - RNA, 19 nt, Artificial Sequence
  Description of Artificial Sequence: Synthetic oligonucleotide
uuuuccacaugagaagcug

SEQ ID NO: 2799501 - RNA, 19 nt, Artificial Sequence
  Description of Artificial Sequence: Synthetic oligonucleotide
cacagcagauucaaaaguc

SEQ ID NO: 2799502 - RNA, 19 nt, Artificial Sequence
  Description of Artificial Sequence: Synthetic oligonucleotide
auccuucugggguacugcc

SEQ ID NO: 2799503 - RNA, 19 nt, Artificial Sequence
  Description of Artificial Sequence: Synthetic oligonucleotide
uugaugucagagucuacca

SEQ ID NO: 2799504 - RNA, 19 nt, Artificial Sequence
  Description of Artificial Sequence: Synthetic oligonucleotide
uugaugcugacauucuccu

SEQ ID NO: 2799505 - RNA, 19 nt, Artificial Sequence
  Description of Artificial Sequence: Synthetic oligonucleotide
caggcuuguccguugaugc

SEQ ID NO: 2799506 - RNA, 19 nt, Artificial Sequence
  Description of Artificial Sequence: Synthetic oligonucleotide
uaagacaguggucggcagc

SEQ ID NO: 2799507 - RNA, 19 nt, Artificial Sequence
  Description of Artificial Sequence: Synthetic oligonucleotide
cuuagcuauagcguccccg

SEQ ID NO: 2799508 - RNA, 19 nt, Artificial Sequence
  Description of Artificial Sequence: Synthetic oligonucleotide
guugaugcugacauucucc

SEQ ID NO: 2799509 - RNA, 19 nt, Artificial Sequence
  Description of Artificial Sequence: Synthetic oligonucleotide
uuccuuagcuauagcgucc

SEQ ID NO: 2799510 - RNA, 19 nt, Artificial Sequence
  Description of Artificial Sequence: Synthetic oligonucleotide
ucaaaaguccacugcgcgu

SEQ ID NO: 2799511 - RNA, 19 nt, Artificial Sequence
  Description of Artificial Sequence: Synthetic oligonucleotide
auuuccuuagcuauagcgu

SEQ ID NO: 2799512 - RNA, 19 nt, Artificial Sequence
  Description of Artificial Sequence: Synthetic oligonucleotide
guccaagggaugcacaacc

SEQ ID NO: 2799513 - RNA, 19 nt, Artificial Sequence
  Description of Artificial Sequence: Synthetic oligonucleotide
agcagauucaaaaguccac

SEQ ID NO: 2799514 - RNA, 19 nt, Artificial Sequence
  Description of Artificial Sequence: Synthetic oligonucleotide
caaauucaucuucaagaac

SEQ ID NO: 2799515 - RNA, 19 nt, Artificial Sequence
  Description of Artificial Sequence: Synthetic oligonucleotide
acauuucagguccaaggga

SEQ ID NO: 2799516 - RNA, 19 nt, Artificial Sequence
  Description of Artificial Sequence: Synthetic oligonucleotide
augacgcucuccaggaucc

SEQ ID NO: 2799517 - RNA, 19 nt, Artificial Sequence
  Description of Artificial Sequence: Synthetic oligonucleotide
uuucagguccaagggaugc

SEQ ID NO: 2799518 - RNA, 19 nt, Artificial Sequence
  Description of Artificial Sequence: Synthetic oligonucleotide
accauaagacaguggucgg

SEQ ID NO: 2799519 - RNA, 19 nt, Artificial Sequence
  Description of Artificial Sequence: Synthetic oligonucleotide
gaugacgcucuccaggauc

SEQ ID NO: 2799520 - RNA, 19 nt, Artificial Sequence
  Description of Artificial Sequence: Synthetic oligonucleotide
aagacaguggucggcagcu

SEQ ID NO: 2799521 - RNA, 19 nt, Artificial Sequence
  Description of Artificial Sequence: Synthetic oligonucleotide
uccguugaugcugacauuc

SEQ ID NO: 2799522 - RNA, 19 nt, Artificial Sequence
  Description of Artificial Sequence: Synthetic oligonucleotide
gauacugcuucagagucuc

SEQ ID NO: 2799523 - RNA, 19 nt, Artificial Sequence
  Description of Artificial Sequence: Synthetic oligonucleotide
agcuuucaagguuuugaug

SEQ ID NO: 2799524 - RNA, 19 nt, Artificial Sequence
  Description of Artificial Sequence: Synthetic oligonucleotide
gagaagcugggucaggguc

SEQ ID NO: 2799525 - RNA, 19 nt, Artificial Sequence
  Description of Artificial Sequence: Synthetic oligonucleotide
agggaugcacaaccgggcg

SEQ ID NO: 2799526 - RNA, 19 nt, Artificial Sequence
  Description of Artificial Sequence: Synthetic oligonucleotide
cuuucaagguuuugaugac

SEQ ID NO: 2799527 - RNA, 19 nt, Artificial Sequence
  Description of Artificial Sequence: Synthetic oligonucleotide
acuaugagcucaucaaauu

SEQ ID NO: 2799528 - RNA, 19 nt, Artificial Sequence
  Description of Artificial Sequence: Synthetic oligonucleotide
cagauucaaaaguccacug

SEQ ID NO: 2799529 - RNA, 19 nt, Artificial Sequence
  Description of Artificial Sequence: Synthetic oligonucleotide
cugauuuccuuagcuauag

SEQ ID NO: 2799530 - RNA, 19 nt, Artificial Sequence
  Description of Artificial Sequence: Synthetic oligonucleotide
aaguccacugcgcgucccg

SEQ ID NO: 2799531 - RNA, 19 nt, Artificial Sequence
  Description of Artificial Sequence: Synthetic oligonucleotide
ugaugucagagucuaccau

SEQ ID NO: 2799532 - RNA, 19 nt, Artificial Sequence
  Description of Artificial Sequence: Synthetic oligonucleotide
ucaucaaauucaucuucaa

SEQ ID NO: 2799533 - RNA, 19 nt, Artificial Sequence
  Description of Artificial Sequence: Synthetic oligonucleotide
aaaguccacugcgcguccc

SEQ ID NO: 2799534 - RNA, 19 nt, Artificial Sequence
  Description of Artificial Sequence: Synthetic oligonucleotide
ugacauucuccuccacagc

SEQ ID NO: 2799535 - RNA, 19 nt, Artificial Sequence
  Description of Artificial Sequence: Synthetic oligonucleotide
ucacugauuuccuuagcua

SEQ ID NO: 2799536 - RNA, 19 nt, Artificial Sequence
  Description of Artificial Sequence: Synthetic oligonucleotide
caagguuuugaugacgcuc

SEQ ID NO: 2799537 - RNA, 19 nt, Artificial Sequence
  Description of Artificial Sequence: Synthetic oligonucleotide
auuucagauuuuccacaug

SEQ ID NO: 2799538 - RNA, 19 nt, Artificial Sequence
  Description of Artificial Sequence: Synthetic oligonucleotide
cacaugagaagcuggguca

SEQ ID NO: 2799539 - RNA, 19 nt, Artificial Sequence
  Description of Artificial Sequence: Synthetic oligonucleotide
uucagagucucgugcugag

SEQ ID NO: 2799540 - RNA, 19 nt, Artificial Sequence
  Description of Artificial Sequence: Synthetic oligonucleotide
uuccugccaggcuuguccg

SEQ ID NO: 2799541 - RNA, 19 nt, Artificial Sequence
  Description of Artificial Sequence: Synthetic oligonucleotide
ugcuucagagucucgugcu

SEQ ID NO: 2799542 - RNA, 19 nt, Artificial Sequence
  Description of Artificial Sequence: Synthetic oligonucleotide
cucgugcugagcuuucaag

SEQ ID NO: 2799543 - RNA, 19 nt, Artificial Sequence
  Description of Artificial Sequence: Synthetic oligonucleotide
ugauuuccuuagcuauagc

SEQ ID NO: 2799544 - RNA, 19 nt, Artificial Sequence
  Description of Artificial Sequence: Synthetic oligonucleotide
caaaaguccacugcgcguc

SEQ ID NO: 2799545 - RNA, 19 nt, Artificial Sequence
  Description of Artificial Sequence: Synthetic oligonucleotide
uagcuauagcguccccgcg

SEQ ID NO: 2799546 - RNA, 19 nt, Artificial Sequence
  Description of Artificial Sequence: Synthetic oligonucleotide
ugcugagcuuucaagguuu

SEQ ID NO: 2799547 - RNA, 19 nt, Artificial Sequence
  Description of Artificial Sequence: Synthetic oligonucleotide
cugcuucagagucucgugc

SEQ ID NO: 2799548 - RNA, 19 nt, Artificial Sequence
  Description of Artificial Sequence: Synthetic oligonucleotide
guugccacaucuacuauga

SEQ ID NO: 2799549 - RNA, 19 nt, Artificial Sequence
  Description of Artificial Sequence: Synthetic oligonucleotide
ugucagagucuaccauaag

SEQ ID NO: 2799550 - RNA, 19 nt, Artificial Sequence
  Description of Artificial Sequence: Synthetic oligonucleotide
acaguggucggcagcuucc

SEQ ID NO: 2799551 - RNA, 19 nt, Artificial Sequence
  Description of Artificial Sequence: Synthetic oligonucleotide
uauagcguccccgcgacau

SEQ ID NO: 2799552 - RNA, 19 nt, Artificial Sequence
  Description of Artificial Sequence: Synthetic oligonucleotide
aauucaucuucaagaacuu

SEQ ID NO: 2799553 - RNA, 19 nt, Artificial Sequence
  Description of Artificial Sequence: Synthetic oligonucleotide
cuccacagcagauucaaaa

SEQ ID NO: 2799554 - RNA, 19 nt, Artificial Sequence
  Description of Artificial Sequence: Synthetic oligonucleotide
guggucggcagcuuccugc

SEQ ID NO: 2799555 - RNA, 19 nt, Artificial Sequence
  Description of Artificial Sequence: Synthetic oligonucleotide
acuuugaugucagagucua

SEQ ID NO: 2799556 - RNA, 19 nt, Artificial Sequence
  Description of Artificial Sequence: Synthetic oligonucleotide
ucaagguuuugaugacgcu

SEQ ID NO: 2799557 - RNA, 19 nt, Artificial Sequence
  Description of Artificial Sequence: Synthetic oligonucleotide
agcuauagcguccccgcga

SEQ ID NO: 2799558 - RNA, 19 nt, Artificial Sequence
  Description of Artificial Sequence: Synthetic oligonucleotide
acaaccgggcgauacugcu

SEQ ID NO: 2799559 - RNA, 19 nt, Artificial Sequence
  Description of Artificial Sequence: Synthetic oligonucleotide
cuaccauaagacagugguc

SEQ ID NO: 2799560 - RNA, 19 nt, Artificial Sequence
  Description of Artificial Sequence: Synthetic oligonucleotide
uacugcuucagagucucgu

SEQ ID NO: 2799561 - RNA, 19 nt, Artificial Sequence
  Description of Artificial Sequence: Synthetic oligonucleotide
aaaccuucauggcgucacu

SEQ ID NO: 2799562 - RNA, 19 nt, Artificial Sequence
  Description of Artificial Sequence: Synthetic oligonucleotide
uccuuagcuauagcguccc

SEQ ID NO: 2799563 - RNA, 19 nt, Artificial Sequence
  Description of Artificial Sequence: Synthetic oligonucleotide
augcacaaccgggcgauac

SEQ ID NO: 2799564 - RNA, 19 nt, Artificial Sequence
  Description of Artificial Sequence: Synthetic oligonucleotide
aaccuucauggcgucacug

SEQ ID NO: 2799565 - RNA, 19 nt, Artificial Sequence
  Description of Artificial Sequence: Synthetic oligonucleotide
accuucauggcgucacuga

SEQ ID NO: 2799566 - RNA, 19 nt, Artificial Sequence
  Description of Artificial Sequence: Synthetic oligonucleotide
ugcacaaccgggcgauacu

SEQ ID NO: 2799567 - RNA, 19 nt, Artificial Sequence
  Description of Artificial Sequence: Synthetic oligonucleotide
gauccuucugggguacugc

SEQ ID NO: 2799568 - RNA, 19 nt, Artificial Sequence
  Description of Artificial Sequence: Synthetic oligonucleotide
cagagucuaccauaagaca

SEQ ID NO: 2799569 - RNA, 19 nt, Artificial Sequence
  Description of Artificial Sequence: Synthetic oligonucleotide
agucuaccauaagacagug

SEQ ID NO: 2799570 - RNA, 19 nt, Artificial Sequence
  Description of Artificial Sequence: Synthetic oligonucleotide
cagcagauucaaaagucca

SEQ ID NO: 2799571 - RNA, 19 nt, Artificial Sequence
  Description of Artificial Sequence: Synthetic oligonucleotide
gucggcagcuuccugccag

SEQ ID NO: 2799572 - RNA, 19 nt, Artificial Sequence
  Description of Artificial Sequence: Synthetic oligonucleotide
cauaagacaguggucggca

SEQ ID NO: 2799573 - RNA, 19 nt, Artificial Sequence
  Description of Artificial Sequence: Synthetic oligonucleotide
cuucaagaacuuugauguc

SEQ ID NO: 2799574 - RNA, 19 nt, Artificial Sequence
  Description of Artificial Sequence: Synthetic oligonucleotide
acaugagaagcugggucag

SEQ ID NO: 2799575 - RNA, 19 nt, Artificial Sequence
  Description of Artificial Sequence: Synthetic oligonucleotide
cacaucuacuaugagcuca

SEQ ID NO: 2799576 - RNA, 19 nt, Artificial Sequence
  Description of Artificial Sequence: Synthetic oligonucleotide
uggucggcagcuuccugcc

SEQ ID NO: 2799577 - RNA, 19 nt, Artificial Sequence
  Description of Artificial Sequence: Synthetic oligonucleotide
cuacuaugagcucaucaaa

SEQ ID NO: 2799578 - RNA, 19 nt, Artificial Sequence
  Description of Artificial Sequence: Synthetic oligonucleotide
gacaguggucggcagcuuc

SEQ ID NO: 2799579 - RNA, 19 nt, Artificial Sequence
  Description of Artificial Sequence: Synthetic oligonucleotide
uccuccacagcagauucaa

SEQ ID NO: 2799580 - RNA, 19 nt, Artificial Sequence
  Description of Artificial Sequence: Synthetic oligonucleotide
uucugggguacugccugcg

SEQ ID NO: 2799581 - RNA, 19 nt, Artificial Sequence
  Description of Artificial Sequence: Synthetic oligonucleotide
gggcgauacugcuucagag

SEQ ID NO: 2799582 - RNA, 19 nt, Artificial Sequence
  Description of Artificial Sequence: Synthetic oligonucleotide
ugggucagggucacauuuc

SEQ ID NO: 2799583 - RNA, 19 nt, Artificial Sequence
  Description of Artificial Sequence: Synthetic oligonucleotide
agguccaagggaugcacaa

SEQ ID NO: 2799584 - RNA, 19 nt, Artificial Sequence
  Description of Artificial Sequence: Synthetic oligonucleotide
uccuucugggguacugccu

SEQ ID NO: 2799585 - RNA, 19 nt, Artificial Sequence
  Description of Artificial Sequence: Synthetic oligonucleotide
uugccacaucuacuaugag

SEQ ID NO: 2799586 - RNA, 19 nt, Artificial Sequence
  Description of Artificial Sequence: Synthetic oligonucleotide
ucucgugcugagcuuucaa

SEQ ID NO: 2799587 - RNA, 19 nt, Artificial Sequence
  Description of Artificial Sequence: Synthetic oligonucleotide
auuuuccacaugagaagcu

SEQ ID NO: 2799588 - RNA, 19 nt, Artificial Sequence
  Description of Artificial Sequence: Synthetic oligonucleotide
gcgauacugcuucagaguc

SEQ ID NO: 2799589 - RNA, 19 nt, Artificial Sequence
  Description of Artificial Sequence: Synthetic oligonucleotide
ugcguuuuguugccacauc

SEQ ID NO: 2799590 - RNA, 19 nt, Artificial Sequence
  Description of Artificial Sequence: Synthetic oligonucleotide
gucacauuucagguccaag

SEQ ID NO: 2799591 - RNA, 19 nt, Artificial Sequence
  Description of Artificial Sequence: Synthetic oligonucleotide
cacaaccgggcgauacugc

SEQ ID NO: 2799592 - RNA, 19 nt, Artificial Sequence
  Description of Artificial Sequence: Synthetic oligonucleotide
ucggcagcuuccugccagg

SEQ ID NO: 2799593 - RNA, 19 nt, Artificial Sequence
  Description of Artificial Sequence: Synthetic oligonucleotide
cuccaggauccuucugggg

SEQ ID NO: 2799594 - RNA, 19 nt, Artificial Sequence
  Description of Artificial Sequence: Synthetic oligonucleotide
acauucuccuccacagcag

SEQ ID NO: 2799595 - RNA, 19 nt, Artificial Sequence
  Description of Artificial Sequence: Synthetic oligonucleotide
cagggucacauuucagguc

SEQ ID NO: 2799596 - RNA, 19 nt, Artificial Sequence
  Description of Artificial Sequence: Synthetic oligonucleotide
accacaacacaaaccaaaa

SEQ ID NO: 2799597 - RNA, 19 nt, Artificial Sequence
  Description of Artificial Sequence: Synthetic oligonucleotide
uccacaugagaagcugggu

SEQ ID NO: 2799598 - RNA, 19 nt, Artificial Sequence
  Description of Artificial Sequence: Synthetic oligonucleotide
cuuugaugucagagucuac

SEQ ID NO: 2799599 - RNA, 19 nt, Artificial Sequence
  Description of Artificial Sequence: Synthetic oligonucleotide
gccacaucuacuaugagcu

SEQ ID NO: 2799600 - RNA, 19 nt, Artificial Sequence
  Description of Artificial Sequence: Synthetic oligonucleotide
ugaugcugacauucuccuc

SEQ ID NO: 2799601 - RNA, 19 nt, Artificial Sequence
  Description of Artificial Sequence: Synthetic oligonucleotide
gucuaccauaagacagugg

SEQ ID NO: 2799602 - RNA, 19 nt, Artificial Sequence
  Description of Artificial Sequence: Synthetic oligonucleotide
ugggguacugccugcguuu

SEQ ID NO: 2799603 - RNA, 19 nt, Artificial Sequence
  Description of Artificial Sequence: Synthetic oligonucleotide
uuguccguugaugcugaca

SEQ ID NO: 2799604 - RNA, 19 nt, Artificial Sequence
  Description of Artificial Sequence: Synthetic oligonucleotide
uuguugccacaucuacuau

SEQ ID NO: 2799605 - RNA, 19 nt, Artificial Sequence
  Description of Artificial Sequence: Synthetic oligonucleotide
uucagguccaagggaugca

SEQ ID NO: 2799606 - RNA, 19 nt, Artificial Sequence
  Description of Artificial Sequence: Synthetic oligonucleotide
ccaagggaugcacaaccgg

SEQ ID NO: 2799607 - RNA, 19 nt, Artificial Sequence
  Description of Artificial Sequence: Synthetic oligonucleotide
aguccacugcgcgucccgc

SEQ ID NO: 2799608 - RNA, 19 nt, Artificial Sequence
  Description of Artificial Sequence: Synthetic oligonucleotide
ucugggguacugccugcgu

SEQ ID NO: 2799609 - RNA, 19 nt, Artificial Sequence
  Description of Artificial Sequence: Synthetic oligonucleotide
augcugacauucuccucca

SEQ ID NO: 2799610 - RNA, 19 nt, Artificial Sequence
  Description of Artificial Sequence: Synthetic oligonucleotide
ucagagucucgugcugagc

SEQ ID NO: 2799611 - RNA, 19 nt, Artificial Sequence
  Description of Artificial Sequence: Synthetic oligonucleotide
cauucuccuccacagcaga

SEQ ID NO: 2799612 - RNA, 19 nt, Artificial Sequence
  Description of Artificial Sequence: Synthetic oligonucleotide
cugccugcguuuuguugcc

SEQ ID NO: 2799613 - RNA, 19 nt, Artificial Sequence
  Description of Artificial Sequence: Synthetic oligonucleotide
augucagagucuaccauaa

SEQ ID NO: 2799614 - RNA, 19 nt, Artificial Sequence
  Description of Artificial Sequence: Synthetic oligonucleotide
cacugauuuccuuagcuau

SEQ ID NO: 2799615 - RNA, 19 nt, Artificial Sequence
  Description of Artificial Sequence: Synthetic oligonucleotide
cuucugggguacugccugc

SEQ ID NO: 2799616 - RNA, 19 nt, Artificial Sequence
  Description of Artificial Sequence: Synthetic oligonucleotide
gagcuuucaagguuuugau

SEQ ID NO: 2799617 - RNA, 19 nt, Artificial Sequence
  Description of Artificial Sequence: Synthetic oligonucleotide
caugagaagcugggucagg

SEQ ID NO: 2799618 - RNA, 19 nt, Artificial Sequence
  Description of Artificial Sequence: Synthetic oligonucleotide
guccccgcgacauuucaga

SEQ ID NO: 2799619 - RNA, 19 nt, Artificial Sequence
  Description of Artificial Sequence: Synthetic oligonucleotide
ccacaugagaagcuggguc

SEQ ID NO: 2799620 - RNA, 19 nt, Artificial Sequence
  Description of Artificial Sequence: Synthetic oligonucleotide
gagucuaccauaagacagu

SEQ ID NO: 2799621 - RNA, 19 nt, Artificial Sequence
  Description of Artificial Sequence: Synthetic oligonucleotide
aggcuuguccguugaugcu

SEQ ID NO: 2799622 - RNA, 19 nt, Artificial Sequence
  Description of Artificial Sequence: Synthetic oligonucleotide
ugccaggcuuguccguuga

SEQ ID NO: 2799623 - RNA, 19 nt, Artificial Sequence
  Description of Artificial Sequence: Synthetic oligonucleotide
cgacauuucagauuuucca

SEQ ID NO: 2799624 - RNA, 19 nt, Artificial Sequence
  Description of Artificial Sequence: Synthetic oligonucleotide
acaucuacuaugagcucau

SEQ ID NO: 2799625 - RNA, 19 nt, Artificial Sequence
  Description of Artificial Sequence: Synthetic oligonucleotide
acugauuuccuuagcuaua

SEQ ID NO: 2799626 - RNA, 19 nt, Artificial Sequence
  Description of Artificial Sequence: Synthetic oligonucleotide
gaagcugggucagggucac

SEQ ID NO: 2799627 - RNA, 19 nt, Artificial Sequence
  Description of Artificial Sequence: Synthetic oligonucleotide
agcugggucagggucacau

SEQ ID NO: 2799628 - RNA, 19 nt, Artificial Sequence
  Description of Artificial Sequence: Synthetic oligonucleotide
ugaugacgcucuccaggau

SEQ ID NO: 2799629 - RNA, 19 nt, Artificial Sequence
  Description of Artificial Sequence: Synthetic oligonucleotide
gcuauagcguccccgcgac

SEQ ID NO: 2799630 - RNA, 19 nt, Artificial Sequence
  Description of Artificial Sequence: Synthetic oligonucleotide
ccuucugggguacugccug

SEQ ID NO: 2799631 - RNA, 19 nt, Artificial Sequence
  Description of Artificial Sequence: Synthetic oligonucleotide
gcgacauuucagauuuucc

SEQ ID NO: 2799632 - RNA, 19 nt, Artificial Sequence
  Description of Artificial Sequence: Synthetic oligonucleotide
aguggucggcagcuuccug

SEQ ID NO: 2799633 - RNA, 19 nt, Artificial Sequence
  Description of Artificial Sequence: Synthetic oligonucleotide
ggcuuguccguugaugcug

SEQ ID NO: 2799634 - RNA, 19 nt, Artificial Sequence
  Description of Artificial Sequence: Synthetic oligonucleotide
cuucagagucucgugcuga

SEQ ID NO: 2799635 - RNA, 19 nt, Artificial Sequence
  Description of Artificial Sequence: Synthetic oligonucleotide
agagucucgugcugagcuu

SEQ ID NO: 2799636 - RNA, 19 nt, Artificial Sequence
  Description of Artificial Sequence: Synthetic oligonucleotide
uccccgcgacauuucagau

SEQ ID NO: 2799637 - RNA, 19 nt, Artificial Sequence
  Description of Artificial Sequence: Synthetic oligonucleotide
caagaacuuugaugucaga

SEQ ID NO: 2799638 - RNA, 19 nt, Artificial Sequence
  Description of Artificial Sequence: Synthetic oligonucleotide
agucucgugcugagcuuuc

SEQ ID NO: 2799639 - RNA, 19 nt, Artificial Sequence
  Description of Artificial Sequence: Synthetic oligonucleotide
gggucagggucacauuuca

SEQ ID NO: 2799640 - RNA, 19 nt, Artificial Sequence
  Description of Artificial Sequence: Synthetic oligonucleotide
cagcuuccugccaggcuug

SEQ ID NO: 2799641 - RNA, 19 nt, Artificial Sequence
  Description of Artificial Sequence: Synthetic oligonucleotide
ccauaagacaguggucggc

SEQ ID NO: 2799642 - RNA, 19 nt, Artificial Sequence
  Description of Artificial Sequence: Synthetic oligonucleotide
cugagcuuucaagguuuug

SEQ ID NO: 2799643 - RNA, 19 nt, Artificial Sequence
  Description of Artificial Sequence: Synthetic oligonucleotide
ggcgucacugauuuccuua

SEQ ID NO: 2799644 - RNA, 19 nt, Artificial Sequence
  Description of Artificial Sequence: Synthetic oligonucleotide
gcagauucaaaaguccacu

SEQ ID NO: 2799645 - RNA, 19 nt, Artificial Sequence
  Description of Artificial Sequence: Synthetic oligonucleotide
ggcgauacugcuucagagu

SEQ ID NO: 2799646 - RNA, 19 nt, Artificial Sequence
  Description of Artificial Sequence: Synthetic oligonucleotide
gcguuuuguugccacaucu

SEQ ID NO: 2799647 - RNA, 19 nt, Artificial Sequence
  Description of Artificial Sequence: Synthetic oligonucleotide
cugccaggcuuguccguug

SEQ ID NO: 2799648 - RNA, 19 nt, Artificial Sequence
  Description of Artificial Sequence: Synthetic oligonucleotide
auggcgucacugauuuccu

SEQ ID NO: 2799649 - RNA, 19 nt, Artificial Sequence
  Description of Artificial Sequence: Synthetic oligonucleotide
auacugcuucagagucucg

SEQ ID NO: 2799650 - RNA, 19 nt, Artificial Sequence
  Description of Artificial Sequence: Synthetic oligonucleotide
gcacaaccgggcgauacug

SEQ ID NO: 2799651 - RNA, 19 nt, Artificial Sequence
  Description of Artificial Sequence: Synthetic oligonucleotide
cuuguccguugaugcugac

SEQ ID NO: 2799652 - RNA, 19 nt, Artificial Sequence
  Description of Artificial Sequence: Synthetic oligonucleotide
cagguccaagggaugcaca

SEQ ID NO: 2799653 - RNA, 19 nt, Artificial Sequence
  Description of Artificial Sequence: Synthetic oligonucleotide
caggauccuucugggguac

SEQ ID NO: 2799654 - RNA, 19 nt, Artificial Sequence
  Description of Artificial Sequence: Synthetic oligonucleotide
uagcguccccgcgacauuu

SEQ ID NO: 2799655 - RNA, 19 nt, Artificial Sequence
  Description of Artificial Sequence: Synthetic oligonucleotide
ggauccuucugggguacug

SEQ ID NO: 2799656 - RNA, 19 nt, Artificial Sequence
  Description of Artificial Sequence: Synthetic oligonucleotide
auagcguccccgcgacauu

SEQ ID NO: 2799657 - RNA, 19 nt, Artificial Sequence
  Description of Artificial Sequence: Synthetic oligonucleotide
ucauggcgucacugauuuc

SEQ ID NO: 2799658 - RNA, 19 nt, Artificial Sequence
  Description of Artificial Sequence: Synthetic oligonucleotide
gggaugcacaaccgggcga

SEQ ID NO: 2799659 - RNA, 19 nt, Artificial Sequence
  Description of Artificial Sequence: Synthetic oligonucleotide
gguccaagggaugcacaac

SEQ ID NO: 2799660 - RNA, 19 nt, Artificial Sequence
  Description of Artificial Sequence: Synthetic oligonucleotide
cugggucagggucacauuu

SEQ ID NO: 2799661 - RNA, 19 nt, Artificial Sequence
  Description of Artificial Sequence: Synthetic oligonucleotide
uggcgucacugauuuccuu

SEQ ID NO: 2799662 - RNA, 19 nt, Artificial Sequence
  Description of Artificial Sequence: Synthetic oligonucleotide
ccaggcuuguccguugaug

SEQ ID NO: 2799663 - RNA, 19 nt, Artificial Sequence
  Description of Artificial Sequence: Synthetic oligonucleotide
gccugcguuuuguugccac

SEQ ID NO: 2799664 - RNA, 19 nt, Artificial Sequence
  Description of Artificial Sequence: Synthetic oligonucleotide
caucuucaagaacuuugau

SEQ ID NO: 2799665 - RNA, 19 nt, Artificial Sequence
  Description of Artificial Sequence: Synthetic oligonucleotide
gguacugccugcguuuugu

SEQ ID NO: 2799666 - RNA, 19 nt, Artificial Sequence
  Description of Artificial Sequence: Synthetic oligonucleotide
cuucauggcgucacugauu

SEQ ID NO: 2799667 - RNA, 19 nt, Artificial Sequence
  Description of Artificial Sequence: Synthetic oligonucleotide
caucuacuaugagcucauc

SEQ ID NO: 2799668 - RNA, 19 nt, Artificial Sequence
  Description of Artificial Sequence: Synthetic oligonucleotide
agcguccccgcgacauuuc

SEQ ID NO: 2799669 - RNA, 19 nt, Artificial Sequence
  Description of Artificial Sequence: Synthetic oligonucleotide
cguugaugcugacauucuc

SEQ ID NO: 2799670 - RNA, 19 nt, Artificial Sequence
  Description of Artificial Sequence: Synthetic oligonucleotide
gugcugagcuuucaagguu

SEQ ID NO: 2799671 - RNA, 19 nt, Artificial Sequence
  Description of Artificial Sequence: Synthetic oligonucleotide
gcagcuuccugccaggcuu

SEQ ID NO: 2799672 - RNA, 19 nt, Artificial Sequence
  Description of Artificial Sequence: Synthetic oligonucleotide
ccacagcagauucaaaagu

SEQ ID NO: 2799673 - RNA, 19 nt, Artificial Sequence
  Description of Artificial Sequence: Synthetic oligonucleotide
ugacgcucuccaggauccu

SEQ ID NO: 2799674 - RNA, 19 nt, Artificial Sequence
  Description of Artificial Sequence: Synthetic oligonucleotide
gagucucgugcugagcuuu

SEQ ID NO: 2799675 - RNA, 19 nt, Artificial Sequence
  Description of Artificial Sequence: Synthetic oligonucleotide
ugccugcguuuuguugcca

SEQ ID NO: 2799676 - RNA, 19 nt, Artificial Sequence
  Description of Artificial Sequence: Synthetic oligonucleotide
accgggcgauacugcuuca

SEQ ID NO: 2799677 - RNA, 19 nt, Artificial Sequence
  Description of Artificial Sequence: Synthetic oligonucleotide
ccacaucuacuaugagcuc

SEQ ID NO: 2799678 - RNA, 19 nt, Artificial Sequence
  Description of Artificial Sequence: Synthetic oligonucleotide
cgcgacauuucagauuuuc

SEQ ID NO: 2799679 - RNA, 19 nt, Artificial Sequence
  Description of Artificial Sequence: Synthetic oligonucleotide
gcuuguccguugaugcuga

SEQ ID NO: 2799680 - RNA, 19 nt, Artificial Sequence
  Description of Artificial Sequence: Synthetic oligonucleotide
cccgcgacauuucagauuu

SEQ ID NO: 2799681 - RNA, 19 nt, Artificial Sequence
  Description of Artificial Sequence: Synthetic oligonucleotide
gucucgugcugagcuuuca

SEQ ID NO: 2799682 - RNA, 19 nt, Artificial Sequence
  Description of Artificial Sequence: Synthetic oligonucleotide
ggguacugccugcguuuug

SEQ ID NO: 2799683 - RNA, 19 nt, Artificial Sequence
  Description of Artificial Sequence: Synthetic oligonucleotide
cuauagcguccccgcgaca

SEQ ID NO: 2799684 - RNA, 19 nt, Artificial Sequence
  Description of Artificial Sequence: Synthetic oligonucleotide
gcucuccaggauccuucug

SEQ ID NO: 2799685 - RNA, 19 nt, Artificial Sequence
  Description of Artificial Sequence: Synthetic oligonucleotide
cgucacugauuuccuuagc

SEQ ID NO: 2799686 - RNA, 19 nt, Artificial Sequence
  Description of Artificial Sequence: Synthetic oligonucleotide
ccuuagcuauagcgucccc

SEQ ID NO: 2799687 - RNA, 19 nt, Artificial Sequence
  Description of Artificial Sequence: Synthetic oligonucleotide
ccugcguuuuguugccaca

SEQ ID NO: 2799688 - RNA, 19 nt, Artificial Sequence
  Description of Artificial Sequence: Synthetic oligonucleotide
aggauccuucugggguacu

SEQ ID NO: 2799689 - RNA, 19 nt, Artificial Sequence
  Description of Artificial Sequence: Synthetic oligonucleotide
agcuuccugccaggcuugu

SEQ ID NO: 2799690 - RNA, 19 nt, Artificial Sequence
  Description of Artificial Sequence: Synthetic oligonucleotide
cugcguuuuguugccacau

SEQ ID NO: 2799691 - RNA, 19 nt, Artificial Sequence
  Description of Artificial Sequence: Synthetic oligonucleotide
ggaugcacaaccgggcgau

SEQ ID NO: 2799692 - RNA, 19 nt, Artificial Sequence
  Description of Artificial Sequence: Synthetic oligonucleotide
ccaggauccuucuggggua

SEQ ID NO: 2799693 - RNA, 19 nt, Artificial Sequence
  Description of Artificial Sequence: Synthetic oligonucleotide
cguuuuguugccacaucua

SEQ ID NO: 2799694 - RNA, 19 nt, Artificial Sequence
  Description of Artificial Sequence: Synthetic oligonucleotide
gaugcacaaccgggcgaua

SEQ ID NO: 2799695 - RNA, 19 nt, Artificial Sequence
  Description of Artificial Sequence: Synthetic oligonucleotide
aagcugggucagggucaca

SEQ ID NO: 2799696 - RNA, 19 nt, Artificial Sequence
  Description of Artificial Sequence: Synthetic oligonucleotide
cgugcugagcuuucaaggu

SEQ ID NO: 2799697 - RNA, 19 nt, Artificial Sequence
  Description of Artificial Sequence: Synthetic oligonucleotide
ggucacauuucagguccaa

SEQ ID NO: 2799698 - RNA, 19 nt, Artificial Sequence
  Description of Artificial Sequence: Synthetic oligonucleotide
cugggguacugccugcguu

SEQ ID NO: 2799699 - RNA, 19 nt, Artificial Sequence
  Description of Artificial Sequence: Synthetic oligonucleotide
cguccccgcgacauuucag

SEQ ID NO: 2799700 - RNA, 19 nt, Artificial Sequence
  Description of Artificial Sequence: Synthetic oligonucleotide
agacaguggucggcagcuu

SEQ ID NO: 2799701 - RNA, 19 nt, Artificial Sequence
  Description of Artificial Sequence: Synthetic oligonucleotide
ggcagcuuccugccaggcu

SEQ ID NO: 2799702 - RNA, 19 nt, Artificial Sequence
  Description of Artificial Sequence: Synthetic oligonucleotide
guacugccugcguuuuguu

SEQ ID NO: 2799703 - RNA, 19 nt, Artificial Sequence
  Description of Artificial Sequence: Synthetic oligonucleotide
gcguccccgcgacauuuca

SEQ ID NO: 2799704 - RNA, 19 nt, Artificial Sequence
  Description of Artificial Sequence: Synthetic oligonucleotide
gacgcucuccaggauccuu

SEQ ID NO: 2799705 - RNA, 19 nt, Artificial Sequence
  Description of Artificial Sequence: Synthetic oligonucleotide
ccgggcgauacugcuucag

SEQ ID NO: 2799706 - RNA, 19 nt, Artificial Sequence
  Description of Artificial Sequence: Synthetic oligonucleotide
caaccgggcgauacugcuu

SEQ ID NO: 2799707 - RNA, 19 nt, Artificial Sequence
  Description of Artificial Sequence: Synthetic oligonucleotide
ccuucauggcgucacugau

SEQ ID NO: 2799708 - RNA, 19 nt, Artificial Sequence
  Description of Artificial Sequence: Synthetic oligonucleotide
ggucggcagcuuccugcca

SEQ ID NO: 2799709 - RNA, 19 nt, Artificial Sequence
  Description of Artificial Sequence: Synthetic oligonucleotide
gggucacauuucaggucca

SEQ ID NO: 2799710 - RNA, 19 nt, Artificial Sequence
  Description of Artificial Sequence: Synthetic oligonucleotide
guccguugaugcugacauu

SEQ ID NO: 2799711 - RNA, 19 nt, Artificial Sequence
  Description of Artificial Sequence: Synthetic oligonucleotide
cgggcgauacugcuucaga

SEQ ID NO: 2799712 - RNA, 19 nt, Artificial Sequence
  Description of Artificial Sequence: Synthetic oligonucleotide
ccguugaugcugacauucu

SEQ ID NO: 2799713 - RNA, 19 nt, Artificial Sequence
  Description of Artificial Sequence: Synthetic oligonucleotide
cgauacugcuucagagucu

SEQ ID NO: 2799714 - RNA, 19 nt, Artificial Sequence
  Description of Artificial Sequence: Synthetic oligonucleotide
caguggucggcagcuuccu

SEQ ID NO: 2799715 - RNA, 19 nt, Artificial Sequence
  Description of Artificial Sequence: Synthetic oligonucleotide
ccuccacagcagauucaaa

SEQ ID NO: 2799716 - RNA, 19 nt, Artificial Sequence
  Description of Artificial Sequence: Synthetic oligonucleotide
gcugagcuuucaagguuuu

SEQ ID NO: 2799717 - RNA, 19 nt, Artificial Sequence
  Description of Artificial Sequence: Synthetic oligonucleotide
gggguacugccugcguuuu

SEQ ID NO: 2799718 - RNA, 19 nt, Artificial Sequence
  Description of Artificial Sequence: Synthetic oligonucleotide
ccccgcgacauuucagauu

SEQ ID NO: 2799719 - RNA, 19 nt, Artificial Sequence
  Description of Artificial Sequence: Synthetic oligonucleotide
gccaggcuuguccguugau

SEQ ID NO: 2799720 - RNA, 19 nt, Artificial Sequence
  Description of Artificial Sequence: Synthetic oligonucleotide
cgcucuccaggauccuucu

SEQ ID NO: 2799721 - RNA, 19 nt, Artificial Sequence
  Description of Artificial Sequence: Synthetic oligonucleotide
ccugccaggcuuguccguu

SEQ ID NO: 2799722 - RNA, 19 nt, Artificial Sequence
  Description of Artificial Sequence: Synthetic oligonucleotide
ccgcgacauuucagauuuu

SEQ ID NO: 2799723 - RNA, 19 nt, Artificial Sequence
  Description of Artificial Sequence: Synthetic oligonucleotide
aaaaggaccaaauaaaaug

SEQ ID NO: 2799724 - RNA, 19 nt, Artificial Sequence
  Description of Artificial Sequence: Synthetic oligonucleotide
gauaaagcaaaauauuugg

SEQ ID NO: 2799725 - RNA, 19 nt, Artificial Sequence
  Description of Artificial Sequence: Synthetic oligonucleotide
aauaaaauggugguuuagc

SEQ ID NO: 2799726 - RNA, 19 nt, Artificial Sequence
  Description of Artificial Sequence: Synthetic oligonucleotide
gauacaaguguugauaucg

SEQ ID NO: 2799727 - RNA, 19 nt, Artificial Sequence
  Description of Artificial Sequence: Synthetic oligonucleotide
acauacaguacacacaagg

SEQ ID NO: 2799728 - RNA, 19 nt, Artificial Sequence
  Description of Artificial Sequence: Synthetic oligonucleotide
aaaggaccaaauaaaaugg

SEQ ID NO: 2799729 - RNA, 19 nt, Artificial Sequence
  Description of Artificial Sequence: Synthetic oligonucleotide
ugauaaagcaaaauauuug

SEQ ID NO: 2799730 - RNA, 19 nt, Artificial Sequence
  Description of Artificial Sequence: Synthetic oligonucleotide
aaagcaaaauauuugggaa

SEQ ID NO: 2799731 - RNA, 19 nt, Artificial Sequence
  Description of Artificial Sequence: Synthetic oligonucleotide
uaaagcaaaauauuuggga

SEQ ID NO: 2799732 - RNA, 19 nt, Artificial Sequence
  Description of Artificial Sequence: Synthetic oligonucleotide
ucucauuuuggcaagaauc

SEQ ID NO: 2799733 - RNA, 19 nt, Artificial Sequence
  Description of Artificial Sequence: Synthetic oligonucleotide
guacacacaaggcugaugg

SEQ ID NO: 2799734 - RNA, 19 nt, Artificial Sequence
  Description of Artificial Sequence: Synthetic oligonucleotide
aagcaaaauauuugggaag

SEQ ID NO: 2799735 - RNA, 19 nt, Artificial Sequence
  Description of Artificial Sequence: Synthetic oligonucleotide
aaaauggugguuuagcaua

SEQ ID NO: 2799736 - RNA, 19 nt, Artificial Sequence
  Description of Artificial Sequence: Synthetic oligonucleotide
acagagaccagauacaagu

SEQ ID NO: 2799737 - RNA, 19 nt, Artificial Sequence
  Description of Artificial Sequence: Synthetic oligonucleotide
uacaguacacacaaggcug

SEQ ID NO: 2799738 - RNA, 19 nt, Artificial Sequence
  Description of Artificial Sequence: Synthetic oligonucleotide
accgcugggacacagagac

SEQ ID NO: 2799739 - RNA, 19 nt, Artificial Sequence
  Description of Artificial Sequence: Synthetic oligonucleotide
agcaaaauauuugggaagc

SEQ ID NO: 2799740 - RNA, 19 nt, Artificial Sequence
  Description of Artificial Sequence: Synthetic oligonucleotide
cuugucauaacuccagucc

SEQ ID NO: 2799741 - RNA, 19 nt, Artificial Sequence
  Description of Artificial Sequence: Synthetic oligonucleotide
uugauaucggaugauaaag

SEQ ID NO: 2799742 - RNA, 19 nt, Artificial Sequence
  Description of Artificial Sequence: Synthetic oligonucleotide
ucugagcaaaaccaaaaca

SEQ ID NO: 2799743 - RNA, 19 nt, Artificial Sequence
  Description of Artificial Sequence: Synthetic oligonucleotide
aaaacaaaaggaccaaaua

SEQ ID NO: 2799744 - RNA, 19 nt, Artificial Sequence
  Description of Artificial Sequence: Synthetic oligonucleotide
uaucggaugauaaagcaaa

SEQ ID NO: 2799745 - RNA, 19 nt, Artificial Sequence
  Description of Artificial Sequence: Synthetic oligonucleotide
aagagucucauuuuggcaa

SEQ ID NO: 2799746 - RNA, 19 nt, Artificial Sequence
  Description of Artificial Sequence: Synthetic oligonucleotide
uugacauugcacaaggcac

SEQ ID NO: 2799747 - RNA, 19 nt, Artificial Sequence
  Description of Artificial Sequence: Synthetic oligonucleotide
ugguuuagcauagacgugg

SEQ ID NO: 2799748 - RNA, 19 nt, Artificial Sequence
  Description of Artificial Sequence: Synthetic oligonucleotide
uuuagcauagacguggaca

SEQ ID NO: 2799749 - RNA, 19 nt, Artificial Sequence
  Description of Artificial Sequence: Synthetic oligonucleotide
acauugacauugcacaagg

SEQ ID NO: 2799750 - RNA, 19 nt, Artificial Sequence
  Description of Artificial Sequence: Synthetic oligonucleotide
auugacauugcacaaggca

SEQ ID NO: 2799751 - RNA, 19 nt, Artificial Sequence
  Description of Artificial Sequence: Synthetic oligonucleotide
ugauaucggaugauaaagc

SEQ ID NO: 2799752 - RNA, 19 nt, Artificial Sequence
  Description of Artificial Sequence: Synthetic oligonucleotide
uucaaguuccuucagcaac

SEQ ID NO: 2799753 - RNA, 19 nt, Artificial Sequence
  Description of Artificial Sequence: Synthetic oligonucleotide
uggugguuuagcauagacg

SEQ ID NO: 2799754 - RNA, 19 nt, Artificial Sequence
  Description of Artificial Sequence: Synthetic oligonucleotide
caagaaucugagcaaaacc

SEQ ID NO: 2799755 - RNA, 19 nt, Artificial Sequence
  Description of Artificial Sequence: Synthetic oligonucleotide
cauacaguacacacaaggc

SEQ ID NO: 2799756 - RNA, 19 nt, Artificial Sequence
  Description of Artificial Sequence: Synthetic oligonucleotide
auaaaauggugguuuagca

SEQ ID NO: 2799757 - RNA, 19 nt, Artificial Sequence
  Description of Artificial Sequence: Synthetic oligonucleotide
aaacuuagguucccgucuc

SEQ ID NO: 2799758 - RNA, 19 nt, Artificial Sequence
  Description of Artificial Sequence: Synthetic oligonucleotide
aucugagcaaaaccaaaac

SEQ ID NO: 2799759 - RNA, 19 nt, Artificial Sequence
  Description of Artificial Sequence: Synthetic oligonucleotide
aacaaaaggaccaaauaaa

SEQ ID NO: 2799760 - RNA, 19 nt, Artificial Sequence
  Description of Artificial Sequence: Synthetic oligonucleotide
uugucauaacuccaguccc

SEQ ID NO: 2799761 - RNA, 19 nt, Artificial Sequence
  Description of Artificial Sequence: Synthetic oligonucleotide
aagaccagaaacuuagguu

SEQ ID NO: 2799762 - RNA, 19 nt, Artificial Sequence
  Description of Artificial Sequence: Synthetic oligonucleotide
agaaacuuagguucccguc

SEQ ID NO: 2799763 - RNA, 19 nt, Artificial Sequence
  Description of Artificial Sequence: Synthetic oligonucleotide
auacaguacacacaaggcu

SEQ ID NO: 2799764 - RNA, 19 nt, Artificial Sequence
  Description of Artificial Sequence: Synthetic oligonucleotide
gauaucggaugauaaagca

SEQ ID NO: 2799765 - RNA, 19 nt, Artificial Sequence
  Description of Artificial Sequence: Synthetic oligonucleotide
uagacguggacauugacau

SEQ ID NO: 2799766 - RNA, 19 nt, Artificial Sequence
  Description of Artificial Sequence: Synthetic oligonucleotide
ugugcuucaaguuccuuca

SEQ ID NO: 2799767 - RNA, 19 nt, Artificial Sequence
  Description of Artificial Sequence: Synthetic oligonucleotide
aauauuugggaagcuuguc

SEQ ID NO: 2799768 - RNA, 19 nt, Artificial Sequence
  Description of Artificial Sequence: Synthetic oligonucleotide
aaauaaaauggugguuuag

SEQ ID NO: 2799769 - RNA, 19 nt, Artificial Sequence
  Description of Artificial Sequence: Synthetic oligonucleotide
uuagcauagacguggacau

SEQ ID NO: 2799770 - RNA, 19 nt, Artificial Sequence
  Description of Artificial Sequence: Synthetic oligonucleotide
ugacauugcacaaggcacc

SEQ ID NO: 2799771 - RNA, 19 nt, Artificial Sequence
  Description of Artificial Sequence: Synthetic oligonucleotide
ucaaguuccuucagcaaca

SEQ ID NO: 2799772 - RNA, 19 nt, Artificial Sequence
  Description of Artificial Sequence: Synthetic oligonucleotide
aaguguugauaucggauga

SEQ ID NO: 2799773 - RNA, 19 nt, Artificial Sequence
  Description of Artificial Sequence: Synthetic oligonucleotide
auaaagcaaaauauuuggg

SEQ ID NO: 2799774 - RNA, 19 nt, Artificial Sequence
  Description of Artificial Sequence: Synthetic oligonucleotide
caaguguugauaucggaug

SEQ ID NO: 2799775 - RNA, 19 nt, Artificial Sequence
  Description of Artificial Sequence: Synthetic oligonucleotide
auauuugggaagcuuguca

SEQ ID NO: 2799776 - RNA, 19 nt, Artificial Sequence
  Description of Artificial Sequence: Synthetic oligonucleotide
uguugauaucggaugauaa

SEQ ID NO: 2799777 - RNA, 19 nt, Artificial Sequence
  Description of Artificial Sequence: Synthetic oligonucleotide
ucgauugugcuucaaguuc

SEQ ID NO: 2799778 - RNA, 19 nt, Artificial Sequence
  Description of Artificial Sequence: Synthetic oligonucleotide
gacguggacauugacauug

SEQ ID NO: 2799779 - RNA, 19 nt, Artificial Sequence
  Description of Artificial Sequence: Synthetic oligonucleotide
auggugguuuagcauagac

SEQ ID NO: 2799780 - RNA, 19 nt, Artificial Sequence
  Description of Artificial Sequence: Synthetic oligonucleotide
ggaccaaauaaaauggugg

SEQ ID NO: 2799781 - RNA, 19 nt, Artificial Sequence
  Description of Artificial Sequence: Synthetic oligonucleotide
uaaaauggugguuuagcau

SEQ ID NO: 2799782 - RNA, 19 nt, Artificial Sequence
  Description of Artificial Sequence: Synthetic oligonucleotide
aacuuagguucccgucucc

SEQ ID NO: 2799783 - RNA, 19 nt, Artificial Sequence
  Description of Artificial Sequence: Synthetic oligonucleotide
uugcacaaggcaccgcugg

SEQ ID NO: 2799784 - RNA, 19 nt, Artificial Sequence
  Description of Artificial Sequence: Synthetic oligonucleotide
uauuugggaagcuugucau

SEQ ID NO: 2799785 - RNA, 19 nt, Artificial Sequence
  Description of Artificial Sequence: Synthetic oligonucleotide
cacacaaggcugauggucc

SEQ ID NO: 2799786 - RNA, 19 nt, Artificial Sequence
  Description of Artificial Sequence: Synthetic oligonucleotide
aaauauuugggaagcuugu

SEQ ID NO: 2799787 - RNA, 19 nt, Artificial Sequence
  Description of Artificial Sequence: Synthetic oligonucleotide
gauggaucgauugugcuuc

SEQ ID NO: 2799788 - RNA, 19 nt, Artificial Sequence
  Description of Artificial Sequence: Synthetic oligonucleotide
cuuuucauccccucucccc

SEQ ID NO: 2799789 - RNA, 19 nt, Artificial Sequence
  Description of Artificial Sequence: Synthetic oligonucleotide
auaacuccagucccucugg

SEQ ID NO: 2799790 - RNA, 19 nt, Artificial Sequence
  Description of Artificial Sequence: Synthetic oligonucleotide
gaagaugccccgcagcgug

SEQ ID NO: 2799791 - RNA, 19 nt, Artificial Sequence
  Description of Artificial Sequence: Synthetic oligonucleotide
uccuccgggagacaaaaga

SEQ ID NO: 2799792 - RNA, 19 nt, Artificial Sequence
  Description of Artificial Sequence: Synthetic oligonucleotide
ugggaagcuugucauaacu

SEQ ID NO: 2799793 - RNA, 19 nt, Artificial Sequence
  Description of Artificial Sequence: Synthetic oligonucleotide
agauacaaguguugauauc

SEQ ID NO: 2799794 - RNA, 19 nt, Artificial Sequence
  Description of Artificial Sequence: Synthetic oligonucleotide
uccgggagacaaaagaaaa

SEQ ID NO: 2799795 - RNA, 19 nt, Artificial Sequence
  Description of Artificial Sequence: Synthetic oligonucleotide
agcguguccaguucccggc

SEQ ID NO: 2799796 - RNA, 19 nt, Artificial Sequence
  Description of Artificial Sequence: Synthetic oligonucleotide
agagaccagauacaagugu

SEQ ID NO: 2799797 - RNA, 19 nt, Artificial Sequence
  Description of Artificial Sequence: Synthetic oligonucleotide
ggaagcuugucauaacucc

SEQ ID NO: 2799798 - RNA, 19 nt, Artificial Sequence
  Description of Artificial Sequence: Synthetic oligonucleotide
ggacacagagaccagauac

SEQ ID NO: 2799799 - RNA, 19 nt, Artificial Sequence
  Description of Artificial Sequence: Synthetic oligonucleotide
agcaacagcggcuggcgac

SEQ ID NO: 2799800 - RNA, 19 nt, Artificial Sequence
  Description of Artificial Sequence: Synthetic oligonucleotide
uuugggaagcuugucauaa

SEQ ID NO: 2799801 - RNA, 19 nt, Artificial Sequence
  Description of Artificial Sequence: Synthetic oligonucleotide
agcgaagagucucauuuug

SEQ ID NO: 2799802 - RNA, 19 nt, Artificial Sequence
  Description of Artificial Sequence: Synthetic oligonucleotide
aaauggugguuuagcauag

SEQ ID NO: 2799803 - RNA, 19 nt, Artificial Sequence
  Description of Artificial Sequence: Synthetic oligonucleotide
gaagagucucauuuuggca

SEQ ID NO: 2799804 - RNA, 19 nt, Artificial Sequence
  Description of Artificial Sequence: Synthetic oligonucleotide
cauuuuggcaagaaucuga

SEQ ID NO: 2799805 - RNA, 19 nt, Artificial Sequence
  Description of Artificial Sequence: Synthetic oligonucleotide
accaggggagcucucgggc

SEQ ID NO: 2799806 - RNA, 19 nt, Artificial Sequence
  Description of Artificial Sequence: Synthetic oligonucleotide
augauaaagcaaaauauuu

SEQ ID NO: 2799807 - RNA, 19 nt, Artificial Sequence
  Description of Artificial Sequence: Synthetic oligonucleotide
aggaaagagggcccgagcu

SEQ ID NO: 2799808 - RNA, 19 nt, Artificial Sequence
  Description of Artificial Sequence: Synthetic oligonucleotide
ggugguuuagcauagacgu

SEQ ID NO: 2799809 - RNA, 19 nt, Artificial Sequence
  Description of Artificial Sequence: Synthetic oligonucleotide
uugugcuucaaguuccuuc

SEQ ID NO: 2799810 - RNA, 19 nt, Artificial Sequence
  Description of Artificial Sequence: Synthetic oligonucleotide
ucugggauggaucgauugu

SEQ ID NO: 2799811 - RNA, 19 nt, Artificial Sequence
  Description of Artificial Sequence: Synthetic oligonucleotide
uuagguucccgucuccggu

SEQ ID NO: 2799812 - RNA, 19 nt, Artificial Sequence
  Description of Artificial Sequence: Synthetic oligonucleotide
ugucauaacuccagucccu

SEQ ID NO: 2799813 - RNA, 19 nt, Artificial Sequence
  Description of Artificial Sequence: Synthetic oligonucleotide
agcauagacguggacauug

SEQ ID NO: 2799814 - RNA, 19 nt, Artificial Sequence
  Description of Artificial Sequence: Synthetic oligonucleotide
uccuuuucauccccucucc

SEQ ID NO: 2799815 - RNA, 19 nt, Artificial Sequence
  Description of Artificial Sequence: Synthetic oligonucleotide
agagucucauuuuggcaag

SEQ ID NO: 2799816 - RNA, 19 nt, Artificial Sequence
  Description of Artificial Sequence: Synthetic oligonucleotide
ugggauggaucgauugugc

SEQ ID NO: 2799817 - RNA, 19 nt, Artificial Sequence
  Description of Artificial Sequence: Synthetic oligonucleotide
cauaacuccagucccucug

SEQ ID NO: 2799818 - RNA, 19 nt, Artificial Sequence
  Description of Artificial Sequence: Synthetic oligonucleotide
uacaaguguugauaucgga

SEQ ID NO: 2799819 - RNA, 19 nt, Artificial Sequence
  Description of Artificial Sequence: Synthetic oligonucleotide
aagcuugucauaacuccag

SEQ ID NO: 2799820 - RNA, 19 nt, Artificial Sequence
  Description of Artificial Sequence: Synthetic oligonucleotide
acagcggcuggcgacauac

SEQ ID NO: 2799821 - RNA, 19 nt, Artificial Sequence
  Description of Artificial Sequence: Synthetic oligonucleotide
uccaguucccggcucagcu

SEQ ID NO: 2799822 - RNA, 19 nt, Artificial Sequence
  Description of Artificial Sequence: Synthetic oligonucleotide
acacaaggcugaugguccc

SEQ ID NO: 2799823 - RNA, 19 nt, Artificial Sequence
  Description of Artificial Sequence: Synthetic oligonucleotide
gacauugcacaaggcaccg

SEQ ID NO: 2799824 - RNA, 19 nt, Artificial Sequence
  Description of Artificial Sequence: Synthetic oligonucleotide
gaaacuuagguucccgucu

SEQ ID NO: 2799825 - RNA, 19 nt, Artificial Sequence
  Description of Artificial Sequence: Synthetic oligonucleotide
ucagcaacagcggcuggcg

SEQ ID NO: 2799826 - RNA, 19 nt, Artificial Sequence
  Description of Artificial Sequence: Synthetic oligonucleotide
cuuagguucccgucuccgg

SEQ ID NO: 2799827 - RNA, 19 nt, Artificial Sequence
  Description of Artificial Sequence: Synthetic oligonucleotide
gucccucugggauggaucg

SEQ ID NO: 2799828 - RNA, 19 nt, Artificial Sequence
  Description of Artificial Sequence: Synthetic oligonucleotide
ugcacaaggcaccgcuggg

SEQ ID NO: 2799829 - RNA, 19 nt, Artificial Sequence
  Description of Artificial Sequence: Synthetic oligonucleotide
acaaaaggaccaaauaaaa

SEQ ID NO: 2799830 - RNA, 19 nt, Artificial Sequence
  Description of Artificial Sequence: Synthetic oligonucleotide
ucauuuuggcaagaaucug

SEQ ID NO: 2799831 - RNA, 19 nt, Artificial Sequence
  Description of Artificial Sequence: Synthetic oligonucleotide
guugauaucggaugauaaa

SEQ ID NO: 2799832 - RNA, 19 nt, Artificial Sequence
  Description of Artificial Sequence: Synthetic oligonucleotide
aaggcugauggucccggug

SEQ ID NO: 2799833 - RNA, 19 nt, Artificial Sequence
  Description of Artificial Sequence: Synthetic oligonucleotide
gaucgauugugcuucaagu

SEQ ID NO: 2799834 - RNA, 19 nt, Artificial Sequence
  Description of Artificial Sequence: Synthetic oligonucleotide
gaccaaauaaaaugguggu

SEQ ID NO: 2799835 - RNA, 19 nt, Artificial Sequence
  Description of Artificial Sequence: Synthetic oligonucleotide
auagacguggacauugaca

SEQ ID NO: 2799836 - RNA, 19 nt, Artificial Sequence
  Description of Artificial Sequence: Synthetic oligonucleotide
uguccuuuucauccccucu

SEQ ID NO: 2799837 - RNA, 19 nt, Artificial Sequence
  Description of Artificial Sequence: Synthetic oligonucleotide
uccuucagcaacagcggcu

SEQ ID NO: 2799838 - RNA, 19 nt, Artificial Sequence
  Description of Artificial Sequence: Synthetic oligonucleotide
uuccuucagcaacagcggc

SEQ ID NO: 2799839 - RNA, 19 nt, Artificial Sequence
  Description of Artificial Sequence: Synthetic oligonucleotide
aaggaccaaauaaaauggu

SEQ ID NO: 2799840 - RNA, 19 nt, Artificial Sequence
  Description of Artificial Sequence: Synthetic oligonucleotide
aggaccaaauaaaauggug

SEQ ID NO: 2799841 - RNA, 19 nt, Artificial Sequence
  Description of Artificial Sequence: Synthetic oligonucleotide
ugaccaggggagcucucgg

SEQ ID NO: 2799842 - RNA, 19 nt, Artificial Sequence
  Description of Artificial Sequence: Synthetic oligonucleotide
auacaaguguugauaucgg

SEQ ID NO: 2799843 - RNA, 19 nt, Artificial Sequence
  Description of Artificial Sequence: Synthetic oligonucleotide
ugcuccacccgcuugcgca

SEQ ID NO: 2799844 - RNA, 19 nt, Artificial Sequence
  Description of Artificial Sequence: Synthetic oligonucleotide
aucgauugugcuucaaguu

SEQ ID NO: 2799845 - RNA, 19 nt, Artificial Sequence
  Description of Artificial Sequence: Synthetic oligonucleotide
cucauuuuggcaagaaucu

SEQ ID NO: 2799846 - RNA, 19 nt, Artificial Sequence
  Description of Artificial Sequence: Synthetic oligonucleotide
uccagucccucugggaugg

SEQ ID NO: 2799847 - RNA, 19 nt, Artificial Sequence
  Description of Artificial Sequence: Synthetic oligonucleotide
acuccagucccucugggau

SEQ ID NO: 2799848 - RNA, 19 nt, Artificial Sequence
  Description of Artificial Sequence: Synthetic oligonucleotide
ggcgacauacaguacacac

SEQ ID NO: 2799849 - RNA, 19 nt, Artificial Sequence
  Description of Artificial Sequence: Synthetic oligonucleotide
cucugggauggaucgauug

SEQ ID NO: 2799850 - RNA, 19 nt, Artificial Sequence
  Description of Artificial Sequence: Synthetic oligonucleotide
acuuagguucccgucuccg

SEQ ID NO: 2799851 - RNA, 19 nt, Artificial Sequence
  Description of Artificial Sequence: Synthetic oligonucleotide
gaagcuugucauaacucca

SEQ ID NO: 2799852 - RNA, 19 nt, Artificial Sequence
  Description of Artificial Sequence: Synthetic oligonucleotide
acaaguguugauaucggau

SEQ ID NO: 2799853 - RNA, 19 nt, Artificial Sequence
  Description of Artificial Sequence: Synthetic oligonucleotide
uugaccaggggagcucucg

SEQ ID NO: 2799854 - RNA, 19 nt, Artificial Sequence
  Description of Artificial Sequence: Synthetic oligonucleotide
ggagcucucgggcagcugg

SEQ ID NO: 2799855 - RNA, 19 nt, Artificial Sequence
  Description of Artificial Sequence: Synthetic oligonucleotide
agguucccgucuccggucc

SEQ ID NO: 2799856 - RNA, 19 nt, Artificial Sequence
  Description of Artificial Sequence: Synthetic oligonucleotide
cauugacauugcacaaggc

SEQ ID NO: 2799857 - RNA, 19 nt, Artificial Sequence
  Description of Artificial Sequence: Synthetic oligonucleotide
gaaagagggcccgagcuuc

SEQ ID NO: 2799858 - RNA, 19 nt, Artificial Sequence
  Description of Artificial Sequence: Synthetic oligonucleotide
agcggcuggcgacauacag

SEQ ID NO: 2799859 - RNA, 19 nt, Artificial Sequence
  Description of Artificial Sequence: Synthetic oligonucleotide
aaaauaccccaaaccaaaa

SEQ ID NO: 2799860 - RNA, 19 nt, Artificial Sequence
  Description of Artificial Sequence: Synthetic oligonucleotide
ugggacacagagaccagau

SEQ ID NO: 2799861 - RNA, 19 nt, Artificial Sequence
  Description of Artificial Sequence: Synthetic oligonucleotide
guggacauugacauugcac

SEQ ID NO: 2799862 - RNA, 19 nt, Artificial Sequence
  Description of Artificial Sequence: Synthetic oligonucleotide
uucagcaacagcggcuggc

SEQ ID NO: 2799863 - RNA, 19 nt, Artificial Sequence
  Description of Artificial Sequence: Synthetic oligonucleotide
cagagaccagauacaagug

SEQ ID NO: 2799864 - RNA, 19 nt, Artificial Sequence
  Description of Artificial Sequence: Synthetic oligonucleotide
cccgguguccuuuucaucc

SEQ ID NO: 2799865 - RNA, 19 nt, Artificial Sequence
  Description of Artificial Sequence: Synthetic oligonucleotide
ggaucgauugugcuucaag

SEQ ID NO: 2799866 - RNA, 19 nt, Artificial Sequence
  Description of Artificial Sequence: Synthetic oligonucleotide
cacagagaccagauacaag

SEQ ID NO: 2799867 - RNA, 19 nt, Artificial Sequence
  Description of Artificial Sequence: Synthetic oligonucleotide
gagggcccgagcuucuucc

SEQ ID NO: 2799868 - RNA, 19 nt, Artificial Sequence
  Description of Artificial Sequence: Synthetic oligonucleotide
cuggcgacauacaguacac

SEQ ID NO: 2799869 - RNA, 19 nt, Artificial Sequence
  Description of Artificial Sequence: Synthetic oligonucleotide
gaccaggggagcucucggg

SEQ ID NO: 2799870 - RNA, 19 nt, Artificial Sequence
  Description of Artificial Sequence: Synthetic oligonucleotide
aggcugauggucccggugu

SEQ ID NO: 2799871 - RNA, 19 nt, Artificial Sequence
  Description of Artificial Sequence: Synthetic oligonucleotide
aaaaggaaagagggcccga

SEQ ID NO: 2799872 - RNA, 19 nt, Artificial Sequence
  Description of Artificial Sequence: Synthetic oligonucleotide
gaaucugagcaaaaccaaa

SEQ ID NO: 2799873 - RNA, 19 nt, Artificial Sequence
  Description of Artificial Sequence: Synthetic oligonucleotide
ucggaugauaaagcaaaau

SEQ ID NO: 2799874 - RNA, 19 nt, Artificial Sequence
  Description of Artificial Sequence: Synthetic oligonucleotide
gaccagauacaaguguuga

SEQ ID NO: 2799875 - RNA, 19 nt, Artificial Sequence
  Description of Artificial Sequence: Synthetic oligonucleotide
cuagcgaagagucucauuu

SEQ ID NO: 2799876 - RNA, 19 nt, Artificial Sequence
  Description of Artificial Sequence: Synthetic oligonucleotide
agaaucugagcaaaaccaa

SEQ ID NO: 2799877 - RNA, 19 nt, Artificial Sequence
  Description of Artificial Sequence: Synthetic oligonucleotide
caaggcaccgcugggacac

SEQ ID NO: 2799878 - RNA, 19 nt, Artificial Sequence
  Description of Artificial Sequence: Synthetic oligonucleotide
cauagacguggacauugac

SEQ ID NO: 2799879 - RNA, 19 nt, Artificial Sequence
  Description of Artificial Sequence: Synthetic oligonucleotide
agccgcgcgccucacgcgc

SEQ ID NO: 2799880 - RNA, 19 nt, Artificial Sequence
  Description of Artificial Sequence: Synthetic oligonucleotide
auaucggaugauaaagcaa

SEQ ID NO: 2799881 - RNA, 19 nt, Artificial Sequence
  Description of Artificial Sequence: Synthetic oligonucleotide
acaaggcugauggucccgg

SEQ ID NO: 2799882 - RNA, 19 nt, Artificial Sequence
  Description of Artificial Sequence: Synthetic oligonucleotide
accagauacaaguguugau

SEQ ID NO: 2799883 - RNA, 19 nt, Artificial Sequence
  Description of Artificial Sequence: Synthetic oligonucleotide
cugggauggaucgauugug

SEQ ID NO: 2799884 - RNA, 19 nt, Artificial Sequence
  Description of Artificial Sequence: Synthetic oligonucleotide
ggaugauaaagcaaaauau

SEQ ID NO: 2799885 - RNA, 19 nt, Artificial Sequence
  Description of Artificial Sequence: Synthetic oligonucleotide
agcuugucauaacuccagu

SEQ ID NO: 2799886 - RNA, 19 nt, Artificial Sequence
  Description of Artificial Sequence: Synthetic oligonucleotide
guccuuuucauccccucuc

SEQ ID NO: 2799887 - RNA, 19 nt, Artificial Sequence
  Description of Artificial Sequence: Synthetic oligonucleotide
cacaaggcaccgcugggac

SEQ ID NO: 2799888 - RNA, 19 nt, Artificial Sequence
  Description of Artificial Sequence: Synthetic oligonucleotide
caaaaggaccaaauaaaau

SEQ ID NO: 2799889 - RNA, 19 nt, Artificial Sequence
  Description of Artificial Sequence: Synthetic oligonucleotide
acacagagaccagauacaa

SEQ ID NO: 2799890 - RNA, 19 nt, Artificial Sequence
  Description of Artificial Sequence: Synthetic oligonucleotide
gcuggcgacauacaguaca

SEQ ID NO: 2799891 - RNA, 19 nt, Artificial Sequence
  Description of Artificial Sequence: Synthetic oligonucleotide
agagggcccgagcuucuuc

SEQ ID NO: 2799892 - RNA, 19 nt, Artificial Sequence
  Description of Artificial Sequence: Synthetic oligonucleotide
cagccgcuagcgaagaguc

SEQ ID NO: 2799893 - RNA, 19 nt, Artificial Sequence
  Description of Artificial Sequence: Synthetic oligonucleotide
agaccagauacaaguguug

SEQ ID NO: 2799894 - RNA, 19 nt, Artificial Sequence
  Description of Artificial Sequence: Synthetic oligonucleotide
agucccucugggauggauc

SEQ ID NO: 2799895 - RNA, 19 nt, Artificial Sequence
  Description of Artificial Sequence: Synthetic oligonucleotide
aguacacacaaggcugaug

SEQ ID NO: 2799896 - RNA, 19 nt, Artificial Sequence
  Description of Artificial Sequence: Synthetic oligonucleotide
cgauugugcuucaaguucc

SEQ ID NO: 2799897 - RNA, 19 nt, Artificial Sequence
  Description of Artificial Sequence: Synthetic oligonucleotide
uacacacaaggcugauggu

SEQ ID NO: 2799898 - RNA, 19 nt, Artificial Sequence
  Description of Artificial Sequence: Synthetic oligonucleotide
agggcccgagcuucuuccc

SEQ ID NO: 2799899 - RNA, 19 nt, Artificial Sequence
  Description of Artificial Sequence: Synthetic oligonucleotide
cgaagagucucauuuuggc

SEQ ID NO: 2799900 - RNA, 19 nt, Artificial Sequence
  Description of Artificial Sequence: Synthetic oligonucleotide
cagcguguccaguucccgg

SEQ ID NO: 2799901 - RNA, 19 nt, Artificial Sequence
  Description of Artificial Sequence: Synthetic oligonucleotide
uugggaagcuugucauaac

SEQ ID NO: 2799902 - RNA, 19 nt, Artificial Sequence
  Description of Artificial Sequence: Synthetic oligonucleotide
accaaauaaaauggugguu

SEQ ID NO: 2799903 - RNA, 19 nt, Artificial Sequence
  Description of Artificial Sequence: Synthetic oligonucleotide
uucccggcucagcugcucc

SEQ ID NO: 2799904 - RNA, 19 nt, Artificial Sequence
  Description of Artificial Sequence: Synthetic oligonucleotide
auuugggaagcuugucaua

SEQ ID NO: 2799905 - RNA, 19 nt, Artificial Sequence
  Description of Artificial Sequence: Synthetic oligonucleotide
acauugcacaaggcaccgc

SEQ ID NO: 2799906 - RNA, 19 nt, Artificial Sequence
  Description of Artificial Sequence: Synthetic oligonucleotide
aauggugguuuagcauaga

SEQ ID NO: 2799907 - RNA, 19 nt, Artificial Sequence
  Description of Artificial Sequence: Synthetic oligonucleotide
guuuagcauagacguggac

SEQ ID NO: 2799908 - RNA, 19 nt, Artificial Sequence
  Description of Artificial Sequence: Synthetic oligonucleotide
caagaccagaaacuuaggu

SEQ ID NO: 2799909 - RNA, 19 nt, Artificial Sequence
  Description of Artificial Sequence: Synthetic oligonucleotide
gcaagaaucugagcaaaac

SEQ ID NO: 2799910 - RNA, 19 nt, Artificial Sequence
  Description of Artificial Sequence: Synthetic oligonucleotide
acguggacauugacauugc

SEQ ID NO: 2799911 - RNA, 19 nt, Artificial Sequence
  Description of Artificial Sequence: Synthetic oligonucleotide
agcuggcggaagaugcccc

SEQ ID NO: 2799912 - RNA, 19 nt, Artificial Sequence
  Description of Artificial Sequence: Synthetic oligonucleotide
ucgggcagcuggcggaaga

SEQ ID NO: 2799913 - RNA, 19 nt, Artificial Sequence
  Description of Artificial Sequence: Synthetic oligonucleotide
cagauacaaguguugauau

SEQ ID NO: 2799914 - RNA, 19 nt, Artificial Sequence
  Description of Artificial Sequence: Synthetic oligonucleotide
uagcgaagagucucauuuu

SEQ ID NO: 2799915 - RNA, 19 nt, Artificial Sequence
  Description of Artificial Sequence: Synthetic oligonucleotide
aguguugauaucggaugau

SEQ ID NO: 2799916 - RNA, 19 nt, Artificial Sequence
  Description of Artificial Sequence: Synthetic oligonucleotide
gcuugucauaacuccaguc

SEQ ID NO: 2799917 - RNA, 19 nt, Artificial Sequence
  Description of Artificial Sequence: Synthetic oligonucleotide
cuucaaguuccuucagcaa

SEQ ID NO: 2799918 - RNA, 19 nt, Artificial Sequence
  Description of Artificial Sequence: Synthetic oligonucleotide
gcgaagagucucauuuugg

SEQ ID NO: 2799919 - RNA, 19 nt, Artificial Sequence
  Description of Artificial Sequence: Synthetic oligonucleotide
cuccgggagacaaaagaaa

SEQ ID NO: 2799920 - RNA, 19 nt, Artificial Sequence
  Description of Artificial Sequence: Synthetic oligonucleotide
caaguuccuucagcaacag

SEQ ID NO: 2799921 - RNA, 19 nt, Artificial Sequence
  Description of Artificial Sequence: Synthetic oligonucleotide
uagguucccgucuccgguc

SEQ ID NO: 2799922 - RNA, 19 nt, Artificial Sequence
  Description of Artificial Sequence: Synthetic oligonucleotide
cauugcacaaggcaccgcu

SEQ ID NO: 2799923 - RNA, 19 nt, Artificial Sequence
  Description of Artificial Sequence: Synthetic oligonucleotide
ugcccauggccuugaccag

SEQ ID NO: 2799924 - RNA, 19 nt, Artificial Sequence
  Description of Artificial Sequence: Synthetic oligonucleotide
ggcagcuggcggaagaugc

SEQ ID NO: 2799925 - RNA, 19 nt, Artificial Sequence
  Description of Artificial Sequence: Synthetic oligonucleotide
cuccagucccucugggaug

SEQ ID NO: 2799926 - RNA, 19 nt, Artificial Sequence
  Description of Artificial Sequence: Synthetic oligonucleotide
gucauaacuccagucccuc

SEQ ID NO: 2799927 - RNA, 19 nt, Artificial Sequence
  Description of Artificial Sequence: Synthetic oligonucleotide
acaaggcaccgcugggaca

SEQ ID NO: 2799928 - RNA, 19 nt, Artificial Sequence
  Description of Artificial Sequence: Synthetic oligonucleotide
cacccgcuugcgcaggcgg

SEQ ID NO: 2799929 - RNA, 19 nt, Artificial Sequence
  Description of Artificial Sequence: Synthetic oligonucleotide
gcaccgcugggacacagag

SEQ ID NO: 2799930 - RNA, 19 nt, Artificial Sequence
  Description of Artificial Sequence: Synthetic oligonucleotide
gugguuuagcauagacgug

SEQ ID NO: 2799931 - RNA, 19 nt, Artificial Sequence
  Description of Artificial Sequence: Synthetic oligonucleotide
auugcacaaggcaccgcug

SEQ ID NO: 2799932 - RNA, 19 nt, Artificial Sequence
  Description of Artificial Sequence: Synthetic oligonucleotide
cuucagcaacagcggcugg

SEQ ID NO: 2799933 - RNA, 19 nt, Artificial Sequence
  Description of Artificial Sequence: Synthetic oligonucleotide
caggggagcucucgggcag

SEQ ID NO: 2799934 - RNA, 19 nt, Artificial Sequence
  Description of Artificial Sequence: Synthetic oligonucleotide
aaagagggcccgagcuucu

SEQ ID NO: 2799935 - RNA, 19 nt, Artificial Sequence
  Description of Artificial Sequence: Synthetic oligonucleotide
cacaaggcugauggucccg

SEQ ID NO: 2799936 - RNA, 19 nt, Artificial Sequence
  Description of Artificial Sequence: Synthetic oligonucleotide
acgcgcaguugcccauggc

SEQ ID NO: 2799937 - RNA, 19 nt, Artificial Sequence
  Description of Artificial Sequence: Synthetic oligonucleotide
uguccaguucccggcucag

SEQ ID NO: 2799938 - RNA, 19 nt, Artificial Sequence
  Description of Artificial Sequence: Synthetic oligonucleotide
gagaccagauacaaguguu

SEQ ID NO: 2799939 - RNA, 19 nt, Artificial Sequence
  Description of Artificial Sequence: Synthetic oligonucleotide
agucucauuuuggcaagaa

SEQ ID NO: 2799940 - RNA, 19 nt, Artificial Sequence
  Description of Artificial Sequence: Synthetic oligonucleotide
cagcuggcggaagaugccc

SEQ ID NO: 2799941 - RNA, 19 nt, Artificial Sequence
  Description of Artificial Sequence: Synthetic oligonucleotide
cggaagaugccccgcagcg

SEQ ID NO: 2799942 - RNA, 19 nt, Artificial Sequence
  Description of Artificial Sequence: Synthetic oligonucleotide
gaugccccgcagcgugucc

SEQ ID NO: 2799943 - RNA, 19 nt, Artificial Sequence
  Description of Artificial Sequence: Synthetic oligonucleotide
ggacauugacauugcacaa

SEQ ID NO: 2799944 - RNA, 19 nt, Artificial Sequence
  Description of Artificial Sequence: Synthetic oligonucleotide
gcuggcggaagaugccccg

SEQ ID NO: 2799945 - RNA, 19 nt, Artificial Sequence
  Description of Artificial Sequence: Synthetic oligonucleotide
cacgcgcaguugcccaugg

SEQ ID NO: 2799946 - RNA, 19 nt, Artificial Sequence
  Description of Artificial Sequence: Synthetic oligonucleotide
guguccuuuucauccccuc

SEQ ID NO: 2799947 - RNA, 19 nt, Artificial Sequence
  Description of Artificial Sequence: Synthetic oligonucleotide
uccacccgcuugcgcaggc

SEQ ID NO: 2799948 - RNA, 19 nt, Artificial Sequence
  Description of Artificial Sequence: Synthetic oligonucleotide
uggcgacauacaguacaca

SEQ ID NO: 2799949 - RNA, 19 nt, Artificial Sequence
  Description of Artificial Sequence: Synthetic oligonucleotide
guucccgucuccggucccg

SEQ ID NO: 2799950 - RNA, 19 nt, Artificial Sequence
  Description of Artificial Sequence: Synthetic oligonucleotide
cgacauacaguacacacaa

SEQ ID NO: 2799951 - RNA, 19 nt, Artificial Sequence
  Description of Artificial Sequence: Synthetic oligonucleotide
agaugccccgcagcguguc

SEQ ID NO: 2799952 - RNA, 19 nt, Artificial Sequence
  Description of Artificial Sequence: Synthetic oligonucleotide
auggaucgauugugcuuca

SEQ ID NO: 2799953 - RNA, 19 nt, Artificial Sequence
  Description of Artificial Sequence: Synthetic oligonucleotide
guguugauaucggaugaua

SEQ ID NO: 2799954 - RNA, 19 nt, Artificial Sequence
  Description of Artificial Sequence: Synthetic oligonucleotide
gggaagcuugucauaacuc

SEQ ID NO: 2799955 - RNA, 19 nt, Artificial Sequence
  Description of Artificial Sequence: Synthetic oligonucleotide
aggggagcucucgggcagc

SEQ ID NO: 2799956 - RNA, 19 nt, Artificial Sequence
  Description of Artificial Sequence: Synthetic oligonucleotide
uggccuugaccaggggagc

SEQ ID NO: 2799957 - RNA, 19 nt, Artificial Sequence
  Description of Artificial Sequence: Synthetic oligonucleotide
aucggaugauaaagcaaaa

SEQ ID NO: 2799958 - RNA, 19 nt, Artificial Sequence
  Description of Artificial Sequence: Synthetic oligonucleotide
agcucucgggcagcuggcg

SEQ ID NO: 2799959 - RNA, 19 nt, Artificial Sequence
  Description of Artificial Sequence: Synthetic oligonucleotide
ucccgguguccuuuucauc

SEQ ID NO: 2799960 - RNA, 19 nt, Artificial Sequence
  Description of Artificial Sequence: Synthetic oligonucleotide
gcagccgcgcgccucacgc

SEQ ID NO: 2799961 - RNA, 19 nt, Artificial Sequence
  Description of Artificial Sequence: Synthetic oligonucleotide
guguccaguucccggcuca

SEQ ID NO: 2799962 - RNA, 19 nt, Artificial Sequence
  Description of Artificial Sequence: Synthetic oligonucleotide
cagaaacuuagguucccgu

SEQ ID NO: 2799963 - RNA, 19 nt, Artificial Sequence
  Description of Artificial Sequence: Synthetic oligonucleotide
cucucgggcagcuggcgga

SEQ ID NO: 2799964 - RNA, 19 nt, Artificial Sequence
  Description of Artificial Sequence: Synthetic oligonucleotide
ccagauacaaguguugaua

SEQ ID NO: 2799965 - RNA, 19 nt, Artificial Sequence
  Description of Artificial Sequence: Synthetic oligonucleotide
cgcgcaguugcccauggcc

SEQ ID NO: 2799966 - RNA, 19 nt, Artificial Sequence
  Description of Artificial Sequence: Synthetic oligonucleotide
cccauggccuugaccaggg

SEQ ID NO: 2799967 - RNA, 19 nt, Artificial Sequence
  Description of Artificial Sequence: Synthetic oligonucleotide
ugguccuccgggagacaaa

SEQ ID NO: 2799968 - RNA, 19 nt, Artificial Sequence
  Description of Artificial Sequence: Synthetic oligonucleotide
ucacgcgcaguugcccaug

SEQ ID NO: 2799969 - RNA, 19 nt, Artificial Sequence
  Description of Artificial Sequence: Synthetic oligonucleotide
ccaaauaaaauggugguuu

SEQ ID NO: 2799970 - RNA, 19 nt, Artificial Sequence
  Description of Artificial Sequence: Synthetic oligonucleotide
ucccggcucagcugcucca

SEQ ID NO: 2799971 - RNA, 19 nt, Artificial Sequence
  Description of Artificial Sequence: Synthetic oligonucleotide
gcgacauacaguacacaca

SEQ ID NO: 2799972 - RNA, 19 nt, Artificial Sequence
  Description of Artificial Sequence: Synthetic oligonucleotide
aagaugccccgcagcgugu

SEQ ID NO: 2799973 - RNA, 19 nt, Artificial Sequence
  Description of Artificial Sequence: Synthetic oligonucleotide
gagucucauuuuggcaaga

SEQ ID NO: 2799974 - RNA, 19 nt, Artificial Sequence
  Description of Artificial Sequence: Synthetic oligonucleotide
gcucucgggcagcuggcgg

SEQ ID NO: 2799975 - RNA, 19 nt, Artificial Sequence
  Description of Artificial Sequence: Synthetic oligonucleotide
gccgcuagcgaagagucuc

SEQ ID NO: 2799976 - RNA, 19 nt, Artificial Sequence
  Description of Artificial Sequence: Synthetic oligonucleotide
agacguggacauugacauu

SEQ ID NO: 2799977 - RNA, 19 nt, Artificial Sequence
  Description of Artificial Sequence: Synthetic oligonucleotide
gagcucucgggcagcuggc

SEQ ID NO: 2799978 - RNA, 19 nt, Artificial Sequence
  Description of Artificial Sequence: Synthetic oligonucleotide
cuccggucccgcagccgcg

SEQ ID NO: 2799979 - RNA, 19 nt, Artificial Sequence
  Description of Artificial Sequence: Synthetic oligonucleotide
cuggcggaagaugccccgc

SEQ ID NO: 2799980 - RNA, 19 nt, Artificial Sequence
  Description of Artificial Sequence: Synthetic oligonucleotide
gauugugcuucaaguuccu

SEQ ID NO: 2799981 - RNA, 19 nt, Artificial Sequence
  Description of Artificial Sequence: Synthetic oligonucleotide
cuugaccaggggagcucuc

SEQ ID NO: 2799982 - RNA, 19 nt, Artificial Sequence
  Description of Artificial Sequence: Synthetic oligonucleotide
gcgccucacgcgcaguugc

SEQ ID NO: 2799983 - RNA, 19 nt, Artificial Sequence
  Description of Artificial Sequence: Synthetic oligonucleotide
gguuuagcauagacgugga

SEQ ID NO: 2799984 - RNA, 19 nt, Artificial Sequence
  Description of Artificial Sequence: Synthetic oligonucleotide
uggaucgauugugcuucaa

SEQ ID NO: 2799985 - RNA, 19 nt, Artificial Sequence
  Description of Artificial Sequence: Synthetic oligonucleotide
ggucccgguguccuuuuca

SEQ ID NO: 2799986 - RNA, 19 nt, Artificial Sequence
  Description of Artificial Sequence: Synthetic oligonucleotide
aacagcggcuggcgacaua

SEQ ID NO: 2799987 - RNA, 19 nt, Artificial Sequence
  Description of Artificial Sequence: Synthetic oligonucleotide
ccuccgggagacaaaagaa

SEQ ID NO: 2799988 - RNA, 19 nt, Artificial Sequence
  Description of Artificial Sequence: Synthetic oligonucleotide
auugugcuucaaguuccuu

SEQ ID NO: 2799989 - RNA, 19 nt, Artificial Sequence
  Description of Artificial Sequence: Synthetic oligonucleotide
cugcuccacccgcuugcgc

SEQ ID NO: 2799990 - RNA, 19 nt, Artificial Sequence
  Description of Artificial Sequence: Synthetic oligonucleotide
uucccgucuccggucccgc

SEQ ID NO: 2799991 - RNA, 19 nt, Artificial Sequence
  Description of Artificial Sequence: Synthetic oligonucleotide
gcccauggccuugaccagg

SEQ ID NO: 2799992 - RNA, 19 nt, Artificial Sequence
  Description of Artificial Sequence: Synthetic oligonucleotide
gcagcguguccaguucccg

SEQ ID NO: 2799993 - RNA, 19 nt, Artificial Sequence
  Description of Artificial Sequence: Synthetic oligonucleotide
ccgguguccuuuucauccc

SEQ ID NO: 2799994 - RNA, 19 nt, Artificial Sequence
  Description of Artificial Sequence: Synthetic oligonucleotide
ugauggucccgguguccuu

SEQ ID NO: 2799995 - RNA, 19 nt, Artificial Sequence
  Description of Artificial Sequence: Synthetic oligonucleotide
uccggucccgcagccgcgc

SEQ ID NO: 2799996 - RNA, 19 nt, Artificial Sequence
  Description of Artificial Sequence: Synthetic oligonucleotide
cagccgcgcgccucacgcg

SEQ ID NO: 2799997 - RNA, 19 nt, Artificial Sequence
  Description of Artificial Sequence: Synthetic oligonucleotide
uagcauagacguggacauu

SEQ ID NO: 2799998 - RNA, 19 nt, Artificial Sequence
  Description of Artificial Sequence: Synthetic oligonucleotide
ggauggaucgauugugcuu

SEQ ID NO: 2799999 - RNA, 19 nt, Artificial Sequence
  Description of Artificial Sequence: Synthetic oligonucleotide
gucuccggucccgcagccg

SEQ ID NO: 2800000 - RNA, 19 nt, Artificial Sequence
  Description of Artificial Sequence: Synthetic oligonucleotide
augccccgcagcgugucca

SEQ ID NO: 2800001 - RNA, 19 nt, Artificial Sequence
  Description of Artificial Sequence: Synthetic oligonucleotide
ucccucugggauggaucga

SEQ ID NO: 2800002 - RNA, 19 nt, Artificial Sequence
  Description of Artificial Sequence: Synthetic oligonucleotide
gggauggaucgauugugcu

SEQ ID NO: 2800003 - RNA, 19 nt, Artificial Sequence
  Description of Artificial Sequence: Synthetic oligonucleotide
aggcaccgcugggacacag

SEQ ID NO: 2800004 - RNA, 19 nt, Artificial Sequence
  Description of Artificial Sequence: Synthetic oligonucleotide
guccuccgggagacaaaag

SEQ ID NO: 2800005 - RNA, 19 nt, Artificial Sequence
  Description of Artificial Sequence: Synthetic oligonucleotide
gcagcuggcggaagaugcc

SEQ ID NO: 2800006 - RNA, 19 nt, Artificial Sequence
  Description of Artificial Sequence: Synthetic oligonucleotide
gggcccgagcuucuucccc

SEQ ID NO: 2800007 - RNA, 19 nt, Artificial Sequence
  Description of Artificial Sequence: Synthetic oligonucleotide
gguccuccgggagacaaaa

SEQ ID NO: 2800008 - RNA, 19 nt, Artificial Sequence
  Description of Artificial Sequence: Synthetic oligonucleotide
caccgcugggacacagaga

SEQ ID NO: 2800009 - RNA, 19 nt, Artificial Sequence
  Description of Artificial Sequence: Synthetic oligonucleotide
gauggucccgguguccuuu

SEQ ID NO: 2800010 - RNA, 19 nt, Artificial Sequence
  Description of Artificial Sequence: Synthetic oligonucleotide
cgcugggacacagagacca

SEQ ID NO: 2800011 - RNA, 19 nt, Artificial Sequence
  Description of Artificial Sequence: Synthetic oligonucleotide
ggcaagaaucugagcaaaa

SEQ ID NO: 2800012 - RNA, 19 nt, Artificial Sequence
  Description of Artificial Sequence: Synthetic oligonucleotide
gcaacagcggcuggcgaca

SEQ ID NO: 2800013 - RNA, 19 nt, Artificial Sequence
  Description of Artificial Sequence: Synthetic oligonucleotide
gcaguugcccauggccuug

SEQ ID NO: 2800014 - RNA, 19 nt, Artificial Sequence
  Description of Artificial Sequence: Synthetic oligonucleotide
auggucccgguguccuuuu

SEQ ID NO: 2800015 - RNA, 19 nt, Artificial Sequence
  Description of Artificial Sequence: Synthetic oligonucleotide
gcugcuccacccgcuugcg

SEQ ID NO: 2800016 - RNA, 19 nt, Artificial Sequence
  Description of Artificial Sequence: Synthetic oligonucleotide
gucccgguguccuuuucau

SEQ ID NO: 2800017 - RNA, 19 nt, Artificial Sequence
  Description of Artificial Sequence: Synthetic oligonucleotide
ggcugauggucccgguguc

SEQ ID NO: 2800018 - RNA, 19 nt, Artificial Sequence
  Description of Artificial Sequence: Synthetic oligonucleotide
gcaaaauauuugggaagcu

SEQ ID NO: 2800019 - RNA, 19 nt, Artificial Sequence
  Description of Artificial Sequence: Synthetic oligonucleotide
gcauagacguggacauuga

SEQ ID NO: 2800020 - RNA, 19 nt, Artificial Sequence
  Description of Artificial Sequence: Synthetic oligonucleotide
cugauggucccgguguccu

SEQ ID NO: 2800021 - RNA, 19 nt, Artificial Sequence
  Description of Artificial Sequence: Synthetic oligonucleotide
ccgcagcguguccaguucc

SEQ ID NO: 2800022 - RNA, 19 nt, Artificial Sequence
  Description of Artificial Sequence: Synthetic oligonucleotide
aaggcaccgcugggacaca

SEQ ID NO: 2800023 - RNA, 19 nt, Artificial Sequence
  Description of Artificial Sequence: Synthetic oligonucleotide
gggacacagagaccagaua

SEQ ID NO: 2800024 - RNA, 19 nt, Artificial Sequence
  Description of Artificial Sequence: Synthetic oligonucleotide
cagcaacagcggcuggcga

SEQ ID NO: 2800025 - RNA, 19 nt, Artificial Sequence
  Description of Artificial Sequence: Synthetic oligonucleotide
gcacaaggcaccgcuggga

SEQ ID NO: 2800026 - RNA, 19 nt, Artificial Sequence
  Description of Artificial Sequence: Synthetic oligonucleotide
ggaaagagggcccgagcuu

SEQ ID NO: 2800027 - RNA, 19 nt, Artificial Sequence
  Description of Artificial Sequence: Synthetic oligonucleotide
cccgucuccggucccgcag

SEQ ID NO: 2800028 - RNA, 19 nt, Artificial Sequence
  Description of Artificial Sequence: Synthetic oligonucleotide
gguucccgucuccgguccc

SEQ ID NO: 2800029 - RNA, 19 nt, Artificial Sequence
  Description of Artificial Sequence: Synthetic oligonucleotide
agccgcuagcgaagagucu

SEQ ID NO: 2800030 - RNA, 19 nt, Artificial Sequence
  Description of Artificial Sequence: Synthetic oligonucleotide
cgcagcguguccaguuccc

SEQ ID NO: 2800031 - RNA, 19 nt, Artificial Sequence
  Description of Artificial Sequence: Synthetic oligonucleotide
gccucacgcgcaguugccc

SEQ ID NO: 2800032 - RNA, 19 nt, Artificial Sequence
  Description of Artificial Sequence: Synthetic oligonucleotide
guucccggcucagcugcuc

SEQ ID NO: 2800033 - RNA, 19 nt, Artificial Sequence
  Description of Artificial Sequence: Synthetic oligonucleotide
ccaggggagcucucgggca

SEQ ID NO: 2800034 - RNA, 19 nt, Artificial Sequence
  Description of Artificial Sequence: Synthetic oligonucleotide
ccucacgcgcaguugccca

SEQ ID NO: 2800035 - RNA, 19 nt, Artificial Sequence
  Description of Artificial Sequence: Synthetic oligonucleotide
gggcagcuggcggaagaug

SEQ ID NO: 2800036 - RNA, 19 nt, Artificial Sequence
  Description of Artificial Sequence: Synthetic oligonucleotide
cggcuggcgacauacagua

SEQ ID NO: 2800037 - RNA, 19 nt, Artificial Sequence
  Description of Artificial Sequence: Synthetic oligonucleotide
cgguguccuuuucaucccc

SEQ ID NO: 2800038 - RNA, 19 nt, Artificial Sequence
  Description of Artificial Sequence: Synthetic oligonucleotide
ucccgcagccgcgcgccuc

SEQ ID NO: 2800039 - RNA, 19 nt, Artificial Sequence
  Description of Artificial Sequence: Synthetic oligonucleotide
cccgcagcguguccaguuc

SEQ ID NO: 2800040 - RNA, 19 nt, Artificial Sequence
  Description of Artificial Sequence: Synthetic oligonucleotide
caaggcugauggucccggu

SEQ ID NO: 2800041 - RNA, 19 nt, Artificial Sequence
  Description of Artificial Sequence: Synthetic oligonucleotide
ccggcucagcugcuccacc

SEQ ID NO: 2800042 - RNA, 19 nt, Artificial Sequence
  Description of Artificial Sequence: Synthetic oligonucleotide
caguugcccauggccuuga

SEQ ID NO: 2800043 - RNA, 19 nt, Artificial Sequence
  Description of Artificial Sequence: Synthetic oligonucleotide
gcgcaguugcccauggccu

SEQ ID NO: 2800044 - RNA, 19 nt, Artificial Sequence
  Description of Artificial Sequence: Synthetic oligonucleotide
gguguccuuuucauccccu

SEQ ID NO: 2800045 - RNA, 19 nt, Artificial Sequence
  Description of Artificial Sequence: Synthetic oligonucleotide
cagcggcuggcgacauaca

SEQ ID NO: 2800046 - RNA, 19 nt, Artificial Sequence
  Description of Artificial Sequence: Synthetic oligonucleotide
gccuugaccaggggagcuc

SEQ ID NO: 2800047 - RNA, 19 nt, Artificial Sequence
  Description of Artificial Sequence: Synthetic oligonucleotide
ggaagaugccccgcagcgu

SEQ ID NO: 2800048 - RNA, 19 nt, Artificial Sequence
  Description of Artificial Sequence: Synthetic oligonucleotide
cucacgcgcaguugcccau

SEQ ID NO: 2800049 - RNA, 19 nt, Artificial Sequence
  Description of Artificial Sequence: Synthetic oligonucleotide
ccgcuagcgaagagucuca

SEQ ID NO: 2800050 - RNA, 19 nt, Artificial Sequence
  Description of Artificial Sequence: Synthetic oligonucleotide
cguggacauugacauugca

SEQ ID NO: 2800051 - RNA, 19 nt, Artificial Sequence
  Description of Artificial Sequence: Synthetic oligonucleotide
gcuagcgaagagucucauu

SEQ ID NO: 2800052 - RNA, 19 nt, Artificial Sequence
  Description of Artificial Sequence: Synthetic oligonucleotide
cgccucacgcgcaguugcc

SEQ ID NO: 2800053 - RNA, 19 nt, Artificial Sequence
  Description of Artificial Sequence: Synthetic oligonucleotide
ggcuggcgacauacaguac

SEQ ID NO: 2800054 - RNA, 19 nt, Artificial Sequence
  Description of Artificial Sequence: Synthetic oligonucleotide
gcggcuggcgacauacagu

SEQ ID NO: 2800055 - RNA, 19 nt, Artificial Sequence
  Description of Artificial Sequence: Synthetic oligonucleotide
cccagccgcuagcgaagag

SEQ ID NO: 2800056 - RNA, 19 nt, Artificial Sequence
  Description of Artificial Sequence: Synthetic oligonucleotide
cguguccaguucccggcuc

SEQ ID NO: 2800057 - RNA, 19 nt, Artificial Sequence
  Description of Artificial Sequence: Synthetic oligonucleotide
ccagccgcuagcgaagagu

SEQ ID NO: 2800058 - RNA, 19 nt, Artificial Sequence
  Description of Artificial Sequence: Synthetic oligonucleotide
ccacccgcuugcgcaggcg

SEQ ID NO: 2800059 - RNA, 19 nt, Artificial Sequence
  Description of Artificial Sequence: Synthetic oligonucleotide
cgucuccggucccgcagcc

SEQ ID NO: 2800060 - RNA, 19 nt, Artificial Sequence
  Description of Artificial Sequence: Synthetic oligonucleotide
gggagcucucgggcagcug

SEQ ID NO: 2800061 - RNA, 19 nt, Artificial Sequence
  Description of Artificial Sequence: Synthetic oligonucleotide
ggcaccgcugggacacaga

SEQ ID NO: 2800062 - RNA, 19 nt, Artificial Sequence
  Description of Artificial Sequence: Synthetic oligonucleotide
cccggcucagcugcuccac

SEQ ID NO: 2800063 - RNA, 19 nt, Artificial Sequence
  Description of Artificial Sequence: Synthetic oligonucleotide
caguacacacaaggcugau

SEQ ID NO: 2800064 - RNA, 19 nt, Artificial Sequence
  Description of Artificial Sequence: Synthetic oligonucleotide
gcguguccaguucccggcu

SEQ ID NO: 2800065 - RNA, 19 nt, Artificial Sequence
  Description of Artificial Sequence: Synthetic oligonucleotide
ccggucccgcagccgcgcg

SEQ ID NO: 2800066 - RNA, 19 nt, Artificial Sequence
  Description of Artificial Sequence: Synthetic oligonucleotide
ccuugaccaggggagcucu

SEQ ID NO: 2800067 - RNA, 19 nt, Artificial Sequence
  Description of Artificial Sequence: Synthetic oligonucleotide
cagucccucugggauggau

SEQ ID NO: 2800068 - RNA, 19 nt, Artificial Sequence
  Description of Artificial Sequence: Synthetic oligonucleotide
cgcagccgcgcgccucacg

SEQ ID NO: 2800069 - RNA, 19 nt, Artificial Sequence
  Description of Artificial Sequence: Synthetic oligonucleotide
ccgcgcgccucacgcgcag

SEQ ID NO: 2800070 - RNA, 19 nt, Artificial Sequence
  Description of Artificial Sequence: Synthetic oligonucleotide
cggucccgcagccgcgcgc

SEQ ID NO: 2800071 - RNA, 19 nt, Artificial Sequence
  Description of Artificial Sequence: Synthetic oligonucleotide
cgcgccucacgcgcaguug

SEQ ID NO: 2800072 - RNA, 19 nt, Artificial Sequence
  Description of Artificial Sequence: Synthetic oligonucleotide
cccucugggauggaucgau

SEQ ID NO: 2800073 - RNA, 19 nt, Artificial Sequence
  Description of Artificial Sequence: Synthetic oligonucleotide
caacagcggcuggcgacau

SEQ ID NO: 2800074 - RNA, 19 nt, Artificial Sequence
  Description of Artificial Sequence: Synthetic oligonucleotide
ggggagcucucgggcagcu

SEQ ID NO: 2800075 - RNA, 19 nt, Artificial Sequence
  Description of Artificial Sequence: Synthetic oligonucleotide
gccgcgcgccucacgcgca

SEQ ID NO: 2800076 - RNA, 19 nt, Artificial Sequence
  Description of Artificial Sequence: Synthetic oligonucleotide
ccccagccgcuagcgaaga

SEQ ID NO: 2800077 - RNA, 19 nt, Artificial Sequence
  Description of Artificial Sequence: Synthetic oligonucleotide
ccucugggauggaucgauu

SEQ ID NO: 2800078 - RNA, 19 nt, Artificial Sequence
  Description of Artificial Sequence: Synthetic oligonucleotide
gucccgcagccgcgcgccu

SEQ ID NO: 2800079 - RNA, 19 nt, Artificial Sequence
  Description of Artificial Sequence: Synthetic oligonucleotide
cgcaguugcccauggccuu

SEQ ID NO: 2800080 - RNA, 19 nt, Artificial Sequence
  Description of Artificial Sequence: Synthetic oligonucleotide
ccccgcagcguguccaguu

SEQ ID NO: 2800081 - RNA, 19 nt, Artificial Sequence
  Description of Artificial Sequence: Synthetic oligonucleotide
gcgcgccucacgcgcaguu

SEQ ID NO: 2800082 - RNA, 19 nt, Artificial Sequence
  Description of Artificial Sequence: Synthetic oligonucleotide
ccagucccucugggaugga

SEQ ID NO: 2800083 - RNA, 19 nt, Artificial Sequence
  Description of Artificial Sequence: Synthetic oligonucleotide
ccgcagccgcgcgccucac

SEQ ID NO: 2800084 - RNA, 19 nt, Artificial Sequence
  Description of Artificial Sequence: Synthetic oligonucleotide
cgcuagcgaagagucucau

SEQ ID NO: 2800085 - RNA, 19 nt, Artificial Sequence
  Description of Artificial Sequence: Synthetic oligonucleotide
cgggcagcuggcggaagau

SEQ ID NO: 2800086 - RNA, 19 nt, Artificial Sequence
  Description of Artificial Sequence: Synthetic oligonucleotide
cgcgcgccucacgcgcagu

SEQ ID NO: 2800087 - RNA, 19 nt, Artificial Sequence
  Description of Artificial Sequence: Synthetic oligonucleotide
aauaaauauauuuuguagu

SEQ ID NO: 2800088 - RNA, 19 nt, Artificial Sequence
  Description of Artificial Sequence: Synthetic oligonucleotide
uuuucuaaggcccaacugg

SEQ ID NO: 2800089 - RNA, 19 nt, Artificial Sequence
  Description of Artificial Sequence: Synthetic oligonucleotide
auauauauugcuuuauuuc

SEQ ID NO: 2800090 - RNA, 19 nt, Artificial Sequence
  Description of Artificial Sequence: Synthetic oligonucleotide
uuauaauaaauauauuuug

SEQ ID NO: 2800091 - RNA, 19 nt, Artificial Sequence
  Description of Artificial Sequence: Synthetic oligonucleotide
aagaaaaggacuucuuugg

SEQ ID NO: 2800092 - RNA, 19 nt, Artificial Sequence
  Description of Artificial Sequence: Synthetic oligonucleotide
aagaagauucagcacaugg

SEQ ID NO: 2800093 - RNA, 19 nt, Artificial Sequence
  Description of Artificial Sequence: Synthetic oligonucleotide
aagguaaagaccaaagccc

SEQ ID NO: 2800094 - RNA, 19 nt, Artificial Sequence
  Description of Artificial Sequence: Synthetic oligonucleotide
aaauauauuuuguaguaca

SEQ ID NO: 2800095 - RNA, 19 nt, Artificial Sequence
  Description of Artificial Sequence: Synthetic oligonucleotide
guuaaucucaaagagaagg

SEQ ID NO: 2800096 - RNA, 19 nt, Artificial Sequence
  Description of Artificial Sequence: Synthetic oligonucleotide
aaaacacacacacaagaag

SEQ ID NO: 2800097 - RNA, 19 nt, Artificial Sequence
  Description of Artificial Sequence: Synthetic oligonucleotide
uauaauaaauauauuuugu

SEQ ID NO: 2800098 - RNA, 19 nt, Artificial Sequence
  Description of Artificial Sequence: Synthetic oligonucleotide
aaagaccaaagcccgaggc

SEQ ID NO: 2800099 - RNA, 19 nt, Artificial Sequence
  Description of Artificial Sequence: Synthetic oligonucleotide
ugugguuaaucucaaagag

SEQ ID NO: 2800100 - RNA, 19 nt, Artificial Sequence
  Description of Artificial Sequence: Synthetic oligonucleotide
uauauauugcuuuauuuca

SEQ ID NO: 2800101 - RNA, 19 nt, Artificial Sequence
  Description of Artificial Sequence: Synthetic oligonucleotide
ugcaagaaaguacagaugu

SEQ ID NO: 2800102 - RNA, 19 nt, Artificial Sequence
  Description of Artificial Sequence: Synthetic oligonucleotide
aaagaaaaguuucugugcu

SEQ ID NO: 2800103 - RNA, 19 nt, Artificial Sequence
  Description of Artificial Sequence: Synthetic oligonucleotide
uauuuuguaguacaaagaa

SEQ ID NO: 2800104 - RNA, 19 nt, Artificial Sequence
  Description of Artificial Sequence: Synthetic oligonucleotide
acauaucuuuuccacaucc

SEQ ID NO: 2800105 - RNA, 19 nt, Artificial Sequence
  Description of Artificial Sequence: Synthetic oligonucleotide
aagaacuauaauuauaaua

SEQ ID NO: 2800106 - RNA, 19 nt, Artificial Sequence
  Description of Artificial Sequence: Synthetic oligonucleotide
aaugcaaaggguuuguuaa

SEQ ID NO: 2800107 - RNA, 19 nt, Artificial Sequence
  Description of Artificial Sequence: Synthetic oligonucleotide
agaacuauaauuauaauaa

SEQ ID NO: 2800108 - RNA, 19 nt, Artificial Sequence
  Description of Artificial Sequence: Synthetic oligonucleotide
cauauuucauauuucagug

SEQ ID NO: 2800109 - RNA, 19 nt, Artificial Sequence
  Description of Artificial Sequence: Synthetic oligonucleotide
aaaaggacuucuuuggcca

SEQ ID NO: 2800110 - RNA, 19 nt, Artificial Sequence
  Description of Artificial Sequence: Synthetic oligonucleotide
uauuucauauuucauauuu

SEQ ID NO: 2800111 - RNA, 19 nt, Artificial Sequence
  Description of Artificial Sequence: Synthetic oligonucleotide
ugguuaaucucaaagagaa

SEQ ID NO: 2800112 - RNA, 19 nt, Artificial Sequence
  Description of Artificial Sequence: Synthetic oligonucleotide
acaaagaaaaguuucugug

SEQ ID NO: 2800113 - RNA, 19 nt, Artificial Sequence
  Description of Artificial Sequence: Synthetic oligonucleotide
cauuggaagagcaaggagc

SEQ ID NO: 2800114 - RNA, 19 nt, Artificial Sequence
  Description of Artificial Sequence: Synthetic oligonucleotide
ugugcugcaagaaaguaca

SEQ ID NO: 2800115 - RNA, 19 nt, Artificial Sequence
  Description of Artificial Sequence: Synthetic oligonucleotide
ucaaggaagaacuauaauu

SEQ ID NO: 2800116 - RNA, 19 nt, Artificial Sequence
  Description of Artificial Sequence: Synthetic oligonucleotide
aaaauuccaguccuaugag

SEQ ID NO: 2800117 - RNA, 19 nt, Artificial Sequence
  Description of Artificial Sequence: Synthetic oligonucleotide
uuucugugcugcaagaaag

SEQ ID NO: 2800118 - RNA, 19 nt, Artificial Sequence
  Description of Artificial Sequence: Synthetic oligonucleotide
gauaacccugcaaagaagg

SEQ ID NO: 2800119 - RNA, 19 nt, Artificial Sequence
  Description of Artificial Sequence: Synthetic oligonucleotide
agaaaaguuucugugcugc

SEQ ID NO: 2800120 - RNA, 19 nt, Artificial Sequence
  Description of Artificial Sequence: Synthetic oligonucleotide
ugcaaagaagguaaagacc

SEQ ID NO: 2800121 - RNA, 19 nt, Artificial Sequence
  Description of Artificial Sequence: Synthetic oligonucleotide
aaguacagaugucacugac

SEQ ID NO: 2800122 - RNA, 19 nt, Artificial Sequence
  Description of Artificial Sequence: Synthetic oligonucleotide
gaaaguacagaugucacug

SEQ ID NO: 2800123 - RNA, 19 nt, Artificial Sequence
  Description of Artificial Sequence: Synthetic oligonucleotide
aagacaagguucugcaguc

SEQ ID NO: 2800124 - RNA, 19 nt, Artificial Sequence
  Description of Artificial Sequence: Synthetic oligonucleotide
uuuguaguacaaagaaaag

SEQ ID NO: 2800125 - RNA, 19 nt, Artificial Sequence
  Description of Artificial Sequence: Synthetic oligonucleotide
aagagcaaggagcacacug

SEQ ID NO: 2800126 - RNA, 19 nt, Artificial Sequence
  Description of Artificial Sequence: Synthetic oligonucleotide
agaaaaggacuucuuuggc

SEQ ID NO: 2800127 - RNA, 19 nt, Artificial Sequence
  Description of Artificial Sequence: Synthetic oligonucleotide
caaagaaaaguuucugugc

SEQ ID NO: 2800128 - RNA, 19 nt, Artificial Sequence
  Description of Artificial Sequence: Synthetic oligonucleotide
acaaaacacacacacaaga

SEQ ID NO: 2800129 - RNA, 19 nt, Artificial Sequence
  Description of Artificial Sequence: Synthetic oligonucleotide
uuuuccacauccuaagaca

SEQ ID NO: 2800130 - RNA, 19 nt, Artificial Sequence
  Description of Artificial Sequence: Synthetic oligonucleotide
auaaauauauuuuguagua

SEQ ID NO: 2800131 - RNA, 19 nt, Artificial Sequence
  Description of Artificial Sequence: Synthetic oligonucleotide
uccuaugagaggauaaccc

SEQ ID NO: 2800132 - RNA, 19 nt, Artificial Sequence
  Description of Artificial Sequence: Synthetic oligonucleotide
uaagacaagguucugcagu

SEQ ID NO: 2800133 - RNA, 19 nt, Artificial Sequence
  Description of Artificial Sequence: Synthetic oligonucleotide
gaaaaggacuucuuuggcc

SEQ ID NO: 2800134 - RNA, 19 nt, Artificial Sequence
  Description of Artificial Sequence: Synthetic oligonucleotide
uucagugucacuagucaag

SEQ ID NO: 2800135 - RNA, 19 nt, Artificial Sequence
  Description of Artificial Sequence: Synthetic oligonucleotide
uuaaucucaaagagaaggu

SEQ ID NO: 2800136 - RNA, 19 nt, Artificial Sequence
  Description of Artificial Sequence: Synthetic oligonucleotide
uccuuauucccacugacac

SEQ ID NO: 2800137 - RNA, 19 nt, Artificial Sequence
  Description of Artificial Sequence: Synthetic oligonucleotide
aagaaaguacagaugucac

SEQ ID NO: 2800138 - RNA, 19 nt, Artificial Sequence
  Description of Artificial Sequence: Synthetic oligonucleotide
aacuauaauuauaauaaau

SEQ ID NO: 2800139 - RNA, 19 nt, Artificial Sequence
  Description of Artificial Sequence: Synthetic oligonucleotide
uaugagaggauaacccugc

SEQ ID NO: 2800140 - RNA, 19 nt, Artificial Sequence
  Description of Artificial Sequence: Synthetic oligonucleotide
uuuggccagggcuacaggg

SEQ ID NO: 2800141 - RNA, 19 nt, Artificial Sequence
  Description of Artificial Sequence: Synthetic oligonucleotide
uacaaagaaaaguuucugu

SEQ ID NO: 2800142 - RNA, 19 nt, Artificial Sequence
  Description of Artificial Sequence: Synthetic oligonucleotide
ucauauuucagugucacua

SEQ ID NO: 2800143 - RNA, 19 nt, Artificial Sequence
  Description of Artificial Sequence: Synthetic oligonucleotide
gauacuuggguaaaucccc

SEQ ID NO: 2800144 - RNA, 19 nt, Artificial Sequence
  Description of Artificial Sequence: Synthetic oligonucleotide
ugguacauggcuuuuggca

SEQ ID NO: 2800145 - RNA, 19 nt, Artificial Sequence
  Description of Artificial Sequence: Synthetic oligonucleotide
acuauaauuauaauaaaua

SEQ ID NO: 2800146 - RNA, 19 nt, Artificial Sequence
  Description of Artificial Sequence: Synthetic oligonucleotide
uccacauccuaagacaagg

SEQ ID NO: 2800147 - RNA, 19 nt, Artificial Sequence
  Description of Artificial Sequence: Synthetic oligonucleotide
acaggcauguucugggagc

SEQ ID NO: 2800148 - RNA, 19 nt, Artificial Sequence
  Description of Artificial Sequence: Synthetic oligonucleotide
aagaagguaaagaccaaag

SEQ ID NO: 2800149 - RNA, 19 nt, Artificial Sequence
  Description of Artificial Sequence: Synthetic oligonucleotide
aaucucaaagagaagguga

SEQ ID NO: 2800150 - RNA, 19 nt, Artificial Sequence
  Description of Artificial Sequence: Synthetic oligonucleotide
ucaaagagaaggugacagg

SEQ ID NO: 2800151 - RNA, 19 nt, Artificial Sequence
  Description of Artificial Sequence: Synthetic oligonucleotide
agggcuacaggguggauac

SEQ ID NO: 2800152 - RNA, 19 nt, Artificial Sequence
  Description of Artificial Sequence: Synthetic oligonucleotide
cuuauucccacugacacac

SEQ ID NO: 2800153 - RNA, 19 nt, Artificial Sequence
  Description of Artificial Sequence: Synthetic oligonucleotide
uggauacuuggguaaaucc

SEQ ID NO: 2800154 - RNA, 19 nt, Artificial Sequence
  Description of Artificial Sequence: Synthetic oligonucleotide
uuguaguacaaagaaaagu

SEQ ID NO: 2800155 - RNA, 19 nt, Artificial Sequence
  Description of Artificial Sequence: Synthetic oligonucleotide
ucuaaggcccaacugguac

SEQ ID NO: 2800156 - RNA, 19 nt, Artificial Sequence
  Description of Artificial Sequence: Synthetic oligonucleotide
cugcaaagaagguaaagac

SEQ ID NO: 2800157 - RNA, 19 nt, Artificial Sequence
  Description of Artificial Sequence: Synthetic oligonucleotide
aaaggguuuguuaauaaaa

SEQ ID NO: 2800158 - RNA, 19 nt, Artificial Sequence
  Description of Artificial Sequence: Synthetic oligonucleotide
auuucagugucacuaguca

SEQ ID NO: 2800159 - RNA, 19 nt, Artificial Sequence
  Description of Artificial Sequence: Synthetic oligonucleotide
ucauuggaagagcaaggag

SEQ ID NO: 2800160 - RNA, 19 nt, Artificial Sequence
  Description of Artificial Sequence: Synthetic oligonucleotide
acauccuaagacaagguuc

SEQ ID NO: 2800161 - RNA, 19 nt, Artificial Sequence
  Description of Artificial Sequence: Synthetic oligonucleotide
aucuuuuccacauccuaag

SEQ ID NO: 2800162 - RNA, 19 nt, Artificial Sequence
  Description of Artificial Sequence: Synthetic oligonucleotide
cucaaagagaaggugacag

SEQ ID NO: 2800163 - RNA, 19 nt, Artificial Sequence
  Description of Artificial Sequence: Synthetic oligonucleotide
caaagagaaggugacaggc

SEQ ID NO: 2800164 - RNA, 19 nt, Artificial Sequence
  Description of Artificial Sequence: Synthetic oligonucleotide
uaucuuuuccacauccuaa

SEQ ID NO: 2800165 - RNA, 19 nt, Artificial Sequence
  Description of Artificial Sequence: Synthetic oligonucleotide
aaaugcaaaggguuuguua

SEQ ID NO: 2800166 - RNA, 19 nt, Artificial Sequence
  Description of Artificial Sequence: Synthetic oligonucleotide
aagaaaaguuucugugcug

SEQ ID NO: 2800167 - RNA, 19 nt, Artificial Sequence
  Description of Artificial Sequence: Synthetic oligonucleotide
aaauuccaguccuaugaga

SEQ ID NO: 2800168 - RNA, 19 nt, Artificial Sequence
  Description of Artificial Sequence: Synthetic oligonucleotide
uaaauauauuuuguaguac

SEQ ID NO: 2800169 - RNA, 19 nt, Artificial Sequence
  Description of Artificial Sequence: Synthetic oligonucleotide
acugguacauggcuuuugg

SEQ ID NO: 2800170 - RNA, 19 nt, Artificial Sequence
  Description of Artificial Sequence: Synthetic oligonucleotide
uucagcacaugguaaauaa

SEQ ID NO: 2800171 - RNA, 19 nt, Artificial Sequence
  Description of Artificial Sequence: Synthetic oligonucleotide
acuccuuauucccacugac

SEQ ID NO: 2800172 - RNA, 19 nt, Artificial Sequence
  Description of Artificial Sequence: Synthetic oligonucleotide
cauauuucagugucacuag

SEQ ID NO: 2800173 - RNA, 19 nt, Artificial Sequence
  Description of Artificial Sequence: Synthetic oligonucleotide
caaggaagaacuauaauua

SEQ ID NO: 2800174 - RNA, 19 nt, Artificial Sequence
  Description of Artificial Sequence: Synthetic oligonucleotide
uaaagaccaaagcccgagg

SEQ ID NO: 2800175 - RNA, 19 nt, Artificial Sequence
  Description of Artificial Sequence: Synthetic oligonucleotide
uuggguaaauccccuacca

SEQ ID NO: 2800176 - RNA, 19 nt, Artificial Sequence
  Description of Artificial Sequence: Synthetic oligonucleotide
acacaagaagauucagcac

SEQ ID NO: 2800177 - RNA, 19 nt, Artificial Sequence
  Description of Artificial Sequence: Synthetic oligonucleotide
uuucuaaggcccaacuggu

SEQ ID NO: 2800178 - RNA, 19 nt, Artificial Sequence
  Description of Artificial Sequence: Synthetic oligonucleotide
gagaggauaacccugcaaa

SEQ ID NO: 2800179 - RNA, 19 nt, Artificial Sequence
  Description of Artificial Sequence: Synthetic oligonucleotide
agugucacuagucaaggaa

SEQ ID NO: 2800180 - RNA, 19 nt, Artificial Sequence
  Description of Artificial Sequence: Synthetic oligonucleotide
uauuucagugucacuaguc

SEQ ID NO: 2800181 - RNA, 19 nt, Artificial Sequence
  Description of Artificial Sequence: Synthetic oligonucleotide
gaaggugacaggcauguuc

SEQ ID NO: 2800182 - RNA, 19 nt, Artificial Sequence
  Description of Artificial Sequence: Synthetic oligonucleotide
cuuuuccacauccuaagac

SEQ ID NO: 2800183 - RNA, 19 nt, Artificial Sequence
  Description of Artificial Sequence: Synthetic oligonucleotide
uacaggguggauacuuggg

SEQ ID NO: 2800184 - RNA, 19 nt, Artificial Sequence
  Description of Artificial Sequence: Synthetic oligonucleotide
ucagugucacuagucaagg

SEQ ID NO: 2800185 - RNA, 19 nt, Artificial Sequence
  Description of Artificial Sequence: Synthetic oligonucleotide
uuuccacauccuaagacaa

SEQ ID NO: 2800186 - RNA, 19 nt, Artificial Sequence
  Description of Artificial Sequence: Synthetic oligonucleotide
acacacaagaagauucagc

SEQ ID NO: 2800187 - RNA, 19 nt, Artificial Sequence
  Description of Artificial Sequence: Synthetic oligonucleotide
gaagauucagcacauggua

SEQ ID NO: 2800188 - RNA, 19 nt, Artificial Sequence
  Description of Artificial Sequence: Synthetic oligonucleotide
uaaucucaaagagaaggug

SEQ ID NO: 2800189 - RNA, 19 nt, Artificial Sequence
  Description of Artificial Sequence: Synthetic oligonucleotide
agaggauaacccugcaaag

SEQ ID NO: 2800190 - RNA, 19 nt, Artificial Sequence
  Description of Artificial Sequence: Synthetic oligonucleotide
cuauaauuauaauaaauau

SEQ ID NO: 2800191 - RNA, 19 nt, Artificial Sequence
  Description of Artificial Sequence: Synthetic oligonucleotide
cuaugagaggauaacccug

SEQ ID NO: 2800192 - RNA, 19 nt, Artificial Sequence
  Description of Artificial Sequence: Synthetic oligonucleotide
aagaccaaagcccgaggca

SEQ ID NO: 2800193 - RNA, 19 nt, Artificial Sequence
  Description of Artificial Sequence: Synthetic oligonucleotide
aggcccaacugguacaugg

SEQ ID NO: 2800194 - RNA, 19 nt, Artificial Sequence
  Description of Artificial Sequence: Synthetic oligonucleotide
aaauccccuaccacacucc

SEQ ID NO: 2800195 - RNA, 19 nt, Artificial Sequence
  Description of Artificial Sequence: Synthetic oligonucleotide
auuucauauuucauauuuc

SEQ ID NO: 2800196 - RNA, 19 nt, Artificial Sequence
  Description of Artificial Sequence: Synthetic oligonucleotide
aaaguacagaugucacuga

SEQ ID NO: 2800197 - RNA, 19 nt, Artificial Sequence
  Description of Artificial Sequence: Synthetic oligonucleotide
ugucacuagucaaggaaga

SEQ ID NO: 2800198 - RNA, 19 nt, Artificial Sequence
  Description of Artificial Sequence: Synthetic oligonucleotide
agaaaguacagaugucacu

SEQ ID NO: 2800199 - RNA, 19 nt, Artificial Sequence
  Description of Artificial Sequence: Synthetic oligonucleotide
uaaauccccuaccacacuc

SEQ ID NO: 2800200 - RNA, 19 nt, Artificial Sequence
  Description of Artificial Sequence: Synthetic oligonucleotide
acagaugucacugacuuaa

SEQ ID NO: 2800201 - RNA, 19 nt, Artificial Sequence
  Description of Artificial Sequence: Synthetic oligonucleotide
aucucaaagagaaggugac

SEQ ID NO: 2800202 - RNA, 19 nt, Artificial Sequence
  Description of Artificial Sequence: Synthetic oligonucleotide
gugacaggcauguucuggg

SEQ ID NO: 2800203 - RNA, 19 nt, Artificial Sequence
  Description of Artificial Sequence: Synthetic oligonucleotide
aguacaaagaaaaguuucu

SEQ ID NO: 2800204 - RNA, 19 nt, Artificial Sequence
  Description of Artificial Sequence: Synthetic oligonucleotide
gcugugguuaaucucaaag

SEQ ID NO: 2800205 - RNA, 19 nt, Artificial Sequence
  Description of Artificial Sequence: Synthetic oligonucleotide
gguacauggcuuuuggcag

SEQ ID NO: 2800206 - RNA, 19 nt, Artificial Sequence
  Description of Artificial Sequence: Synthetic oligonucleotide
agguaaagaccaaagcccg

SEQ ID NO: 2800207 - RNA, 19 nt, Artificial Sequence
  Description of Artificial Sequence: Synthetic oligonucleotide
uauauugcuuuauuucaua

SEQ ID NO: 2800208 - RNA, 19 nt, Artificial Sequence
  Description of Artificial Sequence: Synthetic oligonucleotide
aaaggacuucuuuggccag

SEQ ID NO: 2800209 - RNA, 19 nt, Artificial Sequence
  Description of Artificial Sequence: Synthetic oligonucleotide
aaggugacaggcauguucu

SEQ ID NO: 2800210 - RNA, 19 nt, Artificial Sequence
  Description of Artificial Sequence: Synthetic oligonucleotide
uguucugggagcacaggac

SEQ ID NO: 2800211 - RNA, 19 nt, Artificial Sequence
  Description of Artificial Sequence: Synthetic oligonucleotide
aggauaacccugcaaagaa

SEQ ID NO: 2800212 - RNA, 19 nt, Artificial Sequence
  Description of Artificial Sequence: Synthetic oligonucleotide
cacaggacauaucuuuucc

SEQ ID NO: 2800213 - RNA, 19 nt, Artificial Sequence
  Description of Artificial Sequence: Synthetic oligonucleotide
uagucaaggaagaacuaua

SEQ ID NO: 2800214 - RNA, 19 nt, Artificial Sequence
  Description of Artificial Sequence: Synthetic oligonucleotide
auauuuuguaguacaaaga

SEQ ID NO: 2800215 - RNA, 19 nt, Artificial Sequence
  Description of Artificial Sequence: Synthetic oligonucleotide
uaccacacuccuuauuccc

SEQ ID NO: 2800216 - RNA, 19 nt, Artificial Sequence
  Description of Artificial Sequence: Synthetic oligonucleotide
gagcaaggagcacacuggg

SEQ ID NO: 2800217 - RNA, 19 nt, Artificial Sequence
  Description of Artificial Sequence: Synthetic oligonucleotide
uggaagagcaaggagcaca

SEQ ID NO: 2800218 - RNA, 19 nt, Artificial Sequence
  Description of Artificial Sequence: Synthetic oligonucleotide
aguccuaugagaggauaac

SEQ ID NO: 2800219 - RNA, 19 nt, Artificial Sequence
  Description of Artificial Sequence: Synthetic oligonucleotide
caggacauaucuuuuccac

SEQ ID NO: 2800220 - RNA, 19 nt, Artificial Sequence
  Description of Artificial Sequence: Synthetic oligonucleotide
cacacugggaagaaaagga

SEQ ID NO: 2800221 - RNA, 19 nt, Artificial Sequence
  Description of Artificial Sequence: Synthetic oligonucleotide
gcaaagaagguaaagacca

SEQ ID NO: 2800222 - RNA, 19 nt, Artificial Sequence
  Description of Artificial Sequence: Synthetic oligonucleotide
gaacuauaauuauaauaaa

SEQ ID NO: 2800223 - RNA, 19 nt, Artificial Sequence
  Description of Artificial Sequence: Synthetic oligonucleotide
caagaaaguacagauguca

SEQ ID NO: 2800224 - RNA, 19 nt, Artificial Sequence
  Description of Artificial Sequence: Synthetic oligonucleotide
uuccaguccuaugagagga

SEQ ID NO: 2800225 - RNA, 19 nt, Artificial Sequence
  Description of Artificial Sequence: Synthetic oligonucleotide
guaaagaccaaagcccgag

SEQ ID NO: 2800226 - RNA, 19 nt, Artificial Sequence
  Description of Artificial Sequence: Synthetic oligonucleotide
cuuggguaaauccccuacc

SEQ ID NO: 2800227 - RNA, 19 nt, Artificial Sequence
  Description of Artificial Sequence: Synthetic oligonucleotide
auuggaagagcaaggagca

SEQ ID NO: 2800228 - RNA, 19 nt, Artificial Sequence
  Description of Artificial Sequence: Synthetic oligonucleotide
aacccugcaaagaagguaa

SEQ ID NO: 2800229 - RNA, 19 nt, Artificial Sequence
  Description of Artificial Sequence: Synthetic oligonucleotide
agauucagcacaugguaaa

SEQ ID NO: 2800230 - RNA, 19 nt, Artificial Sequence
  Description of Artificial Sequence: Synthetic oligonucleotide
agucauuggaagagcaagg

SEQ ID NO: 2800231 - RNA, 19 nt, Artificial Sequence
  Description of Artificial Sequence: Synthetic oligonucleotide
agagcaaggagcacacugg

SEQ ID NO: 2800232 - RNA, 19 nt, Artificial Sequence
  Description of Artificial Sequence: Synthetic oligonucleotide
ucacuagucaaggaagaac

SEQ ID NO: 2800233 - RNA, 19 nt, Artificial Sequence
  Description of Artificial Sequence: Synthetic oligonucleotide
auaucuuuuccacauccua

SEQ ID NO: 2800234 - RNA, 19 nt, Artificial Sequence
  Description of Artificial Sequence: Synthetic oligonucleotide
guacaaagaaaaguuucug

SEQ ID NO: 2800235 - RNA, 19 nt, Artificial Sequence
  Description of Artificial Sequence: Synthetic oligonucleotide
caagguucugcagucauug

SEQ ID NO: 2800236 - RNA, 19 nt, Artificial Sequence
  Description of Artificial Sequence: Synthetic oligonucleotide
aaaaguuucugugcugcaa

SEQ ID NO: 2800237 - RNA, 19 nt, Artificial Sequence
  Description of Artificial Sequence: Synthetic oligonucleotide
agaccaaagcccgaggcag

SEQ ID NO: 2800238 - RNA, 19 nt, Artificial Sequence
  Description of Artificial Sequence: Synthetic oligonucleotide
uuucagugucacuagucaa

SEQ ID NO: 2800239 - RNA, 19 nt, Artificial Sequence
  Description of Artificial Sequence: Synthetic oligonucleotide
ggaagaacuauaauuauaa

SEQ ID NO: 2800240 - RNA, 19 nt, Artificial Sequence
  Description of Artificial Sequence: Synthetic oligonucleotide
cagucauuggaagagcaag

SEQ ID NO: 2800241 - RNA, 19 nt, Artificial Sequence
  Description of Artificial Sequence: Synthetic oligonucleotide
cugugcugcaagaaaguac

SEQ ID NO: 2800242 - RNA, 19 nt, Artificial Sequence
  Description of Artificial Sequence: Synthetic oligonucleotide
uccccuaccacacuccuua

SEQ ID NO: 2800243 - RNA, 19 nt, Artificial Sequence
  Description of Artificial Sequence: Synthetic oligonucleotide
uccuaagacaagguucugc

SEQ ID NO: 2800244 - RNA, 19 nt, Artificial Sequence
  Description of Artificial Sequence: Synthetic oligonucleotide
auauuucagugucacuagu

SEQ ID NO: 2800245 - RNA, 19 nt, Artificial Sequence
  Description of Artificial Sequence: Synthetic oligonucleotide
aaagagaaggugacaggca

SEQ ID NO: 2800246 - RNA, 19 nt, Artificial Sequence
  Description of Artificial Sequence: Synthetic oligonucleotide
gacaggcauguucugggag

SEQ ID NO: 2800247 - RNA, 19 nt, Artificial Sequence
  Description of Artificial Sequence: Synthetic oligonucleotide
uucugcagucauuggaaga

SEQ ID NO: 2800248 - RNA, 19 nt, Artificial Sequence
  Description of Artificial Sequence: Synthetic oligonucleotide
uucugugcugcaagaaagu

SEQ ID NO: 2800249 - RNA, 19 nt, Artificial Sequence
  Description of Artificial Sequence: Synthetic oligonucleotide
aggacauaucuuuuccaca

SEQ ID NO: 2800250 - RNA, 19 nt, Artificial Sequence
  Description of Artificial Sequence: Synthetic oligonucleotide
cuaagacaagguucugcag

SEQ ID NO: 2800251 - RNA, 19 nt, Artificial Sequence
  Description of Artificial Sequence: Synthetic oligonucleotide
acacugggaagaaaaggac

SEQ ID NO: 2800252 - RNA, 19 nt, Artificial Sequence
  Description of Artificial Sequence: Synthetic oligonucleotide
uugcuuuauuucauauuuc

SEQ ID NO: 2800253 - RNA, 19 nt, Artificial Sequence
  Description of Artificial Sequence: Synthetic oligonucleotide
aauccccuaccacacuccu

SEQ ID NO: 2800254 - RNA, 19 nt, Artificial Sequence
  Description of Artificial Sequence: Synthetic oligonucleotide
uuccacauccuaagacaag

SEQ ID NO: 2800255 - RNA, 19 nt, Artificial Sequence
  Description of Artificial Sequence: Synthetic oligonucleotide
gugucacuagucaaggaag

SEQ ID NO: 2800256 - RNA, 19 nt, Artificial Sequence
  Description of Artificial Sequence: Synthetic oligonucleotide
cugugguuaaucucaaaga

SEQ ID NO: 2800257 - RNA, 19 nt, Artificial Sequence
  Description of Artificial Sequence: Synthetic oligonucleotide
cuaccacacuccuuauucc

SEQ ID NO: 2800258 - RNA, 19 nt, Artificial Sequence
  Description of Artificial Sequence: Synthetic oligonucleotide
auguucugggagcacagga

SEQ ID NO: 2800259 - RNA, 19 nt, Artificial Sequence
  Description of Artificial Sequence: Synthetic oligonucleotide
agaagauucagcacauggu

SEQ ID NO: 2800260 - RNA, 19 nt, Artificial Sequence
  Description of Artificial Sequence: Synthetic oligonucleotide
acaggguggauacuugggu

SEQ ID NO: 2800261 - RNA, 19 nt, Artificial Sequence
  Description of Artificial Sequence: Synthetic oligonucleotide
uggguaaauccccuaccac

SEQ ID NO: 2800262 - RNA, 19 nt, Artificial Sequence
  Description of Artificial Sequence: Synthetic oligonucleotide
ugagaggauaacccugcaa

SEQ ID NO: 2800263 - RNA, 19 nt, Artificial Sequence
  Description of Artificial Sequence: Synthetic oligonucleotide
ugggaagaaaaggacuucu

SEQ ID NO: 2800264 - RNA, 19 nt, Artificial Sequence
  Description of Artificial Sequence: Synthetic oligonucleotide
acaggacauaucuuuucca

SEQ ID NO: 2800265 - RNA, 19 nt, Artificial Sequence
  Description of Artificial Sequence: Synthetic oligonucleotide
uggcuuuuggcagcugugg

SEQ ID NO: 2800266 - RNA, 19 nt, Artificial Sequence
  Description of Artificial Sequence: Synthetic oligonucleotide
aagauucagcacaugguaa

SEQ ID NO: 2800267 - RNA, 19 nt, Artificial Sequence
  Description of Artificial Sequence: Synthetic oligonucleotide
ucagcacaugguaaauaaa

SEQ ID NO: 2800268 - RNA, 19 nt, Artificial Sequence
  Description of Artificial Sequence: Synthetic oligonucleotide
aaggacuucuuuggccagg

SEQ ID NO: 2800269 - RNA, 19 nt, Artificial Sequence
  Description of Artificial Sequence: Synthetic oligonucleotide
ggauacuuggguaaauccc

SEQ ID NO: 2800270 - RNA, 19 nt, Artificial Sequence
  Description of Artificial Sequence: Synthetic oligonucleotide
uuauuucauauuucauauu

SEQ ID NO: 2800271 - RNA, 19 nt, Artificial Sequence
  Description of Artificial Sequence: Synthetic oligonucleotide
aaggagcacacugggaaga

SEQ ID NO: 2800272 - RNA, 19 nt, Artificial Sequence
  Description of Artificial Sequence: Synthetic oligonucleotide
cacuagucaaggaagaacu

SEQ ID NO: 2800273 - RNA, 19 nt, Artificial Sequence
  Description of Artificial Sequence: Synthetic oligonucleotide
ugcugcaagaaaguacaga

SEQ ID NO: 2800274 - RNA, 19 nt, Artificial Sequence
  Description of Artificial Sequence: Synthetic oligonucleotide
uucauauuucagugucacu

SEQ ID NO: 2800275 - RNA, 19 nt, Artificial Sequence
  Description of Artificial Sequence: Synthetic oligonucleotide
caaggagcacacugggaag

SEQ ID NO: 2800276 - RNA, 19 nt, Artificial Sequence
  Description of Artificial Sequence: Synthetic oligonucleotide
auuuuguaguacaaagaaa

SEQ ID NO: 2800277 - RNA, 19 nt, Artificial Sequence
  Description of Artificial Sequence: Synthetic oligonucleotide
gaggauaacccugcaaaga

SEQ ID NO: 2800278 - RNA, 19 nt, Artificial Sequence
  Description of Artificial Sequence: Synthetic oligonucleotide
acacuccuuauucccacug

SEQ ID NO: 2800279 - RNA, 19 nt, Artificial Sequence
  Description of Artificial Sequence: Synthetic oligonucleotide
agaugucacugacuuaaaa

SEQ ID NO: 2800280 - RNA, 19 nt, Artificial Sequence
  Description of Artificial Sequence: Synthetic oligonucleotide
guacauggcuuuuggcagc

SEQ ID NO: 2800281 - RNA, 19 nt, Artificial Sequence
  Description of Artificial Sequence: Synthetic oligonucleotide
ggguaaauccccuaccaca

SEQ ID NO: 2800282 - RNA, 19 nt, Artificial Sequence
  Description of Artificial Sequence: Synthetic oligonucleotide
aacugguacauggcuuuug

SEQ ID NO: 2800283 - RNA, 19 nt, Artificial Sequence
  Description of Artificial Sequence: Synthetic oligonucleotide
cauccuaagacaagguucu

SEQ ID NO: 2800284 - RNA, 19 nt, Artificial Sequence
  Description of Artificial Sequence: Synthetic oligonucleotide
ugcaaaggguuuguuaaua

SEQ ID NO: 2800285 - RNA, 19 nt, Artificial Sequence
  Description of Artificial Sequence: Synthetic oligonucleotide
guccuaugagaggauaacc

SEQ ID NO: 2800286 - RNA, 19 nt, Artificial Sequence
  Description of Artificial Sequence: Synthetic oligonucleotide
gguaaauccccuaccacac

SEQ ID NO: 2800287 - RNA, 19 nt, Artificial Sequence
  Description of Artificial Sequence: Synthetic oligonucleotide
aggguggauacuuggguaa

SEQ ID NO: 2800288 - RNA, 19 nt, Artificial Sequence
  Description of Artificial Sequence: Synthetic oligonucleotide
uaacccugcaaagaaggua

SEQ ID NO: 2800289 - RNA, 19 nt, Artificial Sequence
  Description of Artificial Sequence: Synthetic oligonucleotide
gacauaucuuuuccacauc

SEQ ID NO: 2800290 - RNA, 19 nt, Artificial Sequence
  Description of Artificial Sequence: Synthetic oligonucleotide
ccuaccacacuccuuauuc

SEQ ID NO: 2800291 - RNA, 19 nt, Artificial Sequence
  Description of Artificial Sequence: Synthetic oligonucleotide
cugguacauggcuuuuggc

SEQ ID NO: 2800292 - RNA, 19 nt, Artificial Sequence
  Description of Artificial Sequence: Synthetic oligonucleotide
acugggaagaaaaggacuu

SEQ ID NO: 2800293 - RNA, 19 nt, Artificial Sequence
  Description of Artificial Sequence: Synthetic oligonucleotide
gugguuaaucucaaagaga

SEQ ID NO: 2800294 - RNA, 19 nt, Artificial Sequence
  Description of Artificial Sequence: Synthetic oligonucleotide
agucaaggaagaacuauaa

SEQ ID NO: 2800295 - RNA, 19 nt, Artificial Sequence
  Description of Artificial Sequence: Synthetic oligonucleotide
aguacagaugucacugacu

SEQ ID NO: 2800296 - RNA, 19 nt, Artificial Sequence
  Description of Artificial Sequence: Synthetic oligonucleotide
caaaggguuuguuaauaaa

SEQ ID NO: 2800297 - RNA, 19 nt, Artificial Sequence
  Description of Artificial Sequence: Synthetic oligonucleotide
aggacuucuuuggccaggg

SEQ ID NO: 2800298 - RNA, 19 nt, Artificial Sequence
  Description of Artificial Sequence: Synthetic oligonucleotide
guacagaugucacugacuu

SEQ ID NO: 2800299 - RNA, 19 nt, Artificial Sequence
  Description of Artificial Sequence: Synthetic oligonucleotide
uucugggagcacaggacau

SEQ ID NO: 2800300 - RNA, 19 nt, Artificial Sequence
  Description of Artificial Sequence: Synthetic oligonucleotide
ugacaggcauguucuggga

SEQ ID NO: 2800301 - RNA, 19 nt, Artificial Sequence
  Description of Artificial Sequence: Synthetic oligonucleotide
aggaagaacuauaauuaua

SEQ ID NO: 2800302 - RNA, 19 nt, Artificial Sequence
  Description of Artificial Sequence: Synthetic oligonucleotide
gcaaggagcacacugggaa

SEQ ID NO: 2800303 - RNA, 19 nt, Artificial Sequence
  Description of Artificial Sequence: Synthetic oligonucleotide
cacacacaagaagauucag

SEQ ID NO: 2800304 - RNA, 19 nt, Artificial Sequence
  Description of Artificial Sequence: Synthetic oligonucleotide
gaagaacuauaauuauaau

SEQ ID NO: 2800305 - RNA, 19 nt, Artificial Sequence
  Description of Artificial Sequence: Synthetic oligonucleotide
ucugugcugcaagaaagua

SEQ ID NO: 2800306 - RNA, 19 nt, Artificial Sequence
  Description of Artificial Sequence: Synthetic oligonucleotide
accaaagcccgaggcaggg

SEQ ID NO: 2800307 - RNA, 19 nt, Artificial Sequence
  Description of Artificial Sequence: Synthetic oligonucleotide
gcugcaagaaaguacagau

SEQ ID NO: 2800308 - RNA, 19 nt, Artificial Sequence
  Description of Artificial Sequence: Synthetic oligonucleotide
uggcagcugugguuaaucu

SEQ ID NO: 2800309 - RNA, 19 nt, Artificial Sequence
  Description of Artificial Sequence: Synthetic oligonucleotide
agcacacugggaagaaaag

SEQ ID NO: 2800310 - RNA, 19 nt, Artificial Sequence
  Description of Artificial Sequence: Synthetic oligonucleotide
acaagaagauucagcacau

SEQ ID NO: 2800311 - RNA, 19 nt, Artificial Sequence
  Description of Artificial Sequence: Synthetic oligonucleotide
ccuaagacaagguucugca

SEQ ID NO: 2800312 - RNA, 19 nt, Artificial Sequence
  Description of Artificial Sequence: Synthetic oligonucleotide
acacacacaagaagauuca

SEQ ID NO: 2800313 - RNA, 19 nt, Artificial Sequence
  Description of Artificial Sequence: Synthetic oligonucleotide
uucuaaggcccaacuggua

SEQ ID NO: 2800314 - RNA, 19 nt, Artificial Sequence
  Description of Artificial Sequence: Synthetic oligonucleotide
cuaaggcccaacugguaca

SEQ ID NO: 2800315 - RNA, 19 nt, Artificial Sequence
  Description of Artificial Sequence: Synthetic oligonucleotide
acuucuuuggccagggcua

SEQ ID NO: 2800316 - RNA, 19 nt, Artificial Sequence
  Description of Artificial Sequence: Synthetic oligonucleotide
gagcacaggacauaucuuu

SEQ ID NO: 2800317 - RNA, 19 nt, Artificial Sequence
  Description of Artificial Sequence: Synthetic oligonucleotide
augcaaaggguuuguuaau

SEQ ID NO: 2800318 - RNA, 19 nt, Artificial Sequence
  Description of Artificial Sequence: Synthetic oligonucleotide
gaccaaagcccgaggcagg

SEQ ID NO: 2800319 - RNA, 19 nt, Artificial Sequence
  Description of Artificial Sequence: Synthetic oligonucleotide
gcagcugugguuaaucuca

SEQ ID NO: 2800320 - RNA, 19 nt, Artificial Sequence
  Description of Artificial Sequence: Synthetic oligonucleotide
cuccuuauucccacugaca

SEQ ID NO: 2800321 - RNA, 19 nt, Artificial Sequence
  Description of Artificial Sequence: Synthetic oligonucleotide
guggauacuuggguaaauc

SEQ ID NO: 2800322 - RNA, 19 nt, Artificial Sequence
  Description of Artificial Sequence: Synthetic oligonucleotide
ggauaacccugcaaagaag

SEQ ID NO: 2800323 - RNA, 19 nt, Artificial Sequence
  Description of Artificial Sequence: Synthetic oligonucleotide
augagaggauaacccugca

SEQ ID NO: 2800324 - RNA, 19 nt, Artificial Sequence
  Description of Artificial Sequence: Synthetic oligonucleotide
auaacccugcaaagaaggu

SEQ ID NO: 2800325 - RNA, 19 nt, Artificial Sequence
  Description of Artificial Sequence: Synthetic oligonucleotide
uacagaugucacugacuua

SEQ ID NO: 2800326 - RNA, 19 nt, Artificial Sequence
  Description of Artificial Sequence: Synthetic oligonucleotide
auacuuggguaaauccccu

SEQ ID NO: 2800327 - RNA, 19 nt, Artificial Sequence
  Description of Artificial Sequence: Synthetic oligonucleotide
gcuguaaacaucaugguuu

SEQ ID NO: 2800328 - RNA, 19 nt, Artificial Sequence
  Description of Artificial Sequence: Synthetic oligonucleotide
uaaggcccaacugguacau

SEQ ID NO: 2800329 - RNA, 19 nt, Artificial Sequence
  Description of Artificial Sequence: Synthetic oligonucleotide
gguuaaucucaaagagaag

SEQ ID NO: 2800330 - RNA, 19 nt, Artificial Sequence
  Description of Artificial Sequence: Synthetic oligonucleotide
ggacauaucuuuuccacau

SEQ ID NO: 2800331 - RNA, 19 nt, Artificial Sequence
  Description of Artificial Sequence: Synthetic oligonucleotide
auucagcacaugguaaaua

SEQ ID NO: 2800332 - RNA, 19 nt, Artificial Sequence
  Description of Artificial Sequence: Synthetic oligonucleotide
cacugggaagaaaaggacu

SEQ ID NO: 2800333 - RNA, 19 nt, Artificial Sequence
  Description of Artificial Sequence: Synthetic oligonucleotide
caaagaagguaaagaccaa

SEQ ID NO: 2800334 - RNA, 19 nt, Artificial Sequence
  Description of Artificial Sequence: Synthetic oligonucleotide
ccugcaaagaagguaaaga

SEQ ID NO: 2800335 - RNA, 19 nt, Artificial Sequence
  Description of Artificial Sequence: Synthetic oligonucleotide
aaagcccgaggcagggcug

SEQ ID NO: 2800336 - RNA, 19 nt, Artificial Sequence
  Description of Artificial Sequence: Synthetic oligonucleotide
cauaucuuuuccacauccu

SEQ ID NO: 2800337 - RNA, 19 nt, Artificial Sequence
  Description of Artificial Sequence: Synthetic oligonucleotide
ggaagagcaaggagcacac

SEQ ID NO: 2800338 - RNA, 19 nt, Artificial Sequence
  Description of Artificial Sequence: Synthetic oligonucleotide
auggcuuuuggcagcugug

SEQ ID NO: 2800339 - RNA, 19 nt, Artificial Sequence
  Description of Artificial Sequence: Synthetic oligonucleotide
uccaguccuaugagaggau

SEQ ID NO: 2800340 - RNA, 19 nt, Artificial Sequence
  Description of Artificial Sequence: Synthetic oligonucleotide
gacaagguucugcagucau

SEQ ID NO: 2800341 - RNA, 19 nt, Artificial Sequence
  Description of Artificial Sequence: Synthetic oligonucleotide
cugcagucauuggaagagc

SEQ ID NO: 2800342 - RNA, 19 nt, Artificial Sequence
  Description of Artificial Sequence: Synthetic oligonucleotide
uuuuggcagcugugguuaa

SEQ ID NO: 2800343 - RNA, 19 nt, Artificial Sequence
  Description of Artificial Sequence: Synthetic oligonucleotide
cuucuuuggccagggcuac

SEQ ID NO: 2800344 - RNA, 19 nt, Artificial Sequence
  Description of Artificial Sequence: Synthetic oligonucleotide
ggcagggcuguaaacauca

SEQ ID NO: 2800345 - RNA, 19 nt, Artificial Sequence
  Description of Artificial Sequence: Synthetic oligonucleotide
caagaagauucagcacaug

SEQ ID NO: 2800346 - RNA, 19 nt, Artificial Sequence
  Description of Artificial Sequence: Synthetic oligonucleotide
caguccuaugagaggauaa

SEQ ID NO: 2800347 - RNA, 19 nt, Artificial Sequence
  Description of Artificial Sequence: Synthetic oligonucleotide
gcaaaggguuuguuaauaa

SEQ ID NO: 2800348 - RNA, 19 nt, Artificial Sequence
  Description of Artificial Sequence: Synthetic oligonucleotide
ucugggagcacaggacaua

SEQ ID NO: 2800349 - RNA, 19 nt, Artificial Sequence
  Description of Artificial Sequence: Synthetic oligonucleotide
accacacuccuuauuccca

SEQ ID NO: 2800350 - RNA, 19 nt, Artificial Sequence
  Description of Artificial Sequence: Synthetic oligonucleotide
uuggaagagcaaggagcac

SEQ ID NO: 2800351 - RNA, 19 nt, Artificial Sequence
  Description of Artificial Sequence: Synthetic oligonucleotide
aggugacaggcauguucug

SEQ ID NO: 2800352 - RNA, 19 nt, Artificial Sequence
  Description of Artificial Sequence: Synthetic oligonucleotide
gucaaggaagaacuauaau

SEQ ID NO: 2800353 - RNA, 19 nt, Artificial Sequence
  Description of Artificial Sequence: Synthetic oligonucleotide
gaggcagggcuguaaacau

SEQ ID NO: 2800354 - RNA, 19 nt, Artificial Sequence
  Description of Artificial Sequence: Synthetic oligonucleotide
aggcagggcuguaaacauc

SEQ ID NO: 2800355 - RNA, 19 nt, Artificial Sequence
  Description of Artificial Sequence: Synthetic oligonucleotide
ggcagcugugguuaaucuc

SEQ ID NO: 2800356 - RNA, 19 nt, Artificial Sequence
  Description of Artificial Sequence: Synthetic oligonucleotide
gcacaggacauaucuuuuc

SEQ ID NO: 2800357 - RNA, 19 nt, Artificial Sequence
  Description of Artificial Sequence: Synthetic oligonucleotide
acuagucaaggaagaacua

SEQ ID NO: 2800358 - RNA, 19 nt, Artificial Sequence
  Description of Artificial Sequence: Synthetic oligonucleotide
cuagucaaggaagaacuau

SEQ ID NO: 2800359 - RNA, 19 nt, Artificial Sequence
  Description of Artificial Sequence: Synthetic oligonucleotide
caggguggauacuugggua

SEQ ID NO: 2800360 - RNA, 19 nt, Artificial Sequence
  Description of Artificial Sequence: Synthetic oligonucleotide
agacaagguucugcaguca

SEQ ID NO: 2800361 - RNA, 19 nt, Artificial Sequence
  Description of Artificial Sequence: Synthetic oligonucleotide
ugggagcacaggacauauc

SEQ ID NO: 2800362 - RNA, 19 nt, Artificial Sequence
  Description of Artificial Sequence: Synthetic oligonucleotide
cacuccuuauucccacuga

SEQ ID NO: 2800363 - RNA, 19 nt, Artificial Sequence
  Description of Artificial Sequence: Synthetic oligonucleotide
agcacaggacauaucuuuu

SEQ ID NO: 2800364 - RNA, 19 nt, Artificial Sequence
  Description of Artificial Sequence: Synthetic oligonucleotide
aagcccgaggcagggcugu

SEQ ID NO: 2800365 - RNA, 19 nt, Artificial Sequence
  Description of Artificial Sequence: Synthetic oligonucleotide
cauggcuuuuggcagcugu

SEQ ID NO: 2800366 - RNA, 19 nt, Artificial Sequence
  Description of Artificial Sequence: Synthetic oligonucleotide
gucacuagucaaggaagaa

SEQ ID NO: 2800367 - RNA, 19 nt, Artificial Sequence
  Description of Artificial Sequence: Synthetic oligonucleotide
gauucagcacaugguaaau

SEQ ID NO: 2800368 - RNA, 19 nt, Artificial Sequence
  Description of Artificial Sequence: Synthetic oligonucleotide
cuguaaacaucaugguuuu

SEQ ID NO: 2800369 - RNA, 19 nt, Artificial Sequence
  Description of Artificial Sequence: Synthetic oligonucleotide
caaagcccgaggcagggcu

SEQ ID NO: 2800370 - RNA, 19 nt, Artificial Sequence
  Description of Artificial Sequence: Synthetic oligonucleotide
agcaaggagcacacuggga

SEQ ID NO: 2800371 - RNA, 19 nt, Artificial Sequence
  Description of Artificial Sequence: Synthetic oligonucleotide
agcugugguuaaucucaaa

SEQ ID NO: 2800372 - RNA, 19 nt, Artificial Sequence
  Description of Artificial Sequence: Synthetic oligonucleotide
aaggcccaacugguacaug

SEQ ID NO: 2800373 - RNA, 19 nt, Artificial Sequence
  Description of Artificial Sequence: Synthetic oligonucleotide
gugcugcaagaaaguacag

SEQ ID NO: 2800374 - RNA, 19 nt, Artificial Sequence
  Description of Artificial Sequence: Synthetic oligonucleotide
aggcauguucugggagcac

SEQ ID NO: 2800375 - RNA, 19 nt, Artificial Sequence
  Description of Artificial Sequence: Synthetic oligonucleotide
ccacacuccuuauucccac

SEQ ID NO: 2800376 - RNA, 19 nt, Artificial Sequence
  Description of Artificial Sequence: Synthetic oligonucleotide
guaaauccccuaccacacu

SEQ ID NO: 2800377 - RNA, 19 nt, Artificial Sequence
  Description of Artificial Sequence: Synthetic oligonucleotide
cagugucacuagucaagga

SEQ ID NO: 2800378 - RNA, 19 nt, Artificial Sequence
  Description of Artificial Sequence: Synthetic oligonucleotide
gcuacaggguggauacuug

SEQ ID NO: 2800379 - RNA, 19 nt, Artificial Sequence
  Description of Artificial Sequence: Synthetic oligonucleotide
auccuaagacaagguucug

SEQ ID NO: 2800380 - RNA, 19 nt, Artificial Sequence
  Description of Artificial Sequence: Synthetic oligonucleotide
ccuaugagaggauaacccu

SEQ ID NO: 2800381 - RNA, 19 nt, Artificial Sequence
  Description of Artificial Sequence: Synthetic oligonucleotide
ggcauguucugggagcaca

SEQ ID NO: 2800382 - RNA, 19 nt, Artificial Sequence
  Description of Artificial Sequence: Synthetic oligonucleotide
uucuuuggccagggcuaca

SEQ ID NO: 2800383 - RNA, 19 nt, Artificial Sequence
  Description of Artificial Sequence: Synthetic oligonucleotide
cacauccuaagacaagguu

SEQ ID NO: 2800384 - RNA, 19 nt, Artificial Sequence
  Description of Artificial Sequence: Synthetic oligonucleotide
caggcauguucugggagca

SEQ ID NO: 2800385 - RNA, 19 nt, Artificial Sequence
  Description of Artificial Sequence: Synthetic oligonucleotide
gguaaagaccaaagcccga

SEQ ID NO: 2800386 - RNA, 19 nt, Artificial Sequence
  Description of Artificial Sequence: Synthetic oligonucleotide
ggcuguaaacaucaugguu

SEQ ID NO: 2800387 - RNA, 19 nt, Artificial Sequence
  Description of Artificial Sequence: Synthetic oligonucleotide
ccuuauucccacugacaca

SEQ ID NO: 2800388 - RNA, 19 nt, Artificial Sequence
  Description of Artificial Sequence: Synthetic oligonucleotide
acaagguucugcagucauu

SEQ ID NO: 2800389 - RNA, 19 nt, Artificial Sequence
  Description of Artificial Sequence: Synthetic oligonucleotide
aggagcacacugggaagaa

SEQ ID NO: 2800390 - RNA, 19 nt, Artificial Sequence
  Description of Artificial Sequence: Synthetic oligonucleotide
cccugcaaagaagguaaag

SEQ ID NO: 2800391 - RNA, 19 nt, Artificial Sequence
  Description of Artificial Sequence: Synthetic oligonucleotide
cagaugucacugacuuaaa

SEQ ID NO: 2800392 - RNA, 19 nt, Artificial Sequence
  Description of Artificial Sequence: Synthetic oligonucleotide
ggcccaacugguacauggc

SEQ ID NO: 2800393 - RNA, 19 nt, Artificial Sequence
  Description of Artificial Sequence: Synthetic oligonucleotide
cagcugugguuaaucucaa

SEQ ID NO: 2800394 - RNA, 19 nt, Artificial Sequence
  Description of Artificial Sequence: Synthetic oligonucleotide
gcuuuauuucauauuucau

SEQ ID NO: 2800395 - RNA, 19 nt, Artificial Sequence
  Description of Artificial Sequence: Synthetic oligonucleotide
cagggcuacaggguggaua

SEQ ID NO: 2800396 - RNA, 19 nt, Artificial Sequence
  Description of Artificial Sequence: Synthetic oligonucleotide
ggacuucuuuggccagggc

SEQ ID NO: 2800397 - RNA, 19 nt, Artificial Sequence
  Description of Artificial Sequence: Synthetic oligonucleotide
ggcuuuuggcagcuguggu

SEQ ID NO: 2800398 - RNA, 19 nt, Artificial Sequence
  Description of Artificial Sequence: Synthetic oligonucleotide
gcagucauuggaagagcaa

SEQ ID NO: 2800399 - RNA, 19 nt, Artificial Sequence
  Description of Artificial Sequence: Synthetic oligonucleotide
gaagagcaaggagcacacu

SEQ ID NO: 2800400 - RNA, 19 nt, Artificial Sequence
  Description of Artificial Sequence: Synthetic oligonucleotide
cgaggcagggcuguaaaca

SEQ ID NO: 2800401 - RNA, 19 nt, Artificial Sequence
  Description of Artificial Sequence: Synthetic oligonucleotide
cacacuccuuauucccacu

SEQ ID NO: 2800402 - RNA, 19 nt, Artificial Sequence
  Description of Artificial Sequence: Synthetic oligonucleotide
ccgaggcagggcuguaaac

SEQ ID NO: 2800403 - RNA, 19 nt, Artificial Sequence
  Description of Artificial Sequence: Synthetic oligonucleotide
cugggagcacaggacauau

SEQ ID NO: 2800404 - RNA, 19 nt, Artificial Sequence
  Description of Artificial Sequence: Synthetic oligonucleotide
gcccaacugguacauggcu

SEQ ID NO: 2800405 - RNA, 19 nt, Artificial Sequence
  Description of Artificial Sequence: Synthetic oligonucleotide
acccugcaaagaagguaaa

SEQ ID NO: 2800406 - RNA, 19 nt, Artificial Sequence
  Description of Artificial Sequence: Synthetic oligonucleotide
ccaacugguacauggcuuu

SEQ ID NO: 2800407 - RNA, 19 nt, Artificial Sequence
  Description of Artificial Sequence: Synthetic oligonucleotide
ggcuacaggguggauacuu

SEQ ID NO: 2800408 - RNA, 19 nt, Artificial Sequence
  Description of Artificial Sequence: Synthetic oligonucleotide
ggagcacacugggaagaaa

SEQ ID NO: 2800409 - RNA, 19 nt, Artificial Sequence
  Description of Artificial Sequence: Synthetic oligonucleotide
auccccuaccacacuccuu

SEQ ID NO: 2800410 - RNA, 19 nt, Artificial Sequence
  Description of Artificial Sequence: Synthetic oligonucleotide
ccaaagcccgaggcagggc

SEQ ID NO: 2800411 - RNA, 19 nt, Artificial Sequence
  Description of Artificial Sequence: Synthetic oligonucleotide
gggaagaaaaggacuucuu

SEQ ID NO: 2800412 - RNA, 19 nt, Artificial Sequence
  Description of Artificial Sequence: Synthetic oligonucleotide
ccacauccuaagacaaggu

SEQ ID NO: 2800413 - RNA, 19 nt, Artificial Sequence
  Description of Artificial Sequence: Synthetic oligonucleotide
gccagggcuacagggugga

SEQ ID NO: 2800414 - RNA, 19 nt, Artificial Sequence
  Description of Artificial Sequence: Synthetic oligonucleotide
gguggauacuuggguaaau

SEQ ID NO: 2800415 - RNA, 19 nt, Artificial Sequence
  Description of Artificial Sequence: Synthetic oligonucleotide
cccaacugguacauggcuu

SEQ ID NO: 2800416 - RNA, 19 nt, Artificial Sequence
  Description of Artificial Sequence: Synthetic oligonucleotide
ggagcacaggacauaucuu

SEQ ID NO: 2800417 - RNA, 19 nt, Artificial Sequence
  Description of Artificial Sequence: Synthetic oligonucleotide
ccaguccuaugagaggaua

SEQ ID NO: 2800418 - RNA, 19 nt, Artificial Sequence
  Description of Artificial Sequence: Synthetic oligonucleotide
cccgaggcagggcuguaaa

SEQ ID NO: 2800419 - RNA, 19 nt, Artificial Sequence
  Description of Artificial Sequence: Synthetic oligonucleotide
agcccgaggcagggcugua

SEQ ID NO: 2800420 - RNA, 19 nt, Artificial Sequence
  Description of Artificial Sequence: Synthetic oligonucleotide
gcccgaggcagggcuguaa

SEQ ID NO: 2800421 - RNA, 19 nt, Artificial Sequence
  Description of Artificial Sequence: Synthetic oligonucleotide
cccuaccacacuccuuauu

SEQ ID NO: 2800422 - RNA, 19 nt, Artificial Sequence
  Description of Artificial Sequence: Synthetic oligonucleotide
gcagggcuguaaacaucau

SEQ ID NO: 2800423 - RNA, 19 nt, Artificial Sequence
  Description of Artificial Sequence: Synthetic oligonucleotide
gggcuacaggguggauacu

SEQ ID NO: 2800424 - RNA, 19 nt, Artificial Sequence
  Description of Artificial Sequence: Synthetic oligonucleotide
ccccuaccacacuccuuau

SEQ ID NO: 2800425 - RNA, 19 nt, Artificial Sequence
  Description of Artificial Sequence: Synthetic oligonucleotide
ccagggcuacaggguggau

SEQ ID NO: 2800426 - RNA, 19 nt, Artificial Sequence
  Description of Artificial Sequence: Synthetic oligonucleotide
aaaauaaagaaacacccca

SEQ ID NO: 2800427 - RNA, 19 nt, Artificial Sequence
  Description of Artificial Sequence: Synthetic oligonucleotide
auauuuuacaaauacacug

SEQ ID NO: 2800428 - RNA, 19 nt, Artificial Sequence
  Description of Artificial Sequence: Synthetic oligonucleotide
uauuuuacaaauacacugg

SEQ ID NO: 2800429 - RNA, 19 nt, Artificial Sequence
  Description of Artificial Sequence: Synthetic oligonucleotide
uuuacaaauacacuggaga

SEQ ID NO: 2800430 - RNA, 19 nt, Artificial Sequence
  Description of Artificial Sequence: Synthetic oligonucleotide
uucaaaauaaagaaacacc

SEQ ID NO: 2800431 - RNA, 19 nt, Artificial Sequence
  Description of Artificial Sequence: Synthetic oligonucleotide
aaauccggaauuucgcucc

SEQ ID NO: 2800432 - RNA, 19 nt, Artificial Sequence
  Description of Artificial Sequence: Synthetic oligonucleotide
aauugaauauauuuuacaa

SEQ ID NO: 2800433 - RNA, 19 nt, Artificial Sequence
  Description of Artificial Sequence: Synthetic oligonucleotide
uuguuguuuacuaugaccc

SEQ ID NO: 2800434 - RNA, 19 nt, Artificial Sequence
  Description of Artificial Sequence: Synthetic oligonucleotide
aauaaagaaacaccccauc

SEQ ID NO: 2800435 - RNA, 19 nt, Artificial Sequence
  Description of Artificial Sequence: Synthetic oligonucleotide
uuaacuguggccaucacca

SEQ ID NO: 2800436 - RNA, 19 nt, Artificial Sequence
  Description of Artificial Sequence: Synthetic oligonucleotide
uucgauacgacuuucguug

SEQ ID NO: 2800437 - RNA, 19 nt, Artificial Sequence
  Description of Artificial Sequence: Synthetic oligonucleotide
uuuaauugaauauauuuua

SEQ ID NO: 2800438 - RNA, 19 nt, Artificial Sequence
  Description of Artificial Sequence: Synthetic oligonucleotide
uguauugucagcacaguug

SEQ ID NO: 2800439 - RNA, 19 nt, Artificial Sequence
  Description of Artificial Sequence: Synthetic oligonucleotide
acagagaugauauacaaau

SEQ ID NO: 2800440 - RNA, 19 nt, Artificial Sequence
  Description of Artificial Sequence: Synthetic oligonucleotide
uuuguuguuuacuaugacc

SEQ ID NO: 2800441 - RNA, 19 nt, Artificial Sequence
  Description of Artificial Sequence: Synthetic oligonucleotide
uauauuuuacaaauacacu

SEQ ID NO: 2800442 - RNA, 19 nt, Artificial Sequence
  Description of Artificial Sequence: Synthetic oligonucleotide
uuaauugaauauauuuuac

SEQ ID NO: 2800443 - RNA, 19 nt, Artificial Sequence
  Description of Artificial Sequence: Synthetic oligonucleotide
uuuacuaugaccccugcau

SEQ ID NO: 2800444 - RNA, 19 nt, Artificial Sequence
  Description of Artificial Sequence: Synthetic oligonucleotide
uugaucacagcuccaacgg

SEQ ID NO: 2800445 - RNA, 19 nt, Artificial Sequence
  Description of Artificial Sequence: Synthetic oligonucleotide
uuggaugcaauccugggcc

SEQ ID NO: 2800446 - RNA, 19 nt, Artificial Sequence
  Description of Artificial Sequence: Synthetic oligonucleotide
aauuaccacugcuggaugg

SEQ ID NO: 2800447 - RNA, 19 nt, Artificial Sequence
  Description of Artificial Sequence: Synthetic oligonucleotide
acaaauacacuggagaauc

SEQ ID NO: 2800448 - RNA, 19 nt, Artificial Sequence
  Description of Artificial Sequence: Synthetic oligonucleotide
uaauugaauauauuuuaca

SEQ ID NO: 2800449 - RNA, 19 nt, Artificial Sequence
  Description of Artificial Sequence: Synthetic oligonucleotide
auuggaugcaauccugggc

SEQ ID NO: 2800450 - RNA, 19 nt, Artificial Sequence
  Description of Artificial Sequence: Synthetic oligonucleotide
aauauauuuuacaaauaca

SEQ ID NO: 2800451 - RNA, 19 nt, Artificial Sequence
  Description of Artificial Sequence: Synthetic oligonucleotide
caaaauaaagaaacacccc

SEQ ID NO: 2800452 - RNA, 19 nt, Artificial Sequence
  Description of Artificial Sequence: Synthetic oligonucleotide
agaaucaugcaaugcugcc

SEQ ID NO: 2800453 - RNA, 19 nt, Artificial Sequence
  Description of Artificial Sequence: Synthetic oligonucleotide
auacacuggagaaucaugc

SEQ ID NO: 2800454 - RNA, 19 nt, Artificial Sequence
  Description of Artificial Sequence: Synthetic oligonucleotide
uggagaaucaugcaaugcu

SEQ ID NO: 2800455 - RNA, 19 nt, Artificial Sequence
  Description of Artificial Sequence: Synthetic oligonucleotide
aaagaaacaccccaucuuu

SEQ ID NO: 2800456 - RNA, 19 nt, Artificial Sequence
  Description of Artificial Sequence: Synthetic oligonucleotide
guugaucacagcuccaacg

SEQ ID NO: 2800457 - RNA, 19 nt, Artificial Sequence
  Description of Artificial Sequence: Synthetic oligonucleotide
agagaugauauacaaauuu

SEQ ID NO: 2800458 - RNA, 19 nt, Artificial Sequence
  Description of Artificial Sequence: Synthetic oligonucleotide
ucuucaaaauaaagaaaca

SEQ ID NO: 2800459 - RNA, 19 nt, Artificial Sequence
  Description of Artificial Sequence: Synthetic oligonucleotide
gucuucaaaauaaagaaac

SEQ ID NO: 2800460 - RNA, 19 nt, Artificial Sequence
  Description of Artificial Sequence: Synthetic oligonucleotide
uucuuuugcaacuggaccu

SEQ ID NO: 2800461 - RNA, 19 nt, Artificial Sequence
  Description of Artificial Sequence: Synthetic oligonucleotide
uuacaaauacacuggagaa

SEQ ID NO: 2800462 - RNA, 19 nt, Artificial Sequence
  Description of Artificial Sequence: Synthetic oligonucleotide
auugaauauauuuuacaaa

SEQ ID NO: 2800463 - RNA, 19 nt, Artificial Sequence
  Description of Artificial Sequence: Synthetic oligonucleotide
auaaagaaacaccccaucu

SEQ ID NO: 2800464 - RNA, 19 nt, Artificial Sequence
  Description of Artificial Sequence: Synthetic oligonucleotide
aagucuguucagucguccc

SEQ ID NO: 2800465 - RNA, 19 nt, Artificial Sequence
  Description of Artificial Sequence: Synthetic oligonucleotide
auagcagagccuuucaucu

SEQ ID NO: 2800466 - RNA, 19 nt, Artificial Sequence
  Description of Artificial Sequence: Synthetic oligonucleotide
uuucaucucgccuuuguug

SEQ ID NO: 2800467 - RNA, 19 nt, Artificial Sequence
  Description of Artificial Sequence: Synthetic oligonucleotide
auugucuucaaaauaaaga

SEQ ID NO: 2800468 - RNA, 19 nt, Artificial Sequence
  Description of Artificial Sequence: Synthetic oligonucleotide
aauuucgcuccggaggacc

SEQ ID NO: 2800469 - RNA, 19 nt, Artificial Sequence
  Description of Artificial Sequence: Synthetic oligonucleotide
uuuggcaccuguauuguca

SEQ ID NO: 2800470 - RNA, 19 nt, Artificial Sequence
  Description of Artificial Sequence: Synthetic oligonucleotide
gucgaauuaccacugcugg

SEQ ID NO: 2800471 - RNA, 19 nt, Artificial Sequence
  Description of Artificial Sequence: Synthetic oligonucleotide
agcacaguugaucacagcu

SEQ ID NO: 2800472 - RNA, 19 nt, Artificial Sequence
  Description of Artificial Sequence: Synthetic oligonucleotide
gauacgacuuucguugucg

SEQ ID NO: 2800473 - RNA, 19 nt, Artificial Sequence
  Description of Artificial Sequence: Synthetic oligonucleotide
ugucgaauuaccacugcug

SEQ ID NO: 2800474 - RNA, 19 nt, Artificial Sequence
  Description of Artificial Sequence: Synthetic oligonucleotide
uucacagagaugauauaca

SEQ ID NO: 2800475 - RNA, 19 nt, Artificial Sequence
  Description of Artificial Sequence: Synthetic oligonucleotide
agucugcacauucuuuugc

SEQ ID NO: 2800476 - RNA, 19 nt, Artificial Sequence
  Description of Artificial Sequence: Synthetic oligonucleotide
agaaacaccccaucuuuuc

SEQ ID NO: 2800477 - RNA, 19 nt, Artificial Sequence
  Description of Artificial Sequence: Synthetic oligonucleotide
auugucagcacaguugauc

SEQ ID NO: 2800478 - RNA, 19 nt, Artificial Sequence
  Description of Artificial Sequence: Synthetic oligonucleotide
uugucagcacaguugauca

SEQ ID NO: 2800479 - RNA, 19 nt, Artificial Sequence
  Description of Artificial Sequence: Synthetic oligonucleotide
uugccuuucuuaacugugg

SEQ ID NO: 2800480 - RNA, 19 nt, Artificial Sequence
  Description of Artificial Sequence: Synthetic oligonucleotide
aauccugggccacaagucu

SEQ ID NO: 2800481 - RNA, 19 nt, Artificial Sequence
  Description of Artificial Sequence: Synthetic oligonucleotide
cuuucguugucgaauuacc

SEQ ID NO: 2800482 - RNA, 19 nt, Artificial Sequence
  Description of Artificial Sequence: Synthetic oligonucleotide
agcuccaacggggagaccc

SEQ ID NO: 2800483 - RNA, 19 nt, Artificial Sequence
  Description of Artificial Sequence: Synthetic oligonucleotide
uaaagaaacaccccaucuu

SEQ ID NO: 2800484 - RNA, 19 nt, Artificial Sequence
  Description of Artificial Sequence: Synthetic oligonucleotide
uucaucucgccuuuguugu

SEQ ID NO: 2800485 - RNA, 19 nt, Artificial Sequence
  Description of Artificial Sequence: Synthetic oligonucleotide
ugaauauauuuuacaaaua

SEQ ID NO: 2800486 - RNA, 19 nt, Artificial Sequence
  Description of Artificial Sequence: Synthetic oligonucleotide
uucagucgucccuugaugc

SEQ ID NO: 2800487 - RNA, 19 nt, Artificial Sequence
  Description of Artificial Sequence: Synthetic oligonucleotide
gauagcagagccuuucauc

SEQ ID NO: 2800488 - RNA, 19 nt, Artificial Sequence
  Description of Artificial Sequence: Synthetic oligonucleotide
uuugcaacuggaccuguga

SEQ ID NO: 2800489 - RNA, 19 nt, Artificial Sequence
  Description of Artificial Sequence: Synthetic oligonucleotide
ugcaaugcugccugcauug

SEQ ID NO: 2800490 - RNA, 19 nt, Artificial Sequence
  Description of Artificial Sequence: Synthetic oligonucleotide
ugggccacaagucugcaca

SEQ ID NO: 2800491 - RNA, 19 nt, Artificial Sequence
  Description of Artificial Sequence: Synthetic oligonucleotide
aacggggagacccagggaa

SEQ ID NO: 2800492 - RNA, 19 nt, Artificial Sequence
  Description of Artificial Sequence: Synthetic oligonucleotide
cacaguugaucacagcucc

SEQ ID NO: 2800493 - RNA, 19 nt, Artificial Sequence
  Description of Artificial Sequence: Synthetic oligonucleotide
ugcacauucuuuugcaacu

SEQ ID NO: 2800494 - RNA, 19 nt, Artificial Sequence
  Description of Artificial Sequence: Synthetic oligonucleotide
cuuaacuguggccaucacc

SEQ ID NO: 2800495 - RNA, 19 nt, Artificial Sequence
  Description of Artificial Sequence: Synthetic oligonucleotide
uucuucgauacgacuuucg

SEQ ID NO: 2800496 - RNA, 19 nt, Artificial Sequence
  Description of Artificial Sequence: Synthetic oligonucleotide
cuucacagagaugauauac

SEQ ID NO: 2800497 - RNA, 19 nt, Artificial Sequence
  Description of Artificial Sequence: Synthetic oligonucleotide
uucguugucgaauuaccac

SEQ ID NO: 2800498 - RNA, 19 nt, Artificial Sequence
  Description of Artificial Sequence: Synthetic oligonucleotide
uuucguugucgaauuacca

SEQ ID NO: 2800499 - RNA, 19 nt, Artificial Sequence
  Description of Artificial Sequence: Synthetic oligonucleotide
aauacacuggagaaucaug

SEQ ID NO: 2800500 - RNA, 19 nt, Artificial Sequence
  Description of Artificial Sequence: Synthetic oligonucleotide
uacuaugaccccugcauug

SEQ ID NO: 2800501 - RNA, 19 nt, Artificial Sequence
  Description of Artificial Sequence: Synthetic oligonucleotide
ucguugucgaauuaccacu

SEQ ID NO: 2800502 - RNA, 19 nt, Artificial Sequence
  Description of Artificial Sequence: Synthetic oligonucleotide
ugaucacagcuccaacggg

SEQ ID NO: 2800503 - RNA, 19 nt, Artificial Sequence
  Description of Artificial Sequence: Synthetic oligonucleotide
uccgccucccauuuaauug

SEQ ID NO: 2800504 - RNA, 19 nt, Artificial Sequence
  Description of Artificial Sequence: Synthetic oligonucleotide
cauucuuuugcaacuggac

SEQ ID NO: 2800505 - RNA, 19 nt, Artificial Sequence
  Description of Artificial Sequence: Synthetic oligonucleotide
ucacagagaugauauacaa

SEQ ID NO: 2800506 - RNA, 19 nt, Artificial Sequence
  Description of Artificial Sequence: Synthetic oligonucleotide
acuuucguugucgaauuac

SEQ ID NO: 2800507 - RNA, 19 nt, Artificial Sequence
  Description of Artificial Sequence: Synthetic oligonucleotide
augcccuucacagagauga

SEQ ID NO: 2800508 - RNA, 19 nt, Artificial Sequence
  Description of Artificial Sequence: Synthetic oligonucleotide
aagucugcacauucuuuug

SEQ ID NO: 2800509 - RNA, 19 nt, Artificial Sequence
  Description of Artificial Sequence: Synthetic oligonucleotide
guauugucagcacaguuga

SEQ ID NO: 2800510 - RNA, 19 nt, Artificial Sequence
  Description of Artificial Sequence: Synthetic oligonucleotide
ucuucgauacgacuuucgu

SEQ ID NO: 2800511 - RNA, 19 nt, Artificial Sequence
  Description of Artificial Sequence: Synthetic oligonucleotide
uguuguuuacuaugacccc

SEQ ID NO: 2800512 - RNA, 19 nt, Artificial Sequence
  Description of Artificial Sequence: Synthetic oligonucleotide
aaauaaagaaacaccccau

SEQ ID NO: 2800513 - RNA, 19 nt, Artificial Sequence
  Description of Artificial Sequence: Synthetic oligonucleotide
aacuggaccugugauagca

SEQ ID NO: 2800514 - RNA, 19 nt, Artificial Sequence
  Description of Artificial Sequence: Synthetic oligonucleotide
uuguuuacuaugaccccug

SEQ ID NO: 2800515 - RNA, 19 nt, Artificial Sequence
  Description of Artificial Sequence: Synthetic oligonucleotide
aacuguggccaucaccaug

SEQ ID NO: 2800516 - RNA, 19 nt, Artificial Sequence
  Description of Artificial Sequence: Synthetic oligonucleotide
ugcauuggaugcaauccug

SEQ ID NO: 2800517 - RNA, 19 nt, Artificial Sequence
  Description of Artificial Sequence: Synthetic oligonucleotide
aguugaucacagcuccaac

SEQ ID NO: 2800518 - RNA, 19 nt, Artificial Sequence
  Description of Artificial Sequence: Synthetic oligonucleotide
cauuuaauugaauauauuu

SEQ ID NO: 2800519 - RNA, 19 nt, Artificial Sequence
  Description of Artificial Sequence: Synthetic oligonucleotide
ucaggcuggccucagagau

SEQ ID NO: 2800520 - RNA, 19 nt, Artificial Sequence
  Description of Artificial Sequence: Synthetic oligonucleotide
ucagcacaguugaucacag

SEQ ID NO: 2800521 - RNA, 19 nt, Artificial Sequence
  Description of Artificial Sequence: Synthetic oligonucleotide
uuuucuucgauacgacuuu

SEQ ID NO: 2800522 - RNA, 19 nt, Artificial Sequence
  Description of Artificial Sequence: Synthetic oligonucleotide
gaaauccggaauuucgcuc

SEQ ID NO: 2800523 - RNA, 19 nt, Artificial Sequence
  Description of Artificial Sequence: Synthetic oligonucleotide
cauuggaugcaauccuggg

SEQ ID NO: 2800524 - RNA, 19 nt, Artificial Sequence
  Description of Artificial Sequence: Synthetic oligonucleotide
guggccaucaccaugucgc

SEQ ID NO: 2800525 - RNA, 19 nt, Artificial Sequence
  Description of Artificial Sequence: Synthetic oligonucleotide
ucuuuucuucgauacgacu

SEQ ID NO: 2800526 - RNA, 19 nt, Artificial Sequence
  Description of Artificial Sequence: Synthetic oligonucleotide
caggaagucuguucagucg

SEQ ID NO: 2800527 - RNA, 19 nt, Artificial Sequence
  Description of Artificial Sequence: Synthetic oligonucleotide
aauccggaauuucgcuccg

SEQ ID NO: 2800528 - RNA, 19 nt, Artificial Sequence
  Description of Artificial Sequence: Synthetic oligonucleotide
gagaaucaugcaaugcugc

SEQ ID NO: 2800529 - RNA, 19 nt, Artificial Sequence
  Description of Artificial Sequence: Synthetic oligonucleotide
aucuuggacgcccggaaag

SEQ ID NO: 2800530 - RNA, 19 nt, Artificial Sequence
  Description of Artificial Sequence: Synthetic oligonucleotide
aggaagucuguucagucgu

SEQ ID NO: 2800531 - RNA, 19 nt, Artificial Sequence
  Description of Artificial Sequence: Synthetic oligonucleotide
agggaaauccggaauuucg

SEQ ID NO: 2800532 - RNA, 19 nt, Artificial Sequence
  Description of Artificial Sequence: Synthetic oligonucleotide
gaccugugauagcagagcc

SEQ ID NO: 2800533 - RNA, 19 nt, Artificial Sequence
  Description of Artificial Sequence: Synthetic oligonucleotide
aggcuggccucagagaucc

SEQ ID NO: 2800534 - RNA, 19 nt, Artificial Sequence
  Description of Artificial Sequence: Synthetic oligonucleotide
uugucgaauuaccacugcu

SEQ ID NO: 2800535 - RNA, 19 nt, Artificial Sequence
  Description of Artificial Sequence: Synthetic oligonucleotide
uggaccugugauagcagag

SEQ ID NO: 2800536 - RNA, 19 nt, Artificial Sequence
  Description of Artificial Sequence: Synthetic oligonucleotide
uggacgcccggaaagaagu

SEQ ID NO: 2800537 - RNA, 19 nt, Artificial Sequence
  Description of Artificial Sequence: Synthetic oligonucleotide
aaauacacuggagaaucau

SEQ ID NO: 2800538 - RNA, 19 nt, Artificial Sequence
  Description of Artificial Sequence: Synthetic oligonucleotide
ugccuuucuuaacuguggc

SEQ ID NO: 2800539 - RNA, 19 nt, Artificial Sequence
  Description of Artificial Sequence: Synthetic oligonucleotide
uucgacaucuuggacgccc

SEQ ID NO: 2800540 - RNA, 19 nt, Artificial Sequence
  Description of Artificial Sequence: Synthetic oligonucleotide
uaugaccccugcauugucu

SEQ ID NO: 2800541 - RNA, 19 nt, Artificial Sequence
  Description of Artificial Sequence: Synthetic oligonucleotide
cugcacauucuuuugcaac

SEQ ID NO: 2800542 - RNA, 19 nt, Artificial Sequence
  Description of Artificial Sequence: Synthetic oligonucleotide
ucccauuuaauugaauaua

SEQ ID NO: 2800543 - RNA, 19 nt, Artificial Sequence
  Description of Artificial Sequence: Synthetic oligonucleotide
ucggguuugccuuucuuaa

SEQ ID NO: 2800544 - RNA, 19 nt, Artificial Sequence
  Description of Artificial Sequence: Synthetic oligonucleotide
uuggcaccuguauugucag

SEQ ID NO: 2800545 - RNA, 19 nt, Artificial Sequence
  Description of Artificial Sequence: Synthetic oligonucleotide
gaauuaccacugcuggaug

SEQ ID NO: 2800546 - RNA, 19 nt, Artificial Sequence
  Description of Artificial Sequence: Synthetic oligonucleotide
ucuuuugcaacuggaccug

SEQ ID NO: 2800547 - RNA, 19 nt, Artificial Sequence
  Description of Artificial Sequence: Synthetic oligonucleotide
cacauucuuuugcaacugg

SEQ ID NO: 2800548 - RNA, 19 nt, Artificial Sequence
  Description of Artificial Sequence: Synthetic oligonucleotide
aaacaccccaucuuuucuu

SEQ ID NO: 2800549 - RNA, 19 nt, Artificial Sequence
  Description of Artificial Sequence: Synthetic oligonucleotide
uguuuacuaugaccccugc

SEQ ID NO: 2800550 - RNA, 19 nt, Artificial Sequence
  Description of Artificial Sequence: Synthetic oligonucleotide
uuuugcaacuggaccugug

SEQ ID NO: 2800551 - RNA, 19 nt, Artificial Sequence
  Description of Artificial Sequence: Synthetic oligonucleotide
ucgacaucuuggacgcccg

SEQ ID NO: 2800552 - RNA, 19 nt, Artificial Sequence
  Description of Artificial Sequence: Synthetic oligonucleotide
uuggacgcccggaaagaag

SEQ ID NO: 2800553 - RNA, 19 nt, Artificial Sequence
  Description of Artificial Sequence: Synthetic oligonucleotide
uacaaauacacuggagaau

SEQ ID NO: 2800554 - RNA, 19 nt, Artificial Sequence
  Description of Artificial Sequence: Synthetic oligonucleotide
ugugauagcagagccuuuc

SEQ ID NO: 2800555 - RNA, 19 nt, Artificial Sequence
  Description of Artificial Sequence: Synthetic oligonucleotide
uguucagucgucccuugau

SEQ ID NO: 2800556 - RNA, 19 nt, Artificial Sequence
  Description of Artificial Sequence: Synthetic oligonucleotide
ucgaauuaccacugcugga

SEQ ID NO: 2800557 - RNA, 19 nt, Artificial Sequence
  Description of Artificial Sequence: Synthetic oligonucleotide
agagccuuucaucucgccu

SEQ ID NO: 2800558 - RNA, 19 nt, Artificial Sequence
  Description of Artificial Sequence: Synthetic oligonucleotide
uucuuaacuguggccauca

SEQ ID NO: 2800559 - RNA, 19 nt, Artificial Sequence
  Description of Artificial Sequence: Synthetic oligonucleotide
accacugcuggauggaccu

SEQ ID NO: 2800560 - RNA, 19 nt, Artificial Sequence
  Description of Artificial Sequence: Synthetic oligonucleotide
ucagucgucccuugaugcc

SEQ ID NO: 2800561 - RNA, 19 nt, Artificial Sequence
  Description of Artificial Sequence: Synthetic oligonucleotide
cuccggaggacccaccacg

SEQ ID NO: 2800562 - RNA, 19 nt, Artificial Sequence
  Description of Artificial Sequence: Synthetic oligonucleotide
cuuuguuguuuacuaugac

SEQ ID NO: 2800563 - RNA, 19 nt, Artificial Sequence
  Description of Artificial Sequence: Synthetic oligonucleotide
caucuuuucuucgauacga

SEQ ID NO: 2800564 - RNA, 19 nt, Artificial Sequence
  Description of Artificial Sequence: Synthetic oligonucleotide
ugaugcccuucacagagau

SEQ ID NO: 2800565 - RNA, 19 nt, Artificial Sequence
  Description of Artificial Sequence: Synthetic oligonucleotide
uuacuaugaccccugcauu

SEQ ID NO: 2800566 - RNA, 19 nt, Artificial Sequence
  Description of Artificial Sequence: Synthetic oligonucleotide
gcaacuggaccugugauag

SEQ ID NO: 2800567 - RNA, 19 nt, Artificial Sequence
  Description of Artificial Sequence: Synthetic oligonucleotide
aucaugcaaugcugccugc

SEQ ID NO: 2800568 - RNA, 19 nt, Artificial Sequence
  Description of Artificial Sequence: Synthetic oligonucleotide
accacguccucgcuucgac

SEQ ID NO: 2800569 - RNA, 19 nt, Artificial Sequence
  Description of Artificial Sequence: Synthetic oligonucleotide
uaccacugcuggauggacc

SEQ ID NO: 2800570 - RNA, 19 nt, Artificial Sequence
  Description of Artificial Sequence: Synthetic oligonucleotide
ugauagcagagccuuucau

SEQ ID NO: 2800571 - RNA, 19 nt, Artificial Sequence
  Description of Artificial Sequence: Synthetic oligonucleotide
accuguauugucagcacag

SEQ ID NO: 2800572 - RNA, 19 nt, Artificial Sequence
  Description of Artificial Sequence: Synthetic oligonucleotide
gcuucgacaucuuggacgc

SEQ ID NO: 2800573 - RNA, 19 nt, Artificial Sequence
  Description of Artificial Sequence: Synthetic oligonucleotide
gaagucuguucagucgucc

SEQ ID NO: 2800574 - RNA, 19 nt, Artificial Sequence
  Description of Artificial Sequence: Synthetic oligonucleotide
uucggguuugccuuucuua

SEQ ID NO: 2800575 - RNA, 19 nt, Artificial Sequence
  Description of Artificial Sequence: Synthetic oligonucleotide
guucagucgucccuugaug

SEQ ID NO: 2800576 - RNA, 19 nt, Artificial Sequence
  Description of Artificial Sequence: Synthetic oligonucleotide
uuuccuuaguucggguuug

SEQ ID NO: 2800577 - RNA, 19 nt, Artificial Sequence
  Description of Artificial Sequence: Synthetic oligonucleotide
caauccugggccacaaguc

SEQ ID NO: 2800578 - RNA, 19 nt, Artificial Sequence
  Description of Artificial Sequence: Synthetic oligonucleotide
aucuuuucuucgauacgac

SEQ ID NO: 2800579 - RNA, 19 nt, Artificial Sequence
  Description of Artificial Sequence: Synthetic oligonucleotide
uccggaauuucgcuccgga

SEQ ID NO: 2800580 - RNA, 19 nt, Artificial Sequence
  Description of Artificial Sequence: Synthetic oligonucleotide
ucccuugaugcccuucaca

SEQ ID NO: 2800581 - RNA, 19 nt, Artificial Sequence
  Description of Artificial Sequence: Synthetic oligonucleotide
ugcugccugcauuggaugc

SEQ ID NO: 2800582 - RNA, 19 nt, Artificial Sequence
  Description of Artificial Sequence: Synthetic oligonucleotide
agucuguucagucgucccu

SEQ ID NO: 2800583 - RNA, 19 nt, Artificial Sequence
  Description of Artificial Sequence: Synthetic oligonucleotide
ucgccuuuguuguuuacua

SEQ ID NO: 2800584 - RNA, 19 nt, Artificial Sequence
  Description of Artificial Sequence: Synthetic oligonucleotide
uugcaacuggaccugugau

SEQ ID NO: 2800585 - RNA, 19 nt, Artificial Sequence
  Description of Artificial Sequence: Synthetic oligonucleotide
auuucgcuccggaggaccc

SEQ ID NO: 2800586 - RNA, 19 nt, Artificial Sequence
  Description of Artificial Sequence: Synthetic oligonucleotide
uccugggccacaagucugc

SEQ ID NO: 2800587 - RNA, 19 nt, Artificial Sequence
  Description of Artificial Sequence: Synthetic oligonucleotide
ugcaacuggaccugugaua

SEQ ID NO: 2800588 - RNA, 19 nt, Artificial Sequence
  Description of Artificial Sequence: Synthetic oligonucleotide
cuggagaaucaugcaaugc

SEQ ID NO: 2800589 - RNA, 19 nt, Artificial Sequence
  Description of Artificial Sequence: Synthetic oligonucleotide
uccaacggggagacccagg

SEQ ID NO: 2800590 - RNA, 19 nt, Artificial Sequence
  Description of Artificial Sequence: Synthetic oligonucleotide
acaccccaucuuuucuucg

SEQ ID NO: 2800591 - RNA, 19 nt, Artificial Sequence
  Description of Artificial Sequence: Synthetic oligonucleotide
gagacccagggaaauccgg

SEQ ID NO: 2800592 - RNA, 19 nt, Artificial Sequence
  Description of Artificial Sequence: Synthetic oligonucleotide
guugucgaauuaccacugc

SEQ ID NO: 2800593 - RNA, 19 nt, Artificial Sequence
  Description of Artificial Sequence: Synthetic oligonucleotide
acgacuuucguugucgaau

SEQ ID NO: 2800594 - RNA, 19 nt, Artificial Sequence
  Description of Artificial Sequence: Synthetic oligonucleotide
ggaauuucgcuccggagga

SEQ ID NO: 2800595 - RNA, 19 nt, Artificial Sequence
  Description of Artificial Sequence: Synthetic oligonucleotide
cccaucuuuucuucgauac

SEQ ID NO: 2800596 - RNA, 19 nt, Artificial Sequence
  Description of Artificial Sequence: Synthetic oligonucleotide
cccuugaugcccuucacag

SEQ ID NO: 2800597 - RNA, 19 nt, Artificial Sequence
  Description of Artificial Sequence: Synthetic oligonucleotide
ggagaaucaugcaaugcug

SEQ ID NO: 2800598 - RNA, 19 nt, Artificial Sequence
  Description of Artificial Sequence: Synthetic oligonucleotide
cuggccucagagauccgcc

SEQ ID NO: 2800599 - RNA, 19 nt, Artificial Sequence
  Description of Artificial Sequence: Synthetic oligonucleotide
ucacagcuccaacggggag

SEQ ID NO: 2800600 - RNA, 19 nt, Artificial Sequence
  Description of Artificial Sequence: Synthetic oligonucleotide
cuuuucuucgauacgacuu

SEQ ID NO: 2800601 - RNA, 19 nt, Artificial Sequence
  Description of Artificial Sequence: Synthetic oligonucleotide
cucgcuucgacaucuugga

SEQ ID NO: 2800602 - RNA, 19 nt, Artificial Sequence
  Description of Artificial Sequence: Synthetic oligonucleotide
acaucuuggacgcccggaa

SEQ ID NO: 2800603 - RNA, 19 nt, Artificial Sequence
  Description of Artificial Sequence: Synthetic oligonucleotide
ucuguucagucgucccuug

SEQ ID NO: 2800604 - RNA, 19 nt, Artificial Sequence
  Description of Artificial Sequence: Synthetic oligonucleotide
acauucuuuugcaacugga

SEQ ID NO: 2800605 - RNA, 19 nt, Artificial Sequence
  Description of Artificial Sequence: Synthetic oligonucleotide
ccugcauuggaugcaaucc

SEQ ID NO: 2800606 - RNA, 19 nt, Artificial Sequence
  Description of Artificial Sequence: Synthetic oligonucleotide
guuuacuaugaccccugca

SEQ ID NO: 2800607 - RNA, 19 nt, Artificial Sequence
  Description of Artificial Sequence: Synthetic oligonucleotide
cgcuucgacaucuuggacg

SEQ ID NO: 2800608 - RNA, 19 nt, Artificial Sequence
  Description of Artificial Sequence: Synthetic oligonucleotide
ucuuggacgcccggaaaga

SEQ ID NO: 2800609 - RNA, 19 nt, Artificial Sequence
  Description of Artificial Sequence: Synthetic oligonucleotide
auuaccacugcuggaugga

SEQ ID NO: 2800610 - RNA, 19 nt, Artificial Sequence
  Description of Artificial Sequence: Synthetic oligonucleotide
ccucgcuucgacaucuugg

SEQ ID NO: 2800611 - RNA, 19 nt, Artificial Sequence
  Description of Artificial Sequence: Synthetic oligonucleotide
cggaauuucgcuccggagg

SEQ ID NO: 2800612 - RNA, 19 nt, Artificial Sequence
  Description of Artificial Sequence: Synthetic oligonucleotide
ucaugcaaugcugccugca

SEQ ID NO: 2800613 - RNA, 19 nt, Artificial Sequence
  Description of Artificial Sequence: Synthetic oligonucleotide
gaaacaccccaucuuuucu

SEQ ID NO: 2800614 - RNA, 19 nt, Artificial Sequence
  Description of Artificial Sequence: Synthetic oligonucleotide
ucgauacgacuuucguugu

SEQ ID NO: 2800615 - RNA, 19 nt, Artificial Sequence
  Description of Artificial Sequence: Synthetic oligonucleotide
uuuuggcaccuguauuguc

SEQ ID NO: 2800616 - RNA, 19 nt, Artificial Sequence
  Description of Artificial Sequence: Synthetic oligonucleotide
auacgacuuucguugucga

SEQ ID NO: 2800617 - RNA, 19 nt, Artificial Sequence
  Description of Artificial Sequence: Synthetic oligonucleotide
acuaugaccccugcauugu

SEQ ID NO: 2800618 - RNA, 19 nt, Artificial Sequence
  Description of Artificial Sequence: Synthetic oligonucleotide
gucagcacaguugaucaca

SEQ ID NO: 2800619 - RNA, 19 nt, Artificial Sequence
  Description of Artificial Sequence: Synthetic oligonucleotide
caccaugucgcccacgcca

SEQ ID NO: 2800620 - RNA, 19 nt, Artificial Sequence
  Description of Artificial Sequence: Synthetic oligonucleotide
uccucgcuucgacaucuug

SEQ ID NO: 2800621 - RNA, 19 nt, Artificial Sequence
  Description of Artificial Sequence: Synthetic oligonucleotide
cuuaguucggguuugccuu

SEQ ID NO: 2800622 - RNA, 19 nt, Artificial Sequence
  Description of Artificial Sequence: Synthetic oligonucleotide
ugucagcacaguugaucac

SEQ ID NO: 2800623 - RNA, 19 nt, Artificial Sequence
  Description of Artificial Sequence: Synthetic oligonucleotide
gagaugauauacaaauuuu

SEQ ID NO: 2800624 - RNA, 19 nt, Artificial Sequence
  Description of Artificial Sequence: Synthetic oligonucleotide
aagaaacaccccaucuuuu

SEQ ID NO: 2800625 - RNA, 19 nt, Artificial Sequence
  Description of Artificial Sequence: Synthetic oligonucleotide
uugaugcccuucacagaga

SEQ ID NO: 2800626 - RNA, 19 nt, Artificial Sequence
  Description of Artificial Sequence: Synthetic oligonucleotide
ugucgcccacgccagcagc

SEQ ID NO: 2800627 - RNA, 19 nt, Artificial Sequence
  Description of Artificial Sequence: Synthetic oligonucleotide
gguuugccuuucuuaacug

SEQ ID NO: 2800628 - RNA, 19 nt, Artificial Sequence
  Description of Artificial Sequence: Synthetic oligonucleotide
caaauacacuggagaauca

SEQ ID NO: 2800629 - RNA, 19 nt, Artificial Sequence
  Description of Artificial Sequence: Synthetic oligonucleotide
ugcaauccugggccacaag

SEQ ID NO: 2800630 - RNA, 19 nt, Artificial Sequence
  Description of Artificial Sequence: Synthetic oligonucleotide
uggaugcaauccugggcca

SEQ ID NO: 2800631 - RNA, 19 nt, Artificial Sequence
  Description of Artificial Sequence: Synthetic oligonucleotide
gggaaauccggaauuucgc

SEQ ID NO: 2800632 - RNA, 19 nt, Artificial Sequence
  Description of Artificial Sequence: Synthetic oligonucleotide
uuucuuaacuguggccauc

SEQ ID NO: 2800633 - RNA, 19 nt, Artificial Sequence
  Description of Artificial Sequence: Synthetic oligonucleotide
uccggaggacccaccacgu

SEQ ID NO: 2800634 - RNA, 19 nt, Artificial Sequence
  Description of Artificial Sequence: Synthetic oligonucleotide
uuucuucgauacgacuuuc

SEQ ID NO: 2800635 - RNA, 19 nt, Artificial Sequence
  Description of Artificial Sequence: Synthetic oligonucleotide
cagucgucccuugaugccc

SEQ ID NO: 2800636 - RNA, 19 nt, Artificial Sequence
  Description of Artificial Sequence: Synthetic oligonucleotide
cacagagaugauauacaaa

SEQ ID NO: 2800637 - RNA, 19 nt, Artificial Sequence
  Description of Artificial Sequence: Synthetic oligonucleotide
gcauuggaugcaauccugg

SEQ ID NO: 2800638 - RNA, 19 nt, Artificial Sequence
  Description of Artificial Sequence: Synthetic oligonucleotide
gaaucaugcaaugcugccu

SEQ ID NO: 2800639 - RNA, 19 nt, Artificial Sequence
  Description of Artificial Sequence: Synthetic oligonucleotide
uacgacuuucguugucgaa

SEQ ID NO: 2800640 - RNA, 19 nt, Artificial Sequence
  Description of Artificial Sequence: Synthetic oligonucleotide
uauugucagcacaguugau

SEQ ID NO: 2800641 - RNA, 19 nt, Artificial Sequence
  Description of Artificial Sequence: Synthetic oligonucleotide
guuguuuacuaugaccccu

SEQ ID NO: 2800642 - RNA, 19 nt, Artificial Sequence
  Description of Artificial Sequence: Synthetic oligonucleotide
ucaccaugucgcccacgcc

SEQ ID NO: 2800643 - RNA, 19 nt, Artificial Sequence
  Description of Artificial Sequence: Synthetic oligonucleotide
ccuuucuuaacuguggcca

SEQ ID NO: 2800644 - RNA, 19 nt, Artificial Sequence
  Description of Artificial Sequence: Synthetic oligonucleotide
uuaguucggguuugccuuu

SEQ ID NO: 2800645 - RNA, 19 nt, Artificial Sequence
  Description of Artificial Sequence: Synthetic oligonucleotide
uccuuaguucggguuugcc

SEQ ID NO: 2800646 - RNA, 19 nt, Artificial Sequence
  Description of Artificial Sequence: Synthetic oligonucleotide
ccaacggggagacccaggg

SEQ ID NO: 2800647 - RNA, 19 nt, Artificial Sequence
  Description of Artificial Sequence: Synthetic oligonucleotide
cucccauuuaauugaauau

SEQ ID NO: 2800648 - RNA, 19 nt, Artificial Sequence
  Description of Artificial Sequence: Synthetic oligonucleotide
gaccccugcauugucuuca

SEQ ID NO: 2800649 - RNA, 19 nt, Artificial Sequence
  Description of Artificial Sequence: Synthetic oligonucleotide
gugauagcagagccuuuca

SEQ ID NO: 2800650 - RNA, 19 nt, Artificial Sequence
  Description of Artificial Sequence: Synthetic oligonucleotide
ccuuuguuguuuacuauga

SEQ ID NO: 2800651 - RNA, 19 nt, Artificial Sequence
  Description of Artificial Sequence: Synthetic oligonucleotide
uuaccacugcuggauggac

SEQ ID NO: 2800652 - RNA, 19 nt, Artificial Sequence
  Description of Artificial Sequence: Synthetic oligonucleotide
ccaucuuuucuucgauacg

SEQ ID NO: 2800653 - RNA, 19 nt, Artificial Sequence
  Description of Artificial Sequence: Synthetic oligonucleotide
gggagacccagggaaaucc

SEQ ID NO: 2800654 - RNA, 19 nt, Artificial Sequence
  Description of Artificial Sequence: Synthetic oligonucleotide
ucgcuucgacaucuuggac
